United States Patent Application Publication US 2019/0348154 A1 - sequence listing, part 7

SEQ ID NO: 22166 - DNA, 2634 bp, Escherichia coli
gtgatttcgcgtcacatcccaatgcgtaatgtaaaaaaaagcagtttttttagacttgctgaatatttacaagattcgcagaacaaacaggaacgagttggcgctgttaagactacaaactgtcatcaggaaaatatccttgatgctgctcgttatgagattgaaccaacacaacgactaaatacgcgtgctaagggggataaaacttatcatttggttatttcttttcggcctggagaaaacccaccacaggaggttttagatgtaatagaagaacgtatgtgtacagcgttaggttatggtgaacatcaacgtgtaagtgcagttcattacgatacagacaatgtacatattcagatcgcaataaacaaagttcatcccaaaactcacaacattcatactccttataacgattataagattcggacagccgtatgtcaggaactggaaaaagagtttggcctcgaaaaagacaatcaccgggcaagtaagacgcgatccgaaaataatgcggcagatatggaaaggcattccggcagagaaagtttgcttggctggataaagagggagtgcgcagatcaattaaagagtgcggctaactggcaagagttacataaggcaatgcgccagaatgggcttgagttacgccagaaagggaatggattcgttattactggtcccgatggccttgctgtaaaagccagctctgtagatcgctctctgtcccgagcagcgcttgaaaagaaattaggctcgtttgagtcttccatacccgacacgaaaccttccagactttccccggaagcgattaaacaacgattcggttcagctgtacatgttaagcggcccggagaacgccccccaccaattcgtgaaaaccgacaggttcaccttggggagattcccgttatgtcgattaacaatggtaaacgctatgagggcaaaccgctgggttctcagggtgcaagtacctcagttctttacgggcgctaccagagtgaacagcaacggcttactgctgcccgtaacgaagcactgcgtctggcaaaggttaaacgtgatcgcctcattgaaaatgccaaaaggacaggccggttaaagcgggcagctatcaagttactgaaaggaccaggcgtgaataaacgccatttatatggtttggcaagtaaggcgcttggggaagaacttgaacgggcaaatgccatttataaaaaagaccggcaggcagcttatgacattcataaacgccgtacatgggctgactggctgcagttcaaagccgcaggtggtgatgatgaagcgctgaaaattttacgccagcggaatgcacaacaggctcgtaaagaggccaacattctgcatggcgataaagtcaaaaaagatggccgtatccctggattgaaaccggacagtgtaacgaaggaagggacgattatttaccgcgtgggagagagtgctatccgtgacggtggtaaacgtctggatgtatcacgtgatgctggtgatgacggtcttcatgccgcactgctgatggctaaacaccgttacggagacaaactcaccgttaacggcagttttgaatttaaaaaacgcattgtagctgtagccgctgcgcgtgagctggacgtgtcatttaccgatcctgaactggaaaagttgaggcaaattctggctaagaaagcggcccgcgagcgtgaatacatccacatcccctttgagcaaagaggcaaggcccgacaagccggggccatgtgggacaccgaaaagaaatcctggtttgtcggtccttacgcaaccagagatcggattgaaaactttatccgaatgaatgaggaaaaagacaatgagcaaagacgacaaagatatgccggaacagaacgaactgaggcaggacgagaacgaagcggcaatggcaatgctactggagcaaatgaaccaggagttacaggacgaagcccctccgctgatgccggaaacggatatggaactagcaacagcggaagacgaactggctcaggcgatggcgttactacagcaggaagccagccaggaaggagtgatgacacccgtacagggagaagtcgagcagccgaatcaaatggtgaacgaggacatcgtaagcccaacgttgcgcgacctggacgccagccgccgcccacagcaaaaaaccgtctgcgagcaatgtccgaactcggtatggttcgcatcgccggaggaagtgaagtgttactgccgggtaatgttcctgaccagttggagcacaaaacagccgaacgtactgatcaactgcgacgggatatggctggggcaggaggaataacaacacctgctgaggttaagaaaccgctgagtagtgctgaaaaatatatcaatgaacgtgagcaaaaacgccttaaagggttcgatataccgaaacatagagggtataattctactgataaaggtctgtttgagtatgcaggccaacgtaaaagcgggctggaaacgttagccctgctaaaacgggatgatgaaattgttgtgatgcctgtcagcgattacaccgcccggagactgagcaatcttaaagtcggggagtcagtcacacttaccccttccggttcagttaggacaacgaaaggaagaagtcgatga

SEQ ID NO: 22167 - DNA, 189 bp, Escherichia coli
atgaaacaaaattccgaagaattagggctgttactcgccatgctaaatacggggcatggtggtgcattggcaggaaacccaaacgaagccagcctgaatacaggcaaggttcaacaactgttaaacgtgatggacgtcaccgctgatgactggaacataaaggagcaagtccatgagaaagccaaataa

SEQ ID NO: 22168 - DNA, 1944 bp, Escherichia coli
atgagaaagccaaataatgccgtagggccgcaggtccgtaataaaaagaaggcagcgaaagggaaactgatcccggcgatggctataacttcactggcggctggcattcaggccgccacacagtattttgcttacagctttaattatcaggaactgttggggccgaactttaatcacatctatgcgccgtggtcctatttcaaatggtattcagcatggcatgagcgcttacctgatgcgttttttgctgctggcagtgtgggggcggcggttgctgccggtggcctagttctgaccgcgctgacaagtatgatgaaagcaaattcatccaaggctaacgaatatcttcatggctctgcaagatgggctgatgagcaggatatcagagatgctggtttgctgaatgatgaaggtgtttatgttggtgcgtgggaagacaaaaacggtcagttgcggtatctgcgtcacaacggcccggaacatgttctgacgtatgcacctacccgttctggcaaaggtgtcggcctggttgttcccaccttgctttcctggaaacattcaacggtagtggctgaccttaaaggtgaactgtgggcgatgacggcgggctggcgtaaagaatatgccaagaatctgtgtctgaaattcgaacctgctgcagctaatggttccgtcgcctggaatcctcttgatgaaatccgtgtgggcactgaaaacgaagttggcgacgttcagaatcttgccacgctgatagttgacccggacggtaaaggactaaatgaccactggcagaaaacatcccaggcgcttttagtcggtgtgatcctccatgtactttacaagcacaaaaatgaaggtacgccagcaacgcttccgtatgttgactccatcatggccgacccggaaagaggggcaggggaattgtggatggaaatgacgcaatatagtcacataaatggcgagaatcatccggtggtgggggctgccggtcgtgacatgatggaccgcccggaagaagaagccggttccgtgctgtctaccgcaaaatcttatctcgcccttttccgtgatccagttgtggctcgtaacgtcagtgagtcacattttaaaataaaagacctgatgaatcatgatgatccggtttcgctgtatatcgttactcagcctaatgataaagctcgtctgcgtccgctggtacgaatcatgctgaacatgattgttcgtttgctggctgacaagatggaatttgagcgtgtagataacaaccttacgttatggcagcgttttaaacaggcgtttggtttttcagttcagggaacaaaaagagtacagacaaagaaaacctacaaacatcgtcttctgggaatgatcgatgagtttccaagtctgggtaaactcgaaatcattcaggaatcattggctttccttgcaggttatggcatcaagttctacctcatctgccaggatattaatcagttgcgtagccgtgaaacaggttatgggccggatgaaacaataacctcgaactgccatgtgcagaacgcatatccacctaaccgtactgagactgcagagcacctttctaagttgaccggacaaacaacggttatcaaagagcagatcacaaccagcgggaaacgtgccagtgcgatattgggtggagtatccaaaaccattcaggaagtacagcgcccacttctgacagtggatgaatgcctgcgtatgccaggacctaagaagaatgctgaaggtctgattaccgagcgcggcgacatggttatttatgtggcaggttttccggctatctatggaaaacagccgttgtttttccaagatgagattttctcgcttcgtgcttctgtacctgcaccaaaagttaccgatcggattcgagctgtagctgccgcgaatgatgacgccagtaatgaggctatcgcaatatga

SEQ ID NO: 22169 - DNA, 534 bp, Escherichia coli
atgaaaaaaatgacccgctatgccgccattggtgttatttcggcttcattgattggtgcagttgtgtgttgctttggatatgccgccgggttacgcatcaataccacgaaaagtatccctgttggcttgtacaaaatcagccagaaagcgccagagaagggcgactatgtaattttctgcccgcctgaaaaggctattttctcactggcacagaagcgtggttacatcggcagcggcttttgtccaggggggtatggcgagatgatgaagcggattttagcggctaaaggtgatgaagttgcttttcgtgatgatggtgtttacgtcaacggacagttattgccttacagcaagccgttaagtgttgatccgggcgggcgtaaactgcccgccattcgtgaagtatacacgttgggtaaatcagaactgttgctgatgactgaccgcagcgcatcttcatttgacgggagatatttcggcgcggtcacaaagtcacagattatttctacgatattacctgtaatgacctggtaa

SEQ ID NO: 22170 - DNA, 330 bp, Escherichia coli
atggggttatttcataagagtgcggagaaggagaagttagaggcactggaaaaggttatttcaaaaaccaatcgtggcatttttaaacgaattgatgaaaatcgcgagctactcgaattgttatatgaaaaagcaccagagcttatggataaatgtttctggattcgatgctggattgaatctcaggatgaatttttaagtaagttggcagagatttctggcgtggaaaatcgaacctataaccttactcctgataaaccttatccacgtccttttccgaaaaaaccagattgccttatggattcttcgaatgaggataatgccgtatga

SEQ ID NO: 22171 - DNA, 183 bp, Escherichia coli
atgaatactctcattatgtatgctttgaaaactattcgttatcgcagcctcattgctgaggcacttttgggtaatttatcaaagtgtgaagatacaaaaaggcgaagtgaaatcatcacggtttgtcatcgctccgctgatgtcctgatagtgaagaaattaaagtgcttatggcagaaatag

SEQ ID NO: 22172 - DNA, 2031 bp, Escherichia coli
atgagagtattcattgcagaaaaaccaagtgttgcgaaagccatcgctgaaatattaggcgcaaccaataaaaaagacggttacattgagtgcggcagtgactatgtgacctggtgttttggtcatatgtttgagcaggctgaacctgatgaatatacaccagacaatgtgcctcgtaatgaaagcggtaaaaaaatctggcgagaagatgaactgccaattatccccgaaaaatggattattaatcctcgtgaagatgctgagaaacagctgaaaaccatccggcatttggttgagcgagctgacacgattgtaaatgctggcgatccagatcgcgaggggcagttactggttgatgaaatccttgatgacatgggatgtactaaaccggttctgcgttactggtgtaatgcgaatgatacggtaagtgtcacaagggcgttgaaaggacttgagaacaacgataaatatgtaaattttggacgtgcagctcttgcgcgtggtcgggctgattggttggttggaatgaacctttcaagaggattcacgttgtcggcagcgcgtggtggctcgcgtgttctgttgacggtcgggcgagttcagacaccaacgctggcacttgttgttgcccgcgatctcgaaattgaaaacttcaaaccaattccttatcacaatattaaagctgtctttaaacatgacaaaggagtgtttgttgcggcatggcaggccagagaagatcagccagggcttgattcagagggaaggcttattgacactaaagaagctgataagctagtagcggctttaaccggaaaatccggtaaggttgttgaatataagcaagagccaaagaaaaaatatcatccaaaagcctattctcttggcagtatcaccgctgttgcttcaagtaagtttggttattctggtgagcaagtactggctatatgccagtctctttatgaaacgcataaacttaccagttatccacgttctgatagttcttatttgcctgaatctcaacacgcagatgcacctcaaattctggattctcttcgggttacttatccgggaatagctgctttaatcgataaggctgatccaaaagtaaaatcaaaaacttttgatgactctaaggttacagcgcatcacggcattatcccaacgatgcacaaaggtaacgttgaaaggcttacgccagaagagcgtaatatttacgaccttatcgtaagaacataccttgctcaattttatccagtacatgaatataaagcgacatcaattattattgatgttaatggtgaaacatttggggccggtggccgcgtaacgactaaaaatggatggaaggatgtttattcagatggagaggatgaagaagaaaaagaaaatgaatctgaacagactcttccatcaatgagaaatggtgacgaaattatttgtgctcaggcacagcggcaggatgctaaaactaaagctccgcgtcgttttaatgacggtacactcaacactgcaatggaaaatattcataagtatgttgaagacccggctcagaaaaaattactgcgggaaggtgatggtattggcacatcagctacccgtgccacaatagttgctgatttaaagaaacgtggttttattgaaaacaaaggcaaagacattatcagtaccaagctgggaagggggctgatagccattctgccagaactggttaaaagcccggtaatgacagccatcaacgaacgtatgttactggaaatagagcaggggaaacgtgacgttgattcttttgtgaagattcaggaaaaatttgtgcgagagcagattaaggttattaatgccggagctatcaaagttgccggtggtgtgcaaatttctgacaagtacaaatgcaaggtatgtggtaaaggacttattcgtcgtccgtccaaaaaatccggtcacttctggtcttgcagtggttatcccaattgtaaagagtcgtacccagatattaaaggtagtccaaactataaccccataaaacgcgcttaa

SEQ ID NO: 22173 - DNA, 186 bp, Escherichia coli
atgactgatactaatgcagtaattcgccctgatgttaacgacgcaatacaggaaaaatatcgcgatctgatgacaccgggatatgtagtcgaattttcacccgatgaggctgatcttgtgggggcattcgaagatgatgcgctgaatgtacgtgacgcatacgaaagcgcttttgatgcggagtaa

SEQ ID NO: 22174 - DNA, 3819 bp, Escherichia coli
atggcagaagctaaagcgaaaaaaccattttatgagattgtggctgaaaacctgatagcccagcttaaagaggggactgctccatggcagaaaccatggaaccccggcgctcctggtgtcgcattgcctatgaaccctacgacgggtaaacgttataaaggcattaacgctattcaccttatggcgcagggttatagcgatcaacgttggatgacctataagcaggcgacggctgcaaatgcgcaggtaaggagaggcgaaaaaggcacgccgatccaatactggaaatttactgaggaacgcatcaaacgcaacgatgatggtagcgttgtgctcgataaagacgataaaccggtaaaagaaactgtccaactggagcgaccgaaggtatttaacgcagttgtgtttaatgcggagcagattgacggtctaccgccgatggccgttcgccaagataagagctggaacagtattgaacgtgctgaatctattctcgaagcctctggcgcgaaaatctctcatgaccaggttgaccgggctttttaccgtatgtctacagacagcattcatttgccgcagcaggcttcctttccaagtgctgatcgttactatgccactgcacttcatgaattgagccactggacaggtcacgcatcgcgtcttgatcgtgacctgtctcatccttttggaagtgaaggttacgccagagaagaactacgcgcagagattgccagtatgatcattggcgatgaactggggataggtcatgacccttcccagcatgttgcctatgtaaaatcttggattaaagccttacaggatgatccgctggaaattttccgtgcagcagctgatgctgaaaaaatccaagggttcgtgttgggccttgaacaacagagaatacaggaacaaccggtaactctggaaagagagcagcgcgaaaaagagcataatgaggtaatggctgaggtacagcggctgactaacccgcagattttcgatgcggaaacagctcaactctatcatttcacattcatgacactggagcagacagctgaggaagctggttacgttacctattacagccgtggcactggtgagcagggcgaagaaactattcgggttaattacgaagacagtaatggaaatactattcctgttcatactgatgtggttgggcgcggaaaagcattgacatatatcggtgatgagcgtgtccccggaacgggattttcatccgataatgaatggcaaagcaatgctcttaaaaccgctttcgccagcatagataacaacctaactttagtcgctaaaaaagttcatagtcagattgaaaatatcagtggagatccgcgagagttaccgcaggatgttaagtttcctaaaaactggtggcctaattccagttttctggcgtcgaccccaagtgtggagaactcaaaagcagctgcagaggctgatatgaccactaaaactgaaacgtctattacatcagcgcagcagcgccagtatcgtgcagagaaatttattctttcgaatctcgatagtggtctttctaagcacgttcagaatatgaaccgtcgccagcttacgttgtcacgaaacgttctctatgatgctcaaaatagcaatcaggatagtgatttttggcagcgtaacaaggaatttcattcttcgttcagtcaaaactggaatgaggctcaggacaagatcaagagcgcataccgtgagattgattttgcattatcacttctaccagagccgaaatataacattgtggaaaatcctggtcagaatgagcatgtgaatataatcatgcagaccaacagtgcagttaaggcgctggccgctgttaacgaaggggataatcgttcaatttatgactcacgtctcatcaataacggtaaggtcgatctgaatgacctgcagaacaatttttatcaaacacttgaagcagaaaaagcagccttaaagcaaggtattatcaagcctgatgatgagattagcgtgctcccaccaagagaagcacaggaatggtatcaagaccgtgttgaaggcttgatggaggacgctgacagcccggatgaactgaaaagcgctctggatgcgcttggcccagaaccgggagataatgaggctgttttccttggtgaagatggagggcgaattcttccagaattcagtctgaacgttacgcaggaaaatactccaatcaatgtcccctacaaagaacgcaatgaagctaaagcgcttggggcaaaatgggatcgaaccgaacagacctggtttgtaccaaaaggtgtatctctggataaatttgcaaaatgggttggtgggccaactgcagaaaacaattcatctgtcgtatctgtgaaagaagtaacgccaaaagtgggtgagcgtcagaatctggctgtcccttataaagaccgcgcagaagctaaagcagctggtgctaaatgggacaaagagaaaaaaacttggtatgccgaagctggggcagatatgcaaaaactggcgaagtggaaaccggaaaatgtggtgatcgaacagtcaccggccatgacgctaaaggaggaagtagaaaccgcgctgaaagatattgggtgcatccttgatgccgatactgacaaaggacagaaacatccaattatggatggtaagaagcatcggatcacggtagagggagacaagaaaggggaaaagtcaggtttttatatcatctatactgacggccatcctgcgggcttcatgcagaacaaccgcaccaaagaagagttacgttggtcttccaagggaaatgtgatgtccgacgaagaaaaagcgctcctgcgggcgcaggctgctcagaaacaggccgaaaaagcggcacagcagcaaaaagaccatgagtcctctgcaaagcgtgttcaaaagcagctcgctaaactcaatgaacctcagcagcaaactgcttacctgaagaagaaagggctgcaggtacataaaggtgtgttcactgataaggacggacagaaaacctttattcctgcttatgatgtccatggtaagcaatggactatgcagtacatcaacgaggacggcacaaaacgttttgccaaaaatgctcgcaaagagggatgtttccatgtcattggcgggctggatgcgcttaaaaaatctccggtgttgattgtggccgaaggttacgcaacggcagggagcatcacagaggctactaatataccaacggtcgccgccttcgattcaggtaatctggaatctgtcgcgaaaacgcttaaagaagcctaccccgataagccaatcatcattgccggtgatgatgatatttctcagtcatgcaaaatgaaggtgaaggataaagccagtgtaaacgtcggcagggaaaaagcgctggaaacagcgaaagctgtcggcggtgtggctgtgtttccagtttttgctaaaggtgaattacctgggaaagacgaactcagccagattaaaccggcggcgtatcttgcacaccagaccgcctcgcgcaaactggaggcccatacgagcggtgataagccactctcggatgccgaagtgaaggttctgcaggcagcacagctatcggaaaagcagcttgatattattcgccgcgctgatcgttacactgactttaacgatctggccgtaaatagttctcttggccgagaaggtgtggcgatgcagttgaaagccatcattgctgaccagctgaataaaaaacagcagcagtcacaggtccagaccgaagagaagaaactcgttcaggaaaaagagaaaaaacggaccattcgccacgctatgtaa

SEQ ID NO: 22175 - DNA, 375 bp, Escherichia coli
gtgagtcattctactaaatgtccgattaactatttaaaaatggtgagtataatgtttattgctttttttgttactatgattattacatgtatcattgtctttgcaatcatctactttccttataagaaagtggctgacttacttggcaattttattcatttacgaactatgtttgctggtgttttttttgttattgccggtctcattgctatatcaatttcagatacagccacaaatgatatggttgttttcctacccgattccagagtagttggtaaagttgcgataggatttggtgttatttgcattattgcatctttctttataaatcatttgtttggatcggaggaaatgaatcaatctaaaacgcagtaa

SEQ ID NO: 22176 - DNA, 987 bp, Escherichia coli
atgaagccacacattctcccaaaatggtgcgttatgaaaaaatttcaggtcagaaatttcccggacgatgcatatttcgccctagaacagttagcaaacgaaaatcaacgttcggtcgaaggtgaggcccgctatgctctgttgaaatggatagcacctcctgagcaggtttattctggagaagaactataccggcaggaagtgtctggccgcctcaatacagttctgcggaaaaccaaccaattccgtaactacaaacctcttgtgccgtccaatgtggccgtagagctggggattgaagatcttggccttgtcgccaactggttcagtggtgacgtactcccttccttcactgagctgcagcggttaagcaagttatttggttgtcgcgccgactggttaattcacggtgagggggatgtgtatgaatggaactcaggcgtcagaatgcacggcacaggccgggctgctgttaagcaccttctcagacctgatagtgatggtaataaagtcacagacatcaggctgctaagggaagatagtgatataggagcacttctgatactccgtgagtttgaaaatacacggtatgttgatgcgttctggacaaacctacacgtaagtgaagtcattggagccggtggcgagtctgatttggctgatttttttgtcactcttcgggcgctgtacaagagttttgtcaaacttgatgtaaacgtcaaaggctaccttatgccgcgatctgcttataagcaaatcagagaagaggaacaagcctatccactgatgcttctcaaggattatcgtgtaaatgaaagcatgtggtgggaggatatttgggataaaagtcaaagaggtaaatttaattactggaaaggtgatgaggcgctgattcgtcgcattgaagatgcaataaagcgtaataaaagattgcttgacgaaattgaagctattaaaaactcagaacctttggaccatgatgattaa

SEQ ID NO: 22177 - DNA, 207 bp, Escherichia coli
atgtcccgtatatcctatagcaaaacagcatcatatgacagacggccactggagcatctttccctgtcagatttcatccatgctctgccaaccgttaccattgatgagattgaaaaactcgctgagacgaacatccacttggtcgagcagataccacgttacctgagccaaatggtcagccatgaatgcagacttattggtttttaa

SEQ ID NO: 22178 - DNA, 198 bp, Escherichia coli
atggaaattttcttgaagccgctgggtatgggggcagtggctgtatttatcgggattgttttgctctggcttattcctgaatataaaaagacgcccaggaaagcggctgtagctgtaattaatatcggagtagctctcatgctcgcggtggcagtaggaatgattgcagtgatgatgatgacgccagcaggaacctga

SEQ ID NO: 22179 - DNA, 885 bp, Escherichia coli
atggagttaacacagatttcattgcgaacgtcgcgagagcaagtcgagcgcatcaaaacctatgcaaaagcaagtaacctgtcagttaacgctttcctggttaacctgatagagaactcactaaacaatattgctaatgacggaacacagaatgaacttacacggcttgtagctgaaccggtcaaaacgctttcaaggcttcatcacaaaatttgcgatccttggaatacaaatgaacctgctgatctgactcccgctgaaatagcttttttgacagatgcggccaggaagcaactggatagcaaacatttggctggccctgattactttgcaatacgtgaccgcatcgataataccctaatagaaagcagtcttaactattatcaggatctgttcggctttgcacatcgcttctatattcgtgatgaagaatccagaaggacgtttgcaaccgaacacgcgccggtaggcatccaatccgtcgattattcgtttacggttgggaacaagacctttacgattattgtccggggaaatgacagtaattccttcgatacaccggaggataaccgccctcctgttctggcgtttacctgtgaaaccgcgcaatttgatacccgccatgattgggatactttcattgcactggtgaggctcatgaacgcagtacataatggtgaagaatctaaatgccacgccggtacgtatacccgccttggccgccgtatggatagcgaaaaaccatggtcacttttcttagggagactgcagctgctgctgaaagatagcgagctaaaggatatggctgtagaatttcataaacttgttaatggtgatgcggctaacgttatcaaacaaatacgtttactttacggtgagggttaa

SEQ ID NO: 22180 - DNA, 615 bp, Escherichia coli
atgaaaatagcgcgaatatatttgcgggttagtacagacgaacaagatttaacccggcaaaatgaaattattgaaaatgccaggaataatggattctatgttgccggtatctataaagaaaaggcgtccggtgcaagagctgaccgcccggaactgcaacgtatgattgatgatctgcagctagacgaagtagttattgcagaacatatagatcgtatcagtcgtttaccgctcgatagtgcgttagcgttaataaactctataaaagagcggggagcgaagctcgccattcccggtattgtggatcttaccgaactggcaaacgctcaatccggtgtcgcgaaggtcgttctggaatctgttcaggatatgttactcaaagttgccctacagttggcaagggatgagtatgaaaaccgtcgtaaacgccagaaagagggtattgagctggctaaacggcaaggccggtatcaggggcgaactgcaaatctacggctccataaacgcatcattgagtatcgttcaaggaagacgagtattgcggaaacagcgaaactttgtgaatgtagcgttagtcttgtaaaagctgtatggtctaaacataaaaataagtaa

SEQ ID NO: 22181 - DNA, 375 bp, Escherichia coli
atgagcaaagaaattagagcggaaagaatcaagaatgtaattctggaaaactcgacttatgaagaactggccgagaagactggcattagcgtgagtacgctggtcaggatagcgtccggtaaaactgaacctaagttcagtgatattattaaaattgcgatggtgacaggcgttgatttaaatgaattggcacatggagatattgttaatataaaggaagatgcaatgctaaaaaatgataagcaaaatgacgaagttgttaaggctcataatttcatcgtctggaatatatccagtttagataaaaaagatatattatctatatcaagaatagtttacgcactttcgactttgaaaaaaaacctaattatttaa

SEQ ID NO: 22182 - DNA, 774 bp, Escherichia coli
atgccgtatttagatattccaccggctcaggttgaacgtgtagtttgctcaattactgcagcgataaaatatcaggttccggctaacatcatgttagccatagctgaaaaagagggtggtcgtcccggacttgagaataaaaaccgtaactcaaacggcacatatgatataggccgtatgcagtttaatacggtttatttaaaggatctggaaaaatacggcattacagaagaagatgtagcacagccaggctgttattcgtatgatttggctgcgtggcgtatacgcggccatatcaaaaatgataagggagatatctggacaaaagcagcaaattatcattcaaaaacgcctcaatttaacaaggtatatcgtgctgacctgatcagaaaagcagctaaatggcagacctggattgaagctcgctttaatacgtttgacacaacgaaacctgcaggaacgactactccacagcctcaacaggcgacggttggagttacgccagaagaaagagcagggaaaaacattacactggttactaaccttgcacaaagcgacacactcgctacagaaccgcccaaaaatgacggaacaacagtaacaccgactacaccgaatcaacttattggtttttccgcttctgtaaaacaaataccggttgaaagcgtcgtaaaagctgactatcagcagcccacacagcaactaccgggtcgttataacaaggctgcagctgatgcactggctgcagtatatggaaatatcaaactacgttga

SEQ ID NO: 22183 - DNA, 1596 bp, Escherichia coli
gtggtaaatcaggcgaatttacaaaaagccccgaaaagaaatggtgacagaatgaaattcaggcatctaatttatccttgcttatctgtgttgctgatattaatcagcacacaggcacaggctgcgccattagatagtgctgggttacttgatgatatccttaagcgctttgcaaatgttgccagcacctgggctggaaccatacaaaattacgcgacctggatattttggtcattagcggtaatttcaatggtatggacattcgcaatgatggcaatgcagggcgaaggattatcggcagctcttgcggaagtagttcgtttttttgctgtgttaggttttttcttctatctgctaaaaaacggcccggcaatatcggtagatattcaggattcattacgtcaactcgcggctaatgcttctggtttatcaaaatcattctcgccttcgggcattgtagatatagggtttgatatcgtatcaagagtcgttgaccagtcttctatttggtccccggcagactccactgtcggcttgattttagccggagttattctatgcgtattagcacttgtcggtgtgaatatgcttcttctgctgattaccggctggattttaagttacggcggtattttcttactcggttttggggggtctcgttggacttccgatattgccattacatacttcaaaacagttctaggaattgccctgcagctgttcacaatggttctaattgttggtattggaaaatccttcatagaccagtattaccaggcaatgggcgatgacgcagtacaaatgaaatctatgtttgtaatgcttgtagcctcaattgttcttttggttcttgttaataaagttcctcctatggttggcagtattgtaggcggtgcttcaatgcaaggcattggtggctttggtgccggtgcaattattggggctgctgctgcagcaggagccgcaatagcagcatctggcgctgctgcggcagcaggtgctgcaaatgctgccggaggtgcatcagcacttaaagcggcatttgaatcggcacaagcagcgatggccgaagagtctagtactggtagtaaaggcggttcaggtggaggatttggaagtggggaggataccggttctgtagatacttctggaggacaaccatcaggcggttccggtggttcgtctgcagagaacagtacaggtagttccagtggaggaagccagggctttgcttcatcattctcacgagctggccgcatggcttcgcatatggcgaatagtttggctaacggcctggctgcacgcaatgcagccaagcatgactcaaaagtcagagcggcaagagacatcattgcacaaactccaggtggaaagctcgcttctcaaatccgttcgcaaactgttgaacgtcaatcgaacaacacagaagaatcttttggctacgggagcataacaacaagtaacaagttcaacggcgacagtcttggaggggaggagcaaacaacgactcaaacagaaaatactggttctatagatacacaaacatcacaaagtggtgatgaatacgaacaatttaaaaacaagtcaaagttctga

SEQ ID NO: 22184 - DNA, 174 bp, Escherichia coli
atgaaatatatcattcctctcattctgtcggcgttttttatcactgcttgcgacccaaaaaccgatcccaaccaggttgattgcaataagtcagtatcaaagatgactgaccaggaaaaaacgcaatgtggtaaatcaggcgaatttacaaaaagccccgaaaagaaatggtga

SEQ ID NO: 22185 - DNA, 1395 bp, Escherichia coli
atggcagaacaagataaaatgtcccccgacgcgtctcctggcgtcgcaaacaaaactggtgtacgccgcgttaataaaagaccaatgtacattgctattggtggcttcgctttattctgcattctcgtggcgtacattgccaataaacgagccaaccaaggcatgtcagatacggcagaaacaactattcagcgtgggagcagccgagatacctcggcaatggcaatggacgttatgggaggaagtacctccggcattattgaagccccaacagcaccgtcagaaattccgacacaggataataaaacccaacagagcacgaattatacatcggtccccattgttccagtagctgatccagatcagccccccgttccgccacaatcggtaacgtcacggtcaaacgatccagaagcagaccagattcgccgcaataaaatgcgtgattttattgaagctgtaaaagcaaaaacagaagtcaatttgcctaaccaactaggacgctcgagtactacaggtaatacaccacaaacccgcgatgaaatgctgcaagaaattgctaacgttcgccgtcagatggaacagaacaacgctggcgatgcaactgcaagttacgacgctcaggttcagagaatccgggcttcaatgaatggcgtcacagatagcaatagcgatacaggtatgcaattggcatcagtgggtggcgtatccgtttctcataatgacatcaaccagttcggtaagaaagggcagggtgacaggtggttactggatgaacaaatttcagcaccacatagccaatacgaacttcgtgcaggttgggtcattcctggcgtcatgattagtggcattaactcggatcttccagggcagattattggtcaggttgctcaggacgtttatgactcagcaacaggcaaataccttcttattcctcatggaactcgtgtgataggtacatattcaagtgatattacctatggtcaggaaggggtcatgattgcctggcaacgtctagtgttcccagatggaaaagctcttgatttaggttccatgccgggagcagacatggccggttactctggtttccgagatcaggttaataaccattacttccgcatttttggcaatgccttactgctatctggtatcaccgcgacaattgcttattctcaggatcgtaaccaaaacaataacaactcgaatcaagctccgaacatgagcagtgaaatgagtgcagcgctgggtcaggtattcggccaagctattgcgcaggttgtacaaaaaaacctgaatatctcacctacgctcgaaattcgaccgggttatcgcttcaatataatggttactaaagacttagcattcacaaaaccttaccaagcctttgattactaa

SEQ ID NO: 22186 - DNA, 444 bp, Escherichia coli
atgaaagcagcaatgaaattaacctccgttatggtgctaatcgcaagcctgttaacgactggctgtgtatcttcgagttatggaaactattcgaatgctaacatgtttgcctctgcaagcatggctgataacaccgttgttaatctggcaacgctgtatcctcctggacgtacaacattcacgatgaaacaacctgctaaagatcctttcggttcagcacttgttcagcgtttgcgttcacgcggttatgctgtcatcgagttcacgaaagacggcaaacctcagagcacctcagggacacctcttggttatgttgtgaacactatcgttcccaatctctaccaagtcacagcatttgtgggcgacgtcaaattaagccggggattcgttttggcaacagacggcaaggcatacccggctggcccatggactcgcgaggaataa

SEQ ID NO: 22187 - DNA, 891 bp, Escherichia coli
atgaaaaagtcaattatctcagcgttaattttgagcttaccgcttctggctaatgcggctcctggaagtgatccgctggctgatcaatatttctctaataatgaaccatccctcacaccgcaggaacaagccgccatcggaataggccaaaaatggcagactggtgctggtagcgtaacaagtaaaccatttgctggaccagacggtgctatcagttacgtatatacaacagggcagacacaaattgtctgtgctgtactgcaactgtgtgacatcgctttacaacccggagaaaacgtcaacaacattgatgttggtgatccacgcgtaacggtatctccttcaatcactggttctggtgccacacagcaattgcatctaattataaagccacttgatgtgggacttgatacttccctagtagtgacaactgaccgtcgtacgtatcgtatgcgtgttaaaaccagccgcaccaaatttatgccatatgtgtcttttacctacccggaagatgccaaggctaaatgggatgcaattcggacgcgtgaagccaaacaattgcgtgataacacaattcctcaaactggtgaatacctgggaaatctggatttcaactataaaataagcggttctgccagttggaaacccgttcgggtatataacgatggggttaaaactattatccaattccctaaaacaatttcttctggcgaaaccccaatccttctggtcgtgcgtaaagaaggcggactgttctctaaagatgaaacacaaatggttaatctgcgaacccaaggagatagaactattgtcgatggtctttttgacaaggcatatctggttattggtgtcggttcgagccaagaaaaagtgactatcacaaggggataa

SEQ ID NO: 22188 - DNA, 384 bp, Escherichia coli
atggttacgccagatggcgaactacaacgtaaagccgtattacgcacctacgcatttttatccccggatgatccggccacaaaaaaagcgaatgaatatttgaatagttcgaaagaacgtaatcctttcacccgagcaaaaacggaaatggttagcaatgagctaatttccgttctgcagcaaacacctgacacctggcaggttgactggattgagacaacacgtaaccgcgacggtacgttaaaaaatccaccggttcgaatgagagcactggtcaatctttatcagaacactgacttgaacgcaaatattaaagaaaacaatgacgtgataaacccacatcgtattttcattaaagattttaactggtcaaaacaactgtaa

SEQ ID NO: 22189 - DNA, 717 bp, Escherichia coli
atggcgatgtttatcgccggtattgcagggattggtgaagtctacttcccgtttgtactggctaatccgttgttagtcttcgcaacaatgggcggccttgctgtctctttgttcttacaggtgatcatgggcggcggtttgatcggtgtggcttcgccggggagtttgatcgccatcgccatgatgacgcctaaaagtgcgattattgccaacctggtatctatcagcgccggttttgtcgtctcctgtacacttggctggttaattctcaaaattagccccggttcagaagatgatgacgaagaaaatccggtcatcgtcggtggtcgtcaggtgagatctgttagcgactttgtccctggcatctcaaacgtgacggcggcaaccagtaataaaaccgttcaacgcattttggttgcctgtgattcaggtatggggtccagcgcgatgggggcatctgttttacgaaaacggttaaaagctgaagggctcgattacataactgttgtcaacgattccgcaaacagagtaggtagagattacgatattgtcattacgctttccggactactcgaacgcgcaagactaagttgcgagaatgaaaatactgtttttatgacggtgaaaaactttattaagttaagtgactatgatgaggcagtgtcctatataaaaacgcaagaaaatgttactcaacgtgaggaggcgacggcatga

SEQ ID NO: 22190 - DNA, 717 bp, Escherichia coli
atggataaggctattgctgcggaaagctgtcctgtagggatgcctattccttggccatctgattctataccttcaggctacgctctgatgacaggtcagacatttaataaagcctcctatcccaaactgggaattgcatatccatctggtgttattcctgacatgcgcggatggataattaaaggaaaaccatccagtgggcgagctatattatctactgaactggatggaattaaatcacataaccatacgggcagtatttcgagtactgatttagggacaaaggcaacatcatcttttgattttggacacaaaacgacatctgcctctgatcttggttctaagacaacatcgtcgttcaatcacggaagtaaatcgtcgaccagcacagggggccattcacatcaaataacatgtaaaggtgatgctgattacggtggcaatgcactaaccgctgattctataggtgactctcgttatgactacgttaataccgatactgtaggtgatcactctcatactacagccattggtacccatgcacatactatcgcattgggtagccatacacatgaactttcaattggcacccattcgcattcaattgcccttggttcccataatcactccctaaccattaataataccggcaacaccgaaaacaccgaaaacaccgtcaaaaatatcgcattcaactatattgtgaggctagcatga

SEQ ID NO: 22191 - DNA, 516 bp, Escherichia coli
gtgatcgctgaattaacggcagcaatgacggctattcgtgaaacagcccagattgcaaaactaatgaacgaggcaaaaactcaagctgaagtaaatgcggctattggtgagctgaaatcaaagcttgcgtctattcagcgcgaatgcgtgtctctcgttgaactggtgggctcttatcaagaaataaatgcttctctcaaagctaaaattgcagaattcgaaaactttgaggctcagacggaaggctatatccttaaccaacttgagtcgggtacttttgtatactcgaaggaggtaatcgtgaacggtggcagcataaccatgcatctttgcccaaaatgttttggacaaaagatagtatcgatacttcaaccattcccggttagcgaagatgagctttttcataaaagcaggtgcctccactgtgaaaataagtttctgatgaataaaaatccggattacgtatcgcctccatccattgaggagttgtccagaaaacttaacggcaatctgtag

SEQ ID NO: 22192 - DNA, 267 bp, Escherichia coli
atggaactggccagacatctagaatttactgtcagcaccggcgttaaagtttacttctgcgatcctcagagtccttggcagcggggaacaaatgagaatacaaatgggctaattcggcagtactttcctaaaaagacatgtcttgcccaatatactcaacatgaactagatctggttgctgctcagctaaacaacagaccgagaaagacactgaagttcaaaacaccgaaagagataattgaaaggggtgttgcattgacagattga

SEQ ID NO: 22193 - DNA, 729 bp, Escherichia coli
atgagaaaaaataatacggcaataatattcggcagcctgtttttttcctgcagcgtgatggccgcaaacggtacgctggcccccaccgtggtgccaatggtgaacggtggtcaggccagtattgccatcagcaataccagcccgaatctgtttaccgttcccggtgaccggattatcgccgtgaacagtctggatggtgccctgaccaataatgagcagaccgcctccggcggtgtggtggtggccaccgtcaacaaaaagccctttacgttcattctggaaacagaacgtggtctgaacctttccattcaggctgttccccgtgaaggcgcggggcgtaccattcagctggtcagtgacctgcgcggaaccggagaagaagccggcgcgtgggaaacgtccacgccttacgaatccctgcttgtgaccatcagccaggctgtccgtggcggaaaattacccgccggctggtatcaggttcctgtgacaaaggaaaccctgcaggccccggcggggctgtcttcagtggcagatgccgtatggacggggaatcacctgaagatggtccgctttgccgtggaaaataaaacgctgtctgccctgaatatccgggaaagtgatttctggcagccgggaacccgtgccgtgatgttcagccagcctgccagccagttactggcaggtgcgcgcatggatgtgtatgtcatccgtgacggggagggcaactga

SEQ ID NO: 22194 - DNA, 927 bp, Escherichia coli
atggaacttcgccagctacgttattttgttcgtattgtggaaaccggtagtatgggcattgcggcgcttgatctcggtatcggtgtctcagcacttagtcaacagatgacgaggctggagaatgaactctccattcgtctgttgcaacgaacctcgcgcggcgtcacgcccactaacgccggtctggctttttactcgcaggcacaattggcgctacgccacgccgatgatgcgatcttggcctctcgcgaggcgcgtctctctggacacgtcagcgtcggcatggcccccagcaccgcctccatcctgggaataccgtttattcatgccatgcgggaacattacgccgacgttcgcctgcatgtggtggaaagcctgtcgggtaatctggaacggatgatcaacacgcgccagattgatctggcggtcgtgtttcaaaaagagaaaatcctgcgctggaacgccagaccggttcttgaggagcgcctgtttctgattggcacacacgagctgctggcggatattccggatgacaccataacgcctgctcaactggcgaatattcccctgatcatgccaagccagggacacggcctgcgtggcagactggaagccatctgtcaggaacacggactgaaggtcgatattgccacggaaattgacggcctgacgttactgatgcgcgccgttagcagcggactcggcgccacgctgcaacccggtgcagccatttcgcatcttgagagggaagcgctaagagtgatcggcgtccataatcctgtcctcagccgccccaattttctggtcagtctgtcggacgatgaactcacccctgccggtcttgcagtccgcgtaatactcacaaaagtcatgcgtgaactcgttgaaaccggtcattggccgggcgcaaccctttacgctccctaa

SEQ ID NO: 22195 - DNA, 1404 bp, Escherichia coli
atggttgatgtactggtaattggcggtggtaatgccgcgttatgtgccgccttaaccgcccgtgaggcaggagcttccgtgctgctgttagaggctgcgccccgggaatggcgcggtgggaattcccaacacacgcgcaatttacgctgtatgcacgatgcgccacaggatgtgctggtcgagagttatcccgaagaggagttctggcaggatctctggcgtgtcaccgaaggcaataccaatgaagcgttggcgcgactggtgatccggacctcttcccagtgtcgcgactggatgcgtcatcacggcgttaattttcagcctccgctctctggcgcgctgcacgtggcgcgtaccaatgccttcttcatgggcggcggtaaagccctcgtgaacgcctattaccgcagcgcagaaaagctgggggtacagattcgctacaacacgccagtacaggcacttgaattgcacaacggcgaattcatcgcagccctggcaggccacgagcgcattgaggcgaaagcctgcgtactcgccgccggtggatttgaatccaaccgcgaatggctgcgcgacgcctggggagagaacgctcgtggcgaatggccagccgataacttcctcattcgcggcacccgctttaatcagggcgtcttgctcaagtttatgatcgatgccggtgctgacattatcggcgatccgtctcagtcccactgtgtggcgattgatgcccgggctccgttgtacgacggcggcatttgtacccgcgtggattgcgtctcacttggtgtggtagtcaaccgggacgcggagcgcttttacgatgaaggcgaagatttctggccgaaacgctatgccatctgggggcgtctggttgcccaacagccggggcagattggctactccattatcgacagcaaagcgatcggtcactttatgccgccggttttccccggcgcacaggccaatacgctgagtgaactggcccgccagttggggctggatcccgaacgctttacccataccgtggagcactacaatcaggcctgtcagccgggtcagtttgatcacacgaagctggataactgcgcgacgcagggcctgacgccaccgaaaacgcactgggcgcggcctattaatacgcccccttactacggttatgccctgcgaccggggatcacctttacctacctgggactgaaagtgaatgaacacgctgcggttcacttcgcaggcacccccagccgtaacctgttcgttgccggtgagatgatggctggcaacgtactgggcaagggctataccgccggtgtcggcatgtccatcggcaccacgtttggtcgcatcgcaggtaaagaagccgcgcaggcagcacgtaaggaggcgcatcatgaagcagcttga

SEQ ID NO: 22196 - DNA, 1140 bp, Escherichia coli
atgaagcagcttgaaaaactgatcatcgaggccaaaattctcaccgagccagaagctgaagtcgagcgggtgatgcaggtgtgtaatgcctgtcgctattgcgaagggttttgcgccgtgttcccggcgatgactcagcgactggaatttggcaaagccgacattaactatctggcaaacctgtgccataactgcggcgcctgcctgcacgcctgccagtatgctccaccccatgagtttgcgatcaacgtgccgaaagcaatggcggaagtgcgtctggaaacgtatcaacactacgcgcaaccggcggccttcggggcgctgtatcgccaggctggcgtcaccgtgacgctggcactggtctttagtctgatcctctttttactcctcgcgatggggatgaagggatcgctactccatccgccgctggccggtgatttctaccaaatcttcccgcacaacctgctggcatggatgtttggatcggttttcatgctggcgatcggtttactaatggcaggggtgatccgcttctggcgcgagatctctcccgtcgggccgcgtccggcggaaattgccgaagcgtcgcacaacgcgctgacgctgaaatacctcgacggcggtcatggcaaaggctgcaacgaggcggacgatgctttcacattgatgcgtcgtcgtttccaccatttcaccttctacggcttcatgctctgtttcgccgcgaccgtggtggcgacgggttaccactacttcgccggttgggaagccccctacccgttcttcagcgtgccggtcatgcttggcacgctcggaggaatcggtttaattgtcggcccggcaggcctgctgtggttaaaccttaagcgctcgccactgcatggcgacgcgcgacagaaaccgatggatcgcggttttattttactgctgctcctgaccagcctgaccggtataggtttgctggcgggaagagacacctcatggatggggatcctgcttgccatccatcttggcgtggtcatggcgctttttttgaccattccatacggaaaatttgcccacggattttaccgctgcgcgtctttactcaaatgggcgattgagaagcgacgtggaaaacaggcgggggtcgcaggcgactaa

SEQ ID NO: 22197 - DNA, 1296 bp, Escherichia coli
atgactcaacaaccatcgcgcgctggcacgttcggcgcaatactgcgtgtgaccagcggtaattttctcgaacagttcgattttttcctatttggtttttacgccacttatatcgcaaagacgttttttcctgccgaaagtgagtttgccgcattaatgcttacttttgccgtttttggctccggatttttaatgcgccctatcggggccgtggtgttgggcgcatatatcgacaggatcggccgacggaaagggctgatggtcaccctggcgattatgggctgcggcacgctgctcatcgccctcgtgccgggttatcagactatcggcctgctggctcccgtgctggtcctggtggggcgtctgctacagggattttctgctggcgtcgaactgggcggcgtctctgtttatctttctgagatcgctacaccaggcaataaaggcttttacaccagttggcaatcggccagccagcaggtggcgattgtcgtcgccgcgctgatcggctacggtctgaatgtcacgctgggacacgatgaaatctccgaatggggttggcgaatcccgttcttcattggctgcatgattattccgctgatttttgttcttcgacgttcgctacaggaaactgaagcctttttacaacgtaaacaccgtccggacacccgggaaatttttaccaccattgctaaaaactggcgcatcatcaccgcgggtaccctgctggtagcgatgacgaccacgaccttttattttattactgtctatacccccacttacgggagaacggtgttgaacctgagcgcacgtgacagcctggttgtcaccatgctggtagggatttctaacttcatctggctgccgattggcggcgctatctctgatcggatcgggcgacgcccggtgctgatgggcatcaccttgctcgccctcgtcaccacctggccggtgatgaactggcttaccgctgcccctgacttcacccgcatgacgctggtgctgctctggttctcgttcttttttggcatgtataacggtgcgatggtggcggccctgaccgaagtgatgccggtttatgtccgaaccgtgggtttttcgctggcctttagtcttgcgacagcgattttcggcggcctgacgcctgctatctccaccgcattggtccagttgaccggcgataagagttctccggggtggtggctcatgtgcgcggcgctgtgcggactcgccgcaacggcaatgctgtttgttcgtctcagccgtggctatcagacagcagagaataagctctga

SEQ ID NO: 22198 - DNA, 834 bp, Escherichia coli
atgcaaacagaagctgaagtcctaaccgatcataacgagataatttgctcgaccaatattgagcgtatcgtcacaggacgtgatagtgcactgaagcagatagcgacgttaatccaaaaacttgatgatatctccagcctgacattcagtattggcggtgatgtggctggaacctggggaatgcgtaatggatatgcctttgattgctggctgatgcagccaaccgacaaagcgatgccggtgatcacccgaaatatcgctcgcagtatctggcgcgatctcatgctgaagtccgggatgttgactctgatggatgccgaagcccgcagtcagtgggcaaagaacctggaggagggcgagctcccggcgattagcgaagccaacatcctgagtacttttgagcagttgcaccataacaagcaggacgttttcgaacgtgggattatcaatgtatttaagggattgagctgggactacaaaaccaataatccctgttatttcggtaagaagattatcgttaacaatctggtgaagcatgacagatggggctacagcctgtactggggctggcggcgagatcagcttgccgatctggaacggatgttctacctgctggatgggaagaccattcccgataaccggcatgatgtctccatccggtttatggattttgtgcgcgataatccgcatcagcagattttcgaagatgagttgttcactattcgctactttcagaaaggcagtggacacatcacattcaagcgactggatctggtggataagatgaatgacattgtggcgaagcactatccgtcagcgttatcagcaaaatga

SEQ ID NO: 22199 - DNA, 198 bp, Escherichia coli
atgtttgagtccggccttccaccacatcgtatgcaaatcgagtcgcttaagggcggctttttttgtgcctgggatccgttagttacctatctttctcgctattttaactctctcagggctaaccaattccaacccatcgcaaacgaaaaatgttggtacaggcgttggtattttcggttcgatattaatttttattag

SEQ ID NO: 22200 - DNA, 615 bp, Escherichia coli
gtgagcagaaaagatactaaagaattgctaactatctgcatggtgtacttttcaatttatttttgtgcatacatgatagtcccagatgagtttgaacatggcagtattatttattccataacattctattttttagagctaacaccaattttggctatccttttggcaatacatatttatttttccttaaaaaaagaatcgactaattgggagaaggtatggagagacagaggatttctaacatcacctaaagatgatgcatatgagagtgatttttctgactttataacaaactactactccagcgaacaattcaaaaatagactgtctgatgtttgggaaacagcaatgtattccatagggattatattattgatacttactggtattgctcaatatgtttttaacattgacttatcattaaatcctgaaaatttaatatcgccattgatttttggtgagatattgatcttctcattcggaattttcttgagtgttgttctctgctcattatgcaagctactgactaacaggtatccaggtgaagcaaggagagcaagaaaggcaaatccatattatcttttatttcctaatggagacagcagagatatctaa

SEQ ID NO: 22201 - DNA, 456 bp, Escherichia coli
atgtctcttgaaatttttaaaatggaaagaaaatatttaaaatttattactgcaataatttgcttagggtttttatggttataccaggcaaatgctgcatcagctttagataccataatccataagtctccctccgggatagtattacccgctatagagaagtctaacgtctctgtttatgcgaaagattcctcttatcattttaaacttccatttacacaaatatcaccagcgcctggtaacatcgttttgaatggtgtcaacccactggggtatattgaatttggtatgcgcagtgatgagatagtttcagatgcaaaactaaagcttgaatatactccgtcaccgtcattgatccccgttcagtcgcagcttaaagtttatcttaatgatgagttgatgggagtattaccgattaccaaagaacaactgggaaaaaaacgttggcggaaataa

SEQ ID NO: 22202 - DNA, 243 bp, Escherichia coli
atggcagagattattcccatgactgaagaacagaaattccagttagagatttacaaactggtcatgaaccagaacgcagccgcggaggaagcatttcagttcattggcactgacgaactgaagcttgagctattcaaaattcacttccagtcaggcggcgctaattcagatatcacgacccgcactatcgaagcggtgcgtaaatcgaaggaagcgttagacctgttcactaccggaacatga

SEQ ID NO: 22203 - DNA, 546 bp, Escherichia coli
atgttaagtgaagatattagagatgtagttggttatgaggggctttatgcggtaactcgtgatggtagagtttactctcactcaaggataataaatacatgccatggggctactcgattaatgaagggtagatggctgaagccagcaaaggatgggggcggatatctatttgttggtctctgtaaggatggagaggttaaaccaaaaaaaatacatcgaattgttgctgaggcatttattgaaaacaaagaatctaaaccattcatcaaccatatagataataataatcaaaataataatgtagaaaatcttgaatggtgtacgcaacatgaaaacatgcagcattgctctagaagcggtagggtgaaaatacctcattatgtgggttctgaacatccatcgtccaaattaaatgaagatatagttctggtcataaaaaatgatttgattacgccaattagcgagttagctgcaagatataatgtgactgttcaggccatacacgccattaaaaaagggaagacatggaggcatgtgaatggctga

SEQ ID NO: 22204 - DNA, 2124 bp, Escherichia coli
atggcaaccgatgtaggtttacccgaaggctttgttctcgataatcagcctgataactcacagcttcctgatggctttgtgcttgattcccaaccagaacagcagcaatctcctttggtttcaccagaggaaaattccagacaggaaaatgttgttaataatgctaacggtttcgaccgttttatgtatggcgttctcagtggattgatggatgttggtaaaggtgttggcctgtttcaggacatgacaccagaagagcaagccgcaattcagtctctacagcagaagttagcggcaaaaccatcaaccgcacaagatgttggtgagttcgttggacaagcagcaccatttgttagtggtggtgggattatttctcaggttccgaaaggggcggcaaggctggctgccgccgcagggcttggtgctggagaaggggctattgtagccaatggaacaaatagcgatgttgcttccggcgctgctattggcgctgtggctggccctgtagccgagattgttggtccagcgcttgggaagattgcaggaaaaattaaaaatagtgccggagatatttatcgctcatccgtaggaatgggtagtaaatcatctaaagcaacgttaaagaaagctgctggcgcaatggataataaatttattggtgggcaacgagctattcaagatttcgccgatgaagttaatcctgattttaacgcgataaatgctattcgtgagctagaactggaaaattatgccactccaggcatgatctctaataatcctgctgtcagggctcttgataatgcagtggcaagtctccctggaacagagattagtgaggcgcataagcgttttattactgaattaggaagaaaagctgatgaaatgataacttcatttgggggaaaccttgataagcaactggtttctgacaggcttgcagataattttgataaaaccatttcatcattacaaaatcagtcagataacatctacaacaaaattgccgaaaaggtacctgtaagagaccggattgaggcaactaatacattgaattttttagaggattttgctgatgacataggtggaattgatgaattatctccaataatgaagcggacattgaaccgacttgatccaaacaccttgccaacgtatgggcgtttagatctcgctagaaagcaggttggacaagctattggcaaaggctctggcccattcaaggatgaagaaacaggtgttcttaaaaagttatatgcagccataacagatgaccaacaggctgtcgcagaaaaatatggcgcaggggaattatggacgcttggtaaggagttggtaaaaaaacgaaaatccattgaagatgatgctgtaaccgtcttgggtagaaaacttcagcaatcagcaattccaaaagttgaaagtgccgttgttaatatggcaaaaggaaacggtggtgactttaggcaattaatgaagtcaattccaaaggatatgcggcaggaagttgcgctcacctcaatgaataaagcatttaccagctatgccaaatcacctggtcagcaattaggagttgatggatttgtaaaatggtataacggaatgtcacgcaatggggccaatatgaaggctctccgtgatgctattggcacagatgcatcaaagcgccttgatacgatttatcaagcagctaaggctatgaatagactcaatactggtaagcagcatgctagtagtcttgtggatcagcaagttaataactttctgaaagaaaagggtagtctcgcaaaaatttatggaatagcctcaaaagctgctgcggcggaaggtattacaagcttatctggtcttcctggtgtaggtgcaacaggggtgataacgtccgcattgatgtcagggaaaacaagcaggataaaggctgctgatgctctactgtcttctcctgagtttaaattaatgctatttcgcctgcaaaacgcaccagtagacagagcagaagtgagacgcgtaatagaaaggaaactgatgcaatctggggcatttaagagatgggagaaaaccttatcaacagatgaagcaaaaaccattgcccgcacggggattattacatggctcgctagtgacagttag

SEQ ID NO: 22205 - DNA, 2721 bp, Escherichia coli
atgcctgttgttcctactacatccggacgccaggtgcaaagtcgtggtgtgcaaaccggtggttttcagaccttcgatgttcctcaagcaggtcaggtgctggcgaatgtcgcagatcagtatgcggtggcatatggtgaagctaggcagaaagcgaatgttgcattgtctcaggatgccatccttcagcttaatcagcgcagcaatgaacgtctttataaccctcaaaccggtttttatgcacaacaaggcaaaaatgcgattggtaaggggcaagagtacatatctggatttgatcaggatgtggaagaaatagctgcttcattgactgatgaagcagcaagaaatatgtttttgcaacaagccagaacacagaaaattcagttcagtactggagttctcagacatgagatagggcagacaaatgcctatgaagatgagcaatatcaggcaacgagaaaattatggatacaaaatgaagcggatgcctggaatgacccgcaaactgccactttagccagaaattccagaatggtagccattgccagatatggagcagccaggggatggtcacaagaacgcattctggaagaaatagaaagtgatgatcgcagtgccacagaaatgcgggcgaagaattatgccgctgctaatccggaaggatggttaaatggtcagtttcagaaaaatgattctggaggcatggacatgcgtgccatacgccttgttgaatcaggtgatcgtcattttaatcctgatggtagtattcttgaaggaccgaaaacatcttctggagagagggcccaggggaaataccagttaatgccgggcacagggaaagaactggcggccaaacgtggcgttgaatacaaccctacggacgaacaacagcatgaaatgcttgccagtgactatgtaaatcaactgtatggtaagtacggctccgaaatattgaccggagcagcatataactgggggatgggtaacgtggataaactgatcgccaaagtcggtgatccacgtaaaggtgaaatatcagaagaagaatttatccgaaatcttccatcagaaacacaagggtggctttcccgatatagaaaaaataaaactggaatggatccgctgactatttatcaaatagataaccttgctaatagtcagatagaaaagcaaaggaagttaatattagaacagcttgagccagctattaataacaccatggcccagctatataacggtgaggttccagattatataccggctcaggagaccatcatcagggggtatggaaaaaacgcagataaaataatcaatcaactggatatagcgattgataacgcgagaatattccaggcaattcagtatttgcctccttctcagcagcaagaagaaatgcagaaagtgaagcctgaggttaacgatcctcactatgcgttaaaactcgatgcttacggaaaattgtctgcattgcttcagagatcaaatgaagcaattcaggcgcaacgggattcacgcagattcaatgaggcgctgacaataggtgaaaaattagacccaagcaacaagtcaatgcagaaagctgctgattacacagaaatggcgcagaactttcgtattaatgatgcctccactcatgatggggttgttcggcttgtggctcagactggcataatgccttcgcaggtcatcacgcagctttcagcagtatcccgatccagcaatcaggaagtggttaaaaatgcggcggaactgtttagtcggttatatgaaacagacaatgcatctattggaaatatgccgaaggatatgcagggtttttatctgactgttaagcaactaactgatgcagggatgtcttcagatgctgctattgtggaagcgcagagtaagacatacaaccagacagatgcactaagggcgcagctctcatctgttcagagtacaagagaatacaaaaaagagcgtgacagcgcagccaattctgctgtcagtaatatggctcactggcttcgctgggatccgtctgcggatgaccagacgccggaagcagcgctctttcgcaatgactatcagatgctctatgacgttaactatcgccttgctggtggtaacgctgacgtagcgaagcaaatgaccaaccagcagatagctcgcacctggagtatcagcgaggtcaacggggaagcacagtttatgaaatatgcaccggaggcgctttatcaatatgggccgtcaggctggattgcagcgcaatggaaggctgaaaaagaaaaaatcatgtatggcgatgacttgcataaactgtctccttcatttaaccgaccttcaactgaggctggtgcattgggactgaatacgccacgctcactggttggaggtgagttgattcttgttcctgatttatcaactccgagagataagctttattcagttgtgatcagaacaaaagataaagatggtattacgagggatgatttattttatgacaagcatggaagacagatgcgctgggggccatcactagaagattgggaaccttataagaaaatgcagcaggaacgggagcagcacgagcaggaagaaattatgcgtggacaggctatacaaaacttcaaagacaagcatcgtgctctggatgagcagtatcagcgcctgcataacgaacgtatggacaaatttaatgaaccgccccgggtttcctggagagtgttttatctgtga

SEQ ID NO: 22206 - DNA, 282 bp, Escherichia coli
atggcaaaaacagcagcagcactgcatatccttgtaaaagaagagaaactggctctggaacttctcgagcagattaagaacggtgccgatttcggcaagctggcgaagaaacactccatttgcccgtcaggtaaacgcggtggtgatttaggtgaattccgccagggccagatggttccggcgttcgataaagtggttttctcttgtccggtactggagccaaccggtccgctgcatacccagttcgggtatcacatcattaaggtgctttaccgtaactaa

SEQ ID NO: 22207 - DNA, 267 bp, Escherichia coli; identical to SEQ ID NO: 22192

SEQ ID NO: 22208 - DNA, 360 bp, Escherichia coli
atgaacaagaaaaccaaacgtactttcacccctgagttcaggctggaatgtgcacagctgattgttgataagggctattcgtatcgacaagccagtgaggcgatgaatgtcggttctaccacgcttgagagctgggtacgtcagctcaggcgagagcgccaaggtattgcgccctctgcaacacccattacccctgaacagcaacgtattcgcgagctggaaaagcaggttcgccgactggaggaacaaaatacgatattaaaaaaggctactgtagattcaatctgtcaatgcaacacccctttcaattatctctttcggtgttttgaacttcagtgtctttctcggtctgttgtttag

SEQ ID NO: 22209 - DNA, 654 bp, Escherichia coli
atgggacgctggcttgctggcaggctcatgaaagagctggggctggtcagctgtcagcagccgactcaccggtataaacgtggtggtcatgaacatgttgctatccctaactaccttgaacggcagttcgccgtgaccgagccaaatcaggtgtggtgcggtgatgtgacctatatctggacgggtaagcgctgggcgtacctcgccgttgttctcgacctgttcgcaagaaaaccagtgggctgggccatgtcgttctcgccggacagcaggctcaccatgaaagcgctggaaatggcatgggaaacccgtggtaaacccggcggggtgatgttccacagcgatcagggtagtcattatacgagcaggcagttccggcagttattgtggcgataccagatcacgcagagtatgagccggcgcggaaactgctgggataacagcccaatggaacgcttcttcaggagtctgaagaacgaatggatgccggtggtgggttacgtaagcttcagcgaggcagctcacgccataacggactatatcgttggatattacagcgcactaagaccgcacgaatataatggtgggttacccccaaacgaatcggaaaatcgatactggaaaaactctaacgcggtggccagtttttgttga

SEQ ID NO: 22210 - DNA, 243 bp, Escherichia coli
atgaaaattaaaaccatgggcgcaagcccattaagcggtcgtatttttcaaggaacattaaacactgaaaaaggaatgtgggtaggaaagaaagaagatgtcaccgaacaggcagttaaggcagtagctgaacacctgatgataaaagaccagaaatacgcatacgaaacgaaggatggcaaatggctgataataagccatcaactggttgataaattaccagaagattttattgctgattaa

SEQ ID NO: 22211 - DNA, 147 bp, Escherichia coli
atgagaggacttgcatacaatcccggcattcttccggcagaaatgattattcgccaacgcgtaaagccaatgccatcgagagaggaattgctaaagagaaattcttttccgtcagtgaatcaaaacaaatatctgaatgcgatgtag

SEQ ID NO: 22212 - DNA, 501 bp, Escherichia coli
atgaaacaaatgacactaattgagatggatggatttctgaaaggtaaatgcatcccaagtgatttaaaggttaacgaaacaaacgctgaatatctggtgcgtaaattggctgaagcggaggccaagtgcgcggcgctggcggcggagaatgcggcgcttaaacagtcggagaaggaatttaataacttctgtcgtcaggagtactacggttgggaggacaacttcacggaaaccccggccaccgatgctttcctgtctgaaattcgtgcggaagcacgcaacgaggggattaactataccgccagccgtcttgctgctgcgttcaatcacggatttatcaataagtctttgcgtgaagttttcgacgttacacgcatgattttgtcagcgaaagaagagttggctaatgaagcgcatccgattgatggcctgtctggtgaatatgcggagaaatcccttgaagaatgggcggaacagattcgcaaaggaggcaaccagtga

SEQ ID NO: 22213 - DNA, 159 bp, Escherichia coli; identical to SEQ ID NO: 6188

SEQ ID NO: 22214 - DNA, 384 bp, Escherichia coli
atgtcgctcgtttgttctgttatatttattcatcatgccttcaacgctaacattttagataaagattacgccttctctgacggcgagatcctgatggtagataacgctgttcgtacgcattttgaaccttatgagcggcatttcaaagaaatcggatttaatgaaaacaccattaaaaaatatctacaatgcactaacatccagacagtgacggtgcctgttcctgcgaagtttttacgtgcttcaaatgtaccgacgggattgcttaatgaaatgattgcttatctcaactcggaagaacgcaatcatcataacttttcagaacttttgctttttcttgcctgtctatttttgccacatgcaaaggtttcattacactattaa

SEQ ID NO: 22215 - DNA, 321 bp, Escherichia coli
atgagcaagttccctagtcatgaaatggataggttcaatatcaggcttcctgcaggaatgcgggatgctatagctgaacgagcaaaacgtaacggcagatcaatgaactcagagattgttcagatactggaagatgccttgaatgcagaaaatacactcggggaaatagcagataaaatcaacagcgtctcggttccgctaaatgttgatgcgctagttcaacttcaagcccaggttatcgccatgcaaaaagaaatacaggaaaagttcagagagcagaacgaaaagttgagagaactgctaaacaaaaaacccacctga

SEQ ID NO: 22216 - DNA, 687 bp, Escherichia coli
atgcagctaatagtgcacaggcggcagcgacctcgcagactgcatcggcaaactccgcgacagcagccaaaaaatcagaaaccaacgcgaaaaatagcgagacagccgcaaagacgagcgaaaccaacgcaaagtccagccagacggcagcgaaaaccagcgaaacgaatgccaaagccagtgaaactgcggcaaaaaacagccaggttgcagcagcccaaagcgagagcgcggcagccggttctgcgacttcagcagctggatcagcaactgctgcggctaacagccagaaagctgcgaagacgagtgaaactaacgcaaagtccagccagacggcagcgaagaccagcgaaacgaatgccaaaaccagcgaaactgcggcgaaaaacagtcaggatgcagcagcccaaagcgagagtgctgcagctggttctgcaagcgcggcggctgcttctgccactgcatcagccaacagtcaaacagcagcaaaaaccagtgaaaccaatgcaaagacaagcgagactgcagcggcgaactcggcgaaagcatcggcagcaagccagacagcagctaaagcaagtgaagacgcagccagagagtatgcaagccaggcagcagagccgtataaatatgtcttacagccgttgcctgatgtgtggataccgtttaacgattcactggatatga

SEQ ID NO: 22217 - DNA, 741 bp, Escherichia coli
atgttgaataaagtttcacaaattaatttggccaaaatactggctgaaaaatttaacgaaggtgactggcaggagctgtttgctgttacagattgtgaagacgttccggaaggactaaatcaattctaccggcatgttcactgggacaaccctgagctgaaaggggtggccatcgctgccatagaaagcactctggccagggacgctgataatctttctaagatctgggcgctggataatgttcaacgctttatcagcattgccaatactgagttattcaatgaaataaagaacattgtgaatcagaacgggcaaagaaatgtttcggcagcaccagtgaaaaatgtaaatgaaaacatttaccaggccttagaagatgcggaagtgttgcttaaaaataatgggccacaccgggcatatgatcgtgttcatacagctcttcatgcttcattaagacaaatgtgtgccaaccatggaattgcgaccaatagtacaaatgataatgttccaggcttgctttccctgataactgcacatctcaaagacctgcctgatgatggaagaaatgaagatgtgtttaaaatgttgagatcatctgccgcaatacttcatgggatcaataacctgcgtaacaattacagcatggcccatcctactgaaactttgctgaatgaagccgatgcccgttttgccataaatctggttcgttccatcatgacttatgttgatgagttgctttag

SEQ ID NO: 22218 - DNA, 267 bp, Escherichia coli; identical to SEQ ID NO: 22192

SEQ ID NO: 22219 - DNA, 267 bp, Escherichia coli; identical to SEQ ID NO: 22192

SEQ ID NO: 22220 - DNA, 360 bp, Escherichia coli; identical to SEQ ID NO: 22208

SEQ ID NO: 22221 - DNA, 252 bp, Escherichia coli
atggctaacaattcaaagcaaacatcaagtaaagtcgcatcagtcgcagcacaaaccctaaacaaccccaacgcatctgcaattcagaagagccttgctggttcagctctctctcaaaaaggttcctcaaatcagacaagtggtgcaatggaacataaagcatctgcggcgctggataatccacgttccagtactttaaccaagcagcttgctgcttccgtgctggctcaatccaacaaaaaccgtaaataa

SEQ ID NO: 22222 - DNA, 1278 bp, Escherichia coli
atgagtttcaagagagatcgttacttagttttagatccatgcggaaactatctggtaaggattaccgttccagcttacatgcgctcgctttttggcaacaagcgctacttcgtcaagagcactggcacaagtgacatacgtcaggcgcgattgttcagagatgctatcgctgttgaatggatacgtttacgggaacaggtcaaaccaagagaagggagtaagattgagcaggcaattgcagagctacgcagagttagcgcccgagttcatgaaacacctgttcagcatgtcatgagcaatacccaatcccaaggagtgccatccctcctgaaaatgcgtgatctttatctattgcagttcagcgagaagcgcaaactcactacgctatcgaagacaaacaaggctgttgaagtgctcttagaacatctgaaaaagcgtgatgttcagcttcgtgacgttaaccgaaccaccgttacaggctggcttgatcagctcaagacggagaaagcaccacagaccatacaaaactatgtcagcgcactggctcaaatctgggatctggcccgtaatcgctaccacgatgcaccgcaagaaaacatctggcgcggtcatgcgctggaggccaaaagtagcaaggtgagttatgaagtatttgagcctggagaattggcgaaggtgttcgctgtgatggcgaatgatgaagagatgcaaaatgtaacgctgatcgggatgtatagcggtatgcgcctgaatgaaatttgttcattacgtgcagccaacatccgagagattgaaggggtgttatgtttcgaagtgacggaggggaagaccaaatcagcagcccgtattattccggtgcatagcctgatcactccgttggttttgtcgctgcgtgagaagccccataacggctttttattctatcgtgcgtcgatagctgaccgcgcagatggaaagcgctctacgtggcattcacagcgttttacgagggctaaacgtaaggcattgggggaagtaggatcagagttgaaagtttttcacagtctacgccatgcagtggcgcagattctggatcgtgggggggttggacgaggtaagttaaaaccagttacagaagaccggatcgcacttctcttgggtcatgagcgcggctctacagaaagtttcaagacgtacagcaagaatgcagcatctccgattgaactacagccatacatcgagctattacgttacccagagatagagacggagccccaacgtgagaaaactgataaatag

SEQ ID NO: 22223 - DNA, 267 bp, Escherichia coli
atgcaactaaaaaattgcataatttgttttattggtcacattttatgcgacacgatgaagaaacagccgaatggagggcagattagcacacttttcaacatcattgtgctcaacaatgcgctcctgctaaaccataattctttttatcagatggaatatctgtcacattgcttttcaacgatagcttcctgggagagattttttcttattattcctccccatctggtgttaccctcctgcccattaacccattcaacagaactgtga

SEQ ID NO: 22224 - DNA, 258 bp, Escherichia coli; identical to SEQ ID NO: 6943

SEQ ID NO: 22225 - DNA, 828 bp, Escherichia coli
gtgctgactgacggtaagctccatgctgatgacacgcctgtcccggtgctgttgccaggcaataagaaaacgaagaccgggcggttatggacctacgttcgtgacgaccgtaacgccgggtcaacgctggcgccggcggtgtggttcgcttacagcccggacagaaaaggcatccatccgcagccccatcttgcggggttcagtggtgtactgcaggcggatgcatacgccgggttcaacgagctgtaccgggatggccggataacggaagccgcctgttgggctcacgcccgccgtaaaatccacgatgtgcacgttcgcaccccgtcagccctgacggaggaagcgctgaaacggatcggcgaactgtacgccatcgaggcagagataaggggaatgacggcggagcagcgccttgccgaacgtcagttgaaaacgaaaccgctgctgaaatccctggaaagctggctgcgtgaaaagatgaaaaccctgtcgcgacactcagaactggcgaaagcgttcgcatacgccctgaaccagtggccggcgctgacgtactatgcagatgatggctgggctgaggcggacaataacatcgctgaaaatgcgttgcggatggtcagtctgggccgcaaaaactacctgttcttcggttcggatcatggaggagagcggggagcgctgctgtacagcctgatcgggacgtgcaaactgaacggagtggagccagaaagctacctccgctatgtccttgacgtcatagccgactggccgataaaccgggtcggcgaactgctcccctggcgcgtagcactgccgactgaataa

SEQ ID NO: 22226 - DNA, 291 bp, Escherichia coli
atgacgggcaaagaggcaattattcattacctggggacgcataatagcttctgtgcgccggacgttgccgcgctaacaggcgcaacagtaaccagcataaatcaggccgcggctaaaatggcacgggcaggtcttctggttatcgaaggtaaggtctggcgaacggtgtattaccggtttgctaccaaggaagaacgggaaggaaagatgagcacgaacctgatttttaaggagtgtcgccagagtgccacgatgaaacggatattggcggtatatggagttaaaagatga

SEQ ID NO: 22227 - DNA, 732 bp, Escherichia coli
atgatgtggcaagcccgtttctatcagtccctgccaaagattgtgacggaacatcccggcgcgcgctggttgtttctcacactgacagtgcgcaactgttccattgacgcgcttggtgagacgctgaccgcgatgaatgcggggtttaagcggttgaaagagcgtaaggaatttcgccatgtgttgggttgggttcgtaccacggaagtaacgcgcggcaaggatggtactgcacatccccattttcacactctgctgatggttcccccttcgatgttgtccggccgtgagtatgtgaaacatgcccgttgggtggaactgtggcgtgattgtctgcgggtggcgtatgacccgaatgtggatatcagagtggtgaaatcacggaaaccaaaagacgatgaatctttaccttgtgttgttgcggaacagctgcgcggcgcggtggttgaaactctgaaatattccacaaagcctgctgatatgctggctgatcctgaatggttcctcgaattaacacggcaggtacacaagcgtcgttttgttgctacggggggagcgcttaagaacgttctgcaactggagcgggaaacgaacgaggatttaatcatggcggatgacatggcagagggtacagatgacggttcccgtctggcgttttcgtgggtgccggttgtcaaaaaataccagcgcgatcgggcgaaagataaacgtcagctaagtggcgaggattga

SEQ ID NO: 22228 - DNA, 684 bp, Escherichia coli
atgattaccctgatcttaatgggtattggtatacttatatccacaaggtatctatggtggcgttactcttcttcagttattcttgatgagtttcctgacagcttcttttcattgacgctgttagctgctgaaacgtatgcatggtttgttttattacttggttattttcaggtctgtttcccattgaacagggaaagcatacctttaccagataataaagaagaatggcctgatgtcgatatattcatacctacatataatgaaccctttactgtcgtgaagaatacagtttatggagcgctggctttagactggccaaaagataaattacatgtctggcttcttgatgatggtgccagagacgaattcaggaaatttgctgatgagtcaggtatttgctatgttgcaagagaaacgcatgaacatgcgaaagctggaaatataaacaatgcgcttaaaatagctaacggcgaatttgttgctattttcgattgtgatcatattccttccgtttcttttttaaaaaaaacgatgggctggtttattgccgataaaaaactatcgatgctgcaaacaccacatcattttttctctcccgatccttttgaacgaaacttggggcaatttcggcagaaaccaaatgaaggacatcttttttatggtttaatcggctttgttgaataa

SEQ ID NO: 22229 - DNA, 1341 bp, Escherichia coli
atgtttaagtataaaaaaaaggcagcagggatctgttttttgtattttttatgtgtctctgtaatgacatgttatctgtatactatttacgttaaagatcgagtcaattcggtaaaggtatcgatcatagatagtgggcttgctatagctaatgtgtctgagtatcggcgcttagtatttaataatgtattttatgggttagatatttctccggaagagttgttaaaaaggatacgcaatagttttgctgactttcaaaaaccagaatatatttatgatctaggtccctatatcattagcgatggtaaatgcgccaaagttacaacggaaggggataacttttgtgacggcatagtttcttctatccgtataagtaacatctttgaaagagggattattagtttaaataataaatattatatttattatgctcatcctatttcgaaacgaacaagtttgatatcagtggtagatcctgaacgttatttggctttgataagaaatcagtcaggtgaacgggaaaatatatatgtctcattttatgatatcaatgataatgaaaagaaaatcgcgggtgatgattttttgattaatgatgctgtatttgagaaatcagcgatcactcttgcttattcttatatcccggaagtaatgtttattgttgcctataaaaaagataagtatatttatatgtgcttgttgtttgttttcacatcggcgatttctgcggggttaatatattttcattacattaaattaatgcaaaaaatcataaataagggtaagtcagaaaaagaatctatattatcgaataatcattataatttgcatggaaaaaatctattctttaacgttgaagagattgatgcaattagagaaatatatgattccgggacttacgatgcattgacgcgagcttctgggcgtcgtgtttttgataataatatcaggatgctgagtaaggattttggatatttatgcctgtttgatgtagataaatttaaaaccattaatgacaagtttggtcatttatttggtgatgaagtactaataagacttgttaatcttattaaggatgaattacccctcagcaaaggtgaagtttatcgatttggtggcgatgagttcgctattatttatcatgataaagatataaatcaattatcaagaattttgcacagaatagtccatttctcaataggtggattgaattgtagttgcagtattggtgttgccaatactgacgagtgcatgaataacattgaacggttgaaattactggcagatgaacgattatacaaaagtaagcaaaatggcagagcacaggtaacctggtgttaa

SEQ ID NO: 22230 - DNA, 150 bp, Escherichia coli
atgccagtgatcgctgaaggtgttgaaacagaaagacaggccagagaattacaaaaattaggcttctcccatgttcagggatatttataccagaaaccattaccgttttcagagtggcatatagacagtaaaccgaaaaaaagaaaataa

SEQ ID NO: 22231 - DNA, 279 bp, Escherichia coli
gtgctgactatttgtgatttgttggacgagatagtcccgaaagagaaatcttatcgtgagcaaattacttatgttgctgatcgcccagggcatgatcgccgttatgcgattgatgctgagaagattggtcgcgaattgggatggaaaccacaggaaacgtttgagagtgggattcgtaaaacggtggaatggtatttggctaatgcaaaatgggttgataatgtgaaaagtggtgcctatcaatcgtggattgaacagaactatgagggccgccagtaa

SEQ ID NO: 22232 - DNA, 210 bp, Escherichia coli; identical to SEQ ID NO: 20633

SEQ ID NO: 22233 - DNA, 795 bp, Escherichia coli
atgaccactataaccaaagagcgactgctgacaatcaagcagtggcgcgaaacatacggacctggtagcaacgttgtactgccagcagaagaagcggaagaactggcacgaattgcactggcatcgctggaacgcgaacagattcgccacgagcatgccaaatggtctgactccacatttggctgcgttggccccattggtccactgaaacacctctcaaaagaggctctggaaaccgcagccgaaccagacgatctcagcgagtgggctgatatgcatttcctgttgtgggatgcacagcgccgtgctggcatcagcgatgctgaaattaccgctgctatggaagataaattgaagatcaacatggagcgccagtggcctgaaccaaaagatggtgagcctcgcttgcacattaaagaacccggcaactctccggtaattccggatgatttatccacggtatgcgctgaggcttatcaggttgtaggagttatggcagatgcgcttggtgtattcggtgatgcagcagtacagaaagttctggataacctgtcacagcaaaaacttgttcacagagatgtgctgccgttctcgcttccggtgactccggatggttggataagctgtagtgagcgaatgccccctcaagatgattggattttaatttattcaaagcacggcgagtatatggcaggacaggtacaaggggaatacgtggagttgagcgacggcactttatcgtggttagggaacgccttgttctggatgccgctaccagaaccgcctcaggggtga

SEQ ID NO: 22234 - DNA, 405 bp, Escherichia coli
atgagtgtgccgcaaacaaaagctgaactgcttttagctattgataaaaattttagtaaattaattagttacctcaacacaatcccaccagaaattacttcagataaatcaatggacggacacgccaaaggaacggagatgagtgttcgtgatctcgtttcgtatctgcttggatggaatgctcttgttgtaaagtggatcgcttctgatgctaaaggtctgcctgtcgattttccggaaactggctataaatggaatcagcttggccttcttgctcaaaaattttactcagattacagtgagttaagttatgagttgttagtagctgaacttcagactgtaaaaaatgagattgtgaaccttattaatgatcgtaccgatgatattttgtatggaagaccatga

SEQ ID NO: 22235 - DNA, 261 bp, Escherichia coli
atgttctaccggcactccgcccagttgtccgagggcttcctgcagaccttcagccagagcagagaagctctcaccacccagcacaacccgcatccagctccagtggctccattccagacggaagtgatacaacttatgcgccaacaacttaccggcgatggtgacaactacacctttcagttcagtaaagtccgacagacctcgcagaccgggctgatgtcgctggcggaacatgacctcctgctctgcaccatactgtag

SEQ ID NO: 22236 - DNA, 267 bp, Escherichia coli; identical to SEQ ID NO: 22192

SEQ ID NO: 22237 - DNA, 273 bp, Escherichia coli
atgctggcagtgactgcactgattcctgccgtctggctggtgacagagatctccaccgtgccgtccggctttgtggtcaccgtcgaagcgaccgttgcaccgttgcctgccaacacgctgaccgtctgtccggcaagcacattaccgaacgcatccgtcaccctcacccgcagcatgttcgccgtcgaaccgtctgccactgagccgtccttaatgaccaccagatcagcgatctgcgccgtcctgatatcggcgataaacgtcacgttctga

SEQ ID NO: 22238 - DNA, 354 bp, Escherichia coli
gtggctgatttcgataacctgttcgatgctgccattgcccgcgccgatgaaacgatacgcgggtacatgggaacgtcagccaccatgacatccggtgagcagtccggtgcagtaatacgtggtgtttttgatgaccctgaaaatatcagctatgccggacagggcgtgcgcgttgaaggctccagcccgtccctgtttgtccggactgatgaggtgcggcagctgcggcgtggagacacgctgaccatcggtgaggaaaacttctggatagaccgggtatcgccggatgatggcggaagctgtcatctctggcttgggcgtggcgttccgcctgccgttaaccgtcgccgttga

SEQ ID NO: 22239 - DNA, 540 bp, Escherichia coli
gtgtttttcagatccgcaccgagacacagcacaggcggaacatttttaaagcccggaggcaaagccagcgcatccggcacatacccccgcgaacggcgcagcatttcgccgctttcgcgcaccaccgaatcatccatccgctgcacgatgtcgcggttatgtatcaagaatccgtcggcaatgccctgcaaatccgccagcgcttgttcgttgctgatagccggtggtttaccgctcaggttgccagaggtcatcaccagcgggcattgcagttcctgtaacagcaaatgctggagcgggttcgcaggcaacattaccccgacttcgttaaggtcaggggcgatatcatcacaaagctcaggtacatattttttatccaccagcacaatcggcgcggcgggcgtggtaagcaactggcgcgcagcgtctggtaaaccgtcagccactggcaacatgaccgccagcggtttcgccgggcgatgtttgcgcgcccgcagtgtcgccaccgcgttactgttacgtgcatcgcaggcaagatga

SEQ ID NO: 22240 - DNA, 1050 bp, Escherichia coli
atggcaggagaaaatgggccagcacgccctgatatagcgacaaaaccgccgttaccggcggatgtgcgcaactgcaatttctatgtgctgatggaggcgctgtaccgtcggcatggcgcgccgggccaggacatttccctgcgtaccgagcctgcccgggagatcgtgcgtttcagctctgacgccagtatcagttttccgggtacggacctgagtgcgctttcccgtagccagaatggacagtatgtactgcaaacccggttcctgggtttttccggcagccagtcgccgctaccgggctattatctggatcagatggcgcaggagtccgcacagaacgaagacggcctgaaagaatttctcgatctattcagccaccgctggacacagtttgcctatcatgcctggcgcaaataccgctactacatctgctttcgtagcggcggtactgacaccttttcacagcgcatgtacgcactggtcgggctgggtaatcagagcgtgcgtgacaggcttgccattaaccacagcaaaatgctggcctacgccggaattctggcaacaccaggccgcgcgccggaggttatctgtaatctggtgtcgcactgttttgatttgccggatgtcaccattgaacgctggcaactgcgtaaagtcgccattgatccggcacaccagaaccggctgggtgtacgtaatccgaaaggaaaaacggctggacatattccgggacgctccatactcggcgttaattttaccctcggcgcacgggtgccggatcgcagcggaaaattcctgttgcagattggcggcctgtcgcgggagcgttatctctcatttttacccgatggcgaaaatcacctgccgctgaccatgttcctttcctttattctgcgcgaccagtttgcctgggatttacggctgtgcctggcgccacagcaggctaaagggatgcgccttggcgatccggccagctcccgcctcggcagaaccagctttattggtcagccgaaagtaccgcccgccatcacaatccgaatcagggaataa

SEQ ID NO: 22241 - DNA, 612 bp, Escherichia coli
atgaacagtcaggccatgccggaacatctgtttgcccaggtagtaaccgatgtccaggccgtagagcaactactccaggaacagggatacgaaccgggcgtcattgtttcgttccgttacattctctgcacgtttattgatgaagcggcgctgggcaacggctggtccaacaaaaacgaatggatcaaacagtcgctgctggttcattttcataacgaagcctggggcggcgagaaagtgtttatcctgctcgaacgcctgatccgggagccggtacgttaccaggatctgctggaatttttatacctctgtttttcgctcggctttcgcgggcgctacaaggttgccattcagcaacaggatgaatttgagcggatctaccagcgcctgcaccatgccctgcacaaactgcgcggtgacgcgccatttccgctacttcatcagaagaacaacatacagggtgggcgttatcagttaatccgacgactgaccatcaagcatgtactgtgcggcggtcttgttgtgctgaccgtattttatctgttttatctgctgcgtctggacagccagacacaggatattctgcatcagctcaataaattactccgataa

SEQ ID NO: 22242 - DNA, 336 bp, Escherichia coli
atgttgcttagggataggtatatttttgtcacgcaaaatgtaattggaacagaattaacatctatgacgtcgctggcaaacaagcttaataaatttgatgtcggctgggaagggaatgcagtgagcgaatctagtttatatgccctcagtaatactggttcatggggagcaatgatgtgggattctggaagtaaagtagggcattgggtacttgttaagggtgttgatgatgctgggaatgtgataatatatgatccatatcaagggagtcgatatctgatgactgaacaggaatttaaggaggtatggaatgggcatagtgtttacaaaccataa

SEQ ID NO: 22243 - DNA, 450 bp, Escherichia coli
gtggcgaccgtcatcacttccggtcagcacgtcgtgcgttttccccttgttgtcagttacgcggagataatccccggagaaagtcgacacacggctgtaagccacacccaccatcgcatacgcgctgaaccattcattcacgcgtacagacggccccgccattacgctgaaccagcggttacgcacggaatcttcatgccagcgggtatcgctgtaatgcgttttttgttcatcttcagcgttggcataactgaaagacgtaatcagccccagcgcgtccgtaaactcataacggtatttcacgttaatcccgttcagattatcgctgccgggagcgttcgtacgggcatgaagataccccgcgctcagtgtggactgatgttcagacgcccatgcaggcgcaccggatacggacagacagatggctgcggacaaaatggctgcacataa

SEQ ID NO: 22244 - DNA, 681 bp, Escherichia coli
atggcaacgacgaacgcattctgtctggcgtcaccgccactggcacgcatctgccttcacggggatttgcaacgatttggccgccgcctcagcctgtatgtgaacacggcagcggaagccatccgtgccctgtcgttacaggtgccgggctttcgccgtcagatgaacgaaggctggtaccagatacgtattgccggtgatgacacggcaccggaggcggtgtacgcccgtcttcacgaacagctgggtgagggaacggtcatccacattgtgccgcgactggccggagccggaaagggcggactgcagattgtgctgggggcggcagccatcgtgggctctttcttcacggccggtgcctcgatggcgttatggggttcagccctggcagccggtggtttttctgccaccacgatgctgttttcactgggggccagcatgatactgggcggtgtggcccagatgctggccccgaaggcaaaaacaccggattaccgcgtaacggataacggcagacagaacacgtacttttcctcgctggataacatgattgcccaggggaacccgatgccggtgccttacggggaaatgctggttggctcccgccgtatatcccaggacatcagcacccgtgatgaaggcgggggcggaaaggtcgtggttatcgggcggcaggggtaa

SEQ ID NO: 22245 - DNA, 243 bp, Escherichia coli
gtgaaggatacggaagcagaaaaactgttccggatccgggaggcggaagaaacaaaaaacaacctgatgcaggtagccagtgagcatattgcgccgcttcaggatgctgcagatctggaaattgcaacggaggaagaaacctcattgctggaagcctggaaaaagtatcgggtgttgctgaaccgtgttgatacatcaactgcacctgatattgagtggcctacgaaccctgtcagggagtaa

SEQ ID NO: 22246 - DNA, 510 bp, Escherichia coli
gtggctacgcagactgaagttgccaggcatttaagtctgaccgatcgccagcttcgcagattgcagaaattgccgggtgccccgatatcgaataagcgagggcaactggatctggatgcctggcgcgatttttacatatcgtatctgagaagaagtaaaaacgatgtgcctgatggtgatagcgaagacgactatgaggagaaattgcttattgccagatgggaactgacagcagaacaggctgttacacagcagttaaaaaatgaggtgtcaaaaggaaaacttattgataccgggttctgtatttttgctctcagcaagctggcaatggcgttatccagtacgcttgattccatccctttatccatgcagcgacagtttcctgatttaacaccgcgccatcttgaccatctgaaaacccttattgcgaagggggcaaatcagtgtgcgcgggcgggggataaattaccggatttactcgatgaatatatcagagcaacaactgaataa

SEQ ID NO: 22247 - DNA, 1362 bp, Escherichia coli; identical to SEQ ID NO: 5764

SEQ ID NO: 22248 - DNA, 315 bp, Escherichia coli
atgacaataagtattgtttcaccttccgcagcggctgtaaagccccgccgtcatccccgtttcagacgcgaagacatccccgcgccggaaattgaccccgtgctgaaagccttcgggcgacacatagcccggagttttcaccgggggcgtggtgtacacatccccgcgccggaaattgaccccgtgctgaaagccttcgggcgacacatagcccggagttttcaccgggggcgtggtgtacacatccccgccatgaaaaacacggctttcgggcaggtgctccgcacactcgaactgaaacgcgcttttaactga

SEQ ID NO: 22249 - DNA, 351 bp, Escherichia coli; identical to SEQ ID NO: 6245

SEQ ID NO: 22250 - DNA, 426 bp, Escherichia coli; identical to SEQ ID NO: 6184

SEQ ID NO: 22251 - DNA, 324 bp, Escherichia coli
gtggaaaaagcccgcccgatcctggcggctgcaccactggcggatgccgggccctcacttcgtgatcagatcatggccctggatgaggcaaaaggggcagaagcgcaggctgaaaaactggcggcctgcccgggaatgaccgtggagaacgcccgggctgtgctggctgcgggatcaggtaaggccgaaccggtctctgcatccacaaccgccctgtttgaacatttcatggcgaatcattcaccggcagcggtgcggggtggcgtgtcacagacgtcagcagacggtgatgcggacgtgaaaatgctcatggccatgccatga

SEQ ID NO: 22252 - DNA, 369 bp, Escherichia coli; identical to SEQ ID NO: 20457

SEQ ID NO: 22253 - DNA, 186 bp, Escherichia coli
atgcgaaagctgaaaatgaaactcttcgcgctgacgttgccgctggtcgtaagcgcctgcgtatcaacgccacctgtccaggtcccgtgcgtgaagccaccggcaccgcccgcgtggataatgcaaccggcccccaactggcagacaccgttacacgggattatttcaccctcagagagcggctga

SEQ ID NO: 22254 - DNA, 714 bp, Escherichia coli
ttggaggagcaggcgatttcattagttggggaggacttataccaagcattgataaagggttatacggagaagcagtggggaagaagtgcaaaagaattgcctgcatttattattaagcgaatcccagtgagatttacgtttgataacaattatttttccgatcgctatcaaggtattccggtgggaggctacactaagcttattgaaaaaatgcttgaaggtgtggacgtaaaattaggcattgattttttgaaagacaaagattctctagcgagtaaagcccatagaatcatctacactggacccattgatcagtacttcgactataggtttggagcgttagaatatcgctctttaaaatttgagacggaacgccatgaatttccaaacttccaagggaatgcagtaataaatttcactgatgctaatgtaccatataccagaataattgagcataaacattttgactatgttgagacaaagcatacggttgttacaaaagaatatccattagagtggaaagttggcgacgaaccctactatccagttaatgataataaaaacatggagctttttaagaaatatagagagttagctagcagagaagacaaggttatatttggcgggcgtttggccgagtataaatattatgatatgcatcaagtgatatctgccgctctttatcaagtgaaaaatataatgagtacggattaa

SEQ ID NO: 22255 - DNA, 819 bp, Escherichia coli
atgatctatcttgtaattagtgtctttctcattacagcatttatctgtttatatcttaagaaggatatattttatccagccgtatgcgttaatatcatcttcgcactggtcttattgggatatgaaataacgtcagatatatatgcttttcagttaaatgacgctacgttgatttttctactttgcaatgttttgacatttaccctgtcatgtttattgacggaaagtgtattagatataaatatcagaaaagtcaataatgctatttatagcataccatcgaagaaagtgcataatgtaggcttgttagttatttctttttcgatgatatatatatgcatgaggttaagtaactaccagttcgggactagcttacttagctatatgaatttgataagagatgctgatgttgaagacacatcaagaaatttctcagcatacatgcagccaatcattctaactacttttgctttatttatttggtctaaaaaatttactaatacaaaggtaagtaaaacatttactttacttgtttttattgtattcatctttgcaattatactgaatactggtaagcaaattgtctttatggttatcatctcttatgcattcatcgtaggtgttaatagagtaaaacattatgtttatcttattacagctgtaggtgttctattctccttgtatatgctctttttacgtggactgcctggggggatggcatattatctatccatgtatttggtcagccctataatcgcgtttcaggagttttattttactctgccagttctcatgtcttttggttttttgaaaggctga

SEQ ID NO: 22256 - DNA, 252 bp, Escherichia coli; identical to SEQ ID NO: 20442

SEQ ID NO: 22257 - DNA, 405 bp, Escherichia coli; identical to SEQ ID NO: 20458

SEQ ID NO: 22258 - DNA, 294 bp, Escherichia coli
atggatgttgctgccgggttatgtgaagggaacgaaccgttgccggaaaagcgccccataattttagaggcgcaggatgtgttgataatctacaaaggaaagctaccgggaagaattactgatgctctgaagatgccgccgtcaacactgcggtcagaaaaagatgatgttgaatcacgtattgaaaaactggagcgctatatcgctgaattgaaaaaaagcgccccaacaaaaaatgaggtgcttgcagcagatgaaatgaaagaagctattcttgatcgcgcgggcatctaa

SEQ ID NO: 22259 - DNA, 273 bp, Escherichia coli
ttgctgaatatacgcgagagcgtactgttgcccgggtctatgtctgaaatgcatttttttttactgataggtatttcttctattcacagtgacagggtcattctggctatgaaggactatctggtaggtgggcactcccgtaaggaggtctgcgagaaataccagatgaataatgggtatttcagtacaacactggggagacttatacggctgaatgctcttgcagcaaggcttgcaccttattatacagatgagtcgtcggcatttgactaa

SEQ ID NO: 22260 - DNA, 1104 bp, Escherichia coli; identical to SEQ ID NO: 5395

SEQ ID NO: 22261 - DNA, 381 bp, Escherichia coli; identical to SEQ ID NO: 10432

SEQ ID NO: 22262 - DNA, 348 bp, Escherichia coli
atggtgacgaaaaccatcactgaacagcgtgcggaagtacgtatttttgccggtaatgatccggctcacaccgccacaggcagcagcgggatttcctcggcaacaccggcactgacacccctgatgctggatggggccaccgggaaactggttgtctgggatggacagaaagccggtagtgcggttggcatactggtactgccgcttgaaggcacagaggcggtgctgacgtattacaagtcggggacctttgcgacggaggcaatccgctggcctgaaagtgtggatgaacacaaaaaggccaacgcctttaccggcagtgccctgagtcacgcggcgctgccgtaa

SEQ ID NO: 22263 - DNA, 1506 bp, Escherichia coli
gtgagacgtaatctttcacacattattgccgcagcattcaatgaaccgctgcttctggagcccgcctatgcgcgggttttcttttgcgcgctcgggcgcgagatgggggcagcaagtctttcggtaccgcaacagcaggtacagcttgatgcacccgggatgctggctgaaacggacgagtacatggccggaggtaaacgaccggcccgtgtttaccgggtggtgaacggtattgcggtactgccggtgaccggcacgctggtgcaccggctgggggggatgcggccattttccggaatgactggctatgacggcattgtcgcctgtcttcagcaggcaatggcagatagccaggtgcggggcatactgctggacattgacagtccgggcgggcaggccgccggcgcgtttgactgcgctgacatgatttaccgcctccggcagcagaagccggtctgggcactgtgtaatgacacggcctgttctgcagccatgctgctggcgtcggcctgctcccgacggctggttacccagacatcccgtatcggctccattggcgtgatgatgagccatgtcagctatgccggtcatctggcgcaggccggtgtggatatcacgctgatttactcaggagcgcacaaggtggatggcaatcagtttgaagcgttgccggcagaggttcgccaggacatgcagcagcggattgatgcggcgcgccggatgtttgccgaaaaagtggcgatgtataccggtctgtctgttgatgcggtcacgggaacagaggctgccgtttttgaaggtcagtccggcattgaggccgggctggcggatgaattaatcaatgcgtcggatgccatcagtgtgatggccacggcgctgaacagtaatgtcagaggaggcactatgccgcaattaactgcaacggaagccgccgtgcaggagaaccagcgagtgatggggatcctgacatgccaggaagcgaaaggacgtgaacagcttgccacgatgctggcagggcaacagggcatgagcgttgaacaggcccgggcgattctggccgcggcggcaccgcagcagccggtggcatccgcacagagtgaagccgatcgcattatggcgtgtgaagaagcgaacggtcgtgaacaactggcggcaacgctggcggcgatgccggagatgacggtggaaaaagcccgcccgatcctggctgcttcaccgcaggcgaatgccggaccatcactccgtgatcagatcatggcactggatgaggcaaaaggggcagaagcgcaggctgaacagctggctgcctgcccgggaatgactgtggagagcgcccgggctgtgctggctgcgggatcaggtaaggcagaaccggtctctgcatccacaaccgccctgtttgaacatttcatggcgaaccattcaccggctgcggtccaggggggcgtgtcacaggcgtcagaagacggtgatgcggacgtgaaaatgctcatggccatgccatga

SEQ ID NO: 22264 - DNA, 213 bp, Escherichia coli; identical to SEQ ID NO: 6096

SEQ ID NO: 22265 - DNA, 1041 bp, Escherichia coli
atgagtatcgatgcactacgatgggctaaaaaggtgaaaaccggcagttcatccagtaagtctgtattgacctggcttgctgatatgtgcggtgccgatttgtgtgcatacccgtctgtatctgcactggcagaagtaacggaactaaacaaaaagactgtgcaggacagcttacgacacctgatggagattgggttaattgttgataccggtgagagaaaaggcagaacaaagcaaattgtggtgtaccgacttatcggtgtagaagaaagtgttgccgagcctgaatacacccaaaaacgggagtctttaaaggtgggtaaaattggtgctgttaataaaaacagtaccgaaaatggttatgtttcagcacaaaacagacctaaaaacggaactcttagctgcatggaaaataaccaaagacacccaaattttccatcaaagacacccaaaaacggatcacggaacccaaaggaacccaaagatctaaaccccacacataacgcacgcgagagtgctccgaccagtgagcaggaagttttgtcgttacaggcagcaccccttgtattcctggatggcctgagcgaacccatcggaaaatttccgatgaccgatagctggtatccgtcacgggattttcgacgacgggctgcgttgtgggggatggctttgccggagacagaatttacacctgctgaacttgccgccttccgggactactgggcagcggaggggaaagtgtttacgcagattcagtgggagcagaaattcgcccgtcacgtaaatcacgtcagggcgcaggttaaaccagtcagcaagggggtaaaccatgcagcagcaccaggtggcaccgcatcacgggcagttcaggaaattcgggcagcacgtgagcagtgggaacgtgaaaacggatttatcagcgacggaaacggtctggaagctgtgggaactcatgggggaggtttattcgaaccgctggacccagaagaacggggccgcaccttcgaagctctggattgcacagattggcgcgatgactga

SEQ ID NO: 22266 - DNA, 486 bp, Escherichia coli
atggtgtcgcactggttcagtgccagtcagtggcagctaccgaacgaaagcgattatctgaaattacagtcgctgtttgcccgggtggcagaagagaaacatcagcgcggtgaactggaaaagccccaccaccagctggtggatacgtatacgtcactgaaccggcagtatgtggagctgcagagtgaatataagcatctgcggcggtattttggtgtgacggcgcaggtgccgtacacggatgtgtggacacataaaccggtgcagttctatcccgggaaacatccgtgcgaaaaaccggcagaaatgctgcagcagataatcagcgcaagtagccgtcctggtgatctggttgcggattttttcatggggtcgggttcaacggtaaaagcggcgatggcactggggcgtcgtgcgattggtgttgagctggagaccggacgttttgagcagacagtcagggaagttcaggatttaatcgtttga

SEQ ID NO: 22267 - DNA, 288 bp, Escherichia coli
atggggatccgtgcgcagttcacctccggagcacaacgtggcggcgaagttcagggggtttttgacgatccggagtcgctgggttttgccggtggcggggtccgtattgaaggaagcagcccgtcattatttgtgcggacggatacggtgcgtgccgtgcggcgtggtgacacgctgaccattaacggcgagatgttctgggtggatcgtgtttctccggatgacgggggaagctgttatctctggctcaaccgtgggcaaccacccgctgttaaccggcgacgataa

SEQ ID NO: 22268 - DNA, 378 bp, Escherichia coli
gtgaatgtggggagcaaaaaggaaggtggtcatgaccagaaagtgacggtagcgaacgatcagcatctcacgataaaaaatgaccggcacaaggttgtaaataacaaccagacaagcaaggtgacgggaactgataccgaagaagtcgtcaaaaaacagagtattaaaataggtgataattacgaactgaaagttgagcatggtacaaatatcatatctggggacagtattgagctaatttgtgggcagggagagagcgggacttgttccataaaactggagaaaacaggaaagataataatacgggggacggagtttctatttgaggctaccggtcctgtagatattaaaggaaaagatattcatctgaacggatag

SEQ ID NO: 22269 - DNA, 588 bp, Escherichia coli; identical to SEQ ID NO: 20439

SEQ ID NO: 22270 - DNA, 426 bp, Escherichia coli; identical to SEQ ID NO: 6184

SEQ ID NO: 22271 - DNA, 330 bp, Escherichia coli; identical to SEQ ID NO: 8147

SEQ ID NO: 22272 - DNA, 405 bp, Escherichia coli; identical to SEQ ID NO: 20458

SEQ ID NO: 22273 - DNA, 489 bp, Escherichia coli
atgaagaaaaaatacgaactggttgttaaagggataaataattacccggataagattactgttactgtggtactggaaattggtgggtatccgtcactgttgttgccaaatgtggcgattagtcttgaccgtactgaaggtgccacgctggagttttacgaagctgaggcgaaaaagcaggcgaagcagtttttcatggatgttgctgccgggttatgtgaagggaacgaaccgttgccggaaaagcgccccataattttagaggcgcaggatgtgttgataatctacaaaggaaagctaccgggaagaattactgatgctctgaagatgccgccgtcaacactgcggtcagaaaaagatgatgttgaatcacgtattgaaaaactggagcgctatatcgctgaattgaaaaaaagcgccccaacaaaaaatgaggtgcttgcagcagatgaaatgaaagaagctattcttgatcgcgcgggcatctaa

SEQ ID NO: 22274 - DNA, 171 bp, Escherichia coli
atgacaagggaaattgacttcgaaaaagccatgagacatgtacgagcaacccttgattttgaaggcttagtgcttacaaaagaagaggaagagcttttgaaaaggcggtttcatggagaaattacagaagaggaatacatacaaaaagcgctcgaactggcaaggtcttga

SEQ ID NO: 22275 - DNA, 432 bp, Escherichia coli
atgcgaacaccacatcttgtgccactcagcaaacaggctgtagccatactgacagaacttcagacatgggctggtgaaaatggtctgatatttacgggtgcacatgacccgcgtaaaccaatcagtgaaaatactgtaaataaggccctgagggtgatggggtatgacacaacccaggaagtctgtggccatggattccgggcgatggcgtgcagtgcattgattgaatcaggtttgtggtcccgcgatgctgtggaacgtcagatgagccatcaggagcgtaatggtgtacgtgctgcgtatatccataaagcagaacatctggaagaacggcgactgatgttgcaatggtgggccgattttctggatgcgaaccgggagaagggtatcagtccgtttgaatatgcaaagattaacaatccattaaaatag

SEQ ID NO: 22276 - DNA, 489 bp, Escherichia coli
atgaaactggccctgacgctggaagctgacagcgttaacgtacaggcactgaacatggggcgaattgtcgttgacgtcgatggtgttgagcttgccgaactgattaacgtggtctgcgataatggctactcccttcgtgttgttgatgaatctgaccggacctcaacagacagcatccccccctctgctgccctgagcggtatacgctgtagtaccgcgcatatcacggaaacagacaacgcctggctgtactcgctgtcgcatcagacgaatgacaccggcgaatcagaatggattcatttcacaggtagcggatatctgttacgtaccggtgcgtggtcatacccggttctgcggcttaaacgcctggggctgtcaaaaacgttccgccgtctggttgtcacacttacccgacgttatggcgtcagtctcattcatctggatgccagcgccgaatgtctgccggatttacccactttcgactggtaa

SEQ ID NO: 22277 - DNA, 645 bp, Escherichia coli
atgagcagaattatcaccaccaccgtgtatacactgcatgagctatcctccaccgcacaggaaaaagcccgcgactggtaccgtcagcatcatgctgacagcaactggtatgaaaacgtgtatgaagacttcagggaggtctgtggcattttcggaattgacctccgccagcgcgttttccggctcagcaacggcaggtttatggaagagccgtgcatctggttcagcggattctgcggccagggggacggagcctgttttgaaggacgctggcactggcagccagcggcaccccggaaaatcagggaatatgccccgcagaaccgtgagcttcatcgtatctcggatgccctgcaggtggtgcagaaacgtaacttctggcaactgcagactgaaatccaccaccggggacgcgactgccatccgtacagcatggatatcacggttacccggaacagtccgactggtcaggcaatgacaaccgatgcggaagccgcagtcagcgaagccctgcgcgacctggccttctggctgtaccgtcaactggaaaacgagtacgactggctgacctcagatgccgctgtggatgaggccctgctcatcaacgaatacacctttaccgaagccggtctacgcgccggctga

SEQ ID NO: 22278 - DNA, 384 bp, Escherichia coli
atgtacgcaaaatcttttctcgcacttgatggcaacggacgtctgatcggtgcccgtaccgcacagactgctccttatgcccactacacctgccacctttgcggcagtgcactcagataccacccgcaatacgacaccgaacggccctggtttgaacacactgacgacgggctgacggagcacgcgcagcaatgtccttatgtcaggccggaacgcagagaaatacggttgattaaacgtctgcagcaattcgtcccggatgccttacccgtggtacgtaaagccagctggtactgcaggcaatgtcaccacgattattatggggagcagtactgcacacactgccagaccgggcgtttcagtgaggagggggtagcagaatga

SEQ ID NO: 22279 - DNA, 255 bp, Escherichia coli
atgacgtcaaatcatcatgccccttatgacctgggctacacacgtgctacaatgggcagaacaaagggcagcgaagccgcgaggctaagccaatcccacaaatctgttctcagttcggatcgcagtctgcaactcgactgcgtgaagctggaatcgctagtaatcgcggatcagcatgccgcggtgaatacgttcccgggccttgtacacaccgcccgtcacaccacgagagtttgtaacacccgaagtcggtga

SEQ ID NO: 22280 - DNA, 396 bp, Escherichia coli
atgctgcagggcgtaatcccgcaaccggtaataatggaccgtcatggcataattctccgtacgacaggcatgatggctgtacgttatcagacaggcggcaataccggcggcttccgggctcatttcagcgcggttaccgttcatggcattgaacagtacccatgtttcgtcatcatcatcatccggttcgggggccataaatgccccgccgttgttcagggtgtacagattccagataccaccgcagtagttttcgcacagacggtccatccagccgaagacacggggctccagggtgacccactgtggaatgaggccaaaatgctgcggccagaagctgatgcgctgttcatcagggacgggagtggcaaccaactgagactggttattccctga

SEQ ID NO: 22281 - DNA, 366 bp, Escherichia coli; identical to SEQ ID NO: 17674

SEQ ID NO: 22282 - DNA, 396 bp, Escherichia coli
atgttttatttgacaaaagctgtgctgccgcatttgaaaaaaggcagctcaatcatcaatacgacctcgattacggcttatgccggcaatgaaaggctgatcgattattcttcgacgaaaggagcgattacatcatttacgcgttcgctcgctttgtcgcttgtcgatcagggcattcgtgtgaacggtgtggcaccggggccgatttggacgccgcttataccgtcgacgtttactgagagagaggtcgaaatattcggttcaacaacgccgatggaacggccgggacagcctgctgaagtggcgccgagctatctgtttctagccagcgacgattcttcctacatgacgggccaggtgctccatgtcaacggcggaacgattattaacggataa

SEQ ID NO: 22283 - DNA, 318 bp, Escherichia coli; identical to SEQ ID NO: 20468

SEQ ID NO: 22284 - DNA, 315 bp, Escherichia coli; identical to SEQ ID NO: 20469

SEQ ID NO: 22285 - DNA, 330 bp, Escherichia coli
atgaaaaccttccgctggaaagtgaaacccggtatggatgtggcttcggctccttccgtcaggaaggtgcgctttggtgatggctattcccagcgcgcgcctgccgggctgaatgccaacctgaaaacgtacagcgtgacgatttctgtcccccgttgggaggccacggcgttggaatcgtttctggcagagcacggaggctggaaagcctttctgtggacgccgccttatgactggcggcagataaaggtgacctgcgcaaaatggtcgtcgcgggtcagtatgttgcgtgttgagttcagcgcagagtttgaacaggtggtgaactga

SEQ ID NO: 22286 - DNA, 330 bp, Escherichia coli
atgaagaccttccgctggaaagtgaaacccggtatggatgtggcttcggccccttccgtaagaaaggtgcgctttggtgatggctattcccagcgtgcgcctgccgggctgaacgctgacctgaaaacgtacagcgtgacgctttctgtctcccgcgaggaggccacggcacttgagtcgtttctggctgagcacgggggctggaaatcctttctgtggacgccgccttatgagtggcggcagataaaggtgacctgcgcaaaatggtcgtcgcgggtcagtatgctgcgtgttgagttcagcgcagagtttgaacaggtggtgaactga

SEQ ID NO: 22287 - DNA, 273 bp, Escherichia coli
ttgaaaattattcgaaatcaagagacagcgacaaccgtgttggaaaatgaatgcatcgtcctaaacctggacaatgggcagtatttcggattggaaggggctttaaaagagctgtggatcgaaattgaaaatgagcgaaaggataaaaaagatattctgatcaagtggcaatcggcgttcgatcagacggaagaagaactatcagcgatattaaatgaggcgatacaggaactgacacatcataagctcattaaaatagaggataaaagctga

SEQ ID NO: 22288 - DNA, 186 bp, Escherichia coli
atgggcagacgtcgaagcatcatgtcagaggaattcaaaaatgaattggctaaagatcttggattttacgatacggtaaagaccgagggctggggcggaattcgggccagagacgccggcaacatggtgaaaagggccatcgaattagccgaacagcatatggctcaaaatcagcaaaatcattaa

SEQ ID NO: 22289 - DNA, 129 bp, Escherichia coli
atggtctttgacgatttcgaccttttccacttccgtatagccggcgatcgtgatgatctccatgcggtctctgagcgggccggggattgtggccaggttgttcgcggttgcgataaacaaaacctttga

SEQ ID NO: 22290 - DNA, 132 bp, Escherichia coli
atgaatgaattacagaaacggcagaacctagagcaggaaaatgaaaatctcaaaaaagagctgcaagaagagcggatcggcaattcacaggcggaagatgaagcgacagaagaggaagtgaaaaacaaataa

SEQ ID NO: 22291 - DNA, 153 bp, Escherichia coli
atgaatcgcttcgacgactttcgtttcctcgaaaggcttgacgatgaagtccttggctccggcttcgatcacctcaacgacgatccgcttttgccgcatggccgtacacatgatcactttcactttcgggttcagctggatcatatcctttaa

SEQ ID NO: 22292 - DNA, 144 bp, Escherichia coli; identical to SEQ ID NO: 9158

SEQ ID NO: 22293 - DNA, 516 bp, Escherichia coli
atgaagatattcattagtttatttttgtttataatatcaacaaattcttttgctgatgatatcactcatgccggagtggttcgtattgaagggttaattaccgaaaaaacctgcattatttctgatgagtcaaaaaattttacagttaatatgccagacgtacccagtagttcggtaaggagtgcaggggatgttactgaaaaggtttatttttccataacgttaacccgctgtggtagtgatgttggcaacgcgtatataaagtttaccggcaatacagtttctgaagatgccagtttatataagctggaagatggctcggtagaggggcttgcacttacgatttttgataagaacaaaggcagtattagtaatgatgttaaaagcatggttttttcacttacatcatcagttgataatatattgcatttttttgcggcttacaaagcattaaaaaataatgtccaaccaggggatgcaaatgcgtcagtatcgtttattgtcacctatgattaa

SEQ ID NO: 22294 - DNA, 429 bp, Escherichia coli; identical to SEQ ID NO: 7597

SEQ ID NO: 22295 - DNA, 222 bp, Escherichia coli; identical to SEQ ID NO: 6137

SEQ ID NO: 22296 - DNA, 390 bp, Escherichia coli
atgagtacagagttaaatagcggtactgtcggtggttttggtcacatgggaccaaatgacccctacaatgatggtcatagcggctctggaagttcgggaggtagttttaacggtggtggtaatggtggccatgataatagtagtggttcatcttatactgcatcctttggtctcatcactggccgacacccgataactgtcccaggtacgaagaatattaattctgtcgatctttctgctgtcattaataacattatacatcatgaaggtgcacgcaataacatgtacctagatactgcgaacaatgtaagagtgggagtgacgggcactggctggcaatgtctagcaacggcaggcatttcggctgagggtaaaagaactttccgctaa

SEQ ID NO: 22297 - DNA, 441 bp, Escherichia coli
atggcatggcacacagttcaagagacactgaaattaacaggaaagtcgcgctcgcaattatatcgtgacatggctaaaggccttgtcagctatcgcacaggaaaaaatgatcgccgggagttcgagaccagtgaactgattcgggcctatggcgagctgcgcacttctgagacaccaaaaaggcacaaggagggacactccaaatctgtcgttagccaggcggaaaatgctcagctagacgtcattcagcagaaactggacgctctgcagcagactgttaccctaatgcttgaagacaagatggcgcgggaagcagaaaaccgcctgcgaaatgaggagagggaacaactacaggccgaaattagccgtctggctgacgcgctggcacaggaaaaaaagcggggattctggtcgcggctgtttcgctccggttcagagtaa

SEQ ID NO: 22298 - DNA, 906 bp, Escherichia coli; identical to SEQ ID NO: 9037

SEQ ID NO: 22299 - DNA, 1071 bp, Escherichia coli
atgagtacagaaatgaaaacggggctggtgctgtccggtggcggggcggtgggcgcttatcaggcgggagtggttaaggcactggcagagtgtggtacacagatcagcatggtttcaggggccagcattggcgcattcaatggtgccattatcgcggcctctcccgatctgtcagaagctgccgtacgcctggaggcgctctgggatcatctggggaataatcaggtgctgtcggtaaacagattggtttacttttcattgctgaaaaaactgctcccggccatgaacctctgccagctccccggacgtgcgggcgcactgcttacgacgcttcttcgccatatatcgatactcaacgggtttgacaatctgatgactcagccgttgttgtcagatgggcccctgacagtgctgatggatcattatcttgatactgatgatctggctgacgggctaccgttgtatgtgtcgctgtaccccacggaagggggaatgcaggatattatcgactgcattcgtgctgaactgggtaccggaactacaaaaaactccgtttttcagcatatccagagcctgccccacgggcagcagaaagaagccttactggcgtcagccgcgctgcccctgctgttccgtccccgtgaggtacagggaaaaatgtacggtgatggtggtatgggcggatggcaaaatatgcaggggaatacccctgtgacgccactggtggatgccggatgcaatatggtgattgtgtcgcatctgagtgacggttctttatgggatcgccaggcttttccggacaccacaatccttgaaatccgtccccggaaaaagctgaaacaaacaggggaagaaggcaaaagtggcggtctgctcagttttacatcggcacatatcgacacctggcgtcagcagggctatgaagacacgatgctggcgatggagcatatccggaaaccactggaggcgcgtcaggcactgacccggtcagaggcggtgttgcagaaaagtctggagaaaacggaagaggcagatttggcactgagaaacgcgatggcccggattaaataa

SEQ ID NO: 22300 - DNA, 2520 bp, Escherichia coli
atgcgtggaatgaaagacagaataccttttgcagtcaacaatattacctgtgtgatattgttgtctctgttttgtaacgcagccagtgccgttgagtttaatacagatgtacttgacgcagcggacaagaaaaatattgacttcacccgtttttcagaagccggttatgttctgccggggcaatatcttctggatgtgattgttaacgggcaaagtatttctcccgcatcgttacagatttcatttgttgaacctcagtcgtcaggagataaggcagaaaaaaaattgccacaggcctgtctgacatcagatatggtcagactgatggggttaacagcagaatctctggataaagttgtttactggcatgatggtcagtgtgcggattttcatgggttgccgggagtggatattcgtcctgataccggagcgggcgtattacgcatcaatatgccgcaggcctggcttgagtattctgatgccacctggctgcctccctcacgctgggacgacggcattcccggactgatgctggattataacctcaacgggacggtttcccgtaattatcagggaggagactctcatcagttcagttataacgggactgtgggggggaatctggggccctggcgcctgcgggctgactatcagggaagccaggagcagagccgctacaacggggaaaaaacgacaaacagaaatttcacatggagtcgcttttatctgttccgtgccattccccggtggcgggcaaacctgacgctgggcgagaataatatcaactcagatatattccggtcatggagttatacgggagccagcctggaaagcgatgaccggatgctgccgcccagactgcgaggctatgcaccgcagattaccgggattgcggagactaatgcccgtgttgtggtgtcgcagcagggacgggtgctgtacgactctatggtccccgcagggccattcagtattcaggacctggacagttcagttcgcggacgtcttgatgttgaggttattgaacagaacggacggaagaaaacctttcaggtcgatacggcctcggttccttatctgacgcgtccgggacaggtccggtacaaacttgtctccggtcgctcccgcggatacgggcatgagaccgaagggcctgtatttgcaaccggagaggcgtcctgggggctcagtaaccagtggtcgctgtatggcggggctgtgcttgccggtgattataatgcactggcagccggtgccggctgggacctgggtgtgccggggaccctttccgctgatatcacgcagtcagtagcccgtattgagggagagagaacgtttcagggaaaatcctggcgtcttagctactccaaacggtttgataatgcggatgccgacattacgttcgccgggtatcgtttctcagagcgaaactatatgaccatggagcagtacctgaacgcccgctaccgtaatgattacagcagtcgggaaaaagagatgtataccgttacgctgaataaaaacgtggcggactggaacacctcttttaacctgcagtacagccgtcagacatactgggacatacggaaaacggactattatacggtgagcgtcaaccgctactttaatgttttcggactgcagggtgtggcggttggattgtcagcctcaaggtctaaatatctggggcgtgataacgattctgcttacctgcgtatatccgtgccgctggggacggggacagcgagctacagtggcagtatgagtaatgaccgttatgtgaatatggccggctacactgacatgttcaatgacggtctggacagctacagcctgaacgccggccttaacagtggcggtggactgacatcgcaacgtcagattaatgcctattacagtcatcgtagtccgctggcaaatttgtccgcgaatattgcatccctgcagaaaggatatacgtctttcggcgtcagtgcttccggtggggcaacaattaccggaaaaggtgcggcgttacatgcagggggaatgtccggtggaacacgtcttcttgttgacacggatggtgtgggaggtgtaccggttgatggcgggcaggtggtgacaaatcgctggggaacgggcgtggtgactgacatcagcagttattaccggaatacaacctctgttgacctgaagcgcttaccggatgatgtggaagcaacccgttctgttgtggaatcggcgctgacagaaggtgccattggttaccggaaattcagcgtgcttaaagggaaacgtctgtttgcaatactgcgtcttgctgatggctctcagcccccgtttggtgccagtgtaaccagtgaaaaaggccgggagctgggcatggtggccgacgaaggccttgcctggctgagtggcgtgacgccgggggaaaccctgtcggtaaactgggatggaaaaatacagtgtcaggtaaatgtaccggagacagcaatatctgaccagcagttattgcttccctgtacgcctcagaaataa

SEQ ID NO: 22301 - DNA, 522 bp, Escherichia coli
atgaaaaagataagaggtttgtgtcttccggtaatgctgggggcagtgttaatgtctcagcatgtacatgcagctgataatctgacctttaaaggaaaactgattattcctgcctgtactgtacaaaatgctgaagttaactggggtgatattgaaattcagaatctggtacagagtggcggaaatcagaaagactttaccgtcgacatgaactgcccctatagcctgggaaccatgaaagttacaataacatcaaatggtcagacaggtaattcgatactggtgcctaatacttcaaccgcttctggtgatgggctgctcatttatctttacaatagtaataacagtggtattggtaacgctgtcactttagggagtcagtttacgcccggaaaaattacaggaacagcaccagccagaaagattactctttacgcaaaacttggatataaaggaaatatgcagagtttgagggcgggaacattttctgcaacggcaacgctggttgcatcatattcgtaa

SEQ ID NO: 22302 - DNA, 504 bp, Escherichia coli
atgattcgtttatcattatttatatcgttgcttctgacatcggtcgctgtactggctgatgtgcagattaacatcaggggaaatatctatattcctccatgcaccattaataacgggcagaatattgttgtcgattttgggaatattaatcctgagcacgtggacaactcacgtggtgaggtaacaaaaaccataagcatatcctgtccgtataagagtggctctctctggataaaagttacgggaaatactatgggaggaggtcagaataatgtactggcaacaaatataactcattttggtatagcgctgtatcagggaaaaggaatgtcaacacctcttacattaggtaatggttcaggaaatggttacagagtgacagcaggtctggacacagcgcgttcaacgttcacctttacttcagtgccctttcgtaatggcagcaggacactgaatggcggggatttccggaccacggccagtatgagcatgatttataactga

SEQ ID NO: 22303 - DNA, 1263 bp, Escherichia coli
ttggcatggagtcagttccccgtcatcttaggtatcactttaactcacaggtgtccagtaaatatgaacaggatcccagtaatcattatcaatggtttccttggcgcaggaaaaaccactcttatgaaaaacctgctcacacaggcaaacaggaatcacttagctgtatctgtcattgtcaatgatatgagcgatctggatgttgatggtgtacttattgcaaatacagaaatcgttaatattgcgaacaataatttcgtgagtatcacatctgatagtatcagcagccagagtgggattaagacggtcgacaaggcaattaaaaatatgctcaggcattatttgcctgacgttatatttgtcgaaacatccggaggtagccacccactgccattaattaagtatctgcagactcatgagcgattacagctaaaatcacttttatcacttgtcgataccgttatgctcaatgatgactataacggagggaaagcactgatacctgcatttcaggagaatcttttccatggcaagcgcagaatagagaatttactggctgagcaaatcatgttttgtagcactttgctgttaaccaaaaaggatcgactgtcattcgacattgtcaccgatgtggcgaaagcaatccatcctctgaatccttacgtaaatgtgatagctgtgtcatgggggaaccttaaactagcagagttactaacccttccggattacgattttaaccgggtcggattacttatcagagaactggaagacacaatcacagtagaagaagcaaaaatttcagcccaaaatggcgaaataatttcgcgagtgattaaagatgacaggccattccacccacaaagattatgggaaacctatcattattttatgggaatgggtatttatcgtaataaaggctttttctggctaccaggaagacctgacatggctctgctctggaaccaggccgcaggaagcatcaatctggagtttatcagctactggaattccggtgtattggcagcccctgataatcacctgacccacgaagagcgctctgctttgcagaaaaaagtcaataaaactctggggcggtttggagacaggagatgccatttaacgattatagggcgttctgatgaagtccatgattttacctccgccttaattaactgttttctttctgaagaagagattgtctggtggcaatcaggtggcattttcccggatccctggcccgctaatatatcccggctgaactga

SEQ ID NO: 22304 - DNA, 384 bp, Escherichia coli
gtggggacggacaccgcaaaagaaattctctatgcccgtatgaaagccgatcccacgcctgtggatgaagccacgtcgtatgctatccgttttcctgatgatccggagattttttcgcagacagaggcgcagcaactggtcgcggaagagcttgtggagaagtgggaaaaaggaaagatgcgtctgctgtgggataacaaaaagcggcgtaacgaagcgctggactgcctggtgtatgcctacgcggcattacgtgtgtccgtgcaacgctggcagcttgatctggctgtactggcaaaatcccgggaagaagagacgacccggccaacccttaaagaactggcagcgaagctgtccggaggagtgaatggttacagtcgctga

SEQ ID NO: 22305 - DNA, 252 bp, Escherichia coli
atgtattcggaaaatattgcggcttacgtcgggctggatgtgcataaagaaacgttggcggttgctattgttgcatctgaacggcttggcaaggttcgttattatggtacgattaacaacgaagcccagtctgtacgtcgattatttcagaaattgcagggactttacggaaacattctttcctgctatgaagctggcccctgtggttttgggctatatcatcaactcacagcgatgaatataaaatgctag

SEQ ID NO: 22306 - DNA, 435 bp, Escherichia coli
atgaagaaaaacgatgatgtgctatgccttgtaattaagctgctcttaagtgtttttattgctttcatttttgcattcaaatacaaacaggagctcctgtcagctttatctgagcaggtatactatcagttactggtcgttgtaaccataatttcaggctttttagccaatccaattggatattttatttacaatgcccatgtatatttgcgcagaaaaatatccaaggaatacaatgctgagtacttatctgagcaagtaaaattattgtcaaaaaccgacttaaaaaacataagcgaaaagcacaaagaaatgattgagtcttggggagggcgagatccgctaagcgaattccaaatagaattagtgagcgcagaactagagagactgagaaaatcaaagaacgaccaagcgacacaaccaacaaaagaatag

SEQ ID NO: 22307 - DNA, 525 bp, Escherichia coli
atgaatccagacctattagtgatttttgagcgagctttagaaggcataacatcagtctcggtacaaaaaaaaacaaatgacacatatactttaaaatccgaccatctcaacacatacatgttgctaacaataataagtggaaataacgaagatgataagctgaaattaaagctatcttttgttttatccttaccaatagatggggtgaacaaagacatattagacggcataataaaggctggcttttctttacaagaaaactctccttgcaaactaataggcataacagaaactgataatgaattgaaggtagagcttgttatattttacactgattacgcatctgtatttagcgaggctgacagagaagataaatataaagaatcagatttcaaactaatagtgttatcaatgctttcagagctgtattcttgctcaatgggaataaacaacttcatttcaaaaaccttgctcagcgctcttgagaacatcaaaaaaggtacaaaagatgaagaaaaacgatga

SEQ ID NO: 22308 - DNA, 699 bp, Escherichia coli
atgcaggatattcgcgaagaaagtctgaacgagtcggttaagtcagagcagtcaccgcgggtggtactctgggaaatcgacctgacggtacagggcggtgagcggtattttttctgtaatgagctgaatgaaaaaggggagccggtcacctggcaggggcgtaagtatgaggcatacccgattgacggcagcggctttgagatgaacggccggggcagcagtgcccgcccgtcgctgacggtgtccaatctgtttggccttgtcaccggggtggcggaggacctgcagagtctggtgggggccacggtggtccgccgccgggtgtatgcccgttttctggatgcggtgaatttcgttgcgggcaatccggcggcggacccggagcaggagttgagtgaccgctgggtggtggagcagatgtcgcagctgacagccatgacggcctcgtttgtgctggccacaccgaccgagacggacggggcgctgtttcccggtcgcatcatgctggcgaacacctgtatgtgggattaccggggagatgaatgcgggtataacggtcctgcggtggcggatgagttcgataaacccaccacggatatccgtaaggacagatgcagcaagtgcatgcgcgggtgtgaactgcgcggaatgtcggctaattttggcggtttcctttccattaataaactttcgcagtaa

SEQ ID NO: 22309 - DNA, 363 bp, Escherichia coli
atggttaaactggcttcacaaccaggagcctctgttgcccgtattgccagggaacacgatatcaatgataacctccagttcaaatggctcaggctctggcagaacgaagggcgtatatcgcggcgtcttccggtaacaacctcttctggcgctggcgttgaattattacctgttgagataacgcctgatgagcagaaagagcctatggcggctcttactccgcttttatccactccttcacaaagcacagtcagtgccagttcctgtaaagttgagttccgccacggtaacatgacgctggaaaatccttcaccagagctgctcacggtgttgatccgtgaactgaccgggagaggacgatga

SEQ ID NO: 22310 - DNA, 351 bp, Escherichia coli
atgatctcgctcccatcagacactcgaatctggctggttgccggcgttactgatatgcgtaaatccttcaacggtctgggtgaacaggtacaacatgtgctggatgagaaccccttctccggtcacctgttcatcttccgtggccgacggagtgacatgattaaaatcctctgggctgatgctgatggtctgtgcctgttcaccaaacgtctggaggaaggccagtttatctggcctgcggtgcgtgacggtaaggtatccattacccgctcgcagctggcaatgctcctcgataaactggactggcgtcaacccaaaacatcccgccttaatgcactgacaatgttgtaa

SEQ ID NO: 22311 - DNA, 369 bp, Escherichia coli; identical to SEQ ID NO: 10061

SEQ ID NO: 22312 - DNA, 792 bp, Escherichia coli; identical to SEQ ID NO: 9265

SEQ ID NO: 22313 - DNA, 258 bp, Escherichia coli; identical to SEQ ID NO: 10427

SEQ ID NO: 22314 - DNA, 573 bp, Escherichia coli
atgctgcgtctgcggcgggccggacagataaccggtcagcatgtgcctgaaattattctgctcaactcccatgacggatcatccagctaccagatgttacccggatattttcgtgccatttgtaccaatggcctggtctgcggtcagtcgctgggagaagtccgggtgccacaccggggaaacgtggtggacagggtcatagaaggtgcttacgaagtggtgggcgtgtttgacctgattgaggaaaagcgtgatgccatgcagtcgctggtcctgccgccaccggcacgccaggcgctggcacaggcggcactgacttaccgttatggtgacgaacatcagcccgtcaccaccgccgacattctgacgccacgacgccgggaggattacggtaaggacctgtggagtacttatcagaccatccaggagaatatgctgaaaggcgggatttccggtcgcagtgccagaggaaaacgtatccatacccgggccattcacagcatcgataccgacattaagctcaaccgggcgttgtgggtgatggcagaaacgctgctggagagcatgcgctga

SEQ ID NO: 22315 - DNA, 378 bp, Escherichia coli; identical to SEQ ID NO: 10109

SEQ ID NO: 22316 - DNA, 279 bp, Escherichia coli; identical to SEQ ID NO: 9194

SEQ ID NO: 22317 - DNA, 678 bp, Escherichia coli
atgaataccagaaatctttttcccctgctttttactgttgcatcattctccgcctccgccggtaactgggccgtcaaaaacggctggtgtcagaccatgacggaagatggtcaggcgctggtaatgctgaaaaatggcacgattggtattaccggcctgatgcagggatgcccgaatggtgtacagacgctcctgggcagccgtatcagtattaacggtaacctgatccccacatcacaaatgtgtaatcagcagacgggattcagggctgttgaggtggaagtcggacaggcgccggaaatggtcaaaaaagccgttcactccatagcagagcgtgatgtgtccgttttacaggcatttggtgtacgaatggaattcacccgcggtgatatgctgaaggtctgtccgaaatttgtcacgtcacttgccggtttttccccgaaacagacacccgccattaataaagattccgtcctgcaggctgcccggcaggcatacgcccgggaatatgacgaggaaacaacagaaaccgctgattttggctcttacgaagtaaaaggcaataaggttgagtttgaagtgttcaatcctgaagaccgtgcgtacgacaaagtgaccgtcacggttggtgctgacggtaatgccaccggtgccagcgttgaatttatcggaaaatag

SEQ ID NO: 22318 - DNA, 177 bp, Escherichia coli; identical to SEQ ID NO: 4925

SEQ ID NO: 22319 - DNA, 378 bp, Escherichia coli; identical to SEQ ID NO: 10114

SEQ ID NO: 22320 - DNA, 378 bp, Escherichia coli; identical to SEQ ID NO: 10115

SEQ ID NO: 22321 - DNA, 549 bp, Escherichia coli
atgaaccaaaacagcacagcagcacatcgcccggctgtgccgctgacaacggcacctgatacagccctgtggcctccagattatccagatagagattctgaccgtgacgccaccagtcatcctcgcgatgaaaatccggcatctcaatccccgccagatggtaagcatcccggaacagcgtgtaacagtccgtcaccccgtgctcaaagcgccgcccggaaagatgtggcacacagcggaacttgtgaatcgccccccggcaaaccagccaccacggcaaattactctgcacctgcagccgccggtcagcctcactcagccagggcagaccaccggggtggctgtggaccagcgccacaatctcaccctgcatctctgcccgcagccagtcctccggtgcgatacgaaaatacgcctccggctctgcggaaatattcacacaagggatataccgctccccctccggcgtgcttatcacgaagccgcacgactccgcaggcgcacaccgccgggcatgcgccagaatcgctgattcagtctgtgtcataa

SEQ ID NO: 22322 - DNA, 252 bp, Escherichia coli; identical to SEQ ID NO: 10128

SEQ ID NO: 22323 - DNA, 240 bp, Escherichia coli; identical to SEQ ID NO: 8148

SEQ ID NO: 22324 - DNA, 222 bp, Escherichia coli; identical to SEQ ID NO: 9012

SEQ ID NO: 22325 - DNA, 942 bp, Escherichia coli
ttgcttacaggtgtagatgatgcttcaataaaaaacattaaagatactaatactgacacttcagcacagattgtattaatagatgagtttattattgagctaaataatgaaattgatgatttgggtatagttcgcagcgatatattatcgcagtttagccgtcttgagcagacaattatgctacagcgtaattttcttgcttctcaacaagatgagcttaataacctgttattggaaaggggaaaatattatgaatctaaaaataacatccagaagcggttagatgaaatctctgaactattagccaggttcactctactatatgagcattatgtagtagacattgatcgtctcaaatcaattcaggaaagtgggttgatttttatgcatattgaagcagtaccttgtcctcattgtggagctagtccagatcatcaagatctggaaaaaatatgtgatggggacgttaattctattataaactcagctacagccgagatagttaaaattgaaacgttgttgagtgagctaaataatacagtatcggatcttcgtggtgaagagcaacatctaaaaaaagaatactcaaaatgtgaggaaacttatcagcatttagataaaacaattcgagatatagttgctccaaaagttgataattttagccatgcttatacagcattagttgataaaaaatctgaaattcaaaggtctgttgatttatttataagaagggaacggctggaaaaaagaaaagccgatttattgaataaaagttgtattgtacatgagaaaactcagttggaaattggtccctctgattctgtaatgcataacctttcattgaaaatttcctccatactaaaagcatggaatttccctggtgaatgcaacgtatttttcgacaaagttgcttcagactttgtgatagatggtaagccctga

SEQ ID NO: 22326 - DNA, 906 bp, Escherichia coli
gtggatagcgcacgcgcccttattgcccggggatggggagtaagcttcgtcagccgttgtctccgggtgtcgcgtgcgcagttgcacgtcattctcagacgagccgatgactggaaggacggccgccgcagccgtcacacggatgatacggatgtgcttcgccgtatacaccatgttatcggagagctacccacatatggttatcgtcgggtatgggcgctgcttcgcagacaaacagaacttgatggtatgcctgcgatcaatgccaaacgtatttaccggatcatgcgccagaatgcgctgttgcttgagcgaaaaaccgctgtaccgccatcgaaacgggcacataccggcagagtggctgtgaaagaaagtaatcagcgatggtgctctgacgggttcgagttccgctgtgataacggagaaaaactgcgggtcacgttcgcgctggactgctgtgaccgtgaggcactgcactgggcggtcactacgggcggcttcaacagtgaaacagtacaggacgtcatgctgggagcggtggaacgccgcttcggcaacgagcttccggcgtctccagtagagtggctgacggataatggttcatgctaccgggctaatgaaacacggcagtttgcccggatgttggggcttgaaccgaaaaacacggcggtgcggagtccggagagtaacggcatagcagagagcttcgtgaaaacgataaagcgtgactacataagtatcatacccaaaccagacgggttaacggcagcaaagaaccttgcagaggcgttcgagcattataacgaatggcatccgcatagtgcgttgggttatcgctcgccacgggaatatctgcggcagcgggcctgtaatgggttaagtgataacagatgtctggaaatatag

SEQ ID NO: 22327 - DNA, 366 bp, Escherichia coli
atgattgatgtcttagggccggagaaacgcagacggcgtactacacaggaaaagatcgctatcgttcagcagagctttgaaccgggaatgacggtctcccttgttgcccggcaacatggtgtggcagccagccagttatttctctggcgtaagcaataccaggagggaagtcttactgctgtggctgccggagaacaggtcgttcctgcctctgaacttgctgccgccatgaagcagattaaagaactccagcgcctgctcggcaaaaaaacgatggaaaatgaactccttaaagaagccgttgaatatgggcgagcaaaaaagtggatagcgcacgcgcccttattgcccggggatggggagtaa

SEQ ID NO: 22328 - DNA, 237 bp, Escherichia coli; identical to SEQ ID NO: 8965

SEQ ID NO: 22329 - DNA, 1221 bp, Escherichia coli
gtggaagggaaacgcacgtttacggaatttatccgtgaaggtgtgggcgttcatgcgtttaacggcgaaatctttgtgcagccggtctgggatacggaaaccacgcagttattccgtacgcgttttaaagccgtgagtccgaaacgggtggacacgccaggacacggtatggggaaccgttttctgcgggccggtgtggaggtcgatcgatatggtcgtgccgttgcgtaccatatctgtgaggatgattttccgttctctggtagtggacgatgggaacggatcccgcgtgaacttcccaccgggcgtccggccatgctgcatattttcgagccggtggaggacgggcagacccgtggggctaatcagttttacagcgtcatggaacggctgaagatgctcgattccctgcaggcaacacagcttcagtcggccatagtgaaggcgatgtatgcagcgacgattgaaagtgaacttgataccgaaaaggcctttgaatatatcgccggcgcgccacaggagcagaaggataatccgcttattaatattctggagaagttttccagctggtatgacacgaataacgtgacactgggcggtgtcaaaattccgcaccttttccctggtgatgatctgaaactacagacagcgcaggattcagacaatggattttctgcgcttgaacaggcgctgctgcggtatatcgccgccggtcttggcgtttcctacgaacagttgtcccgtgattactcgaaggtcagttactcaagtgcccgcgcctccgccaatgagtcgtggcgctattttatggggcggcgaaaatttattgcgtcccggctggccacgcagatgttttcctgctggctggaagaggcacttcttcgggggattattcgtccgccacgggcacgttttgatttttatcaggcgcgatcagcctggtcacgggctgagtggattggagccggaagaatggccattgacgggctcaaggaggttcaggaatcagtgatgcgcattgaggccggactgagcacgtatgagaaagagctggcgctgatgggcgaggattatcaggacattttccgccagcaggtcagggaatctgcagagcgggaaaaagccggactctcacgtccggtgtggatagcgcaggcgtatcagcagcagatagcggagagtcgcaggccggaagaggagacaacaccacgtgagacgtaa

SEQ ID NO: 22330 - DNA, 747 bp, Escherichia coli
atgacagaaaaaacggaacggaataaagcgtcgtcagaggtggttaggcagtcagacctggccctgttgacagatgtacaggcagcccttcagcaggaaaagcatcatgcccttttcctgatggtgatttttctgctggtactggtagtgacgtttgttatctgggcatggaacagtcctctggatgaagtgacccgtggtcaggggagtattattcccggcagcagggagcaggttatacagacccttgacccgggtattttgaaaacacttgaggtcagggaaggagatattgttgagaaaggtcaggtactgctgacactggatgatacccgaagctctgccatgctgagggaaagtgaagcccgggtgaataacctggaagcagtcagggcaagactccgtgcagaagcttattccgaatcactgacatttccggatgacgtgcctgcagatttgagggagagggaaagtactgtttatcgactacgaaagactgaactggcacaaagcatcgccggccttaagcagagtaaggctctgctggataaggaaatagcaatgacccggccaattgtgcgtgaaggggcgatgtcggaagtcgaactgttacgtatgcagcgtcagtcagcggagctgcagttacagatggatgagaaacagaataaatacctgacggaagctggagctgaactagtgaagacagaagcagagcttgcacaggcaaaagagaatatggctggctga

SEQ ID NO: 22331 - DNA, 351 bp, Escherichia coli
atgatctcgctcccatcagacactcgaatctggctggttgccggcgttactgatatgcgtaaatccttcaacggtctgggtgaacaggtacaacatgtgctggatgagaaccccttctccggtcacctgtttatctttcgcggccgacggggtgacacgattaaaatcctgtgggctgatgctgatggtctgtgcctgttcaccaaacgcctggaggaaggcctgtttatctggcctgcggtgcgtgacggtaaggtatccattacccgctcgcagctggcaatgctcctcgataaactggactggcgtcaacccaaaacatcccgccttaatgcactgacaatgttgtaa

SEQ ID NO: 22332 - DNA, 330 bp, Escherichia coli; identical to SEQ ID NO: 8147

SEQ ID NO: 22333 - DNA, 384 bp, Escherichia coli; identical to SEQ ID NO: 10122

SEQ ID NO: 22334 - DNA, 555 bp, Escherichia coli
gtggcgctggtccacagccaccccggtggtctgccctggctgagtgaggctgaccggcggctgcaggtgcagagtaatttgccgtggtggctggtttgccggggggcgattcacaagttccgctgtgtgccacatctttccgggcggcgctttgagcacggggtgacggactgttacacgctgttccgggatgcttaccatctggcggggattgagatgccggattttcatcgcgaggatgactggtggcgtcacggtcagaatctctatctggataatctggaggccacagggctgtatcaggtgccgttgtcagcggcacagccgggcgatgtgctgctgtgctgttttggttcatcggtgccgaatcatgccgccatttactgtggtgacagcgagctgctgcaccatattcctgaacaactgagcaaacgagagaggtacaccgacaaatggcagcgacgcacacactccctctggcgtcaccgggcatggcacgcatctgcctttacggggatttacaacgatttggccgccgcatcgaccttcgagtga

SEQ ID NO: 22335 - DNA, 354 bp, Escherichia coli
atgcgtgattttcagaatgcctttgatgctgccctcgccggggtggacagtacgatcgttgaagtgatggggctctgtgcgcagttcacctccggagcacagcgtggcggcgaagttcagggggtttttgacgatccggagtcgctgggttttgccggtggcggggtccgtattgaaggaagcagcccgtcattatttgtgcggacggatacggtgcgtgccgtgcggcgtggtgacacgctgaccattaacggcgagatgttctgggtggatcgtgtttctccggatgacgggggcagctgttatctctggctcaaccgtgggcaaccacccgctgttaaccggcgacgataa

SEQ ID NO: 22336 - DNA, 378 bp, Escherichia coli; identical to SEQ ID NO: 10112

SEQ ID NO: 22337 - DNA, 354 bp, Escherichia coli
atgcgtgattttcagaatgcctttgatgctgcccttgccggggtggacagcacgattgttgaagtgatggggctctgtgcgcagttcacctccggagcacaacgtggcggcgaagttcagggggtttttgacgatccggagtcgctgggttttgccggtggcggggtccgtattgaaggaagcagcccgtcattatttgtgcggacggatacggtgcgtgccgtgcggcgtggtgacacgctgaccattaacggcgagatgttctgggtggatcgtgtttctccggatgacgggggcagctgttatctctggctcaaccgtggtcaaccacccgcagttaaccggcgacgataa

SEQ ID NO: 22338 - DNA, 150 bp, Escherichia coli
atgtgctttggcaaggtctttattactatcagactgaatagccccatccataaatgcccaaaggcggtttacgtattgaccttgcccaacggcccgaccattaaatttttccttcatcagccaacccttctagaagcctacgacatgtag

SEQ ID NO: 22339 - DNA, 327 bp, Escherichia coli
atggcgggactggagcgtgaagagttccgggtgctgtatctgaataaccagaatcagctgattgccggtgaaaccctcttcaccggcaccatcaaccgcacggaagtccatccccgggaagtgattaaacgcgccctgtatcacaatgccgcagctgtggtgctggcacacaatcacccgtccggtgaagtcacccccagtaaggcagacctccttatcacggaacgtctggtacaggcactgggcctggtggatatccgggtgccggaccatctgatagtcggtggcagccaggttttctcctttgccgaacatggtctgctttaa

SEQ ID NO: 22340 - DNA, 327 bp, Escherichia coli
atggcgggactggagcgtgaagaattccgggtgctgtatctgaataaccagaatcagctgattgccggtgaaaccctcttcaccggcaccatcaaccgcacggaagtccatccccgggaagtgattaaacgcgccctgtatcacaatgccgcagctgtggtgctggcacacaatcacccgtccggtgaagtcacccccagtaaggcagacctccttatcacggaacgtctggtacaggcactgggcctggtggatatccgggtgccggaccatctgatagtcggtggcagccaggttttctcctttgcggaacacggcctgctttaa

SEQ ID NO: 22341 - DNA, 198 bp, Escherichia coli
atgaaagccattcttggcgcggcgaaaaaaccggttcaggtctggtcgcctgcggatatcgggctgaacagcgtccccacgtattccgcacaacaggttgccgcaccgaagcagcgcgagcgtcagcgtgtggtgattgaaggtgacggtgaagaacaaatcgccgcgtttgtcgagaatctgcgcaaaatcatttaa

SEQ ID NO: 22342 - DNA, 276 bp, Escherichia coli; identical to SEQ ID NO: 16135

SEQ ID NO: 22343 - DNA, 246 bp, Escherichia coli
atgttttccagattatttgtaaaaaaacatactccagctatggtgacaggtagtctgatatttctgttcattattctgctgacatttttctggaaaaaagcagagctggtgaatgacagccagatcagagttaatttcgcacttggctatatagaaaacattctcaatcagaacaacagcatcagccaggaagcagaacatttgcttctgaataactgtaacgctgaaaacaggcctggtatatga

SEQ ID NO: 22344 - DNA, 198 bp, Escherichia coli; identical to SEQ ID NO: 21848

SEQ ID NO: 22345 - DNA, 2676 bp, Escherichia coli
atgagcaccgataaacaagtttacccactgtattacgaagcaaaaaatgacaaagtaagaaaacgtctcggtattaaaggcggtttctactgggctgaagcgaaaaaattatccattgccatctcccgtggtgctgttgcgattgacgatgctggctacgatgaagatgactttaaaaaacctgttcgcgtcaatttgcccgttgttgatgaccttccaccagaaggcgtatttgatacggaattctgcaaccgttacgaaaaaggcggggaagatggcatcacaatggtatttatcgcgccctcatcctctgcgcaggacaagccagccagcactgacaataccaatgttaatggcgaagacatgacggagattgaggagaatatgctactcccgatttccggtcaggagctgcccattcgctggcttgctcaacacggcagcgaaaaaccggtaacgcacgtttcacgcaacgaactacaggcattacacattgcacgagctgaagaactaccagccgttactgccctggctgtttcccacaaaaccagcctgctcgacccgctggaaattcgcgatctccacaaactggtgcgtgatactgacagagttttccctaatccaggcaattcaagcctggggctgatgactgcttttttcgaagcatacctggacgcagactacaccgatcgcggtctgctgacaaaagagtggatgaaaggaaatcgtgtttcacgcatcacgcgcacggcttccggcgctaatgctggcggcgggaacctcaccgatcgcggcgaaggtttcattcacgatctgacgtcactggcgcgcgacgtagccactggcgtactggctcgttcaatggacgtggacatttataaccttcatccggcacacgctaaacgtgtcgaggaaattatcgctgaaaataaaccgcccttttctgttttccgcgacaaattcatcaccatgcctggcgggctggattattcccgcgccatcgtggttgcgtccgtaaaagaagcaccaattgggatcgaggttatccccgcacacgtcactgaatatcttaacaaagtactgactgaaactgatcatgccaaccctgatccagaaatcgtggatattgcctgcggtcgttcctctgccccgatgccgcagcgtgtaacagaagaagaaaaacaggatgatgaagaaaaactgcaaccatcttgcgcaatggcagatgaacaggcaacggctgaaacagtggaaccggatgcaactgaacatcatcaggacacgcagccgctggatgctcagtcacaggtaaattctgttgatgcgaaatatcagaaactgcgggcagaactctatgaagcccggaaaaacattccgcccaaaaatcctgtcgatgcagacaaattactggctgcctctcgcggagaatttgttgaagggattagcgacccgaatgatccgaaatgggttaagggaattgaaacccgagattctgtgaaccagaaccagcccaaatcggaacaaaacaaccagaaagcggaacaaaacagccaaaatgcacagaaaaatgagccagaaacgaaacaatctgaaccagtagcgcaacaggaaccggaaaaagtctgtgccgcccgcggtcagagcggtggcggcaactgccctgattgtggcgcggtgatgggcgacaccacatatcaggaaacctttaatgaagaaaatctggatgaatctcaggaaaaagatccggaggaaatggaaggccctgaacatccgcacaatgagaatgctggcagcgatccgcatcgcgattgcagtgatgaaactggcgaagtcgcagatcccgtaatcgcaggagacatagagcctggtatttattacggaatttcgaatgagaattaccacgcgggtcccggtgtcagtaagtctcagctcgacgacattgctgatactccggctctgtatttgtggcgtaaaaatgccccagtggacaccacaaagacaaaaacgctcgatttaggaaccgctttccactgccgtgtacttgaaccggaagaattcagtaaccgctttatcgtggcacctgaatttaaccgccgtacaaccgccggaaaagaagaggagaaagcgtttctgatggaatgcgcaagcacaggaaaaacggttatcactgccgaagaaggccggaaaattgaactcatgtatcagagcgttatggctttgccgctgggtcaatggcttgttgaaagcgccggacacgctgaatcatcaatttactgggaagatcctgaaacaggaattttgtgtcggtgccgtccggacaaaattatccctgaatttcactggatcatggacgtgaaaaccacagcggatattcaacgattcaaaacggcttattacgactaccgctatcacgttcaggatgcattctacagtgacggttatgaagcacagtttggtgtgctgccaactttcgtttttctggttgccagcacaactgttgaatgcggacgttacccggttgagattttcatgatgggcgaagaagcaaaactggcaggccagcaggaatatcaccgcaatctgaggaccctggctgactgcctgaataccgatgaatggccagctattaaaacgttatcactgccccgctgggctaaggagtatgcaaatgactaa

SEQ ID NO: 22346 - DNA, 510 bp, Escherichia coli
atgtttttcggcttgtcgctctccatcttcggctcgcgactggcgctggagggcagcatcgcctacatcgtcaaccacgcgttcgctaaaagcctatttttccttgtagcaggtgcgctgagttacagctgcggcacgcgcttgttgccgcgtctgcgtggcgtattgcacaccctgccgttgccaggcgtgggtttctgcgtagccgcgctggcgattactggcgtaccgccgttcaacggcttcttcagtaaattcccgctgtttgctgccggtttttcgttgtcagtggagtactggatcctgctgcccgccatgattctgctgatgattgaatcggtcgccagtttcgcctggtttattcgctggtttggtcgcgtcgtgcctggcaaaccgagcgaggccgtcgccgatgccgcaccgctgccaggatcaatgcgcctggtgttgattgtactgattgtgatgtcgctgatttccagcgtaatcgccgcgacctggttgcagtaa

SEQ ID NO: 22347 - DNA, 1812 bp, Escherichia coli
atgattacaaaagatatagttgttagtgcatataattgtcttaagtcatatgcttactacgaaaacttaaattttttcctaaaggaagaaatcgctcaatttgaagattctctctatgacgaaaaaatagaaaaagtggttgatttttttgaaaataataatgacattaactttaatgagtggctaaataaaattgatgttgaattattaccaaaaaaaattgatagccatttggatattgagcaaacgagcggagctctttttttaagtaataataagacatcagatgaatacaaagtaggtgctgtaaattatttgatcgttgctcctattgaaatatatttaatagaaacactctggtctatctttgttggttcaatgctagatgacaagttttctgattcggtttatggaaatagaatatcaaaagtaataaaaaaatattctaagaatagtttcgatgcgccaaaaaactcctcaaaaaatatctttgaaagatacattgataattataataaatggcgagatggtggtatcgataaagcgatagaagttatagaaaaagagcgaaatgatgttgcaattctttctctggatcttaagggtttttattataatatagatatagattttgatgccattgatagaattattgacgaagaacaattagaagaaattaaagctctttctatgttgttgaatagtaaattgaggttgatgcatcaaaaatacagagagaaaatatctccatatattggtgtgacacattcaactccttcatcaaaaggcattccaattggatttacttcttctgccatattatctaattggtatttaatgggttttgataaagatattaaatcaaaaattaatccatcgtactacggtcgctatgtggatgatattcttttagttttttcatccccggacattaaaaaagaagataaaggtgaagaagtaataaaattcatagagcgaacccttaatggattcattaaacaggcagcgaatgatgaaaaaggctttacgttgaccgagagttatcatgaattaccaattcaaaaggataaattgatttttcattatttcaataaagatcatagtttggctggtttacaagtcttcaaacaagaaattgagaacagaagcagtgcatttcgttttttaccggaagaacatatatctagcgatctcgataaatttgcttatgatatattacttgatggttcggcaaataaatttagaagtattgtaggtttggcagagaatgaaactgaattatcaaaatatatatcatcacatatcttagctcataggctttgcaatcttccatcgaatgagaataccttaaagcaaataacgctgttttttaaaggtgaaaattctctaaggttcagtcggttatgggagaaagttctatcgtatacattaattacaagaaaatatggattttcaatcgccttttacaaacaaattaaagaatcaattaataaaatgaagtggaaggaaggtgatagtgttatatctccaaaacttaaaaatggaatgcagaaatacattgatatttctctttgtttgaatttggctttgttagatttaaatgtcattttaggtgataaagagccacaaaatagagctttggaaggtttgaaatctttaattaaacagtccgatggaatgtctgttctaattgaaagatttagaagcagtaatttgattcgtcataatctagtgtcttggcctttagctaactatactaaatataaaggagatcttactgaggagaatttatacagtaagatgcatgggtaa

SEQ ID NO: 22348 - DNA, 603 bp, Escherichia coli
gtgaaacgcatctggggagtcacgggcgactctctgaacggtcttagtgacagtcttaatcgcatgggcaccatcgagtggatgtccacccggcatgaagaagtggcggcgtttgccgctggcgctgaagcacaacttagcggagaactggcggtctgtgccggatcgtgcggccccggcaacctgcacttaatcaacggcctgttcgattgccaccgcaatcacgttccggtactggcgattgccgctcatattccctccagcgaaattggcagcggctatttccaggaaacccacccacaagagctattccgcgaatgtagtcactattgcgagctggtttccagcccagagcagatcccacaagtgctggcaattgctatgcgcaaagcagtgctaaaccgtggcgtttccgttgtcgtgttaccgggcgacgtggcgttaaaacctgcaccagaaggggcaactacccactggtatcatgcgccacaaccagtcgtgacgccggaagaagaagagttacgcaaactggcgcaactgctgcgttattccagcaatatcgccctgatgtgtggcagcggctgcgcgggggcgcataaatag

SEQ ID NO: 22349 - DNA, 372 bp, Escherichia coli; identical to SEQ ID NO: 21767

SEQ ID NO: 22350 - DNA, 300 bp, Escherichia coli
atgattggtagctttaaggatggacagaacggtgaacttgctacgttctatgtatctggaacacggagcgcacaaataccagccattattgaaaagccgcttcgccgtaaactgtcacttctggccgctgccagcagtgaaaaatcattattctcgccacctggtaataattatgaacgcttgcagggtaagctaactgggtggtcaagcattcgggtaagcattcaatggcgtctaatctttcactggtgcgatggttgtgcttacgacatttatctcgacccacataaataccgctag

SEQ ID NO: 22351 - DNA, 309 bp, Escherichia coli
atggatacgatcaccgcagaaccaaccactgtaggcgaaatgctttcagaagagtttttaaagccgctgaacatcacccaagctgagctggcgctggtaatgggcgtgtcccggaaggttatcggccagataatcaataacagtcgccgtatcagtgtagcagaagcctcacagttggccgtattattccagacagatgaagatttctggattaacctgcaggccgcacatgaccgctgggagagccggaatattattgcgaataaccatttccgccctattcaggaactgctgatgagggctgtttga

SEQ ID NO: 22352 - DNA, 378 bp, Escherichia coli
atgcttatatataaccaaactttgggatatttctccataccttgcataattctttttatactctcgtgtttattagtggcgtggggcgcactaaagaaaaatgaaaagatttttgatataagtggtattttatctgtattgttttttaccggtattattatttcaataatgataccaacatataatgatgaggatattaaagcaggtgaagtattatccgcatgtaaaatagtagaagaaaatgcatataatggcacatttaacgaaaatgttaataaaattaattgcgatggtgttataaagaacattcctgtaagcacatataacaaactaatatacgcctataataaaagttcattacagacagatacagaataa

SEQ ID NO: 22353 - DNA, 456 bp, Escherichia coli
atgactacttttaccgacgaggacaaagaactaattaaagaaatcagagagcgaattggcagtctggacgtgcgagacaatattgagcgccgggcttatgaaattgctctggcatcgctggaagcagaggcagttatgttctgtatatcaggacaaaatgtagattcagaagaacatgtatcaaccagcaaagcggttgttgatgcctgggttgaagaatggaatcaggttgacagaactcctggcgagccactgtacaaaactgtgccactctaccatcaccccgccttgccagcgtcggtagtgcctgaaggactggttaaagcagtgcgtttctatgaacaggtaaagcgtgagaatccgccagtcgaaaccgtagcatggaaagacgctgttgactgggttctcgaagaggcttgtctggctgtaaaagcatcatcagggaaggatgcatag

SEQ ID NO: 22354 - DNA, 288 bp, Escherichia coli
atggcaactttgcaggaattaatcgacctgacgccagaacaggaaaaaacgtggaatcgccttgtgaaggctgtaaaggatttcagggcagccggaggaaagttttatagcgtcctggacacgctgagcgcatacaacggcgagcacgttgccagcattgataacgataagggctaccacactgcaagcgtctatatgcctagcattgatgcgccagggttaaccagttgggctgatgattggcacggcatcacactgaaagatggcgttgaagtggatgaggactaa

SEQ ID NO: 22355 - DNA, 219 bp, Escherichia coli
atgactacgctatttaggaaaaattacccacgaaaaagcagggtagtagaaattctgttttttattctgtttatcgtgttgatgacaccgatatccccattattactggtctggataatcggaaaaataattgagccagttattgaattgtataacgacgtggtatgggcgtcgttcaacacactgcacaataaaattaacccatataaggaaaactga

SEQ ID NO: 22356 - DNA, 360 bp, Escherichia coli
atgacggaacaagtgaaaactacacgtaaacatggcaagcacattcgtgtgccagttctgccagaagaagaagcgatcattaagcgcaacgcagatgccgctggtctgagtacagcggcatttctgcgtaaggttggaatgggttatgaagtggaatccatggttgatattgaacaggttcaggagctgagtcgggtaaatggtgacttaggccgacttgggggattgcttaagttgtggctttccaatgacgagagaacccgtaatttttccgcatcgctgatcaaaactcttttgggaaaaatcgagtcaacccaaaacgagctacgcacagtaatggacaggatactgagcaaatga

SEQ ID NO: 22357 - DNA, 156 bp, Escherichia coli
atgaaagaaaaagaatcaacaccggtgttgtgtgaatcccctaaaggagtggggatagtgatcccacttgtaacatcatggccggattcagtcgtagtaatggatgtcatccatgatgactggaagataaaagaggaagccaatgagaaagcctaa

SEQ ID NO: 22358 - DNA, 162 bp, Escherichia coli
ttgtcctatttgcaagtgattttcaaaccgtctaaggattgggagtgcgccgtgctatatatgttaatctgcagtgttctgatgctggcactggtaaatggcaaaagtaaagatttgactaaaggcattgataagctgcaggatgaatttaaagataaatag

SEQ ID NO: 22359 - DNA, 381 bp, Escherichia coli
atgaaagctaagcgcgagcacattgttcctttgtcaccacaagcattagaaattcttgagataatgaaaccgattagctttcaccgtgcgcatgtttttccgagcaggaataatactcagcagcctatgaatagccagacggccaacgcagctttaaaaagaattggatttggtggtaaattagtggcacacgggctgcgatctattgcaagtacagcaatgaatgaagccggttttaattctgatgttgttgaagcagcattggctcacattgataaaaatgaagtacgaagagcgtataatcgctccacctacatagcgcaacgtattgaattaatgagttggtggggaaaatatgttgctaaaggtattaaccattga

SEQ ID NO: 22360 - DNA, 702 bp, Escherichia coli
atgcacgaccttatccatcagtacctggtgatcgagtttttcgcccacggcctcttcccaggtctcgcccagcgtggtgttcacaaaggttttcaggccgttgggatctttcagtgcatccagccagtcatagacaatctgtacccaggtggtgaacggactgtacgccgtccagatatggaatgtgatggagcgcggcggcggaatttcattatccgcggcgctgaaaaacgtcagaccgtcgcgggtccacatccccgtgttttcacagatccaccgcccgttgctctggtcaagctcagactgatggatcacgcagccatgatgttcacagaggtagaaaacgctttcggggctgtccttctcccatttaaggccaaaaggcgtggactcatcgccaaatttcagatactgcgcctccccacagtgcgggcagggcacataaaaacgcatgaaatgcgccgactcgttggccgctttttcgatctggcaggtgcctttgattttaggcgtcgagccgcgaatggatttgggccatacagagccctcaatacgtttatccccaagcagggttggcgaaccctctttttcgacatccggttcgaacgaggaaagttcgtcatagcagaccacgtccacggatttttcacggtagtttttggcggcagcgccgcccaggcaccagaagcccacacccgatga

SEQ ID NO: 22361 - DNA, 276 bp, Escherichia coli; identical to SEQ ID NO: 16135

SEQ ID NO: 22362 - DNA, 690 bp, Escherichia coli; identical to SEQ ID NO: 5943

SEQ ID NO: 22363 - DNA, 1701 bp, Escherichia coli
  misc_feature (1684)..(1693): n is a, c, g, or t
atgattggtacaacaccttatcatgcgaaatattttgcgcatgaactttccattcttcattcaaacaatggggtggaccgtctgtctcaatcgctgtttgatgcaagcgtagatctaaaccctcatcaaattgaggcggctctttttgctatcgaaaatccgctaagcaaaggtgttgtgcttgccgatgaagttggtttgggtaaaaccattgaagctggactagtgctttgccagttgtgggctgaaagaaaacgtaaactgttgatcatttgtcctgcttcactgcgtcgccaatgggcgagcgagttacaggaaaagttcaatctaccttctcaggtgttggacgcgaaaatgtatagccagcttcaaaaagaagggatccataatcccttaaataataaatcgatcactatcatgtcataccactatgctgctcggttagaagagaaattggtggctgaaatgtgggatctggttgttatcgacgaagcccataaactgcgtaatgctcatcgagaaagcaacaaaatggggcaagcgttaaagcgtgcgcttgatgggcggaagaaattactactgaccgcaacgcctttacagaactcgttgatggaactgtatggcatgtcgacgcttatagatgaacataccttcggcgaagttaaagcgttcagaaagcaatatatgcaggcagatagcgatattgcggagttgaaggggcgattgtcgcgttttatcaaacgaactctacgcaagaatgtgctggagtatatcaagtatacagaacgtaaagcgatcactattcctttctatccgagcgaacaggagcaggatctttatgaacgcgtacaaaaattgcttgaacgtgaggatagctatgccttaccaaaacgacaccggcatctgacggggcttatactcagaaaactactttcctcaagtacgaaagccgtattgaataacttgcagatccttaagactcgtttagaaaggttaaagctggaaggtatcgttgaagatgatatggacatcatccaacagatcataatggatgatgatcttgaagatgacatcgttgaagatgccgaatcagtagcgccagatacagagtgcaaatctgtggattcagatgcgcttcaggcagaaatcaatgagctggaatcactcattgtcaaagcagaacagattggcactgataccaaatcaaaagagttgctttctggcctggagcaaggttttgcacagcttgccgaaatgggggctgcaaaaaaagtcatcatcttcacggagtcgatgcgaactcaacagtaccttgcacattttctggaaaacaatggctaccagggaaaagtagtaacctttagtggcacaaacaatacaccgcaggcaaacaagatctaccagcaatggcgcgaggaatatcagggatcttctcgtattaccgggtcggcgcaaattgataaacgctcggctttgatcgaccacttcaaagatcatgctgaaatcatgatagctacagaagctgcagctgaaggggtgaacctgcaattttgttcgctactgatcaattacgatttaccctggaacccacaacgcattgaacagcgtattggacgttgtcaccgatacgggcaaaaatttgatgtggttgttattaacttcctcaatcagcgaaaccaggccnnnnnnnnnnactcttaa

SEQ ID NO: 22364 - DNA, 264 bp, Escherichia coli
gtgaacaaccctaaaatactcatttttgatgaagcaaccagtgctctggattatgagtcggagcatgtcatcatgcgcaatatgcacaaaatatgtaagggcagaacggttataatcattgctcatcgtctgtctacagtaaaaaatgcagaccgcattattgtcatggaaaaagggaaaattgttgaacagggtaaacataaggagctgctttctgaaccagaaagtttatacagttacttatatcagttacagtcagactaa

SEQ ID NO: 22365 - DNA, 144 bp, Escherichia coli
atgtatgaggtgtgtgtgacatttttcatgaaaataaaacaggtgataacctcctttggtaatgggtattcacaggtattattacagaacaatgttgtttctggcttgttcttttttttttgcaactggaatagcctcttttaa

SEQ ID NO: 22366 - DNA, 249 bp, Escherichia coli
atgacacagggctggcgggaggataaatgcccgtctgtccgcgccgggaaaaaaccgcgcgtcggtggcgctgaaaggggccgcgctcacgcgccgcccctttcattacgcggacgttctgatgggggcttctgtcttttcagacctgtcatttgtctgttactgatgatgttgttgttcctgctactgctactgctactgctactgctactgctactgctactgttcttcttttttctactgctctga

SEQ ID NO: 22367 - DNA, 726 bp, Escherichia coli
atgaatgaggcagaaacacaggctgcaatattgcttggtattgatgatcctcatatacatgatcttgcagcagatttttctaagccgtgcgtaatgattaactgccatgatcgacgtatgcgtcttcccacagttgctccagatcacaaaaacattggtgcttttgcgtctcactttctgtttgaaatggggcatcgcagagtaatgaacattatgtgtttacgtcgatacacaatggaactgcgacttgccggaattaaagaagcatgggagagacagaatcagaactttaaagatgacagagatttactcactattaatagtttcagcgccaaagaagccgaagaaaaagtcggagcatggctggatatgacagagaaaagtatgctaccgactgcttttttggcaagtggggacttcattgctgcaggtataattaacgctttaaaaaaacgtaatatacgagtgccacaagatgtgtccgtaatgagtattgatgggtttaatctggctgcaatagaagatgtgccacttacggcagtacatgtacctcgcgatgaactgggtactgaagcggtacatatgttacaacaaagacttgtacgtcctgatgcaactgttggtgcattacttttgtatgggaaactggtaatacgagaatctgttcgccgtatacggccagggaaagagccaactccgattaaaggagatagactgtatgactga

SEQ ID NO: 22368 - DNA, 234 bp, Escherichia coli; identical to SEQ ID NO: 21875

SEQ ID NO: 22369 - DNA, 474 bp, Escherichia coli
atggggtattattcgtcagctgaaatattacttcacgttttattgtttattccttgccgcccgcgtctcccagcgcgggctttttttgtccataagaaagcccctccggagaggggctggagagtggcgctatgtgccattgcatggtgccgggtgcctcccggtgagttcagcccggtgacactgaacccgcgtcattctcgttttgataatcagagattataccatcaccagtcgcccctccgctcagggggattcaccatgccgttctcttttaacaaattcgccgctaacaggacaacattccgctttctgagttgtgaggaatttaacacttcacacctgtgtgcattttctacaggctgctcccagcaccacaatacatcgcaggcaacagaagccaaatgccccaccacagaaaaaacatgcaattatgattattgtttactgcaaagatgtagaatcacggtttaa

SEQ ID NO: 22370 - DNA, 540 bp, Escherichia coli
atgtccggcagtgcttttgccgttacgcaccacgccttcagtagcggagcaggaaggacatctgatggaaatggaagccacgcaagcaccttaaaatcaccatcatacactaaatcagtaagttggcagcattaccatcgcatcggtgggaaaaacgccctgctgctggctggcactattatgtctgtacgtattattggctcatcgttcgccacctcagcgctggaagtggttattctgaaaacgctgcatatgtttgaagtaccgttcctgctggtgggctgctttaaatatattaccagccagtttgaagtgcgtttttcagcgacgatttatctggtctgtttctgcttctttaagcaactggcgatgatttttatgtctgtactggcgggcaatatgtatgaaagcatcggtttccagggcgcttatctggtgttgggtctggtggcgctgggcttcaccttaatttccgtgttcacgcttagcggccccggcccgttttctctactgcgtcgtcaggtgaatgaagtcgcttaa

SEQ ID NO: 22371 - DNA, 369 bp, Escherichia coli
gtgtcagactcgcgccatgagacaaattatcccgacgaccataacaaccgcatctggtgggggctgccctgcaccgtgacgccctgtttcggggcacgtctggtgcaggagggtaaccggttgcattaccttgccgaccgcgccggtatcagaggacagttcagcgacgcggatgcctaccatctggagcaggcctttccgctgctgatgaaacaactggaactcatgcttaccagcggtgaactgaatccccgccatcagcataccgtcacgctgtatgcgaaggggctggcctgtgaagccgataccctcagcagttgtggttacgtttatctggctgtttatccgacgcccgaaatgaaaaattaa

SEQ ID NO: 22372 - DNA, 273 bp, Escherichia coli; identical to SEQ ID NO: 22237

SEQ ID NO: 22373 - DNA, 303 bp, Escherichia coli; identical to SEQ ID NO: 21878

SEQ ID NO: 22374 - DNA, 807 bp, Escherichia coli; identical to SEQ ID NO: 21879

SEQ ID NO: 22375 - DNA, 417 bp, Escherichia coli
ttgcatctggaaaaattagagacactgaatgtattcggtgtacgtgccgattacatggcaacctttaaacaatacctggaagatgaagggattacgccaagtgacgagatccttgagctgaattttgaaactcggccaaatatgccagcaaccaggcttaaaacacttaagcttaaagatggttataaagataatcaaagactcggctttaaacgtgtctattttcccgaattgtatgaagttcctgctgattttcaggggaaaattaagcagccgcatattaagctggacctatacccgaaacttgagtcgattgataccagcagaaaaggggacaatactccggttaacgtgcgtaatgaagcgaagttagattataaaatcattagtgcgtttgattttgcctgcgattcatga

SEQ ID NO: 22376 - DNA, 468 bp, Escherichia coli; identical to SEQ ID NO: 7045

SEQ ID NO: 22377 - DNA, 618 bp, Escherichia coli; identical to SEQ ID NO: 21886

SEQ ID NO: 22378 - DNA, 381 bp, Escherichia coli
  misc_feature (352)..(361): n is a, c, g, or t
atgcttgaaacagaaagcaaaggctcactactcaatactgataatttcaaaaaaccatttaactacgaaatggatgttacaacggattccgcaggtgctactgagcgtaagaacatcgatttagttgaaactttcaactatctcattggcttacatgtgaaatccatcgaatccaatatcgaacgtggctatgtgcgtgttgaaggaacgctaccaactggcgagcgtacccttattctgtggcgcgattgcgacaagatcggctatgaagaattgaataaatatgccaacagattcgatttatatgcaaaagaaaatacgttcgacgttatctatatcaatggcgatcatnnnnnnnnnncctaccgcctttaccgttga

SEQ ID NO: 22379 - DNA, 216 bp, Escherichia coli; identical to SEQ ID NO: 17121

SEQ ID NO: 22380 - DNA, 231 bp, Escherichia coli
atgtctatatggggatctccacctacctggatttttttccggttaaacgttaatcaggctggtgggttttacctgttctgtaggagtggtcattatgaccatcccttatatcgtccgaatgccggacgaaggtacacatcaaccgtaacgaaaatcgttatggttgccttgatggtctgcgtggtcattatgaccattcagccaatgaccttaatcagaatttttcgctaa

SEQ ID NO: 22381 - DNA, 171 bp, Escherichia coli
atgagtacgcgtattaatttgtggcgggcgctttttggcgagaaacctcgtatcttgctggaaaatagtgattttactgtcacgtcttttcgctatgacagcggtgtcgaggggcttaaaattgcaaacagtcgtggacatttgattattcttccctggatgggcagatga

SEQ ID NO: 22382 - DNA, 1488 bp, Escherichia coli
atgaattttcatcatctggcttactggcaggataaagcgttaagtctcgccattgaaacccgcttatttattaacggtgaatatactgctgcggcggaaaatgaaacttttgaaaccgttgatccggtcacccaggcaccgctggcgaaaattgcccgcggcaagagcgtcgatatcgaccgtgcggtgagcgcagcacgcggcgtatttgaacgcggcgactggtcactctcttctccggctaaacgtaaagcggtactgaataaactcgccgatttaatggaagctaacgctgaagaactggcgctgctggaaacgctcgacaccggcaaaccgattcgtcacagcctgcgtgatgatattcccggcgcggcgcgcgccattcgctggtacgccgaagcgatcgacaaagtgtatggcgaagtggcgaccaccagtagccatgagctggcgatgatcgtgcgtgaaccggtcggcgtgattgccgccatcgtgccgtggaacttcccgctgctgctgacttgctggaaactcggcccggcgctggcggcgggaaacagcgtgattctaaaaccgtctgaaaaatcaccgctcagtgcgattcgtctcgcggggctggcgaaagaagcggggctgccggatggtgtgttgaacgtggtgacgggttttggtcatgaagccgggcaggcgctttcgcgccataacgatatcgatgccattgcctttactggctcaacccgcaccgggaaacagctgctgaaggacgcgggcgacagcaacatgaaacgcgtctggctggaagcgggcggcaaaagcgccaacatcgttttcgccgactgcccgaatttgcaacaggcggcaagcgccaccgccgcaggcattttctacaaccagggccaggtgtgcatcgccggaacgcgtttgttgctggaagagagcatcgccgatgaattcttagccctgttaaaacagcaggcgcaaaactggcagccgggccatccacttgatcccgcaaccaccatgggcaccttaatcgactgcgcccacgccgactcggtccatagctttattcgtgaaggcgaaggcaaagggcaactgctgctggatggccgtaacgccgagctggctgccgccatcggcccgaccatctttgtggaggtagacccgaatgcgtccttaagccgcgaagagattttcggtccggtgctggtggtcacgcgtttcacatcagaagaacaggcgctacagcttgccaacgacagccagtacggacttggcgcggcggtatggacgcgcgacctctcccgcgcgcaccgcatgagtcgccgcctgaaagccggctccgtcttcgtcaataactacaacgacggcgatatgaccgtgccgtttggcggctataagcagagcggcaacgggcgcgacaaatccctgcatgcccttgaaaaattcaccgaactgaaaaccatctggataagcctggaggcctga

SEQ ID NO: 22383 - DNA, 573 bp, Escherichia coli
atggaaaccaatatcgttgaagtagagaactttgttcagcagtcagaagagaggcggggtagcgcctttacgcaggaagtgaaacgctacctggagcgctacccgaatacgcaatattttgatgttttacttaccgatttgaatggttgcttccgtggaaaacgtattcctgtttcaagcctgaagaagctcgagaaagggtgttatttcccggcctcggtatttgcaatggatattctgggcaacgtagttgaagaagcgggtctgggtcaggaaatgggcgaaccggatcgtacctgtgttcctgttctcggttccttaaccccttctgccgccgatccagagtttataggtcagatgctcctgaccatggtcgatgaagatggcgctccctttgacgttgagccgcggaacgttcttaaccgcctgtggcagcagctgcgccagcgcggattgttcccggtcgtagcggtagagctggagttctatttactggatcgccagcgcgacgctgaagggtatctgcaaccgccctgcgcgcccggcaccgatgaccgcaatacacaaagctag

SEQ ID NO: 22384 - DNA, 1335 bp, Escherichia coli
atgaaactgaatgcaacttatataaaaacacgtgataaatggtgggggcttccgctgttcctgccttctttaatcttgcccattttcggccacatcaatactttcgcgcatatttcttccggtgaggtttttctcttttatctgcctctggcactgatgatcagcatgatgatgtttttcagctgggcggcattgccagggatcgccttagggatttttgtccgcaaatatgcagagctgggtttttacgaaacgctctcattaacggctaattttattatcattatcattctctgttggggcggttacagggtctttactccccggcgtaacaacgtttcacatggtgatacccgtttaatttcccagcgtatattctggcagattgtgtttcctgcaacgctgtttctgatacttttccagtttgctgcgtttgtaggattactggcgagcagagaaaatctggtcggcgtcatgccttttaacctcgggaccttaatcaattatcaggccttactggtgggcaatctgattggtgtcccgctgtgctacttcatcattcgtgtagtgcgaaatccgttttatttacgtagttattattcgcaattaaaacagcaggttgatgtcaaagtcaccaaaaaagagttcgcactctggctactggcattaggtgctttactgctgctgttatgcatgccgttaaatgaaaaaagcacaatttttagcaccaactataccttgtcattattgctgcccctgatgatgtggggagcgatgcgctatggttataagctgatttcgctgctctgggcggtcgtgttgatgatcagcatccacagctatcaaaattacattcccatttatcctggctataccacgcagctgaccataacctcctccagttatctggtattctcttttattgtcaattatatggctgtactggcaacccgtcagagagcggtagtcagacgcattcagcggcttgcgtatgtggacccggtggttcatctgccaaatgttcgcgccctgaatcgcgcgttgcgtgatgccccctggtctgcgctttgttatttacgcatccctggcatggaaatgctggttaagaactatggcatcatgctacggattcaatacaagcaaaaactttctcactggctgtcacccttgctggaaccgggtgaagatgtttatcagctttcgggtaacgatctcgcgctgcgactgaatacagaatcgcaccaggagcgcattaccgcactggatagccatctcaagcaatttcgtttcttttgggatggaatgccgatgcaaccgcagattggcgtcagttaa

SEQ ID NO: 22385 - DNA, 216 bp, Escherichia coli
atgagtacgatagctgagcttgtcagggctaattttcgtgaagagttggcgcgttggtatcggtatcgttcatcgtccagtttgccgcttgatgagttgtatgagcattcacctgccgcacgacgctatccgcgtgaccgtgttcttcggcggttgttcagactcaacaatgagtttcagcgcaacagaataatccggagtctggatttaaagtga

SEQ ID NO: 22386 - DNA, 1881 bp, Escherichia coli
atgactccaagtgaacttagctacctgctttgggcgcaggttgacagggtggctccacacctgttgccaaacggcaagaaagaggggcatgagtgggttgccggtaacgtcaacggtgacaagggaaacagccttaaggtcaaccttagcggcaagaaaaaatgggctgatttcgctgagggagacggcggtgacatgcttgatttgtggatggcatgtcgtggaattaacctgcatcaggctatgcaggaagcgaaagcatttctcggtatcaaggatgacgatcaccatttcgatgccagacgtgagaagaaattctccagacctgatcgcaagaaaatcgcccgctacgttaccagaacagaatcccatcttgagtacctgcaatcgcgtggcatatcgccagaaatcgtaaagcgctacgaggttgtcagcggcaaggtgtggaatggagagcgggaactggatgctctggtgattccgtacaaacgcgatggtgagttgttgcaggtcaagcgaatcagcactgagcgcccggacgggaagaaagtcattatggcagaaggtgattgcgaaccttgcctgttcggatggcaggctctggacgctggcgtgagggcggttgtgctttgcgaaggcgaaattgattgtatgagctatgcgcaatacggcatctcggcgttatccgtgccgtttggtggcgggaaaggcgctaagcaacagtggattgagtttgagtatcacaacctcgacaggtttgaggaaatattcatctcgatggacgttgatgatgttggtcgtgaagccgcaagggaaatcgcaagccgactcggtgaacatcgttgccgtcttgttactctgccgtacaaagacatcaacgaatgcctgatgaacggtgttaccgaggatgaaatctggcagtacatcggcacggcatcctacttcgatcctgaagaactctacagcgcgcgagagttttaccaggacactatcaacgctttctacggcaagcagcagtatctgtttaatccaccgtgggaatctctggcagataaattccagttccgtgaggcagagttgacgctggtcaatggggtgaacggtcacggaaaaacggaggttgtcgggcatatggcacttgaggcaatgcgtcagggtgtgaagacgtgcatcgcgtcacttgagctgaagcctggtattctccttaagcgccttacccgtcaggcgacgtgctgcaagatgccgccagtgctggaaattgactctgcatttaaattttatgacgaaagactttgggtgtttggcctgaccggaacggcgaaagccgacaggctgatcgaaatattcgactacgctcgccgccgatacgggatccagttattcatcatcgacagcctgatgaaatgtggcataggcgacgatgactataacgggcagaaggcgtttgttgactcgatttgcgacttcaaaaacaaaacaaactcccacgtcattctcgttactcactcgcgaaaaggagacagcgaagaaaaaccaaccgggaaaatggacgtaaaaggctctggagcgataacagacctgacagacaaccttttcatcatctggcgtaacaaggctcgcgagagagcgttacagagagttcagagtggtgaaaagatgtcagagaaggacgaacagctactggcgtctcctgcatctgttttgatgcttgaaaaacaacgtaacggcgaaggttgggaaggtggtgtcccgttgttccttgacgagcaatcgcaccagttcctgcaacttgaatcaggatcgccatatagctacatcgccaatatgccgaaatcggaatatgacgaggcgtggcgacaggaaaacgtgacggagtattaa

SEQ ID NO: 22387 - DNA, 732 bp, Escherichia coli
atgagcatgaatcttatggctaaggccatgaatataaaggttggcaacccactgagaaaactggttctgattaaacttgccgataacgccaatgataatggcgaatgctggccttcatatcaacatgtcgctgaccagtgtgaggtgagcagatcgacagtaaaaagtcacattagggcactggaagagatggggcttttgaaaagggaattcagaagaaaaggagagcttaaccagtcaaacgttttttatctgacgctggataatgcacaacaaatccagccagaatcaggtggggcaggagctgcccccagaacctatcactcttttgaaccagtcaatgaacctaaaaacattatgttcgaacatgtccgaacagagtgtgaaaaaactcctgaccgtcacgaagaaaccgacaaggcattcgaggaaatattctggtgtgcaggcatgcggaaagccgggaagaaaaacgcagcttcagcattcagaacacagttcagggaatggcgtaaaactaccaggggtacggcaagcgagtttgccacgatgctggcagaagacatcgcatgcaggaatggtaagcagttcggattcgacaggttgttaccatcgagctacctgaacggtcagcgctggaacgacgagaagccagaaactattcaaccacaatccaaaccatcatccgcaatcaccgtatcgaaaactggctacgtgtttttcgacaggtga

SEQ ID NO: 22388 - DNA, 144 bp, Escherichia coli
atgcgaaaaacgcaggaaaataaacgcgttaatcaccgaaaagatgtgctacgtgaccagttttatcagggggttaatccagcaatagctgtgccactgagagaaatacttaacaggtacaaaacttcggagaagtcaaaatga

SEQ ID NO: 22389 - DNA, 546 bp, Escherichia coli
atggggttaatccccccaatagacgaggctgatcctacaagccatactcgttccccatacaaaatggatatagtacgctttgttagtactttttcgcttagccctgcaaggattaaaatccttaagggttttcttaactttcgtgtttcactcactcaagcagggctagttgaaggttttcagtgggtagatggaagcttcacagaacatattgaacttattgaaaaaaggccaccgaatgatgtcgatgttgtgaccttttttcaattcagtaatggcgataatgatgcaatcgtaatcggtagaaagccagagctatttgatcatgattttgttaagaaggagtttttcgtagattcctacttccaagaacttaatctaccaagtcatgagcttgttgaaatgactgtatattggtacagtatgtgggcacatagacgcgatctgtcgtggaagggatttatccaaatcccgttaaacccacaacttgatgttgtggcaatgactatacttaattcggctactactgagggggtcaaacaatga

SEQ ID NO: 22390 - DNA, 930 bp, Escherichia coli
atgaatcgtaatgattatgttttcgctctcagtgagcgcgagcaaataagtaatctattaaaaaatatgccaacaagtcattctattagccgaaaaagcttagaagaccgtctggagaaagttgagcgattaatttcacaagctgacgttcgagaacatgaacctacgcatgctgtgttaacttttagaggcccaacagtagttggcacgcatggcatttcagcagtatttggaacaaaagctatatcttgttttaatgatgcaatagcttacttggcaacctctttcaatggcccacttcctgcatcaggcaagataccaaacatagaaaataatcatctcatgattaccgcgtcagcccgtggttctttcggattcgtacttgaagagtttagacctgatgctcctcttgaattcgatgaagaaaccccagtagcaaaagctattaataaggccagaaaaatatttcaggcaagcttggataatgatgatgaagaattgtctgatgctatagaaaacttagactctcgggccttagataaaatcagagcattcattcattatctgcatgaaaataaaacagtttttacacttaaaagccaaggttttagcatcgtttttagagagccaaaacagcttgaagctgtatatcaacatctcagcaatgataacattcagcaggaaaaaattattgagaacgttatatttttgggaactcttcctaacaagcgccaatgtgaatttatagttttaggtaacactgatatcagaaccgctagcattgacaaagctgtagatgacccagatattataaacaagcacttaggaagcgttgcaacagccacgttcctgaaaaaaactgttggtaagggcaagcccagatacactctggtttctcgacctcaatgggatattaaatcaatcgattag

SEQ ID NO: 22391 - DNA, 2163 bp, Escherichia coli
atgaaaaaaaatgcccagtccgtggaagcctggctggaggcgatgatcgccgtggcgcgctattaccgcctcgatttttcccaggagaatgtgcgcgcgaccgtcaactgggagcgcgacagcaaacgggaagagttactcactgatatggcgcggcagttagggatggggctgcggctggtggaattttccgccgactcgcttaacccgtggcggctgccgctgatcgcggtgtttgataatcaacagattggcgtgatcacccgccgcgacaatcacgacaatatcagcgttcagttcagcggtgacgaagggctggaaaccacattaaacgtcacggatatagaagacaaaatcgttgaactggcgctactgcgcccgctcagcgcaattcccgatgcgcgggtagacgactatattcgcccgtatcaggcgaactggttctggaatctctcgctaaaagactggcggcgctatggcgatattatgctggcgtcactggtggcgaacgtgctggcgctggcggcgatgattttctcgatgcaggtttacgatcgggtggttccggcgcaatcctacccgacgctgtgggtgctgttcgccggggtgatgatggcgatcctgtttgaattctgtatgcgcatggtgcgcacgcacctttccgatgtgattggtaagcgggcggatctgcgcatttcggatcgcgtttttggtcacgcattacggctgaaaaataacgtgcgatcgaaatccaccggatcgtttatctcgcagatccgcgaactggaatcggtgcgggagcttattacgtccaccaccatcggcgcagtggcggatctgccgttcttcctgctgtttgtttttattttgtggatgatcggcggttggctggtgctggtggttttgctggcgctgccgttattggtgatccccggcctgctggtacaacgaccgctggcgcggctggcgaacgaagggatgcgcgagtcggcagtgcgcaacgctacgcttgtcgaggccgtgcagtcgattgaagacattaaactgctgcgtgctgaacagcgtttccagaatcagtggaatcacaccaatgacgtggcgtcatctatcagcatgaagcaacgttttctcaccgggctactgctcacctggacgcaggaagtgcaatccatcgtttacgtggtggtgcttctggtgggctgctttatggtgatgaacggcgacatgactaccggcgcactggtcgggacgacgatcctggcttcgcgcaccatcgcgccgctgtcgcagatatccggcgtgctctcgcgctggcagcaggcaaaggtggcgcgtaatggcctcgatgaactgatgaagcgcccggtggatcagccggaacacggcaaactggtgcataaagcggtgctgcacggtaattatcagttcagcaacgcggtgttttattacgacgaagaagagaagattgccgatgtggcgatcggcaaactcaacattcaggctggtgagaaaatcgccattctcgggcgcaacggcgcgggtaaatcaacgctactgcaaatgctcgccggaatgcgtatcgcccagcaggggcaggtgctgctggataacatcagcatcgggcaacttgatccggcagatctgcgccgcgacatggggctactgagccagaccggacgactgttctttggttcgctgcgggaaaacctcaccatggggatgccggaggccagcgatgaagatatcgaacgcgcattaaccctcagcggggcgctgccgtttgtgcagaagcagaaaaatggcctcaactacatgattcaggaagggggatttggcctctctggtggtcagcggcaaacgctgctgctggcgcggctgctcatctctcaacccaatatcgtgctgctcgatgaacccagcgcctcgctggacgaaatggcggaagcgtatttaatcgaacaactgaaacagtggattggccatcgcacgctggttatcgccactcaccgcacggcaatgctgcaactggtggacaggatcatcgtgatggatcaggggcggattgtgatggatggcgcgaaagaggccattttgcgtgaacagggcgaacccacgacgcgacgggtggtgttgcaggagaagaataaggggtctgctgcatga

SEQ ID NO: 22392 - DNA, 7908 bp, Escherichia coli
atgagcctgattattgatgttatttcgcgtaaaacatccgtcaaacaaacgctgattaatcctggcgacgtcacggttgttatttatgagccttccgtggtgcaggttcatgctcaggcctctgtcgttgcgcgttacgtccgtgaaggaaatgacctgctgatctatatgcaggacggcacggtgatccgctgcaacggttatttcctgcaagcggcgaataccgctgaacaatcggaactggtgtttgccgatggacaacagctcacccacgtcacctttgccgatactgctgcgggtggattagcccccgtagaactgactgcccagaccaccgcgattgaaagcattgcgccatttcttgataccattgctcagaccagcaccttcccatggggatggctggcgggggcggcggtaggtggtggcgcgcttggtgcactgctggcaagcggtggcgatggcgactcgaaaacagaagtgattaataaccctccgccacccgctgagcctggcaacgccacaccatcatttttagttaccgataatcagggcgatcagcgcggcattctcgccaccaatgacatcaccgatgacaccacgccaacctttagcggcagcgggcaggcgggggcgactattcagattaaagacagtaacggcaatactattgccagtactcaggtagacaacaacggtcagtggagtgtctcgttacccacgcaaagtgcaggtgaacatacctggtcagtggtgcaaattgtcggcagtaccatcactgacgccggttcgataacgttaaccatcgacaatagtcaggccagcgtgcaggttgccaccaccgcaggcgataacattattaacgccagcgaacaggccgccgggtttacgctttctggcaccagtagccatctggcgcagggaacagaactcaccgttacgctaaacggcaaaacctacaccaccagcgtaggcgctaacggtgcctggagcgtgcaggtgccgaccgccgatgcacaggcgttaggcgaagggaatcaggcggtgctggtcagtgggaaagacgccacaggcaatacggtcactggcgcgcagctgctaacggtcgatacccaaccgccaacgcttgccatcaacaccatcgctcaggacaacatcatcagtgctgcggaacataacgtcgcgctggtactgagcggcacgtcgaatgcagaagcggggcaaaccgtaacactgaccgtcaacgggaaaagccatacagcaaccgtcggtagcgacggaacctggcaagtgacgctgcctgccacggaagtccaggcactggcggagggtaattacgctgtcaatgccagtgtcagcgatcgggcagggaacagcaccagccacagcgcgaatttcacggtagacacctcagcacccgtggtcagtgttaataccgtggcgggcgacgatattcttaataatgctgagcaggccgtcgcgcagatcatctccggacaagttagcggtgcttctcctggcgatacggtcaccgtgaagttaggtgccactgttctgactggtgtagtgctggcggacggtacatggaatgtggcgctggatccggcggtaacccgcaccctggcgcgtggccctaacgatattattgtcacggtgaccgatgctgctggtaataccggtacggcgactcataacatcactctggtgggcgtcgcgccgcaagtggcgatagatgcgatcagcggtgataacgtactgaatgcgctggagtctcagcagccgctaacgttaagcggcaccagcaatttacccgatggcggcacggttaacgtgacgttgaataatgtcacgtatagcgctcaggttagcggcggcgtctggtcgctgagcgttccggtaagcgatgttgttaatctggcgaataccaattacaccgttactgccagcgccacagatgtgaccggcaacaccggcaccgcgcagagcaatttactggtcgatacggtgctgccacaggtgatcatcaacacctttgcgggcgacaacattgtcaacaacgccgaagcggcggcagatcaaactctgagtggcgtcgtggtgggcgctgcgcagggcgacacggtcaccattgaactgggcggcaatatttacacggcgacggtgggcagcaatctcacctggagcgtgaacgttccggcggcagatttacaggcgctgggcgacggtgcgttaaccattaatgcttcggttaccaccgtacatggcaatacaggcagcagtgcgcttgatatcaccatcagtgccgggctgccggggctgcgcattgacactatcgcgggcgatgatgtgatcaatgccgttgagcagcagcaaaacctgattatcaccggtagcagtaccaatctgcccgccggaagagtggtcactgttttgctcgggggcaacacctaccagggggtgaccgacagcaacggcaactggcaggttggcgtgcctgcggcagatctacaggcactgacgccgggtacgatagtggttaatgccagcgcaacggaccccgccgggaatccggtttccatcgatcgcaacgtggaagtcaatccgggcgcggtgcttatcaccatcaataccgtctccggtgatgacattattaatgccgcagaaaaaggcgcgccgttaacgctgactggcaccaggcagttggtggaaaccgggcaaaccgtggtagtgaaattcgccgggcagacctttaccaccaccgttcaggcggggggcggctggagcctgaccgttcccgccagcgcggtgagcagcctggcagatggcgcggcggaaatcaccgcgaccgtcaccaacatcagcggtaatactggcgacacctcccgaaccattaccgtcgacagccaggccccggcgttgagcatcgatccactgaccgctgataacatcattaacgccgccgaaagcgggcaggatcttcctatcaccggcaccactgacgcccagccggggcagacggtgaccgttacgttgaatgggcagacctatcagggcgtcgtgcagtccgacggcacctggagcgtgaccgttcccgccgccaacgttggcgcactggctgacggcaacgctacggtcaccgccagcgtgaacgatgttgccggtaatccgagcagcgtctcacgcgtggcgctggtcgatgccacgccgccggtggtaaccattaatccggtggcgaccgataacgtcatcaatacgccggaacatgctcaggcgcaaatcatcagcggcacagtcaccggcgcgcaagcgggcgatatcgttactgtgacgctgaataatgtgaattacaccaccgtggtggatgcttccggcaactggagtctgggcgttccggcctcggtggtcagtgggctggcggacggcagttatcctgtcagcgtctcagtaaccgatcgtgccggaaacacgggcagccagtcgctgaccgtcacggtcgataccgccgcgccagtaattggtattaacaccattgctggcgatgatgtgataaatgccagcgaaaaaggggccgatctccagattaccggtaccagcgatcagccagccaataccgccatcaccgtgacgctgaacgggcaaaattacaccaccacgaccgacgcctccggcaactggagcgtcacggttccggcatcggcggtaaccgcactgggccaggccaactacacggtaacggcggcggtgaccagcggtatcggcaacagcgccaccgccagcggcacgcgggatatcaccatcgacgccaatctacccggtctgcgggtcgatacggtggcgggcgatgatgtggtcaatatcatcgagcatgggcaggcgctggtgattaccggcagcagctcggggctggctgaaggcacgccgcttaccgtcacgattaataatgtggaatacaccactgcggtgcaggccgatggtagctggagtgtgggcgttacggcggtgcaggttagcgcctggcctgcgggaacagttaatattgccgtatccggggaaagtagcgccgaaaatccggtgagcattacgcatccggttatggtcgatctcacgccggcggcgatcaccatcaacaccatcgccacggatgatgtgattaacgccacagaaaaaggcgctgatttaaccctttctggcactaccacgaatgttgaagcaggccagacggttactgtgacctttggcggtaaaaactacactgctaccgtggcgagcgatggtagctggaccgccaccgtacctgccgccgatttagcggcattacccgagggcagcgcctccgcgcaggccagcgtcagcaatatcaacggcaatagcgcctcggcggtgcataactacagcgtcgatagcagtgccccgaccatcattatcaataccgtcgccagcgacaatatcgtcaacgccagcgaagccgatgcgggtgtgacggtgagcggcagtaccaccgctgaagcggggcagattgttacggtaacgctcaatagcccgaccgtgcagacctatcaggcaacggtgcaggccgatggcagctggagtattaacattccggcggcagaccttgaggcattgaccgatggcagccacaccctgactgctacggtcaatgacaaagcgggcaacccggcgagcaccacgcataatctggcagtggatctcaccgttccggtgctgaccatcaacaccatggcgggcgacgatattattaacgccgccgaacacgggcaggcattggtgatttccggctccagcactggcggagagtcgggagatgtcgtcagcgtcacgctaaacaataaaacctacaccacgacgctggatgcctccggcaactggagcgtcggcgttccggcggcggatgtcacggcgctgggtagcggcccgcaaaccatcaccgccagcctgagcgatcgcgcgggcaacagcgacagcacgactcacgatgtgaccgttgatcttagcggcccgacgctgaccatcaataccgtctccgacgatgacattattaacagtacggagaaaacccaggatctgatcatcagtggcggctccagcggtctggcgaccggcaccacggtcaccgtgatgttgaacggcctggcgtacagcgccactaccgatagttccggcaactggagcgttaccgtgcccgcttcggcggtcggcgcgctgggcgaggcggtctattcgattagcgccagtgccaccgacagcgcgggcaacagcggcagcaccacccatacggtgaatgtcgaatcgctcctgcctggggtgatcattaataccgtggcgggcgatgacattatcaatgccgctgaaatcgctgtggcgcagaccatcagcggtcaggtcacgggaacggcggttgcggggaatacggtgattgtcaccattggcggcaatcaatacaccgccaccgtgcagtcagatttaagctggagcgtcagcgtacctgcgaacgttttgcaggcgctgggcaacggtgaactgaccatcagtgcctcggtgaccaattccgcaaataataccggcaccgcgacgcgcgacatcgtgatagacgccaacctgccaggcctgcgggtcgataccgtggcaggcgatgatgtgattaacagcattgagcacactcaggcgctggtggtcaccggtagcagtagcggactggcggcgggcgcggcgttgacggtggttatcaatagcgtcacctacggcgcaacggtactcgccgatggcagctggagcgtcggcgttccggcggcagatgtcacaaactggcctgcggggacggtcaatattgccgtctctggcacgaataccgccggaacaacaaccagcattagccatccggtcacggtcgatctcgctaccgtggcgattaccatcaacaccctttccactgacgatgtaattaacgctgctgaaaaaggctctgatttgcagctttccggcaccacctccggcgtggaagcggggcagactattaccgttattttcggtggcaaaagctacaccaccacggttgccgcggataatacctgggggctgacgatcccagccgccgatctcgcaaccttgccggatggcgcagcaaacatccaggccagcgtcagcaacgtcgcgggtaacaacgcccaggcaacgcatgtttatagcgtcgatgccaccgcgccctccgttactatcaacaccatcgccagcgacgatattcttaatgccgccgaagcgggatcggcgctgaccatcagcggcaccagcaccgcagaagccgggcagacagtgaccgtgacgctaaacggcgtcaattacagcggcaacgtgcaggctgacgggagctggagcgtcagcgtaccaactggcgatttagccgaccttaccgccagcccctatacggtgagcgcggcggtcagcgacaaagcgggcaacccaacctcggcaacgcataacctgacggtggatcttgccgctccggtcgtcaccattaacacggtagcgggcgatgacatcattaacgccacggaacatgctcaggcgcagattatcagcggctcggcaacgggcgcgacgacgggtaacacggtttccgtggcgattggcacgactacctacaccaccgtgctggacgccaacggcaactggagcatcggcgtgcctgccagcgtgatttccgcgctggcccagggcgatgtgaccattaccgccacggttaccgactccgcaggcaacagcggcacggcctcgcacactgtcagcgtggcgctcggtgcaccgatactcgccattaacaccatcgccgtcgatgacatcatcaacgccacggagaaaggcgcggatctgtcgatttccggcaccagcaaccagcctgcgggcacgcaggtaactgttacgctcaacgggcaaaattacaccaccacagccgatgcttccggtaactggagcgtgaccgttccggcgtcacgggtgagcgccctcggtgaagccacttatacggtgactgccgccgccactgacgccgatggcaacagcggttccgccagccataacgtacaggttaataccgcgctgccgggcgtcaccattaacgtggtggcaacggacgatattattaacgccgccgaagcgggcgtggaccagaccatcagcgggcaggtgacgggtgcaacggcaggcgacacggtgaccgtcacgctcggcggggcgacgtacaccgccacggtgcaggcgaatttaagctggagcgtcgatgttccggcagccgctttacaggcgctgggcaacggtgaactcaccatttcggcttcggtaacgaacagcgtaggcaataccggtaacggcacgcgcgaaatcaccatagacgcgaatctcccgggtctgcgggtcgataccgtggcgggcgatgatgtggtcaacattatcgagcacggtcaggcgctggtgattaccggcagcagctctgggctggcggtgggtagtaatgtcacgctgaccattaacgggcaaacctatgttgcggcagtgctggcggatggcacctggagcgtcggcgttccggcggtggatgtcagcgcctggcctgcgggggcgctgacgattacggcgagcggcagcactaccgccggaaacccggtcagcgttacgcatccggtgactgtcgatctctcggcggtggctgtcagcatcaacgccattaccgccgatgatgtgattaacgctgctgaaaaaggcgcggcgttaacgctcaccggcagcacttctggtgtcgaagccggacaaacggtcaccgtcacctttggcggcaaaacttacactgcaagcgtcgcggctaacggttccggcggcagatatggcagccctgcgtga

SEQ ID NO: 22393 - DNA, 1410 bp, Escherichia coli
atgtcacgttataaaataggtcataaacaaccacaatttcgttattcagttctggcccgctgcgtggcgtgggcaaatatctctgttcaggttctttttccactcgctgtcacctttaccccagtaatggcggcacgtgcgcagcatgcggttcagccacggttgagcatgggaaatactacggtaacttctgataataacgtggagaaaaatgtcgcgtcgtttgccgcaaatgccgggacatttttaagcagtcagccagatagcgatgcgacacgtaattttattaccggaatggccaccgctaaagctaaccaggaaatacaggagtggctcgggaaatatggtacagcgcgcgtcaaactgaatgtcgataaagatttctcgctgaaggattcttcgctggaaatgctttatccgatttatgatacgccgacaaatatgttgttcactcagggggcaatacatcgtacagatgatcgtactcagtcaaatattggttttggctggcgtcatttttcaggaaatgactggatggcgggggtgaatacttttatcgatcatgatttatcccgtagtcatacccgcattggtgttggtgcggaatactggcgcgattatttgaaactgagcgccaatggttatattcgggcttctggctggaaaaaatcgccggatattgaggattatcaggaacgcccggcgaatggttgggatatccgcgcagagggctatttacctgcctggccgcagcttggcgcaagcctgatgtatgaacagtattatggcgatgaagtcgggctgtttggtaaagataaacgccagaaagacccgcatgctatttctgccgaggtaacctatacaccagtgcctcttctgacactgagcgccgggcataagcagggcaagagcggtgagaatgacactcgctttggcctggaagttaactaccgaattggcgaacctttggcgaaacaactcgatacggatagcattcgcgagcgtcgaatgctggcaggcagccgctatgacctggttgagcgtaataacaacatcgttcttgagtatcgcaaatctgaagtgatccgtattgctctgcctgaccgtattgcaggtaagggcgggcagacggtttccctgggacttgtggtgagtaaagcaactcacggtctgaaaaatgctcaatgggaagcgccgtctttgctggccgcaggcggaaaaattacggggcagggtaatcagtggcaagtgacgctcccggcttaccaggcaggcaaagacaattattatgcgatttctgcggttgcctacgataacaaaggcaatgcctcaaaacgcgtgcagacagaggtggtcattaccggagcaggtatgagtgccgagcgcacggcgttaacgcttgacggttag

SEQ ID NO: 22394 - DNA, 1323 bp, Escherichia coli
atgaccaaattctcagtggttgtcgcaggcggtggaagcacctttacgccaggcatcgtgttgatgctcctggcgaatcaggaccgtttcccgcttcgtgcactgaaattttatgataacgatggtgcgcggcaggaagtgattgccgaagcctgtaaagtcatccttaaagaaaaagcgccggacattgcgtttagttacaccaccgatcctgaagtggcattcagcgacgttgattttgtcatggcgcacatccgcgtcggcaaatacccgatgcgcgaactggatgaaaaaatcccgctgcgccacggcgttgttggtcaggaaacttgcggacccggcggaatagcgtacggcatgcgttccattggcggcgtcctggaactggtggattatatggaaaaatattcaccaaatgcctggatgctcaactactccaacccggcagccattgtcgcagaagccacgcgtcgtctgcgcccgaatgcgaaaatcctcaacatctgtgacatgccaatcggtattgaaagccggatggcgcaaattgttgggctgcaagatcgcaaacagatgcgcgtgcgctactacggcctgaaccactttggctggtggacatcaattgaagatttgcagggcaacgacctgatgccccagctgcggcaatatgtctctaagcacggttatgttccaccgcagcaagatacacatactgaagcgagctggaacgacacctatgcaaaagcgcgggatgtccaggcactggacccggatacattgccgaacacctatctgaaatattatctcttcccggattatgtcgttcagcattccaaccctgaacatacccgcgcgaatgaggtgatggaacatcgcgagaaacaggttttcgatgcttgccgcgccattacggcggcaggaaattcagcggcgggcaagctggaaattgacgaacatgcgtcatacatcgtcgatctggcggcggcaattgccttcaacactcaggagcggatgttgctgattgtgcctaacaacggggcaattcataactttgatgatgaagcgatggtcgagatcccgtgtctggtcgggcacaacggaccagaaccactggtggtcggcgagatcccgcagtttcagaaagggttaatgagtcagcaagtggcggtggaaaaactggtcgtggacgcctgggaacagcgttcatatcagcacctgtggcaggcgattacgttgtcgaaaacggtaccgagcgccgcggtcgccaaagctattctggatgagttgctggaggccaacaaagcgtactggccagagttacgttaa

SEQ ID NO: 22395 - DNA, 1143 bp, Escherichia coli
atgacaaataaacacccatcattgttttctccttttatgctgacagaaaaaataaagctacgtaatcgtatcgttatggctcctatgacaacctggtcagctaatcctgatggaaccatctctgagcaagaactcgaattttataaacgtcgctcacaaaatgttggtttagtaataacaggatgcacctatgtcacgccaagcggcattgggtttactcatgaatttgccgcgtatgacgaccgtttcattaacagccttgaaaagttagcagctgcagccaaaagtggcggtgctccggctattttgcagattttccacgccggtaataaagccatcccggagcttgtgccaaataacgatgttattagtgccagcgcatcaagtgtaaaatctggtgactttatgaagagagtggtacaaagcagggaaatgactgaaaacgaaattcaggaaaccattagagcattcggagatgtcacaaaaatggcgattaaagcaggttttgatggcgttgaacttcatggtgcgcacggattccttctgcagaatttcttctcccctctatttaaccagcgtaatgaccgatggggaggagatcttgaaggacgtatgcgcttcccgctggccgtattacaggaagtaaaaaatgtagtctatgaatatgcgacaaagtcctttgctatcggttacagaatatctcctgaagaatctgtaacaggggggctgcggatagaggatacttataaactccttgatcggctcatttcatccggtatttcgtatatacatacctcgctggtcagtattaacgatagctaccctgttgagtcgccaaatggcccccgaactattgaattgattttaaatcatattgcaggcagagtgccggtaatcgccgcaggtaaaatacgcacaccgtctcaggctcaagaagcaatttccgctggcctgccacttgttgcgatcggtaaagggctggtgataaatccagaatgggtgactttagctgaatcaggtagaagtcatgaaattcaaacagcccttaatccacaacgcgttcctgaattaaccattccggataaactatgggatcaaattcaggcatcgaaaggaactggctggtttccgttaatagattaa

SEQ ID NO: 22396 - DNA, 921 bp, Escherichia coli
atgaaaactgtttcgataaaacacacttactgggatatagctgctgatatctatttccctgacgattttaatagtgaaaaaaagtatcctgccattatcagtgcccatccaattggaagctgcaaagaacagacatcgggtagtgtgtatggtgccgccctggcaaaagctggctttatcgtcattgcttttgatgccagttttcagggaagcagcggtggagaaccgcgttatctggaagatccaacaatgcgagtaaaagacttcagcattgtcgttgattaccttactaccttaccttacgttgatgccgggcgtattggtgtactgggtatttgtggtggaggtggatatgccattaatgccgcaatgacagaacgtcggattaaagccattggtactgtcacgggtgcaaactacgggcgtcttatgcgtgagggatttacagcgtttaatcctatcggagcactcgaagcaatggcgcaacaaagaacagacgaagctaacggcgcaaaacttcgcgtagatgatttgctcccttcttctccggaagcagctcttgaagcgggattaacagaaatagacctttttgaagcaacagaatattatcgttcgccacgaggctgtgcgcctaatggggtaaatcgttcgctattttcacatcagactgttgccgtgggctgggatgcttttcatcttgcagaagtcctgttaactcaaccactaatggttgtagtgggcgatagagtgggcgcttttggtgcctatcgtgacggctgcgaaattattggccgcgctgcctcaaaacataaagagctggtcgtggttgaaggttattcacattacgacctgtatgataagccagaacctgtgaaacaggcactcgacaaattaattcctttttataaaacacatttgtaa

SEQ ID NO: 22397 - DNA, 927 bp, Escherichia coli
atgatgaaaatagagccttcaattttgccttctcttgcctggtttgcgctgattgttcgtgccggcagtttttccagagccgcttctgaaatgggtattacgcgggccgcattgtcccagaatttaaaatctcttgaggaacgtcttaacaccaagctgatataccgtacgacccgcaatatgtcgcttactgaggaaggacagcgtctgtatgaagtgctggtgtcggctttggggcaaattgatgatgcgttgaaagatgtcggtgatacccaacttgaacctacaggactgttgagaataaattcctcccgtgttgcagcaaggatgcttgttgagcctcatattggcgagtttcttactcgttaccccaaaacaaagatagaactcattatggatgacggtttatctaacattattgcggacggctgtgatgtgggcatacgtcttgagcaaggactggatgagcatatgactgccgttcctgtttctccgcttattaaactggttactgtggcatcgccagattatttaaaagaacacggtattcctgaaactcctcaggaattgagtaaccataattgtcttcggttgcggcataaaagtagcggtgcactctcagcatgggagttttcgaatgttgtggggggtaatgaagagttcgaaatagaggtgtcaggtaagtatatttctaatgatgacgaaagcatgatacgaatggcgctgaatggaacgggtatcattcaacatctggattttgcaatcgctgaacatatcaatgcgggcaagttacagccgattcttgaggattgggccgtttcatttcctggattttatatatatgtttcatcacgggtgagaatgccctctaaagttcgtgcttttattgattttatggtggagaaaagagtaaaaatagaaagttaa

SEQ ID NO: 22398 - DNA, 243 bp, Escherichia coli
atgaaagacgaaatacaaagtatgtgcctcaccccggatatcgttaaacagttcaatactcttttgaatacacactgccagtcctcagaagaggcgctcggcatgctcagcgcactgtgttttgagctcatgatgaaatgtggtgttcagtccataaacagcctcatggtcaacggtatgggcatatccatgcaactccaggggattgatattgccgaaaggcccggcaagaatattcactaa

SEQ ID NO: 22399 - DNA, 351 bp, Escherichia coli
atgactcaaaactatgaactgattgtgaaagggatccgcaattttgagaataaagttacggtaactgtagcgttacgggacaaaaaacgctttgacggtgaaatttttgacctggacatctcgctggaccgtgttgaaggtgccgcgctggagttttatgaggcagcagccagaaggagcatcagacaggtcttcctggatgttgctgccgggttatgtgaaggggatgagcagtcgccggaaaagcgccccataattttagaggcgcagaatgtgtggataacctacaaaggaaagctaccaggaagaattactggttctctgaagactcctccggaatcacaaccttaa

SEQ ID NO: 22400 - DNA, 189 bp, Escherichia coli
atgaggcgcttcgcaggcgcatgtcgtttcgttttcaatcgtgctctggcgcttcagaatgagaatcatgaggccggtaataaatacatcccttacgggaaaatggcttcctggctggttgagtggaaaactcaccggaaatgcagtggcttaaagatgctccgtcacagccattgcaacagtcactga

SEQ ID NO: 22401 - DNA, 627 bp, Escherichia coli; identical to SEQ ID NO: 17597

SEQ ID NO: 22402 - DNA, 453 bp, Escherichia coli
atgtttgggaaagaaagacaacgtcaaatattggcatatttgaataaacatgagcgggctacggttaatcaactcgccatcttattctctgtcagtaaagaaacgatccgtaatgatttaaatttattagcggagcaagggggtgttgagcgttgtcacggcggagcaataatattgcgtcggattttccattctcagcccgttaataacgttggtacctctattgaaaagttcctcaatcaggtcaactggcgaaaaaactcgatgacaaacaaaaaagggaaaataatgataagcaaagtttgtatattaggatcttttaatgtcgatattattgccaaagttgatcgcttccctaaaagcggcgaatcaattcttgccagcaataccatcattggacctggcggcaagggcgcaaaccaggcgatggcagccagcaaatgtcccgtctag

SEQ ID NO: 22403 - DNA, 462 bp, Escherichia coli; identical to SEQ ID NO: 14037

SEQ ID NO: 22404 - DNA, 978 bp, Escherichia coli
gtgggtgatagttataccgatggcgatatttttgatagtgtgaactttcgtggcctcaaaataaattcaacagaagcgatgttgcccgatagccaacatggttttgctccggtgattcatggtattgcccgcggcaccgcacaagtgagtgtaaaacagaatggatacgatgtttatcagactactgttccacccggcccttttactattgatgatatcaactctgcggccaatggtggtgatctgcaagtaactataaaagaggcagacggcagtattcagacattatatgttccttattcgtctgttccggttctccaacgtgctggatatacgcgttatgcgcttgccatgggggaatatcgtagtggaaataacctgcaaagctcccccaagttcatacaaggtagcttgatgcatggactggaaggaaactggacaccttatggcggaatgcaaattgcagaagattatcaggccttcaaccttggtattggtaaagatttaggactttttggtgccttttctttcgatatcacgcaggccaatacgacacttgcagatggcacccgtcacagcgggcaatcgattaaatccgtctacagcaaatccttctaccagacgggaaccaatatccaggtcgcaggatatcgctattctacgcaaggtttttataacttatccgacagtgcctacagtcgaatgagtggttacaccgtcaagcctcctaccggagacagcaatgagcagacacaatttattgattattttaatctgttctacagtaagcgtggtcaggaacaaataagcatctctcagcagcttggaaattacggtacgacatttttcagtgccagtcgccaaagttactggaacacgtcacgcagcgactggatttgcccctatatttccagacacctgttatcacttaacccattactggcttgctgccgtagatattcccgtggcgagcgataa

SEQ ID NO: 22405 - DNA, 189 bp, Escherichia coli; identical to SEQ ID NO: 17374

SEQ ID NO: 22406 - DNA, 189 bp, Escherichia coli; identical to SEQ ID NO: 17375

SEQ ID NO: 22407 - DNA, 582 bp, Escherichia coli
atgaatcttgccctaagaaagattatatatgatccaattagttatattcatcctcaacgagtaagttggaataatgcacgtattagcaatccggtacttagatctattaccaatgaaatgatactcctacagtacaatctttcagttgagcattttagtctgaatagttcacttatttactacataaacaattggaaattatttccattgatctgtttactcagtggttgtcacttttatcgagaaaggtttgcagaacgcggatttttttacaaggttcctgatgtgctaaggaattatttatcagcgataccggtggaaataaatgaaaaggcacgatataaacctggcatcgttaactatcagaatatcatcacatgtggtttttcaacgttgttgccctatgtaaggcaacaaccgttggcaatgcagcaacgatttaatttattatttcctgattttgttgaccacatacaattgccgttaccagttgcgtctactcttttggagagaattacattttatgcgaaaaaaaatagagatgagcttgataaactctcctgcaaatggtgttgtgattaa

SEQ ID NO: 22408 - DNA, 708 bp, Escherichia coli; identical to SEQ ID NO: 17605

SEQ ID NO: 22409 - DNA, 1218 bp, Escherichia coli
atgaataagatatataaagtcatttggaaccatacaacccaaaaatgggatgttgtttcagaattgacgagttgtagaaaaaaatgtaaatcaactcgcttaggaattgctttatcagcaatggttctggggggcgctattgcaattaattgcaataacgcaatggcagatgtcatattgtcaccagactggcgtccgggtacgaataactcgggtgttggggctgcaacagtaagtggtaaaaccgaatacatcactggtccaaatgtcgtccagtctggtgggtcaggtcttatctggatgactgtagaacaggcaattttaaatggttacaccactggagataatttatccggattgatttacgtcaataccggagaaaaaacaaaaaccattacagtgaaggatgaggttactggcgcttatcaaacacttcaagtgtttgatactgactctttctcacaacgcgatgcggggactggaggaaatgaaaccattcctggttttagtggcactgcagattttttcaatgcgacacgttttgtaacagccaataatggcggtacagctattttggatgtgggttcaccagcaatcggtaatttttttaaaaatacacagcttgctgtagctgatggagaaggttcctctgttgtatggaactcggtcaatgatttttattttcagcctggtgcaaccatgcaggggggcggcgttactcaaaaaatcattgactcaatgaaatatgctggaacaattactgattgggcgggaaaagtacaccatattaactctcttgatgatttaaagcaatataatcaatatttgataaagtcactagaggacaaaacgctttcttataagcagtatgatgctgaatttaataaggcccttattgtcaccaagcataattacaatgtggatatgaccgctgggggacgtatagactcaactccttacaaagaaaatgtagggctgcttgctgttctccatgcaaccaataacgcacgagcaatattaggtaaaacgggtaaattaactggagttcttcctgcctatgggaatggaggagggatcgttgcaactaatggtgggaccggtgttaatgaaggggtcattgatgccattggtactgaaatgattgcctatcaagacagtaccattgttaacgatggtacactttttgtttgggataataatgataaatatgctctctag

SEQ ID NO: 22410 - DNA, 753 bp, Escherichia coli
atggatacaacaagtttaattagctcaatttctgtaccaagattatctttctatgaaacatttcttgggtgcgctactgatcaagaaaaggttggggcatacgttgcctaccaagatctgtctggcgattttttttgtcttgtccagatgattgaggttgctctgcgtaatgcgataaacaatacaatcaaagctaatcatgggcctgcttggtacgactctatacctcaaacaaagaaatctcaggatcttgttttaaatgcgaaacaaaaagcactagatgagtgtggcgtaaggtatacggatgatgatgttatttgccgtctaacctttggcttttgggtttatatgttagatgccccatatagggatacgcaaaggccgtgctacatctggactccagagaacaaggcaaaaacatttcctcatgcgaagaatcctttgggtgggggggatatgaaggttaaagcgctgtttgacgagtttcataaagttcttttgtttaggaatcgactttttcaccatgagcctatttggaaaaaacaccactgcaagtcgcatagtcaagccataaataatatgttgaaagagttcaattttttaatgaatgccttgagtatcgtctctaacgagaaaaaggaacttattgagtttattgggcacgataggcgcttttatgaacgctgcacgatagagtatgttatggggattatagggaggattaagtgcagggagcttaaggtagccggttga

SEQ ID NO: 22411 - DNA, 132 bp, Escherichia coli; identical to SEQ ID NO: 17678

SEQ ID NO: 22412 - DNA, 192 bp, Escherichia coli; identical to SEQ ID NO: 13008

SEQ ID NO: 22413 - DNA, 819 bp, Escherichia coli
atgcaattagccagtcgttttggtcatgtaaatcagatccgtcgggagcgcccactgacacgcgaagaactgatgtaccacgtcccgagtatttttggagaagaccggcacacctcccgcagtgaacggtatgcgtacattcccaccatcaccgtcctggaaaatctgcagcgggaaggctttcagccgttcttcgcctgccagacacgtgtgcgcgaccagagccgccgggaatataccaaacatatgctgcgtctgcggcgggccggacagataaccggtcagcatgtacctgaaattattctgctcaactcccatgacggttcatccagctaccagatgttacccggatattttcgtgccatctgcaccaatggcctggtctgcggtcagtcgctgggagaagtccgggtgccccaccggggaaacgtggtggacagggtgattgaaggtgcttacgaggtggtgggcgtttttgaccggattgaggaaaagcgtgatgccatgcagtcgctggtcctgccgccaccggcacgccaggcgctggcacaggcggcgctgacttaccgttatggtgacgaacatcagcccgtcaccaccgccgacattctgacaccacgacgccgggaggattacggtaaggacctgtggagtgcttatcagaccattcaggagaatatgctgaaaggcggaatttccggtcgcagtgccagagggaaacgtatccacacccatgccattcacagcatcgacaccgatattaagctcaaccgcgcattgtgggtgatggcagaaacgctgctggagagcctgcgctga

SEQ ID NO: 22414 - DNA, 561 bp, Escherichia coli; identical to SEQ ID NO: 5114

SEQ ID NO: 22415 - DNA, 861 bp, Escherichia coli; identical to SEQ ID NO: 5113

SEQ ID NO: 22416 - DNA, 192 bp, Escherichia coli
atgtatttttttagtgtgcagaatatcctggtacatataccaataggggcaggcggttatgatctctcatggatcgaagcggtaggcacaatcgccgggttgctgtgtattggccttgccagtctggagaagatcagcaactacttttttggcctgatcaacgtcaccttgtttgtaatgccagtcagttaa

SEQ ID NO: 22417 - DNA, 903 bp, Escherichia coli
atgtatttttctggtgaaccggcacagatcgctgagattaaacgactggccagcggtgcagtcacaccgttttatcgccgcgccacaaatgaaggtattcagctgtttctggccggaagtgccggacttctgcagaccactgaagatgtgcggtttgaaccatgccccggactgacggctgccggacgtggtgttttatcgccggagaatatcacgttcacccgctggctgaagcacctgcaggacggtgtactgctggatgagcaaaactgcctgatgctgcatgaactctggctgcagagcggtactggacagcgtcgctgggaagggttaccggatgatgtcagggaaactatcactgtgcatttcaccgcaaaaagaggtgactggtgtgacatctggggtaacgaggatgtatcggtgtggtggaaccgtctgtgtgacaacgtactgtcggaaaaaaccatgccgtttgacctgctgacggttttgccgacccgcctggatattgaagtgaatggctttaacggcggtgttctgaacggtgttccttctgcatatcactggtatacagaacggtatggcgtgaagtggccttgtgggtatgacctgaatatcagcagtcagggggaaaacttcattcaggtagatttcgacacgccgtggtgtcagccggaaagcgacgttgttgcagaattaagccgccgtttcggctgcacgctggagcactggtacgccgaacagggctgcaatttctgtggctggcagttgtatgagcgcggagagcttgttgatgtgctgtggggggaactggaatggtcttccccgacagatgacgatgagctgccggaagtcaccggacctgcgtggatagtcgacaatgtggcgcattatggcggatga

SEQ ID NO: 22418 - DNA, 756 bp, Escherichia coli
atggaaaaggcggtgggcttcacctcccgttttgatttcgccattcatgtggcgcatgcccgttcccgtggtttgcgtcggcgcatgccaccggtgctgcgtcgacgggctattgatgcgctgctgcagggactctgttttcactatgatccgctggccaaccgcgtccagtgctccatcaccacgctggccattgagtgcggactggcgacagagtccggtgcaggaaaactctccatcacccgtgccacccgggccctgacgttcctgtcagagctgggactgattacctaccagacggaatatgacccgcttatcgggtgctacattccgaccgacatcacgttcacaccggctctgtttgctgcccttgatgtgtctgaggatgcagtggcagctgcgcgccgcagtcgtgttgaatgggaaaacaaacagcgcaaaaagcaggggctggataccctgggtatggatgagctgatagcgaaagcctggcgttttgtgcgtgagcgtttctgcagttaccagacagagcttaagtcccgtggaataaaacgtgcccgtgcgcgtcgtgatgcgaacagggaacgtcaggatatcgtcaccctggtgaaacggcagctgacgcgtgaaatctcggaagggcgcttctctgccagtcgtgaggcggtaaaacgtgaagtggagcgtcgtgtgaaggagcgcatgattctgtcacgtaaccgcaattacagccggctggccaccgcttccccctga

SEQ ID NO: 22419 - DNA, 807 bp, Escherichia coli
gtgtttacaccccgtgaaggtgcaggaacgctgaagttctgcgaaaaactgatggaaaaggcggtgggcttcacttcccgttttgatttcgccattcatgtggcgcatgcccgttcgcgtggtctgcgtcgacgcatgccaccagtgctgcgtcgacgggctattgatgcgctcctgcaggggctgtgtttccactatgacccgctggccaaccgcgtccagtgctccatcaccacgctggccattgagtgcggactggcgacggagtctgctgccggaaaactctccatcacccgtgccacccgggccctgacgttcctgtcagagctgggactgattacctaccagacggaatatgacccgcttatcgggtgctacattccgaccgatatcacgttcacatctgcactgtttgctgccctcgatgtatcagaggaggcagtggccgccgcgcgccgcagccgtgtggtatgggaaaacaaacaacgcaaaaagcaggggctggataccctgggcatggatgaactgatagcgaaagcctggcgttttgttcgtgagcgttttcgcagttatcagacagagcttaagtcccggggaataaagcgtgcccgtgcgcgtcgtgatgcggacagggaacgtcaggatattgtcaccctggtgaaacggcagctgacgcgcgaaatcgcggaagggcgcttcactgccaatcgtgaggcggtaaaacgcgaagttgagcgtcgtgtgaaggagcgcatgattctgtcacgtaaccgtaattacagccggctggccacagcttccccctga

SEQ ID NO: 22420 - DNA, 144 bp, Escherichia coli
atggacattgagttttcgcagattcatgaaatggtctatatgcatgatattgtaaattcggactcgaaaaagaaaccaaggattccgttaaaaaattccttaatgctgagaaggttctcacgcaaaaaacatcatgggcactaa

SEQ ID NO: 22421 - DNA, 156 bp, Escherichia coli; identical to SEQ ID NO: 7036

SEQ ID NO: 22422 - DNA, 378 bp, Escherichia coli
atgggcgaacagtggggctatgtcggggctaaatcgcgccagcgctggctgttttacgcgtatgacaggctccggaagacggttgttgcgcacgtattcggtgaacgcacgatggcgacgctggggcgtcttctgagcctgctgtcggcctttgaggtcgtggtatggatgacggatggctggccgctgtatgaatcacgcctgaagggaaagctgcacgtaatcagcaagcgatatacgcagcgaattgagcggcataacctgaatctgaggcagcacctggcacggctgggacggaagtcgctgtcgttctcaaaatcggtggagctgcatgacaaagtcatcgggcattatctgaacataaaacactatcaataa

SEQ ID NO: 22423 - DNA, 222 bp, Escherichia coli; identical to SEQ ID NO: 5758

SEQ ID NO: 22424 - DNA, 297 bp, Escherichia coli
atgaacgggcagtcattttcatgttcccggtatcctcagcttgcccgtgcttatcccgggtgtaagctgccggatttgcgcggtgtttttatccgtggttgggacaacggacgtggactggatggagatcggaacagacatctcctgagttatcaggccgatcaatccggtgtctatcatgagcgtgggggatggctgaaagggcatcacagcggtatgccttactgggcccagggaagcacaacggaaatgcgccccaaaaacattgcctttaactacatcgtcaaagcaagctga

SEQ ID NO: 22425 - DNA, 351 bp, Escherichia coli
atgatatttgatgctagtttaaagaagttgaggaaattatttgtaaatccaattgggtttttccgtgactcatggttttttaattctaaaaacaaggctgaagagctactatcaccgttaaaaataaaaagtaaaaatatttttataattagtaacctagggcaattaaaaaaagctgagtcatttgtacaaaaatttagcaagagaagtaactatcttattgttttggcaactgaaaaaaatactgagatgccaaaaattattgttgaacaaataaataataaattattttcttcatacaaggtactattcattccaactttcccaaatatttttactttttatttttaa

SEQ ID NO: 22426 - DNA, 216 bp, Escherichia coli
atggagatcatcaataacgtgagcgaaaaccgccaggtgactgtccctgctgaactgctggcgtccctgattcagaccgctgaacaggcattgtggaaacgtgaatgggccgcccgggatcatggcctcgccgtcccggaatgcgtcacccgccgtcaggcggtggttaatcaggtccgcatcctgctgaaaaacaacacacacgaaaacgactga

SEQ ID NO: 22427 - DNA, 189 bp, Escherichia coli
atgaatactaacgtttttcgactgctcctgctgggaagcctgttcagccttagcgcctgtgtgcagcaaagtgaagtgcgacagatgaaacacagcgtcagcacactgaaccaggagatgacgcaactcattgacatcctccacgccctgaaggacgtggatccctgctacgttcaggctgtcgcctga

SEQ ID NO: 22428 - DNA, 216 bp, Escherichia coli
atggagatcatcaataacgtgagagaaaaccgccaggtgaccgtccctgctgaactgctggcgtccctgattcagaccgccgaacaggcactgtggaaacgtgagtgggccgcccgtgataacggcctcgccgtcccggaatgcgtcacccgccgacaggcggtggttaatcaggcccgcgccctgctgaaaaacaacacacacgaaaacaactga

SEQ ID NO: 22429 - DNA, 324 bp, Escherichia coli
gtggaaaaagcccgcccgatccttgcggctgcaccactggcggatgccggaccctcactccgtgatcagattatggctctggatgaggcaaaaggggctgaggcgcaggctgaaaaactggcggcgtttcccggaatgacggtggaggctgcccgcgacattctgtcctcatcgccggataaagcagaaccggtctctgcatccacaaccgccctgtttgaacatttcatggcgaatcattcaccggcagcggtgcggggtggcgtgtcacagacgtcagcagacggtgatgcggacgtgaaaatgctcatggccatgtcatga

SEQ ID NO: 22430 - DNA, 324 bp, Escherichia coli
gtggaaaaagcccgcccgatcctggctgcttcaccgcaggcgaatgccggaccctcactccgtgatcagatcatggcactggatgaggcaaaaggggctgaggcgcaggctgaacagctggctgcctgcccgggaatgactgtggagagcgcccgggctgtgctggctgcgggatcaggtaaggcagaaccggtctctgcatccacaaccgccctgtttgaacatttcatggcgaaccattcaccggctgcggtccaggggggcgtgtcacaggcgtcagaagacggtgatgcggacgtgaaaatgctcatggccatgccatga

SEQ ID NO: 22431 - DNA, 249 bp, Escherichia coli
atgacaaggaagcaagtcgctgaattaactgggattaactacaacacctatgctggatatgagcagggaaaagtaaagatgtcttttgacgcaggtatgaaatttttcaagccagaaagatttcgcaagtaccgtgactggttcatgtttgatgaaactgatcccgctggcggacaaatagccccggcgctcgcgcacattgggcaagactcaacaaccttgcaccactcagaccaaaagactggctga

SEQ ID NO: 22432 - DNA, 1143 bp, Escherichia coli
atggctgaagaagcagggcgcttaacattttttgatgtaacgaaagctggtttttacaatcttaaggatgaagttcaaaaaagcacggatattgtaaatatattagactccctgtccaactgggtttgttctcgttcttttgaagaaaccctaccattggttgatgactctagactgcggaaaaaggtttattgtcgaggtgtgcataaagatgaaaagacaggcgattatttttttgtgctttggaaatcagaacttgatggcaatggtaatcttcagggggttgcgccagattcacaggtaaattcatcatctagtgacgttaagatgctttcggatgatatgactgatggggttaaatatatttggggtaagccatgttattactggtacatccctgagttcaataaatttgctgcaattcgtttccctcactcaaactcagacacttatctttttagtcgctatattagagattatgctaatttcagaatgccatatcccgggcgtaaaattgcagaagtatgcagaccaaatccaggtgggaaagacataaagtttagtgttgttacatttgaaagtgatgacggaagttcacgagtaagatttttatttgaagcgcagcagtatatgaaaaaagctgggcgtataaatataaagaagattcgtgactctataacacatattgtaataagagatacaattggagctaaagttccagataaaagagcttggtgggtaaaggcttttgataaatttcctgtattacgtgatgaagtacctaagactcataaagaacgacagatagagttaattattgaagaaagaccaactgaaaagcaaattgacgaacttttcgatttttatgaagaggattatgctttcggctcttcttggaacaatatcggcttcaaacaggatggtaagaatgggcagactaagtggttagatgaatatgttatgcgtgattatttgaatgctacttatactgtaaatgataacgcacatatctcggctgagaaattggcagagttaattaatgataaacgaaaagaactcgtaagtggtctcgatggttatgagattgataaaactcaagttataccttcgggaaataacaatgaggtcgctataggaggatga

SEQ ID NO: 22433 - DNA, 507 bp, Escherichia coli
gtgataataaagatccttattgggattctcatggccttcgttctgcttgttggcggttttagcatttcagaaagcgtcaaatattcatatgttgttgatcttcttggtgttttgcaaaatacgtccgcgatgatttttgcaattgctggtatttggctagcttatctctatccaaatgcaatcgctggtttgatgaaatctgaaaaagtggattttttagcaagcaaaagtgaagcgaagcgcatagaaggtatgattcttattatcattatgtccgctactgtattaatttttattattgctttttacgcatttaatgctgttctccgcggtacggatttctatgcgaacaatcgtcaccttattaaaggtgtgagttgtgtatatatcttgagtatattactgactcaactgtcatgcgttattgttcttatttggagaaatgtctcgtttataaataggttgtatacagtaataaacgaaaaagaattggaggaaaagttatag

SEQ ID NO: 22434 - DNA, 732 bp, Escherichia coli
gtgatacacataacaaagccaggaattttatttaagtatcgtaagtttgataaaaacaatctgaagctgttattgaatcgtgagttatggtttgcaaaaccagatactcttaatgatccttttgaagcaaattcttcattttcaaatgtgcttgatgctgtttggaaacattatccactgcctcttgatatgagaattaaatatgagagatatcttaaacagtcattgcagcaagtcggaatttgttcctttagtaaagcgaggaaaaatcaattgatgtggtcacattatgccgatgaacataaaggtatttgcattggctttaaagaggagtatttgaagaaagctggggtttcttttttggaagcagatgtggaatatcaggataattatccctttgatgatattgttaaacgtattcattattttgaggataatgaatgccttaacgggtttgataatatttgcggggatattttactttctattttaacgacaaagtacacaagttggaaatatgaaagggagcgccgattgattgtggagaattttggagcaaggaaatttgaacctttagcggtcaattctatagcttttgggttaagaatgaaggaaagagataaaaaaacgctactgactctattgtcaggcccagagtggtcgcatttgaaatggtttcaatcaacgaaatcatcaattaaatactctttagatttcatacgtattaaatag

SEQ ID NO: 22435 - DNA, 420 bp, Escherichia coli
atggtgacgcttgatactgtgtattggaagtttggttatgcatcggaagctgcccaattattggagactgaattaataaatgccctcactgagtatgatatgaagcaagggggggatatagcgtcgttgaaaaaacagtttctagaaatggataagtacacgctgggtaaactgaattacgcactgaagtcaaggatggtgggggatgctgatacactggagcatgtgtcagatgctcttaaagccagaaactacttggcacatgagttttatcgcaaacatgctgatggtaaattcactccagaaggaaggcagagaatgcttgctgacttaaaaaatatacatcaaataatttttgaggcttaccgcaaggttctgcaactaagtgacattgatattcctcctttagagcatgattaa

SEQ ID NO: 22436 - DNA, 477 bp, Escherichia coli
ttgaaatttgaacaaatctataaaaatattactggccttagctgtcccatattcgggattcagtggaatgctccaataatagaaactgacgaagcgaagaagatcgtcatttttcttgaggacaagcgcgttcttttcaatcctgtcgacatggagggtgctagtcattgcacttcgagtgttatcaacattagatctgaattgactaaagtcctacaaggtttgccgagcgattcacatttagcaaaacaattaaggaaaatgagaaaagcatgccaagaattctgtgacagcgttggctcccctcactttatccaacttgatcatcctgttcaaatatccatacttgagcgagccctttttaaactgcgacaaaagtgtggtaactctctggcagaaatagcggttacctatggtcttgatgttgatgacggattggccagtattatcccttttaataatcccagtaacatatag

SEQ ID NO: 22437 - DNA, 474 bp, Escherichia coli
ttgggggaaggctcggcgctgcccgttggtgtaccggttccatggcccaccgccacaccgccagcaggctggttacagtgcaacggagctacgttcaccaaagaacaatatcctgttctggccagagtctacccgaccctccgtcttcccgatttacgcggtgagtttatccgtggatgggacgacgggcgcaagattgacgaggggcgtaagttgctttcatggcagaaaggtacactggtcggcggtcatgacgataacgattctgcgcttgatatctcgtacatgagtaacggaaataatattgactatggcggcgataaggtgtttgcggggaattaccgtagcgattatttgtggtacgcaatgctgggtggaacaaacagtcgcgcaaaagccgaattaaacggagcattctttaacataacccgcccccgcaatatcgcgtttaactatatcgtgagggcggcgtga

SEQ ID NO: 22438 - DNA, 1269 bp, Escherichia coli
atggccctaacggatactaaagttcgttctgcgaaaccagaggagaaagagtattcacttgttgacggcgacggcatgtccttacttgtaaaacctggcggttcaaagtattggcgatttcgtttccgctttggcggtaaacaacatttgatggcgttcggcgtttacccggatgtttcactggcggatgcgcggaagaaaagggaagaggccagaaagctggtagctgctggtatcgatcctcgtgagcataagcgtgctgtgaaagaagagcaggcgaaagagattattactttcgagaaggttgccagagagtggctcgtaaccaaccaaaaatggtcggaagatcatgctaatcgtgtaaaaaagagcctggaggacaatatcttcccggcaattggtgctcgcaatattgctgaactgggcacccgcgatctgttaattcctattaaagccgtggagaaatccggacgtcttgaagtggcttcccgccttcaacagcgcaccacggccatcatgcgttatgcagtgcaaagcgggttaattgattacaatccggcgcaagagatggcgggggcggttgcttccagtaatcgacagcatcgtccggcgctggagttaaagcgcatccctgagttacttgagaaaatagacagctataccggcaggccgctaactcgctgggcaacggaacttactctgcttatctttattcggtccagtgagctgcgttttgctcgctggtcagagatcgattttgaaacgtcaatgtggaccatcccgcctgagcgagagcctattcccggcgtgaaacattctcagcgaggatcaaagatgcatacaccgcatctggtgccgctttcaaagcaggcgctggcgatcctgaagcagataaaacagttctgtggcgaacatgagctgatttttattggcgatcatgatccgcgtaagcccatgagcgagaacacggtaaacagtgcgttacgggtgatggggtatgacactaaggttgaggtttgtggtcacggcttccgcacaatggcctgtagttcgttaattgagtcagggctatggtcgaaggatgcggtggaaaggcagatgagccatatggaacgcaattcggtgagggcggcgtatatccataaagcggaacatctggatgagcgcaagctgatgttgcagtggtgggcggattttctggatgccaatcgggatagagcgattacgccgtttgactatgcgaagatcaatcggggtaatggcaagtga

SEQ ID NO: 22439 - DNA, 321 bp, Escherichia coli
atggttaggcgtaatgtgaaatggttgtctttctttatttttatttctattctgtctttatttcgcgggtggtcgtttattaaacagtttcatctgtcggcatttactgtacttgctgtatttatttatgcgttgtatagctatataagaatttcaaattttgtaaataagatggagttaaataataaattcattgtttttcttaggttgaagaaatttgttttgttttttaagcaagggactaagctcactattctggaaagaaatattgtctttttttctgtttatataccttgtctgcttatcatgtgcttatattag

SEQ ID NO: 22440 - DNA, 498 bp, Escherichia coli
atgaatacagcacaattacctaaaaaagcaaatatttataaagcaatgttttattttttcttcaacaaggaaaaatttattacgcttggtgctatcaataagatggcttttgaacttgagaaggatgaatataagagaaaacttgaggcggggaaatacagtctaaatccagatgatcacaaacactccctcgaagagtattgtgatgacttaagaaagtccattcttgcgtcagtgctaataatgttgggtgtgctttttatagtaattgcgattggattttactcagggaaatttcggattatctatccattagaatggaaagacgccgttagcgccaccggaatatttattctatcatggtcaacattgtttcagctaggctggaggaatgcatcatggaaaggctgtcgccttgatgaactggttggattagcaatatttagacgtttttttattttcggctcgttccttagcttattatacttcgcaatataa

SEQ ID NO: 22441 - DNA, 3135 bp, Escherichia coli
atgcttaccgaagacgacttagaacagctttgcctgggctggtttgccgaacaaggttgggaaattcatcacgggccggatattgcccccgatggcagtaacccgcaacgcgccagctatcatgatgtattcctgacacccgtgctgaacgcctgcctgcaaaaaatcaacccgcatctgcctgctgacgtcttcgaacaggtcatctcccgtattactcgcgctgaaagcccggatctgattgccagtaacaaaactttccatcactggctgctggaaggggttccggtacagtaccgtcgcgacgaagaactcatccacgaccacgctctgctggtggattttagccagccgcaaaacaaccgttttatggtggtcaatcaaatgactatcagcggaacgaaacagcctcgccgcccagatatcatctgctttattaacggaataccactggcggttgtggaactaaaaagccctgtcgatgacaaggtagatatctgggatgcctaccatcagttacagacctataaagacgaaatacgcgacctgtttatcagcaatgaagcgttgattgtcagtgatggttatctggcgcgtgtggggtccctgaccgccacggaagaacgttttatgccgtggaaagccataagcaatgaaaacgataagccgttgctggaatggcaactggaaactatggtacggggtttcttcaaccgggaattgctgctcgactatatccgctatttcgttctgtttgaaaataacgatgaaaggctaattaagaaaatagctggttatcaccagttccacgcggtgcgtgaggccgtgcaggcgacgatcgttgcttcgaccggtaagcaactggtactgcacagcaatattcagccaggcagtaagaaagcgggcgtggtctggcatacgcagggttccggtaaaagcatctccatgtgttgctatgtcagcaaactgttgcaacagccggagatgggcaacccgacgattgttgttgtgaccgatcgtaacgatctggatggccagctttacggtacattctgccaggcacaggagctactcaagcaaatgccggtacaggcagatgaccgtgaaacattgcgtgatctgcttgcaactcgcgatgctggcggcattatctttaccaccgtgcagaaattctccccggaagaaggggaaaacgcccatccgattctcaatggacgcagcaatatcgttgttatttccgatgaagcgcaccgcagccagtacggcatgaaagccaacctggatcgtaaaaccggcgtctataaatacggttacgctaaacatatgcgcgacgcgctacctaacgcctcgtttctgggatttaccggtacaccggtttcggcagaggatcgcgatactcgcgctgtatttggcgattacgtctcaatttatgatattcaggacgctgtggacgatggcgcaacggtgcctattcactatgaatcccggctggcaaaactcgatctcaatcatgaagagctggcggcgctgtccgatcaggttgaagaactgattgaggacgatgagctggatcagagagaaaaaaccaaaggtgaatggagccgcctggagaaactggttggtgctaaaccacgtcttcagcagatcgctgccgatctgatttctcactttgagaagcgcaataccgtaatggacggcaaggcgatgattgtcgccatgagccgtgaaatctgcgtccatctttacgatgaaattattgcgttgcgtccggagtggcacgatgacgatcctgaaaaagggcaaatcaaaatcgtgatgaccggtacagcatctgataaggcaatgctgcaaccgcatatctacaacaaacggactaaaaaacggctggagtcccgctttaagaatgtgaacgacccgctgaagctggtgatagtgcgcgatatgtggctgaccggctttgatgccccttgctgtcacactatgtatatcgacaaaccgatgcgcggccataacctgatgcaggctattgcccgtgtcaaccgggtattcaaagacaagcccggcgggctggtggtggattatattggtatcgccaatgagctgaaactggcgctgaaaacttataccgatgcaaacggtaaaggtgatgcgaccgtcaacgctgaagaagcactggcaatcatgctggaaaagctggacatcatccacggtatgtttgccaaaacggcaacgtcagcgggttttgattacaccggctttgaagctcatgcgcagaagttgctagtaccagttgcaaactatgtgctcggccttgaagacggtaagaagcgttttctcgataacgtactggcaattactaaagcctggtcgctttgctgtacgctggatgcggcacagccttataaactagagattgctttcttgtcggcggtaaaagccgctatcagcaaattcaccagcgtggacaaaaaaataagccaagctgagaagaactccgcgctgaaacagattctggataatgccgttattgctaacggcgtggatgatattttcacgctggctggtctggataaaccgaatattggcttgctttcagatgaattcttgcaggaagtccgcgatatgccatatcgaaatctggcggtagagctgctggaaaaactgattaatgacggtatccagtcccgtacaaaaaacaatgtagtgcaggagaggaaatattcagaacgtcttcaggctgtattgattaaatacaacaaccgggctattgagacggcgcaggtgattgaagagctgatccagatggcgaaggattttcagtctgcaatggagcgtgacgatgcgcttggcctgaatcctgacgaaatcgctttctacgatgcactggcagaaaatgaaagcgccgtccgggagttaggagatgaggtacttaagaaactggcgatagaagtcaccttaaagttgaggcaatccactaccgttgactggcaggtgcgcgagagcgtgcgtgcgagattgcgtatcctggttcgccagactctgcgccgttataagtatccgcctgacaaaacgcctggggcggtagagttaattttaaaacaagcggaagttatttcgaatcactggacgatgtaa

SEQ ID NO: 22442 - DNA, 1194 bp, Escherichia coli
atgttcaaagttgatcagcccagtaatagcctgcaaccgctccaagaaaccaccttcactaacgcgggtttcaccgaacgctaccacttacaggaatggttggcgaagcatccgcaggcattgacccgcagcagcgatgatgaattacttattattcagaaagaatttgccgggtttgacgacaccaaagagcggttagatctgctggcgatcgacaaagacggtaatctggtgatcatcgagaacaagctcgatgattccgggcgtgatgtcgtgtggcaggcgctgaagtacgcgggctactgcgcgaatctacgcaaagaacatattgttgagatcttccagcgttacctcgatcagaacgatccagaagaaagccgcccggcttctgacgtgctggcagaattccttgaacatgaaagcctggatgaagtgcaaattaaccaaagccgttcccagcgcgtaatgatggttgcggcaaatttccgcaaggaagtcactaatactgcgctctggctgatgcagttcaatatccgtgtccagtgctttaaggtcacgccttaccgttatggaaatgatgtattcatcgacatccgccaggttattcccacaccggaagccgaatcctacatgatcggtatggcgcagaaggaagcagaagaacaatcaaccagcggtgaactgaaacagagccaacgcctgcgcaaggccttctggacgcagatgctggagaaatttcatgccagcgactgtacgctgtataacaacatcagcccgtctatggatcactggttatgtgcaggctctggcataagtggtatgccttatagcctaatattcagcaagaaggaaatccgcgtagaattatggatttcgcgagcatcggcagacatcaacaccatggcgttgaactggcttgaacaacaccgcacatctgtcgaagaggtattcggcaacccactggagtggctatcgctacctggtaaaaaagcctgccgtattcaataccgccaaaaaatagatggcttccagcaggaaaattggccgcaaatgatcgactggctggtggaacatatgacccgttttgagaatgcgctttcgccgtatctgccacagcttaaccagttgatcaagcagacctttaacgggcatgatgaagctgaaaatacaacagaagaagccgaacacgtataa

SEQ ID NO: 22443 - DNA, 1425 bp, Escherichia coli
atgagatctaatataacttatactcttgatgaaattgccgagatttatgatggccctcatgcaacgcctaaaaagttagagacaggggatgctatttttttaagtatctcttctattgagaatggaagattaaatttggaaaaatcatccttcatttccgaagatgattttgttaaatggacacgtagagtaacacctcaagccggagatgtcgttttttcttatgaaacgaaaattggcgaagcatcaattattcctgaagggttacgttgctgtttaggtagacgtatgggattgctgagagccaaacaagataaggtattacctcagtatttgttatatgcttatttatctccaacatttcaggatgtgattagagaaaaaacgatccacggtagtactactgatcgtatttcaatcagagagatgccttctttcgagatacaactacctgatatacatacacaaaaaaaagtaattcagattttaagttcaattgataataagttatctaaaaatgctgaaataaatcaaaccttagaacaaatggtacaagcccttttcaaaagttggtttgtcaattttgaaccggtaaaagccaaaatcgcggtgctggaagcaggtggttcgcaaaaagatgcaacgcttgctgccatgacagcgatttctgggaaagatgctgattctttagctgtatttcagcgagagtatcctgaaaaatatgccgaacttagagctatagcagagttgttcccgctagcgatgcaagacagcgaattaggagagattcctgttggatggttttgtacggacttatcatatcttgcattacttaataactcttcctggtcaaagaagaatgctccagaatcattaaagtatgttgatttagcaaacacaaaatggggcattattcattcaactgaagatttcttattttctgatgcgccaagtcgtgcccgtagaatattaaaacccggtgacactattgtaggaactgtgaggccaggaaatggttcatatgcctttattgctgaagagggcctgactgggagcaccggttttgcagtattaacgccaaaacatgaacactttagttcgtttatttatatctgtgcaacgtctaaggataatatcgaacgtctggcccatttagccgatggcggagcatatccagcagttaatgctgaggttatactatctactccgtgtatcattcctattgatcatagcagcagcaaaaacctaatagaatgcttccactattatgtcagagagttatttgcttataagcataacaatcttagacaaaataaatcactggaacaactccgcgacaccctcctccccaaactcctctccggagaaattacgttaccggacgccgaggaaatagccaaggaagctgactatgttcaaagttga

SEQ ID NO: 22444 - DNA, 1707 bp, Escherichia coli
atggacaacgctgaacagcaatttctgaacgatctggatactaagttctggaaagccgcagacaagctacgcgccaatatggacgcagccaactacaagcatgtggtactggggcttatctttctgaagtatgtttcagatgcctttgacgcccgccagaaggaactgaaaggactgtttgaagacaagttcaacccggacaacatttacgcgctgtctcgtgacgattacgacacagaagaggcgtaccagcaggcgatcgcagaagagctggaagttcaggattactacactgagaaaaacgtcttctgggtacccaaactggctcgctgggaaacgcttaaaaccaatgctgctctgcctgtagggacggttctggggaaagacgatagcggcaaagatatcgtcatgacgtcagtatcgaagctgattgatatcgctctggatactatcgaaaacagtaacccgaaactgaaaaacatccttaaccgtatcgggcattatcagcttggtaacgacttgctaatcagcctgattaacgttttctccgataccagtttcagcgaacctaaatacaatggcgtgaagctcaatttgaagagcaaagatattctcggccacgtttacgaatacttccttggtcagtttgcactggcggaaggcaaacagggcggccagtattacacgccgaaaagcatcgttacgctgattgttgaaatgctccagccctacaatggccgcgtgtatgacccggcgatggggtctggtgggttcttcgtttccagcgatcgctttatcgaagcgcacgcagatgaaaagcattacaacgctgctgaacaaaaacgcaatatctccgtttatgggcaggagtccaaccctactacctggcgtctggctgcgatgaacatggtgattcgcggtattgattttaacttcggtaaacagaacgccgatacgttcctgaacgatcagcacccggatttacgtgccgattttgttatggctaacccacccttcaatatgaaagagtggtggaatgcgaagctagaagatgacgtgcgctggcagtacggtacaccaccgcagggtaacgccaactttgcctggatgcagcacatgatccaccacctggcaccgaaaggttcgatggcgttgttgttggcaaatggttcgatgagctctaacagtaatacggaaggtgatatacgccgtcagattatcgaagctgatttggttgaatgtatggtagctttgccaggtcaactcttcactaacacgcagatccccgcttgtatctggttgttgacgaaagataaatctggaggtaatggtaaagcgcatcgtaagggtgaggtgctgtttattgatgcccgacagattgggtttatgaaagatcgcgtattacgtgatttctcaacggatgatatcaaaaagattgccaatactttccatgcctggcagacagataaagattatgaagatgaggccggtttctgttttgcagccacactagacgatataaagaaaaacgattttgttctaacaccaggacgctatgttggtgcggttgagcaggaagaagatgacgagccatttgcagaaaagatggcacggttagctatacagctaaaagatcaactagaggatagtgcaagactggaggcacaaattaaagcaaattttggggggctgggttatgagatctaa

SEQ ID NO: 22445 - DNA, 978 bp, Escherichia coli
atgacctctctcgttttttcctattctcatgcagacgaagcactgcgcaatgagcttgagaagcatctttcccccctgaagcgcacgggcaagatcacgacatggcatgatcgtcgcatcattccaggacaagagtttgagaaccaaatagatcattacttttctcaggctgatatcatcctgttgttgattagcagtgatttcatcgcttctgactattgctatcaggtagaaatgaccaacgctctggagcgtcataaccggggcgaggctgtggtcattcctgtgatcttaagagagtgtgcctggcatcagttaccgttcggcagcattatggcagcgacaattgatggtaaacctatcaccaggtttgccagccacgatgagggttatgttcaggttgtcgatgccgtttcccgcgctattgccaatttggaagcgaaaaagccgcaacagattgtgcacaccccagttccggctaatccaatgtttcaggcgacggataccgtttttacgccacgttccagcaatctttctttgccaaagcattttacagaccttgataaagatcgtgcctgccgtgacggttttgaatatgtcgcccgttattttgaaggctcgctgactgaactcaaaaaacgccatgccgggttagaggttgattttaataagcgtgacgcaaatgccttcacttgtgcgatctacattgggggaagcaaagtaggtcaatgtgcaatctggcttaatagcgggcgaaatatggggataggcgatattggttatagccaggatggcgtgattggcaatgcttacaatgaaatcttaaccattgacaataacggccagatccttggttttcgcccatcaatgggcgtcttcagccctggctactcaagggataccttgctcactaacgagggtatggctgatcatctatgggatatgttttttgagccaataaaacagcaggctcgttaa

SEQ ID NO: 22446 - DNA, 330 bp, Escherichia coli
atgttgtttttagttaaattaaacattgcgatttttattgtctttgcaatcacttccgcacttttttggaagataccaaaagcgttcttggttttcctgttttgcatgtactgggtaatcgtcacggcggtgtacatagaaagcagagaacaggcacgcatacaatatttggaatctgacattaacaccctgtaccttgattcatttaaaagtaaaaacaactgcaaatcatttgaaactaacaccaatttactggataaaaatggtaatcctgtggaaataatggtgtgtgatgatcaggaactgcattttttcgttccaaagaattaa

SEQ ID NO: 22447 - DNA, 906 bp, Escherichia coli
atgccaaatttaccgatgggcggatcgcagggtgaattacccttagtacctacagtagaagttgttgctgatggcattcctatgggggtgcttaatgatggaaccccttatctaactctttacggtttagccaaattatgtggcatagatgaagcacctcttcgaatgtttacatctaactgggagactgaaaaaaataagccaagaggacaaaaagtagctgcatacttagctgagaaaggatttaacaacgttgaccgactgtatacccgcgtcataaatagctcaaacgttgaaacacatgcttatcctgactatgtttgtatggctatcctccgttactacgctctagatgccaccaattttgataggtcagtcgcaataggtaattttgttcgcttggctgagtacacgcttaagcgaatgatttatgaaaagtcaaattacaacccaaatgcttcaatagatatctcattcgagaactatagagcaaggattaagctaaacgatcagataccgacaactcattttgcagtattcagagagatagctgacattgccatgaacctgatcggaggaggattcccaatggatgacaccacatctttggatggaagtgttggaattcactggggaaagtattggacagctaatgggctatctgagaaattcggggaaagggtgcagtacccacatctattccccgaaaattacaggcagtcagctgcaaataagcatataaaagcttggatttatcctattgaggcacttggcgtgttcagaaaatggctacacgataattacgcaatggaaaaactgccaaattaccttgggaacaaaaagattagtaatgcctccgagctattagagttgataaaaaaaccagcactcccaaataagcattga

SEQ ID NO: 22448 - DNA, 369 bp, Escherichia coli
atggattattcaaagttaagtgattttgaaattaacaagcgagtagcagaggttatttataaagacaggaatggtctatttgttgccagaaatctccctagcaaggaaggagtaacgattgttgcagaagttaattctgaatatatctgcatagcggcagctgactactgcaacaacccggcagacgcatggccgattatcatggaaaacatgatcagcgtatgtgcatacaagcgagcaaaccctggcatgaaagcagtgtcatggtgggaggctgatagctttggtgagcatattactcttgatgacaacccactccgcgctgccatgattgtctttctcatgatgcaggacgccaataatgcttag

SEQ ID NO: 22449 - DNA, 246 bp, Escherichia coli
atggcgaaaaaaccaggtgaaaacacaggaaaaacggcggaatataccaagaggttggcccacgcggcggtaagaaagacaattttgccaccgtcaaggacaacgaaaggcttccgccaacaacaaagccaggtcatggctgggtattggataagcgaactccagacagcaaaaagtaatactcaagccgggtcactccggctttttgatatgtcgctcgcagaactcaacaagcctgctcattaa

SEQ ID NO: 22450 - DNA, 1743 bp, Escherichia coli
atgaatcacaaggactgggattttgttaaccgtcggctggtggcaaaaatgttgtctgagatggagtatgagcaggttttccacgcggaatctcagggcgatgaccactactgcattaacctgccgggagcacaatggcgcttcatcgctgaacgtggtatctggggctggctgtggattgatgcccaaacgttgcgctgcacggacgaaccagtactggcgcagacgctgctgatgcagctaaagccggtgctgtcaatgagtgatgccactgttgcagagcatatgcaggatttgtatgccacgctactgggcgacctgcaactgctgaaggcccgtcgcggactgagtgccagtgacctgattaatcttgatgccgatcgtctgcaatgcctgctgagcggtcatcctaaattcgtttttaataaaggtcgccgtggctggggcaaagaggcgctggaacgatatgcgccagagtataccaacaccttcagactgcactggctggcggtaaaacgtgaacatatgatctggcgctgcgataacgatctggatattcagcagttgttgactgccgcaatggatccgcaggagtttacacgcttcagtcaggtctggcaggaaaacggactggatcacaactggctgccgctgccggtacatccgtggcagtggcagcaaaaaatcgctaccgacttcatcgctgattttgccgaaggcaggatggtgtctctcggcgagtttggcgaccagtggctcgcccagcagtcgctgcgtaccctgaccaacgccagtcgccggggcgggctggatatcaagctgccgctgaccatctacaacacctcatgctaccgggggatccctggcagatacatcgctgccggaccactggcttcacgctggctacaacaggtttttgcgaccgacgccaccctagtgcaaagcggcgcagtgatacttggtgaaccggctgcaggctatgtctcccatgaaggctatgccgcgcttgcccgggctccctatcgctaccaggaaatgcttggtgttatctggcgggagaatccgtgccgctggctgaaaccggatgaaagtccggttctgatggcaacactgatggagtgcgacgaaaacaatcagccgctggcaggcgcatatatagaccgctccgggctggacgctgaaacctggcttacgcaactgttccgggtggtcgtggttcctctgtatcacctgctttgccgctacggtgtcgcgcttattgcacatggacaaaatataactctcgccatgaaagagggggttccacagcgtgttctgctgaaagacttccagggcgatatgcgactggtgaaagaagagttccccgaaatggactctttgcctcaggaggttcgtgatgttacatcccgcctgagtgcggactacttaatccatgatttgcagacgggtcacttcgtgacagtactgcgttttatttcgccactgatggttcgtcttggcgtacctgaaaggcgattttatcaactgctggcagcagtgttgagtgattacatgaaaaaacatccacaaatgtcagagcgttttgcgcttttctcacttttcaggccacaaatcattcgcgtggtgctgaacccggtaaaactgacctggcctgatctggatggcggcagccgcatgctgccgaattaccttgaggatctgcaaaatccgctgtggctggtaactcaggaatatgaatcatga

SEQ ID NO: 22451 - DNA, 273 bp, Escherichia coli
atgaatctgtccggcatggctgaggtcatccaccaccgactgcaccgtggcgttatcggggatattccaggtggcaccggaggcgagagtgacattcgtggggtcaatggcaccgttcagcacagtgctgccggtcagcttcagggctgtaccgcgctgagcaatgacatccgtggtgacggtactgtcgttcagcgtcagcgtgccttcattcaggttgacggctttctgggtgagtgtggtgttgctgacagtgagtgtgccacttcctga

SEQ ID NO: 22452 - DNA, 1491 bp, Escherichia coli; identical to SEQ ID NO: 8027

SEQ ID NO: 22453 - DNA, 1323 bp, Escherichia coli
atggaactgaccgttgaatcagtgcaagccctggcgcccgatgacgcctcggttaaagcggctcgtggcctggttgctcccgcaaaatggccgacgctcggatatagcgaggctgccttctggggagagtgtaaaggtagcggctcccgcccttatcaggtacgaatcgacagacaggatctggcctgtaaatgttcctgccccagccgtaaattcccctgtaaacatagccttgcgttgctttttctccaggtgcaacacaccgcaagtttcaccgctggcgagccgccggaatgggtaagcgagtggctaacctcgcgccagcagcgggcggttcgcaaagaagagaagaaagagcaggctgaggcaaaagctgccgacccgcaggctgccgccaaacgggaagcggcacgcaaccaaaaaatgacggcggggctggatttcctcgaacagtggatgcacgacctgatccgccacggtctggcgcagatctctgcacaacagttgccttttgccgggatcgccgcccgcatggtcgacgcccaactaccgggaattgccgctcgcctgaacaatctgaccactcattttactaccgccgaggtatggccatcgagcctgtgcaaagaactggggcagctacagctgattattgacgcctggcgccagcaacaaatgttatccccggcacaacttagcgatctccatgcggcattgggaatacccccggataaacacgacgtcactgacggattaacctgcctcgataactggcaggtcttaggtcaaagcgcgcaagaagggaataatctgtggcgacgccgggtctggctgtacggagaaaagagccaccgcaccgcgctactgctggactattcacacggtagtaaaaactttccccagcactttatcaccgggcaagtctgccagggcgcgcttgcctttttccctggcgcatcaccgctacgggcgcgggttgtggagccgtttacccgcggtgaaagattcccgcttgcagaattacccctcccggacgcgctgcatgacatggcgcagcggcttagcgcgaatccctggcaatggcctctgccgctgcgagtaagcgaaatattgatttacccgcacgagagcggctggcgattcgtctcgacacagggccagcacttaccgacgcacctgtcgtcggacgagggttggcggttactggcggccagcggcggcgcgccgtttatgctaatgggggaatgggatggtcagcagctgacgccctgtagcgcctggcttgccggtagcgtcatttgggcaaccggaggcgcacaatga

SEQ ID NO: 22454 - DNA, 1605 bp, Escherichia coli
atgaacgaatggcaaaatttaacccgcacagcgctactcggcacagacaaaaaagcgtttacaccgtcggcgtcgcaaagtgagattgggctgttactgtctgaactggcgaataacacatccgcagagcaacagctactgcgctcggcgggcgttctggcgctctgccatctggctggctgggtgccgcaggcgattgaccccgcaccgctgccggaaatcgataaagaaaatgccgagccaataaacaacccggcttttgcgggactgctgcatctgctgctgtcagaaggaccgccgcggttgctgtggtcggcgcttgatctattggtccgtcgtcaacttcttcctccgcccctgctgttaccagcattgctgaattatggagcgcaaaagccatctctacgcggcatcctgtccaatgttctgggcgctcgcgggtgctggctggcgcaaatcaacgccgattggggctatgttctcgcctccactgacgctccgctggatgaagaaatgtggctgcacggcacgtccgaacagcgtctgcaatatctgacgcaaatgcgcattcgcgccccggaacagggtcgcgatcggctggcgcaggagatgagttcgctggatgcccgcgaacgcgcacagctgctggctgtgctggaagtggggatctcccaacacgacgaagcctttctggaacagacattatccgatcgcagcaaagaggtgcggcaaactgcggcacggttactgtgttgtctgccggaaagcgcctggatctcgcgcatgaagtctcggttagcgccgttgctcagttcatcccccgctcctgagaccttacttgaaaggctaaaaggcttatccggcaaagaaaaaatgctgcgcgtcgcccttgatgccccggaggcgttcttaccagagtggaaggccgatgcgctggaagaaactaagcccaaaggcgaaaagttgggccagcgcgcatggtggctgtatcagatagttgcagcggttccgctcgactggtggcaaacgcaactgcaggctacccccgttgaactgctgcgctgggccgggaaaaccgactggcaggaggcgctactgcgcgcctggtatcacgccgtcctgcgcgaaaaaaatccacagtgggcgcaggcattcctcgccctactccccgtcggaataagcattcattcccctgctggcgtgaagattaacgcctttgagcttctgcaatgcctgcccgtagaagaacacgagccagtgttgacgttactgttctcggtaatgggcggcgaacatttacaacgctacatcgccctgttaccgctggatgcgtcgctctttagcctgcgcctgagccagcaaatggtcacggagctgcaccgttgggtgaaacatgattccgcgcgctttgactacgccctgcgccatgtgatgagtgatttcgcctgcctgctggcccccgaagtcctcaatgatgtcattgacaagtggccgcatgacgcacaacaaacgccttattgcgaggcagcctttactgccctgagcgccacgctggcgcaccgaattcaacttcattcgttttttgtcggagaaactactttatga

SEQ ID NO: 22455 - DNA, 1095 bp, Escherichia coli
atgacttccaccgctactgccgccgttttacgccgacatgccgaacaacaatttgcagaagaactggatgagctgcaaaaaaacgatactcatccgcgcccggaaaactgggctatttctccgtggtccgttgctacttatctgttaggcgggcaactggaaaatggttttgaggtcacgccgaaatatatcggcaacaggcggattatcgaaaccgccgttgccacgctggcaaccgatcgcgcactgctgttgtatggcgtacccggcactgcgaaatcctgggtctctgaacatctggcggctgccatcagcggcgactcaacgttaattattcagggcaccgcaggcaccggtgaagaacaaatgcgttatggctggaactacgcggagttgctctctaaaggtccgtcacgttcggcgctggtagaaagcccattgatgcgggcgatggcacgcgggcagattgcccgcgtagaagagctgacgcgtattcctgccgatgttcaggacacgctgatcacgatcctgtcggaaaaaacgctgcctatccccgaactgaatgaagaggtccaggcgacgcgcggctttaacgttatcgccaccgccaacaaccgggataaaggcgttaacgagctttcttccgcacttaaacgtcgtttcaacacggtcattttgcccgtacccgccagcgaagaagaagagattaacattgtcactcgccgcgtcgccgaactgggtcaggcgctggcacttcctgccgaaccgccagcgcttaaagagatccagcgagtcgtgcaaatcttccgcgaactgcgaaacggcctgacggttgacggcaaaacgaaaattaagtcgccaaccagtactctcagcaccgcggaggcgatctccgttatcaacaacggtatggcgctggcgggccattttggcgacggcgtgctacatccgcgggatatcgccgcaagccttatcggcgcggtggtaaaagatcccgtgcaggacgacgtggtatggcgtgaatatctggaaactatagtcaaagagcgcagcgactggaacgatctctatcgcgcctgccgcgaaattgtgtaa

SEQ ID NO: 22456 - DNA, 2250 bp, Escherichia coli
atgactgaacaaaccgttcatttgtttggcatccgtcaccatggccctggctgcgcgcgcagcctgcgaaaggcgctggagacgctacagcccgactgcctgctggtggaagggccgcccgacggcgaatccatcctgccttttatgcagcatgaacagatgcaaccgccggtcgcgctactgatttatgccccggacgactcacatcacgccgcgttttacccctttgcggcgttctccccggaatggcaggcgctgcgctatggttttgagcaaaatatcgccgtgcgctttatggacttgcccatcagtcatcagttcgcgcttgatgacgaaaaagagagcgatgacgatgatgccgttgaagccagtcccgacggcgatccgctggactggctgggccgcgccgccggttacaccgatggggaaagctggtggagccacagagtagaggaacgcgaagatgatttgtctctgttcgaggcgattcgcgaggcgatgattgccctacgccaggcaactcccgaagcccgaaactcagccagagatcaactgcgtgaagcgtatatgcgcaagacgctacgtcaggcgaaaaaagagggcttctcgcgcatcgcggtagtctgcggtgcgtggcacgttccggcgctggaaaacctgccgcccgcaaagaatgataacgaactgctgaaaaatttgccgaagtgcaaggtcgcggcagcctggacgccctggagctacgaggcgttaagccgcgccagcggttatggcgcaggggtggtgtcaccggaatggtacgatcatctgtggcgttatcagggcgcttctcaccgcgatatcggctggctgtcacgcgcggcaaggctgtttcgcgaagccgatctcgactgttccagcgcccacattatcgaagcggcgcggctggcgcagacgctggcgattatgcgccatcacccgcagccggggcttgacgaactttgcgaagcgctgcaaaccgtagtgtgtatgggcgaaagcgcgccaatgcagatgattcgccagaagttaattgtcggcgacgcgctgggaagcgtaccggatgatacgcccgtcgtgccgctccaacgcgacattacgcaacagcaaaaaacgctgcgcctgaaggcagaagccagcgaaaaagtgctggatcttgatctgcgcaaacccggcgatctggcgcgtagccatttactgcatcgcctgaccttactcgacatttcctggggccgtctggctggacaaggaaataacagcaaagggacgttccacgaagtctggtcgctgcgctgggaaccggcactggcaatcaacatcattaccgccagccgttggggtaacagcattgagcaggccagctcccgctatgccattgtgagggcgcaatacgccagcacgctgccggaactggcaaagcttatccaacaggtgctactggccgatttacagaccgcgattgcccccatcgccaatacactggaatcactggctgccactcagggcaatatcgaacagttgctggaagccctggcaccactggtggcgattgtccgctacggcaacgtgcgccagaccgactctggtatggtaatgcaggtactgatgagcctcgccccgcgcgccgccatcgccctacccggagcctgttcggcgctcaacgacgacagcgccgccagtatgagagaaaaagttatcgacgcccacgccgcgctgcggttgctggataacgaagatctattggcgggctggttgcaggcgttgatggtgctggcagagggcagtaccgcacacgcgctgcttcgcggaacggcgacgcgcctgttgtttgatctgcaaacgttaacgacagaacggatcagcacgctgatgaacctggcgctatcgccagccaatcccccggcggaaagtgccgcatgggcggaaggtttcctcaacgacagcgcgatggtgctactgcacaatagcgaattatggcagttgatcgatgcctggctaagcggcctgaacgacaatcacttcacccggatcctgccgatgctgcggcggacattcggccgtttttccagcccggaacgccgccagttaggcgaacgcgccgcgcagggcgagcgtgtcgcgcagcaagaagagaccagcggtatatgggatgaacagcgtgccgcgttaatgctgccgctactgcgccgcattctggctttgccaccacacgaaagggaaaatcatgtcgagtaa

SEQ ID NO: 22457 - DNA, 1170 bp, Escherichia coli
atgtcgagtaacgaaatggaacggctgcgccgctggcgtctgatccttggagaagatgccgacaatgcctgtaacgtggcgctggatgccagagagtccgcgattgatgccgcgctggcggcgctgtatcagccagagggtaaacatggattacgcggcggcacgggtggatcgtcacccaaagtcgctcgctggctgggtgatattcgccagtatttcccttcttctgtggttcaggtgatgcaaaaagacgcctttgaacgtcttaatttgcacagtatgttgctggagccggagatgctggcaaacgtccagcctgatgttcatctggtctccacgctgatgtcgctgaatggcgtaattccggccaaaaccaaagaaaccgccaggcttgtggtgcgtaaagttgtcgagcaattgatgaaacagcttgaagagccaatgcgtagcgcggtaagcggcgctcttaatcgtgcggtacgtaatcgtcgcccgcgccacgcggaaattgactggcagcgcaccattcgcgccaacctgcgccactggcaggaagagtataaaagtattgttcctgaaacgctgatcggctacgggcgcaagtctcaacgcacgcaaaaggagatcattttatgtatcgaccagagtgggtcgatggcctcctcggtggtctattccagtatttttggcgcagtaatggcatcgctcccggcggtaaaaacgcatctggtggttttcgacaccgcagtcgttgatatgacagagaagctcgacgatccggtagagctgctgtttggcgtacagctgggtggcggcaccgacatcaaccgcgcggtgggctactgccagtctttgattcgcgatccgcgcaataccattctggtgctgatttccgacctctacgaaggcggggtggaacgcaatctgttgcaacgcgccagtgagttgattcagtccggcgtacaggtggttaccctgctggccttaagcgatgaaggtgcgccgttttacgaccggtcactggcaggaaaactcgccgccatgggtattccctcctttgcctgtaccccagatttattccccggcatgatggccgccgccattcgtaaggaagatgtgaatctgtgggctgcgcaaaatggcgtagtgacagcaagagaaaccgcctga

SEQ ID NO: 22458 - DNA, 147 bp, Escherichia coli
atgccatacaaaccgaatgtttccgaacttaagaaaatgactgttgcagagcgcaagaaagaagccatgcgccagcttaaagcatcctttgagcgcgccagcattgaagggactttgcataaacgctctgcaaagtctgttgcgtaa

SEQ ID NO: 22459 - DNA, 528 bp, Escherichia coli
atggggaatcgtttaacggaaaaaaacaatcagatgatttcttttctatccgatgaatttgaggaatttccgcagggagattttttaaatcatctctataggttttcggtagaccatcatcattttatcgtgatatttagccctattgatattagcgatgcggagtaccatcaataccgtagcgaggaagttggatttgaaatcccaactaattgttttgatgtgaaatttgataggcaagaaaactttgatagtggtaacttttacatgccccccgccgcaactgaatgctcgaggcgcagacgctttactgatgaactcgcagaggcgctagcaacgattattgaaaagcattacatcatttatcatgccagggcttatcttgccatcgcagagaatgacaagttgaaacgttactatgaccggattttacacaatgccccggctaatgtagcatatagagtaatcaaagatgttggagaggaggaacgaggttatgccatacaaaccgaatgtttccgaacttaa

SEQ ID NO: 22460 - DNA, 279 bp, Escherichia coli
atggcgctgacgctgctgctgggaacgcctacgcttggctttctcggtgcaccgggcgtggcgctgacagtgggacttaagcgcggtggtgtgctgctcagcatactggtgttaccgctgactatcccattactcatctttgccaccgccgcgatggacgcggcttctatgcatttgcccgttgatgggtatctggcaattttaggcgcgttgctggcaggcaccgcgacattaagtccttttgcgacggcggcagcgttacgaatcagcattcaataa

SEQ ID NO: 22461 - DNA, 378 bp, Escherichia coli
atgatgttctggcgcattttccgtcttgagctgcgcgtggcgtttcgccacagcgccgaaatcgccaacccgctgtggttcttcctgattgtcattaccctttttccgctcagtatcggtccggagccgcaactgctggcgcgtattgcaccgggcattatctgggttgccgcgctgctttcatccttgctggcactcgagcgactgttccgtgacgatttgcaggacggcagtcttgaacaattgatgttgttgccgttacccttgcccgccgttgtgctggcgaaggtgatggcgcactggatggtaaccggtctgccgttactcatcctttcgcccctggtagcaatgctactgggaatggatgtttatggctag

SEQ ID NO: 22462 - DNA, 600 bp, Escherichia coli
atggctgactattttgaaatacgtgctgattacaatcagcacaccatcacggtttatcaggcttacaatgatgcaatcgctgacgtcgccgtacgtgacgggcgatttggcgcacctttttcattcaaccgcatgacctggattaaaccctcttttatgtggatgatggagcgtagcaactggggactgaaaaaagatcaacaacgcattctcgcaatccgaatcaaacgcaccttctttgatacattgctggaacaagcggtgctaaccacgccggaagcccatgtctatccacatgcaggagtttgggaaacgttatttgcgcaagcaaatgtatatgttcagtgggacccagaacgcagcataaatggcaaaaaactggagcaccgatcattacagcttggtatttctcgtaacttgatcagtcaatttaacgaagacgccattgttgccattgatgatctgacgccgctggtgcgaaagtgtcataaccttttgataaacggtaaaacaacacaggcgaaatccttcctgccgccagaaaaaatttatcctgttagtgcaactgcaagaaaggcttggggaatgaaaaattcctga

SEQ ID NO: 22463 - DNA, 450 bp, Escherichia coli
gtgcgacaaatcaacgccgggcttaataccagagaaattattctggaaatgattgacgaagcagatgaacccccgtttgctgagcagcgaacctggcatcgcaggcgaatcgcttttctttgtgagtgcatcagcgttgctgtcgactacggcttcttctgttctgtctctcagcagtcaataatgaacataaccaggatggctgaagatgtatggataacagaaagtaaaacgacccaactcattgatatctggcagcaacttaagcagctttatccgccagaaactattccctatacccagcagttacccgctaaagaattgcttgaactgctactttccagtcctgacgatcttcgaataattgaaatccctgacatcatcggcgatgtttttgatgaccaaacctggattcgattattcaaaaaacactttgctgatgttatctaa

SEQ ID NO: 22464 - DNA, 261 bp, Escherichia coli
atgggtaaactcacgggcaagacagcactgattacgggcgcattgcagggaattggcgaaggaattgccagaacttttgcgcgtcatggcgcaaacctaatcttgctggatatctcccctgagatcgaaaagctggcggacgaactgtgtggtcgtggtcatcgctgtacggcggttgtcgccgatgtgcgtgacccggcgtcggtcgcccagctatcaagcgtgcgaaggaaaaagaagggcgcattgatatcctggtga

SEQ ID NO: 22465 - DNA, 414 bp, Escherichia coli
atgaaggaattattgctgttatcggtatttttgatatccgcttgctcgacatcctatgatgtttatgacggtgttgataaggcatattgcgacaaagttaaagtggatttttctcttgccaagacggcgaaggatagttgtattgatcactacgtcaagacttataccaagccagcctcatcggcatctgatattgctgaaggtgctgtgtttgagtgtaacaaggtgatatccatcgcagcgagttcttcatacgatgctgctgtatgtgcaatggctgaaagaaacggcatgtcagtgcaaaaaattaatagcatgataagcagtaatgacgaagccaaaataagaactgatatcagctcggtgaaaaaagatgccatgaacagagttgtaaaatatcagtcatctttataa

SEQ ID NO: 22466 - DNA, 228 bp, Escherichia coli
atgcgctatgtgtcatgcaaatgtggtgcccaaggaccagaaaaacgaactaaatctgaagcgatttcttcatggaatagtcgaatgaaagtatgggtttatgatccagaaaccatattaaacgctgaagagcgcaggagaacggaagtctatattcataaccttaatgaagatggatttacaccagtgcttgtaaaggctactccgcaggaggttaaccatggctaa

SEQ ID NO: 22467 - DNA, 879 bp, Escherichia coli
atgaccactattaccagagaacaggcacagaaaattattgaagcagccgatgaggttattagtgcgctggccggaactaacgaggatgttcaccctggtagcgataacatgctacgcctgtgggatgacctgaatgaccgttacgcgccgccggaagttgtgcgtgagctggcgcgtatcgtgctggcatcgctggaagcagaaccagttgcttatattttcaaacatccggccgggaaattattctgggctttaacggatgaaagcaataaagagcaagcggacgttattcctgtttatgctgccgcgcctgcgtcggttgtgccggatgatgcatcagggtcgcttgcttatgcttacaaagagcttacgcctgagattatgcgcggtcatatcgctgtattcgagcgatatggaatagccccaaacgatagcattaccacaattcaggcactgcgaatcgcgctggatggcatagagcggagcgacgccatgcttcatggtgccgaacctgcaagtaatcatgaagagttgccgcttgattatctccaaggtcaaaaagatggtcttgaatgggctgcgcagcttgcagaagcaaatcacccacaaactggcgactggctttacgatgacccgctggagctggctaaagctatcagaaaaggtcctgacatgcccgaattcgatggaccaactccggtaactccggatggttgggttatggtgccgaaggagttaacaccggaaatgatgagagccgttcagattagaagtgagcttggagggtatgccacttccaatctatctggtgcgtacaatatgttttctgagttctggaatgttgctgtctcagctgcgcctaaggtggatgatttatga

SEQ ID NO: 22468 - DNA, 147 bp, Escherichia coli
atgttcataccgtatggattgggtatctggaaacgtcctcgcatttgttatgcaaaatgcaacaaagccagtgaaatcactggctcgcgtcttccgaagatgtttcaaatcgcacaaggccaggcggcaaggccacgcttaagatga

SEQ ID NO: 22469 - DNA, 957 bp, Escherichia coli
atgaagcaactttggtttgccatgtcattagtgacaggtagcctgttattctctgctaacgcctcggccactcccgcgtccggggcgttattacagcagatgaacctggccagtcagtcactgaattacgagctgtcattcatcagcatcaataaacagggtgttgagtctctgcgttatcgacatgcacgcctcgataaccgtcctcttgcacaattgttgcaaatggatggcccgcgccgggaagtggtacagcgcggcaatgagatcagctattttgaaccgggacttgaaccgttcacgcttaatggcgattacattgttgattctctgccatcgctcatctataccgatttcaaacgcctttctccttactacgactttatctccgtcgggcgcacgcgtattgctgatcgtctttgcgaagttattcgcgtggttgcccgagatggtacacgctacagctacatcgtgtggatggacaccgaatcgaaattaccgatgagggttgatctccttgatcgcgatggtgaaacgctggaacaatttcgcgtgattgcttttaatgtcaatcaggatatcagcagcagtatgcagacgctggcgaaggcaaatttgccgccgttgctttctgttcctgtaggtgaaaaagctaaattcagctggacgccaacctggttgccacagggttttagcgaagtttccagtagtcgacgtccgctaccgacgatggacaacatgcctattgaatcacgtctctattccgacggattattcagcttctcggtaaacgttaaccgcgctacgccatcgagcaccgatcagatgttgcgcaccggacgcagaaccgtcagtacaagcgtacgtgataacgccgaaatcaccattgtcggtgaactgccgccgcaaacggcgaaacgcattgccgagaatattaagttcggggcagcgcaatga

SEQ ID NO: 22470 - DNA, 606 bp, Escherichia coli
atgtcagaagattatttaattgaatgggataaggattttgcagacgatctcaacgtcgtcgccagcgtttttttacagcacaccccaaccttatggcccactattttctctcaactttcgacgcaacctgaaatctttgaagacgaagatgaagacgaatatggattacaagacgttctcgattgcagtggaggcgatctcggaaatcatgacctggcgcaggcatttttacaggttctgcgcggtgaaggactaattcaactcgttgactggaaaggtgaagatgaagaaggtgagctggctaattttgctgcagatcgcttttatgagctcacaaaaaacctgacagcttctgaggaattaaggagtcttcttgtcgaaataacccaagaggatgaaatctccgatgtctgtgaagccggagaccgttaccttgacgaaatctttgaacgcatccaaaccgaactcaataaaaggggctttcagatttttgatctgaatgaaggatctgacacctataacgtggtcgttctgccaatgaacgaatataaaaaaatagatgatttcaacacgccgtggctggaagtacaggattttttaagctaa

SEQ ID NO: 22471 - DNA, 756 bp, Escherichia coli
atgcagatgttccttaaccagataagcaatgcacttcaacaggctccatctttgtcagagtcaaaggaacacaccatagatattcaaaaaataacggatgcctttgtgaaggagttccgtgggatattatttgataaaaatggaaattcttcagagcgtttattcaatttttatgagtgctgctatatatttttaccaagagcgcagcctcaagataaaatcgaaagctataattcagcactgcaagctttttccatctttcgttcatctactttgaataataatgatgtagggtttaatttcaaattattcccagaagtcaaactgcctggggaaaatcttgaaacggtattcaaatacaaaaaaggaagttttgtccgggagatagccagaattaacattgctctacaaaaaggagagggtggtttatataatttaggtgggttggattttaagggatgcttcttttctggacagaacttcagtaactatgatattcaatatgtgaactgggggacgtcattgtttgatcttgatactccatgtatttttaatgcgcctgcttacaacaagagtaatgaaaaatcattagaacgcgtcagcgaaaacggtttaagtggagtcttgtctgatcgtaataaaaaaataaaactcatcacgggcgtggcaccattcgatgatattttatttatggatgatgactttgatgatccttccactaaggatgatcccgtggagaatagtccccttgtataa

SEQ ID NO: 22472 - DNA, 213 bp, Escherichia coli
atgtatatcgggatagatcttggcacctcgggcgtaaaagttattttgctcaatgagcagggtgaggtggttgctgcgcaaacggaaaagctgaccgtttcgcgcccgcatccactctggtcggaacaagacccggaacagtggtggcaggcaactgatcgcgcaatgaaagctctgggcgttcagattctctgcaagacgttaaagcattag

SEQ ID NO: 22473 - DNA, 528 bp, Escherichia coli
atgaaaaaattggttttaggttcagctattcttgctgtacttgggatgacttctactgcaatggctgcaaacagtggtactgttaattttacaggggctgtatccagcgcaacgtgtgatcttaaagttacaaatgcttctggagctgagatacctacagttgatttaggtactgtatcaacgacgggaacacctgcttcagttcaatttaagcttgttccttcagataatgcttgcttggcaaaaaatggagcccagattagctggacatcaaataatttaacaacccaaggttttagcaatgcaactacggggggaacaaatgcatatatggcattacttacttctaatgcccaagaaactggtgcgagctcatatgttaaatccggtcaaactacttttaactatcaagtaactagtggcggtattcgatcttttgattacagtgcttcgttagttaaacctactggtactgtgactccaggcgcattttcaacttcagcaagttatgttgttgcttataaataa

SEQ ID NO: 22474 - DNA, 201 bp, Escherichia coli
atgaaaggcagaacgccacacattgaacatcaagccaaccacttctcggatgttcgcaatgagatgattgccattcgcggtgatatgcacggaatggagcgtcgcctagcagataagatggacgagaatcaaaagtggatcatcgtcctgttgattttatcaattcttatcccgctacttatcgcattggtcacaaaatga

SEQ ID NO: 22475 - DNA, 1065 bp, Escherichia coli
atgaagaaattaattaaccagattgattctgttgtcacagaacaaatggaaggactcatcgccacctggccacacctgcaggcaaattacgcgccccgatatgtgtggtgcaaacaaaccgataatgcagtggcgctgatttcaggcggcggctcaggccatgaaccactgcatgcaggttttgtcggtatgggaatgttaaccggtgcatgtcctggtgaaatcttcacatcgcccacgccagatcaaatgatcgaatgtgccaaagcggttgataatggttctggcgttctgtttttcatcaaaaattacacaggcgatattctgaatttcgaaacggcagtcgagatgttacacgaagaaggcatcgccgttgggaccgtcattattgatgatgatgtagcggtaaaagatagcctgtatacagccggacgtcgcggtgttgcgggtacagtttttgttgaaaagattgtcggtgcggctgcacttcagggatataacctggggcagtgcgagcaacttggcaaagatgttaacaatgccacccgttcttttggcatcgcactgtcagcctgtacggttcccgccgcgggaaaaccctcatttgaactggctgataatgaaatcgaatttggtgtcgggatccacggtgaacccggcattgaacgccgcactttgcaagatctgaacactttaatcgacagcgtgatagcgcaattactggataataccccctggcgacgcacattacgccattgggatcgccatgcggggggatggattgacgcatcatcaatgaatgagtcattcgatcaaaatgccgaatatattgtgttaattaacggacttggcagcacgcctgaatcagagttatatggtgtggccagggtatttatgtgcgccgcacagcgccagggaattaaaattagccgccagttggtcggtaattattgtacatcattagatatggccggattttccatcagcctgctgaaatgtaccccagagtttttgcaactttgggatgccccggtcaatacgccagcgcttcgttggggatgttaa

SEQ ID NO: 22476 - DNA, 4923 bp, Escherichia coli
atggcgctggtcggtattaataacgaaaacgaattttactctaaccactatttgggtgaggtattcaccagtgatatccgcgatgtgctggaaccctggatagcccaggaaaatgcagcgcgtgaagcggagcgtgccgctcgtgaacagggcaaagacgtagagccgggataccgcgctccgtggaaccagtttaacagtctggcgactgagtttttccgcaaacttgccgagcacgaaaaacagcgtcagatcccgcagcgtctggccgatcaacgtaatcgctggcagccattgttaaaggcgctgggctacgaaattacgccgcagatccaaatgctggatgacgatacaccactgccagtactggcgcgttacaacagcactgacggtagcccgtggctgtggattgttgaagcacacgatcaggaagaaggaacgctggatccgctggcgctctccttactgaccgcgcaattcccggcggataccgacaaacataagcgcgacagcctgcgcaaaaaagccaacggtgaatatcgcagctggcaggatctgctctctacggcggtcttcacccaaaatgaaccgccgcgttttgtgctgctgctcggtaaccgtcagctattgttgttggaccgtactaagtgggcgcaaaaccgtctgctacgttttgattttgaagagattttaagtcgtcgtgaaacggatacgctgaaagcgacggcagtgttgctacataaagattcgctgctgccgggcagtggggcaccatatcttgactcgctggatgacaattcgcacaaacatgcgtttggtgtttcggaagatctgaaatatgccctgcgcgaaagcatagagttgttgggcaacgaagcgatgcattatctgatcgaccgtggcctggcaaactataccggtaaccgtgcggtggacccggatgaactgagccgcgaatgtctgcgttacatgtaccgcctgctgttcctgttctacattgaagcgcgcccggagctgggttatgcgccaatgacagccaaaacctatctgcaaggttacagcctggaaacgttgcgcgatctggagatgatcccgctgaccagcgaagaagatcgcaacgggcgctacttccacgacagcctgaatatgctgtttaaactggtgcgcgaaggctacaacggcggcgtgaaaatgcagagtgacctggagagcggcgaccggatcaccatccatagtcatcagttcagcgtcccgcgtctggaaagtcatctgtttgatgccaacaacacgcgcattcttaaccgcgtggtattccgtaacgaaaccctgcaacagattatccaggcgatgtcgttaagccgcccgggcaaagggcgctttaaccgccgcggacgtatttcttatcgccagttgggtatcaaccagttgggtgcggtgtatgaggcgctgctctcctatcgcggattcttcgccagcgaagatctctacgaggtgaagaaagccggggaagagtttaacgagctggagacgggttacttcgtcagtaaggatgagattggcaaataccacgaagacgagaaggtctacgagaaagacggcagtctgcgcattcaccgcaaaggcagttttatctaccgtatggccgggcgcgaccgtgagaaatctgcctcttattacaccccggaagtgctgacccgctcactggttaaatatgccctgaaagaactgtttaaagagcaaattgatccgattaccgatctgcacgctaaagctgatgccatcttaaacctcaccgtgtgcgaaccggcgatgggcagcgcggcgttccttaacgaagccatcaaccagctggcggaagcgtatctgttccacaagcagcaggcggaaggtcgccgtattccgcaggatcgttacacccaggagttacagcgggtgaaaatgtacattgccgacaacaacgttttcggcgtggacttaaacccggtggcggtggaactggcggaagtgtcgctgtggctgaacgccatcagtggcgatgcctttgtaccgtggtttggttaccagctgcactgcggtaactcgctggtgggcgcgcgccgtcaggtgttcaacaagagtgaactgacctacaaaaaagccaaagatccgagctggcttaacagcgagccggtcgaactggcgatgaacacgccgcgtgaagagacgcagatttttcacttcctgctgcccgacggcggtatggctaactacagcgataaaaccgttaagcagcgttatccggatgacttcaaagccctggacagctggcgcaaagagtttattaaaagctttgccgggcatgagattgctgatgtgcagcgtatcagcgaaaaggtggaagctctgtggaacacctatcgccagcaacttaaagcagaacgtctgaaaaccgccgacagctacccggtgtggccggcagaaaacagcgagcagacgcgttcttcgctgagcagtaaagatgaaaccttcagtggtcgtcttgaagataacagtgcctaccagaagctgcgttgggtgatggactactggtgcgcgctgtggttctggccgatcgacaaagccgatgagctaccggatcgcggcacctggttgtttgagattgaaaccctgctcgacgggattgtaatcacggaaaaagtcactgaagttgcggagcacaccaccggcgatctgtttgccgaagaaggtctgctgcgagaagagtcttcactgttttccggcgcaggtcgtctgaaaaccgaggtgttgttccgtcatttgccgcgtctggcgattgtcgatgccctgagaaagcagtaccgtttcttccactgggatctggagttctgcgacctgtttgccgagcgcggcggttttgacctgatgctcggaaacccgccgtggctaaaagttgtatgggaagaacgcggaatattgggagattataaacctgagcttgtactgcacaatcttagcgctgccaatatatcttctctccgagaagaatcttttgcacgagtctatggattagaagatgcatggcgaagtgagtttgaatctgccgttggattacagaactatctaaatagtcagcaaaatttttcatgcttgttagggcaaaaaacaaatctatataaatgttttttaccagtctcatggcgacttatttctgaacatggtgtttcagggttattgcaccctgatggagtttatgatgatagcaaggcgggggaacttcgtgccaaaatttactgccgtttgcgtgaccattatcaatttcaaaatgaattagggctttttcccgatgttcatcatgcaacaacatttagtattaatatttatggtccattgcaagaatcgccttcatttacacacatgtcaaatttgttctctgtgtatacaatagattcaagtattttgcatgataatcaaggggaaattcctggtatcaaggaagaatcttacaatggggataaactgaaaataaattggaatatatcaccccataaatcaagagtattaacaattactattgatgagttacgtttgtttgcggggatatttgatgataattcaacacctgcactgcacgcaaggcttccagctttacatacagtacaattattggaagttttacgtaaatttgatgttaaatcaaaaaaactatcttcaataaaaaataattattattctacagtgatgtttgatgaaacatttgctcaaagagatggtacaactaaaaggaaaacggaattcccctctggaatttcacaatggatattatctggaccacatttctttgtggggaatgcttattacaaaacgccacggactttatgtaaattaaatagtgactatgactccattgatttgatgactattcctgataattatatgcctagggttaattatattcctaattgcgagtattccgattttctaaatcgaattccgacagtttcttgggatggtaatgtctttcctgtgactaatggctatagatttgttaatcgggaaatgataggttcaacttctgaacgaactttcatcgcaactataatacctcccggtatttctcatattaatacgtgtctaagcactatttttaaacatgactatgatttacttgatttcttttcgatgtctttgtccattgtcgtagattatagagtcaagtgtactggcatggggcatgcgaatcagtcattagttaatcaacttccattattaagtaatgagaagtttagagcctctttacatgcaaggtcgatggctttggttagtataacagagcattataaaaaattgtggtgttccatttattcctcagaatttaaaatacaatattggagccgcgatctcccacagctcccccaggatttcttcaccaatctgaccccagaatggcagcgtaactgcgccttacgctccgactacagccgccgtcaggcgctggtggaaatcgacgtgctggtggcgcaggcgctggggctaaccctcgaagaactactcgccatctaccgtattcagttcccggtgatgcgccagtacgaagcggacacctggtacgatcaaaacggtcgcattatctttaccccaagcaaagggctggtgggcgttggcttgcctcgtaccgcgcgtaaagctgacctgaaaaacggctttgtctttaacgtcgacagcccggactggaccggcggtgactgcaccgatcaagccatcggctgggatgatgtcaaacatctgcaaaccggtaccgtcagcgttacctttgatgactatacccgcagcgacgaaggcgagcgccgtaccgtcacctggcaggcaccgtttatcaagccggatcgcgaagacgactacaaagtggcctgggcgttctttgcacaagataaggagagcgcctga

SEQ ID NO: 22477 - DNA, 165 bp, Escherichia coli
atgcgtaaagccccttttactgagcatcagattatcgccgtgattaaatcgcttgaatacgggcgaactgttaaagatgtctgccgggaggcaggcttctctgagccacttactacaactggaagtccagatacggtggtatggaatcttctgatattaaaataa

SEQ ID NO: 22478 - DNA, 486 bp, Escherichia coli
gtgcgagcagcggcactgcatgtgctcggggacctgctgggttcggttggggctattattgccgcgttgattattatctggaccggctggacacctgctgaccccattctctcaatactggtgtcgcttctggttctgcgtagcgcgtggcgactgttgaaagatagcgtgaatgaattacttgaaggtgcaccggtatcgctggatatcgccgaactgaagcgtcgtatgtgccgggaaatcccggaagtccgcaatgtgcaccatgtacatgtatggatggtaggcgagaagccggtgatgacgctgcatgtgcaggtgatcccgccacacgatcacgatgccttgttagatcagatccaacactacctgatggatcactatcagattgagcacgccactattcagatggaatatcaaccttgtcatgggccagactgccacctgaatgaaggggtgtctggccattcacatcatcaccattaa

SEQ ID NO: 22479 - DNA, 639 bp, Escherichia coli
atgtatcttgataccagtcacgcacaaaacctgaaggaaaaattgctgctatgcgcggttaatgaatttgccgaatatggttacgaaggggccagagtagataatattgttaaggcagcagggtgcagtaaacagacggtttatcaccactttggtaataaagaaaatttgtttattgaagtactggaatatacctggaacgatattcgcgaaaaagagagagagcttgacatttcagggctttcgccggttattgcgatcgagaaaataattgattttacttgggattattacatcaataacccgtggtttttaaaaattgtccatagtgaaaaccaaagtaagggtgtgcattataaaaaatcaaaacgcctcgctgaaattaaccatgcacatttgcagtcaatggcttcattattagaagaagggcagcggcagaaaacctttaagaaatatattgatcccttacaaatcaacattaatatcgccgcactgggtgcatattatttaataaaccagtacacactggggatggtttatcacattagcatggtttcacctgaggctttggaagccagacgcagggtgatcaaagagaccatcctgagctggcttttggtgaaccctgcccgtgggtaa

SEQ ID NO: 22480 - DNA, 630 bp, Escherichia coli
atgcccgggcgctttgaactaaaaccaaccctggagaaagtctggcacgcgccggacaattttcgcttcatggacccgctgccgccgatgcatcgccggggagtcattattgcggcaatagtgctgattatcggtattcttctgcctggagatgaaacacgccagatgcctgttgtcacccgcgaagcgcagttagatatgcaatcaccccccccaggtgaagcacagctacaggcacatttagtgacgccgcaaaacgatccggatcaggtcgccccggtcgcgccggaacctattcaggaaggtcaacctgaagagccacctgttgcagagacacaatctttccaaccggaaagtggtatcgatcaacagtggcggacatatcgcgtagaaccaggcaagacccttgcccagctgttccgcgaccataatttgccgcctacagacgtgtacgctatggcccaggtcgagggcgcggataaaccactcagtaacctgcaaaatggtcagattgttaaaatccgtcaaaatgcgaatggggtggttaccggcttaaccattgatacgggaaataatcagcaagtcctgttcacccgccaacctgatggtaatttcatccgcgcacgctga

SEQ ID NO: 22481 - DNA, 2475 bp, Escherichia coli
atgataaaggcatttttatcgcactcaagtaaagataaggaacattatgtgcgtaatgtcgctaattggcttggcaaggaaaacataatatatgatgaatttacttttgaggaaggagaaagaacactagaccaaattatggagggtttaggagaatcagagttatttgttctttttatttccaacagcgcacttgagtccgaatgggtcaaaaaggaaataactgagtcaaaaaaactcctcgatgaaggtaaaattttgaaaattttccccataataattgacaacagtataaatcatgaagaccaaagaatacctgattggttaagaaaagactataatcttcaacccatcacacgcgcaagaactgcagcctcaagaattaagaaccatctatacaaaatttcttggcaaaaacacccaaaacttgccaaaataagctcattatttgtaggaagaaacgataagctagaagaatttgaagagagaattaacgattacactaaaaaaaaaccaactgttatcttcgcatctggtttaataggtgtaggaagaaggtcattcttatctaaagcgttaataaaatgtaacattcaaaaaaatcaaatcacaccttatgctatatatttagacagaaatgagtcaattgaggattttatcctaaaacttaacgatttaggtattaccgatcttaaagaaagtgctctatcactttcagaaaaaacaattgaggaaaagcaaaaaataatatccaacatattaaatgaagcttacaaagcaaaagaaacaatatttttcctagatgatgggtgtataataaactataagcgagaattaaccccttggtttaaaatgataattgaagagtataatgacatcaatttccctgtattatgtatcgcctcaagatacagggtcaactttgctaacaggcctcgtgatgacagattttatttcattgaattacccgagcttaatgtaaaagaaagaaggcgtctattatcacaactattagaaattgaaaatattgatgatctagacccatccaactttagcagcgtctgcgacttacttactggtttgccagaacaagtaaggtttgctattgaactgataaaggataaaaacataataccatttgagaataaacttcctatactgtcagattttaataatgataaagcatcaatacagctacaaaggtatgcccacaatgaaacggttttagactttataagactcctcgctcaatttgaggtaataacattagactttattttttcaatcgttgataaggacaaatatctacctgtccttgaagctttgattgcagaaagcatttgcgaattagtgggttctgatggtgaaatgatcagattaaatgatatcgtaagagattatataaaaagaaacagacttaagattaatgatgagcataataaaaaacttaatttagttgttaaagatatagtaaacaatgaagatttaacagaagcaaactcatctgtatatatttttaccataaaagaaatgctcaaatcagatgagtatattgatcctaaacaccttattccttcgcattatttaagatgtatgaaagatttatataatacaaaaggttcattagaaaaagtaatatcattagcagacacaattttacaaaaagaaaagaacatggataatggtgttgtacaagatataagatactatctatgtcttgctttagcaaaaaaatccgattccaggcttttaactgaagttcaaaaaatttccggtgatgaacataaatttttattgggtttctattacagaaaatgcggaagactttctgatgcactttttcagtttgaaagtataatcaatgctccatatgttgagtctcgagctaaacgagaattggttcaggtttatacacaattagaagaatatgataaagcgttaagttatgctaaaaagaactatgaagaaaatagaagcaatcaattccactgtcaagcctattttaattgtctcataaattctcagcatagggtagcgtcagataatatcgtgttaaaagatattatcaccaccttaatcaacattgattcagagcaatcaaatgaaatggcaaaaatagctgacgcaatgtattcagctaaaattgaaaatgatgcagtgaagtcaatcaccataataaatgactgtatagcaatatatccagaaagtccttatccattactcgcaaagtgtgatattggattaaaattcaagtctatacagacactagaggaagccttatcctcattagataaaatgaaaaggcgaaaagttgtgtctgaacgaacacttacaacctatctggcttatttaatggctttaaagggtgatgcagatagtgcaaatcagataatatccaatgatattaaaaaatatcctcaggaagcaagagaaagaattttgaaaaggataaaagaatatgccgctaaaaattaa

SEQ ID NO: 22482 - DNA, 2421 bp, Escherichia coli
gtgtatgaaaacgtcgattttttcgcccgcctgttcggtcacgacaaagcggagcgggaagtccgaatcaatgatctgctgaccagcaccgggttagcaccgtttcgcgatcgtccggcaggtaaactctccggcgggatgaagcaaaaacttgggctgtgctgtgcgttaattcacgacccggaactgttgattcttgatgagccaacaacgggggttgacccgctctcccgtgcccagttctgggatctgatcgacagtattcgccagcggcagagcaatatgagcgtgctggtcgccaccgcctacatggaagaggccgaacgcttcgactggctggtagcgatgaatgccggagaagtgctggcaaccggcagcgccgaagagctgcggcagcaaacgcaaagcgccacgctggaagaagcatttataaatctgttaccgcaagcgcaacgccaggcgcatcaggcggtagtgatcccaccgtatcaaccggaaaacgcagagattgccatcgaagcgcgcgatctgaccatgcgttttggttccttcgttgccgttgatcacgtcaatttccgcattccacgcggggagatttttggttttcttggttcgaacggctgcggtaaatccaccaccatgaaaatgcttaccggattgctgcccgccagcgaaggtgaggcgtggctgttcgggcagccggttgatccaaaagatatcgatacccgccgtcgtgtaggctatatgtcgcaggcgttttcgctctataacgaactcaccgtgcggcaaaaccttgagttacatgcccgtttgtttcacatcccggaagcggaaattcccgcaagagtggctgaaatgagcgagcgttttaagctcaacgacgttgaagatgttctgccggagtcattgccgctcggcattcgccagcggctttcgctggcggtggcggtgattcatcgcccggagatgttaatcctcgatgagcctacttctggtgtcgatccggtggcgagggatatgttctggcagttgatggtcgatctctcgcgccaggacaaagtgaccatttttatctccacccactttatgaacgaagcggaacgttgcgaccgtatctcactgatgcacgccggaaaagtgctcgccagcggtacaccgcaggaactggttgagaaacgcggagccgccagtctggaagaggcatttatcgcctatttgcaggaagcggcagggcagagcaacgaagccgaagcgccgcccgtgatacacgacaccacccacgcgccgcgtcagggatttagcctgcgccgtctgtttagctacagccgtcgcgaagcactggaactgcgccgcgatccggtacgttcgacgctggcgctgatgggaacggtgatcctgatgctgataatgggttacggcatcagtatggatgtggaaaacctgcgctttgcggtgctcgaccgcgaccagaccgtcagtagccaggcgtggacgctcaatctctccggttcccgttactttatcgagcagccgccgctcaccagttatgacgagcttgatcgccggatgcgtgcgggcgatatcaccgtggcgattgagatccctcccaatttcgggcgcgatatcgcgcgtggtacgcccgtggaactcggtgtctggatcgacggtgcgatgccgagtcgcgccgaaacggtaaaaggttacgtgcaggccatgcaccagagctggctacaggatgtggcgagtcggcaatccacgcccgcgagccaaagcgggctgatgaatattgagacacgctatcgctataacccggacgtaaaaagcctgccagcgattgttccggcggtgatcccgcttctgctgatgatgattccgtcgatgttaagcgcccttagcgtagtgcgggaaaaagagttggggtcgattatcaacctttacgttacccccaccacccgcagcgaatttttacttggcaaacagctaccgtacatcgggctgggaatgctgaactttttcctgctctgcgccctgtcggtgtttgtgtttggcgtgccgcataaaggcagtttcctgacgctcaccctggcggcgctgctgtatatcatcattgccaccggaatggggctgctgatctccacctttatgaaaagccagattgccgccatttttggcactgcgatcatcacgttgattccggcgacgcagttttccgggatgatcgatccggtagcttcgctggaaggtccaggacgttggatcggcgaggtttacccgaccagtcattttctgactattgcccgcgggacgttctcgaaggcgctggatttgactgatttgtggcaactttttatcccgttgctgatagccatcccgctggtgatgggcttaagcatcctgctgctgaaaaaacaggagggatga

SEQ ID NO: 22483 - DNA, 321 bp, Escherichia coli
atgacgcatctggaactggttcccgtcccgcctgtcgcgcaactggcgggcgtgagccagcattatggaaaaaccgttgcgctgaacaatatcactctcgatattccggcccgctgtatggtcgggctgattggtccggatggcgtcgggaagtcgagcttgttgtcgttgatttccggtgcccgcgtcattgagcagggcaatgtgatggtgctgggcggcgatatgcgcgacccgaagcatcgccgtgacgtttgcccgcgcatcgcctggatgccgcaagggctgggcaaaaacctaccacaccttgtcggtgtatga

SEQ ID NO: 22484 - DNA, 459 bp, Escherichia coli
atgacgacacaaacgcaatgcgaattgatgtccgctaatgaacctcaatttgacctcactgcaacaccagtacctgacgagcagcgtctcgatttctggccgctgcactttggtgctatcacgcagtggataacgctggaaccccgtattttcgcctggatggatcgcttctgtgatgagtacagcggtggtctctggtccttttacacgctcagcaatggcggtgcgtttatggcccctgatgctgaggggggcgataaatggcatctgttcaacggcatgaacggcaatggtgcggaaatgagcgcagaagccgcaggtattgctgtctgcctgattgaatacagccatcacgcctgtcacaccgaatgcgatgccatgactgaacactattaccggctgcgggattactctctgcagcacccagaatccagcgccattctgcgcattattgattaa

SEQ ID NO: 22485 - DNA, 222 bp, Escherichia coli
atgagaattatcagtaaacgccgggcgatgacgatttaccgtcagcatccggcctcccgcatttttcgatactgcaccggcagataccagtggcatggcagtgtctgtcattacaccggtctggctgttcctgacattcccggcgtgctggtggtatacgccgaacgccgccaggaccgcagcggaccgtatgcctgcctgatgagtattaccctgaattga

SEQ ID NO: 22486 - DNA, 318 bp, Escherichia coli
atgagtaacatcacatggggcctgcagcgggatatcacaccgcgcctgggagcacgtctggtgcaggagggcaaccaactgcattatttggctgaccgggccagtatcaccggtaaattcagtgacgccgaataccggaagctggatgaaacattcccgcactttatcagccagatggaatcgatgcttaccactggtgaaatgaatcctcgccacgcccactgcgtcaccctgtaccacgatggtttcacctgcgaagccgatacccttggcagttgcggctacgtatacatcgtcgtctactccactcaacgctaa

SEQ ID NO: 22487 - DNA, 852 bp, Escherichia coli
atgagtgaacgtctgagcattaccccgctggggccgtatatcggcgcacaaatttcgggtgccgacctgacgcgcccgttaagcgataatcagtttgaacagctttaccatgcggtgctacgccatcaggtggtgtttctgcgcgatcaagctattacgccgcagcagcaacgcgcgctggcccagcgttttggcgaactgcatattcaccctgtttaccctcatgccgaaggggttgacgagatcatcgtcctggatacccataacgataatccgccagataacgacaactggcataccgatgtgacatttattgaaacgccacccgcaggggcgattctggcggcaaaagagttaccctcgaccggcggcgatacgctctggaccagcggtattgcggcctatgaggcgctctctgttcccttccgccagctgctgagcgggctgcgtgcggagcatgatttccgtaaatcgttcccggaatacaaataccgcaaaaccgaggaggagcatcaacgctggcgcgaggcggtcgcgaaaaatccgccgttgctacatccggtggtgcgaacgcatccggtgagcggtaaacaggcgctgtttgtgaatgaaggctttactacgcgaattgttgatgtgagcgagaaagagagcgaagccttgttaagttttttgtttgcccatatcaccaaaccggagtttcaggtgcgttggcgttggcagccaaatgatatcgcgatttgggataaccgcgtgactcagcactatgccaatgcggattacctgccacagcggcggattatgcatcgggcgacgatccttggggataaaccgttttatcgggcggggtaa

SEQ ID NO: 22488 - DNA, 2481 bp, Escherichia coli
atgttgagaatgaccccacttgcatcagcaatcgtagcgttattgctcggcattgaagcttatgcagctgaagaaacctttgatacccattttatgataggtggaatgaaagaccagcaggttgcaaatattcgtcttgatgataatcaacccttgccggggcagtatgacatcgatatttatgtcaataagcaatggcgcgggaaatatgagattattgttaaagacaacccgcaagaaacatgtttatcaagggaaattatcaagcggttaggcattaataccgataactttgccagcggtaagcaatgtttaacatttgagcaacttgttcagggtgggagctatacctgggatatcggagtttttcgtctcgatttcagtgtcccgcaggcgtgggtggaagaactggaaagtggctatgttccaccggaaaactgggagcggggtattaatgcgttttatacctcttattatgtgagtcagtattacagcgactataaagcgtcgggtaatagcaagagtacatatgtacgttttaacagcgggttaaacttactggggtggcaactgcattctgatgccagtttcagtaaaacaaatagcaatccaggggtgtggaaaagcaataccctgtatctggaacgtggatttgcccaacttctcggcacgcttcgcgtgggtgatatgtacacatcaagcgatatttttgattctgttcgcttcagcggtgtgcggttgtttcgtgatatgcagatgttgcctaactcgaaacagaattttacgccacgggtgcaggggattgctcagagtaacgcgctggtaactattgaacagaacggttttgtggtttatcagaaagaggttcctcctggcccgtttgcgattacagatttgcagttggccggtggtggagcagatcttgatgtcagcgtgaaagaggcggacggttcggtaaccacctatctggtgccttatgcagcggtgccgaatatgctgcaacccggcgtgtcgaaatatgattttgcggcaggtcgtagccatattgaaggggcgagcaaacaaagtgattttgttcaggcgggttatcagtatggttttaataacttattgacgctgtatggcggatcgatggtcgcgaataattattacgcgttcactttggggactggctggaatacacgcattggtgccatttccgtcgatgccacgaagtcgcatagtaaacaagacaacggcgatgtgtttgacgggcaaagttatcaaattgcctacaacaaatttgtgagccaaacgtcgacgcgttttggtctggcggcctggcgttattcgtcgcgtgattatcggacatttaatgatcacgtatgggcaaacaataaagataattatcgccgtgatgaaaacgatatctatgacattgccgattattaccagaacgattttggccgtaaaaatagcttctctgccaatatgagtcagtcattgccagaaggctggggttctgtgtccttaagtacgttatggcgagattactgggggcgtagcggcagcagtaaggattatcagttgagttattccaacaacctgcgaaggataagctataccctcgcggcaagccatgcttatgacgagaatcatcatgaagagaaacgttttaatatttttatatcgattccctttgattggggtgatgacgttacgacgcctcgtcggcaaatatatatgtctaactcaacgacgtttgatgatcagggggttgcctcaaataatacgggattatcaggaaccgttggaagccgggatcagtttaactatggggtcaacctgagttatcagtatcagggaaatgaaacgacagctggggcgaatttaacctggaacgcgccggttgcgacagtgaatggcagttatagtcagtcgagtgcttatcgacaggctggagccagtgtttcagggggcattgtcgcctggtcgggtggcgttaatctggcaaaccgtctttctgaaacgtttgctgtgatgaatgcgccaggaattaaagatgcttatgtcaatgggcaaaaatatcgcacaacaaaccgtaatggagtggtggtatacgacggaatgacaccttatcgggaaaattacctgatgttggatgtgtcacaaagcgatagcgaagcagaattacgtggcaaccggaaaattgccgccccttatcgcggcgcggttgtactggttaattttgataccgatcagcgcaagccatggtttataaaagcgttaagagcggatgggcaaccattaacgtttggttatgaagtcaatgatatccatggtcataatattggtgttgtcggccagggaagccagttatttattcgcaccaatgaagtaccgccatcggttaatgtagcaattgataagcaacaaggactttcatgcacaatcaccttcggtaaagagattgatgaaagtagaaattatatttgccagtaa

SEQ ID NO: 22489 - DNA, 966 bp, Escherichia coli
atgacatatgaaaattttcacagtgatttaacgaatatattaaatggtgaatatgaaaaagaaattcatgattgggataaaataaaggcagtactattgcacattgttaaaaataactatcaaggatttgggcgcaatattgtcgattttattgatagaggaagttgggatcgtataactaaaattgattttaaagatggaaatagacagcttgaattaacatggaataacggatggttgtaccatgcttcaatagagactattttaattattgagcacgaaagagcattttttgtattaataaaatcatattatcaagacaggaaaaagctaaataaattatattctgctcgttgtcggtcatatgagattgataaatttggccactatatggtagaagttcaacgtgttacgcgttccggtgaggaatttatacagataccaaatataaattgttacacgacggctataatgatacgtccaccaaatcgtgtacctgttagcaatcatgcatccgaattgctaatgcataacatcaatcttaacttggcaatagctaagtttgattttctactacaggaattgagtgatattaaagagtatgatagagatgcgttacaagaaaagggaaatacagcacggcgttatcttgagtatgttttgatgttagtaaatattagggctgaaaaggaatttgaagaagactatcaaaagttaatgcttgggagtttgtcgagggtgattaattttctcggtctgcctaataagctgaagaatgacatcactctagctcaggaattattaaattcctgtagccatcatgggggcgttagaattgaaaaaaatgagttagaacaggcaatggaaacactacaacagttatgtcagtggataaaaggtatagatttttttaaggtgtcaaaagatatcaatggtaaatctattaatattaacaaaccattctaa

SEQ ID NO: 22490 - DNA, 1656 bp, Escherichia coli
atgttgattttcaaacctattcccctcgccatgttgcttaccgggtgcctgtcctccgcctggggggcgcagttaactcaagcgctaacactcaaagacgtcactgtttatctgcatggtgccagcctacaaggtgaagagacactcaacttaccggcaggtgaaagcgaaattattttcactaatatcgccaattcggtaaccgacgacagcatcgccatttctatcgataacggagtgacggtgctttcctcacgtatcgcgctaatggaaacacagccgaatgcgctgccgtcagatactcagcaacagttaaaagcagtaaaggtggaacaggcaaaactgaccgccgagaaaaacaatatcgcggctcaaattaaggtattagaggcaaatagcacattaaccaataaaagtgccgccgaagttggcaagtatctgcaaatggtgaaagagaaaaatggtgagttattacgggctgacaatgagttgacgcagaaacttgctgataaccagcttggaattgaaaagttggagcaacgcgagagtatgaataacggtgattcagaggcatccgatgatccgcaggttatcatcgctaaggtatatgtcccaaaagccgtcactgcgaaagcggtggtgcattatataactcctgatgctacatggacgccgatctatgatattcacgccacgggcataaaccaaccgctgcgtctggtttacaaggctaatattcgccagtatacggggttgccatggaaaaacgttaatctcgtgctctcgaccagtgaacctgatactcatctcacgctgccacacctggaacctctgtatgtggatgtgactgagtatggtggtgtaagcggctcgctttcagcaacacccgtgatgaaacagcgttcggaatattcgtctgaccaggatgcatcagaattgcagaaatccctggaggcagagatgcaaaaatcaagggagcgaccagccgggcgcaagtatgccgcacaggcagcaccagcttcggcgcgaccagaaagtttcaccgcgcaaaatgttcgctatgcgctttcgctgccgtggcaaatcgacagcgacaacaccgcgcgcacggtggtcattaaggaggaatcggtcagcggtgaatatcgcttctttgctattccgaagatcagtaatgacgcttatctccaggtgcaaattaaagagtgggaacagttaaatttaatccccggcgaaagtcagatcttctttggtaacaatcgtaccggcgtgggctatttgcagccgccggaagatggcaagtcgctggatattcagcttaaccgcgatcccaagctgattattcaacgtaaagccgtactcaaaaaagagaatgcgttatctatctttaatgacagcgcggtgcgcaacttcagttacacccttaatgtaaagaacagctacggcgacgcggtggatatcactctgctcgaccagatcccagtcagtgctaatagtgatattacggtggaaaaaatgcagtatggtcaggcgcagtttgatgcgaaaacgggtgaactgtcctggacgctgaaactgtcaggtaaagagaacgtgagtctgccattctcatacagcgtgaagtatccgaaaggtatgcacccttcgggaatgtga

SEQ ID NO: 22491 - DNA, 531 bp, Escherichia coli
atgcgctacaaagtcacactgttcttgctgactatgattctctgcttaacagggttctattcctgcaacaagaacttcctcttactctgggatgccaataatatgtatgtcagcacaagaaataatatcgataaagacaaggtaaaaatagaattcggtatcagcgtcaacacgatcaaccgagagacggatgccgaattatttactgacagagcgaagtatagaattatcttcgatggtaacctaaaaaacaggatgataaatgagtacggcgaaaatgattttttaattacctacgatgaccgctgctatttatcatttcgtcaatttaaaaccaatcgtcgtcatcaacatgactattattttgacttctttaacaacaatgggaatgtctttgtcacagtcgaaatcaaaggcgagaacccacttaaatttacgcgtagtttaaatgatatgcgtcagcagttttcaccaactcgtgaggatagcccttctcactcctgcaaggttatttcttcagatccttcttaa

SEQ ID NO: 22492 - DNA, 1878 bp, Escherichia coli
atgttatcccctaaaatatcgcggctttccgttattgtatttctctcactaattagcgccaacgttaatgcctgtggaccatttattcctaaccatctgttaactgaccgcaatagcgcactgctggaaatgccaaatggcagttttgtctttgaagtacaacagttggctaaacgcgatcctgatttaccgatatggcatgaagatacgcccgcggaggcaacgcaggcaaatacagatgatgatgctgagcctcctgcgcaaaatcggatactggaaatcacgcaaaaattgcagaagccattatctaaggcgcagaggctttattattcaggagctaaggattttcatcagggaaaatacgatagcccttactttcagcaattattagccttgccgaaaacagagcaaggggaatggcgtcttgctacgctatatagtctggcaagggggggatttgatgccactgacgacaatctcgatcttataatcaataaaggcggctttaatcaggaacttgctgagcaggccatacagcgttatcagcaaatcattgaagaagtgcgtaatggagcagccgatcctgaattgctctctctcgccagtctcggtcagattgggcattattatctgaaaaaaggtgatgtcgctgcggcagtaaaaatgtatgcccggcaagcggcccagggttcgccctccgggaaagcgtcgctacggatgatttcgctgtatataaccagggagaaaaatttaccactgctggagtcggttattaatgattctctggttcagcaactggtaatcgcagagctctttattcgtcatgactgggggtatgttagcgaagcctgtactaaggaccttgtagattatacctgtccaacgcatcgcgaccgtttaattaagttgctaagtcaacacagagttaaaggatttagttatagcgatcgcctggcagcactggcgtatcgggcaggaaattattcgttagcacaaacgctgttgcaggatgcgccagaaagtggattaagcgaatggttaaaagcaaaaatggcattacgagccggagatattccactggcaacgcgtcactatgctcgcgcagccccgctgttctctaccgatgaagtctggggaagtatggacccggaaagcccttattatcatgccgataaagttaccatcccgtcttgccgtattgccagtgaacaggcgattgtggcattaaaacgcgatgattatcttcaggccaccgcattattttaccaggccaaagatctctattgggctgatttagcctgggtggcagaaaacgttttgaccttgtcagagttacacgcgtttgttgaaaaaaacgtaccagcacctcagcatcctttaaaacctatagatttaaacaagagcagttacggttattatatttcgccagatatcattcccacggatgttaaattacgtgcactattaggtagacgattaatacgtaatggtcagtatcagcaggccatcaattggtttgatattcccgatcatcgccaggccgcacaaaaactggctgatttaatggcgatagcaaaaaataaaaatatccctgataaacaacgcgcccaggcgcaatacgaagctgcgcggcttttacgtttcagtggtatcgaattggtggcttatgaaatgtatcccgataatgctatttccagtgggcagtattcagcactctttgaatacagaaataacgatcagtggataagtcgtaaagaaaaacaacgtattcgccatgcaatccccaccgctgatgatcattttttgcattaccgctggcaggctgcggaatgggccggacaatctgccgatttacttcaccctaaaacccaggcttga

SEQ ID NO: 22493 - DNA, 1206 bp, Escherichia coli
atgccatcttgcaaaaggatttttgcagcttcacttcttctgatctgcctgggctacgggctgcatattttatttaccccttcacaaccgcttcgctttgatcagcaagtctatatctggcaacgcgtctggacggcagaacataacgaggcactcaaacgaagccgcccgcttttctctacgcttcgcgtactcgggatgcaatttcacccgcaagaaggcatccgacactttacggttaatacttcacttattaagcaagatggtcgcccggtctggctggtcgcgcgactcgaaggtcagcttacacggcttaataaccagcaaattatccagcatattcaacaaaccctacgtgagtggcaaaaagctggtattacgctggtaggggtagaaattgattatgacgcgccaacagcaaaattgccggactatctgaccctacttagtacgttacatcaggcacttcctacaaatataaaacttagcattaccgtcctgcctacctggcttgaatcaccacatctcgcccgattattgcggattgcggacacttcggttttgcaggtacataacgtgctatcgcccgaaaaaggcctgttagatgccagtctggcgcagcgttgggtaaagcaatatgccagacaaaccacgcatccttttttcatcgcattgcccgcttacggttctgcgctcaccagtgataatcgcgtcgagagtgaagctccgttatacgttgccgaagagatgcgtgaattaagtgtgtcgccgcaaacaattgccgatttcattcaatatttagaacagcaaccaccgcatggattacaggggttggtatggtttcggctaccattagcaggcgatcgccgcgcctggtccctgacaacgcttgaagctgtgattcaacatcaaccgctgactccgcgctggtcgttaataattactcaacatgcagacaagcaactttttgatctggcctttaaaaacagcggcgtaattgatgcgccattgccaaaacaaataattatgtccaatgcagattgtctattcgctgatggagccagccactatcaggtgcaacctggaccatccagcctgaattttgtgagaggaagcgccaggcaactacgcgccggagaaagcagtccgctgggatgggcgcgctgcaatcaaaaaattcaaggagagtttaatgttatcccctaa

SEQ ID NO: 22494 - DNA, 906 bp, Escherichia coli
gtgacttcaccatttattcaacaaattgctgataaccgggtatgtcaggtactcacctgtcttcctgaaaaatttgtggttgatttcgcaaacggaatcgatgttgcacaggagcatatccgcacggccggagagcgcacgttcttccggcgtttaaaagaggggctgaccggcgaaggcgctgcacggcagaatgccatcaatgcgtcgcttgcacagggcgttgaggcgtccctgcgctggctgacggagatgacaacgtcacttgccaccacaaactacgcgattacccgggtaaacgacagggtcagttcactggtcagtgatacagccaggctggcgcattattccgcagatacgcgggagcagttactcaccctggccgatcaggttcaccataaactgaatcatcttgaagaaaaactccaccgtgttgaccaggttcagcgggcgcagttacatcttgagcagatattctcatggtggagcgccgggcgatatgcgtcattttcccctgccggacgttgttatgtggcacttgaagagcttcgctggggcgcgtttggtgatgtgatacgtcagagcgaaacaggccaggttaaccagctactggatattctcagacataaagcattaacgcagatggcacaggagagtggcggtagtgcaaccgtgcgtctgaacactctggactggcttggtggtcagggccgggagcaggcagataacgagtggcatgacgcgattaactggctgggagactggtgcagtgaagagcagcatccggtgatctggtcaaccacgcaggctgcagaacacttaccggttcgcatgcctcgcctctgctctgcagaacgcctctctgaaagtatggtcgatgaaatatttcagaagggggctgcatga

SEQ ID NO: 22495 - DNA, 435 bp, Escherichia coli
atgaaaaaggcaaccgagttagaacctcgtaacctttcggcagcagtacgaactcgtttagatgagatcgagggctggctggataaaggtgtatcgaggcaagagattgctcaactgcttgatgctgaatatagcttttccgtaacaccgaaagcgctggaaatggcattgtaccgggccaggttaaagcgtaaaaaaggtggattgcacaatccagaaagtacggtaaaaaatggattgcacaatccaaaaccgcaggaagaagcaaaaccggaagatactggattgcacaatccagaatcagaaaagttagttgaggatatgggcgggaacaaagaatttctgtccgataccgattttaaaaaaatcggggatgaggcaaaaaaagttgcgtcctcattcaaaggtagcgtaggtaataaaaaaggtttctaa

SEQ ID NO: 22496 - DNA, 438 bp, Escherichia coli
atggctattagcgaattatctctaggaaagcagatacttgaaaagataaataatcatgatcgttttaattctaaattgcggtttaaaattaaaattttaaatgttgttgcgttcattattcttcttgctataggagataagtttaacgaactggttatgtgtgcgattgctttcgttgttttttttgtactaaccggtgtgtatttgaagtgcaagatggttattccatcgtcgttaatatttgattatttcgagcgtagtgctgatgatgagggttttagaagtctttttatggggctgtttaacagcaaaaagtttcttaccgtccgggatgatcgcaagaaaattaatgattatctttatgagcaagataagaagtttgaagaattgaagaaaatagaaactatcactcatggtatgaatggtcgcggtgaataa

SEQ ID NO: 22497 - DNA, 276 bp, Escherichia coli
atgctagaacaatacgttcaacgaaatagcgcctggcttatgcctttaattgcagggcttatactagcgacggctcctttaatgctggaaatggttacagataaacaaccacttccatcatgggcgtctgtggcggctgccggtataggtttttgctgttcaggtgttggggctgcttttacgaataccctttcagcaaaaattataaaactgttggcaggtgtttttgtggtagtgatggttatcctggtattaattaaactgattaattcctaa

SEQ ID NO: 22498 - DNA, 885 bp, Escherichia coli
gtgacagacaaaccattaccagcgaagcaaataaaaacggtaaacaccggcatcgcaattaaagagaatcccccaaaaggggatgatatggcgtttactcactcgatattgtgtcaggttggcctaccccgttctaaggtggatggccgcgagtttatgaggaaatcaggcgatgcctggctggtcgtccaagctggctggcttgatgaagggagcgggcctgtagaacaaccgatcccctatggttcgatgcctcgtttagcgctcgcatgggtatcctcttatgctctccgcaaaaagacccgcgaaataccgatcggtaagagtgcaaacgaatttctgcaattaatgggcttatcaggtggcggcagacaatacaaaacgttgcgcgaacaaatgcacgcgctggccgcttgccggttgcagctcggatttaaaggacgttctttcaacggtcagcccgtagaacaattcgatgcctggcagaaagacgaccaaagcggccagctaagtttatggccgggcgtgatgaccctatcagaagggtatttcaatgggctaattgatagcgccgttcctctcgataaccgcgctctgtacgcgctaaaaggctcggcattgtcgttagatgtttatacgtggctggcacatcgtttacaccgtatcgagggccgcccgattaaacttcactggatgaatttacgggaacagttcgcccaagagtacatgggtaaagaccctgacaaggatttcaaaaagaaatttcttccagctctgcgcgacgttctgaccgtatacccacaggcgaaggtagaaaaagttaccgggggaatattactttacccttccccgcccccgatcccattcaaggaagcaaaaaaatag

SEQ ID NO: 22499 - DNA, 183 bp, Escherichia coli
atgtacgagctagggggtcgcatgtacgatcattgggggggtcggatgtacgtggataactttatgtttcaacagcttttttacaggcttattcaccttatccataacttgactcaaagcggaggtgtggcattaacccgaaataaaaaaggcccgcatgggcctatttttttgcttccttga

SEQ ID NO: 22500 - DNA, 921 bp, Escherichia coli
atgtgcgaactcgatattttacacgactctctttaccaattctgccccgaattacacttaaaacgactcaacagcttaacgttggcttgccacgcattacttgactgtaaaactctcactcttaccgaacttggccgtaacctgccaaccaaagcgagaacaaaacataacatcaaacgaatcgaccgattgttaggtaatcgtcacctccacaaagagcgactcgctgtataccgttggcatgctagctttatctgttcgggcaatacgatgcccattgtacttgttgactggtctgatatccgtgagcaaaaacggcttatggtattgcgagcttcagtcgcactacacggtcgttctgttactctttatgagaaagcgttcccgctttcagagcaatgttcaaagaaagctcatgaccaatttctagccgaccttgcgagcattctaccgagtaacaccacaccgctcattgtcagtgatgctggctttaaagtgccatggtataaatccgttgagaagctgggttggtactggttaagtcgagtaagaggaaaagtacaatatgcagacctaggagcggaaaactggaaacctatcagcaacttacatgatatgtcatctagtcactcaaagactttaggctataagaggctgactaaaagcaatccaatctcatgccaaattctattgtataaatctcgctctaaaggccgaaaaaatcagcgctcgacacggactcattgtcaccacccgtcacctaaaatctactcagcgtcggcaaaggagccatgggttctagcaactaacttacctgttgaaattcgaacacccaaacaacttgttaatatctattcgaagcgaatgcagattgaagaaaccttccgagacttgaaaagtccggcactgttgcaaagttag

SEQ ID NO: 22501 - DNA, 861 bp, Escherichia coli; identical to SEQ ID NO: 6162

SEQ ID NO: 22502 - DNA, 3276 bp, Escherichia coli
atgaaaaaaaattctttaaatgtgattttggatactgttttctcggcgaaaagcatcaatggtgagaaatctcattcttttatatcgtataaattagttaaagctgtagaaaatttaagtggatatgacttggatcttttcctcaatcgtgcgataaaccatcctaacttccctagcaatatggatttttccttacgaacagtttttacaattgaacaatctaacactattgaatttaaaaatttcatttcagaattggtgtggtacaagcatattttcatacgatataaaaaacaccttaatgatatattatcggcaaaggcaagacttgagaagttagttcttttcgcaacaggtagtgaatgtataaaatatttagatgaaatagaaagctcttatggagttagtttttggagcattgatgctcgtctcttaataaataaagttttgcttaacgaaagcaatgggttatatgttaaatcaattctatctaaaacccactataaacttacagagtttatgttacagcagctattatttaagcatcaagtacataactttgatgatttttcaaagaaccttataaaaatactagatgatatgcgcaccactcaagataatgggtatgctagaaatttagctgatggtatttcatcctttttaatacctttagagtttgataaaaatatagatctcaaaaatagaaccttagcaccatttaccaaccttcctttaatagatcaatttatcatattccagagaactataagcgatttacaacttcatggaaatggtttaagaaatagcgagttaagcttaattgcagaaattaacagctttattaaaaataactatctcaacaatattttagatggaagagagcgtaatatagagaatattgatgaacactataaaagtgttattcgacgttatactataggtgattatactgggtgtatttcagaaataaattcagttcgaacgcagaagacaattttgccattaattgaaatatatgcaaaatcccatgtgtatcttgataagaaaatttcagactcatgcatattcaataaattaacaaactggcttatagcaattataaaatgcgacagacgcgctggaaaatacatcgatgaatttgaacttttagcatctaagatatatttcaattcaaattcatcctctctattcttcacattatataatttaataagtgataaccataataaattaaacatatctcgtataaatctaaccaaaaatggttcctttgtaacatcccttcatttgaatataacaatcaaggaactatggactgaacttggaataaaagagaatgagataccaaaatatcgattatttaaattcaaagacctagcaaatctatcctttgatgaaatcaaaaaacactacgaagtatacaatgataatgtaataattcgctctgaatatttaaaagattatactaactttttattagaaaatgaaaagtatgaattatgcatccaatttatagctgaaaactgcatcggcaaccccgcaaattattactacttcccaatccgaaaaataattgattttgtaaaagacaatatttttgactatgcaagcgtggccttatctatattgatagatatttttgtcaaaagcacatcaaacacttcaaatgagcttcttctcgaaagttatgagagtttagtagatatttcaaatattaataggccatctacccattattgctctaagcaattaactccattagagcactatttccttaagtttatctgtataccttccgtgatggattcagacccttcattcacaggcacggacgacttgaagaaggaaagaattgctattatagatctattattaaaagaacacgatgatgcagatttattgaaagagaaagacgaaattatagatgaaatatcattcgaagaaataaaaacaaaatatgagacaggaaaaatatttgttgatatagaaaatttaaaacgggcaaagcttgaaagatacagatattattttgatgcacttaaggattcgcttattctcggactagaaccacctgaagactttgctttaattacagacgatgggaatatcacagccattccatctggcgatacaaactctataatccatgaacttctaaaagaactaatctccgattttgttaaaaatgaaaattacggtcttgataaatatttgagtgcagatatacggcatggtgtttttgaaaatcaactcagatcaagtgctgaaaaatcgcaattaataactgatatggatggtactggacagtattcgaaaagcaatttaattattgagacatatccattaattaaccctattataaataacgaaatagggacagcaatagctgatttctcttatcactttgacattgaattggctaaagccaattcctggttcaatgtcaagacaatgctcataagtgaatcacagcaaggtatgattgatttcctcatttctgttgatatgtttaattcatttaaagcagcagtttcaaatcaagcatcttttgagaagttttttgacgcttgtattaacttcatgtgggaaagaacgttcagatgtttgaatgatattaaagagcgattgcattacgaatttaagaggaatattttagatttaattgccactcttaggcatcaaattgatatctatagaagacgtagttccatgagagaaatccaggagaaaattgacctcttggccgaaagcattaataaagaaattgcaacagtctgcgattggttaaatgtacttgagtataacgaggagaaaatatataaaatatcatccgtgatgcaggcatgtaggaaaactttttttaatatacaccattgttctgatgatgctatcgtttttgattcaatgtatcatgatgatgaaccaaaattatcttataaagaagccaagcctctaatcacatcaataataacagcgttaaacaatgctatggcctatggtaataaaaaaatctttatcagtattaagcctgaagaaaagtcatggaaaataaccatcagaaatttgataattgagacaaagaacagaactaccaaccaaattttacaagagattgatgataaaataaaacgaggggataatagtctaaatataaaagaaggcggagctggaatatataaaatatatgatttattatgttcattaccgcaaagatttaatgtgaatcattgcatccaaaataacgaattcattttaaatattgagataaagaaatga

SEQ ID NO: 22503 - DNA, 450 bp, Escherichia coli
atgaaaattcttcttgttgaggatattgaatataagcgtgataaggtgatcggtttactagagtctatttctgccgatgtatcagtcgatgtagctaaatcttatgtttcggcagtaaattccgcaaccagtaaaacttatgatcttataatattagatatgagccttcccacttacgataaggggcctaatgaaaatggaggtcgcttcagagtgtacggagggaaagatattattcgcaagttaatgagaggaaaagagcatccagtagttgtggttttaacacaacatacaacttttggtgaaattggtgagcaaaaaaatactgacactctatcacaagagttgaatgctttaatgggatcaaaatttataggtattgtaaaatatgactcaactaaacctcaatggaaagatgaaataaaaaaagtcgtacaggatttgttatga

SEQ ID NO: 22504 - DNA, 294 bp, Escherichia coli
atgcacgccgcgttgtgtcagcgtttgcacgatccggcgcaaatcatcgagattgcgcgccaggcgatccatgctatgcaccaccacggtgtcgccggtgcgggcgaagcttatcagcgcttccagttgcggacgcttgacatccttgccggatgccttgtcgctaaaagcgcgatcaaccttgacgccttccagttgccgttccgggttctggtcgaaggtgctgaccctgatatacccaatgcgctgtccagtcatggaattccctgcaaaatgtcagggaagactctatga

SEQ ID NO: 22505 - DNA, 390 bp, Escherichia coli
atgtcaaagtcagcagcgggtacggtcagccagccggggcgcaatgtccgggcaaaatcaggtttaaaccgttcggtactggatcagggctggtatgaaatgcgccgccagcttgagtacaagcagctctggcgtggcggtcaggtgcttgctgttccgccagcgtacacaagccagcgttgcgcgtgctgtggtcatacagcgaaagaaaatcgcctgtcacaaagtaaattcagattccaggtatgtggatatacagcgaacgccgatgtaaacggcgctcgtaacattttagcggcggggcacgccgttcttgcctgtggagggatggtgcagtcaggccgcccgttgaagcaggaacccaccgaaatgattcaggcgacagcctga

SEQ ID NO: 22506 - DNA, 1329 bp, Escherichia coli
atgcacattggacaggctcttgatctggtatcccgttacgattctctgcgtaacccactgacttctctgggggattacctcgaccccgaactcatctctcgttgccttgccgaatcaggtactgtaacgctacgcaagcgccgtcttcccctcgaaatgatggtctggtgtattgttggcatggcgcttgagcgtaaagaacctcttcaccagattgtgaatcgcctggacatcatgctgccgggcaatcgccccttcgttgcccccagtgccgttattcaggcccgccagcgcctgggaagtgaggctgtccgccgcgtgttcacgaaaacagcgcagctctggcataacgccacgccgcatccgcactggtgcggcctgaccctgctggccatcgatggtgtgttctggcgcacaccggatacaccagagaacgatgcagccttcccccgccagacacatgccgggaacccggcgctctacccgcaggtcaaaatggtctgccagatggaactgaccagccatctgctgacggctgcagccttcggcacgatgaagaacagcgaaaatgagcttgctgagcaacttatagaacaaaccggcgataacactctgacgttaatggataaaggttattactcactgggactgttaaatgcctggagcctggcgggagaacaccgccactggatgatacctctcagaaagggagcgcaatatgaagagatcagaaaactgggtaaaggcgatcatctggtgaagctgaaaaccagcccgcaggcacgaaaaaagtggccgggactgggaaatgaagtgacagcccgcctgctgaccgtgacgcgcaaaggaaaagtctgccatctgctgacgtcgatgacggacgccatgcgcttccccggaggagaaatggcggatctgtacagtcatcgctgggaaatcgaactgggatacagggagataaaacagacgatgcaactgagcaggctgacgctgagaagtaaaaaaccggagcttgtggagcaagagctgtggggtgtcttactggcttataatctggtgagatatcagatgattaaaatggcggaatatctgaaaggttactggccgaatcaactgagtttctcagaatcatgtggaatggtgatgagaatgctgatgacattgcagggcgcttcaccgggacgtataccggagctgatgcgcgatcttgcaagtatgggacaacttgtgaaattaccgacaagaagggaaagggccttcccgagagtggtaaaggagaggccctggaaataccccacagccccgaaaaagagccagtcagttgcttaa

SEQ ID NO: 22507 - DNA, 417 bp, Escherichia coli
atgtttattacgaaagagttcgatatagaacgacttaaccaagctaaagaaaatagcattgtcgttaattgtggaagtgtgggacccaatgatggtattttttatgcgctcaggcaggattatgaaaagatagtatcaatatgggatgagatgctacagtcagaaagtttgagtcctttcttaaattttgaaaagtatgattcgcatgttcttttgtatgcatggctatgccataaaaatatagagatgataaatatagatgatatattttatgacttggcaatcatatcaacttcggctaaaatccctgggctcagacaagctcttgaagaggatcttattaattttgataaaaacttaaaggagcagaagcaatatactgatttattcaattttctattgagtcgctctaagtga

SEQ ID NO: 22508 - DNA, 543 bp, Escherichia coli
atgcgctcattatatcaaaaaatcgcagaaccattaaatgctgatatatttttgcatacatgggataagatccaagtttggagcggagaggctcgtaagtctggattttggcaacggcaattcaaacttcctgataataaaatacctcatccattaagagacattgataaatttaaagagaaattccctcgtacaggtaatttgcttctaagtacaattactgatgatattaatgttcacttttccgctacacaccctttaataaaaatgagtgtcattgaaaatgaagatgtcgctcttcataattggttaaataataaatcatttatgagcagggggaactataatcagtttaaaatgtattatggtattaaacagtatttattaataatggttcacttagagcgactcaatagaaaattgaataaatcagtatattgcttctgctcctttaagtttttatcaaaattaataagatcctcttcaagagcttgtctgagcccagggattttagccgaagttgatatgattgccaagtcataa

SEQ ID NO: 22509 - DNA, 303 bp, Escherichia coli
atgcagctctttagtcagcaccttcacttcgtcattggtgatatcttttccgccctggatgccgccaatataggcgcggccatcgtcggtacaggaaaaacagacgctatagacgcgccggtcaccgagaaacagctgcagcatcagctcgccctcctcctgaaacggcgacgccaacagtttaacgtcaagattatcgccatttttcaaaggaatagagaacatcgcgcgaccaaaatctgccacattgtacagctgcggcaggacatcagggtgaaacgttttctcaataaaattcagtga

SEQ ID NO: 22510 - DNA, 228 bp, Escherichia coli
atggcgcataacttttcttcagtactcgaaaatcataacgaagatatcaacatctgcatctctaaatttgatattaacattgataattattccgtatttactcctaaggagttgaatataaaaggtgatgatagtaataaggtttatataaaaggtaataagcttcctgtaggtattgaaataatatttacagataaagcaaaaaaatgtaacgttttcatcacttag

SEQ ID NO: 22511 - DNA, 174 bp, Escherichia coli
atggtgaagcatgcgctctcaatggccccggaactgacaaccaatgttaatgagcaaaatgagcaggcggttgggttctataagaaggtgggttttaaggttacgggacgctctgaggtggacgatttggggaaaccgtatccattgctgaatctggcatatgtgggggaataa

SEQ ID NO: 22512 - DNA, 585 bp, Escherichia coli
atggcattcagaatgagtgaacaagcacggaccataaaaatttataatctgttgtccggaactaatgaatttattggtgaaggtgacgcatatattccgcctcatacaggtctgccagcaaacagtaccgatattgcaccgccagatattccggctggcttcgtggctgttttcaatagtgatgagtcatcgtggcatctcgttgaagatcatcggggtaaaacggtttatgacgtggcgtcaggggacgcgttatttatttctgaactcggtccgttaccggaaaatgttacctggttatcgccggaaggggagtttcagaagtggaacggcacagcctgggtgaaggatacggaagcagaaaaactgttccggatccgggaggcggaagaaacaaaaaacaacctgatgcaggtagccagtgagcatattgcgccgcttcaggatgctgcagatctggaaattgcaacggaggaagaaacctcattgctggaagcctggaagaagtatcgggtgttgctgaaccgtgttgatacatcaactgcacctgatattgagtggccggaagaaccagacacaatgtaa

SEQ ID NO: 22513 - DNA, 267 bp, Escherichia coli
atgaaagacgttagcttgcaatttactgacaaacagcaatacaacgacattgtgattaatagcggcttgctggatgccaattggtcaaccgtgtttattgatgatatcggttttgtccttgtattcgacgatccagaaagcgagacacctgtacttattgggaaaaaaggttattacgtcaacgtgcgtataactggtgacgatgttgatatttctcagcttgagcctttcatcgttccagatccaggcgtccgcgcatgggcttaa

SEQ ID NO: 22514 - DNA, 1797 bp, Escherichia coli
atgatttacacaacaggcactatagctgttagcggaaacacagttaccggggcagggactgaattcaacgccgcattatctctgatcagagtgggttgcactcttattgccattagcgatccggtgcagattttttcaatcacaaaggtaaaaagcgcaacaagtttgtcggtaactcctgcggcaagtccggctattccggctggaactaaatttagcatcctgctttcagattcgatctctgtggatggtcttgctcaggatgtcgccgaaacactgcgttactatcagggcaaagaatcagaaatagcggacgcagttgaattttttagcgacaacaaagatgtgatttcagcctcaaaattagcatcacaatcagctaccactgcaaccaacgctgcaacaacagcgacaagcgcagccgattcagctaagacatacagagacgaagcccacgaatacgccaatcagacggcgcagccttacgcgtatgttttacagccgctgccggatgtgtggatgccctttaatgattcgctggatatgattacgggctattctccgggttataaaaaagtgaagattggcgataatgtggttcaggttgccagtgataaacaggttaatttcagtcgcgcatcaacggcaacatatatcaacaaatctggcgaactgaaaacggcggaaattaatgagccgcgatttgagtgtgatggcctgcttattgagggacaaagaacgaacttcttccagaacagtacagacccttcgaagtggaataagtcaacttcactggacgttacagaaacaggcgcagatagtttcgggtttaattatggccggtttgtcgtacaggattcgattgttggtacaagtaaagcgcataccattatcggactgtattcgagtgccggaggggttgatacttcaggggacgaaaagcatgtaactatatcctgtcgggtaaaaagtgaagttgataatatcgccgttcgtattttatttgaacattatgatggggaggtaaggacatcaataggagcagcaaacctgaaccttaccacccgcataattagcaagacaggtcagacaagccgtgttacagcaaggtctgttaaggatgatgcaactggctggatattttttgaggctacattaaaagcagatacaacagaaaatacggttggtggttttgtccagtattctccggatacagggcagatggttacatcaggggattatctcgatgtaaccactccacagattgaggctggtacaggcgcatcatcttttattgttacggggacggcaccggcaacgcgggcaagcgatatggtgacagtcccaatcaagaataacctttataatcttccttttacggttctttgtgaggtacataagaactggtataaaacgccaaatgcagcaccgcgtgtttttaatatcagcggtcatcaaaccggagcggggatcgaaatggggtttggttcatcaggtgggtacgacggttttccgtattgcaatataagtggttcagaccgacgaataaatgaaaatgccgggctggaaaaaatggttatggggatgcgtgtaaaagcagatcaattgacatgtgcaataagtaacggacgtatatccagcgaaataaaaacaacctggacttatattcaaagctccgcaactattcgtatcggtggtcagacaacgacaggacaacgtcatttatttggtcatatcagaaattttcgagtatggcataaggcattaactgatgcgcaattaagcgaaattgtttaa

SEQ ID NO: 22515 - DNA, 246 bp, Escherichia coli
atgaaaaaactaattgttgcttgcatcttatcagctctgtcttttggtgcttttgcttctgtaaattcgacagataagagtgatgctggcactgctcaatatggtgatactggccttgataaccaacgttcgagttatttcaatactgactcatggaaagaaaaacaactacaaggtaaaattattgacagtgaatgtaatttacctatccatttttctggtgtaaatgatgggtgtaaaaaataa

SEQ ID NO: 22516 - DNA, 4971 bp, Escherichia coli
atgagtagcggcggcggtaaagcaaaaacaccgactttaattaacgataatctataccataaacaattttatcgtgtacttgatattatttcggaaggtccgatttatggacctgtaaatacaaaagcgccattaaatagcgtgatgcttaatgatacgcctgttacagacgcgaacggcaatacaagtgtccctggtgttagcgtggcgtggcgtaacggcacgttagatcaatcacctattaacggttttaacgccattgaatcaaccgttattgttaacgctcaggtgaaacacgataccccaataatcaggactgtatcagatcctaacgttgcgcgcgttcgcctgaatatcggcgtcgattcacttgtacaatctgacgagcaaagcaatcaacataacacatcggttatgatgatgattgatgtcaagccttcatcttcttctgcgtggacgcttgttaaagatgtcactataggtccgggtaagatcagcggagaatatcttgaagcgcatattatcaatgcaccagatgaaaagccgtttgatattcgcgttcgccgtgtcaccgctgatagcacgagcgatctattgcggaatggtacgcgatggagtagctacagcgaaataatcgacgataatttgtcatatccccacaccgctgtagctggcgcggttattgatcatgatcagtacactgatacacctacccgcacttatcacctgcgcgggctgattgttgacgttcctgataactataacccggaaacgcgcacttattccggtttgtggcttggcggcttcaagaaggcgtacaccaataacccagcatggatcttccgttacctggttaaaaacgagcgtttcggccttgcccgccatgctggatacattgacgttgacgacggcgcattatatacgctttctcaatactgcgaccagttggtagatgatggttacggtggccttgagcctcgcgtgacgcttaatgcttacattacagagcaaatgagcgcccgcgatttactggacaatatcgccgggatgttccgaggcatcgcgttatgggacgggcaacgccttaccgtgatgattgatgcgccacaagacccgatcgccaccatcacaaacgcaaacgtcgttgatggtgcgttcactcgttcaagtatcgcccgcgcagaatgctacaacgccgtgattgtatcatggaccgacccggaaaacggctgggagcaatcaaaagagtatgtggcagatgatgagctaatcgcccgtgatggttataacgaaacaacgttggaggcgttcgggtgcacttcacgcgggcaagcgtaccgcgctggcaaatggctgatagaaacagcaaaacgcgagccgtcaaaattcacgtttaaaatggcccgtgacgcaattcacttcacccctggggatattatcgagatactcgacaataaccgcgcaggcgctcgtttgggcggtcgcatcgtggtaaacagtggcagggttatcacggtcgataaagttgattctgaatatatcgcccctggtgacaccattagcttgcttgatagcgatggcaagtttaaaaaacaccagatcactggagttagcggaaacaaaattacccttgcatccgccccggcatggattcgtaacggtactgtttttgctgtatcaaccaacgcagcaaaacccgttttatgtcgaatcaccagcgtagcagaaacagaaaataacagcgtatacaccatcgaggccgcacagcatgatccacataagcaggccgtagtcgataatggcgcaatcttcgagatcaataacgacacgcttaatcacttccgcgtgccgaacattgaaaatctgaaggtgttaaacgttggatctgaaacggttcaatgtcgcgcaacatgggaaacacagacgacaacgcgtcgcctgacctttgagattcgcgtgtataacgccgacggcgctgtggttaaaagctacgaaactacgaattacagttatgatttttatggcattgattcaggaacctactcattaggcattcgcggtcgtaatgatacgggcatgaagggcgctgagagtatagttgatctggttattggtgcaccagcagccccgattggcgttaattgggttcctggtgtattccaggcaacagtgtatccgatcagcagaacaacgcttaccactgataccagttacgagttttattactcaggtgaaacacagatcaccgacccggcatcagtaaccactaaagcacaatatacggggcgtggtcatcagtggacgtttggcggcatgaatacaggtcacatatattacgtttatgtgcgcacgcgtaacgcttttggtgtgtctgactttgtggaagcgtcaggtaagccaacagaaaactttgacgaaattaccgattacgtcaccaaagacgtaatgaattccaaacaatttaaagaaatggttggtgacattaaagatctaggcgaccgcactgatcttatcgaaagcgctacgaatgaccttaaaactgctactgacaacctcaaagctgcaactgataatctgaccaacataactgacgatttaaggactgaaactgacaacctaaccatagaaacaggatcaataaaagctgatactgatacgctcaaaaaagaaacggaagatctttataaaaaagttaaggaaaacgccgatgatattggacagcatgagtcgagaatcgactcgctggaggtgtctagcgaaaaagttggcagcgaactggcgcaagcaaaagcaagtctgcaaaacgcctcacttgctcttattaataactcgcttgcacagactaacactcgcgtaactcttaccgctcagtacaagaaaggcaggacagagacgaaagcggaaattgaccgcattgacaacgttatcgctgaagagaaaaaagcgacagcggaatcactggaaaccatcacggcagaaatgaatgtgatggacacaaaccttaaaggtcagatctctaatgtgcaacgcgcagtagctgacgaggccagcgcccgcgctgaagctattaacggtgtaaatgcctcaataagcaatcttgacaagaaaactgacgccagcgtaaaccgtcttgatcaggcaattgcagacgaaacaagtgcgcgtactcaggctatcagcgacgtgaacgcaagtatctcaacacttgacaagaaaactgacgccagcgttaagcgcctcgataatgcaatatcagatgaaacgcaggcaagaagcgacgcaataacagtggttaaagctgatttaacaacgcttgaaaataacacaaatgccagtgttagccgtcttgatcaagctatcgctgatgaatcaagcgcacgtgctcaggcgatatcaggtatcagcgcgacgcttggcggcgttaaaagtgaggttgataaaaacagcgacgagatagatcaggcgaaagcaagtctgcaaaacgcatctctggcgcttattaataactcaatggcgcaaagcaagatgagcactgttattgaggcgaaatacaggaaaggacaaacaaaaacaaaagcggaaatagcaagggtagacacagcaatcgcagatgaggcgagcgcacgcgcagaagctattagcaacgttaacgccagcgtcagtagtcttgaaagcaaaaccgacgcgagcgtttcccgtcttgataaagcaatcgcagatgaggcgagcgcacgcgcagaagctattagcggggttaatgcgtcaatttccacgctcgatagcaaggtgacaagcaacgtaaccaggatggataaagcgatcgcagatgagaagaatgcacgcactgacgcaatcagcagccttaactcatcgcttaccagtacgattaattcgaaagtatccgaagtgtcaactgcactttctacgcatgaaacatcaagcgcggaaaaatttggccagatctcggcatctttcgacgatgtaaactcaagcatcacggaatggtcacaggctatggcaacggcagacgaggcattgtcaaccagaatcgaccagttgaaagtaactattaacggaaacacaacggcgatagaaacgacatcaaaagcactgactgacttcaaaggtaacgttgatgcgtcatattcaattaagattgccactgataaaaacggtatgaaatacgctacaggaatgtcgctcggccttactggtagcgggactaacgttcaatcgcagtgtattttcctcgttgaccgtttcgtgcttatgactgcggcaggtggctcctatcagaccccgttctatgttactaacggtgcttgctacatccgtgatgcgtggatcagagacgcatcaatcactaccgcgaagattgcgcagcaaattcagtcaaccaactataaagctggttcggctggctggatgctaaataaaaacggcaatgcggagttcaacaacgtcactgtacgcggtacggtgtacgcaacatctggtaaattcactggtgagattcaggccacaagcgggaagtttaaaggtacagtagaggcaaagtcatttgtcggtgacgttgctaacatgggggttggtccagatcgagtgcttgggcataacggaagttatagcgcaaccatcacatataaagacagcacggataatgcattgacgaaatcagttatgcttatggcgactatttcattaatgtctggtgaatatagatccacttataacgtaacgtttagttgcggagataaaaacaaaacaatttcatattacgtgccttatggtggatgcacattaacagtgcaatgcgctttttctggtttaaaagcatcagatattatcgggaaaatatattgtcctcaaacatcatcatctgaaggatacgcatattgtaccgcgttgtattctccaacaatgatagtagcaagaggcaccggatcatttagaacatcaacgacagcataa

SEQ ID NO: 22517 - DNA, 531 bp, Escherichia coli
atgctcaaatttagatttacgggcaatcttcgaagatatttcggcaaagtgtgtttaaacgttgaaacgccagcgcaagggcttcgcttattgaccgcgcagaatcaggaattcaagaaggcgtttttaaacactcctttgcgcttacgaattgccgggaaagattacgacgaaaagaccgcgccagctgcggttaatagcaaatatccagatggaactactgtgattattgcgccaatagtggaaggtggtattgcaggtattggtgtgatcggctggattatgattgggatatcagttgtcagtgtcgctttttctatttttatgtctcgcaacatgaaggtaaaaacatcatcagaaagcgcacaggacaacaccataactaataacacttacaccagcatagaaaacagggtaggccaaggtagaccagtgccaattttattaggtgaaatgaaagttggttcaaacgtcggatcgttaggcatagacacaacaaacaataaagacgccttagacgttgtaagttaa

SEQ ID NO: 22518 - DNA, 732 bp, Escherichia coli
atggggatggaagacaaaatgtcgcgttatgccgccgcgcatccgtttgaggaagtttgcggacttgtaatagataacgagtatttttacccgtgcgctaacgtgtctgaaacgcctcacaacagcttcaagatttcgccggacgattacatcaaagcggacgaattgggtgttataaccgccgtttttcactcccacgttgatgatattccggtactgtctgcgcgggatcgacaacagcaggttatttccgggctaccctgggttttatattccggcggcaagattaaaaagtttcgcccggtggcgcacctgctaggccgtaagtttgtgcacggggtaactgactgctatgcgcttttccgtgacgcctatcacctttgtggtgtagacctgccggacttcgagcgccttgatggctggtggctgcgcggtgaaaacctgtatttaaaaaacttgccgcaaaacgggttttatcaggttgatgcgcaaagcatccagccaggtgacgtaatcatcagacagccgtttaaaggtgcggatccatgccacgcaatgatttacctgggtgataacacggttttgcatcatgaccatgccggactattaagccgacgcgagcaaatgcggcccgcgtatgttcggcaaacgcattcaatatggagatctgataaatgctcaaatttagatttacgggcaatcttcgaagatatttcggcaaagtgtgtttaa

SEQ ID NO: 22519 - DNA, 705 bp, Escherichia coli
atgcgcaatatacctacagagatgattattgattccgtcgatgccggagttggcgcggtcattgacttgttcgaattggaccttacgccacttggaggcgaggttattcgcttccattccggcgcgaacggctattacggcccggttatctggaagggcgtggcttacaacagctacccgatcgaggccactggcttcgaaatgaaaaacgaaggcgtttattcgcgccctcaaatggttgtagccaacatcggcggactcattacggggatgaataacgatttcaacgaccttagaggaatgaaggtaacgcgccgccaggtggaggttaaatacttggacgccgttaacttccctaacggaaaccccgacgcagatccatctattgaagctgtatctttttacgtcgtggaggctatgagcgaagaaacagcggatcaggtgcagtatgaactctcaacgccaattgatgcagataaggctgttattcctgggcgcaccatccttgctgacgtttgccagtggcagtacaggggcgacgggtgcatgtattctggcggtccggtagcaacggataaagatgtgccgacaagtgatccggcgttagacaaatgcagccaccgccttagcggttgccgtttgcgtttcccgcgcccggcagcgctgccgatctcctgtttccctggttccagcaaggtaggttaa

SEQ ID NO: 22520 - DNA, 159 bp, Escherichia coli
atgaggcccgcaaaatacgcagagaaagtttttgttgaagtgaaaggcgacatgaaaaaatttatggatgttcttatcaaagagatgggaaaaccgttccatatagccgaacgtcagtattacgcttgcaaggctaatagctacaacagatacgcatga

SEQ ID NO: 22521 - DNA, 354 bp, Escherichia coli
atgcaaaaatatcgtctcgatgtatggatggcaggaagtaaggattgggaaggttacggcttgtatgatagtcacgaaatggcgatcgaggaaggagaaaaacttgttcgattcttcggacgcgccagggaatttaaaatcactccagtacaaatagcggacaaggtggaagatatgaacccgaaagatattaatgttaacttcaatgttaattttgctgattctatggatcagtcttgccctggtgaaatacacgcaaaaggtttcccggcagacgatccgcaagcaaaacgcgaatacgaaaaagcggcaaaagatttctgtatcgacaaccagggagcgttcgataaataa

SEQ ID NO: 22522 - DNA, 249 bp, Escherichia coli
atggcgcggcgcaatcactgtggctatgtgtacacgttgaaacaggccgcccgccttatcggttatcatgagcacgaatttattgatttgctgattgggtgcgggattttatatcaggcctgtttaacgctgtacccaaaagctaaatacttgcaggaaaagctattcatcataatgacggatgaaaaccaggttaatcacccgttcgttactgacaagggattaacttacttaaaagagatattgtga

SEQ ID NO: 22523 - DNA, 198 bp, Escherichia coli
atgggggtcaatatgtatgctatttgtgtagtggaccgcactggcgcttttacattgtttgacgactatgaaatcaacgatcttactgtaaaagccgataatggcgagacctggtatcttcatgacatggaagacggttatgtaggttgcagatcaaggggaggtaaggaggttttattcttgcttgatggcgtataa

SEQ ID NO: 22524 - DNA, 354 bp, Escherichia coli
atgccggaagtgttcagatggacgccacagagaagctacagcgtaagcagtgagcctaacgtgtctgttatcaagctgggtgatggctatgaacagcgccagacaaaagggattaatccactacttgatagctatacactggtcttcaaaggcacaagcgccggatgcggtgacgccggaaacgtggcgatccaagttgacgcatttttaagagcacgttgcgcggtcgaggcgttttactggacgccatctacagacggggtgcaaaggctttttatctgccgtaaatggagcatgacgaaagacggcccggtatgcacgctaaacgcaacgtttgaacaagttgtcagctaa

SEQ ID NO: 22525 - DNA, 156 bp, Escherichia coli
atgagtagctatgtagtagtgatgctaaacaacgcattcgagcaagtggaagtagcaattgttaagggtttcgacgacgcattcaaatacggtcaattcatgatgaacgcgaagggtgatgaataccgggatttcttcctgaaagcacttaactaa

SEQ ID NO: 22526 - DNA, 255 bp, Escherichia coli
atgaaactggtggcgattgataaaaacctgaaagcacagaaaaacgcacaggaccggatcattaaaaaaggcaaggctttattaagcgccttcctgaaaaaagaggctcaccccaaaaagttacgcgatggctacggctataaattcgacattaatactgattggaggttgtttagcgaagatatgagtgtttggttgattatttaccatctggaatataacagacactgcggggtaaaaggcgctcacaagtga

SEQ ID NO: 22527 - DNA, 186 bp, Escherichia coli
atgattattgacgaaacagaattatgttacggaatcaggttggatcttgataaggatggtcggctatggataaccgaactcatgggagctgacaccatcgtaattgaaaaatcgcaggcgacacaacttatcgccgggctgcaaaaatttgcagatggcacatttgagaatgagcgggaggattaa

SEQ ID NO: 22528 - DNA, 288 bp, Escherichia coli
atggatttaacgattattggtcacgcactggctgcggcggtcatacaggttgttgttggcatgcttactggtgattatcttactggcggcctgattggatgtacattcttttttgcgcgggaacacacacaggctgaatatcgttacatagcggaattttgcggaggaaaacgggaaagaatgccgtggtatggtggattcttaccaaaagcatggaatatagctagcgttttcgacttcgcagcgcccgccttcctgtgctttttaatttatatagttaccatgtaa

SEQ ID NO: 22529 - DNA, 2340 bp, Escherichia coli
atgtcaaccagtttaggtacaatttattacgaagttgatgcgaaaactggtcaacttctagtcgctcagcgacaggcggaccaggcttttgacagtatcgagcgtggcgcaaaacgcgctgaccgccaggttaacacgcttaaaacttcaatcaaagcactatccagggttatacatctgctacttgctgcggaggctgtgcgccagtttattgacatggcggagcaagcaaaaatgcttcgtgtcaaaattaaaatgctcacaggtgacgcagaggtcgcaggacgtgtttttgacggcctgaaaaaaatatcaaaggaaaccgggcaaagccttaaagacactggcgaattgtggcaaggcctggctatttcactaaagaatacttccgctacggaaggccaattgctcaacctggttggcactattcagaagatgggggcgttaggaggcgcgtcagcggaacagatgtctaattctatgcgccagttccgccagtctatagacggcggcgtgctgcgtgctgaagagtttaacagcctgttagagaacacgccgaccatcgtacagacaatggcccgccatatggggttgtcaatgggccagttccgcgccgaaatgctggacggcaagatcacggctgaaaggatggttaacgcgattcaggcagctacacaggaaacaaacgagaagtttgcacagttgccgcgcacgtccggcaaggctatcaatgagcttaaagttgaggtgatgggacttgtcgaacagcttgacgatcttttcggcatatcagatggcgttgtgtcagcaatagacttaatcactggtggcgttgagggattaggtaaaggcgcaaaattcgccgcaacatgtttcaatacactaaaaacggctggcagcgaatttatcgacatgtttgatgatgtagctgttaaggctggcgaggtggcggaagagattatcaggatggtaacgccaatcaaggcgctaatggatggctacaaatggatgaaggagatcattgacaaacgcaaggaagagctaaacagcaacaacgagaagaaatttggccccaccattggcaaattcatgacgtttaaaaatgacatcgaaaaagctactgccgcttatgatgagttcatgcagaaacagggtgaggctgacgacggcaagattaccggattcgatcagccagttggtaaaccgaaaaaggggaaaaagggcaagaaatctgaagctgatcggcttggtgatgaaggtataaaagtgtcagaccagtacaacaaggacgccgccgctatgcgcaaagcattagagaacggcaaggccattgatgctgcattcgcccagggcaaaatcaccctccttgagtacaaggccgcgcaaaaggggataggcaaggaactgaaggacgaattggcccaaatacccgtggaagaactgcaagacaaatgggcgcacatagtaagcccaatggatcagcttaaaggcgaaattgacccaatcaaacaggcgcaaaatgaatgggcagtaagaaagcaaatgttattagacctgggcgccacagaggcgcaacagagacaggcgcagttagaatatgaacaacagatccgcgatctgaagtgggaacaatggcaggcgcaaagcgacacaaacagcctgattggtgcttgtgttagcggcctcaagggtggcatgggtaatgcgctcactggcctgttaaacggtactcaatcattaagcgaggttttcgccaacctgggaagtagcatactcaataccgttggtaacaaactatcagaaattgccgccaactggatagcagatcagttgatgatggaaacgcaaagcaaggctacccaggcaagtacaactgctggcgctgtggctgcgcagggcgagattgcggcggcggcggccccggcggcggcagcgacagcggcatcaactggcggtagctgggcggcggctggttcagcggcgcttactgcgatcatgtcgctggcaacatccattttcggcggtgggcgctttaatggtggtagcgtaattggtggcaatatgtaccgcgtcggggaacataacaggccggagctattccagacgtctaacggcaaccaatacatgatccccggcgagaatggcagggttatcccagggcgtgatattggcggcggtggcggtatcagtatgcctgtttacatcgatattcaaaccacaaacggatttagtgacgaagacagccgcagacttgaacagacaatggaacgtgtagccatgaaaatgataacaagggaatcgcaaagaccgggcggaatgttgcaaccgcgccgcaaataa

SEQ ID NO: 22530 - DNA, 417 bp, Escherichia coli
atgaaacggctaatcaaagcggcagtgatggcggtaatggtaggtttagcattcaacgccaacgcaaacgatgtgatgaatataaactgcgatgatgtagctaataatgttgctgaataccacaaaatcttcaagaaggaacccgcagctatcaaggttttttataaagcaattgacgatcatttcgaaggtaaaccggtttacgcaagatggtttaactggggacttgtgaaggaggctgctgtaggcgtcgtattcgaaggcaacgatgaaataagaaacagaatagccaatgagtgtaacgctgataaagccgcatttgctgaaagaatatttaacgaaggcggcgcgggtataaaaaatcatgccatcattgacttgggcaacggcagaattgaaatagtaaggttcagataa

SEQ ID NO: 22531 - DNA, 681 bp, Escherichia coli
atgatccatgttcgaacaggacaatttgcggttgttgttgatggcagacgttacgagtttaacccctgctttgctgcaatggctaagatcggcagtgacagggaactggttgaatacttcgcaacggtgcacggtggcaaatatccatcacgattgccaacggatacagacctacgcaatcgcattatggcgcgttgttatggtgaactggtgcaaacgtccatccatgtactgaaatgttgctcagaatgcgaaataggcccgttattgggcgaatgcagctttactccttcgggtaagttaagactaaaacctggattgatgcccaccagcgacgttatcacactggcgcaacactgcatgtatcacggtttgattggtgacggaccagatgaggacactggcgaggagcaggaaggagactataaacagacgtttgacatccttgaatacgtttactccgctgttgctcacctgggattgtctgaatctgaagcatggggcatgacaatgaccggatatagggccgctgtacgcgctaaaacgccaccagacgaaagaaacgagaaacgtaagccaaacgttcatataaataaacgtgattatgatgagcaaatggaggcagctaaaagggtgctggaattgatgaaaaaacgcgagcaagaaaaagcccggggttag

SEQ ID NO: 22532 - DNA, 477 bp, Escherichia coli
atgtctcagacttgtgataaaggttcgttcttaggccgcgacgttgccgtattttacgctatcgcttgccctaatgcgaaacctgaagaaagcgcttataaagcgttaggcatgatgcgtggcaaatctctttccgtagaatgggaaaccgcagacgccaccgctgataaatcagcagactacaccaaagaatcactggtaacttacaaatctgttgccttctcaggtgacggagtatcccgcaccgaagaaatccacaaccagaaggcacttaaacgccacgttattaaccctggcgaaacaacaggtgcacagccttacgtttggctgaaacttgtttccccgctcgatgtaacagaaggtccgttcctttgcacttcctttaaagaagaggatccgcacgacgatgtgtccacctggtcaattgaatgcgaaagcgctggcaaagtcacggtaggtgacgttccgttagtgtaa

SEQ ID NO: 22533 - DNA, 387 bp, Escherichia coli
atgaaacgcagcgaagtatacgatgaaataagggattggattaagtcccacgggtacgacgaaggttatattttgcaggcccgtttctggaatgagcgatccaattctaataacgaccgatatattgttatccagcaaaatggcggggcggctggtgaagaagcagtaacccgtgactacttccgcatcctggttatttcagcgcgcaatgatgcaaatatcagcgaagtggaagacctcgcagacgcaatacgccaaagtatgataaccgaatataaaactgataaaattacacacatgaagccagttggcgctattcctgcaatgcagacaagagaagggcgctttatttttaccgtagcttttcaaaccatcatatcaagataa

SEQ ID NO: 22534 - DNA, 474 bp, Escherichia coli
atgccactgaaaggcgtcaggcgtgtccgtatgaaaatgacggaagaaatcaggagcatagcagacaaaaagacttatgaagtgctatggattgttggcaatgtcgcgtccggccttgcatctggaatgacgccagttgatacgggttttttaattaacagcatgtatcagacagttgagaaaaacggtaacggcctttgtttaagggttggatataccgcccgctatgctgaatgggtgcatgacatgcccgggacattaatgggacagcctcgcgagcatttcggtaaaaccaacaacctttcagatttcggcccgaaacaggtagtcgagttcggaggcggtactggtaagggttattactgggatccaaacgctgaacctgaatttttgcgcaaggcgttcgaggaaccagataattttaatgagatctggaacacgattaaacttgggtactggacgaaacaatcatga

SEQ ID NO: 22535 - DNA, 369 bp, Escherichia coli
atgagtaagatcgcgagattcagttacaaggcattagccaccatttaccccgtaacgcgtgacgactggacaaactccgacgtatacggtgcgccatacctggtagattgtgcgtgggagcgtactgacggaaccgcaacagacgcaaacgggaatgaggttagcaacacaataaccgtatataccgaactgcttcacaagatgcagccagtacagcgcccggaaaaagggtggatgcttgccactggtgacactactgctattgccgacccgctggcggctggggccaactttataaccggaatcgttgaatgggacatgagcatgtttaacgacgcgccggactataagatcgtgacaggaggttaa

SEQ ID NO: 22536 - DNA, 186 bp, Escherichia coli
atgtggaacgacctaacactaccgaagccactaatgccgaagccgtttacccgcgtatgggtgaagactgacaccgggcgacaggtggcggcatatctcaatgatgctggcgaatgggtaattctttgcccgcgcgtggcgaaaacccatccgaaaattgttaaatggagctatggctatgagtaa

SEQ ID NO: 22537 - DNA, 387 bp, Escherichia coli
atggttaccacacaacaggcgcgggaatatctcgaaagccaggggattgacctgccagacattatcttatctttgctggtggagcaggctaatagcgtaaacgaatgccttgatgctaattatccgtcctccactgcaacattgattcagctttatctgattggcctgttaggacttacccaggctgataaatacatttcctcgcagactgggccgaacggtgcgatccagtcctaccgctatgtcgattttaataaaagatggaaggcagcttgctcgttgcttcgttcaattgacaaacataattgcacagccgaactaatcccggcagatcccgaagccaccgcgcacgccggactatggatcggtaagagtaggaggatgtaa

SEQ ID NO: 22538 - DNA, 1065 bp, Escherichia coli
atgtactttacaaaagaaaaccttgccaccaacgcccgtatgcagggccattggaaagaactgtgggcgcaacgcaatatcttcaacgagcagcacaacgccatgattgcagcaaatcaggcaaatatgaccgctgaaatgttgacctgtaacgccgtcggcggcttcgcaaaagaattctggaaagaaatcgataaccagattatcgaactgaacaccgaagaaatcggtattgagatcgtaaacgacctgatgggtgtgcaaaccgtactgccagtcggtaaaacgctgaaaatgtacaacgtatccggtgacatcaatgatgaagttgtgatgtctatggatggtcaagcgccacacggctttgatcacaccgaatacgatagcgatggcgacccgatcccgatgttcgcggctggttacggtgttaactggcgtctcgctcagggcttgaatactgtaggcatcgaccttgccctggatagtcagcgcctgaaactgaaaaaattcaacaaagcacgcgtccagttctacctgaatggtaacgatcgcatagtggttgatggtcataaagctatgggtattaaaaaccacaaaagcacccagcagcttaaactaaaaaccgtcgcaaaagtcgacctgactactgcggttttcgacaagatcattgacttcttcaccgttggtgagttcggcaagctggctcgcgccaacttcgtagctaaatacgacgtcatgtgggtatcgcctgagatcatggctaacctggcccgtccgcacatcgtcaatggtgctgtagtcggtagcgtgctgagcgtcattatgccgttcgctccggttggtgagattcgccagagctatgcattgtccggcaacgagttcattgcttatcagcgcagccgtagcgtaattaccccgctggttggtatgactactggtgttgtaccgttaccgcgcatgatgccgactgataactacaacttccgcatcatgtccgctgagggtctgcaaatcacccgtgacatggaaggtcgttcaggagtggtctacggcagcaatacctga

SEQ ID NO: 22539 - DNA, 429 bp, Escherichia coli
atgtttcgttttcgtcgtgtaaatattgatggtaagtcaattaccgaaacctatgcagccaatgaggcggtgaagcctggtgaactggttaaactggctgaaggtaaattcgctaaagcagcccttgcagatgttggcaaggcccaacttttcattgttaacccggcattccatgaaggcaaaaccattgctgatgaaattgctaaaggcgcaaccgttgttgctgattatgtggaacagggccgagagtttgctctccttgttcctgcagccgcttatgttaagggtgcagctattgctctcgcagccgacggggtgaaactgtttgttgcgccaagtgaacaggcagcgccagatccgatcatcgcatactgccaggaagacgtaaccctggaggcggaagattttatccgcgttcgcgttgcttaa

SEQ ID NO: 22540 - DNA, 1269 bp, Escherichia coli
gtgaaaaaagaattaattcaggttaataccaaattaaccgctaataccatacgtcgggaaacgtataacgggcgcgagcatattgttgttccgtcctatacgttgccattcaatatcgttatgaatcgtgagtattacccagaagctgaaattatcgctaattaccagtcactggaggggacgcttgcaccgttaggccatcctaccgttgacggtaaatttgtttccgcatttagcccggaaggattgaacaccgggttttgtggagcgtggaacagaaacgttgaattacgcggcaatcgtgtttatgtggaaaaatgggtggatattgaaacagccagccattcagaacaggggcgcgaattattaacccgactggaagcactggagaaaggagaaagcaaagatcctatctggtcgtccgtcgctgtatatcgtcagcgtatgccagctactgaagagatgaaagcccagggcgctgaccatgtagtaaaaattatgtcgatcgaccatgacgctattttgctgcatgagccgccagccgcatcacctgaacagggtgtagggttgatggttaatactgaccaggcgaaaccgttaatggcggtggcaatgaaagaaaacagttaccgtacgcttgagaaacaattaaccgacgcggcgcgtgaattatttcctgatgccgattacgtgtatgttgtggacttcactgataaagaagtgacgattgccactaataccgaaagtgctcaagtttgcgcatatgaaaaacaggctgataaaattattctcaataatggcgagcttgcaaccaatgaggaaagtaaatcatggttcgctcagttcgctgaacacctgtctaatcttttctccctgaatgaaaaaattaaggccaataaatcggaggacgatcccatgcctttgaccaaagaagaacgcgccgaactggtaaaagaaattaacgaaggcttatccgccaatatcgctaatgcagtagcagaggcattaaaaccagtacaggcaagcgttgaagaattacagaccaatcagaaagcgattaaagaagagatcgcagcaaacgcaaataaagaagaagcagaaaaacgcgccgcagtagcaaaagtacacggcgaaattgttgctaacgcattaagcggtgaagcgttagaagcaatgtttaaatccctgggcaaagccgcgccgatggcaaccaacgcagcaagcgaaggtaaaaaaggcgaagtaccagactttaacacctatttctaa

SEQ ID NO: 22541 - DNA, 945 bp, Escherichia coli
atgatgaaggtgaagaaaataatcaggcgaatacctccagccgcgataatgccatctaacaccgaagatccgaccatgacagggaagttacgttctggtgctgttaagcgtttcaaatcctgcctgaaaaaagtagccgatccatatatcgccatactggacagaatccaatatagcctggctgttaataagaaatacaccttccagatttacatggatgaattacatgacatgctggaggacgccagcgacatgattgatgagatattcgagctaaccgacccggaaagtttttggttttggcagaattacgtgaaggttgcctatcagcgcggcacggcgcaggagtacgccaatcttgctaaccagtcggtcacttactcaagcgcttatcctgatgtatcagccgtgctatccagcacaacttaccgcacgcgccttgccctggtccgtacccgtgtatttgaggaaatgcgcgggctgaccgcacagatcaaaaaggatatggcccggcgattaacagaagggatggcacgtggattaaatccactggaaatagcgcgcacattgcagcaggaaacgcaattgccactgtacaggtgcaaacgtattgcccgaactgaaatatgcacagcgttacgcacagcgcgtatggatgaggctgaagcggcgacagaagaatttaatctgcgcacgatgcaaatgcacatttctgcattatcaccgacaacaaggctatcgcacgcgcagcggcacggtaaaacatacaccatagatgaacagcgagaatggtggagtagatcccctaattcaattaactgcaaatgcaccacgattaccgtattagttgatgaagacggtaatatattaaacaagcgaatactggagcgggcgcaagaaaactataaggttgcgcactctaaatatggcgaagattgggagtaa

SEQ ID NO: 22542 - DNA, 1371 bp, Escherichia coli
atgccatcaaatttagatttggcggttaatgctgccttatcacaacgtcaggcggcctatgcccgctatgcagccgccaacccattcactatggggatagatgccaaacgagatactgcatggagtgaatacggattcaaggaagaaatcacgtatgacgacctgtacaaactgtatagacgcggtggtattgctcacggtgctattgagaaaatcatcacgacttgctggcgcaccaggccaacgatgatcgagggaacagaagacgagaaagcggaaacggaaacaccctgggaaagagacatcaagaaacagtttgataacagattttggcgcaccattgccgaatgtgaccgccgccgcctcattggtcgttatgctggcctgttgattcatgtcagagataaccagccgtgggatcagccagtgacaaaaggcgtaggcattgccaaatttaccccggtatgggctggcgctcttacgccgaaggagttcgaagaagacccgaacagtgaaaactatggcctgcctacatggtgggaatacaaggagcgcataaacagcaagactattgccagaaagatccaccctgaccgcatatttatctttggtgactattctgatgatgccatcgccttccttgaaccgtcctataacgcctttgtgtcacttgagaaagtggaaggcggtagcggtgaatcattcctgaaaaacgctgcccgccagttagctatctcgttcgataaagagattgatttccgctcccttgctgcaacatacggatgcgacgtcacagagctacgcgaaagattcaatgaggctgcggctgaaatgaataagggtaatgatgtgatgatggcgttacagggtgcaacagtaagcccgctggttactgccgtatccgacccgtcatcaacctatgacgtaaacctgcaaaccgccgccgctggtgttgatattccaacccgcatcctggttgggaaccagcagggagaacgcgcatcaaccgaagacctgcgttacttcaacagccgctgcatgacccgcagggaggaaatcggtggcgagattgaagatctgttccgcaagatggcagatctacgccttatcagtatgccagtagatgtatcagtgctatgggacgaccttaacgccatgaccaaagcagagctactggaagccgcagacaagatggcgcaaatcaatcaggcttgtttggctactggtgaagaaatatttagcggcgatgagatccgcgaggctgccggatacgatggcccagccagtgaagtagaaacggaagaggatgacgatgatgaaggtgaagaaaataatcaggcgaatacctccagccgcgataatgccatctaa

SEQ ID NO: 22543 - DNA, 1479 bp, Escherichia coli
atgttgacaatcaaagaacaagttattcagtccaaatgtgaaaacgatggcctgtttttcaatcgctacttctataagcaagcgaacggaacgaagatgttaatctcaggccatcacttagctatccgtgacgcactgcaacgcgttgtcaatggtgagataacccgactcatcatcaacattcccccagggtacggtaaaaccatgatcgctaccatcaacatgatggcacggtccctcgcaataaatccccgcacaagattccttcacgtttcctattccaacaacctggcgctactcaactcctcgactgtaagaaacatgatctgcacgcctgaatatcaggcaatgtggcccatgaagatccgcaatgatgccaacagtaaatctatgtggtggaccgaatacggtggcggcgtgtacgcgacctcatcgcttggccaggtaactgggttccgtgcagggtatatggaaccgggatttaacggcgcgttaatcatcgacgacccattaaaacccgctgacgcttactctgacgtggtgagaaagcaggtaaacacaaactataacgacacacttgcttcacgtctggcagtgcaaacaacgcctgttatcgtcatcatgcagcgcatccactacgatgatttgtccggctacctgctacgaggtggaagcggggaaaagtggtatcaccttaacctgccagtgaagatcgacaacagcatcgactactgggatctgtaccctgaaaacgagttcgcaatccctattcttcacaacctgccagacggctggctgtggcctaaaaagcacaatgacgcccatgaagctggattgaaggcacacaggcggtcatttgaggcccagtacatgcagcgcccgcgtaagttcgacgaagagggtgcattgtggactgaagcgatgataaccgccgcgcaccggatgcagataacgcaggagaaaattcgcacggtgatagccatcgacccggcgactacatcatcggaagaatcggacgaaaccgggatcgtagcatgttccgcttatggtggcggcaagtacgctcagtattctgtagacggtgactactcaggccgcatgtctcctaacgactgggcgcaagcatcaatgaacgcttacaacatccatgaagctgacgcgatggttatcgaaaccaaccagggtggggaaatggcagaggccacgctacgcaatgccggatttaagggccgcattgttaaggtgcacgcaagcaagggtaaattcgcccgtgccgaaccaatatcagcactatatgcacagggcagagtagcccacactggcagtctgtacacgctggaaaatcaaatgatggaatacgtgccagctaccgctaaaaaatcccctgaccgtatggatgcgatggtgtggggtatcactgaattaagccaaccacaggcaatgggcctcatgttaccgaagcgcctgcgcggattttaa

SEQ ID NO: 22544 - DNA, 486 bp, Escherichia coli
atggcccgcactaaaaaggcaaaggctgacgataaaaagccagcagctaaaaaggtgggccgtccgcatggttataccgaagaaaaagcattagaaatctgtgagctggtggcggacggtcagagtgttaacaaaatttcgaaaatgcctggtatgcctacccgttccacaatcctgaaatggtttagagacgtgccggaattctcggacatgtacatgcgcgcgaaggaaatcggcttcgaggtattagctgatgagatcctcgatatagctgatgatgctaagaacgttgataaagaccaactacgccgccaccaattgatgattgaaacgcgtaaatggctattggcaaaactgcaaccgcgcaaatatggcgaacgcgtcacacaggagatcgtcggcaacagggaggaagcaccagtacaggtagaagtcacaaaagaagagatcgcccgcatcgttcaggaagtagaagatgaggtgtga

SEQ ID NO: 22545 - DNA, 585 bp, Escherichia coli
atggctaagggtaaaggcattaagttgcctcaattcaaagtcccgctctttgagcatacaacagttttcttctgcccgacccgcgagatgttctatgaattttgcgaaaaggcagggatcccaatcgaacctgatttcgaactggcaggaggattgacgcttacttgcactggtgagaaaggcggtaacttctacgtgatcgcggtattcgacaatgagttaggaacgctggtacatgaatgcgctcacaccacattccatgttttaagtgatgtaggcgtcgttgccactacagatcccagccatccagcaaacgagacttatgcttacatggtgggccgtatctttgacgcattcttccccatcctggcagaatcaaatgaagcacaggtggcagctatgcaggccgctgaagtcgtagagaaggcgttagagcaggcagagaagactactgatgcagcagagcaggcagtagagcaggcagaggagccgaaagaagagaaaaaaccagctaagaaaggcaaacgtaagccgaaagcaaaagaggcgattgtaccgcgtgttatgagctttaaacgaggttaa

SEQ ID NO: 22546 - DNA, 471 bp, Escherichia coli
atggacaaggtgaagacgttaatcatcgccgttgttgtttgcattgttgttggccttgttgccgcgctcagtcattgccagtcagtgataaacacaatgcaaagcgagctaactactacgcagggcgcactaaaaacagcaagcaacactattcagcagatgaaggagcgaaacgccgaactgtcaaaacttgataagaggtatcacgatgagattaaagctatcagatctgacattgccgatctgcgcactggcattgataacggtactatcaggctgcgcgtcaacgccgtgccaatgcgaacagacagtaataccggaacctccagccgcattgatggagccacctgcgaacctactgccgacgctaaatcggcttatctatccctcagagaacaactaaaaataaaagacgcacagatcactggcctacaggactacatcaaaacgcagtgcttacgcaaagaataa

SEQ ID NO: 22547 - DNA, 492 bp, Escherichia coli
atgattagccaatcgctgaaaaacaaaattgttgcggcggcggctggtggggcgatcgctattgcggcggtgatgattaagccattagagggcgttgagtacgatccttatcgtgatgttgtcggtgtatggactgtttgccacggtcacaccgggaaggacatcatgttgggtaagacttacacgcaatcggaatgcgatgctttgttgaataaagatctacacaaaaccgcaaaagcgattgacccatatatcaaagtcgaaatatcagattttacccgcgctgcgctttattcattcgcctataacgtaggcgcaaccaacttcaaaacatcaaccttattgaagctactcaatgacggcaagaaatcagaggcgtgcgcacagcttaaacgctgggtatacgctggcggtaagaagtggcaaggcctggtaaaccgccgcgaggttgaatatgccgtttgcgaatggggtgagaaatggacaaggtga

SEQ ID NO: 22548 - DNA, 201 bp, Escherichia coli
atgttcgacagaatacgggaggcgtgtgcgtatgtgactggggccgtaactgcttttttcggcgcgataaccatcaatgacattgccgtcttcgtgggtatcctatcaaccattggcacatttgccgttaattattacttcaaatcacaggagaacaagcgagcgcaagaggaacacgacgcgcgaatggggaataagtaa

SEQ ID NO: 22549 - DNA, 177 bp, Escherichia coli
atgaacgagatcgaagacggcatctatttgcataaggtatttaacatcgcgtatttggttagaggtgaagcggtgatgataagacctgatgatgttccttattgggaattaagcgacatggatcggtggcatatgcaaacattactaaataatggcctgatatatagaaagccgtaa

SEQ ID NO: 22550 - DNA, 183 bp, Escherichia coli
atgattgaagatggggtgtacgcagcaacagtagtagacaggttgttttaccgcgtggaaggtgatgatattcgtatccgtgttggcggtggcgagtgggtagcgccaatcattaagactacgcgagaaacaatcaagatatttcttaatgctggtgaactggtaaaggttagcgacctatga

SEQ ID NO: 22551 - DNA, 198 bp, Escherichia coli
atgattgaatgccttattgctgtgattgttttgctttatatcgctggcgcggtcctgatgtcatgttttattaagtatagcggcgctgaacctggtggccttgagattcctttatggcctgtagtgatgtttctagccttcttcgatgctacggtagtgcagatcaagcgagccattaaggagcgcaaaaatgattga

SEQ ID NO: 22552 - DNA, 252 bp, Escherichia coli
ttgagcgcatcaaataaaccttacaaaatccgttgtaaaggtgaataccctggctttacgactggttgcgaatacctgggccacattggatgcggccctttcggtgagttagggatgaatacgctggacgacgacggcgacagccggacgcttgatcttgattctgatgatttcgaatacatcccgccagtaacttaccgtgccgttgatgatttcctggctgaacatgaagacgagggcgatgatgattga

SEQ ID NO: 22553 - DNA, 324 bp, Escherichia coli
atgtctaaatttatcagcgttaaagttttccgtggcactttaccgaacgaagaaagattaggacaatttgccgggcaacctagtgcatgtttccgtgtagccactgaagacgatgcgcatgttaaatgcttccacgtatcggaaccgccttttaatgcagaccatcttgaagacccggatagaattaaaagcctagtttttgcctatctgatgttccagggtatcgctaatatggaagtggaattgcttggcgctgaactggtggcagaatacaaaattactgaagcagaaagcggagaatcaaaaattgagcgcatcaaataa

SEQ ID NO: 22554 - DNA, 255 bp, Escherichia coli
atggaaataatcaaaatatggcgcggcaacagtaaggctgacggtgagttttgccgcgtcgttcaattcgtaaattatggtaggttttacgagctaccttatgacaaaaggaaagatgatttctatttaagcgagtcaatcccggtgcacagaaaaataaaggcgcttagggggttattgcgaagtggtttttattcttgccctaacccattaaacaatcctgaactggtagctattttttacgaaggagaatag

SEQ ID NO: 22555 - DNA, 300 bp, Escherichia coli
atgaaaagcgctaaatttattgcttgctgttttgttgaagttcctaacgatgatgttttctgtaattatgaatttaaagacagcttaggcagatctcatgttgttgttggtaagcgcggcgactggttatatatcactgatggagacaggatcttcactaaaaaccagttgttaataataaaggcagaaaatgatgaaataccagtaggtaatatggggattatgaattatcacgctggtttattgttaaagcacgatacggtaaacaaagcgcgtagcttacctggtgcggagttttaa

SEQ ID NO: 22556 - DNA, 141 bp, Escherichia coli
atgaacgctaacgctaaatatccggcctgggttttcgaactgtacgcaagatactttgaattactggcacaaggtgaagaagcattaagcattgacgagtacgcggagtgcttagggtttaaaggagacgaagaagcataa

SEQ ID NO: 22557 - DNA, 279 bp, Escherichia coli
atgaaacgctggattaacaaagaagtcgaatctcgcttaaacgcattttgggagatggtggagaaagaagacccagcacacgctgcaagcccttacctgaacaacatcgaatatcactacattgcagcaaacaacgcggagttcgaagaagaaggtggagccgacaagttcgcacaaagcaacgcattcaacaacgcaaacgaaatgatgatggcagtcatcgaacaggcagaggaagactacgaatgcaaatcacttgaattcgcacgtatggcataa

SEQ ID NO: 22558 - DNA, 219 bp, Escherichia coli
atgattttaacgtgtaacgaatcgaaattgggctgttttgaggaaggcgtacagtacacggctgaaaaaccgatgggattgtctcctaaatttccgtttatcgtcgtgactgacacttacggtcacttatggtatgcagggccgctaggcggtattggtcgttatgttgtccgtagttcggatggggcgatgaaggttacttttacggaagaaacgtaa

SEQ ID NO: 22559 - DNA, 240 bp, Escherichia coli
atgagacagaatcagagataccagtgcacatactcacgatgcagcgcgttttttaagaatggcaagatctacgaggttgacgcggcattggttgacgcaaaggatcaggaatatattcatgccattactgacgaccaggggcagttatggcgattttataagatgggttgtggcacggcgcttgtttatgcgcgtgctggtggtggtgcttttgctgcgttttcgtatgtaggggtatga

SEQ ID NO: 22560 - DNA, 207 bp, Escherichia coli
atgtatgttagatgcactgaatcaaaatcatcatgctttgaggttggcggaatatataccgtagctcacctgactggtgatgaacttaacacccaatacattaaagacgaccacggagacgcgtggcgctattgggattgttacgcgcgtggacacgttgccagccagttcagtacggaaccgatcgcgcgttttgttaagtggtga

SEQ ID NO: 22561 - DNA, 225 bp, Escherichia coli
atgtttgtaaaatgtataaagtctcgtttccctaatctttttgtggttgatgagatttacgacatagaaacgctaataagcagaactaacgatattcagtacatttatgatgaagatggcgatccgtggtttttttataacgatctcaatggtagcggattcgttgatggcgttggcggtaatggtgtgccagttgcgctatttataaatgcaaataaggaatga

SEQ ID NO: 22562 - DNA, 252 bp, Escherichia coli
atgaaaataagggtaagttatttccgggcgaaagataaggcaacaggaaagcagattgcgatcctggttaacgaggcgcagtacatgtttgtccttcagccgtggtgtgttgtagatcttaacgacaactatcgccgccacgctgcgcgaagtgctgttggtatgaaaggctggcaaccgcgcgacatggaaaaatattgtgaatggaaattggtggcaaaatacacggtagattataaaggggttttctga

SEQ ID NO: 22563 - DNA, 249 bp, Escherichia coli
atggacgtttacgaggatgtttacctggcaccttcatcttatagcttttattttctgataaatggaaaggcttatagatgcgattctgacggggtgagagaagaaaagctgttttgcactaaaggatacctggatgatttggtttttgccgggatatttcgtaaacgcccggctaacctggaagaagaaatgttgattgaggtaattaaaaatgaaaataagggtaagttatttccgggcgaaagataa

SEQ ID NO: 22564 - DNA, 228 bp, Escherichia coli
atgaaagttaaattcttgcacgatcacggatacccgtcattgaaacaggttgttggtaaggtcgttaatgtcgttcatagcgatgatattgcttgcatgattaatggtgctgatctcattgctgctggtgctgatgaccattacatcaatccggcgtggtcgtatacgttcagcctgggcgacttcgtgggcgataaggggcgcgggctgcaagtagtcgagggttaa

SEQ ID NO: 22565 - DNA, 267 bp, Escherichia coli
ttgatagttacacaactgcatagtggggcaaatatgtgtatctatgaacacaagcgggataaaacccgcttttttgttcgtgctggcgtggcttaccagtatcacgactgcggatatatcgaggcgcttgcttacgatctggatttcgaacaagaaaaagaatggtttgatttcaagatttaccggaagcgcaagccaacgcgtgacgaacgacacgctatccgggactttttaatcagcatagaccgctgggaggcagacgaatga

SEQ ID NO: 22566 - DNA, 231 bp, Escherichia coli
atggagctaaaaatctggcaggctatcgacgtagttgataatgaattaacaatgtttgccactgacggaaagcgcgtggttatcgctacatggacgcataaccatgatgatattgtttttcgtcgcaaggctgcggagtggcttttctctgacaacggctacacgatgaatatcatgcagctttccagaatgaaggatgaaaagctggttgatagttacacaactgcatag

SEQ ID NO: 22567 - DNA, 366 bp, Escherichia coli
atgcaaataatcattgattacctttgccacgctgcaaatacgcttttcggtttttatcagcaaccattcctgaaagaatgggacgaaatgcttaatgacatcctcgacaaagggttaataatggaattcggggagctaacaatcaaatttaattacgaaggcaaagaatatgacatatgggtaggcaacagatggtatgcatacgggcatatttattcaattggcggtaaatacattaaacgaagtcaggaatttagaccgcgcttccgcacaatgcgacgactgcatgacctgcatatgaagatatttggagatcaggaggcacgggaattattcaaaatttacgggggtaaatcatggagctaa

SEQ ID NO: 22568 - DNA, 216 bp, Escherichia coli
atgaaaagtaaccgcaagcgccttgtaagggcatacgataaagcattaaaggcttttgatgatctgcgacacaataagcgccagcgccgcaaatgggcgcgtatgcttgtttatgagtggcattattctgatgcttttatggaaagtgcgccgctattaacacaagaacaagccgacgaagtagctaacgataacgtttattatatgatgtggtga

SEQ ID NO: 22569 - DNA, 270 bp, Escherichia coli
atgaagcctaaattaaaagagcatgaatttagggatctcataaacggaataaccgataaagctaggatgtactcaaatgcgcaacagttaagggcggttatagttacggaattaatgaaatacattgagccatgcggaccaggcgacgaaatgactatggataaggccatcaagcgccgttcggctgattggtcggttagtaacactggattaaccggatacattgaaggctataacgactgtttacaggatcatggcaatgaaaagtaa

SEQ ID NO: 22570 - DNA, 348 bp, Escherichia coli
atgaaaatacttaacattgggtggctgtattgcgaaaactgcgacgacgatggcatggtcgtaaaaaccgaaaaaggttgcggcctcatgctgtatcaaggtgataaattcgtttgtcctcgctgcggcggcggtggtgagatagaaattgttgatgatattgctacagcatataagccatctcgcattgcccttgatgaaaaaataaaaattcatccttatttattacagcaaattatcgatcacgtatcggcagccgcaatctatagcggtaacaattatcagcgagaaatgaacgtcaaacgtgcgattgagcagtatttcgaaggtgacgacaatgaagcctaa

SEQ ID NO: 22571 - DNA, 207 bp, Escherichia coli
atgatggataaactggaaataaacgatcagtttgccgttatcttgttcgaagataaaacaggcggcgcatggtgtaagaaagtcactggtgctgaagcacgcttaatattgggtatggcaagcgcgttaaatgatggcgaattgccagccgtgccaattaagccagtacatatttacggacggagtaacgacaatgaaaatacttaa

SEQ ID NO: 22572 - DNA, 723 bp, Escherichia coli
atgaatttggaatctattcttaaattccacttcccaaaatcaccgcgtttgtcagatgaaagccggggcacgtccccggatgcgcttaatactacggatgcgctaactgccgctggtatggcgcaatcgcgcgtagagcttggttatagcgcttttctgggaaagatggaactatcacaagccgaaaaacataaggccgtagttttgcttatagagcgtttaaaggctatggcaaaagattatgaatacgttatggaactggacgaggctaaacgcaatgatctcattattcttgttgccgttttcgcgtttcgggattattgccagagtgccgcgacggaaaaaacttgtatggagtgcggcggatataaatttacgtttgacgaatacggagaaaaacacctttgcaaaaaatgcaaggggcatgggaaggttctcaatcattgtaaacaatgcaagggccgtggcgaagtaccggataaagcagccagcgaagcggcggaaatgccagtgttcaaaacgtgccagcattgcggcgggcgcgggtactcgcgtttccctgtagatcttgtccggcaggcggttaatcagcttgttttcccggtaagccgatcaacatggtggaagaaataccgcgctttctatgaagacgccattgctgaattgttcaaggaagaggcgcgggctgataacgaaattaaacgagttacgcggggtgaatga

SEQ ID NO: 22573 - DNA, 183 bp, Escherichia coli
atgaaaaacgaaattaaagatctgcaaatagatattcagcgcgacgagcgtgatttagccacagtccgacaaattcaggcttttcacatgcgagaattacttgcactgaaagagtttgaaagaaagctagtgcaatcaatatctgatcgcaaaagactggttgcacgttacgggggtaaataa

SEQ ID NO: 22574 - DNA, 402 bp, Escherichia coli
atgaatgaatatacttttagcctgccttacccgccatcgaacaataaatattaccggcattcgcgcggtttccactatataagcaaggaaggtaaggaatacagggagcaggtaaaagacattataaaactgcttaatctgaaaattaatcttaagtgtaggctatcaataacggtgtatattgcaccgccagataacagacgccgcgatattgacaatgtagggaaggcattatttgacgctataacttattccggtttttgggctgatgatagccaggttgacgcaatgaaatttgtccgctgccggaaggtaaaaagagggcgattgtttatcaaggtacgcgaacgcggcgacctgttaccggatattaacgaatacttgactaatatgtggtggtaa

SEQ ID NO: 22575 - DNA, 606 bp, Escherichia coli
atgcagaaccctaaaaaaccaataagacgccgttgcaagtgctgcggcgttttttttgagcctaaatatcacaatcaaacgtggtgcagtgatgagtgtctggaagagctgaagtttgatcagctatgccgcgaccgtgagaaggctatgaaggctatggaacggaagaaacgccgtgatagccagcgggaagaacgcaaccggaagcggaagcagttaaatccgcgtagttattggttgaagcaggcacaagcggtatttaatgcctatatccgcgaacgtgacgcgggtcagccgtgcatatcatgcgggacttactattacgaacaatgcggagcagatgccggacactatagaacggttgccgccgccgggcaccttcgttttaacgaggataattgccacaaacaatgcaggcactgcaaccagacattagatggcaacatagaagcatatcgcccagcgctgattaggaaaattggccttgccagggtggaagcgctggagaacaacaacgaaactcataaatgggcgatcgaagaatgcaaggagatcataaaagtctatcaggctaaattggacgccttaaggagaaaggcagcatga

SEQ ID NO: 22576 - DNA, 177 bp, Escherichia coli
atgtcttttgataattaccaatggcatgacgactatgaacgagaaagcgtcatgcgtgcaatgtgcaatgtatgcagcacaaagaaaggaggctgtaacgagtgcaacgaatgcttagatcattggctaagggccggacacaccgaaaggctgaacgaaacagagaatcaaaaataa

SEQ ID NO: 22577 - DNA, 765 bp, Escherichia coli
atgagtgggcttaaaaattgggtggtgtggtcgctgtacgacggcagcgggtacgccgttaaagattgggctgacgctggctataagtgttattgcttcaactatgacggcgctaaccacggcgactatgaaggcgtaaaaatcattcatccgaatattgaatacgttaacgtatggattgacagccatttcctggtgatgttctcccctgatttgtctgtttatccagatcctgacattattctggccttcccgccatgcgaccatctagccgtgtccggcgctcgttggtttgccagcaagcgtgaaaaagatcctgacttccaggtgaaggcggcatataacgcaaaactggtagaaacgctggctgacatgtatcacgtcccgtggatggtggaaaatccggttggcgcactgtcaacgttatggcgtaagccggattttatcttcaacccgtgcgcttacggtggctacctgcctgaagatgacaaacatcctgccttcccggaatacatcgccgaccgcgacgcatacacgaagaaaacttgtatctggtgcgggaatggatttaatcagccgctattcctgcctgtgccaatgcctgatgaatgggaagacagtaagcagcacgctaagttaggaggaaagtcgaaacgcactaagatgatccgctcactaacgccgcgtggctttgcccgtgctgtattcctggctaacgaccgggccatcaatcgtactacgctcaaccgcgttttaccggactga

SEQ ID NO: 22578 - DNA, 504 bp, Escherichia coli
atgaaaaaggtgacaattgacaggttactggcctgcgtttatgtcgccgttttcgtgatcatcaaccttattgttaaccattgcggcccgtgggtaattccgatcaccacggtagccgcagtgtgtgtcaatatgatgatccgcgactttctgttatatgacggcggcctgaaatggtcggctacaacgtgcgcagccgctggcgcaatcacggtgctgataaactacgatgccggaatggtggcggtcgcgtcattcgttgcggttgtttccggtgcgcttatatctggcggcgtttaccgggttttacctggtgatttcgattccaaacgctggcctgcaaatatagcttcagccattggagatgcgttaatttttcccacgctatcgtttatggcatttatgccggaaatatcagctatgcaattcatctcaaaaatggcagcggtaacggtgatcactatcatcatgcgccgctattttacgtttgagggcagaaaatga

SEQ ID NO: 22579 - DNA, 486 bp, Escherichia coli
atgactaatgcagcagatttattacgacttgcagcggaaacaatagagcaaagaggtaaacaaaacggttacgacagaaaagaagaaaaatcagcgccaaaaatagccactatatacaacgctaagaaggggacaaatttaaccccgcttgatgtatgggatctattaatttgtctcaaggaggcgcgtttagaggccattttagttaatgaaagcgatcctactgacactttggttgacttgattagctacagcgcactaaaagcggagcagatattaaacgatcaggaggaagaacggaagaaaaaacagttcactgccgccaatattaatgatggaataataaatgatgcagcaataacaagctgtaagggcttgcctccttcaatgcttaaccctcaatgtcgttgtactactgattcgcttgatttgaattttgacttcagtcggaagagggataaccaaaatgaaaaaggtgacaattga

SEQ ID NO: 22580 - DNA, 540 bp, Escherichia coli
atgaaaagtgattacggcggcagccatacgccgaaagaaataaaagacttatggcaaacgccaaaacccgtttttagaggaatggatcgcgagttcgaatttgtcgcagatgtggcggcaaacagggaaaacgcgctcgttcctcggtatataactgaagaaatggacgcgcttacttatccgtggggagcggtggcaatgcctggcgaatatgtatggatgaatccaccatattcaaacccaggtccattcgttgataaagcagcgctcgaacatcaacgaaatcacatcggttgcgtaatgttattgcccgctgacgtttctgttagctggtttatgaacggcgttgagacggcaaatgagtgccgattaatcacgcgcgggcggctggcgtttatcaatgctgcgactggtaagccagtaagcggaaacaataaagggagcttgtttttgatctggcatccacggtgcagacatgaatgtattttcacgcagataacacgtaaagagctatatgcaagaggtgcagataatgactaa

SEQ ID NO: 22581 - DNA, 234 bp, Escherichia coli
atggccttattcaatatgtcagagccgcaatttaacgccgtaaagactgccgcccgcgccgcgctttcggcctgcaaagcggaggtagagaaaaacggctacagcgataaagccacgcggatgatattagataagcattatcgcaaagtcgccccactaatcagcattgagcgctttgtgtggttggtggggtatttaaacaaccgttggggaacgaaacaggattatttctaa

SEQ ID NO: 22582 - DNA, 237 bp, Escherichia coli
atgcttaagagcttttttaactggttgggggcgtggcttttggctacgctttttgttttcctggcggccatgactgttatcggtgttattatgctgggggctatgtttattacgtggtcgcttcctgaatttaacgacattgggaatattctttttgcagcccgcgctttattggctgttagcgcattcattggtttttgctggactgccgcgccggattggactgacacatggtga

SEQ ID NO: 22583 - DNA, 195 bp, Escherichia coli
atggaacaagaaactgattatcgaatacctgatagcctaaaattagttggcattggtttcgggtgtagatttgtatctgacgcaaaaggagcgatttatttaatacgtcttattgatggcgttcaacatataaggcgactaggaatttacatcaaagcattcagaaggggttatttaaaaactcatgaaatttaa

SEQ ID NO: 22584 - DNA, 219 bp, Escherichia coli
atggcccgcgaatacatgctttattgcgttgagggtggcgtaggccatgatgcctacgtcgccgggaaaggctatccagccgatgaagtgctttctaatatgcacttccgggaaaatgaaagccgggtgtctgtgtggaaacggtgcattgatggtattgaggttgtaagtatcgaacggtatttaggcacgtttgattacggtgttattgaggcttaa

SEQ ID NO: 22585 - DNA, 621 bp, Escherichia coli
atgaacgacatcaaaacggcttattcactcggcagcgaaggcatgttaatcactcgctacactgaagacgcaagttttcatgaagtagaaattaaagattatcacgaagtattgaaagatatggaagctggcaagtatgacgctgatttgaatctggcgttacagattgttgatattgtgatggatgcaaacatccgcgattatgtgtctttaagtgcggaagaaaaaacatcggtagctcgctatgtcttctgtcttgctttcgtaaaacgcatggaagaggaatatgggcgcgtaccagtgccggaagatattgacccgcttgcgttcggaagcgctgttatcttcccgcttgatgaaaaacgtatgggaagcattgcgctgtattctatgcgtggcatgatgaaaaaactctttgaagttaaggtgatgcagaaatgtattgatgaaggccacaaagaggaagaaataaaatttttcatgccattgctttacgttgaaatggtcggcaatgatatgcgtgcaaatgatctaggtgtacaggcggctattgcggtgcttaatgatgcacggaaaaactcacagccaatgcctgaaccggaaaaacgtgtactgcattaa

SEQ ID NO: 22586 - DNA, 333 bp, Escherichia coli
atgaaaattaaattccataaagcatatgatagcgaaacaaacaagctatcactatttattgaattcgaacgccggatcgtggttgttccctgggcacggcgctttaatgacgccgccgggcggcgacaattcgcggtcgatatgctgttacgcggttgcggccttatgcgcccgctatctgatttaaaacggatgatgcctggatcgttcggtcagattgatgaaatagaaataagccaggaagagctaaaacgggcgcgtgatttattcctttcaagtgaaggaaacccgttcaacccagaaactgaaatgaaatggcatcatccactataa

SEQ ID NO: 22587 - DNA, 192 bp, Escherichia coli
atggctataaaattagtgaaagttaaagacctgaaaggcggcgaaaagatccgcacgtggtatggctataaatttattgtcgctgccttttctttcgggcctgtgggtcaagtaacattatttgatgaagaagatgacgaggtgggtaaatggcatcttgagcaatatgtcgaggtgttaaatgaaaattaa

SEQ ID NO: 22588 - DNA, 273 bp, Escherichia coli
atgaaaacgtgggatgcaaaggctggtgatcttgtcgtattgcctgaatatcgtgatgaccctggattggttgtactgaacaagatgtgcaacgatcttgagcgcccgctattggttaaatatctggacggggaaatcatagagccacgctactttgatgagattgaactaaaggcccgcaatgttcgcgttaagccgttccgggattatgttgaagaccactggcggaaattgttcgccggactgaatgggatgtttggcgtatggctataa

SEQ ID NO: 22589 - DNA, 225 bp, Escherichia coli
atgattgaagaaaaagaagtagacaaggaaattcctgacggtcgtgatgagcttatttgttttgacggcggcctgtatgagttcgaaacgtctgcggggtggcacgataaatggcctaagcctactcgccaggaattaagcgaccgtaaatcattcggcgaagatgccgaacggctggctaataacaaatggcttgataagttaattgcggagggtggcaaatga

SEQ ID NO: 22590 - DNA, 294 bp, Escherichia coli
atggcaaaagcaggatctacgcgctatcttgatgcgccgccgattccgcgaacaaaagagcaagttctaaaagaagcccgtgatcaaatagatcatgggctttttttatgcggcacggcagcggaacggatggcaaaaagatttagtgacctgtacgcaaaacaaatatggttcgacaactggcaggcaagtttttatccgctgcaaagaaaaccggatatgcactggcctgaatatgtcgatccacgtatgcgcaaatatcgcgggcgtatgggccaggtcattaatgattaa

SEQ ID NO: 22591 - DNA, 462 bp, Escherichia coli
atgagtttaaattcaatcacgctgggcgggaatatcggtaatgatatggaggttcgctacacacaaaacgggaaagcgattggtagttttccgttagctgtaacgaatggctacggcgataataagcggacaatgtgggtcacttgcctggtatttggtgagcgtgcggaaaaattagcgccacatatccgcaatggtggaaaaatagtggtaagcggtcgcctggatgttcggcaatatgaccggaacgacggcacgaagggaacggcggtagaagtggcggttaacgaatttgaattcatgaacgttaaccaacaaggccagcagcaaggccagcagcagaaagcgccaccgcctcaaaataataacgggaatgatgtccctcctgatttcgatgacgacatcccatttgctcctatggggttacaatatggcaaaagcaggatctacgcgctatcttga

SEQ ID NO: 22592 - DNA, 645 bp, Escherichia coli
atggtgaaaacagagttacataaaaagctatggacggttcagcaaacgctgaacgcgccgaaaaatcagcgtaataattttggtggatataattacaggtcggcggaggatattttagaggcggttaaaccactgcttcaaagtattacgctgactgtaagcgatgaaattgtcctgatcggcaatcgctattatgtgaaagctacggcgacgctaagcgacggtgaagacgaaatagcggcaacggcttacgccagggaagaagaaagcaagaagggaatggacgcaagccagctaacaggtgcgacatcaagttacgcgcgaaaatatgctttgaacggtttattctgcattgatgatgcgcgagatcctgatactgacgcatacgctaagcagacaggccagcagcctcgccagcagaaaaacccaccaaaacaacaaccacagcagcagaaagcgccgccaaatcctgatgaagtattagcacgtttctgtgatgcagcagcgaaagcgcaggacgctaacaagctgcgtgaaatatttggcaaatgctggaaattactaccggaaggatcggaacatcgaatcaaggcaaaagatgtttatgacatccgggtagcagagcttaacggggagatgggttaa

SEQ ID NO: 22593 - DNA, 123 bp, Escherichia coli
atggttattcaggcgcttcaattcaaactggcagtagcggaaatgcttcacgatgccgaaatgtggagcgccgcgaataaagccttatacatagtgttaacagcacgggagattaaatggtga

SEQ ID NO: 22594 - DNA, 291 bp, Escherichia coli
atgagcgttacaattatatatggtaaatgtgatagcaaaatgaatgccagggaacgcagaaggataaaaagagaaaacgaaagaaaatcatcacctgcaatcaataaaacagacaatgtggataaagctattcgatttgcaaacgaggaaagatgcaaaccaaatagcattaaagaacgtcgcaaaggatcagtaaaatggtatacggaaaatgaaagcggcagctactaccacgcaacgcaaccacgccatttaggggaaaaacccctggataaagtccgctaccattaa

SEQ ID NO: 22595 - DNA, 648 bp, Escherichia coli
atgaaaacaaaatggtatgacttagcaaagcagctcatgcgggcgcagggcatgagccaggattcactagcggatcgcatggggataactaaaggcggcctgtcacactggctgaacggtcgccgcgagccaaatcttgaagatattgcgcggattatgcgagagcttggtcgtcggcagttcactgttacacatgatggtatggtcattgatgattctgtttctaatacacttcaggccgtgccgccgcgtgatttaggtagttacccggttattgactggaaggacacagtaaacaatatggatgacgcaaggcgttcagcattacgacacgttacgactagcgttatttgttcagatgacagttactggctggttgccaaaggtgaatcaatgaacgcgccgcaggggttgagcatcccggcggggacgatgatacttgtggacccgcacgcgccagctattgacggcaaactggttatagcccagcttgaggaagggcagataccgacgtttaaacagttgattattgatggaggtcaaaggcttttacgttcgctcaatccgctgtatccgccaatccctatgaatccagaatcaaaaattataggcgtggtggttgatgcgaagatcgtaaacctgccataa

SEQ ID NO: 22596 - DNA, 258 bp, Escherichia coli
atgagtatgcacatgatgaatgaagtatggaacgtaaaacttaacagcccgattcaaaaacttgtcttaatggctctggctgaaaaggcagataacaaaggacgggtacatgatgcatcacgcaaagaagtagccgcaatgtgtgaacttcctgttcatacggtacatgatgccttcgccgcgttaatggataaaggatttgtttgtcgtcttgatgcattcagtgatgtctatgtagtgatgttgccggagggatga

SEQ ID NO: 22597 - DNA, 1053 bp, Escherichia coli
atgaagtggtttaagcatgacagcgatgcgaaccgcgatgaaaaacttcaaaacgttttgttagattatggcctggaagggtacgggctttattggtattgcctagaactaataacttatgacgtagatcagcacaatctaacttttgacctacgacatgacgcaagaataattgcgcgaaacgtcggatctactgaaaaacgtatagaagaaatgatgaaatacttcatcgaaattggtttgtttgaatgttctcaaggccacataacttgtttaaagttattgaaaaggctggaccaatcaatgacttctaaaagcgcttacagggccgccataaacacagcgaaggagcaattaaaattagaaaagttaatcaatccaacacaaaaaggtcatgatagggtcatgaccgggtcaggaaagggtcatgaattagaattagaagtagaaaaagaaagagaaaaagatatatacacttcgtgtattgtcgaaaatgaacaaaaaatggtcaatcaggatggcgtaaacgaagcggcattgcgttgccttgccttctacaacgacaaggcaggatgcaaatgtcgtgatgctaagccattcgtagaactactgacagaaacaaaaacacgtaaagcgtatacggagaatgagatcacgttagtaattgagtgggctttaacccaatggcgtagccgtggtggagtacctaagcctatcaacatttgccgggtaactaagtttgatgggtatttggctgatgctgaacaatggcgcaagctatcagttactgtaaacgctgccgacgtggtggaagcatttaacagcacgtttgacggcctgttaccacctgccgaactggatcgggatcttgaacgcaagatctatgcgttcactgactacctgaaagacaaaagcattaacggctttgtcgcctacttcgaaacgttcaaaaacacggcttcagatttttacttcggcaatggcttcactgcgacacttgatttcctgcttaaaccaaaaacgctacgtgatactcgcgcgggcgctctttga

SEQ ID NO: 22598 - DNA, 726 bp, Escherichia coli
atgtgtaagttaacacatgaggaacatgttgccgctattgcgaaagttaatcctgatgttgaagtgctgggagaaataacgaacgtcgatataaaagtattatgccgctgcaaagtttgtaatcatgagtggttgccgcggcctagctttcttaaacgggggagtggctgcccgaaatgtcgcggtggtagtgatagactgtcacacgaggaacaagtcgcggatattgctaaggttaatcatgatattgaagtactagggagaattacaggcagcctgaaaaaagtattgtgccgctgcaaagtttgtggccataaaaggatgtgtacaccccacaaccttaagcgcggcgacggctgtccaaaatgcgcaaaatacggctttcttcgtcatgagcgcggtaaactttacatcatgactgacgatctggaagtgcctacacaaatgaaaattggtgtaagcgttaaggagaacgagcgaagaaatgaaatattaaaaagcgcacataaagcaggtgttagaattcctgatttgcatatcgtgaaaacgttagaagggccaactgaaaatatccatgaattagaaagcacgatgcataaggcttttagcaattataaaattaacttccctgtaaaatttgatggtagtaatgagtttttctattacaggccggaagtattcgacatggtagaagaagcatataaagagattgtttgctgtcaatga

SEQ ID NO: 22599 - DNA, 1119 bp, Escherichia coli
atgtgtcaaagaaagattagtgatgaacagctaatcactgaacataacaacggtctaacgtataaacagatcgccgaaaagtacggaatggcaaaacgcaacgtcgaacggctgggcgcacggttggcgaaacgcggtttaatatccacgcgccgcgctcctggttttggcgtcaatgctgagtcattgctcgtcgataaggatggcaatgtgattatgcgctggattaaaacagcccgtgaccgcgatgaaatggaaatgctaatgcaatcggcttgtgatgctttcacggaagagataccacgcgcggaggccgtgccagtgccggaaattgattttcaaaaaagcctggccctttatccggtattcgatctgcatatcggggcgcttgctcataaagctgaatgcggtgagagctacgacaccgggatcgctgaacgcgtgctaaatgacttcttcgactacgcggtaggcgctgcgccaatgtctgaaaaggctgttttgcttctcggcggtgatgtgcttcacactgacggcctgttaccagtgacgccatcaagtaatcacgttttagattgtgattcacgctacgcaaaactggtttatgtggcgatccggtcggtccggcgtgcggtcgggaagatgttactaaatcataaggatgtcgagatccaggtattatccggtaatcacgaccaatcaggtatgatttggctacgtgctgcgctggcggctttttacgaagatgaaccgcgtgtgacggttgatgtgtcacctgctatcgtccatcacacacagtacggcaaaacatttcttgcttaccaccacgggcacactatcaaaaagccagaaaatttactttctgcctgcgtttctgactggcgggaggatttcggcaagtcgtcgtctgtttacgctcattgtggacactggcatcaccaacggctgattgaatcatcgttgggcgttgttgagtaccacggcacgttagctggcaaagacgcttattcaacgaatggcggctggcggtcgcggcggctggctgcggtaataatttacagtcctgatcatggggaaatcgggcgctttgtttattaccctgaatattccattttgtaa

SEQ ID NO: 22600 - DNA, 1422 bp, Escherichia coli
atgataaccgaacaagtaaactcattgcggcaagaaagagaatcagcggttatcggtggcctgctgttaggtgggcttactcctaacgcgcaagatgttctcgctacgcttgatcctgaagtgttcactattccgctgtataagcgggcttttgaaattatccgggcgcaagccagaaacagaaatcttatcgacgccttgctggttggtgatgagattggcaacgaaaattttgtaccgctgatgcaaacggcgcgatcgtgtccttctgctgccaatctgaaaggatatgcgcgactactacaggaagaacaccagcggcggcaaatgctggaactaatggaagacattcgctacaaactggaaacggggacgcttgaagtcgtcagggagacgatgaaagattttgattcccggtattcaaaattaaaggtaacaaaagatcaaattatcccggtgctgttgcgcgatgcggtccaggaatacacggaagtgttaagtaaacgcatggagtgtggcgtgaactctgacaacatcaaaacagggattgacccactcgacgaaatgttaggcggcattaacgctactgatctggtgcttatcgccggacgcccagggtctggtaaatcggcgttggcgttggcaattgcccgcgcggcggctgaacgtccataccctggcggcgaaggtcagcgggtcggcgttttgctgttcacgcttgaaatgtcgctcgatcagatgactgaacgtgctatcgctggcgctgggaacttatcaacggattgcctacgtaatccggtaaaactggatgacgaaggttgggcgcacgtcacccagggaatgagtgcccttgccgatctcgatgtgtggattgttgacgcatcgcagttaacggttgaggaaatacgcgccaccgtcgaacggatgaaacaggaccatcctaatcttggaatggtgatgattgactacatcggtttaatgaaactggctaaggccgaacgtcatgatctcgccgtagggcaattgtcgtggtcattgaaaatgatggcgaaagagttgcgcgtgccagtggcggcactggcgcaattatcccgccgcgttgaggaacgaccgaacaagcgcccgaacaattctgatctgcgtgattccggtaatcttgaacaggacgcagaccggatcatcatggtctaccgcgacggctactacaacgaacaatcggttgcccgcgaatatatggagatcatcgtttcaaaaaaccgtcacgggaaaacggggactgtttaccagcggtttgacgataacggcaacatcatcccatgcaaccaggcccgcgcggcgtccgcttgcattcagtcaatgcaacaacgtccggcggcaagtcgattctccccacgaaacagccagagcaacgcatctttttaa

SEQ ID NO: 22601 - DNA, 558 bp, Escherichia coli
atgagcattgaacttgaagcaaaaattatcaatatccttgaacttgatggcatcgacacaatgcaccagttacgccagaaaacaggattatcagcggaatatgacgaagctggatgtttgcctgagacaattaaacacttaatcgacactggcattgtcgagcgtgtatatacatatttcggacctcgccgcaggttgcttggctatcgaattaaatatttgtatgcacaacgtcgcgatcgtgtggcatcgttatttagtgactacagcgttaaaaagcgtatgcgtgacattagcgcggaaactggtattccgtggaattacctgtcgcgcacgctgcgtttaatggtactggatgaaacgctttgcatagacaccaataagcacggccttaatttttactcactgtttaaacctgggcgcttcggtcacgctaatgatctcgcgtttggttttgacagccgcctgaatgaataccggaaaaataacggcctgctgccggataaaccagtatttgagatcgaaaaacttaacggtgaaacggggttggaattatga

SEQ ID NO: 22602 - DNA, 207 bp, Escherichia coli
atgatacgggtaatcttttattcagttgaaacgtttgttgacgatacgcgcgtttattatccgtgggaagtatacgacgcaaaggtgtatacaccgccactgatgcggaaatataaacacgtaaaatttaaccgggtttttgtaccaatgcgtgatgcactgcgggtgctgcgcggtgaattacgaaacacaatgcgtattgtgtga

SEQ ID NO: 22603 - DNA, 198 bp, Escherichia coli
atgaataaggagttagatttaaccattgaagactttagcactattgcggaatacatgcgcggtgacgatcctgataaacctgttgtggttgatatgagatacttaaaaagcgctttcatgacaagctcacgtctaatttctttgcaggcgatcatgtatgcgcgggcacagtggaaaaatagtaacgatgtatcatga

SEQ ID NO: 22604 - DNA, 432 bp, Escherichia coli
atgaggcaaataagatttgagatagtaaatgacgccgtaaaagaaaacgctatcaggcagataagggagatacagcctgatagcaaaagcccgctgataatcaccatccaggagaaaacccgctcactgagtcaaaacgcgttgctttgggcgttgctgacagacgttagcgatcaggttaactggtacggcagaaagctgtcacctgaagactggaaggcggtattcactgccgggcttaagaaatatggcgttgtccctaacctggacaaatcaggctttgttgtgctgggaacatcaaccagccggatgagtaaagcggaatttagcgaattaatcgaactgatctactcgttcggtgctgaacataatgttcaatggtcaggtgatacgaaattaaacgaggaatttataaaacgctgggggcaataa

SEQ ID NO: 22605 - DNA, 177 bp, Escherichia coli
atggctagttattacatggctaaacctacaggcattttgtataaggttgatggcgaatacgtttattactttcacaaccaggcgcgtgagtggcgattgtgtcacgcgcactttaagcacgaaatagaaaatcatcctgaatattttattaaggttgacaatgtaacagtggcgtaa

SEQ ID NO: 22606 - DNA, 657 bp, Escherichia coli
atgagtgaatcaaaagcaatcggtgtgattagccatcgcactaaccctgaatgctacccatcgtttgaagtatcgacatgcagggaagaatataattttggatcatgttatttggttggtgttcgcgctgatcgcgacacttattctgttatggcggcaagctggaagtttgataaatatgccaatttatctaataaagatgatgatggcatgaataaagaaagtgaaatcattaacgaattaatcgaagatgagcggcatgattgcgatacgccagaagttacggaatggatggcaggagaaaagcctccatgcggagtatggcttgagcttctagatcctgtcgatggtcggaaatatgttattctgaaatacaagtatataagtgatcgccttgctctttttgtagaaatggatgcgcctgattttgaacaagccggggaatggaagcatttcgctcataagttgtatgtagatccgaaagaaaaaacactggctgaaattgcgtttgcacttgctactaaggttatcggcgaagatgctgcaaaagaaattgattttaaccgcgacaacgaattttcgtgcgattatcgcaatatggcgcaagctattatagacggatgtataggacacgttgaatatacgggtggtgaataa

SEQ ID NO: 22607 - DNA, 219 bp, Escherichia coli
atggataagatcgggacaatacttattaatcgtgagcaagtgcaaaaaatgttaggcgggcttagtaagtccgccttttttaagctcgttaaaaaatggaaagattctggaactccttttcctgaacctgttaaggggatgccagcattaaagcgcggcggatctctttaccgttatcaggatgttatttcattttgtaaatcaatgggcttcatgtaa

SEQ ID NO: 22608 - DNA, 1236 bp, Escherichia coli
atgcgtaaaatgtgtgtaccaaatagtgaccaaattatgcttacagataccaaattacgaaacattcacggcaagccatacgacggcccggaagaagtaccggacgctggcggattgtctgccaggataagcccgcgaggagttatatctttccagtatcgctaccgattcaacggcaagcctcgacggatgaagatcggcacatacggagaaataacactcaaagaagcgcgggcggcggtggcggagcataaggaagtgctaaactcaggtcgagatccatcggtagcaaaaagaatgcacatttcccgcgttacgacacgggcaacggttgaggatattgtaagggagtacatggaatcaccgcaggcaagaaacatggtcaactataagcaagtcgaggcgatgctaagtaagcacattgtcagaccatgcggtagctatatcgtcgatgatatggactccataatgtgggaggggatttttagaaaggtagctaatggtggcgcgcccgttcaggcagggatagtcttaaacaggatgaaggcggtgataaaatatgccatgcgacgccgccgcgtggagcgtgacgacatatcattgctacgcgtgaaagacgtaggcaaaaacccggcgcaaaggaaacgcgttttgtcaatacaagagattcaccatctaatcagccttatagacagttcaaaaatggcgcggctgaaccagatattgatgaagctgattatattcaccggatgcagaacaagcgaactgacaaacgcaaggcgcgagcatttcgatcttgatagctgcgtgtggacggtgccaggtgcattgagtaagaacaggaatgagtttaaacgcggtttatctggcgttagcgtagctttattgcgtgaggctatggatatgcatagctttgattttgtcttcgttcctgtgctttctggaagggatgtggcggtggacagaagtgtaccgaaaacagcggcaagggatttaatgatgaggatgggcggcgagccgtggtcgtgtcacgatctacgccgcaccgtgaggacaaacctttcagcgcttggcgttgcgcctcacgtcgctgaaaaggttttggggcataagctggcggggatgttggctatatacgatcagtatgactatgtgagggaacaaatagaggcgatgaataagctggctgattattacatgaagcccattgatttacaaaatgaaataacatcctga

SEQ ID NO: 22609 - DNA, 1488 bp, Escherichia coli
atgtggtttcactttctgcaattagggtcggctttgaatatctcctctgctttacgccaggttgttcacggcactcgctggcacgctaaacgcaagagctacaaagtgttgttctggcgcgagataaccccgcttgctgttcctatcttcatggagaacgcctgtgtcctgttgatgggtgtcctgagcacttttctggtcagctggctgggaaaagatgcgatggccggcgtgggattggcggacagcttcaatatggtcattatggctttttttgcagctatcgatcttggtactactgtcgttgtggcatttagtctcggtaagcgggatcgacgacgagcgagggtggcgacgcggcagtcattggtgatcatgacgttgtttgccgtactgttggcaacgcttattcatcattttggcgaacaaatcattgatttcgtcgcgggtgatgccacgacagaagttaaagcactggcgttgacttatctggagctgacggtactcagttatccagcagctgctatcactcttattggtagcggggcacttcgtggtgcagggaatacgaaaataccgctactgattaacggtagcctgaatattcttaatattattattagcggcatattgatttacggccttttctcctggccgggactgggatttgtcggggctgggttggggttaaccatttctcgttatattggcgcagtggcaattttgtgggtgctggcgattggttttaatcctgcgctaaggatttcgttaaagagctattttaacccgctgaattttagcattatctgggaagtcatggggattggtattccagcgagtgtcgaatcagtattatttaccagtggtcggttattaacccaaatgttcgttgccgggatggggaccagtgttattgccgggaattttatcgcgttttcaattgcggctcttatcaacttacccggaagtgcgctcggctctgcttctacgatcattacaggccgaaggttgggggtagggcagatagcgcaagcagagattcagttgcggcatgtgttctggctgtccactcttggattaacggccatcgcctggctaacggctccctttgccggggttatggcatcgttttacacccaggatccacaggttaaacatgtcgttgtgattctgatttggctaaatgctttatttatgcctatttggtctgcctcatgggtgctacccgctggatttaagggtgctcgcgatgcacgttacgccatgtgggtttctatgttgagcatgtggggttgccgggttgtagtcggttatgtgctgggaatcatgcttggctggggtgtggttggtgtctggatgggaatgtttgccgactgggctgtgcgggccgtgctgttttactggcgaatggttactggacgttggctgtggaaatatcctcgacctgagccgcaaaagtgtgaaaaaaagccagttgtgtcggaataa

SEQ ID NO: 22610 - DNA, 1125 bp, Escherichia coli
atgtttcagaaaatcaaaattcgcaaaatgacaatcagccgggcgctggacaaatacctgaagacagtatccatccacaaaaaaggtcatctacaggagttttatcgcgtaaatgtgattaaacgtcaccctattgctgaacgctatatggatgacattaccactgttgatattgccaattatcgggatcaacggttggcgcaaattaacccccgaacggggcgtcaaataaccggaaacaccgtccgtcttgaacttgccctgttgtcatcattattcaatatcgcccgtgtggaatggggaacatgccgcatgaatcctgtcgaactggtcagaaaacccaaaatcagtagcgggcgcgatcgtcgcctgacttcaggagaagaacgccgactttcgcggtatttcaaagaaaaaaaccaggctctttacgtcatttttcatctggcactggaaacagcaatgcgacaaggtgaaatcctgtcattgcgttgggaacacgtcgatctgcaacatggagtagctcatcttccaacaaccaaaaacggtgctccacgcgatgttccgctatccaggaaagcccgtagttacctgcaaatgctgccgacacagcttaacggtaatattttttcttatacctcttcgggattcaaaagtgcctggcgaacagcacttcacgaactgaagatagaaaatttgcattttcatgacctccgtcatgaggctatcagtcgatttttcgaacttggtacattgaacgtcattgaggttgccgctatttcaggccatcgctccctgaacatgttgaaacgatacacacaccttcgggcttatcaacttgtcagtaaactcgatgcccgacgcaagcaaaccagcaaaatcgctccctattttgttccctacccggcaacggtcgagaacagaaacgggcaagtcgttgtgactctgagtgatttcgacctggaaacaagcgcagccacaaaagaacaggccatatttcatgccagcgtgttgctgctacgaacactggcacaagccgcccagcgaggagaacgcgtccctactcctggcgaacttcctacaaacattgatgaacgggtaatgatttgtccattaacaaattag

SEQ ID NO: 22611 - DNA, 654 bp, Escherichia coli
atgatagaacaactacagagtgattttttattctggatatttatttacttcctgatagtaggtttgcttatcagaaatattcatcttaccagaaaaattaaatccatcgaaaaaaacaaaatgttcccagcggaggaatatgctgtcctggacattgaacagcatatgtccaataaatatattgggcggctagtaacccgttttatgaagagaactaatggtgcacctttgttaattgtgtttccagaatacgataaaggagacaacaatgaagacaaaaattctccaccattccaacttgtaaaactaacatccgacattaacaatattaaagaaatttattccaatgatgatttaacctgttttctgaataatatttcggcacaaaaaaatttatatacaacgcactctggacctaaccaggcatggattgaacatgcatatcctttgcaacaagtaactattctcttacaaggcactcgtcatagtgaaagggaagatataatcagtcaacttgagattattctttccagactaaaaaatggagaaaatacaggttttgagcatgacgatgattttggatattcatttcagtatgatgccgcagcaataggaaaatcatcatttttcgatgaagcggcaggaagaaaataa

SEQ ID NO: 22612 - DNA, 330 bp, Escherichia coli
atggtaacgataataataggtgtgtcgagagttattgactataaaacggcagaaatgtcggttgatatccccccattccctgaatggaacagtggtcattatatcgaaattccaggagaaggtattgtattcacaggtgaaaagagtgatgacggtagccgttgttattctggtgtcatcgaatctcattacagcactgatgactgggcgtttattctttctgaatacaaaaactggctgaaagataaggaaagaaagttttcttatctgtttgtcttacgcaatggtgaactggttcaccatgaggtcaataaatcagagcttctttaa

SEQ ID NO: 22613 - DNA, 588 bp, Escherichia coli
atgtacctgcatattgtccctaaactttttcatcttatggcgaataaatgcactcttaaatccatctccatacctgaacttgatttaataattgatggcgaatcattgtctgtggggaggccgtggcctaataaatgtgtatgggttggaatgagaaaaagcagaaaatcagttaatggtcttattttacaaacagataaaaaattaagatggtttactaccagatacacctgggatattgaaaatatggggttgattcatcatcaggttaatacctatatagaagataatgagtttgatatggtgtcacaggaaattcttttaaatggttcttttgataagtggagtgacagggttcattcagcttatgaaaataagcctccagccagaatccagcccaaaatggagtccttattaaataagcctggtgaaaacagtcatgatgtgtgggaagagttcgaatggggtgacttccttctgtccagagaagaaagccttttactttacacgattcagtctgaacgattgagtacagattgctctttattcaaaagacaaccgtctattgaaagtgcattagttatataa

SEQ ID NO: 22614 - DNA, 213 bp, Escherichia coli
atggttaatgatttgttgcttttctctgttagtgtattagtttttttagtgataatcctgatgttacatttgaccctaaaaacagacagtattctttctgaatgctctgaatatcgcacgaaatgtgataatctctatcatctatgccagatgcaagagaaagagttagaacatctacgtgcactcattgatgcgcataacatagattattag

SEQ ID NO: 22615 - DNA, 321 bp, Escherichia coli
atgaaatttattattttaaaaaaggataaagatagcacaattgccagaaacgactctgttttccctgttaacaatttctttgtcgttttaactcttgtgtcttccctggctaactctttcggaatattttttcccacgatatctcattctggcaatgttattgagatgtgttttttcgttatgttttcaacattactggctgctttcagttttgtaagtacaatggggctggcgaacgcagtcccccccattaaaaatgtgtttccgcttttgttgttggttcttgtcttaattactaattataatatttacttccgataa

SEQ ID NO: 22616 - DNA, 207 bp, Escherichia coli
atgaaaacaaaacaagactggctctttcagttaagacgttgctcaacactcgacacacttgaaaagattattgaaaaaaaccaaaacagcctccccccttctgagcttgagtcgtttaatgccgccgccgatcacaggcttgcagaactcacaatgaataaactctacgataaaatccccccatccgtctggaaatatgtatattag

SEQ ID NO: 22617 - DNA, 240 bp, Escherichia coli
atgctcacacaaaatgaatcctgtctggataacatcgcctgtgttgctcccccatttggtcagttcagtacccttataggatggtttttgattgcggaatcaatattaaccgcatgtgctggcgtatattttctccgtaaaaataaaaaacgctggtcacgtcatgatacagtcatgtttctttttgcaagtggcctggcaattttcagtacgtggatgctggaacaccaatgggtttga

SEQ ID NO: 22618 - DNA, 441 bp, Escherichia coli
atgaaagaatacgaaaaagcggctttaatatattccttaaaggaaagcaatacattagttcttcggattatactcatctctattttagttgtcggggtgatttcaggcgcgatatacttatataacttagcgatctcattgtttgattcaaacccgacgtctgtgcaattcaccttttgcggagtaggctgttttattgctctattacttcaatggatatctaatgttgatgcaaattacagagaaagaattggggatcaaccaggtacaataaaaaacattgtacaatatttatttgcagccattattaccattagtttcattacaatggcattaacagccatattagtcttaaaagactcgtccaacatatggctcaacattacttttattgcattattactgtccatttttgtagctattatttctgtttggggttga

SEQ ID NO: 22619 - DNA, 4188 bp, Escherichia coli
atgattgtcagatacggtggtggtaatgatggtatcgttgattatctgataaatggtcgtaaagcagaacgccagtacacgcgtgatgaacttgatcatcgtgtcgttcttgatggtgatttacagactacagataagattattgattctattgaaaacaaaagtcaggaacgttatttgcacattactctgtcttttcatgaaagtcatgtgtcgaatgaagtgttaatggctattgttgatgattataaaaagttattgatgaatgcttatcatcctgatgaatactctttctatgcggaagctcatttgcctaaaattcgtcatatccaggataatagcaccggagaacttgttgaaagaaaaccacatattcatattgtaattcctaaagtaaatttgattactgaaaagttcctaaatccagtgggagatgttaccaaagggcatacaattgaacagcttgatgctatacaggaatttattaataataaatataatcttgatagccctaaagactatccgcgtaaagatgcggattacggaaaaattataagtagagttaagggagatctttacaaagagcatcactctgaattgaaaggtgagttgctttcgcgtatagagaacgagaaaattgaaaattactctgtattcaaagatattgttgcagagtatggtgaacttcgtataagaaatgctggtaaaaccaatgagtatctggctgtaaaattgccgggagataaaaaatacacaaacttaaaaagtcctctttttcgtcagaattacattgagacaaggacattaacacttgagaaaccaacacacaaagagatagaaaagagacttaatacctggttaaataaaacaagctatgagattaagcatatttttaaccaggcggagaaaacaagggaactttacaagacattaagcccttcacaacaaattgatttcctgcaagagaggataaaagaatatgactcaagagaaaaacttaacgaaagaaattctcagcaaacgtcaggacgagcgggaggttacaagtcgtgtcctaaaaagtttgccagaatccgtcaatctgaagcaacagtcggattgtcacgtatgccccaacgcggtatggtttacggaatcaatggattcacaagacccgactctgtcagtgtattgtcagatatttcgcagcgtgatctggcagagcaattatcgcaaagagaacatcctggtcaggatgtgcgacgggattatgatagacaattcacagagtcaggaataaaaagtcttgaacgctcttcttttttgtgtgaaacgatgtttcagactctgaatgaggcggcagagaaaaacgaaattacaacgatggcagaaattcgcagaaatattgatcctgtcaggtttctgtcttctgccgccgagcgttttaatattattccagcgcagcataaaatcagaacagcaaaggacggctccccccggttttctgtggggaatcgtaatatgaacgcatctgattttctgacaaagcatattaatcttgcctggaaagatgcgaaatcctttctgcttgaagtttattcacagcagttagaaaacacgccatatacgcgctatccaacctacagacgccttacgcatcatgaagcccgtgagcgtcttaactcactgaatttatcggaaaaaacattacgaaatactatcaggtttgagcgtggcaagctgtataatgatctgcgagagatgagacgcgagttgaagttaataccacgtgaacagcgtgatattgccgtgggtgtgattgtttacaaaaaactaaccacacttgagcgtctttctgaactcgacacagaggggcgacacataattcgtcaatatcatgctgactggcataaggataaagatgaaatgaaagcccttgaacgtctcaaaagctatctcaacttcgatgaaatcaacgccatttctgctgacgaacccgaactttcgcttcagaaagcggtggattcccagcgccgcttagaagaggcgaaaaaggttaactccaaactaaaagatcttgtgatggataagcaggattccaggattgtttatcgcgatcaggaatcggaaaagcctgtctttaccgacaaagggaactttgtcgttgcgggtaaaaatccctcaaaagaagagatcggaataatgcttgagtattccagggaaaagtttggtggtgtactcaaacttaccggctctgaagatttcaaaaaaatgtgcgctgaagttgccgcagagcaggacatgaagattattttacgcccggagcagtatcaacagatgatgctggaattaaaagcagaacttcagggtaataagtttgagcaggtggaaacacaggaaaatagccaggagtccgaatccagaatagagaaaggtgatgcattgaaggaacaggccaccgaacaggcgcaggctacagaacaggcacaggccacagaacaggctcaggctacagagcaggcgcaggccacagagcaagcacaggtcgcagagcaggccacatcttcatatgatcctggtgttattaccagggcaaataccctggattcacagatgcttagtaaaggcacaaatggtgaatttggctatttgaaatctctggatagcgatgaaaatgagatttgggaagtgctggggcatgtacctggagacagcgatgatatctttagtgttgccagttttgataatgaaaacgatgcaaaagaattttgcaatattgttaatgaattaggaattgacagaacacaggctttgattcaggagcagcttacttctcaacacgatcaggctaccgcgcaggagcataataaacaggaaatttactgtgtaaactttagtcacctccatgatgagaatgagggcgttgtatttcattctaaagatgctgccattgacttttatgagggaaacaaatcttctgcaatagaaaaatatgaaagcaattatttaaatggtgatggttttgaaactattgtgcttatgtctaaaactgtctcaaccgatgaattatcctcttatccagagggggggatagtaacgcttgataagccatttgaagtaattgccaattcatatgaagaataccatactccagtgtatgcggtgtctttctcgaaggatgaattcagtgaagatattaagacttttgagtcattgcacgacgcaactgaatacaaaaataatatacttcaggagcacgggcttaaccaggatgatatcttaatcacacctgtaacaagagaagaaatcgcctttaaaggaattaaggacgctgttaatgacgctaatatggcagtgatggaacaggcgggggattcgtccagagaatcaccagaagagatactcgccagtatttcagctaacgagcatatgatatccgggcttgaaaacttcctggttaaagatcgttctcagttcagttcctgcaatggggatatcgttgtggaggcggaaattaccaggggggaaggtggtctttatcaccttgctgttgctggtaagtatggcttagagcgtggtgatgcagttgccagagtggatgttacagagcagcaattcgccgccatcactggaaaaacaccttctgaagttttaacgggggaccaaacatcggctcgtgttccggtaattacaggtatccatttcagtacaagggctattgaaaatgtgaataaactggaacaacagaaggattatgtctatttctcaacacatgaaggtctgaatgctgaaataaaagatttcagctctctcaaggatgctattgagtggggccgggttgaatgcgagctacatgatctcaataagcgcgatactgtcatttatcgcgtcgagtctgaacatatttctcaggggattgacgctgtaatgaaaaatgctgaacgcgtggagcgtcatgaaattgagaaagcacagggacgggattgcacgccggaagacggcaagattcttgaggcaattgatcgctttgaggacaagttcagaggggaaggactgaagttcgaaagggagaaggccgaatccgatttgcttaatcacggattcactcgtgaaatggcagaagatgctcttggaaaacaatttgtccaggccagagaagatcatcaggaatcgcagcagcagcgtgacgattcacaggacatgcactaa

SEQ ID NO: 22620 - DNA, 342 bp, Escherichia coli
atgaagaaaaaaaccaacaaaaacgttcatgtaacattcagacttaccgaagaagaatatgctccgttcgatagggctataaaagagcttaatattagtaagtcagaatttttcaggctgcttactattggtaaaataaacgcatatgcatctgataaacgtaacatcccagaatacaaacgttgtctttctcagttgagttgggcaggaaacaacataaatcaaatagcgcaccgattaaattcagatcatttaaaaggtattatatcagaatcgctttataaaaaggttttaaatggactaatcggtattcgtgatcgccttcaggagatagctaaatga

SEQ ID NO: 22621 - DNA, 480 bp, Escherichia coli
atgaacaatggagaaaataaactacttggttcgctcttagctcagaaggtcaagcgaagtaaaactggaagaataagagagcgttttgctgaaatagaagaagcgcagcaacaaggcataagaaacattgatattgtcaatgctcttaatgatgaaggttttgatctaacgttaaagacgtttgaaaacatattgcatcgcatacgaaaagaaagggccgagaaaaaagatgtttctcatcttctttcaaataaagagaaaacgtatcaaaaagcaataaccattgaggacaaaaatagaaaaacgaagcaagataatgatatacttaatgcatatttgccagtttgcttcaacaatgcaaagatagctcaacaagctatagataacaatgtatctatagaaacaataaaatcttggaattgtgctaactttgtacaagttagcaatactcttggaaattatatacgaaataaaaggtaa

SEQ ID NO: 22622 - DNA, 702 bp, Escherichia coli
atgtacttaaaactagcaattgtaaataatagcggaaacgtagggaaatcgaccatttgtcaaactttattgaaacctcgtctggaagggtcagaaattataaaagtagaaacattaaacactgatggtacaaatgacgagaaattatcagcaaaggagtttgacgaaattatcaaacgtattgatgatagtgaatgcaccatcattgacgtaggctcatcaaatattgagcaattccttgtacagatgaatgaatatcagggaagtcatgaccttattgattatttcatcgttcctgttgtgcgagaagcaaaacaacaaatagactcaattcaaaccattacaacactaatggctatgggtgttgaacaggatcgttttaaagtaattttcaatcttgctgaaaaggacacccctattaacaaacaatattcagttttcttagctgacgacgtatgtaaagaaattgtaggtgaaaatcctgttgttgtttaccataacaacattttcaatattttaaataaaagcggcctacagtatgatgatgtctataatgacaatcgtgattttcgttcattaattcgttcagcgtcttcaaaggaagagcggcaagatttgtcaaatttaagagcagtaaaaatgttgatgaatggattcaacagcgatcttgatgttgcctttaaaaacctcaatctcgtctga

SEQ ID NO: 22623 - DNA, 600 bp, Escherichia coli
atgtctcgtagtatctctgaagagtttaaagatcaaaaaataaacgatcttcttgaagattatattgctttagaaaaacagatcgaaaaaacagcaaacttaattatcaacgctatagacgagacacctgctcgtctggatgccgttctgtcagacaaagtaaataaaataatacaaagcagcattgatattaataaagatattaatattgcaaaaagcgatataagacaaatatctgatgagtgtcagagcgagataaccaaacaagcaataaatactttttctggaatcaaacaaaattttgaccaaattgcttccgaccataaaaaacaactagagatactaactaaatcagcaaaaccattcagtatcaaaacagccattgcaatttgtgccctgtgcacattatgcctgtctgcggcattttctggcgcaacctggtatgttgcacaacatgaaaaagaggcaagtctgcgcttctatgcaagagcatttcttgatatgaaaaaaataactgaagagagcatgagaaaattaccaaaatcagaccagcaaaatataaaactcaaactagacgaaattgattcaagaaaaccatag

SEQ ID NO: 22624 - DNA, 438 bp, Escherichia coli
atgttcttttctgttggtgtcgaaacaccgaaagatgatcatacagcatacggtatcaccgttccggtttttgattgctttgattttggatgtgtttctgctgctgattctcaggcagaaatacccgcaatggcgcgtgaagcgatattagcaatcgtggaagagatggtaataagcggtgctcattctgttgatgatattcatgatgaagggtgtttgacttattccgccaacccaaattataaccactgtgatagctggtttgtaattgatgttgatttgtcagaaattgagggcaaacaacaacgtattaatatttcattgcctgatgtattgattcgtcgtattgatggatatgtgagagaaagtggcggcgtatacaaagatcgtagccattttctggctcaggcggcacgtcatgaacttgcatataaataa

SEQ ID NO: 22625 - DNA, 183 bp, Escherichia coli
atgaaatctgctgacctgttgaaagaactgatagctgctggttgcgagttgaaacggcataaggcaagcagtcaccagatatggtggtcgccaataacaggaaaaacttttcctgttcctcatcctaaaaaggacttgccgctaggtactgtcagatcgatcaaaaaaatggcggggatttaa

SEQ ID NO: 22626 - DNA, 420 bp, Escherichia coli
atggctcaaccaaccccagaaaagatactggcaatcatagatgatcatgatcgcgcacaaaaaaaacaacgcaacaaaaacgtcttcatttatttatgtctctgcttggcaattattgcaacgtttcgtcttgatggtgtagccgtccttacaattcttttgggcgtgtcagcaatcgcattttttctacattatgtagaatcagggaaaggccagattcttagcagtgaccgcatattgtccatactcgctcaaaccaaagattaccccacaattcgacgtaaagttgttaatcgcttgctctccggttcaaaactcacaggtaaagatgaagagtacatattcagtgaactgaaaaaggctgaacaaagcaacgaacgtgaaaagagattgcaagcaattaaagagtatacatcgtaa

SEQ ID NO: 22627 - DNA, 267 bp, Escherichia coli
atgaaacatttaaaatataaaggatatttaggtacagttgagccggattttgaaaataatatcctgcatggaaagctggcatttattcgagatctggtgacttttgaggcagaaacattagctgacctggaacgggaatttaaaacatcggttgatttgtatttacagtcctgtgtggaggacggaaaggagcctgacgcgccctttaaaggtgtgtttaacgtcaggcttgatccagagctaggcactggaaaaagaagtcattaa

SEQ ID NO: 22628 - DNA, 135 bp, Escherichia coli
atgtcagtatgtgaaatgatagagcttgcaaaccgcattgtaaatggggaacctgtaaaaacacccgcgatagaagcatggattattagcgaaatcatttggtgggcgcataaccgggataatgctttagtttga

SEQ ID NO: 22629 - DNA, 279 bp, Escherichia coli
atgcatttcacaacttttctaaaaaaacatttcgatatagaaaaagtcgttggtacttctgattctggaaatgataccgaatctatttatgtttatgaaaaaggaaatgattgcgaaccgttgtttattctgcatgaatcctggctaaatgcagaaattaaaaagtgtggggtatggactattggcgatatatattccacattggaacacggaaaagaatattctgaacaggaactaataaaaatgattaaggagggtaaagtaatcagcaaatactaa

SEQ ID NO: 22630 - DNA, 252 bp, Escherichia coli
atgccaaatgaaaacacaccagaaaacattaaacgtctgcggcaaaaaattggcctgacacagaaagaatgtgccgaaatatttagcatgagtccgcgtacctggcgtcgcaaagaagaacctgtcggaactgcaagcggtacagcacttacaccagtagagtttaaatttcttctgcttttagctggagaacaccctgattatgtactttgtaaaaggaataaaaagaattctgattctggaagtaattaa

SEQ ID NO: 22631 - DNA, 261 bp, Escherichia coli
atgaagataagaaaaggtgacagacaatattatctgaataaagaaggtgatacatttcatctggtgaagcgagtaaaaactttttctaaatctgcgactttaggaaaaacgaaagcaacggtgaaaactgttgccgatcttgtttttcatgagaaggcattcgacactatcgactttgccagcgacggattaagagagaatgataaagaaattatttttatgatgattcaggaaatgagtgagggaaaaaatgccaaatga

SEQ ID NO: 22632 - DNA, 225 bp, Escherichia coli
atgaaacaatctacttttcctgttatcgtctctacaactggtcatgtgttttctgttgtgcgcgtgacgctttgcacaatttgccttaaacatgaaaaaacaggcgaggcttatgtcgtcatttttacagactgccataatatccgtgattataaaaagggcgttgttccggttcttggggagctttatcaggaagatgtcgatttgattaccggaaaaagttaa

SEQ ID NO: 22633 - DNA, 210 bp, Escherichia coli
atgaaagttcttattggtaatataaatattgataattatcatatgctgtctgcattagctgggattgcgggatttgacaggagcattcagtttacatgtgaaatatcagcaagtatcgaaattatggaggatgatttcgtaaataaagctggtatattaaagatgttagatgaatttattgaaaatgatttttcaataaagctcgtttag

SEQ ID NO: 22634 - DNA, 324 bp, Escherichia coli
atggaaaaccacgccaaatttgttgctactgaaattcttaatcagcttggtggaaaccgctttattgctatgacaggcgcaaagaactttgcctgttttgatgaaaatggtgagtgtggtctttgctttcgtttgccttcaaattttgcaatgaagggaattaatttggttaaaatcaaattaaccttctctgatacatacctggtgacattttcccgtgtccgtggagctacagtaaaagaaatatcaaaatttgataatatttattgtgatcagcttgaatgtttatttaatgaacaaaccggacttgcaaccagattgtaa

SEQ ID NO: 22635 - DNA, 330 bp, Escherichia coli
atgaaaacattaacttttaataacggtactgtttctgttggcgatgtgtttgtatcttcctggggatatgagcaaacgaacgttaatttctaccaggttatttctgttcatggcaaaaaaactgtaactgttcaggagattcgcgcttcagttcatcggacccattcaatgagcggatataagaccccattacttaatgatttctgtggtgagccattaaaacggcgagtgcgtgattattacagtaagccagcaattgaaattgagtcattcgaaacagcatataaaggatcaccggaagaaaaacacgagttcacatcatactactaa

SEQ ID NO: 22636 - DNA, 666 bp, Escherichia coli
atgggaagagcattacttgtcgcatcagataaaggcggtgtaggaaaaagcaccacagcaacaaacctggcctcttatctggtaaataattcacgaacggtcatcattctgaagaccgataaaaacaatgatattcttagctggaacgaaaaaagaaagcagaatggcttattaccggttcctgtttatgaagagtatggcgatgtatcagaagtcattaagcgcctgaaaaaaatatgtgaagtgctgatcattgactgtccagggcatgacagcaaggaatttcgcagtgccctaactgtagctgacattctgcttactctcgttaagccgtcttcagatttcgaagcagaaacgctgactcatgtaacagaaaaagttcgcacagctcaacagatcaatccagacctgcaaccctgggtacttttcacgagaattaacacgacaaaaccacgccacagaaaagcagcgattgatctcgacaagttactccgggagaacccggtgtggatacagccacttcgtacacgtatttcagatttagatatttttgaagcggcctgtaatgaaggcgctggcgttcatgatgtacgtcgcgcatccagcctttctacagctaaagcacaaatagagcttttggcgcaagagttaggcatcaatccctga

SEQ ID NO: 22637 - DNA, 285 bp, Escherichia coli
atggctcttgacttgaaaactccggtaataccaggacaaaaaacagaacaaaccaatgctgacacagcccgattcatcaatgaagctacccgcaaaaaatcgggagcaactaaagtgaccaatgtccgtcttggggatgtttacgaagatattctggaacgggaagcactgcgaacaggccagacaaaaacagcaataatgaaagcggctcttgcagcttacgaacacggcctggacgaaaacggaaaaaatcactggattctacagtcagccaggctgaaatga

SEQ ID NO: 22638 - DNA, 573 bp, Escherichia coli
atgcagccaaaaaaaacacccgtgattgtggtcaaaaaacgccgcgttctggtcatgccagaaaatcctgtggtgaatgaaaagccgcaggaagtacaaaaatcagcagttaatgaaaacaagaaagtacagaagaaagatgctgtagcagagaaaacacgtaaaaagcagcctcagccctggtatttgaaaaaacaaatcacttttcccccaaaatatccgaaagaatattttgaaaagtgtttcaataaagttcgtgctgtttttcctgaactatggacagacgaaaaaaagaacttgcccctgaaaagcgggattctccaggacgttgagaaatacctggcggataacccggatgtggatctgacgattgaagagtggaattgtgcggttcaggtgatgacgttccggtggcaatatcttcagaattgtactgtaccaggcgcaacacgttacgacctttacgggaaacctgctggtacagtaaaaaaagcacacgcaacttatgcgcaactggttctcgatgcccgtaagaaagccagcgagaagaaacaattaaaacgtaagggataa

SEQ ID NO: 22639 - DNA, 240 bp, Escherichia coli
atggcgaaaaggtggttgtatcttgttgtgcggcagaaagaagaaagccccgtagttaatttttcattaacccacgaggcgatcccaatgcttgaacaacatcaggatagcctcttaccgcgcgttacgcaaggagaagaaggccatgaaacagccgaaaaacgccctgacctggtgtttattaatcgtgtgctgcacattgttaatattcacgtatctgacccggaatcgtttgtgtga

SEQ ID NO: 22640 - DNA, 162 bp, Escherichia coli
atgcctttgattgaatacatcaacaagttctatcgggggaatcaggcatcgttcgccaggctgaccggagttcaacctgcgcaggtcacacagtggatcaacaaaggattcatcgtggtgaatcacacactgtatagtccacgccgaaagctgggaatttaa

SEQ ID NO: 22641 - DNA, 1029 bp, Escherichia coli
gtgcagcttgctgtgattagcaaacgtcactggtctgaactatcaccggaagagcagatccgtttctggcaggactacgaagcgggaattgaaagctcattcctggtcccccaggaaaacaaaggcggaacaacaaaacgtcgccggggtgaacattccactaagccaaagtgtgagaatccagcctggttccgtcccgacagctataaggcgctgggcggacagttgggccacgcttacaatcgtctcgttaaaaaagacccggtcactggtcagtacacactcagaatgcatatgtcgttgcatccattttatgtactgaaacgtcagagtgtcggtcgcaaatataaattccgaccggagaaacagcggctgcttgacgcaatatgggttgtacttgtgagtttttgtgatcgtggattgcacactgtcggcatgtctgtctcccgcctggcagaagaaataagcccaaaagacagtaagggaaacgttattcctgaaaccgcagtcacagtatcgcgcctttcccgtctgctggcagagcaggtttcctttggcacgttgggaacgtcagaaaagacgatatgggaccgtgaatcccgccagcgactgccgaaatacgtctggatcaccgaaactggctggaaaatgctgggagttgatctggtgaaacttcaggaacagcaacgtaagcgccttgcagaaagtgaaatccgtctgcaactgattaaagaaggcgttatccgcgagggcgaggaaatctctgttcactcggctcgtaaacgctggtatgcgcagcgttctctcgatgccatcaagttccgacgagagaaagccgcaaagcgcaaacgtgccaatcgccttgcaaaactgccgtatgatgaacagcgaaacgaaattgcacggtttattctgaagcgtatgccgccggacgaagcgtactggtgcactaaagaaagattagagcaactggtagccagggatctacgtcagcttgaactggccctgacagcttcgccaccccactag

SEQ ID NO: 22642 - DNA, 453 bp, Escherichia coli
atggcgcgtaagttaaaaattaatcctgtcattcctgaatgtgtggcagatttgaaaggatatccactctatatcatcgtggcttattggggattaagaaataataaaacgctcacaacaacggatgttagccgtaatttccttattacacagcaacaatcttatgatgtgcttacctacatttaccaggaagcacagaagcagataacagcgactaaacgaacgctatttaacgagcacaaaagaagaattagtgcgttcaggattcttgatattgacaaaggcatattgcgcaccccaaaaaaagagattgcatatgccagctacgacaatataccaactgtcacaatgaaaagtacccgttgtgagatccaggatagttttacagaactgcgccgctggatgtgttcaagaaagacaggtgatcgagtggaggtatttttgaatgcctaa

SEQ ID NO: 22643 - DNA, 195 bp, Escherichia coli
atgcctaagtaccaaataaacgcaaccatcaaaaaaccaggtggtggccccgtgaaatggactcattacagcgacttacctatgaccgctgaagaatgcagaaaaaacttctcaaaagaaaaagaagcaggaaagtgtttttctgttgatgttcatatttcagatttcatttgtaaagaaatacatccacagtga

SEQ ID NO: 22644 - DNA, 978 bp, Escherichia coli
atgattgacgctataattacgccaatagttacatctattccgttactcttattaattttagtcgcgctgatattcgttaaatctgccgtcaaaatcgtgccgcaaggtaatgcctggacagtggaacgctttggtaaatatacccatacgctttcccccggtcttcacttcctgatcccgtttatggaccgcataggtcaacggatcaacatgatggaaaccgtcctggatgttcctaaacaggaagttatttcgaaagacaatgcaaacgtaactatcgatgctgtttgttttatccaggtcattgatgcagcgaaggcagcttatgaagtcgataatcttgcatcagctatttcaaatcttgtcatgaccaatatccgaactgtcgttggtggaatgaatctcgacgatatgctttctcaacgtgacagcatcaattctaaactgttaacggttgtcgattatgcaactgatccgtggggaattaaggtcacacgtattgaaattcgggatgttaaaccaccagaagaactgactaaggcgatgaacgcgcaaatgaaagcggaacgtactaagcgtgcccaaattctggaagcggaaggtatacgtcagtcacaaattctgaaggcggaaggggaaaaacagtctcaaatactgaaagcggaaggggaacggcaatcagcatttcttcagtctgaagcacgcgaacgtcaggcagaagcggaagctcgcgcaacaaaactggtgtcggatgcaatcgctgaaggtgatgttcagtctgttaattactttattgcgcagaaatacactgaagcactccaggcaattggcacagcatcaaacagtaaactggttatgatgccgcttgattcaagtagcctggtgagttcggttgcaggtatcagtgaactgctaaaaaacgtatcacaggatactcccaaagttgatatgaaacaggctcaacagtatttgtcttaa

SEQ ID NO: 22645 - DNA, 444 bp, Escherichia coli
atgttctggtttacgctgtttcttctttgtattgcccttgaaattataaccggaacgggatggttactcgtaatcagtcttggtgcattatcaagtgccattgttgactttttccttcctatatcacaagaagcaaatatatgcttctttgcgtcaataagcatactgacgtcgataattaagttcgtctatgacaaaaaacataagaaattagatacacccctggtgaatacaggacatacacgttttaaaggaaaagaatttactctcagtgacgatattgtgaacggcaaggggcaattacttattggtgatacattctggcctgttgagacgttacacgatgaaaactaccctgcgggaacaagagttattgttacagacatgcaaggaataactcttaaagtaatgaccatcgaagacaagagtgaaaacaaggaataa

SEQ ID NO: 22646 - DNA, 171 bp, Escherichia coli
atgcatctttcgttgttaattccgcttacaggagcagcgatgaatgcactatgtatttttattatcagacttctggataaggattttattgaagtctataaaaaaacgctaaaaaaaattactgcattacatattttattgatggtgttaagtgtcacaggaatagtatga

SEQ ID NO: 22647 - DNA, 663 bp, Escherichia coli
atgcgaaacgcaaatgaaggaatttctcttgcagctattgtagctaaagaaacaacaacaggtaaatggaatggtactggtgggggtattggtttaggtactggtggtattggcttattcatcggaggtgtttctggttctaaacaagagcagacacaaagggcaaaaaactttgaatcgcctaaagaggaagaatacagtctattaaatgtatacggttcgataataaaaattctcgtttttggcgtgctatttggtttatcttcccgtttatttacatttttatcagacactggttctgattttgctgaaccagtaacaaccaccacagccacaggaaagattcaatctattctgggtggcatggcagaaatggtaagcattttaggcaccgttgtcccttttttagtaattatcatagcaatgatctggtttctgtttttcagcagcaaacgagaaaaagaagagttaactcgcgttgaacatgaagctgctaaaacaaaactccgtatagatgtctatcaccgtttacgttacgttgaaagcgatcatgtcgtttttgacccgattacaggccgggaggttccggcagaacgggcgtgtattaataaactgattgaggcacttgttgatgaaagcaacgacatctcaaaaagaaattga

SEQ ID NO: 22648 - DNA, 213 bp, Escherichia coli
atgaaagcaacgacatctcaaaaagaaattgacgaacttctgaatgcaataaaaacaggacattcaaaatttattctatcaatacccgtacatactacccatccaatggcccataaaataatgaagccttgcttcaggagaacaggaccgcttctgtattcagatagtatgaggaaaattcaatgcgaaacgcaaatgaaggtgtttctctaa

SEQ ID NO: 22649 - DNA, 594 bp, Escherichia coli
atgcgaaacgcaaatgaaggtgtttctctaacagaggctatattagccattagaggtatagataaatacgcgtcatacaaaaccataaaaacaataaaaaccataataataactatagttcttattatccttgcattagctttttttagccttgtatcaagccttgtatcagcagcaggaagagttgctgtagctatacaggcagtatgctacctgtgcctctgtatggcaattatcatcatggttgtcatcaaaataagttctttcatcgacgaaaggcgagaaaaattagaattaaaacgtgcagagttggataaaattaagataaaagctcgtcaaaaaatctacaaacgcctgcgttacgttgaaaatgaccatatcgtttttgatccggttacaggccgggaagttccggcaaaatgggcgtgtattcataaagtcattgatgaaattatcgccgataaaagcaacaacgtgatcatgttcgacccggttactggccgggaatttctcgccgatggatgcaacaatgtgaagaaggtagcagcccccctgaaggatacgatgaaatgtacagaagaaaacatcacctaa

SEQ ID NO: 22650 - DNA, 258 bp, Escherichia coli
atgaaaaaaaacgacgatttaatcactttaccatctcataacagccacgctctcgattacatcattaaaaaagcgtttacacctcgcaaaaccaaaacatcgacagcgacccacaacgtttatagttacaataaagaagaatccacattaaatttccaaaaaattggagaagcaatttttttcggcacagacctggtaattaagctgaagccaaatattagtgcctctggtgaactcttcatctgccagaaggactaa

SEQ ID NO: 22651 - DNA, 996 bp, Escherichia coli
atgtacattgtttctaaaactcttgagctagtaacaaccattgttgaatccacagcggcgacgaacgccgctaaagtcgcacaagcgatatctcctacattctttgctgccataaccttatacgttatttatctaatatatgaaatcacgtatgcccagcgtgatgtcctaatgaacgaggtaactaaaaatatcggcgcattcgccctggttggcgcgttcacttattcagcgccttattacagccagtttgttattccttttgtcatgcacgcaggttccgacctttctgctgctgttactggtggttcaggaactgcaaccactgttgataacttatgggatactctatctacgagtttaaatgactttaagaagacaaatcttgaaattcttgcatggactgacatcacagagaaattatatatatatctaatttggggggttggatatgttggggggcttttacttatttattacaccgctgtatttctagcgctatcaacattcatggttggcattctcttatccgccggaatattatttatctgcttttctctatttgcttcaacaagaaatatgtttacagcatgggtggggagttgtcttaactacattctacttaatcttttttacagcatatctttcagtttcgttatcggttttattgagcaaaccgtcccgtcaagtggaaatataaccctcacaacagtggttaatttctttatgatcattgttatatctatattccttgttgagcaagtaggtactctctgctcaactcttactggcggggtaggtataaatggccttacatcagccgctaatggctttgggggtaaggttgcatctggttttatgcgagcatcaggactccgatctttcactaatggatttgccagcaaaatgccaaatccaatctttaatgcaggaagtcgttctgcatcagcattagttcagggattaaaccgtggaagtaaacttaaagcggggtga

SEQ ID NO: 22652 - DNA, 642 bp, Escherichia coli
atgaaagataaagtattatcatttctctttgctggaataattaccgtaacatcaccatcaatctttgcatctggtattccagtagtagacgttacagcgatagctaaaacagttgaagaagggctaaatcgtgccgctgaagcggcaagacagcttgagcaactcaagcaacaatatgaacagaccataagatacgctgaagaacagaagaaaagactcgaaggcttcactgatttcagtaacggctttgatagcgcatccagctatatgaaggattctctatcaacaataacaaatagtgcaaaatcagatcttagctctttgcgatcgcaatatgacttatcaagtaacgttgcagaaacgcaaaaaaaatatgatgcaatcctggctaagatcaaattctatgaaaacttcaacaatgaaatgcaggaaagggctaagagattaaccacgttacagaaggagttcgcgtcagcagatactccgcaaaaaaaagcagacttatctaaccaattgaatacagaaaaattgacaatggagctacaattgaagcaatatgatattgcggagagacagcttgaagctgagcaaaaagcccaacatcaagctatagtaaatcaattgatggataggttaacttaa

SEQ ID NO: 22653 - DNA, 255 bp, Escherichia coli
atgattaacttacgcagcgcaattatccctctattaatggtctcaacaacattaatactttctgggtgtaaagaaaaagtttacgctgttgaatactattcaagcaacccagccgaagcagctaaaaccatcgaacagtgcagaaaaggcgaaatcacagaccagaattgcgataatgctcgtgctgcattagaacaagctcaaaaagaagagcacaagaagaaagtgcgggatctaatggaacgattagattaa

SEQ ID NO: 22654 - DNA, 810 bp, Escherichia coli
atgaatgagccattaaaggcggaattgcactctttgtttagttttgatatctatcctggtgcatcatcagaacagaatactggagttaagttggctatggcgcggttttatttaaatgttccgtttgaagaaaagaatttggctaaacaaaaaggggcgcaatgggaccaagaacaacggaaatggtttgttccacaggggaaaaatccaatttattttattcggtggataaaagaattaaatgaacatgattacaatgttttttcgcaacgtttttatattgcggaaagttaccagtcttgttggcgttgtaagaaaacaactcctgtgtttggtatttttttacctcgttggtataagtatagagacgttatttggggagttgatcctgccgaatgggaagattgtatattagatgaatggtatgaaacatcctcccctaagggtatggagtattttgattcaaagaaaaatatgatttatcggtggttaaccagtagagtatggtggactgatttaacgaaaattgaaataatttcaacctctgctctctcaaggattaatgagtattcaaaattatattatccatcccatagcaaaacagcaaaaatgaactattacgcgaatcattgttgtcattgtaacgcaatgcaaggtgattttatgatgtttaatgagccagggggcgtgttcttccctgtaacatatgaacaggcggagaaaataagattccatgaagtcaatgaaacaatatttgccaaagcaagttatagtttaatacccgaagccggaggtttcatagatctttaa

SEQ ID NO: 22655 - DNA, 636 bp, Escherichia coli
atgaaatccatcattttatcgatggttgccgccaccgcattactgtcaggctgtgcggatagcaaaacacaaccagtacctgagtcaccgttaaccaaacatgaccaccagataacgttgaaaattgataccgtgcgaacagacctgccggacagttctcctgtttgtttgaatggtatgaatatatacgaaagtctgagcgagcggcatccaggcttgtttgccaaaaatcagaacgtgattttccgtagtgcattctttgatgacggtcaggcgatatcctccgaaacaatccgcaaaataatgcagagtaccccgtgcgttgaatcacaaacaacatctgccggaagctgggaacctgccacggaactgatcccccgtcaggcaatatccggtgacactacactggctgaaaaagatcggactgctggcttcacaatgcggatagcgccggagattgagcgtggaaatttccacctgcaactcacaaccactgacccgatacggaaacagactgtcgagcagaatattttactcaaaccggaccagccccttatcgtgagtggttttactggagttaatgctgatagccaaagtgagaaccggattgtcatcattacgccacacgtgcgttga

SEQ ID NO: 22656 - DNA, 393 bp, Escherichia coli
atgaaatccaccattttattgatggttgccgccaccgcagcattacgaccaggctgcgcagatagtagaacacaccccgtgcctgagacaccgttaagcaaaatcatgttatcgatgattgccgcaagtgctatcgcactctctgcccccgtatatgcgtctgatccgtgtgcttccgttctttgtctgtacggtaaagctatcggtagcggcggcgggagcgaatgcaaaagcgccgaaaaggacttctttaatatcatcaaaaagaaaaagggatctattcgctggagcaaaacctttgatgcccgaaaagcgtttcttaatcaatgcacgaccgcagaccctgcggcgatctcaaaaatcatgagtaagttcggacgttcctggggttaa

SEQ ID NO: 22657 - DNA, 1236 bp, Escherichia coli
atgaaaaagctcattattattcccaccacattattgctgaatgcgtgttcccatgcccctgaacccgcacaggcaaaaggaggttggtatgaactgaataccacaattgagcaggtaagagcagacacatactataacggggtgatccttcagcagcccgtgtcacagccaaacagcactgttcaatacagcaatgataattatctcaaaaaggaagccataaacgtaactcccgcgcctcgtattgcagaaaccgtaaaaccacgttctgagcaatcagcgacagcgccaaaaaaccagggcagcaataatagttttctgaagccgacaacaaacagcataacttcatctggtgagataaaaacagcagccaaaggagcaactgaacagcattctgaacaaccagcactccctcccgcaaagccaatcagtagcaacaaccatcaggcacaaacggcacaaaatactgatcagcagacaaaaccgcgtcctgaacaaccaccgctaatgtcaaaaagcggttttctgaaaaaaaacgctaacaacgctgttccggccaccacgcttacaggcccatcaacacctgaaaagcaaatttactttgttcgccatgatggtaaaggctcgctgcaaaaagcagtaaaagaaattgtcccatcggactggacggctgaaatatccccggaggtaacgaaaactttccgtcgcacgatatcctggcagggcaacgatcaatggccttatgtcctggataaaatgcttcgcaactacggtctgacggtaattaagaacaccgaaaaaagacatcttctgattgattttcaacaacagaaagggaaaacatcacaaaaagcacctgtatctcctgacaaaacccctgcatctcctgtcaggacaccagtttcctctgacaagttacctcaaaaaccgctaacgcctgtcaccgttccgcaaaaacagacagaaaaactcacctggaatcttaaaaaaggttcgacgctgcgggatggcctcacagaatgggcgtcaagttcgccgtgtggtaattcaacctggaatcttgtatgggatactcctgtgaactacagaatagatgctcctcttattttccggggaaactttgaatctgcattaaaagatacgctgatgctttatctttcagcagataaaccgttatacgcattcaggaatattgcacaatgcgtaatcacaattaaagacacacaacaggagtaa

SEQ ID NO: 22658 - DNA, 438 bp, Escherichia coli
atgggttggttcttcagcttgctcctgatattcctgtcaataggcagttactatctgacagataacaataaccaaaccatacagcgaatgaagttgcttcctgcaaaacaggaagcaattgaatttgtccatttcgcaaatgttatcaatgactatctttataaatatccagacaaacgtaattcaggaggaacgttaacatctgagcaaatcggtataacacccgtttatgatattcatcatattatttacggtaagcgagtttatatctggtctgccgatacagaaggtctgatgtctgctttgcagcagcaaacaaaacattcagcaatgttaggaagagtaaaaaataagaagattgtcgataatcaggggaatgatatgggcgttcccgttccttcctcaattccagaagaggctattgtactcattaactaa

SEQ ID NO: 22659 - DNA, 399 bp, Escherichia coli
atgcaggataatgatgatgtcagcgagcttgatattgccactcgtgaagtccttatcttacgatgcaatcttattcagcttgcttctgaatatataaaaataaatccccttaaaaacaccagaatctacacagatttaattcatcgttcagcagatgttatcaaaaatatcgaacaaggtaacatccagaataaacataattatctgtcacaggatgtaaaacatacgcttgttttatacgacctgtacaaatcagactttgaacaatgtccgggggcaaaatcccttatacctgtcagggaaaaaattgtctcgctgaaagaacttctttccggcgctaatgagctggacagtatcgttcgtcgcccccgcaggaaaaaacgttcttcacgaatttaa

SEQ ID NO: 22660 - DNA, 585 bp, Escherichia coli
atgcagttatcagcggctgttctggcagcactgataagtcagtgtgcccctgatgtatcacccgatacgatgaatgccctgattatgactgaatcaggggctaatccatatgtaatagcgaatgtttctgacggaacaagtaagtattttaaagatgaaaaaggagctattgaatatgcagaaaaattaacagcagaaaataaaaggtttagtgcaggtctgacacagatatacagcaaaaatttcccatcactcaatctgactaataaaacagtttttgacccgtgtacaaatataaaagcaggagcggcagtcctgacggacaattatctgagacaaaaggagggtagtagtaatcaaaaaattctccgcgctttatctttgtattattcgggtaacgaatcaacaggatttattaaagaaaagaaatttaacaacacttcttatctggaacgggttattcgtaacgcgaataactatatcgtgccatcaatccgtgaaaaaactgatgaatcagaaataaaacccccgaatgatgaagagaaaacatcaccggactgggatgtttttggagattttagttaa

SEQ ID NO: 22661 - DNA, 291 bp, Escherichia coli
atgaaagtcaaatcaactttgcagtattttatcctggcgtttttcctgtcactaaccgcctccgttgcctatgcaggtggactcgacaccgcaacaaataccatgacagaacttaagacatgggcatttggctttggtggtgtttgtgctttgtgttacctgatctataacatcatcatggcattcatggagaagaaaagctggtctgatgttggaatggcgcttatctattgttccctcgctggcggtgcactttacgccgggaactgggcgctggaactcttcaaataa

SEQ ID NO: 22662 - DNA, 285 bp, Escherichia coli
atgacttataacgggtttaaccgtcctgcgttagtttctggtatacccttaatgttgttattgttcacggcttttttcgctgttctgacaggcttccccgctattttcctttggggtataaaagggataattattcctgtcatatgtgcgctgtttctttttatagtaaaactggcctgtgaaaatgactcaaacgcactaagagtcatccgtttaaaccttatggggcttttgttaaaaatccgccacagagatttaattattggttattcatctgtcaggtaa

SEQ ID NO: 22663 - DNA, 2358 bp, Escherichia coli
atgcacaaaatcaaattaaaaaacagtgacaatatggatgttgctcgtgaatatcccgattatcgcttccatataacagacagtattatctttacttctgacaggaaaatgctggcttcacttgttgtagcaggcattccatttgagacagagaacgataatgttcttacaaatttatttaacagcgttaaaaacttcctgattgggttaggaaaggaaggcgacctgtatttatggactcatcttatcaaaaaaagaataaccattgatggagaatggaattttgacaatgcttttttaagcaggttttcaaaaaaataccttgctctgttcacatccagcgcattctacaaatcaacatggtatttaacatttgggattccctacgatgatgttgataccggaatcgagcgcatgaatgaaatgacacaacaggcgcaaaaagcacttcagccatttaacgcttctgttttatcagttcacaatacttatattagtgaggtggcagactatttatcactattgctaaatacagaacataacatgattcctttatcatccactcccttatcatccagtatttgtgattctgaatggtattttggtgctgatgttcttgaactgcgtaacaacgaatcggatagtaaaaagtttgcaacgaattatattttgaaggatttccctatagaaacgacccccggacaatgggattttcttctcaagcaaccctatgaatttattcttactcaatcgtttatttttgaatcacccacaaaaaccctgaagaacattgattcgcaattaaacaaactgcaatcagctaatgatgcagccaaaacacaacaggaagaactcgaagctggtaaagaagcggtcgcagccggaattacgttgtttggttcactacactgcgcattaacggtattcggtgatgcaccagatcaggccagaagcaatggtataaagctctctgctgagtttattacttcgggtaagggattccgcttcagtcgcgcctcactcgcatcaccttttgtttttttcagtcatatgccgctgaataagaggcgtccactggatacccgaagaacaataaccaacctggcctgtctgatgtcttttcacaattattcctccgggaaaaaatcaggcaatcctattggtgatgggtccgccataatgccgttgaaaacggtgtctgacagcatttactggttcaatacgcattacagcccaccggaaaaaaatgttaccggacaaaaaattgccgggcatggaatgattcttggcgcaacaggcacagggaaaacaacatttgaagcagcagccagcggttttcttcaacgctttgaccctttaatgtttgttgtggatttcaaccgttctactgagctttttgtccgtgcatacggaggaagctatttcacgttgcaggaaggcatttataccggctgcaatccgtggcaactggcagaaggcccggaatctcccgtctggcacagacttctcgcatttctgaaacgctggacacaggttctggcacgagacaaccagggcaacccctgttctgatgaacatggcattgaattaaacgctgccgtggaaagcattatgcgaatgcctgtcgaagaacgccggacagcccttcttctcgatatagtcagtcctgaacttcagacgcgtctcgccaaatggtgcgacaacggcgaatatgcctgggcggtggattccccccggaataccttcaatccactgcatcataaaaaagtgggatttgatacaaccgttgtcctggacacaaaaaacggtattcatcctgcctgtgaacctttactcgcggtcctgtttttctacaaagaaatcatgcaacgcggcggcaatctgatgctctccattattgaagagttctggatgccagcaaactttcccatgacacaaagcatgattaaaagcgcactgaaagcggggcgcatgaaaggtgaaatgatgtggttaacatcacagtccccggaagacgccataaactgcgcaatttttgcggcgctggtacaacaaaccgcaacgaaaattctcctgcccaatcccgatgcaaaatgggaaggatataaagaaattgggcttactgaaaaagagtttgaaaaactcaaagagctgacgaaggagtcaaggaccatgctcatcaagcaatctggctcttctgttttcgccaaaatggatttgtttggattcgatgagtttatccccgtgctttctggctctgaaactggcctgtctatttttgatgagattattgctgaaaaaggagatgtagctcctgatatctggataccagaactcctgaaacgcctgaacggttaa

SEQ ID NO: 22664 - DNA, 135 bp, Escherichia coli
atgaaaatccccctcataattgcctccgcgctattaattagtgcatgttctcacacccccaatcctgtgcagaaaaaagggggatggtttgagttaaacacagcaattgaacagatcaaagcaggtgattattaa

SEQ ID NO: 22665 - DNA, 735 bp, Escherichia coli
atggaaaacacaaactattatgaacattcaaaaaaagaagccaccaaaaagaaatttgaagaaaaaaacgaaaaaaaggattatttcaaggccatacgtgactttgagcgcagtgaaattgaaatcataaagaaaaaggcaaaaacatttaccattctcgccattggtgaatttgttgtaatttgcattcttggtttcgcaatagcctcccttgctccattaaaaaccgctgtaccgttccttgtgcgagtggataacagcactggatatactgatattgcccctcaattatctgatgctaaggaaagttatcaggatgttgagactaaatatttcctgtcaaaatatctcattaactatgaagcatacgactggcagaccatccaggaacaggccgatacagtaaaaacaatgtcttcccaaaaggtgttttcagcttatgacaccatgattcgtgctgattcctcaccactgaacattctgaaaaacaactacaaaattaaagtccagattaattcagtaatccttctaaggaaggatatggcgcaggtgcgtttcaaaaaaatggtactggatttatctggtaaacccgcccccggatacagagcaacagagtggatttcgacgatttcttttgactgggataaagatatcaaaacagaaaaagagcgccttgtgaatccgctgggactgcaagttctgagctaccaacctgatccagaggttataaaatga

SEQ ID NO: 22666 - DNA, 771 bp, Escherichia coli
atgatgcttaaacgcactactgcgatagttcttttgtcgatgctacaagtacctggtgctttagcagctatgtacggcacaccatcggaacgagacgggcgtattcagaccgtagattataacgagcaggatgtatttaatgtgcgcgtaaaagcaggcgcacaaacaacaattaagttcggacaagacgaaacaataaaagatgtcggaattggtgatccagaagcctggtcagtatcggtcagggacaacactctgtttctgcgtccaaaagcagaagaaccggatacaaacgttaccgttcagaccaataagcatatatatcctctttacctgatatcaaccacgaaacaacccacgtatattctgcgttttaattatccgaaaccaccgtcagctaccgtaatgactgaaaagccatttccatgcactgatggtggaataattaatggtcattatcaactcaagggggataaatcaattttcccttatcaggtatgggataatggcgaatttacatgcatgagatggactaataaacaggaaattccggtcctttatcgtgttgatgccgatggaaatgaacatctggttaacggagacagaaataaaaacacaatggtttactatgacgtggctgaaaatctccgtttgcgcctgggtgatcaggttgcagatatcagaacatcatcaatcgttaatcgtccgtggaataaaaaaggtacgtcaaacggaaaaacacgagtagagaagttcagctatgaaaaataa

SEQ ID NO: 22667 - DNA, 1140 bp, Escherichia coli
atgaaaaataaagatgatgaaaaaaataatgacgcgggaaatcgcggaattatcgaagtaaaaggtaaagcagcaccaaaaaaaatattaatcctcatcatattactgattgccgcgttatttgtgatcattatcttgtttaaagttctttcacgagaacaggtcgttcagcaaacacctcttgagaagtctgacgagacactggtcacaaataccaacaatggcgtttcactgacaacaatgatgaaaaacatcgaagaaaaggaaaaactcgatgccgctaaccgcaggaaagcacaggaggatcaagaacagaaacaggcagacaatgccccgtcagcgccagcatcacaaaaggccgatcaaacagccgtcaatgtgatagccaacggcactccccaaaccgccagtggagatccaaaccaaccacaaccattgccaaaatccgtccgacaactgatgggcgacacaatggtgaagatcgacaatcaggaaccaggcgaaaaaaaccaggaaagagatgatttacagggcagtcagtacgcagacggaaaggtatcccctgtgctgaaccgccgatatctgttatctgcgggaacagcattatcctgtgtgctcaaaacgaaaatcgtaacctcttatcccggtatcacaatgtgtcagttaacacgagacgtctggtcggataacggcgaagtgcttcttgcccgtaaaggagcattactgatcggggagcagaataaagtcatgacacagggagtagcccgtgtgttcgttaactggacaacgctcaaagatgaaaatgtcaatgtgcgcattggcgcacttggcactgacagtctgggcgcttccggccttcctgcatgggtcgataatcattttggtcagcgttttggtggtgcattgctgctgtcattacttggtgatggtttagatattctgaaaaacagcacgcaacaaacaggctcaaacagcaatatcacctacgaaaacacatctgacgcaacaaaagaaatggcaaaaacaacgctggacaatacgataaatattccccccacggcatatattaatcaggggactgtattgtctgttattgttccgcgaaatatcgacttttcatccgtatatgaacttcagtaa

SEQ ID NO: 22668 - DNA, 1056 bp, Escherichia coli
atgaataacatcagagataccagtaatacatcacaaccacgagataacagtaaaaccgcaagacgatatctggatatgacgggtatccagtctgttcttaatattgaacatgtcacagaaatatctgtgaataaaccaggaacaatatggtttgaagggaaaaatggctgggaatctaaagatgcgccagacgcgacttttgataatttaatgacacttgccaaaactctgacgaacttatcaaagataaaaataccacttagccatgataatcccattgcatcggtagttcttcccggtggggaacgtggacaaatcatcattccacctgcaacagaaaataacagcgttgtgatatctatccgtaagccatcattaacgcgctttactatagatgattatgtccgaacagggcgttttgataatgtcaggattgcgacgaaacacgaagccatcctgactgaacggcaacgctacctgtatgaattatcccggcgtccagatggtcaatctaaagctcaatttttaagagaggcagttaaagaccgtcttaattttttaatcgtcggtgggactggctccggtaagacaactatagcaaaggcaattgcagatatctttccacctgaacggcgttatataaccgttgaagatgtaccggaaatgtctctgccgctgcatccaaaccatatccggcttttctacaaaaaaaataccgttgaagcgaaggaaatcattgaagcgtgtatgcgattaaagccagatcacatctttcttgctgaacttaggggtaacgaagcatggagttatctggaggcgcttaatacagggcatgaaggctcaatcagtaccattcatgctaataatacttatgcctcattttcacgactggcaagtattgtaaaacaatctgatgttggtatgactgttgatatggacctcatcatgcgcacgataaaaacatcaattgatgtcattctttttttcaaccataccagaatgactgaactgtattacgaacccgaagaaaaaaatcgctttttgagcacaatgtaa

SEQ ID NO: 22669 - DNA, 1959 bp, Escherichia coli
atggatgcaaaaaagacgggggggttaattctcttcctgttactgcttcttgtgggtgtgcttatagcctcaaactatctcggtggatacacagcattaagatattcatccgttgatatttctttgctcaagtgggatacattccattctgtaatctcaacattttctggcaacccacaatataaaaaactcgtttttatggcatggtttggattcagcgttccattaatattctttgccatattcatgttaattgtcgtgattgggattatgcctaaaaaagtcatctacggtgacgcccggctcgcaactgatatggacctgagtaaatcaggttttttcccggataaaaaatcaccttacaaacatccaccaatactcatcggtaaaatgttcaaggggagatacaaaaaacaatttatttatttcgccggacaacaatttttaattctttatgccccgacacgttctggtaaaggggtggggattgttatccccaactgcgtaaactatccaggaagtatggtcatactggatatcaaacttgaaaactggtttttatcagccggattcaggcaaaaagaattagggcaagaatgctttctctttgcgcccgccggatacgcggaaactatcgaccaggcaattaaaggacagatacgctctcaccgctggaaccctctggattgcgtcagtcgcagtgatttacttcgtgaaacggacctggcaaaaattgccgcaatccttatcccggcaagtgatgatcctatatggtctgattctgcacgaaacctttttgtcgggttaggactttacctgctggacaaggagcgttttcacctggaacagaaagccaaaggtcataatgtaccggacgttcttgtttccatcagcgccatactgaaaacgtcggttcccgatggcggcaaggatctcgccgcatggatgggacaggaaattgaaaaccgtagctggattagcgataaaacaaaatcattcttctttaagttcatgtcagcaccagatcgcacaaggggaagtatagaaacaaacttttcatcaccgctgagcatcttcagcaaccctattactgctgaggcgacgaatttcagtgattttgatatccgggatattcgtaaaaagcccatgtcaatttatcttggtctgacaccggatgctttaatcactcatgagaaaattgtaaaccttttcttctcattactggttaatgaaaactgtcgtgaactaccggaacacaacccggacctgaaataccagtgtcttattctcctggatgaatttacatcaatgggtaaatcggaggtcattgaacgcgctgttggttttacagcaggttataaccttcgctttatgttcattcttcagaatgaaggacaagggcaaaaaagcgatatgtacggtcaggaaggatggaccacattcactgaaaacagtgctgttgtgctttactatccgccgaaatcaaaaaatgctctggctaagaagatttcagaagagattggggtgcgtgatatgaaaatatccaaacgctcaatttccagtggtggtggtaagggaggaagttcacgtacacggaatgatgatgtaatagagcgcccggttcttcttcctgaagaaattgtgtctctccgggataagaagaataaagccagaaatattgcaatccgtgaaattataaccagtgaatttagccgaccatttattgccaacaaaattatctggtttgaagaaccagagtttaaacgccgcgtggatatcgcccgtaacaatcatgttgacattccaaacctgtttacacaagaagtcatggatgaaatagcaaaaattgcagaaatttatctccctaaagctggaggaaaaaaagtcatggttgccggaggcaatgtgattactaatccagaccttgataatcacgataaaacagacgtatctgaataa

SEQ ID NO: 22670 - DNA, 1644 bp, Escherichia coli
atgaataaaaaattgctttgtttattaatatcctcttttttattatcaggctgtgcaaacttcaaaaaaatcaatgctaatgaacttgcagccgaaagagacgcacaaaaagcgactgaatacgcgaaaaaaattcgtaataacccggttatccaggactcaacaaaacaatggattaatacaacgccaattattgaaaagcaggtaaagcaatcagcgccgccctgcccgattgtgattaatactcgttcagatattgagctacgccagatcgcacaacgaatcacacaaacctgtcatatcccggtacgaatcagcgccgatgtctggacctatctgaacggtacaggcactggctcaacacaacaaatgacaggctcaattccagcacctgatgcaaatggaatggttcctctggcgtcagtaggcagtcagccagtaaaagtctcttctggcggtacatcactccctgaactgaatatctccgggcttcctgccctactgcaaaccgtatcttcacggctgggaatatcctggaaatacgataaaggtcgtatcacattcttctatctggaaacgcgctcattcccgattacatatatggacagcaatgtggcatacaactcaaaagttgtgagcggcacaatgtcttccagtggcagtaccggctctaccagttctggcggtatgactggcgacgcatcaaatacgcaaactacaaccgtagaaatgaaatcatcgctgtacaacgacctgaaaagcgaagtttcctcaatgctgacaccaggtacagggcgcatgtatctgtccacaggttcactgacagtaacagataccccggatgtactggacagcgttcaggagattgtgaacaagcgcaataatgaaatgagtcgtcaggttgtgctgaacgttgaaatcctgagtatcaagaaatcaagccaggaacaggcgggaatcgactggaacgcagtatttaatgatggtcatcttggtctgagtcttggtggctcatttggtgatgccgccgagaatgttattaccagtggtgtatccatcgtggacggtaagctggctggctcaaaagcatttctgaaagccctgtcgtcacaaggcagcgtcagtgtcgtaacgcaaaactccgctgtgactaaaaacctgacgcctgtccctatgcaaattgccaatcagcagggcttcattgaaagtgtcacaaccgattctaccgccaatgtgggatcatccacgtcactgaatgcggcaacaataacgaccggattcaatatgactctgcttccatacattcagccggattcacaaaacctgcaattgctgttctcaatgagtctgtctgacaaacctacttttgaggtgttcgaaagtggcggcagtaaagcacaaacaccgaatgtggatttgaaaacaattaatcagactattgatctgaaatcaggccagacagtcattctgagtggattccagcaatcaaaccggaaaaccagtaaacaaggtgtaataaccccctccttctttggacttgggggtggcgttaacagcgaagacggcgacacgattctggtcgttttgattacaccaaatgtgcttaattccggctccagtgcagtaataaaaaatgtgaactaa

SEQ ID NO: 22671 - DNA, 1311 bp, Escherichia coli
ttgtctgagaataatcagaataaccggaatttcacttcggttattaaaaacaagcgtgcttttttctccggtctggactggaaaacgcttccttcagaagaaaagaatgcgcgtacattcgcaagaaaaaacgacgctgaatattttctctcctgtcagtatcaggattcagaaaatgaaaccaaaacgatggtggcatttatcagaaaagaggatcttcccacaggggcgtcctcattctggtcactggcactgatgataaaacccctcatcgaacctgacggatacgctatctgcgaactcggtgatctttatggctttgtttcctgcgtcaataacgttctcgtcaacgatgttgtaggtaacaaaagtcagatcatgagtgctctgacaacatttcttgagtttaatgaaacaccagaacccggctggaaactataccagcctgaatcatgggatatcagccaggcactcccctcactcactctgtctgcgttgattgacgtaaaaaaaccgccgaaagaggcggcatttactcgcgtatcccgaaaacgtcagttcatgatttatggcggaagtgccattctggccatactgctctggaacgggatcaccatgtaccaggaataccgggaaaaagaagctgcggcagaagctgcacgccttcgtctggcaaaagaaatggcagacaaacaggcaatacagattgccccaccgtggcaacatttacctgaaataaaaccatttattgataaatgcattgataaatgggatgcactgcccttatcgatcgccggatggcgttttgaccttgctgaatgcagcacatccggtaatgacgggctgttacgcacatcatataaggaactgagcggcgttacggtcgaggacttcagcacacggatacgagaaatattccaggggacaaccacagcaacttttgtattgccagaaggcagcgccgggggattttctcttcctgtcagttttgacgtttcgcctgatccaattaccccggacacattgccacaggcaacagatattcaggaacgcctgacaacatttgcacaaaaaatgaggttaaaactcacctggcaggaaattgaaaacacaaaaacagatgaagaaggccgtccaataattctcccgtggaacgagtatgaattaatgattcagaccagcaccccgccttcaatacttttcgctaactttcatgaacctgccgttcgcttccagtatgcaggaataaaactggaagaaggaagactgaattatgagattaaaggtgcattctatgttaaaaataattaa

SEQ ID NO: 22672 - DNA, 516 bp, Escherichia coli
atgagattaaaggtgcattctatgttaaaaataattaaaccaacgattatttctgtctgttttttcagttcacttgcttacgcaacagaatctgaaagcacaccaaaagacgaaataaaatattcatctccgaccattttacaggtagagcagattcaggctgaaacggtaatttacgaagcaaagctggcgcgtcagaaggctgtcagtgaattacgtaatcttgatttgaatggtgtagcgtccgcaacgccagcaataacgccctcttccgggtattcttctcttgcagataccgatatacctgcgcaacgtgtagccgctaaatcacttcgtgttattgaaatatttggtacaccacaacaaatgtcagcacgaatttctctcatggacgggtcagtaactgatgtcaaggtcgggcaaagtattccaggtacttcttataaggtggcatcaatcactggtaatggcgtctggattcagaatggtacagagaaacgccagcttattctttaa

SEQ ID NO: 22673 - DNA, 1539 bp, Escherichia coli
atgtttttttctgacgcagactatcccggaaaagatatttctgatgttgtatacgtcagtatatctgaaaaagacgataaacctgttcatgtttatatcgctgataacagtaaaggacagcgtgctgttcaggcttatattggcactctgaatgttaaatatcccggaaaggtaaatataacctggaccactcttgatgttatcgcatcccgttaccaggacagcgaaagaaggtctgattcaaactcatcacaacacttaaacagcaaccaggaaaaggttattagctacctggcgaaagcaaacaacctgggaagttccgatttgcacatcacacctggtcgggacggttccgagttcacttatgtcgaagcacgcgtgcatggggaactggaaattctggatgtcatcccgcgtaaagaagggctggaattgctgggtgctgcctattctggaatgagcgatgttatcaaaggtacgcagtttgacccagcaataccgcaggatgcacgtatcgcagagaattttctgaagcctgtaaatctttttggggcgcgctattcgcattatccgtgcgtgggtggtgtgtacgcggtcttccgcctgattaaagatgacagcgaggatattcccactttcgaagaacttggctacatgccacaacaaatccagacaatcaggcgaatgttacaacgcccggaaggaattatcgttttatccggccctacagggtccggtaagtcaacgactctgagaacggcttcagaagcctatctgagcacgtttggtttcaaccataacgataatatgcgtctcccccgaaaacgccttttcaccattgaatcaccgccggagggccgcattcccggcgcaatacagacggcagtcagggattccgtcgatggctgggttgacgcgattaaatccgctatgcgacttgatccagacgcgatactgaacggcgaaattcgtgatcacgcatcggcattagcagcaatcaaagcctcgatgacaggccaccttctgttgacgaccttacacgccaacgatgccctgaatattattgagcgccttgaaatggagaatattcaagccaggctgattgcagatcctcttctgtttatcggtctgctgagtcaacggctggtacaaaaactctgtccttactgtaagcgcacttatgctgaaatggcagacaaactgagtacagaagaacggaaactcattgaggaaaattgcctgccggaacaggtccggttgcgcaatcttgacggttgcgagcactgttataaaggcgtaacgggaaggacggttatagcagaagtcgtctcacccgacgcacgtttttttcagttatatcgtcagtccgggcgtctggaagcaaaatcatactggcactatgaacttggaggaattacccgtaatcagcacttattacacctgattaatcatggcctggtagatccgctgtccgcacacttcatatcccccattgacgaagataaatactcaatgctcccggaggggacatggcgataa

SEQ ID NO: 22674 - DNA, 1110 bp, Escherichia coli
atggcgataaaagatatatttgagaaactcaattcgatagaaattgatttctctggaatatcccactggctggcaaaatacacattcaggtattccagaataagtttatatgaagatttatctggaatgttaaatgatggcataaatgtaaagcgtgctcttacacacctgattgatgtagaaacagactacgggaagaaaacggggtcttctgcaacctactatatttgttgtgagtgccttaatgcactgaataacacaggggcaatatcttcagcattaaaaaaatatataaaggaggatgaatatcaactgatatccagcggtgaaattcgcggcgaccttgcgggagggttagttcaggccataaaaattgtcagaagtcgttctgaaatgacaatgactcttgttatgtcgatgatttatccatccgtactggtttttggttgtctggcaaacatgtatatggtccacgataccataacacctgttttcctttctctcgcaccgaaagagcgctggacaagttctatgcgattactgacagatacgtctggtttcctgatagaaaacggaacgtatattctctgcttctgcatcgtgctgtttttcctgatcagatattcgcttgcgcgttatacaggaccgggccgtcagtatcttgattacattcccccctggtcactttataaaacatttaatggtgtaagttttctcttcaacatggcctccatgttaagtattgatattcccgttgcaaaagcactggaaaggctggagaaaaacagcactcaaaacagatggctactcgaacgaataaaagaaatcaggagatatgttttacttggacagtcacttgcaatggcaatgaaaagttgcggttatgacttcccatcgaaattatgcattaacaaactattacttcattctgaaaatgctgacaatgcattgatgatgtctaactatgctgataaatggctggaggaagcaaaaggaaaagtcaaatcaacaggagtctggataactgtagtatccgcattaattgttttcgcatttattgtaatgatgattactgctctctacgatgtcagtaacgtcctgcaacactaa

SEQ ID NO: 22675 - DNA, 558 bp, Escherichia coli
atgtcttctattaatattttaaatatgcgttctgttttttcttctctttctgcacgccgtaaaaaagaacaggacaaaggggcaacactgatggaagtgttattggttgttggtgttattgttgtacttgcagcaagtgcatataaactctattcaatggtgcaatccaacattcaatcatccaatgaacaaaacaatgtcctgacagtgattgccaacatgaaatcactgaaattccaggggcgttatactgacagtaactatattaagactctctacgcgcaaggattactgccatccgatatgatcgcagatacaactggcgcaagcgcgaaaaacccgtggggcggctccgttacaatcaccacctcttcggataaatactccttcaatgttgtagaggccaatgtcccacagaaaaactgcatggcaatggtaaacgccctgcgttcttccagcgcaatctccaaaattaacaacacttccacatcaaccgtcagtgcagcaactgtttgcgcatctgacagcaatacgctgaccttcagcactgattcctga

SEQ ID NO: 22676 - DNA, 483 bp, Escherichia coli
gtgcgttctgttctttatatcctgctatcatgtatttcatcattaatcttttcattgcaacccgcatattcagcgacaacgacccgatttgatgcctgctttgcacaagccgggcaacgttacctgattgaccccctgcttctgaaaagcattgccactgtagaaagttcactcataccagaccggataaatcacaacaaagaaaaaggaaaaatattaagcaccgattacggactaatgcaaattaattcatcacacatccctaacctgaaaaaacttggcgtaataaaagacaaatcagagcttattgataacccctgtctcaatatacaaattggcgcgtggattctggcaacacattttcagaagtgtggcataaactggagttgtcttggcagttataacgctggttttaaagaaagtaacgaacagaaaagaatcaaatacgcacgctatgtctacaataaatacatggtaaggtaa

SEQ ID NO: 22677 - DNA, 636 bp, Escherichia coli
atgctaaacagcatatttaatacggcgatactttgctgtgcaaatatcgtctgtcaatgctacgcctacaatgaagttaaattccgcttaaataaacttaatgtatcttataaaaccggaacagagaaatattactgtctgatactgacaacgcttgccgttctgtatctttcattaaatcagctatcactgattcaatccataatagtgattgttttctatgcattccttacattaatgacctgtatagaccttctttcatttctactaccacgcctttataccgtgacatttatcttctccggcctgttatatcagacatggaataacaatatattgtctggtttgttttgtgcaatgctgatgttcttcattatgctgtttgtaagactttactttgcatataaaaacggaacggaaagtttcggcatgggagatgtgctacttattgcaggaactggcgtatggtttccaacgcctgagattgcctgttcaattgtatttattgccgttatcggcggaattattttcttcactcttggcggattaaacaagcaaaaaaaatatatcccattcggtccgttcctttgtggcggaatgtttgtttactcactcgtaccgggaatattattctga

SEQ ID NO: 22678 - DNA, 234 bp, Escherichia coli
atgatggagatattctggatcatgctggccagccaggacaggaagcgcattcgtgagtacattgcggagcagaacctgatggccgccattgaactggacgaacggattggttattcagccagcagcctggccgggcagccgtataaaggtcgcaacggtcgtgtggaaggaacccgggaactggttattcacgggggaaccgcagaattcggaaaaaatcgtacgctaagctaa

SEQ ID NO: 22679 - DNA, 393 bp, Escherichia coli
atggcaaaagtatttacaccagaagagcgggaagaagtgaaggcgcgcattgtggaattcgtgcgcctgagcggacgagaaacttttcgacaactggcagataaaacgggtgtcagtaagaccgctattcgtcgtttatctggtgcgcttgcggccagtggtgatgtctggctctctggttgcggggtatttccatcagagcaggcgtatcgcgtatggcgtaagacaccggagaaggctgctgacccgacactgattcgaaagttacctgacggagaaatacgtcgttacaacagacggcagaacataatttgtcgtgagtgccgccagagcgaagtcatgcagcgtgtgctggcgttctatcggggaaactttcaggaggtgatggagtga

SEQ ID NO: 22680 - DNA, 621 bp, Escherichia coli
atgccgttctcacaaaaaaaccgcttgccatgccgcaatcagtcaggttacattttcgctgcacctcataaaacgggtgccgggtttcgcagcctgctgacaaccaaagcgcacaaccgcgccagcggtttttttgtgcgtactgtattgccacgtttttttcgcgtcagaattatggcggggcgtacggggccgacttcggtcgggccgggttctttggttgccggtactgcgaaccccgtacgtctcgccacccacagtttcgcagctctggatggtgagttttcaaaacttacaaccaaagaggccacaccatggcaaaccgcaaacagcaccgcgctatcgcggagcgtcgtcacatccagactgaaatcaaccgcagactttcccgcgcattccgcgtcgctaaaatcatgcacatcaatatgctgcatgagcgtagctgcgaactttcaaacctctactcatccgctgttttcagctatctggcggatgatctgcgcgagcttcaacagctcatccagcagcaaaacaaactccattaattcctgttccgggcctttcctgcaccttgcggcgggaggccttcgtacatctgtaacaagaggattgccgcaatga

SEQ ID NO: 22681 - DNA, 1881 bp, Escherichia coli
atgaccagtaagaactttgcactgattacagccatgacacaggctgaactgactcaaaaggtgaatgaacatcttgcgaaagggtggcatcttcagggggagacgcgggttgcctacgaacccggcaccccgtggtatctaatgcaggcaatggtggccgatggcactacagacatctcacctgattccccccagcacggcagcgtgccggagtggtattacgtggtggtacttgctggtcaatccaatgccatgtcatatggtgagggaatgccgctgccggattcttacgatgcgccccacccacgcattaagcaactggcccgtcgcaacacagtgactcccggtggtaaagcatgcgcatttaacgacatcattccggcagaccactgcctgcatgatgttcaggatatgagcgcactgaatcatccgaaggcagacctgagcaaagggcagtacggctgtgtcggccagggcttacatattgccaaaaaactgcttccgtatatcccgaataacgcggggatcctgctggtaccatgctgtcgtggtggttcggcattcacccagggcgcggaggggacattcagtgcggacacgggggccagccaggattcggcacgctggggtgtgggtaaaccgttatatcaggacctgatcgcacgcaccaaagcggcattacagaagaacccgaaaaatgtgttgctggcggtgtgctggatgcagggcgaatttgacatgagcgctgccacctacgcacagcaaccggacctgttcacggccatgctgaagcagttccgtactgacctttccggatttaacgcgcagtgccatggcggcagtgctgcagttgtaccgtggatttgtggcgacacgacgtattactggaaaaacacatacggcacacagtatgactccgtctacggcgcgtacaaaaacagggagagcgacaacgttttctttgtgccgttcatgaccgacggtaacggcaacaacacgcccaccaacttaccggcagaagacccggatattgctgatgcaggttattacggcgcgcaatcccgtagtaatggtaattgggtatcatcaaaccgcccgacacatttcagttcatgggcgcgcaggagcattattccggatcgtatggcaaccgctattctgaacgcagccgggcgcacctcagccttcatcagtggtaaggcaccggaaatcaaaccctcgcccggcggcgacactccatcggggccgtctgatggtgacacatccgttcatacagtctccctgctgccgacagccggagaggctgctgcgcagggctggaccatcaccggcggcagtgttgcgctggaagatggtgtgtttaaggttaccaagcagagcaataaaacctggtccctgatgcatccggtggatgacgcagtctccctgctgacacggggtggcagactgagctgtaagtttcgactgtcaggcgcactgaccaacaaccagttcggtctgggaatttatctgtataccgatgtagcgttacctgacgtcgtggcgatgaccgggactggtaacccgttcctgatgtcgttcttcacccagaccacaggcggcaaactgaatctgatgcatcacaagaaagccggaaacacaaagttgggcgagttcgggaattacagtaacgactggcagacgctggagctggtgttcaccgccggcagtgccacggttactccgaaactgaatggagtggctggcccggcattccaggtcataaaagacagtctgacactggggctgaatgcgctgacgttaactgatatcactaaaaatgccgcgtacggcgtcgatatcggcagcctggtgctggaaatcaataatcccgcagcataa

SEQ ID NO: 22682 - DNA, 897 bp, Escherichia coli
atgcctgctgttgacctttcccagttaccggaacccgccatcatcgcgaagcctgattttgaggcaattctggctgacacaaaggccatgatgattgcgtcctatcctgccgaacagcgtgaagccgtctccgccgcgctggagctggaatcggaacccctgaacgttatcgctcaaaccatgtcttttcgtgaaatgctgttacgccagcgggtcaatgagggggcacgcgcctgcatgttaagccacagcgccgggacagacctggacaacctcgcgggcaatatgaacacaaagcgcctggttatcactccggcaacggataccaccgacgcggtgatggaaagcgacacatcgctgagactgcgggcgcaacgggcgtatgacggtctgagtgttgctggcccgtcaggcgcatacgagtattttgcacgcagcgccagcggtctggtacgcgacgcgcgagccatcagcccgtctccggccaacgtgacggtttccattctgtccactgaaggcgacggcacagcaacggaggcgttgcttaataccgttcgcgccgctctgaatgcagaggatacccgcccggtggccgaccgcctgaccgtacagagcgccagaatcgtgacatggcggctgaatgcaaaactgtacttttaccccggcccggaatccgaacctattctggccgcggctgaatcgtcgttcaggaagtggctggctgagcaggggcttatcggtcaggacgtggcgttgtccgccattgctgccgcactgcatgtgcacggtgtgcaacgcgtggagataatcgaacccacacagaatatggccatcagcgacatacaggcggcgcgctgtgagtcattcaccatcagcgaaggtggacgcaatgagtaa

SEQ ID NO: 22683 - DNA, 240 bp, Escherichia coli
atgaatatattagatgattttgaaaaacatgctgaaatccatgggtatctcaaggtattgaaaatgggagcgatgcacttaggtgcagacttcaaaatttcagaggcattctcacatgataatgtgctacctcaattgcaagcattctataaaaaaaattatatagagaaagaagcacttgaagcgataaactggtggtcgtcactgtcgccggagttacgaaacaaattcgacagttag

SEQ ID NO: 22684 - DNA, 462 bp, Escherichia coli
atgagcagattaaccgcgattatctccgctctggttatctgcatcatcatctgcctgtcatgggctgctaatcattaccgtgataacgccatgacttacaaagagcagcgcgacaaaaacaccagagaactgaaactggcgaacgccaccatcaaagacatgcagatccgccagcgtgatgtagcggctctggatgccaaatacacgaaggacttagctgatgctaaaaagcagcttgatgatttgcagcgttgtgttcgcactggcaagtgtgggctgcacttcaacgccagatgtcccgcgaatggagcgaccagcaccggcagcttgggcgatgttaccagcccccgacttaatgactccgctgaacgggattatttcacccttagagagcgaatcgtcacagtgactaaacagattagttatctgcagaactatatcgtcacccagtgcattatgtag

SEQ ID NO: 22685 - DNA, 330 bp, Escherichia coli
atgataacgataataataggtgtgtcgagagttattgactataaaacggcagaaatgtcggttgatatccccccattccctgaatggaacagtggtcattatatcgaaattccaggagaaggtattgtattcacaggtgaaaagagtgatgacggtagccgttgttattctggtgtcatcgaatctcattacagcactgatgactggccgtttatcctttctgaatacaaaaactggctgaaagataaggaaagaaagttttcttatctgtttgtcttacgcaatggtgaactggttcaccatgaggtcaacaaatcagagcttctttga

SEQ ID NO: 22686 - DNA, 753 bp, Escherichia coli
atgatgacaaaatatgataaggaacgattcaataaaagaatcagtgatgaagtacagattagtgctgatatccgtattaatgacttcatgacagaaagtgcaacttacgtcaccataacggaatcccccctgtatgagcgagtctgtcactatgccttgcaacatggtgaagatttacaggggatgtttaaggatgaaaaatatgaatatatgtcctgttttgttcgtgatgttgctgaattcagaagtaattttgaaagcgaagagcttttaaaacctctgtttaaccatgataaaggtgatactgttgagtttgttatcagcgttcctgaaaaaagagtcgaggattacggtgatatagtcagaaaagagttcgtagatataattcagaagcatgtaataaccattaataataagctctggaagaaattcgtaaaacaagccatgacgggtacaactttatatattggttttgatattaatacaggtgcaatggtggaccctgaagatgaacgtgacaccatattaaaatcatcacgtcaggagtttgtcagaacaacgactttcgattcatttcagccttattactatgttgagcgtttatattctggtgcaaaagaaataggcaatatcaatggttttaatgtctggttcaatgaaagaggattttatttttactggaatgaaaaaacggaattcctgattgagagttggttgacgttccctgcatatccgtatggctggtttaaatga

SEQ ID NO: 22687 - DNA, 222 bp, Escherichia coli
atgataaattcaatcgcgtttagtcttatagcgttatgtataatatatatatcatcactatttaaaaaaagtaacttcagaatattttatataactgtatctacgtgctctttattattatcatgtgtaccaaacaagtacggtatgattggtatagcagcattggtatttacaactatgttaggaccattattaattattttagaggataacagacaataa

SEQ ID NO: 22688 - DNA, 285 bp, Escherichia coli
atgctcataaagataattaaatctgtattcaatttttacatgctctgtgtgcagcctttacttggattatttctcgtgggttatagtgtgtggagattttcaggtgacagtatctgtacagcagacaaggttatagcctgcaacatatcagtattactggaaccagcatcgtactttgtcattggaactgttgttttgtttgtatggtatatagcatggcagaaagaacgatctaaagaagaagagtttaaatcaagcatcaagccggaagattttgtgaagtga

SEQ ID NO: 22689 - DNA, 237 bp, Escherichia coli
atgatgatgaaaaaaggtgttaaaaaagtggcactagccactcttgaaactaaagatctgctttgtgctgcaatgattgatgctggagttgaccctaaacaagctctcttggcctccactgtagcaacgaaagcccatgttgatgtaattattgaccgtgtttttggcaatcagagcgcggctgacatcacgcatggtttatcggaagttggtcgcggcactcgtccgctcaattaa

SEQ ID NO: 22690 - DNA, 276 bp, Escherichia coli
atgtcggttgatatccccccattccctgaatggaacagtggtcattatatcgaaattccaggagaaggtattgtattcacaggtgaaaagagtgatgacggtagccgttgttattctggtgtcatcgaatctcattacagcactgatgactggccgtttatcctttctgaatacaaaaactggctgaaagataaggaaagaaagttttcttatctgtttgtcttacgcaatggtgaactggttcaccatgaggtcaacaaatcagagcttctttga

SEQ ID NO: 22691 - DNA, 135 bp, Escherichia coli
atgagacaggttaactttgatgtcattaatttcattgtcagtagctttcttattattaagaagataattatttactgcgttaaggtcatctatttctttcagtatcccggtgatgctgccaacttactgatttag

SEQ ID NO: 22692 - DNA, 354 bp, Escherichia coli; identical to SEQ ID NO: 14668

SEQ ID NO: 22693 - DNA, 318 bp, Escherichia coli
atgacatttcagacaacgataacagaagtatgttcatatattggtgataactggatgattgatccacatcccccgcaggaactgctggagggatattttcacttaatcagtaaagagtatgaaaatcagcatttttcaatgtatggttttatcatgaatgagacgttatatataaaagggtgcgtttttaatgaactgaacggggacatgattcatattcctcttaataaagactacagggaaatagcccgtttaataaaatgcaaagttataagccagaaaaaatatctctttacagttgtgcgtaacagaacttga

SEQ ID NO: 22694 - DNA, 330 bp, Escherichia coli
atgaagaatatgagttatgctgaacatgtcgctcaaacaattctcggacagctggggagccagcgatttgttgttatgaccggcgctaaaaatctggcttattttgatgataatggtgaatgcggtttatgctttcagttaccgtcatattttgcgaaaaataatattaatattgtccggatcaaattaacgtttgccgatgattacacggtgacgttttacagcaaacagggttcccggatagcgcagatatcggagcacgaggggatttattgcgatcagctgcagtggctttttacccgggagaccgggctgtatacacgactgtaa

SEQ ID NO: 22695 - DNA, 366 bp, Escherichia coli; identical to SEQ ID NO: 7762

SEQ ID NO: 22696 - DNA, 615 bp, Escherichia coli
atgatactttggtctgtgagaaaagaaaccgatatccggcgtggaaggcattgtgttttcctgatgcatgttcaccaggtctttgtcaccaaataccgacgtcagatttttgaccatgacgcgacagaaaaactacgcacttacttttcaaatgtatgtgctgattttgaagctgaactggttgaaatggatggcgaaccagatcacgtccatttgttaattaactatcctcccaaactggcgatatccagtctggtaaacagcctcaaaggcgtatcgggtaggttactgcgacgagatcgaccagatattgcagtcaggtattactacaaaggcgttttgtggagtcctggctattttgccagtagctgcggaggtgcgccaatatccgtcatccgccaatacattgaacaacagcaaacacctgatcaggtggaaaaccgcgccttatatccccgccctgaaggacggggttttacggcgcaccggataaaccaggccaagcgtatgctggttgatcaaataatatcccccaagcgcagcaatattaatattcacctgcaatgggtcgatatctggcttaaaaatattgtgtttcctcccttcatccaataa

SEQ ID NO: 22697 - DNA, 1296 bp, Escherichia coli
atgataaccattcccattacgtttcgtatgttgatagcaaagtatctctgtctgctgaagcccttttggctgcgtaagaataataaaacttcagtgctgttaatcattattatcctcgccatgatccttggcgtggttaaaattcaggtctggttaaacgactggaataatgattttttcaatgcgctaagccagaaagaaaccgataagctttggcagcttgtcctttggttccctgccctgctggggatctttgtattaatatccgtaaacaaaacatggttaattaaactactgactattcgctggcgcgaatggttaacagattactaccttaatcgctggtttgcagataaaaactactacttcacgcagatctacggtgagcataaaaatacagataaccctgaccaacgtatcgctgaagacattctcttactgatcagcaaaacgctcagtctttcatttggcttcatccagtcacttagcatgttgatcacctttaccgttattctttggcaaagcgcgggtacgctctcattcactgttggtggaacagaatggaatatccaggggtatatggtctataccgtcgtgctcattgtgatcggtggaactttatttactcataaggtgggtaaacgtattcgtccgcttaatgtggaaaaacaacgtagcgaagcgacatttcgaactaatcttgtgcagcataataagcaggctgaactgattgcgctaagcaatgctgagtctctacaacgccaggagttgagcgacaattttcataccattaaagataactggcatcgtttaatgaatcgtcagcggtggcttgattactggcagaatatttattcgcgctcgcttagcgttcttccctactttctgttattgccgcagtttattagcggacagatcaatctgggcggactgatgaaatcgcgccaggcatttatgctggtatcgaacaatttaagctggtttatttataaatatgatgaacttgctgaactggctgcggttatcgatcgcttgtatgagttccatcaactcaccgaacagcgccctacgaataagcctaaaaattgccaacatgcggtacaagtggctgacgcgagtattcgtactcctgataataagatcatattagagaacctaaactttcatgtttcgccaggcaaatggctattactgaaaggttactctggtgcgggaaaaaccacactgcttaaaacattatcccactgctggccgtggtttaaaggtgatatttcggtaatgactccaacttattga

SEQ ID NO: 22698 - DNA, 1917 bp, Escherichia coli
gtggaggacagttttgacctgaatgtccgggctgattacctgacgctgggcctgcgtgagaacggcaggaacagcacggcccgcatcctgaatttccatctggcccgtaacccggaaatcgccttcctgtggaacatggccgacaactacagcaatctgctgaacccggaaatgtccatttcctgcccgttcatcctgacgctgactctggtggtggaagaccaggtgaaaacccacagcgaagccaacctgaagtacatggacctggagaagaagtcgaagacctcctatgccaaatggtttccgtccgtggagaaagaggcgaaggagtggggggaactgcgccagcggctgggctccggccagtcttctgtcgtgtcctacttcctcaacatcacagccttctgcaaggacaataatgaaacggcactggaagtggagcaggacatcctgaacagcttccgtaaaaacggttttgagctgatttcaccgcgctttaaccacatgcgcaatttcctgacctgcctgccctttatggccgggaaagggctgtttaaacagctgaaagaggccggtgtggttcagcgcgcagagagctttaatgttgccaacctgatgccgttagtggcggataaccccctgacaccggcaggtctgctggcgcccacctaccgtaaccagctggcgtttatcgatatcttctttaaggggatgaataacaccaactacaacatggcggtctgtggcacctccggggccggtaaaaccggactgatacagccacttatccgcagcgtgctggactccgggggctttgccgtggtgttcgacatgggggatggctacaagtccctgtgtgagaacatggggggcgtatatctggacggtgaaaccctgcgttttaacccgtttgcgaacatcaccgatatcgaccagtcagcggagcgtgtccgcgaccagttgtcggtgatggccagccccaacggtaacctggatgaagtgcatgaaggtctgctgctgcaggcggtcaaagcctcctggctggccaaaaagaatcaggcgcgcattgatgatgtggtgaatttcctgaaaaacgccagtgacagcgagcagtatgccgggtcaccgaccatccgcagccgtctggatgaaatgattgtgctgcttgaccagtacactgccaacggcacttatggccggtattttaactctgatgagccgtccctgcgggatgatgccagaatggtggtgctggagctgggtgggctggaagaccgtccgtccctgcttgttgcggtgatgttctcccttattatctacatcgagaacaggatgtaccgcacgccgcgtactctcaagaaactgaacgtcattgatgaaggctggcgtctgctggacttcaaaaatcgtaaagtcggtgagtttattcaaaaaggttaccgcacctgtcgccgccataccggtgcctatatcaccatcacacagaacatcgtcgactttgactctgacaaggcctccagtgcggcccgtgcggcatggggtaactcctcctacaaaattatcctcaaacagagtgcgaaggagttcgcgaaatataaccagttattcccggatcagttccagccactgcagcgcgacatgattggtaagtttggtgcggccaaagaccagtggttcagttccttcctgctgcaggtggaaaaccattcctcctggcaccgtctgtttgtggacccgttaagccgcgccatgtacagctctgacggcccggattttgagtttgtgcagcagaaacgcagggagggcctgagtattcatgaggcggtgtggcagctggcgtggaagaagtcagggccggagatggcttcgctggaagcctggctggaagaacatgagaaatacaggagtgttgcatga

SEQ ID NO: 22699 - DNA, 1491 bp, Escherichia coli
atgccatactttcagtatcctgatgagtttcccctgagctcgctgcctccactcattcgtgatgccgttattgaagctcagcaaatcacgcaggctcccctggggcttgtggcagcatctgccctgggcgctgtttcacttgtctgccagaatctgattgatgtctgcagactgaatacactacgggggccggtttctcttttcttactgacgcttgctgagtccggagaacgaaaaaccgcagtggacaaattattaatggagcccctgtaccagcaggagatgctgttatattccagacacaaaaatgaactgacgacatggaaaaataaggaagagcttttaaaggcgcagaaaaaagcattgttgtcaaaactgaataaagaactccgcaaaggcgcggatgagtcagaaacgctcagacaactggaagcgcttcagaaaaacagaggggaaaaacctgtaagatataaattcatttttaatgatgccacgacagcagcaattaaagatcagctttgtggtcagtggcgttcagtgggtatcatgtctgatgaagccggtataatatttgatgggtataccctgtctgagctgccttttattaacaaaatgtgggatggctccgtattgtcggtggacagaaagaatgaacccgaacagatgattgaaaatgccagaatgacattatccctcatggtacaacccggtctttttgaccgatatatggagcgaaaaggttctgttgccagggacagtggttttcttgcccgttgtctaatcagtaaacctgccaccacgcaggggaaacgctttattaacggagctgtgaccccgggaggatcattaacggcatttcatgaacgattaatggagctggccagaggcagtattgaaaaatccagtaaggatgaacgttattgtctgcatttttctcctgaagcgcaaaaaatatttattgatcactataatgttctggagcaggatttgtctccttccggacccttaagccagtttcggggacatgtttcaaaaaaaacagaaaacattgcgagaattgctgcgttattgcagtatttcagtcagggtgaagggaaaatctctgccgatatcatgacgtctgctgtcgtaataagttcgtggtacacagatgaatataaaaaattatttgcgttacctgatgaatctgaactgcagctgcaggacgcccgggagctgctcgactggctcattgaggagtgccgcggagaatgcccgccccgtgtcaggaaaaattatattctccagtgtggcccgggccggttccggaacaggaaaaagctgaacgtcctgctgaacattcttgcatctcaactcaggctctctgtcgtgcaggaaggaaaaaccacctatgtcctgctttccgaaataaacaatatcacgctgcctgaactgaatgcgtgctacagccagaaactgataagatggcatgagcaatcctttggcttataa

SEQ ID NO: 22700 - DNA, 447 bp, Escherichia coli
gtggcgttcatcattgatgtgtttgccggatacatcgtggggtggcgggtctcatcgtctatggaaacgacattcgtgctggatgcactggagcaggcgttatgggcccgtcgaccgtccggcacggtccatcacagtgataaaggttctcagtatgtatcgctggcctacacacagcggcttaaggaagccggattactggcatcaacaggaagtacaggcgactcgtatgacaacgcgatggcggagagcatcaatggcctttacaaagcggaggtaatacaccgtaagagctggaaaaaccgtgcagaagtggaactggccacactcacgtgggtggactggtataacaatcgacgattgctggaaaggctgggccatactcctccggcagaagcagaaaaagcttattatgcttccatcggaaacgatgatctggcagcctga

SEQ ID NO: 22701 - DNA, 462 bp, Escherichia coli
gtgacgctcaatacttctcaggtcagttactatatgactcagcgtaagaaaggtataactcagcatatctcggccatgaaggctggtatctcagtccgttctggtcgtcggatcgaaaaaggagagtgggcaaaaaacagtgttcggcactggcgcacacgcaaagatcctctggaagctgtgtgggacagcatgcttgttcctctgttgaaagagaggccggctctgacaccaacaactctgctggagatgctacaggataaatatcccggccagtatcccaacagccttcgaagaacaatgaaccgccccgggtttcctggagagtgttttatctgtgaactcaggctgccagatcatcgtttccgatggaagcataataagctttttctgcttctgccggaggagtatggcccagcctttccagcaatcgtcgattgttataccagtccacccacgtga

SEQ ID NO: 22702 - DNA, 531 bp, Escherichia coli
atgagcaatcttttacagacgggcgcggagttcgagaaaaagctgaaagagagagccgaatctacagagaaaatgctgaacgacgagttcaggaagctcgaagaatctgtaaacagggaactgacctcaaacgaatctttaatcaggaacgctatcaacgaccatacaacagccctgaaagaactgctggagaggtatcagaaaacgaccgtcgatacgatggacgcgcactggaaaaccgtactgaaaatgagcgtgaaacgctggctgtggctgattatcgtctcagtactgatgtttgccacgaccgggagcctgctgtggtaccagggcatgaagataaacgcgaacatgaatattctccgcgagcagaaagagagtctggagaagctgaacgcgaagacatggggcgtgcgttatcacgaggacagcaacggacgttttctggtgttgcccgaggggatgaaagccgaaacgaactggacgatggaaaacgggaaacagaatgccgtaaggctggtacaggagtaa

SEQ ID NO: 22703 - DNA, 399 bp, Escherichia coli
atgcgcatcagcaacgtcgaatggctgaagaaacggatcggattcatcaggaagctcggagaacagaccgcacgacagagacagattattgacctgctcgacaacgaagcaggactcacagaacaggaacgcaaactcctccacgtactggcaacagcggaaaaaaacgacttacaggcacaggagagcgaacgaaaacaggcggtccaaaaacgaatcgagggaaaaaaacaacgacgggaacgcaatcaccgactctttctcgcggctgggctactgatcgaagcaggactggtagacacaaaaacaggcgagctatgctataaaaaagacaggatattacagtcacttaaggaaattaagtacgatctggagacatccccaaacccagacgcgtaa

SEQ ID NO: 22704 - DNA, 216 bp, Escherichia coli
atgcccgttacagggattttttacggtgatgtttgggggcggacagttccggtcgctccagtcaatcgcagctcccatccggtccacgtcaaaggcaagccagtgctgcgcatatggctggttctgctggatgaagcgggcaaggatggcaatgtctttcggcagaatgcgaacgccgtacgtgaaatcgttcgtacaatacggtttgtgcggtaa

SEQ ID NO: 22705 - DNA, 360 bp, Escherichia coli
atgaatactgttttaagtgttcagggtgcttctgcgcccgtcaaaaagaaatcgtttttttctaaattcactcgtctgaatatgcttcgcctggttcgtgcagtgatcccggttgctgttctgatgatgttgttccctgagttagctatggctgctggtaaaggcgacctgatggctaaaggtaacgatacggttaaggcgaccttcggtaaggactccagtatcgttaaatgggttgttctggctgaggtgctggtcggtgcggtcatgtacatgatgaccaaaaacgtcaagttcctggtcggctttgccatcatctctgtatttattgctgtgggtatgagcgtcgttggcctctga

SEQ ID NO: 22706 - DNA, 390 bp, Escherichia coli
atgcactatatgaaaaaaataattgtagatttagataacaccatatcttttaatttatcaggaaaatattcacatgcaactccaaacaaaaaactaattgaaaaattgtatgaatataagcttaatggtttttatattgttatttttacagcaaggaatatgaggacatataaagaaaatataggtaagattaatattcatacattaccagttataattgattggttgaatgaaaatagagtcccttatgatgaggtgattgttggtaaaccttggtgtggagatgaggggttttatgttgatgatagagctattcgaccatcagaactttgcaatatgaccttagaagagatttctaatatgttagaacaggagaaaaaatgcttctaa

SEQ ID NO: 22707 - DNA, 1434 bp, Escherichia coli
atgctaaaaaacttaacatttgatcatatattaagtctttcaaagaaagaagataaaattaaacttgtacaattaattgtaaatcatttagatgagagaacattaagctgtataaaaaatatctctactggtaagggatttaatgctcatttaaaaatacttgaactttttgacctatggttgagtgagtattttgaatatattattatacctaataagttaagcaatgcagggactttttattttgcattcttttttcccgagttttatattaaaagattcaataagaataatactgatctttcctcgttaggagacacatcttttaaacgacttatgagtcgaccacatataccaaactatgtttacaatcttgtgataaactctaatggatgtacttttaactccattaaattattattgctggctcttagtctaacatcaaaaaggttttatgaaacacctcagcaagaacgtaattttttgtgtcatataaatgaaattgtcttggctaatgctgacgaatactccggtatcatttcttgcattataaaaagtagaatatctgtaattgatgactttatttcaagtaatgtttcattaaatacaaacaggcaaatagctttattcataactggacaatcaagaggttttatagatgccctacctaatctcgtaagtaaaataacgattccttctgatgttgatgtttttattagtacatggaaagatatcggacacacacagttatctaaagaaagaatatgtaggatatttgacagcgaggctgcacaatatgtttcagagccagataactactcgtttgtagacgaacactatgatgaattaaaagacttgagcttaagttcatataaaaataataatttagaggagatatattcaagttttttctctggatgtaactcagttttaataaacattaaagatgatggggaatatccatataataaaatgagtaatgcagaaaaaatgtattaccataattcattttggttctgtagtcttaaaaatcataattgggataaatataggtgcattataaagataaggcctgatgctttattgcaagttgataatgtgacaattaatgatatagatgtagatgattctgtttattgtgaggatagtaatgggtggatatttagagaatgggggtttggcataggcgaccaattattttacggcgatcctgatataatgaaaaagctgatgtgtgtccatggtttagataatatatatagtcagctaacatccttgatctcaagttctaatgtttattattcaggtcatattaatgtagggttatgtgcttgggctaatgtatatgattgcaaggtttctaatttaaaaataaaaaatattgtagcgcctcgaaaaatatcgctagaacaaatactttctttgcgggaatga

SEQ ID NO: 22708 - DNA, 1338 bp, Escherichia coli
atggctccgaacccactatgggttcagtcatatatggaactattagcggtggacgataatgttgctctaattggccctagaaaatatatagatacaagcaagcatacatatttagatttcctttcccaaaaatcactaataaatgaaattcctgaaatcattactaataatcaggttgcaggcaaggttgagcaaaacaaatcagttgactggcgaatagaacatttcaaaaataccgataatctaagattatgcaacacaccatttcgattttttagcggaggtaatgtcgcttttgcgaaaaaatggcttttccgtgcaggatggtttgatgaagagtttacgcattgggggggggaggataatgagtttggatatcgtctctacagagaaggatgttactttcggtctgttgaaggagcaatggcatatcatcaagaaccacccgggaaagaaaacgagacggatcgtgcggcagggaaaaatattactgttcaattgttacagcaaaaagttccttatttctatagaaaaaaagaaaaaatagaatccgcgacattaaaaagagtaccactagtatctatatatattcccgcctataactgctctaaatatattgttcgttgtgttgaaagcgcccttaatcagacaataactgacttagaagtatgcatatgcgatgatggttccacagatgatacattgcggattcttcaggagcattatgcaaaccatcctcgagttcgttttatttcacaaaaaaacaaaggaattggttcagcatctaatacagcagttagattgtgtcggggattctatataggtcagttagactctgatgactttcttgaaccagatgctgttgaactatgtctagatgaatttagaaaagatctatcattggcatgtgtttatacaactaaccgtaatatagatcgtgaaggtaatttgatatcaaatggctataattggcccatttattcgcgagaaaaacttactagtgcaatgatatgtcatcatttcaggatgttcacagcaagagcatggaacctaactgaaggtttcaacgaatcgatcagcaacgcagttgattacgatatgtatttaaaacttagtgaagttggaccgttcaagcatataaacaaaatttgttataatcgcgtattgcatggtgaaaatacgtctataaaaaagttggatattcaaaaggaaaatcattttaaagttgttaacgaatcattaagtaggctaggcataaaaaaatataaatattcaccattaactaatttgaatgaatgtagaaaatatacctgggaaaaaatagagaatgatttataa

SEQ ID NO: 22709 - DNA, 930 bp, Escherichia coli
ttgaccctgcataactctgtgagaaaaaccctggctaacgttgctgacaacacaaccgggtcaattgcaatggcaacgaccaaaggaaccttaactcacgctatcgcttctttagagagttctgcacctgaagtgagaagttcagaaaccagcagtactttaactgccagtagttcaagcgaatttaaaagtgataaatatatatgcagtgatattgctgatttgatgagtgtgctcggtagcgactacctcgaaatctatgcaaatagcgttgagataatgagcgcatactggcaggacttcagtgaacatatccaaagcaatatgggaaagtggactcactctaataaaaaaggcgatgcgatagtttttgatgtcaatgcatttcaaaaggccttgatgcatttttattatatcgataaatatcctaatggtgatttccactatcattacaatccagactatgttttataccctccggcaccagctgacaaaattggtgttccactggaagaagcagaaaaatggtgcgccgctttagatcttccggtaattccacccgatcccaaacaccgcacaccttctccgattgtcgaagttgaaccgcaaggtagcggtctgtatgttattattcccaaccctcagattattgacagtatgagtcagtcttcagactcaatggtacacagggacgataaagggaaggaaaaaaatatatctaaagaattcaccggctacgaaataagcacggctgaataccaggcatggctggcgggttataacggccaggcagaaaacatgaaaaccgacgtgcaggttatcacgactaaatacagtacagccaactccacctacgatacgattatcaaattattatcgtcaaccattactgcattgtttgattcagcgaaggattatttacgtttctga

SEQ ID NO: 22710 - DNA, 468 bp, Escherichia coli
atgagaatagacatatcacatcaaacacggcataccccgccaaacatgcttcctcgggaacaaaattgtgtagcaatggcattatctgcgtgctttagacaacaactaaaccctgtggtaaacagcttattaaaagagagaataatacactcccctaaagaattggaacatgacaacgcagtaataagagccctgcaaaaactacaaattcaagaagtttgtaacagcaccctttgggagacagccaaacaacaactacttcaaaaatcggacggaagatattttgccatcaattctaaacacttatcctttccaggcccaggagaatctcacgccttctgttgcatcaaatacaaaaatgcaattggcattaacggaaacaatgccgaaacccaatcgacccactaccaaccctatccctatgataaagtcagtatatggggaccattccctcacaatttaacgtaa

SEQ ID NO: 22711 - DNA, 546 bp, Escherichia coli
atgtctctcactaaattactgccggtcattttgttgatgatggccacaggtgtgcaggcctccacccgggatgaaattgaacgactctggaatccgcagggtatggccgtgcagcctgcacaaccggcagcagacacatcagccagaacagaaaagccggctccccgctggttccgcctcagcaacggcaggcaggttaacctggccgactggaaggtggtgctgtttatgcaggggcattgcccttactgtcaccagtttgacccggtactgaaacagctggcacagcagtacggcttttccgtttttccctacaccctggatggtcagggggatactgcctttccggaagcattaccggtgccaccggacgtgatgcagaccttcttcccgaatatcccggtggccacaccgaccaccttcctggtcaacgtcaacacacttgaggcattaccgcttttgcagggggcaacggatgccgccagttttatggcgcggatggataccgttctgcagatgtacggagaggaaaaaggtacgaaataa

SEQ ID NO: 22712 - DNA, 285 bp, Escherichia coli; identical to SEQ ID NO: 7540

SEQ ID NO: 22713 - DNA, 576 bp, Escherichia coli; identical to SEQ ID NO: 20983

SEQ ID NO: 22714 - DNA, 1341 bp, Escherichia coli
atgtattggtcattacataatcttactgatacaccgtcagattggcggtgtaaattagcaatcaaaatagctaaaattgcctgtggtgacataagcttaactccggaattactcatggagtttaaagacgagttcacagacacacatcaaaaagttgagttagcaaaaaccttagcatcatactctcctacgttttcattatcattattagataatgtcgataattgtcccttagacttgtatacagctcttcaattaagaatcgggttaactcaaaaagctatatcaacactcgctcagattgatgccagtgatattgtatattcccctgatatattactcttgcaaaataatgctttcagagaaacggcagaaatctcgttaaatagacttaacgaatactataagtactttggtttatctccggtcgcactgacagataactcatctcctttgtcaccttgtaatattattacatcgattccttatcctgcccaaacgggccccctgatttctattttaatgacaacatacaataccggtaggcgggtagaaaatgcagtaatatcattgcttaatcaaacataccgttcatttgagctaattattgtggatgatgccagcaccgatgatacgctattccgtcttcagagattagcactcaaagatactcgaataaaaattattagcctgccacaaaatgttggaacatatgctgcaaaacgaataggcttaatacaggcaaagggagagtttgtgacatgccatgactcagatgactggtcccatcctgaaaaattatttagacagatatcacctttattgttaaaccctaaactaatttgttcgatttctgattgggtaaggttgcaagataatgggattttctatgcgcgtgcggtctatccactaaaaagactgaatccttcttctctgttgtttagaagagcggatgtattgcaaaaagcgggcgtttgggactgtgttaaaacgggggctgatagtgaattcattgctcgacttaagctaatttttggtgattccactgtacatcgtattaaattgcctttgacgctaggaagccatcgtaccgactcgttaatgaattcacctacaacaggatatacatctcagggaatttcaccagatcgccaaaaatattgggattcctggtcgcgatggcacattcaggcgttaagaaataaagaaagtctttacataggaaattctgatttcactaataaaaatcgaccattttctgcgcccgactcaatattagtagatactaatgccatcaaaactgcattacaaagtgctcatgttaactttaccagtatataa

SEQ ID NO: 22715 - DNA, 459 bp, Escherichia coli
gtgctaccacgatttgcttcgcgaaatcaaattgaattactcttgaatattgaagatggcaatgaaatcaattctgacaagaccaatgttgatgatctgcctcaggttggtagaacgcttataagtactattgcgcgcgtgcctcaagggaaaagtcttttgattggtggatatacacgagatacgaatacctatgaaagtcgcaagatcccaatattaggcagtattccatttattggtaaattatttggatatgaaggaacaaatgcgaataacatcgttcgtgtctttcttattgagccaagagagatcgatgagcgcatgatgaataatgcgaatgaggctgcggttgacgccagagcaataacacagcaaatggcaaaaaataaagaaatcaacgatgaattactgcagaaatggataaaaacttacctgaatcgtgaagtcgtcggaggatag

SEQ ID NO: 22716 - DNA, 789 bp, Escherichia coli
  misc_feature (769)..(778): n is a, c, g, or t
atggagcaaaacagtgatggcatcgagatcggacgcaataaagtagggattattcacctggtcaacacattcgttaatgatcggacttatgaattacgtggcgaaaagatagttattcctggcatggcaaaagtactatcgacgttgttaaataataacattaagcaaagcactggggttaacgtactttctgaaatttcaagtcgtcaacaactaaaaaacgtatcacgtatgcctccttttcctggtgctgaagaagatgatgatctacaagtagagaaaataatatcgacagctggagcgccagagactgacgatatacaaattattgcatatcctgataccaacagtttacttgttaaaggaacagtatctcaggttgattttatcgagaagttagtagctacactcgatattccaaagcgacacattgaattatctttatggataatagatattgataagactgatctagaacagttaggagctgactggtcgggcacgataaaaattggatccagcctaagtgcatcatttaataattcaggttcaattagtaccctggatgggacacagtttattgcaacaatacaggcacttgcgcaaaaaagaagagccgccgttgttgctcgtcctgtcgttttaacacaggagaatattcctgctatatttgataataaccgtactttctatactaaattagtcggcgagcgtactgcggagttggatgaagtaacctatggtacgatgattagcgtgctaccacgannnnnnnnnngacaggattag

SEQ ID NO: 22717 - DNA, 213 bp, Escherichia coli; identical to SEQ ID NO: 19424

SEQ ID NO: 22718 - DNA, 174 bp, Escherichia coli
atgacccgttctgatgatacccatgaaaacgaggcaaacatgacgccggaagagatgaagaatgagctgcgttatcttcgcgcagaaaatgcatatctgaaagccatgcaggagcatctcctggaaaaaaagcgccaggagctggagaaaaaacgaaagtcatccggagcctga

SEQ ID NO: 22719 - DNA, 183 bp, Escherichia coli; identical to SEQ ID NO: 9395

SEQ ID NO: 22720 - DNA, 630 bp, Escherichia coli
atggtctgtggtggtgatgtcttctgccttgacggtgaatgcgataaggcacagagcggaaaaaacagtgattttggtgaagcagtatcacagctggctgcgcttgccgccgcaggtaaggatgttgccgccctgaatggtgtggatgtcagggctttcacgggtgaggcgaaattctgccgtaaggccgcagccggcttcagtaactgctgtaaggatggcggctggggtcaggatgtggggctggcgaagtgcaacagtgaagaaaaggcgctgggaaaggcaaaggacaacaaactgacggtgagtgtgggcgagttctgctcccggaaagtgctgggtgtctgtctgcagaaaaagcgcagctactgccagtttgattcgaagctggcgcagatagtccagcagcaggggcgtaacgggcagttgcgtatcagttttggcagtgcgaagcatcctgactgtcgggggattacggttgatgagctgcagaaaattcagttcgacagactggatttcactaacttctacgaagacctgatgaataaccagaaaatcccggacagtggcgttctgacgcagaaagtgaaagagcagattgctgaccagctgaaacaggcaggacagtaa

SEQ ID NO: 22721 - DNA, 315 bp, Escherichia coli; identical to SEQ ID NO: 13001

SEQ ID NO: 22722 - DNA, 315 bp, Escherichia coli
atgcagatcaaataccggatttatatggctcacacgttccatgccttcaggcaacaatgcatggactgccagttgcgacacgaccgaagatcaaaatggttcaattacagtttacgccatttgccagtgacgatacttatcactggcaaaccacgatgtaactacatttccccgacaggtcagttcggtgagtaccgccataaaagttgtattcgtcatagaagccgcatttcacaattcgattggcatcataggttgcaactgaccccgcaaaataattcggcttccacccgtgcggattttctgcattactga

SEQ ID NO: 22723 - DNA, 180 bp, Escherichia coli; identical to SEQ ID NO: 18953

SEQ ID NO: 22724 - DNA, 216 bp, Escherichia coli; identical to SEQ ID NO: 5123

SEQ ID NO: 22725 - DNA, 927 bp, Escherichia coli
atgattgaatttagccatgtcagcaaactgttcggcacacaaaaagccgttaacgatctcaatctcaattttcaggaggggagtttttcggtgctgattggtacatcaggctccggtaaatccaccactctgaaaatgattaaccgcctggtggagcatgacagtggcgtgatccgctttgccggagaagaaattcgctcgctgccagtgctggagttgcgccgccggatgggctatgccattcaatctattggcctgtttccccactggagcgtggcgcaaaacattgccaccgtgccgcaattacaaaaatggtcgcgggcgcggatcgacgatcgtatcgacgaattaatggcgctgctggggctggagccggatttgcgtgagcgttatccgcatcagctttccggcggtcagcagcaacgtgtgggagtggcccgcgcgctggctgccgatccgcaagtcttgctgatggatgagccattcggcgcactggacccggtaacgcgtggcgcgttgcaacaagagatgacgcgcattcaccgtttgcaggggcgcactattgtgctggtcactcatgatattgatgaggcgctacggctggcagaacatctggtattgatggatcacggtgaagtcgtgcagcagggcaatcctctggcgatgctgactcatccggcgaatgattttgtccgccagttttttgggcatagtgaactgggtgtccgcctgctttcgttacgtagcgtggcggattacgtgcgtcgcgaagaacgggcagaaggtgaggcgctggcagaagagatgacgctacgcgatgcgctctccctgtttgtcgcgcggggatgtgaagtgctgccggtggtgaacacgcagggcgagccttgcggcacgctgcattttcaggatctgctggaggaggcgtaa

SEQ ID NO: 22726 - DNA, 216 bp, Escherichia coli
atgacaaaaaatattggcaataaaactttaaatgaacgcgctaccgcaggaggtacagctgccggcatcgttatggtgattttggggtttcgagctaagcgacaaaatatttcactggtgatcaatgcaacgataacagcaacaaacaacccctgcgcgccgagatatttggtcgtcaggaatgcctgcccatctatcatctggtatggggtataa

SEQ ID NO: 22727 - DNA, 1215 bp, Escherichia coli
atgaaaaatccctattaccctaccgcacttgggttgtattttaattacctggtgcatggtatgggcgtcattttgatgagcctgaatatggcctcgctggagacgctttggcagactaatgccgcgggcgtctcgatagttatctcatcactgggcattggtcgattaagtgtcttgctttttgcaggattattatccgatcgctttggtcgccgcccttttatcatgctcgggatgtgctgctatatggccttcttttttggcatcctgcacaccaataacatcattatcgcttatgtttttggctttctggcgggaatggcaaacagttttctcgatgcaggcacctatcccagtttgatggaagcttttccacgctcaccgggtacagccaatattttaattaaagcatttgtttccagcggacagtttttattaccgctaattatcagcctgttagtgtgggctgaactgtggttcggttggtcctttatgattgccgcaggcattatgtttattaacgctctgtttttataccgttgtacgttcccaccccatccgggtcgtcacttacctgtcataaagaaaaccaccagctctacggaacatcgctgttcaattatcgatttagccagttattccctatatggctatatctcaatggcaacgttttatctggttagccagtggctggcacaatacggacaatttgtcgctggcatgtcatacaccatgtcgatcaaattactcagtatctacaccgtgggttcgctgctgtgtgtatttattactgctccacttattcgtaataccgttcgcccaacaacattactgatgctgtacacctttatctcatttatcgccctgctcaccgtctgcctgcatcccacattttatgtggtgataatatttgctttcgtcatcggttttacctccgcaggcggtgttgtacaaattggcctgacgttaatggcggaacgttttccctacgctaaaggaaaagcaacggggatctattacagtgctggcagcattgcaacatttaccattccgttgattacggctcatctttcgcaaagaagtattgccgatattatgtggttcgataccgccatcgctgctatcggctttatactggcactgtttattggcttacgcagtcgcaaagaaacgcggcatcacacgctaaaggaaaatatcgctccgggtgggtaa

SEQ ID NO: 22728 - DNA, 1263 bp, Escherichia coli
atgaaactgactgatgtagctgtacgtaacgccaaaccagataaggacaacaacaaaattaaaaaacttcgtgacgggaaagggctgtatctctatgttcaccccaacggctcaaaatactggcgctttcgcaaggttatcaacggtaaagaaacgactcgagctttaggcatttatcctgccgtaacacttgcacaggcaaggaacgctcgtgatgaatatctggcgagcctggctaaaggcattgacccactgcacacgccaaaacctcaaatagtgctttttgaagacgttgccagagagtggcacagccggaaaaaaggctggagcgaattgcacgcacaaaaagtcttaaaagacctggaaaaccacatcttccccattcttggtaaaagaccaattaacgagatcacaaccatggatctactgattcctttacgcaaaatggaagataaaggagtgcttgagacggcatcacgtaacaagcagcgaatgaacgccattatgcgctacgctgtacagaatggaatgattaaatacaatccagcgcaggagctaaacggtgcaatagaaactaataaaaccaaacatcgccccgctcttccccttgagcgattacctgaattacttggcaaaataaatgattaccaccataagatgaatggacggttattaacgcaatttgcactaaaattaaatttattaatttttattcgctcaagtgaattgcgctttgctcgttggaatgaaattgattttgataaatcaatgtgggtaataccagcagaacgcgaaaaaatagaaggcgtaaaatattcatatcgtggaacgaaaatggggacccctcacgccatccctttacccactcaggctatgcagcttcttgacgatataagaaatatatccggtgatgaagtgtttattttccccggcgaccattaccagataaaaccgatgagcgaaaacaccattaacaaggcattacgccacatgggatacgacacaaaaaaagatatttgtggtcacggattcagggccatggcctgttcggcgctgacagagtcaggcaggtggacaagagaagccgttgagcttcagatgagtcacagggaaagaggcagtgtccgggctgcatacgttcacagagctgaacatatgcaggaacgccgccgaatgttgcaatggtgggctgattatctcgacacctgcaagacggcatatattgccccctatgattttaaatgggctaacgaaacaaactga

SEQ ID NO: 22729 - DNA, 222 bp, Escherichia coli
atgtcagcatactcacagaccagcgaaaggcggattcaaaaattaataagactccccagagtcattgaaatcacagggagatcaagagctcgaatttacgaagatataaaatctgatatattccccaaaccaataaaaataggccctcgtgcggttgcatgggttgaagaagaaattatcgactggatagaagaaagaaaacaacaacgttttcaggcttaa

SEQ ID NO: 22730 - DNA, 528 bp, Escherichia coli
atgattatggcttttttactcttaaaaatcaatcactcagcgcaatcgcgccaaaataatttgcaatattgcttgactcgcttttttgtcatggcgtatcgtttgcccgcgcctcagaaaacaggtgccgggtttgacagcctgattgtaagagcgggtagccgctatatttccgtaatgcggtttttttgtgcccgtaattccaccctaccccgtattatggcggggcgtaatgggggagcctttgtgctcgctggtttctcttacgccagtctgtcaaccctgttacgtcccgccaccatgtttgacagcgtgctggcgagactccgtaaatcagtaagaggagccgccaaaatggctatatcaatacgccctgattttatctggcgctttatgcagtgccacggtaaaaatatccgccttcataccgttaccgctgccagtgagcgcgaagcgcgcgccctgcttccggcatctcgtctggtctttgttgcccgtatccgtgtccgggaggcgtgccatgtttaa

SEQ ID NO: 22731 - DNA, 183 bp, Escherichia coli
atgtttaagctccttatcaccctgattaactaccagaacggcgacgttcgccagatgattcattcctgggaatatccgacttatgacgatgcatggcgtgatgcctgtcgtatggcatattcccgcaatgacaaacaggggcgattaacccacaaatgcgcagtaaaaatcatggaggggtaa

SEQ ID NO: 22732 - DNA, 189 bp, Escherichia coli
atgtacgagattcatattaaattgcgtaatgtggtaacaggagaggaagaaaacttccacacgatacgtaaatataaatcaaaaggaaaagcggcaagggacgctatcaggtatacggaagaaattgcgccgaaatatcaattgccagaagaagaactcacagcatcagtggtaaaggtgaagaaatga

SEQ ID NO: 22733 - DNA, 219 bp, Escherichia coli
atgaaaagccgttcaatatcccgtaaaaataatggcagtggtgaaaaacgtttctttgtgttgggttatgccgttaataaacgtgggttaaccaaacatgcccatgcaacggtatatggaacgggaccgggcgaagccatacgccgcgcagccgaagggctggaagagctgggaatgacacatttcagggcgttgaaggttacgcagctttctgcctga

SEQ ID NO: 22734 - DNA, 300 bp, Escherichia coli
atgtctgaaaataatatcgacagagaactttacgaaaaagagtatgttggtttttttactgaagatgcgatagaaaacttaaaggatgtaattaatctggttgattgcctgattgcaacgactgctgacgcaaataacaatcatcatattgatatttgccgcggaatgcttatttctgtccttaatattatgagtcgagaactccggtcaataaagtcagatatgcattattcgggtggcatattctccagatacaaagctgaaaccgccgggattgccaaagcaataagtaacaagtaa

SEQ ID NO: 22735 - DNA, 2676 bp, Escherichia coli
atgaaatctgacatcagaaaagagattattaaccgtcttatccgtgattacaacttcaaagaagaaaataactacctccggtatggtgtttgtccgcaatgtggaaagaaagagttgtttaccagccttgaaaggccgtacatcgtacactgcgggcgtgaaaataaatgcggtgcagacctgctgaccaaagaactttacccggatgtgttttcatcatggtcagatcgctatatcagcacgaaagacgagccatatgcagcggcggcagcttatcttcaggaggcacgcaatattactgtggggccactgaagggcgcatttactcaggagcgataccagaacaaggaaaacggcgaacaggccgctactgtgcgttttacgctggctgacggtgtgtggtgggagcgcatcatagaccgaccggaacgcttcgcgcgcaaggcgaatttttccggcagctacaaggggttgtggtgggcttatccgggagcagatttaagcaaggccaaagaaatctggatttgtgagggcatctttgatgccatcagccttaaccagaatggcattgcggccgtttctgtcatgtctgccgtgaactaccctgataaggcgctggaagaactggcgaagctgtgcggagataatccccgtccggttattgtgtgggcgctggataacgggcgtgcgggtgagcgttacgcgaaaaaacatgcagaacgcagcgccgaagatggctggagaacggcagcggcgttaccgggtgaaaacagcaataaacgcgactggaatgatttacacatcgccggaaagctgcgtggccatgatgtgaaaagataccgttattacggtgatttattgctggcgaaatctccaagagataaggcactaataatgttttcctttcgtgagcggaaggaatttcattttacttttgataaccgtgttttctggttcaagctggacattgagcgccatatgaaggctgttgagcgtgtcattaatgagcgaaatgttgatgaggatgaagcgcgcaaaattgcacttaaggaatctggtgcagtaaaagaaatcgcaaactgtaacccagcgccgctttattacattcgaaataatgacacggatgaagcatggtattacttccgtgttacgttcccggatggtgctacggtgaaaaacacctttacatcaggacaattgacatccgcatctgaatttaaaaaacgcctgttgcatgtggcaaaaggcggcatttataccggaacaattgcgcaccttgacgcattaataaaaaatgaccttcccgcaataaaaagtgttatcggtcaagattttgtcggatataacaaagagattggtgcgtggttgtttaatgatatcgcggtttgtaatggtaaaacctacgaaatcaatgaagaggattattttgaaattgatgacgtaaacgcaaaaccattgaataaaaaaccaatattgcagattaactataaaaaaccggatgaatttacaacgtcctgggtggaagatctctggctggcgtttggtgaaaagggaattattaccctggctttctggttgggttcgttgttcagcgaacaaatcaggcagaaaaacacatcttacccctttcttgagattaccggggagcctggaacaggtaaaacaacgttaattgatttttgctggcgtttgtgtggccgtgacaactatgaaggtgttgatccaaccaaaggatcagaatcaggctggaagcgaacttttggacaggtcgccggattacctgttgttttgattgaagcggacaggggcgataacgcacaaaaaaggggggcgtttgatttcgataacctgaaaagcctctataacggcggtggtattggggtacgtggtgttaaaaccaatgataacgccacatatgaccccgtttttaagggggctatcgtgattgcgcagaatgcgcgggtaaacgcctcatcagcaattattgagcgtctggtacgcgtatacaccgataaaaaacgccactcaccagatagccggttggcagcaaaacggctggagctttaccccgttgagcaggtatcgggttttatccatcgggcagtaagccaggagcgggctattatggatttgtttatggcactctcggattctgaaacaacccgcctttatggttgcgaaaatattcgccatcagcgtattgccaaaaatcacgcgcaacttatcgcgctggtcaaggcgctgaaatgcgttattgatatcccggatgaatggcttggtgccacatgccgggaactggaggaaatggcagcagcgcaagctaaagcggtggcggatgacttaccggaggtcatagcgttctgggaggcattcgattacctggacagcacaacaaaatacggcgtaaatcacttcggcaaggaataccggaaggggttcgccgtcagtatcccgcaactgaggcagactgccgccattcaccgcgttgagatcaggactgacccggaaatgttagagcttctcaagtccgggcgttcccgaccgatgattgagtacaaacccgttaatagcaaggtatccaaagaggcaaacgctggaagaggggttgcagaaaacaaagagccgcgtgtactgaaatgctggatattcagttacaaggaggtcgccgaaaaatga

SEQ ID NO: 22736 - DNA, 1011 bp, Escherichia coli
atgacgataaagaagctggttaacggaaagtttgctgtggacgtgcggcctgcaggagcagaaggaaaaagattcaggcggcgatttgatactcgtggtgaagcagtggcgtatgaacgccatgttctgatgcactaccacgacaaagagtgggtcggaaagcctattgaacgtaaagcgttaagcgatcttctggaattatggtgggcgtatcatggcaagaatcatcgttatggagcgatgacgcgggtaagaattgaagctgttctttgtgatatgcgcgaacttgggataaacagaagcgatcatttaacccggaaaaatattatcagatatcgacttaatttaatgaatcgtggaattaaacagtcaacagtaaatcgctattgcgccatgatgagcggtttctttgaaaagctgattgatgctgaagagtttgcgggtaataacccgtttcgcgagatacgtaagttaaacattaatcagccagaaatggcttatcttgcacatgatgatatttccaggctaaccgcgcttttatctggcgataatcttaaggctgtattgttgtgtctggctacaggtgggcgctggggtgagattgccaatattaaaggtgagcacataattggcggaaaggttatttttatgaagacaaagaacggctcaaggcgggtcgttccaatcgctaaagatcttgaatcactggtcaaagtaaaggcgaccggaagattaatgacacctaattatgcaactgtcagaagtgcaataaggactgtgcggccagatttacccgtcggccagtctgtgcatgttttacgacatacctttgccactcactttatgattaatggtggaaacatcatcacattgcaaaaaatacttgggcacagcactattcagcagacgatgacttacgcgcattttgcaccggattacctggcagatgccatgagatttaacccggtagccgacatggcatttaccggacaaaaagagccagcagagtaa

SEQ ID NO: 22737 - DNA, 183 bp, Escherichia coli
atgtctttcccttgcccggcctgtggcgcttcagcccgcacccgtggtcgttcgttggaagaacacgaacaaaacatctacagaacgtattaccagtgcaataatattgagtgtggggcttgtttttgtacgcttgagtcgtttgtacgcattactaagcgcaggaagtcgaaaacttcatag

SEQ ID NO: 22738 - DNA, 234 bp, Escherichia coli
atgaaaaaacgaaagaaaatgcgatgcgtattacgctgtattcgtatcccgctcgaaatcgaccataaaataaatcagatatgtaaggacagagagatgaactactcccagtgcgtcaggatgtttatcagtcagggaattaaggccggggaaaagcatgaagaagaccgcaacgggcgcaatgtcgcgggggatgtgtgggcctgggcaaatgaccagaaccacacgacgtaa

SEQ ID NO: 22739 - DNA, 711 bp, Escherichia coli
atggatataactcaggcaagcgccgaacatcaggtatgtaaagcacagtttgatacagccagggcaaaactcagtgaacaggaatcattaatcaccaatctggaagcgactatcgaacagacgaaaggggagctggaatctctcgatcgtgactggcagaactcaatcctgtctgcgctgggcgtaaaaacggaagcctccgcgaaattatccattcaggcgggtgtggcgcgagaaaatcttgagcgtctgcgggtgctgcatgatgaggcgcgcatcaggctactggagtgtcgttataacgcggcagaggctggttgtgcttacgaaagcattgataataagttgcgggcagagatatttgcaaaagcacttcccgaactgattaacgagctgacccctgctctgttattgattcgtggtttatgtgagctgcttggccagccgctgtataacgcagaaaagaaaatatgcgaaacactgaaagcggcagatactgctgaaagtgtcgggatgattcgcggccggattaacgataccgaaagcgacacctccagcccgctgcgttattgcccggagaaactcccggattcagtaagctgcgcaatcaggagcgccccttcacctgtacaatggagcgcggcgcgacagaatccagaaaaaatgcgcgaccttgcggagggcagagaactctgccgggggtggcagtaa

SEQ ID NO: 22740 - DNA, 1272 bp, Escherichia coli
atgagcggtctgaatactccacatttgcacggcgctgatatagtgagccgactcagggaattaatgtcccggaatcgcctgaaagcaaacatagcaagcataagcgatgagacgcgtcgcgcgctggacaatgaatatcaaaaactggagcgtgagcttgagcttcacagcctgcatactgcaagtggtgggggtaataacgacggcattgagcgttataattgcactgctgattctgttgtatcacaacgaaatcaacagtctcagatggttttcaattgcgctatcgagtcgataaccggaaagcatccgaaggatttgcacttttccggtgacactgcgcgctattcgtcagaagttgaacccgttccccgccagagtgcaacgcttgccagtggatggcaggcaaatttccttgctgaaataactcccgtgcctgttacggatatatcaggtcaggttgtgctggtagacgcttcggggccgttggcacgtacatcgccacctcacgagcgccgttcgccactacaggcgcattcactggtttcaaggggctaccgctgcgagcaggttaattttgattttgcgttgagctacgacaatgccgatgctcacgcatccgcaaacggccttgaaggaagtgcgcgggccgcttttgagcgccggaaatggctggatttaattcagattggttttaacggcacacattatgccgccgaatctgaccctaaaacatatccggggcgtgacgattgcggcgtgggctggttgcagaagtttcgaaatgaagcggcgggaagggttatcagcggcctttctgtttcatcaccgaaaagtaatatacgcggtacacaccatacgatagatgcgctcgttctggatgcctggcaatccatgattgatgaacagtggcaggaaggcattgtggccgtctgcagtcacaatacgctggtccgtaaacaatggcctttgataaaccgtcttgatccatcgcagatgaatcaggaaattttgcttaacgaggaaatcattaaaaatcccgttctggggaatctcccggctgtaaccgttccatttttcccggacaatgctgtattgatcacacctcttgccaatctgtgtctgtactggcagcgtggttccgttcgtggcctggtaaaaaacgagcctcagtataatcgcctcgcgttctatgagtcctgtaaccttgactgggtggtggggcaatatgaggcagggtgcttactggatgggattgactggaaagaatag

SEQ ID NO: 22741 - DNA, 345 bp, Escherichia coli
atgtttgtacctaagcgtggtgatatttgttggctggattttgagccgcagaaaggaaaagagatcggaaagtatcgcccggcactcatactatcccatgagcaatataaccgactcaccgggcttgtcatatgctgccccataagtacgagtatacgaaatgctcccacagaagttccggtaacaaatctggacgcccccagcgtggtagcaaccacactcattcaaacccttgactggcgtcagcggcaagcgcgcttaattacagaggcagaagatggggtatttaatgatgtgcttgaaagagtcattactctgattggtggagagcatctgcttaagtaa

SEQ ID NO: 22742 - DNA, 249 bp, Escherichia coli
atgcgcacacaggttgtattgcaaaaatggggtaacagcattgcccttcgactaacgggaaaccttaaaaccgttccgggtttttcagtgggtgatatcgtcaacgttgaaattagtgaaaaagggctttttgtagaaaagcctgcacgccgtcgcctgagtgaagccgaattactcgccgggataacgccagttacagcgcacgcggacgaaattgccaccccattcaatgaggaggttgattactga

SEQ ID NO: 22743 - DNA, 627 bp, Escherichia coli
atgagcacggtagcgaaagatctcacagaagatattctcaatgaaattattgctggtgcaaatacctcgcttgagcaacttcttgcgttagcactgagagccgaacgtcgagacagaaatcgtttttatgagcgattaccagggaagcgaccagatagatcggatgaagaaggttgcgatatagactacatggagccttcagagatttatcaacttggtaaagatgacggctggaacgcttatcacgatgctgtgatgaagttggatgaaaaagttaaacctctttctcgaccggtagatcacggtttccgcgataactgcgaatgctctagttgccagaccacggcccgtatttgttccgaattgacagataagtccagcctaatctacgaagttaatgtaggcggtaatacatgggtcgaatgcacaagagctgcatacgtaagagcaaaagacaagggtgaattaaccagagttgttacccatcacccaaataatgagcttaaagatcaccagattagagaactggtgaacgagttgcgggatattgcggttcagtaccacggagcgcagcaattgcgggagaagattgccagagcagtgaacaactcagtccgtaaaaaataa

SEQ ID NO: 22744 - DNA, 747 bp, Escherichia coli
atgtctaatacccatgtaaaaaacatcaaacttggtgcctgtaaggtgtcgtttggtggtgtggatttgggttacaccaaaggtggtgttcaggttgaaatcgcaaccgaaacgctgaaagtgaccgtagaccagctgggccagaccacgatctccgagctgatccagggccgcaacatcaccattactgcgccgctggctgaatccgtgttgaaaaacatggtcgatctgatgccaggttccacgctgagttctggcgaagataccgtaaccatcacgtctgcgcagggagtgaacctgatcgacgttgcgaaagagttggtgctgaccccgcaggatgcgacggattatgttctgaccatccctaaagcagcaaccgcgggtaacttcaccatgacctaccagtctgacgacgttcgcgtgttctcagttgagttttccgcttacccggacgacgctggcgtgttggggaaaatgagcctcccaaagccggttgagagcgtcacgctgaccccgtcttcaccgaccgtaaaagtgggcactaaagttcaattgagcgcaaccttcaccccggccgatgcaaccaataagactggcgtgtggagctctgatgcgactgataaagcgaccgtagatcagaacggactggtaactggtaaagctgtcggttcagccaatatcaccttcacaactaatgacggtgccaagaaggcgaccaaagccgtctctgtaactgccgcaagctaa

SEQ ID NO: 22745 - DNA, 384 bp, Escherichia coli
atgctgaacgagaaacgttctatacaaactattcgcgattgcacgagtattatcgagactcatgtgctgaatcagcacaagcttgaagtacgtaagctcaataatgacgctattgaaccggaagactcacgcttcatcgttaccttcaaagacgatgttgagcgcgctggtgcaagcgtgaagccattagctgaagcaatttacctgaatggtcgtgttcgttttgtagtcaagccagctaaacagtaccctgagctgtctcgttttatcgaggctttttcggaggttattgaacattctattcgccgcttcttacgcaatcatggtagcattgtcagcacggttaaggctgatgattctgctacaaaatggctcctacactag

SEQ ID NO: 22746 - DNA, 753 bp, Escherichia coli
atggctcctacactagatagcgcatattcaaaagatctaagcgagtttcctcataaaggggagactcgtgttgttcgttttggctttcttatcaatgaagcctccctctataaaatctcagaaattgaaatcattgaaccagaagatgacatttgcctgtatgtctctatggaacttgtaggtgcgcgcgaccaaggcgacctgagcgaattcatcttagatcgagcggatgaagatgcctctgaagaagagattatcaaagaggtgctccagtccgggcttctggacgaaaacaaaaatacgatcgctggtaggatagctctgcgtgaatatagttttgttgaagacggtaatgagatcgaatgttaccaggtagccggtgtcgaaactgtcagagagcgtcgtcagcgaggattgtgtcaccgtacctatctctttcttcttcattggtatgagcatttagtctgcgacgatacacaaaccattcctggtgctaagatctgggcagggcctctcatgcgaaccggcgatgtgcgtatatacaatgccaaaacagaaacgttcgaggatgtgttaggtgagtacgggatggggaaagaaaccggatttttgccgtggaacagaggattgttgcttgatgcagagttaagctcttggctcccaaacaaagtgcaagttaacgttcagaaatttatcgtacttatcatctcccgcaaaacaagaactccagtaggtttatacctaaaagattaa

SEQ ID NO: 22747 - DNA, 1311 bp, Escherichia coli
atggcactgaaaatgaaaggtaaaaacaaaaagtttacaatgaactccttctttgcagggattggaggatttgatttagcgtttgaaaatgccggttttactaccaattttcagtgtgagttgaataaattctgtgtgcgcatactcgaagagcattggccagatgttcctcgctacggtgatatccagtcacttgatgcaaaggatataccagatgcctcagtttggtgtggtggttttccatgccaagatgtatccgtcgcaagaggctcaaaggggcgattgggtctcaaggggaaaaactctggactgtttttcccatttatcaatctgattgaagctaaaaggccacaagttgttctgctagaaaatgttacggggttgttgtcgtcgcataatgggcaagattttcgtgttattttggagcgactaacatcattaggctatgtagtcagttggcgggtgatgaatagtcgattttttggtgcaccacaatctcgtccaagggtttttatttgtgcggccttgaacaatagttcagtcgcgattagttctttatatgaaaaagataaaggcaaacacttaaaaaatattagagaaggtttcctgaatataagtgcctgtgaagtaagcggtgccagagtcgctgatgtagcatattgccttgctgctacatctggtagacatacaggaactgactggagtagaacttatatatcctatgaatcctctgtgagaaggatgactccaaaggagtgtgaaggcgtccaaggtttccctatcaactggactctacctttatattctacaagcaagtctgaagatattgatagcgaaagatatcacgcattaggtaatgcagtagcagttcccgttgttgagtggatagctaaaaggctattcactgcattgaagaataacgatattgtcgaaaatgaagtggctagatccgaaagcattgaaaatgtaatgaataatcatcctgatataaaagtagagaatggaagaaagcaagcgctatcagaattacattttgacactttggacaaaaacaaaaaacttcgctggctttcaggtggaattgctttcggaaatatttgttatgatttcaaagtgcctgatgcaccctctaagcctaagctggaaaaattgatttcagtaattgagaaggtgagcgtggatgataaatattttattagcgcaaacgccgctgagggtatattgcgtagagtagacagtcagaatcgtaagttattccctccattacatgaagctcttttgaaactaagtaaaaagaaaagtgttgcttaa

SEQ ID NO: 22748 - DNA, 234 bp, Escherichia coli
atgacggcagggttcaactttaataactatgcagcaggtttttgttccgctaccccggcgttaaggggaaatgaggtcagcatggatactatcgatcttggcaacaacgaatctctggtatgcggtgtgttccctaaccaggacggcaccttcaccgcgatgacgtataccaaaagtaaaacgtttaaaaccgcagctggcgcgcatcgctggttagcaagaaacactgactga

SEQ ID NO: 22749 - DNA, 963 bp, Escherichia coli
atgagcagcaagcttcatggtcttgtctgggaagggtgcgccttcaccggcatgatcttatccagggtggcggttatggcccgtcttgcagactacagcaatgacgagggcgtgtcatggcctgccattgaaactatccggcgtcagatcggtgcaagaagtgaatccacagtgaaatcggctattgcagaactggcgaaagagggctggctgacgaaggaagagcgtaaggtcggtgggcgtaatgtaagcaatatctatcggcttaatgtggaaaaactcgaagcagctgcggcggcggcgcgtgagtcatataaaccgaaaagaaaaattagcccggcaaaaaatgacccgttaacagttgacccgtcaaatattgacccctcaacggttgacccgtcaaattttgatggatcaaccgttgataaaaaactgccgattaggggggcgatgattgaccccgatccgtcagtattaaaacctgatccgtcagataaaagatcttcttgtccggacgcttcgcaaccggacccgcagacggctgaacaggattttttaacccgacaccctgacgcggttgtgttcagtgcgaaaaaacgccagtggggaagtcaggaagatttggtgtgcgcacagtggatctggggacgaatcgtgagtctttacgagcaggcggccagcgatgatggcgagatcactagaccgaaagaacccaactggacagcatgggccaatgacgttcgcacaatgcggatgctggatggcagaactcacagacaaatttgtgaaatgtttgggcgtctccagcgggattcgttctgggtaaaaaacatcatgagtccggcaaaactccgggaaaaatgggatgaactggttatccgcctggggcgttcgcctgcgcagcgttgcgtgaatcacatttctgaaccggacactgaaattccgccgggcttcagggggtaa

SEQ ID NO: 22750 - DNA, 132 bp, Escherichia coli
atgctgccgttgctaaatgaagacccaaaagtggtaaaaccatacctggaaatattctggagtcaacccagtaaaaaaggggccgaagcccctttgaattttgcgctgaaaaaagtgttgctaggatgttag

SEQ ID NO: 22751 - DNA, 555 bp, Escherichia coli
atgaataagcgcaacctcaatattcttgcctctctggtaatcatgctcgctctgacgggatgtaacgaatcggagatcgacaaaattaccttaataggtagagataaaagcgatcttgcacagaactataaagcccagttccaagagcaaacacccagtattgaggtattcgctcttcaagataaaaatgcaccgaatgaacaggaaccacatacgcatggaaatctcattgatggaaaggttgaatcgtctttaacgacaaatgtcggtaagtatacgttcatgcagatcggtgaaatgatgacaagggagtacggaaaaccggtagcaacgaaagacagaattttcgaccaagaagctatctcaggtatggactgtattgagacaaagacctgtggtgcaggcaagtattatgaagtctatcgagggaaggatcgtttagtaatggtgattaacggtgcaggctttgtgaacgaaaaagagggtgtaacattgctttctatcaccgataagatgattaaagtttcacgcttgaaagaagacaaacgcaaatag

SEQ ID NO: 22752 - DNA, 789 bp, Escherichia coli
gtgagtaacagagatgatttttccccatcggtgaagcgaacactagccgaacgcgtaggctggaagtgctcttatcctggctgcaaccagacaactgtaggtccagatagcagtgatacaaacagcaggattaataatggtattgcggcacatattacagcagcagcgccaggtggaccgagatatgatcctagcttaaccccagaacagcgaagctcgattgataacggtatatggatgtgtcgttcacatggcgcactcattgactctgactacactatctattccgttgagcaattgaaaaactggaagcagctggccgaaactcaacaatctcttctgctacagatgacgcaccaggtgagtcagaacaattactcagaaagagacgtcggtgttttaaaagccattactgatatttttaattacaactacctccaaatgctgaagagcgaacagttccgggcaaaagtaagcaccgacattaccgaccctctctacgcatttgataatattgcccataaccccttttacagcttcaatgatgttgttttagaaacaatccgtatggagttggtcgggaaagtgaacaacttttgggcgctgttcagagaacattctgctggagggcttgggtattatgattatatcgatatcccccatatcagacgtttttatcctgatcaggttgagcgctattacggaatcattaaccaaacacaagatctggcgtatgaaatcagcataacggcacagaaattactcgaaattagagcaaaactgccgtga

SEQ ID NO: 22753 - DNA, 126 bp, Escherichia coli
atgggaaacaaacgtaaacaggcgcgtcgcgcagctcatcaggcactgaagtcaaaaccatgtatccactactgcgaaattggcacaatcatcgttaatgaacagcagttgcacgaggtgaagtga

SEQ ID NO: 22754 - DNA, 591 bp, Escherichia coli
atgtttgatatttataatttattaaagcaaatagcagagaacacgaaacctgaccattctgctatttggattgctgtaatatcttcaatatcagctattgcaggcgctgctattggtgcatatttgttatatcgaggcacaaacgaacaaattaattctgctgctgctattgaagataaaaaattaaaagcaactataattaccgcagaaagacttcgttggcttcaagagctaaggtcaagaagtagtgagttttatgcgaatctcgatatgaattacaacttattaaaacgaccgataaatccgcaggcaatcccgacatatcaacaagctggggacgaactggcgaaaattgtaatgattcaatgcaatcagataattgtattgcttaatcctaaaaaaactcatcagcaaactatttttaataaatgtaatgacgcacttaaatttttcatggaatgcgtcgaagaaaaaaataatggtaatctgaactttgatgattccaagtatgcggaaataaaaaacgattactttaatgctttaactgaaataggtattgaaacttggaagcagataaaagagttaagttga

SEQ ID NO: 22755 - DNA, 708 bp, Escherichia coli
atgaggggatctctcagtgcggagtggctgtttggcggcaccggcgttggtgccagcaaccactttgaagcaggcggatttattcgcagccgtgaggaatttgcgtggccgaatattcagtaccatttcctgccagtggcgattaactataacggctcgaacgcagtgaaagagcacggcttccaatgccatgtcggatcgatgcgctcgccaagccgtgggcatgtgcggattaaatcccgcgacccgcaccagcatccgggaattctgtttaactacatgtcgcacgagcaggactggcaggagttccgcgacgcaattcgcatcacccgcgagatcatgcatcaacccgcgctggatcaataccgtggccgcgaaatcagccctggtgtcgaatgccagacggatgagcagctcgatgagttcgtgcgtaaccacgccgaaaccgcgtttcatccgtgcggtacctgcaaaatgggttatgacgagatggctgtggttgacggcgaaggccgcgtacacgggctggaaggcctgcgcgtggtggatgcgtcaattatgccgcaaattatcaccggcaatttgaacgccacgacgattatgattggcgagaaaatagcggatatgattcgtgggaaggaagcgttgccgaggagcacggcgggatattttgtggcaaatgggatgccggtgagagcgaaaaaatga

SEQ ID NO: 22756 - DNA, 579 bp, Escherichia coli
atgaccacctttaccaaagaacagttaatctcccatgcacgcgaaagcgttagttatctgggaaacttgaaaggacgtgttagcaaagaaggtgcggactgcaaagttgttcttgagatggttgaacgagatctagaactggcacgaattgcactggcctcgattgaggcaaaaccaataggtgcattccacattgcagaacagcaagttgacggcacaagtgactacctcaaggatggagaatggcctattgataatggaattattgaggtctacgccgccccacccattccagtagtacctgaagaaaaaccaatgcctaaccctcttaaaatgtacgcggtcgatgctgttgccgctattgcagaggtgagaggctggaacgcctgtcgtgccgccatgcttcagagtcaagatagtggcattaaggatagctggataagctgtagtgagcgaatgcctgtaatcggcgagctaaattggagaactggttttcctttgctgattacgtgtgagatcggcgttataccagcttattacggctttgtgagcgttaatgggggtgaagtggtttactga

SEQ ID NO: 22757 - DNA, 414 bp, Escherichia coli
atgagtaacaaaatcgaaaaccccgtagttctcattcacaagcgtgagaaccacgactcctatgcggtggcgatcaccaatgggagtcacgattattacgatggtctgctaatggcctcagtgtcgcctgatgaggcagacaactcttttgccgtattcgctatggttggttactacatggctgccgaaattgagaagttgcgtgttgagctggagaccgttaaacagcgggaaaaggatctgtttatggaaaatgttcgacttaagtcaggtatagcaggtctgatacacctcggtattcgatatgcggatgtcgaagtcatgaaaatagctggagatgaccagctttctactccctgtactgacagcatcataaacagtattgcatcaggcgttttcaccaaagagggttag

SEQ ID NO: 22758 - DNA, 804 bp, Escherichia coli; identical to SEQ ID NO: 6089

SEQ ID NO: 22759 - DNA, 837 bp, Escherichia coli
atgttcatgccgcctgtttttcctgctcattggcacgtttcgcaacctgttctcattgcggacaccttttccagcctcgtttggaaagtttcattgccagacgggactcctgcaatcgtcaagggattgaaacctatagaagacattgctgatgaactgcgcggggccgactatctggtatggcgcaatgggaggggagcagtccggttgctcggtcgtgagaacaatctgatgttgctcgaatatgccggggagcgaatgctctctcacatcgttgccgagcacggcgactaccaggcgaccgaaattgcagcggaactaatggcgaagctgtatgccgcatctgaggaacccctgccttctgcccttctcccgatccgggatcgctttgcagctttgtttcagcgggcgcgcgatgatcaaaacgcaggttgtcaaactgactacgtccacgcggcgattatagccgatcaaatgatgagcaatgcctcggaactgcgtgggctacatggcgatctgcatcatgaaaacatcatgttctccagtcgcggctggctggtgatagatcccgtcggtctggtcggtgaagtgggctttggcgccgccaatatgttctacgatccggctgacagagacgacctttgtctcgatcctagacgcattgcacagatggcggacgcattctctcgtgcgctggacgtcgatccgcgtcgcctgctcgaccaggcgtacgcttatgggtgcctttccgcagcttggaacgcggatggagaagaggagcaacgcgatctagctatcgcggccgcgatcaagcaggtgcgacagacgtcatactag

SEQ ID NO: 22760 - DNA, 2148 bp, Escherichia coli
atggattcaacgcaaagtacctcattgaaccagggagatattcgcccggagaaaatctctattcacggtgcgtcgccctaccagaatgcctatttgattgacggtattagtgcaacgaataacctgaacccagcgaatgagtccgatgccagtagtgcaaccaatattagcgggatgtcacaggggtattatcttgatgtcagcttactggacaatgtgacgctttatgacagttttgtgccggttgaattcggtcgcttcaatggcggggtaattgatgcaaagatcaaacgcttcaacgctgatgatagcagcgtgaaactgggttatcgcactacgcgttcggactggttaacatcgcatatcgatgagaataacaagagcgcatttaatcaaggttcttcaggaagtacttattactctccagattttaaaaagaacttttataccttgtcgtttaatcaggaactcgctgataactttggcgttaccgccggtttatcgcgccgccagtctgatatcacccgcgcggattatgtttcgaatgacggcattgtcgccggcagggcacagtataaaaacgttatcgatactgcattgagcaaatttacctggtttgccagcgaccgctttacccacgatttaaccttaaaatataccggctccagccgtgattataataccagcacctttccggagtctgatcgcgaaatgggtaataaatcctatggtctggcatgggatatggatacccagctcgcatgggccaaactgcgtaccaccgttggttgggatcatattagtgattatacccgtcacgatcatgacatctggtacaccgaactttcatgtacatatggtgatatttcagggcgttgcacccgtggcggattaggacacatttcccaggctgtagataattacaccttcaaaacacgcctggactggcaaaaattcaccgtgggtaatgtttcgcatcaaccctacttcggcgcggaatacatctattccgatgcatggactgaacgccataaccagtctgaatcctatgtgattaatgctgccggaaagaaaactaaccataccatttaccataaaggtaaaggcagcctgggaattgacaactacacgctgtatatggcggatcgcattagctggcggaatgtgtcgttaatgcccggtgtgcggtatgactatgacaactatctgtcaaaccacaatatctccccgcgatttatgacggaatgggatatttttgctgatcaaacctcaatgattaccgccggttataaccgttactatggcgggaatattcttgatatgggattacgtgatatccgcaatagctggacggaatcggtatcaggcaataaaaccctgacgcgttatcaggatttgaaaacgccttataacgatgaactggcaatgggattgcagcagaaaatcggtaagaacgttattgcgcgtgcaaactatgtttaccgtgaagcgcatgatcaaatcagcaaaagcagccgtaccgacagcgcgactaaaaccaccattactgaatataacaacgatggcaaaaccaaaacacattcgtttaacctcagttttgaactggccgaacccctgcatatcagccaggtagatattaacccgcaaattgtctttagctatatcaagagcaagggcaacttgtcgttaaacaatggttatgaggagagcaataccggtgataaccgggtggtttataacggtaatctggtctcttacgatagcgttccagtggcggattttaataatccactaaagatctccttaaacatggatttcacgcatcaaccgagcgggttggtgtgggcgaatacgctgacctggcaagaagcgcgtaaagctcgcattatcctgggtaagacgaatgcgcaatacatcagcgaatattcagattacaagcagtatgttgacgagaaactggatagcagcctgacctgggacacccgcttgtcctggacgccacaatttctgaaacaacaaaacctgacgatcagtgccgatattctcaatgtactggatagcaaaaccgctgttgatacaacgaataccggcgtggcgacctacgccagtggccgtactttctggcttgatgtcagcatgaaattttaa

SEQ ID NO: 22761 - DNA, 261 bp, Escherichia coli
gtgtcactccttttgaatcgtgagcatacgaacggtcaggtaacaaacgcatcgtatgcaaaagttattgagacggtgcttaaaagcggcgtgcaggctgatgatcgcacaggcactggtactttaagcacctgctacgttccctcttactacatgcttactggtgggactgtgccgcttatttctggaaaggcggtaaatcttaagccactgcttgtcgaacttgagtggttacgctacgctgtacgaggcaggagttga

SEQ ID NO: 22762 - DNA, 726 bp, Escherichia coli
atggatgacccggtaaagggcgaaggccggatgattactgatgccagtggcgtcaccagaagggaaggcgggattttgggaatgtggagcaatatatttccagaacgtaatggtagcaacgagcaaaaaggtgatagcacaccgcgcatacccgacatcagggatattcttgatattttccctcagccactgcgggaaaagctgttgaacaaaatcagtgaagccatcgactatgaacccgtgattggtgtcatgggaaaaactggcgcggggaaaagcagcgtatgtaatgcgctgtttaaaggggaggtttgtgcagttagcgacgttgaggcatgtactcgtgaagttcaggaattgcatatacgcttcggaaaacattcgctgaagataattgatatacctggtgtcggtgagaatgcccggcgggataaggagtatgaagatttataccgcaatttgcttccctccctggatctcatcctgtgggtaataaaaggtgacgatcgggccttttctgcggatgagcatttctacaacaatgttctgctccctgctggtgggggtgagcgcgttttattcgtccttaaccaggttgataaaattgagccattccgcgagtgggatactcatctgcatcagccatctcctgcacagcgcatcaacatcgaaaagaaagaagcctacattactgaacgatttggttttacgcactatccggtgtga

SEQ ID NO: 22763 - DNA, 237 bp, Escherichia coli
atgaatgataatattgcaatatcagtaagtctgctatgtgagcaaacacctgaaatactctgcaccatccaagcaagcgtcagtacgttcattgcgctatgtgggtattcagccgaggaagtaatggatgatgaaaacctgacagatgcgttgaacagttatgttaataacgaactggtcagtgaaatggatttaagatatggatcagtgatcattaatctggtttataaaaagtag

SEQ ID NO: 22764 - DNA, 318 bp, Escherichia coli
atgagtaaagcaataacagaagtccacgaaatcaaagtttacaatgaatctaccagattattccttgtgaagtcattttattgctatgagctttatatcagtaatatgcaggaatacatgggcgatagatttgttaaaatggttgaagacagaatatatatggatgatgtttttgacaaggtaatagaaaacagtaaggaaggatttaataagtttcttaaggagtgtaaaagctcaggctctatcagagatgttttattcgatgaggtcaaagtaaatctgagacatatgcacaacgttatttttaactcaaactaa

SEQ ID NO: 22765 - DNA, 219 bp, Escherichia coli
atggttcaaatcaaaacagataaacatcccaagctcattcgtttacctgaggtaatgaacagaactggattcgggaagacatggatatatgagcttattaaagcgggttgctttcctgcacagataaaaacaggtgtaagagcaatcgcctttattgaaagtgaggtggatgcgtggattgaacgagctattcagacatcacgaaaacaagaagtttaa

SEQ ID NO: 22766 - DNA, 921 bp, Escherichia coli
atggacattgcagttattggttccaatatggtggatctcattacttacacgaatcagatgcctaaagaaggagaaactctggaagcacctgccttcaaaatcggatgtggtgggaaaggtgctaatcaagcggtggcggcggctaaattgaattcaaaagtcctgatgctgactaaagtaggtgatgatatttttgcggataatactattcgtaatctcgaatcatggggaattaataccacttatgttgagaaggtcccctgtaccagcagtggtgttgcaccgatctttgttaatgccaactcgagcaatagtatattaataattaagggagcgaataaatttctttccccggaagatatcgatcgagctgcagaagatctgaaaaaatgcaaattgatcgttttacaactggaagttcaactggaaacagtttaccacgcgattgagtttggtaagaaaaatggtattgaagtgttattaaatccggctccggcattgcgtgagttagatatgtcttatgcctgcaaatgtgatttctttatcccgaatgaaacagaactggaaatattaaccggtatgtcggttgatacttatgatcatattcgtttggccgcacgttcgttagttgataaagggctgaacaatattattgttaccatgagcgaaaaaggcgcattatggatgacccgtgatcaggaagtccatgttcctgcattcaaagtaaatgctgttgatactagtggcgctggtgacgcatttattggttgcttttcccattattatgttcaaagcggtgatgttgaagccgctttgaaaaaagccgctctctttgccgctttcagcgtcacagggaaaggtacgcaatcatcttatccgagtattgaacaatttaatgaatttttaaccttaaacgaataa

SEQ ID NO: 22767 - DNA, 1017 bp, Escherichia coli
ttgctgacacattattcgtttgaagagatcgaagaactcggcaattacattaagcctaaacgtgacgatctttttggctatgcggctacggtgcagctgcaaagcaaatatctcgtacaaaaccgtgttactggtgagattcacgaaggtccgcaacatatctatatgctggttggcatgtgtctgttccagaattgggaagacgactgcgcgggcaaaacacgtatggagatggtcaaaggtttctatgacattacaagtacgttcaaactgtctctgcccacaccaatcatggccggcgtccgtactccaacccgtcagttctccagttgtgtgctgattgagtctggcgatagtctgaaaggtattagtgcagcttcagccgcaattatcgactacgtttcacgtcgtgctggaattggttcgatgattggtttaaaagcggataaagtgcacagcgcgatctcaccgttcgggtcgtcggtaaatgtcagtggacgagtaggtaaagtgatctccatacacaggtttgcctttggcgaacggaagttgcttgagggtaacaccaaaattatgcgctttattgcccgtgatgaagctctgcattgcgaaggaactgaacgcatgatccgcttcatgcgtaccggtcgcgaaggtttattgtggaaagagattgctgctgatgaagaaaacgtcatttacgacaccatgaaatcagtcgccgaacaagaaatgaactgggcagactatctcttcaaagacggttcgatgattggtttaaacgcggatattctcaaaacctatgtaaaataccgcaccaatctggctatgaatcgtcttggcctgaaggctttatttccagaggttaccaccgatccgctggtctggatgaacaagtggttgttaaccgacacactgcaaattgcaccacaagaggcagagcaaagcacatatctggtaggtcagatcgattctaccgtggataaggcttctctaagccagtttgctgacctgtaa

SEQ ID NO: 22768 - DNA, 351 bp, Escherichia coli
atgcgagctgccgtcgctgccgcgggtaacttccgttgtgcggatccagccctgaacaggcaggaactccttgcgaaccttcatacgctgaaaagctgcattcatccggttcagcatctcgcccagttccccaatcgcacagttgcgcacggtcagggtcaggaacatccagcgggcatcagggtaatccgccacgatacgcggcagggactggtagaaacgggcttgccacatcagggagcgcctccactggcagacaggacagtgccggacacggcagaaatgcgcctcacgcagcctcagacgcgtttctccggtttccttgagggtagaccacccgaaacgcagtaa

SEQ ID NO: 22769 - DNA, 492 bp, Escherichia coli
atgatgtacagacatatgcctctgatacgtcttgttgtcagagagttatcactgaataaatcacctgagccagaaatatctgtgcctgtagcatcgctccgtcgtccggaacgccttaaacagcaaacccgcaaaaaacggcatcagctttggacagaggttatggccctgcataacaagggatgtagtttcagggaaatatcccgtattacaggcctgtcgcgtgtgacagtcagtcgcagggggcgttcaggaacattccctgaaatgtcaacccggcctccaaagcgagggcttctggacccatggagggagtggttaaaagagcaacgagaaagtggtaattataacgccagcaggatatggcgggaaatggtggccaggggggtacaggcagtgaaaccatcgtcagggatgctgttgccaaatcgcgtaaaggctggatcccaccggttactactgccgcaagacttccttcagtgtcccgggtaa

SEQ ID NO: 22770 - DNA, 633 bp, Escherichia coli
atggggcgctggcttgctggcagactcatgaaagagctggggctggtcagctgtcagcagccgacttaccggtataaacgtggtggtcatgaacatgttgttatccctaactaccttgaacggcagttcgccgtgaccgagccaaatcaggtgtggtgcggtgatgtgacctatatctggacgggtaagcgctgggcgtacctcgccgttgttctcgacctgttcgcaagaaaaccagtgggctgggccatgtcgttctcgccggacagcaggcttaccatgaaagcactggaaatggcatgggaaacccgtggtaagcccgtcggggtgatgttccacagcgatcaaggcagtcattatacgagcaggcagttccggcagttactgtggagataccggatcaggcagagtatgagtcggcgtggaaactgctgggataacagcccaatggagcgcttcttcaggagtctgaagaacgaatgggtgccggcgacgggctatgtaagcttcagcgatgcagctcacgcaataacggactatatcgttggatattacagcgcactaagaccgcacgaatataatggtgggttaccaccaaacgaatcggaaaatcgatactggaaaaaactctaa

SEQ ID NO: 22771 - DNA, 399 bp, Escherichia coli
atgacgttggggttattgttggctatttttatcgcttctaagcgtgcggaataccgtgatctggcaaaaatgtcatttatccccggtattttcaatatcaatgaaccgataatgttcggccttcctattgtacttaaccccatcatgatggtgccgtttattatggttcccattgttaactgtgccattggttacttctttgtttcgatggaaattattccaccggttgcttatgccgtgccctggactacgcccggacctttaattgctttcctcggaaccgggggaaactggctggcattactggttggttttttatgtttaggtgtggcgacaatgatctatttaccttttgttatcgccgccaacaaagtcaataacatgacaactaacggataa

SEQ ID NO: 22772 - DNA, 453 bp, Escherichia coli
atgaaagaaaatcctgaaatatatttcgatttctttatatctcatgctagtgaagataaagataagttcgttagaccattggtaaatgaattatcgcgacttggtattaatgtttggttcgatgaacaaacattggaaattggtgatagcttaagaaggaatatagatacgggcttaaaaaaagcatcttatggaattgtcgtgctgtctcatgctttttttagtaaaaaatggactcagtatgagttagatagcttgattaaccgagcagtaaatgacgaaaataaagttctgctaccaatctggcataatattgatgcaacagaggttgcagagtatagccattacttagcagataaacttgctttacaaacaacgatacatagtattgatgaaatagcaaaagaactatctaaaatagcatacaaacgtagaagcatcgcaacgtcataa

SEQ ID NO: 22773 - DNA, 243 bp, Escherichia coli; identical to SEQ ID NO: 9259

SEQ ID NO: 22774 - DNA, 828 bp, Escherichia coli
gtgctgactgacggtaagctccatgctgatgacacgcctgtcccggtgctgttgccaggcaataagaaaacgaagaccgggcggttatggacctgcgttcgtgacgaccgtaacgccgggtcaacgctggcgccggcggtgtggttcgcttacagcccggacagaaaaggcatccatccgcagacccatcttgcggggttcagtggtgtactgcaggcggatgcatacgccgggttcaacgagctgtaccgggatggccggataacggaagccgcctgttgggctcacgcccgccgtaaaatccacgatgtgcacgttcgcaccccgtcagccctgacggaggaagcgctgaaacggatcggcgaactgtacgccatcgaggcagagataaggggaatgacggcggagcagcgccttgccgaacgtcagttgaaaacgaaaccgctgctgaaatccctggaaagctggctgcgtgaaaagatgaaaaccctgtcgcgacactcagaactggcgaaagcgttcgcatacgccctgaaccagtggccggcgctgacgtactatgcagatgatggctgggctgaggcggacaataacatcgctgaaaatgcgttgcggatggtcagtctgggccgcaaaaactacctgttcttcggttcggatcatggaggagagcggggagcgctgctgtacagcctgatcgggacgtgcaaactgaacggagtggagccagaaagctacctccgctatgtccttgacgtcatagccgactggccgataaaccgggtcggcgaactgctcccctggcgcgtagcactgccgactgaataa

SEQ ID NO: 22775 - DNA, 222 bp, Escherichia coli; identical to SEQ ID NO: 8150

SEQ ID NO: 22776 - DNA, 519 bp, Escherichia coli
gtgttagccggtgttgctcatactggttcctcatcgagtgccgactttgacgatttacgccagcgcatacagcttcaggcgaatgccaaagagttcaagctgaaacacttagctaagggcgacttcctgactatgctcacgtctaagaagctcacagcgttctttgagtggcttctatatagtgatctatacctacactacttccatctcaacatggagtattggggattcattgacatcattgatgactgtatcctctttgggcgtgaaaagggcttcatccgggaaaccagtaatgaacagttctttggctacatgatggcaaacaaggacgctctacacacctacgttaaggcaaacaagattccttttatccagttcctcaagtcctatgacttcccatacattgaggggcgggagaaggatttcataaaggggctatcaagccagatctctaatcattgcatagagctctatacagcaaccaataaagatgcgctcacagcccggatctcctga

SEQ ID NO: 22777 - DNA, 246 bp, Escherichia coli
gtgggctgggatgcttttcatcttgcagaagtcctgttaactcaaccactaatggttgtagtgggcgatagagtgggcgcttttggtgcctatcgtgacggctgcgaaattattggtcgtgcagcctcaaaacataaagaactggtcgtggttgaaggttattcacattacgacctgtatgataagccagaacctgtgaaacaggcgctcgataaattaattcctttttacaaaacacatttgtaa

SEQ ID NO: 22778 - DNA, 894 bp, Escherichia coli
atggtactttctgattgttattcatgggataacgagcagtctggacatgcccgtctcggtgatccgcgtcgtacacgacgccttgtgtcactgacctcttctctcgctcagcatgcaggtctttctattgtgaaatcatcccagtccactgctcaggttgaaggtgcgtaccgcctgatacgtaacccgtctgtgtccccgcaagccattgccgaagccggatttaccgccactgtaagggcatgtgaggctcatccgctgctcctcgcactggaagacaccaccaccattaacttcagccacagtacggcatctgatgaccaggggaataccaccactaacccgaagacgcgcgggctgctggctcactctgtcctgatgtacgcccctgacagcgccctgccagtcggttttatcgaacagcagcgctggagtcgggtcacggacacctacggtgttaagcaccagcgaaaagaacgtccctgtgaagaaaaagaaagttaccgctggcagcaggcttcggagcgtatggccgaacggctgggggagatacagaaacgggtaatcactgtctgtgaccgggaagcggatatctggcattacctgcattataaagtcagccacggacagcgcttcgtggtgcgtactgcacagaatagccggctggaagaagcacccggcaagctcttcgaactgccggaagtcctggcaaccgcgggaagccacacgctgaatgtgatgcaaaaaggagggcgggcagcccgccaggcccggatgttcatcaggtacagcgaagtcagcataaaaatcgcgacaacagcggccaggcgctcccgctcacgtatgtctgttgccgggagcagtcagaggacggtgcctgctggcatctgctga

SEQ ID NO: 22779 - DNA, 345 bp, Escherichia coli; identical to SEQ ID NO: 12662

SEQ ID NO: 22780 - DNA, 570 bp, Escherichia coli; identical to SEQ ID NO: 12745

SEQ ID NO: 22781 - DNA, 534 bp, Escherichia coli; identical to SEQ ID NO: 7078

SEQ ID NO: 22782 - DNA, 1332 bp, Escherichia coli
atgctgacggtccgggcggtaaatgcgtgggggctgcagggcgatccggcatcggtatcgttccggattgccgcaccggcagcgccgtctcggattgagctgacaccgggctattttcagataaccgccacgccacatcttgcggtttatgacccgacggtacagtttgagttctggttctcggaaaaacggattgcggatatcaggcaggttgaaaccacagcccgctatcttggcacggcgctgtactggatagctgccagtatcaatatcaggccgggccatgattattatttttacgttcgcagtgtgaacaccgttggcaaatcggcattcgtggaggctgttggtcgggcgagcgatgatgcggaaggttacctggattttttcaaaggccagataaccgaatcccatcttggcaaggagctgctggaaaaagtcgagctgacggaggataacgccagcaaactggaggagttttcgaaagagtggaaggacgccagtgataagtggaatgccatgtggggcgtcaaaattgagcagaccaaagacggcaaacattatgtcgcgggtattggcctcagcatggaggacacggaggaaggcaaactgagccagttcctggttgccgctaaccgtatcgcgtttattgatccgtctaatggcaacacaagaccaatgtttgttggtcagggcgatcagatattcatgaacgacgtgttcctgaaacgcctgacggctccgaccattaccagcggcggtaatcctccggcattttccctgacaccggacgggcggctgacggcgaaaaatgccgatatcagcggtaacgtgaatgcgaactccgggacgctcaacaacgtcacgattaacgagaactgtcgggttctgggaaaactgtccgcgaaccagattgaaggcgatctcgttaaaacagtgggcaaagctttcccccgggactcccgtgcaccggaacggtggccatcagggaccattaccgtcagggtttatgacgatcagccgtttgaccggcagattgttattcctgcggtggcattcagcggcgctaaacatgagagagagcatactgatatttactcctcatgccgtctgatagtgcggaaaaacggtgctgaaatttataaccgtaccgcgctggataatacgctgatttacagtggcgttattgatatgcctgccggtcacggtcacatgacgctggagttttcggtgtcagcatggctggtaaatgactggtatcccacagcaagtatcagcgatttgctggttgtggtgatgaagaaagccaccgcaggcatcagtatcagctga

SEQ ID NO: 22783 - DNA, 600 bp, Escherichia coli
atgcgtaaagtttgtgcagccattttgtccgcagccatctgtctgtccgtatccggtgcgcctgcatgggcatctgaacatcagtccacgctgagcgcgggctatcttcatgcctcgacgaacgttcccggcagcgatgatcttaacgggattaacgtgaaataccgttatgagtttacggacacactggggctggtgacgtcattcagctatgcaggagacaagaatcgccagcttacccgttacagcgatacccgctggcatgaagattccgtgcgtaaccgctggttcagcgtgatggcggggccgtctgtgcgcgtgaatgaatggttcagcgcgtatgcgatggcgggtatggcttacagccgtgtgtcgactttctccggggattatctccgcgtaactgacaacaaggggaaaacgcacgacgtgctgaccggaagtgatgacggtcgccacagcaacacgtctctggcgtggggagctggcgtgcagtttaacccgaccgaatccgtggccattgatattgcttatgaaggctccggcagtggcgactggcgcactgacggtttcatcgtgggtgtcggttataagttctga

SEQ ID NO: 22784 - DNA, 1473 bp, Escherichia coli
atgaattgtagcctgacattaagccagaggttaagcctagtatttacagtcgttttgctgttttgcgcagcagtgacatgtggcgttcatatttacagcagtaatctgtatggcaatgcaatggtacagcgtttatctgcagggctggcgcaacagattgtcatcacggagcctctgctggataatcgtgggcaggtgaatcaccggacattaaagagtctgtttgagcgtctgatgacgcttaatcccagtgtggagctgtatattgtctcgccggaaggtcggctgcttgtggaggccgcccctctaggtcatatcaaacgtcggtatatcaatatagcgcccttgaaaaaatttctctccggtgctgtctggcccgtatatggtgatgatccccgaagtgtaaataagaaaaaagttttcagtaccgcaccgctttacctgagggatgatctgaaaggatatctgtatattattttacagggagaggaacttaatgctcttactgatgcagcctggacaaaggcactatggaatgcactgtactggtcgctgtttctggtagtgatatgtggtctgctgtcgggtatgctggtctggtactgggtaacccgtcccatacagcaactaactgaaaatgtcagcgggatagagcaggacagtattagtgccattaaacaactggcaattcagcgccctgccaccccccctagcaacgaggtcgagatattacacaatgccttcattgaactggcccgtaaaatatcctgtcagtgggatcaactttcagaaagtgatcaacagcgccgtgaatttattgccaatatctcccatgatttacggacgccattaacatcacttctgggatatctggaaaccctgtcaatgaagtcggattcgctatcatcagaggactgtcataaatatctgacaacagctctccggcagggacacaaggtgaggcatctatcctgtcagctttttgagctggcacgtcttgagcatggtgctataaaacctcaactggagcaattttctgtctgtgaacttattcaggatgtagctcaaaaatttgagctcagcatagaaacccgtcgattgcaactaagaattatgatgtcacattccctgcctcttatcagggcagatatttcaatgatagagcgtgtgataacaaatttactggataatgctgtacgccacacacctccggaaggctcgatcaggctgaaagtctggcaggaagataatcggttgcacgtcgaagtggctgacagcggccctggactaactgaagatatgcgaactcatcttttccggcgggcatcagtgttatgtcatgaaccgtcagaagagccccggggaggactgggattgctgattgtacgcaggatgctggtactacacggtggtgatatcaggttgactgattcaacgactggagcctgctttcgtttttttcttccattataa

SEQ ID NO: 22785 - DNA, 231 bp, Escherichia coli
atgaatcaatcagagcagagaaaaaaaatactggttcttacacctcgctttccctaccctgtcattggaggggatagattaagagtctatatgttatgtaaagaactttccaaaaaatatgatcttattcttctgagcttatgtgatcaaccactagaacttgaaataaatataaatgactcggtcttcaaagaaattcatcgtgtctatctaccaaaatataaatcataa

SEQ ID NO: 22786 - DNA, 1464 bp, Escherichia coli
atgataaagaaaaaaggatttaccttactggaagtgacgattgtgttaggtattggaacgcttatcgcttttatgaagtttcaggatatgagaaacgatcaggaagcggtattggctgataatgtcggaacacagattaaacagcttggtgaagcggttaaccgctatatcagtattcgttatgacaagatttccacactgtcatcatccaacaatcaaagtagcgatccggggccaagaacctgttcggctgctggttgtgaaatcacttaccagacattaattaatgaaggtctgttacctgtaggctatacaggaacgaacgcgcaaaaagcatcctacaagattgtgttaaagcgttcaggaacagcgcctgattatgtcattaatggccttataacaaccgccagcccgtgggaggaaggtggtcgtattcgttatgacctgttaggaaaagcggttcaggcggcaggtgttgatggtgggatgagcagaaacaccaagatagcgtccggctatggtggtcagtggagtgagaactctaatagctacagcaatatcacggggggtgggttactggcttaccgcgtggggtataactcttcaatgtattctgtttatctgcgtcgtgatgggacgttgccgatgacgggcgatctgaatcttggtgggaagagcatcaaaaacatcaaagatatgacggcatcagggacaacaacaaccggagcacttaagacaacgggtaatgcgtctgttgcatcagatctgagtgtgggtggaacatctacccttaatggtcctgtaaatatcaaaaacaacctgaaagtaaaatccgacacctatctgaacacgctatcaacaacaggtctggcgaagtttggtagtcgtatcgcgacgaatggacttaatccaaacgatctgcctgctgggtgggctggtggtgttcgcacctatgatttgtatgcgtcagggactgttggtgtaggaacaggtaaaacagttaaagcttacatgaacaatgcgggtaatatttatgcgtcaggtaatcttactgctggaacgataaaatccaatggaacaattgaatcaacaggcagaatcaaagcaggtgaatatctccatttgaatggtcaggcaacattaaatgcgaaatgtacgcctaatggtctggtggggcgagacagtacaggtcgagtgttatcgtgtgtcagtggtaaatggcagacagcaagcggtgatggcctgaaaggtatttttataacaataaccgatcaaacatctggatataaatgtgtaatacccaatagtgatacaggtgcatgtgcttgtccggggtcgatgtatgactcaaggtatggttttttatctggaacacttattgcggaatatgatgaacgtcgttgtagtggtagtaagaacgagcactgttatagtaattttagaaggttatatgcatgcaaataa

SEQ ID NO: 22787 - DNA, 882 bp, Escherichia coli
gtgaagaatgaaaaacatttgcagcgtgttgatttgaccacattagaagaagttaccatatacacagtaccggataattgggtggggtacggaacatgggttgctaatactgattgtacggaaatcgtcggaatcgaaatcagtaaaactgactggaccccgcttagcgactggaaaatatttctggaattttatcataagaatccacgatgccgtttaattacgattgatctggaaaccggaaacgctgaagtgatattggatcgtaatacttggttagggcatccaatttttcgtccgaataataacgatactatcgccttttgccacgaagggccccatgacctggtggatgcaagaatgtggatgattaaccgtgatgggacaaatgagcgtaaagtgcatgagcaccaacttggtgaaagttgtacacacgagttctggatccctgatggatctgcactggcttatgtttcctatatgaaaggacagcaacagcgttatattcgcaaatataatcctgatactgatgaagattcattagtgatggaaatgccggcatgttcccatttaatgagtaaccataatggtattctctatgttggtgatggttcaggtagtccggttgatgttaaagatacctgcagttataaaattgaaaatgatccctggatttacattcttagcagtaaaaataaaaaaatacataaattggtgaaacataatagttcctggagggtacagaaaggagaccggcaggtaacgcacccgcatccatcattttctccagataataagtacgttttatattcttgcgatgccgaaggtgaaccagcactatatatggctaaaattcctgaggaaatcttaacccagcaataa

SEQ ID NO: 22788 - DNA, 801 bp, Escherichia coli; identical to SEQ ID NO: 9029

SEQ ID NO: 22789 - DNA, 159 bp, Escherichia coli; identical to SEQ ID NO: 6188

SEQ ID NO: 22790 - DNA, 543 bp, Escherichia coli; identical to SEQ ID NO: 13864

SEQ ID NO: 22791 - DNA, 462 bp, Escherichia coli
gtggatgttcagcgggggacaggaatatccactgactggcgtggatatgcagttgttccttatgcaacagaatatagacgtaataatatttcattagatcctatgtcaatgaatatgcatactgaactggatatcacttccactgaagttattccgggaaaaggtgcgttagttcgtgcagagtttgctgctcatatcggtattcgtggtttgttcacagttcgttatcgtaataaatcagtcccattcggtgctacagccagcgctcagattaaaaacagtagtcaaattaccgggattgtcggcgataatggacaactttatctctcaggattgcctttagaaggtgttattaatatccagtggggagacggtgttcagcaaaaatgtcaggctaattacaagctccctgaaacagaactggataatcctgttagctatgcaactctggagtgccgctaa

SEQ ID NO: 22792 - DNA, 582 bp, Escherichia coli
atgccagtaatccaggacgttccgagaaatcatcgtgatgacttacctattgcaattctggccgccggaatggttaatgaaaatgatctgatcttctttgataatggccaggagataccgctcgttataagcatgatcccggatgcaatcaccttcactggcatctgttactcacatcgtgtctttgttgcgttgaatgaaaaacctaatgtgacagcaatactttgtggtggtacgtatcgtgccagaagtgatgctttttacgatgccagtaactcttcgccattagactctctcaatccgcgaaaaatatttatttccgccagcggtgtacatgatcactttggcgtcagctggtttaatcccgaagatcttgccactaagcgtaaagcgatggcccgtggactaaggaaaattttgctcgcccgccacgccttgttcgatgaagtagcctctgccagcctcgcaccgctctctgcatttgatgttctgattagcgatcgtccgttaccggcagattatgttacgcactgccggaatgcttctgtaaaggtcattacacctgattcagaagacgaatga

SEQ ID NO: 22793 - DNA, 315 bp, Escherichia coli
atgagagttgagcagaataatttcagggacatgttctccgtttatctctccggcccgccgcagacgcagcatgtgttttgtgtatccccggcggcccgggtcgcgcacacgggtctggcaggcgaagaatggctgaaagccttcccgctgcaggctttccagtacggtgatggtggggatgtacgtatagttctggcttcgggacgtgtgtttctcttccccgaaaatccccggcacatggtgcatcagctcttcatgtgtcagtggacggtcacgacgtatctggtttgcagcataaccaaaacgactggctaa

SEQ ID NO: 22794 - DNA, 564 bp, Escherichia coli
atgaaactcaaacatgtcggtattattgtcgtttctgtgttggcgatgtcgtctgctgcggtaagcgcagccgagggtgatgaatcagtaacgaccactgttaatggcggtgtaattcattttaaaggtgaagtggtaaatgccgcttgtgcgattgattcagaatcaatgaaccaaacggttgagctgggtcaggttcgttcttctcgcctggctaaagcgggtgacctcagctccgccgttggcttcaatatcaagctgaatgattgtgataccaatgtttccagtaatgcagctgttgcattcctgggtactactgtcaccagtaatgacgatacattagcgctgcagagttcagcggcaggctctgcccaaaatgtcggtatccaaattttggaccgtacaggggaggtattagtacttgatggtgctacttttagcgctaaaactgacttgattgatggcacgaatatactgccgttccaggctcgttatattgctctcgggcagtcagtagctggtactgcaaacgctgatgcgaccttcaaagttcaatatctataa

SEQ ID NO: 22795 - DNA, 726 bp, Escherichia coli; identical to SEQ ID NO: 12884

SEQ ID NO: 22796 - DNA, 327 bp, Escherichia coli
atgactaaaaaaacacgtttttcccccgaagtccgtcaacgggcagttcgtatggttctggaaagtcagggcgaatatgactcacaatgggcggcaatttgttccattgctccaaagactggctgtacgccggagactctgcgtgtctgggttcgccagtatgagcgggataccggaggcggtgatggtgggcttaccaccgctgaacgtcagcgtctgaaagagctggaacgtgaaaatcgtgaactgcgccgcagtaacaatatccttcgccaggcttccgcttattttgcgaaggcggagttcgaccgcctctggaaaaagtga

SEQ ID NO: 22797 - DNA, 219 bp, Escherichia coli
atggttgtgaataaaacaacagcagtactgtatcttattgcactgtcgctgagtggtttcatccatactttcctgcgggctgaagagcggggtatatacgatgacgtctttactgcagatgagttgcatcattaccggataaatgaacgggggggggcgcaccggaagcctggcagtcagtggtgcactgctgtcctccccctgcacgctggtgagtaa

SEQ ID NO: 22798 - DNA, 786 bp, Escherichia coli
atgagtacagcactcgcaacgctggcagggaagctggctgaacgtgtcggcatggattctgtcgacccacaggaactgatcaccactcttcgccagacggcatttaaaggtgatgccagcgatgcgcagttcatcgcattgttgatcgtcgccaaccagtacggccttaatccgtggacgaaagaaatttacgccttccctgataagcagaacggcattgttccggtggtgggcgttgatggctggtcccgcatcatcaatgaaaaccagcagtttgatggcatggactttgagcaggacaatgaatcctgtacatgccggatttaccgcaaggaccgtaatcatccgatctgcgttaccgagtggatggatgaatgccgccgcgaaccattcaaaacccgcgaaggcagagaaatcacggggccgtggcagtcgcatcccaaacggatgttacggcataaagccatgattcagtgtgcccgtctggccttcggatttgctggtatctatgacaaggatgaagccgagcgcattgtcgaaaatactgcatacactgcagaacgtcagccggaacgcgacatcactccggttaacgatgaaaccatgcaggagattaacactctgctgatcgccctggataaaacatgggatgacgacttattgccgctctgttcccagatatttcgccgcgacattcgcgcatcgtcagaactgacacaggccgaagcagtgaaagctcttggattcctgaaacagaaagccactgagcagaaggtggcagcatga

SEQ ID NO: 22799 - DNA, 753 bp, Escherichia coli; identical to SEQ ID NO: 14211

SEQ ID NO: 22800 - DNA, 258 bp, Escherichia coli
gtgcggtttactggtgatgcagatgccattaatagcgcattactgcgtctctccgccggtgcagatagtgcgactggactgggaatagaaatattggataacaatgatgtggcgattgccattaatggtgaatcaggttttcgtgatttagtgttaaatgaaaacggtgatgctaatttgacgtttaaacttcgctataaatcaactcaggaaaatgtacatgccgggcatccttgtacattaatcgtaaacgtttga

SEQ ID NO: 22801 - DNA, 438 bp, Escherichia coli
atgattgccattctaaacaacgctaaagggagggttggtgtgaatcaattgaagcgattggttgtctccggtttattatttgcttcttttggagcgaacgctgaatgctggattattggtgatctgaaaggacaagaagcctcaagttcagatgggtataactataagttatcatctataccagatacctttcatttggtaataagtaaagagaaggcggatcttatcttggcaaaagatggtataggtggaggtattgattattacccgctatctccgaatgccatgatgggaagaagctatcgagatggtcaactgacgcttgtcacatgggcaatctcaaatgacggaaaagtgatccatacacgaacaattagtcgatctgatataggctcatttacaggctcatttgtcggcaatgttaaaggcaagtgttaa

SEQ ID NO: 22802 - DNA, 1068 bp, Escherichia coli
atgctaaccgcccagaagaagatattttcactggctggcatgtcgccaaaatccagaaatatgacagcaaagtcaggcattaatacagcagatacaagcaaagtttatcatttgctggtggtaggagcggatgccttaactatgtcagaaattacggtcgatggtgttagcgttgagaatgtcagcggctatgccagagaatttctggtcgtagatggctttctctgctcgtgtagtgactccacaaaaaccttcgtccacgcgcgtgacgttaacgaaatgagcgcgatgtactgtgcttctggttcttccaatagcgagttttcggagtccataaaaaagagcttgccgttatgcggcaacacggtttatggttataaggcacctcataaaacgggtgtcgggattggcgtcctgaaaattctgaaggcgacatatgacgcgccgagcgtctttttttatgtcgtaggtctgactcacccattttttgggcgttggtgtataatccagcgcctttgtcaatcaatggtggctcaggcgggggcttcttcggaagcgccggtatccttcagagccggttacgccaaccctgtctgggctaccaccagcgaaattggcgtttccggtggtagcgtaacctgctatctgaaggaggctgccacatgctggctactacccctacccaaaaaacgcaatttatctggattatcgccgcagttcgccgcgattgcccgacaattaccgccaaaattcatcatattgctgccgagtctgaacgcgatgctcgccgttctctggtgcgcgatcacatctgcttttttgctggtcgtatccgcatggaggtggcacatgattaaaacctacgatgtgcatatggaccccctcgagcgcacaagccagatcatcacactgacagaagtgattaatgacattctggtgagcaactctccctcacgagacgaaaaactgaaggcgttactcgcgatattggatctcgccgttcgtgacgttcatttcctgctggaaggtggacaaatgccatgcaaaacgggggcaaccaatgaataa

SEQ ID NO: 22803 - DNA, 318 bp, Escherichia coli; identical to SEQ ID NO: 10871

SEQ ID NO: 22804 - DNA, 930 bp, Escherichia coli
ttggctatattcgaattattttcaaaaagacaaaaaaaattaagaggtgaagtagctgatgtttaccaatacacgaatataccaaatgcatttcgtgttcaggttgttcatattgtaagagatactatcggtgaagatagtgactatgaaacggaagcaagtaagctttacagactcgttcataaaacgctgtgtaaggaatatggtgtattctctctcaaacagtatcctgaatcgaatttcggggcaatttttgactatttcctagctgagagagatcatgaaaaatgcttggatatcattgagatatgtttcaaactgatagacgggtatataagatcaaatgagtggaaattcagagggttagtaaagcaaagtcctgatgatgctattgaagaacttaatatcaggtttaaagaagcaggtcttggatatcaatttgagtcaggagagttggttaaagttgactcacaattcattcattctgatgttgtaaagcctacgcttcagattcttggtaagaacaagagttataacggagcaaacgatgagtttttatccgcccatgagcattatagacatcagcgatataaagaatgtttaaatgattgcctcaaatcttttgaaagtctaatgaaagccatacataaaaaacattcttggcaatttaatgatactgacacagctaaaaaactaattaacagttgtttggcaaataatttagtacctgaatacctccagaatcaattttcttcaataagaattctacttgagagtggtattccaaccattcgaaataaagaaggtggacatggacaaggggcagaaataacaaaagttcctgagtatttagcgagttatacccttcatttaaccgctactaatctgctgtttttggctaaatgcgaagagagttatacgaaaaagtag

SEQ ID NO: 22805 - DNA, 753 bp, Escherichia coli
atgaaaaggtatattgttaaaaaaataatcaatgtaatatttcctgagtttagtaataaaataacttgggctttagttataactgggctaagcataattgcgctaccaattccatattatctcatggcacttaattttataattgatatatataataaaaaattcaatgcagatattgatataataaaaatagataatggtaatccaagcacgatggtagccatcactctaattgctttggggttaacctataacttattaagtaaagtgccagaatggttctttgacagtattaaaattaaagaaaacagagaaaagaaagaaagacaaaggaactctgacattaatctatataaagagtttataaaattattaccaccagattcaaactcaatagactttctaaaaagccatgactttggcaatagatttcatgactcaaaccttaaagacatgacaacatactgccatgaatggggaaaggccatacatcattttcatgataatgaaatagaaataaaatctaacgaactacacaaagagttaactaactttaattattttttagcctgcaactccgggtatttaggcagcagcgagtttatttcaatgctcagcgacagagagattgccttattgagcctcccccctgaaaagatagaaaccataaaaaaagctaacagatgtgcgactaaaatctataacatgtactgtgaatttatactattatgtaaaaaaaatctcagtatctaa

SEQ ID NO: 22806 - DNA, 1893 bp, Escherichia coli
atgcacaatacgtacatcaaagactatatagaatattaccttagccttaaaactgaacctcaatacgccattatgcttaaaggtgcttggggatcaggtaaaacttggttcattgaacgagttcttgaagaatataagcaaaagcattcagagttcaaatttcttaaagtgagtttgtatggcgtcaactctattgagcagattgaagatgagttctatcgtcaacttcatcctattctatcaaacaaagcccttatctttggtgcaaatgtactaaaaaatacgcttaaggctactttcaagatcgatttcaatggcgataataagtctgacgtagatgtcaatgccagtgtccccactattaatcttagcgactttagcagagaaccagatggttttgtgctggtctttgatgatatcgagagagctggtatagatttaccaatcttatttggatatataaatcactttgtagaagtaaacggatacaaagcgatcctggttgccaatgaagaagaaataatcaacagagaaaagcgaataaataatgatgatgagaaatctagcagtgaatacataagaacaaaagaaaagcttgtaggtaaaacatttgaagtaacgtcagatttacatagtgcttgtaatattttcttgggcgtaattagtagtttacacgtagctaatatatttaaagaagatatgcagaccatagaacacctctatgtgtcggcgaaatataataatctaagacatttgaggcagttctttcttgatgtacaacgcatcatttcccttttgggagataaatatgtcagcaacgacgattttatgaaagtatttttccagcagttattaattttctcgatggagtaccggggagggaaccttaactacgaggatttcaattcaatcggcaatgtaaattatagtatgtttttagataaagggcgtgccaaaactaagtatgatatgatcgtcgagaaatattcatcacctgtattaaccgagacgttactggatggtgcgtactggagagagctaatctgtgatggaaaggtaacgcatgatcttctcgctcagctggatattacgcgattttttagaagcaccgatgcccaagcatgggagtatttgtggaactatcgagaacttaatgaaactattcttaatgaacagtacgccattgccaaggataatctattttcaggtaagatcacttccttaggtgaactcctgatgaccgcgagtattttgctggcattggcgaaagaaggtttaaccacagatgctgttgatgacattataaatgagacaaaacatcatatagatatttattacaatggattaggacctgaagatatacatcaggagtatgcgcaaagacattataatgagttaatggcatggcgtggctttggttttcttgacagggatagcgatgaattcaaactcattattgagcatattaagatagcgcagaagaaacggtttgatgaatcaattccggagtttgcattgaagttcagcgatgagttgcaaagaggaaatttatcgtttgtatctgaattgtgtcattctaataataggcagctaaatcttcataacgtgccttttttacacttggtttctcctgaagttttcattgaaagctataggaaacttgacccaatcatcatgaggaaactggcatttagcttgagggatcgttattctgatagggatgccagaaccagactgaccgaagaatacaactggttgattagcctaaaagagatagctgtagatttcactcaaaacgcagccaataactcctttcaggtttttcatgtaaagttttttattgactatgcactaactaatgcaatcaaattatttactgagggaactgattaa

SEQ ID NO: 22807 - DNA, 2415 bp, Escherichia coli
atgagtcatgacgatatgagcaactctagcggctttaacgaggccgctgcagcattttcatggaacggcccgaaaaaggccattaacccttatctggacccggcggaagttgcgccggagtctgcactttcaaacatgatcactctgtacgctgccgataacgagcaggaacagctgcgccgcgatgcactgagtgagcaggtctgggagcgttatttctttaatgaatcccgtgatcctgtccagcgcgaaatggagcaggataatctcattagtcgggcaaagctggcgcatgagcagcagcgttttaacccggacatggtcattctggcggacgtcagcgcccagcccacccacatcagcaagccgctgatgcaacgtatcgaatacttcagcagcctgggcaggccaaaggcttattcccgctatttgcgtgagacgattaagccatgtctggagcgactggagtatgtacgcgacagtcagctatccgcttctttccgttttatggcaagccatcaagggcttgagggcctgctgatcctgcctgaaatgagtcaggatcaggtaaaacgcctgtccaccctggtagcagcgcatatgagcatgtgtcttgaggccgcttgtggtgatttgtatgcctccgatgacgttaagccagaagaaatccgcaagacatgggaaaaggtggcagcggaaaccctgcgtctggatgttatcccgcctgcgtttgagaaactccgtcggaaaagaaaccgccgcaaacccgtgccctatgaactcataccgggttcgctggcacgtatgctttgcgccgactggtggtatcgaaaattgtggaagatacgttgcgaatggcgggaagagcagttgcgtgctgtctgcctggtcagcaaaaaagcatctccctatgtcagctatgaagcagtgacgcataaacgtgagcagcgccgcaagtcgctggagtttttccgttctcatgaactggtgaacgaagacggcgacacgctggatatggaagacgtggtaaacgccagcagcagcaacccggcgcaccgccgcaatgagatgatggcctgtgttaaaggtctggagcttatcgcggaaatgcgtggtgactgcgccgttttctacaccattacctgtccgtcacgtttccattctacgctcaataacggcagaccaaacccaacctggacaaatgcgacggtaagacaaagcagtgattatctggtcggcatgtttgctgcatttcgtaaggcgatgcacaaagccggattgcgctggtatggcgtgcgggtggctgagccgcatcatgacggcacagttcactggcacctgttgtgttttatgcgcaaaaaagaccgccgcgccattactgctttgttgcgtaagtttgccattcgtgaagaccgcgaggagctgggtaataacacggggccacgctttaagtctgagctgataaacccgcgcaaaggaacgccgacaagctacatcgcgaaatatatcagcaagaacattgacgggcgtggtctggctggcgagatcagcaaggaaacgggtaaatctctgcgtgataacgctgaatacgtgaatgcctgggcgtctttgcatcgtgttcagcaattccgcttctttggtattccgggacgtcaggcttaccgtgaacttcgcttgctggctggtcaggcggcaaggcaacagggtgacaaaaaagcaggtgcgccggtactggataacccgcgtcttgatgccattctggctgctgctgatgctggttgttttgccacctacatcatgaagcagggcggcgtactggttccccgtaaatatcacctcatcagaaccgcttatgaaatcaacgaagagccgaccgcctatggcgatcacggtattcgtatttatggcatctggtcacccattgcagagggcaagatctgcactcatgcagtgaagtggaaaatggttcgtaaagccgttgacgttcaggaggcggcagccgaccagggcgcttgcgccccttggactcgtggcaataactgtccccttgctgaaaatttgtaccaacaagggaaagacaaatcagctgatggagataccagaacggatatcacccgtatggatgacaaggagttgcacgattacctgcacagtatgagcaaaaaagagcgccgggaactggcagcaagattacgcctggttaaaccgaaacgacgtaaagactacaaacagcgaattacagagtatcagcgtcagcagctcgtctatgaactgaagtccagaggatttgatggcagcgagaaagaagtcgatttgctccttcgcggtggcagtattccatcaggagcaggcctgcgtatcttctatcggaaccagcgtctgaaggaagatgataagtggcggaacctgtattaa

SEQ ID NO: 22808 - DNA, 459 bp, Escherichia coli
atgactaaacaaagctccgaatacttccaattacactactgttattaccttgaactaatgacagcaacgttccatggtcgagctgataaattaatgacagcaatccaacttataagcggaacagctgtatttgctaatacaggtctggaatggttgttcgcttttcctgttgttgtaatcgcaacaatccaacttgtatggcaaccagctattattgcggaacgagcaagcgtacaaagccgacaatatggtgagttgctttacgccgaggatgaattgtctccacagttcattgcacaaaaattgaaagctttgcatcactctgactccacaacattcggatctttgttaaaccctgcctacaaaagagctgctattgcctgtggtcgggttgacgatgtaaacctcagcttccaagaaaaacttttcgcttggttcgcaggttgtttgccacgttaa

SEQ ID NO: 22809 - DNA, 234 bp, Escherichia coli
atgctgacgaaagaaccatcatttgcatcgctgctggtaaaacaaagtccggcaatgcactacggtcacggctggatttatttaccttgtgggaaaaagtggcatccaagttttgaattacaaccccggcaacaggcttaccggggaagaaataaaaagcgattcctacaaagatttatggttaacgtggcaaacaacctgcgaaccaagcgaaaagtttttcttggaagctga

SEQ ID NO: 22810 - DNA, 1332 bp, Escherichia coli
atgagcacagatataactttcgatatacgtgatgaatataaaagaaaagccattgcagaaaaaataataagtttgctagagtctaatattcctgtttcacctatggtcatagatggggactgggggactggaaaaacagagttttcaaaaaagttagcatccttaattgaaataaactcgaccaatcataaagtagtttatatagatgcttttactgaagatcacaacgatgctcccatacttacaataatggccgcaattgcagctctatataatagcgatgaaaaaaaggaattaatatctaaggcattgccagccctcagattcggacttaagactgtactcaaagctggtgctggttgggtattaaaacaaaatgcggatgaaattaatgaggaatttgaagaggttatcaaagacgctgcaaattcagctatcgatggaaccatcgaggctctgttagaagatcatatcgaggcacaaaagaacgttcttgctctaaaagaagtactaaccaaattagctggagaaagtaaactaacaataattatagatgagttagacagatgtaagcctagttttgccatttctattattgaaaatataaaacatgtttttgatataaaaaacattaactttttattaattgcaaacacaactcaactaaaagcatccataaatcatatctatggctcttctgtagactccaaccgttatcttgacaaatttataaaatttacatacagccttcctgttacctttaaggaagataattataatgacactttaacttccaaaaatcattggatgatgctatgtgagcaatctgaaaggctgaccgctgcagtagaagccagcgaagatattttcttacagttcattgaaagtagaaaattatcattacgtgaggttgaaacacttgctagatatgttgaaatataccaactactatcaggcgacaaaattagcaacaaatatatttatggatattgttattacaggactctagcgataataatctacacttttaaccgagagttagctctcaactttcttgaagataaagttgatgctcaatcaatcatgaaattgtttggtttatctaaattttcatatcaaacaagtgaatataatgtagataattatgaatatgctatatttggaatagtttacaaatacttatctgaaaactcatctcttttacctgctgaggaaaatataaaaagacaatgggcagaaatgagtgaataccattttttaaaaggtggtggcggtattggtgaaccaacaaatattgtgaaagatgctttaaaagtttttttacttcagtga

SEQ ID NO: 22811 - DNA, 846 bp, Escherichia coli
atgagaaccgttaaggtatttgaggaggcctggcccttacataccccgtttgtgattgctcggggaagtcgcagtgaagtgcgcgtggtggtggttgaactggaagaagaaggtattaaaggcaccggcgaatgcacgccgtatccgcgttatggggaaagtgatgcctcggtaatggcgcaaattatgagcgtcgtgccgcaattagagaaagggctgacacgggaggagttgcaaaaaatcctccctgccggcgcagcacgtaatgcgctggattgtgcattgtgggatctggcggcgcgaaaacagcagcaatcgctggctgatttgatcggcataacgcttcccgagacagtcaccacggcacagacgatagtcatcggtacgcctgatcagatggccaatagtgcatcaacactctggcaggcaggcgcgaaattactgaaagtgaagctggataaccatcttatcagtgagcggatggtggcaattcgcacagctgtgcccgatgcgacgctggagaattttattcatccgttaccgatttgtgctgatgaaagttgtcatactcgtagcaatctgaaggcgctgaaagggcgctatgagatggttaacattaagcttgataaaaccggtggtctgacggaagcgctggcgctggcgactgaagcgcgtgcacaaggttttcgtctgatgctgggctgcatgttgtgtacctctcgtgccattagcgccgctttaccgctggtgccgcaggtcagtttcgccgatcttgacggaccgacctggctggcggtagatgtggaaccggcgcttcagttcacgacgggcgaattgcatctttag

SEQ ID NO: 22812 - DNA, 483 bp, Escherichia coli
atgataagtgcagaaggactgcagcggttacttaatttatcggagcctccatctgatgaactgattgatgtttatcttcaattcagcatgatttttcctagggtcgagcaaagtttttttggtggctttgctaagggggaagacagtttaaattatgctcgaacgttacttgacgccgggataaaggtgcccaacgaactttttcacgattttaagcagagatacattttgaacggggatgcgcaggaaagacttgacgccctctgtttcggtcgagagagagataagcggggaatagttaatgggcttcaaaatgacgcagcaacagatctaaacaccatgtctacagtattaaagatagttataaggataagaaataaccttttccacgggaataaagacgcttatctttttgttgattctcaagagcaagcgcaactattgagatggtgcgtgagatttctccaaggattattaaattaa

SEQ ID NO: 22813 - DNA, 267 bp, Escherichia coli
atgccttgggcagagcgatgtctgctcgcggtaatgtcgtggccgccccaaaaaatagccccgcaaatgctcaggctgctcacgcatcaccgcttcggcaataaccggtatattaaggcgctctttgtaggccactcaggagacagcaaggtcaacgttaaccttctcgcgctcttcttgtgttttagcggcaatattccgcttcgacatggcgttacgttttactcctttttgggtgcatacacgttgtttatccgttcaatatga

SEQ ID NO: 22814 - DNA, 753 bp, Escherichia coli
atggatcctaaattactgtatgccacgtttaaacgaaatgacgcaccagcttggcgctgcccgaactgtatgaatgaaacactggagattgtcgctgatagttttgtagaaactgattcaagcgcaacaactcagtttagagatgaagtatggtttgatgaggaaatgtcgggaggagtattcagttgcgtgctgcgctgtacccgccaagcctgccaggagaaggttgctttgtctgggcaggttgttgctgtagaatgcttcaatgacgaaatgacggagcgttggtatgtttctggtttccgtcctaagtatttctatccaccacttcctctattcctgtttcctgaaaagtgccctgaagatatagctgatctcttggcggaagtatcagctctgatcccctcgcacccagcttcagcggtgaacaccatgagaaccatactggagatgatgcttgatagtcttgatgtaccaagagagaaaacagttaaaggcaagataatacgtctttctacgcatgaaagaatcacaaattattcagataaactgggaccaaataaagatgcattcatggcgttaaagtggttggggaatcacggcagtcatggagggattaaagtcacaaggtcctctattaatgatgcctgcattctcattggtcatttgattgacttcttattcttagaaagcccggatgtaactattcatattgaacggataaacaacgtgtatgcacccaaaaaggagtaa

SEQ ID NO: 22815 - DNA, 219 bp, Escherichia coli
atgccgcgtggcagtaaagaggatataatgaaatacccaatccctgtaccgccactcacctggcaagctcgcattgtcgaaatactcgataaattcgacaccctgaccaactccatcactgaaggtcttccgcgtgaaatcgagttgcgccagaaacaatacgaatactaccgtgatttactgttcagtttcccgaaacctgaaactgtcagtaattaa

SEQ ID NO: 22816 - DNA, 1311 bp, Escherichia coli
atgaaatcttccagtcatttcactgtgttcgaatacgggcatttagtgagtgaggaaggtgatgcccgtataaataattcggtagtgctacctgcagacctatttaaatggcttgagctgcgctgtctgaaagacgatgctgataatactcatcgtttgctcacccttagcagccggaatggagtaaaaacgctgcaggtaaaaaactatgcaggagtaatctcactgccaggggggcgatttctcgaaatcctgcctaaaacaggccaggataatgaggatactgttcgtcaacaattactaatgatgttacgtacgttaaaatcatttcgtcatattgcctcctctgaatctggcgtcaaaatatctaaaatgcctctgatggatatttttattcaacaatttatagagagcgtgcgtaagattgtgcagagagggttaaaacgtgactatttacgtcaggaagataatcttccatggatgaaaggaagattacggatctctgcacaattaagcaaaaactgtattaggcgggatcgttttcaggtggagtatgacgagtacagcgtcaatcgtctggaaaaccggatactcaaaactgcaatcaataagattaatcgccaaacaagtaatccacaattattacagcagataacacagctgcagtttcactttgaaaatatcacgccagttcatgatgcttatatagctttcgagcagttacaccttgatagacacatgcatcactatgcacaagcgttagcgtgggcgaagatgattttgttgggtgattctccacactgtatgtgtggggatattaatgctttttcactgcttttcccgatggaggctgtttttgaatcttttgtgacgacatggatgcgttatcgttattatgataaatggcgagtggacgcacaggtaagttcaaaaaatctgattagttataacggtaaagctttatttaagctgcggcctgatatttgtttacggcctcgtaaaagtactactggttcagttattacctgtgatgttaaatggaagatagtaaatggcagaaaggacagtcttgaacaatctcaagccgatctctaccaaatgcttgcctatggattgaattaccaggagggggaaggtgatatgattttgatatacccctatcataacggatttaatcagccatctcctcatccttatgaatttagccatcagaaggaaaataggttacgtttatgggttgtacctttctttattggcgagagtttacaaacatcagagttgcgttttcctggtggggctgaatttatttag

SEQ ID NO: 22817 - DNA, 549 bp, Escherichia coli
atgcagataaccgaagcattacttgcagagccgggagacatccggcgttttgttcagcaggcggtggaccactggccacatctgttggcatttcgtttcactctccgttcggcagaaggaagcatcaacgggcaacagattcaggtattctgtacttctttttaccgacaggtgcacgaacgtattactgagagtaatcacatgctcagtccatcatcgccggtggtattacgctggttgcgggaacaacatggaggggcaacaatacgatgcctgttgctgctcagccaggatcttttctgccatccgcgagccagtgccacggttgatgaagcatgttcacaactggtagatttactgcaacagacctggcaggtgataagcgctggcggacaatgtcgggtggaaaagcgttttcaggtcgcccggggtgatacatctggccagtatgttgcgttaaaaacagtcgcattgtctctggggttaccggttgtgaccgccattacccatcgtccggtacagcgctgtacactgattacagctcagtga

SEQ ID NO: 22818 - DNA, 1959 bp, Escherichia coli
atgcctgtaacgaagtgtgaaccagaaaccacccgcaaagcaagccgtaaatatgcaaaaacgcaggaaacagtcctgtctgccctgctggcgcagacggaggaagtgagtgtgccgctggcctcactgattaaatcaccgctgaatgtgcgcacggtgccgtattctgcggagtccgtcagcgaactggctgagtccattaagggcgttggcctgttgcagaatctggtcgtgcatactctgcctggtgaccgttacggtgtcgccgcaggtggtcgccgactggctgcactcaacatgctggcagagcgtggcatcattccggctgactggcctgtccgtgtgaaggtcattccgcaggagctggcgacggcggcatcaatgactgaaaacggtcatcgtcgggatatgcaccctgctgaacagattgccggattccgcgcaatggcgcaggaaggcaaaacacctgcacaaatcggtgatttgctgggctattcaccccgccacgttcagcgaatgctgaaactggctgaccttgcgcctgtcatcctcgatgcgctggcagaagaccgcatcaccaccgaacactgtcaggcgctggcgctggagaacgacaccgcgcgtcaggtgcaggtgtttgaagctgcctgtcagtcgggatggggcggaaaaccggatgtgcgggttatccgcaatctgattacggaaagtgaagtggcggtggcggggaacagtaaattccgcttcgtgggggctgatgccttctcgccagacgaactgcgcaccgatttgttcagcgacgacgagggtggctatgtggactgcgtggcgctcgatgccgccctgctggaaaaactccaggctgtcgcagagttccttcgggaagccgaaggctgggaatggtgcgccggacgcatggagcctgtcggtgagtgccgtgaggatgccggaacataccgctgtctgccggagccggaagcggtgctgaccgaggcggaagaagaacgtctgaacgaactgatggcacgttacgacgcgctggaaaaccagtgtgaggaatctgacctgctggaagcagaaatgaagctgatgcgctgcatggcgaaggtcagagcgtggacgccggagatgcgtgccggaggtggagtggtggtgtcctggcgttatggaaacgtatgtgtccagcgtggtgtgcagttacgcagtgaggatgatgcggctgacgacgctgaccgcacggaacaggtgcaggaaaaagcgtcagtggaggaaatcagtctgccactgctgacgaaaatgtcttccgaacgcacgctggcagtccaggcagcactgatgcagcaaccggacaaatccctgacactgctggcatggacgctctgcctgaatgtgtttggcagcggagcgtacagtaaaccagcacaaatcagcctggaatgtaaacattattcgctgaccagcgatgcgccatcggggaaggaaggtgccgcattcatggcgctgatggcagaaaaagcccgtcttgctgccctgttaccggagggatggtcacgggacatgacgacattcctgtcactcagtcaggaggtgctgttatccctgctcagtttctgcaccgcatgcagccttaacggtgtccagacccgtgagtatggtcacacgtcacgcagtccgctggacacgctggagagcgccatcggctttcacatgcgcgactggtggcagccgacgaaagcaaactttttcggacacctgaaaaagccgcagattatcgcagccctgaatgaggcaggactatccggtgccgcacgggacgcggagaagatgaagaaaggcgatgcggctgaacatgcagagcaccatatgaaagacaaccgctgggtgcctggctggatgtgtgcaccacgcccacagacggatgccactgaacgcaccgataacctggctgatgccgcctga

SEQ ID NO: 22819 - DNA, 342 bp, Escherichia coli; identical to SEQ ID NO: 982

SEQ ID NO: 22820 - DNA, 678 bp, Escherichia coli
atggctctccagtacatccagacgaccgccggattccagaacaacaccgtcagccttaccgttttccaccgcgaaattgcccagacggttgctgccggtgacggttgccgccgtactggtgaccagtgcgcccccctgcttcagggtgacattcgtggctgtaccaccggcgttcacctgcagtttgcctttctggttaacggtggtgaaatccgccagaccaccttccttgataatctgccagccgtcactgtttacaacagtgccagatgctgtaccgccgttgtgtacatactggtaccccccattcagcgtggtatccagtgcgtgaccatgtacagtctggtcgccgccggcataaaccacagtggtatttgctgttccttcagcagccacaatctgacgaccatttttattgatagtggtacgtacggcatttccgcgaacaaactgcccggtatcaccattttctgcatccggtcccccttccgcgccggtattcacaaccgtgtcggttgccactgcgccgggtttgacgacctgccagcccttatcattaatgacggttcctgtggctattgcaccctcatgcatccactgctcgccgccgttcagcgtggtgttcactgcctgcccctgaaggctctgtccgcctccggcactgataaccgtgtctga

SEQ ID NO: 22821 - DNA, 1134 bp, Escherichia coli; identical to SEQ ID NO: 8777

SEQ ID NO: 22822 - DNA, 282 bp, Escherichia coli; identical to SEQ ID NO: 15041

SEQ ID NO: 22823 - DNA, 504 bp, Escherichia coli
atggatgatgatgatgagatagatcctaactatctgctgaagatgtattccagacaacatgagacgggaggggatgcgatttattgtgggctttatggccatcatataaaaaatggtgttacttactcacctataaatacagattttaatgaagggtctttacttttcgattttttttataaaaaggtcagattccatatagggtgcttgtttataagaaaacaactcctggaagataataatcttttttttgatgaagatttacgactaggagaagatctggattttatctatcgactgctaattacatgcgatatgtatgcggttccatattatatgtataagcataactatagagaaaattccttaatgaactcatgtagaaccatcactcattatcgacatgagtcatttgcgcacgaaagaatctactcttctgtgatgcagttatacaaaggtaaccggaaagaagaaattcatacactgtctcttatacacatctga

SEQ ID NO: 22824 - DNA, 360 bp, Escherichia coli
atggcagtctcacctcagatgacgaacatatgggacaaacaattggcaggatatgttgctgcaggctttaaagtgacagtattagccaccattggtcaacaaggaatacagttaatacaaaagactgttatgatcatcaacctgtggttgggagcacacctggttatttccggggatttaagtattggtcagttaattgcttttaatatgcttgcaggtcagattgttgcaccggttattcgccttgcacaaatctggcaggatttccagcaggttggtatatcagttacccgccttggtgatgtgcttaactctccaactgaaagttatcatcaaggcgacgtcgcaaaatggggctaa

SEQ ID NO: 22825 - DNA, 1020 bp, Escherichia coli
atgaaatatatccctgtcggcgttgatattgcaaaacatcttatgcaggtgcatttcgttgatgaacataccggagagattatcgataagcaggttaagcgtgagaaattccttgaatatttcagcaaccgtgaaccctgccttatcggcatggaggcctgtgggggttctcatcactgggcgcgtgagcttcagaaactgggacataaggtcagattactcaaaggccggttcgtcaaagcattcgtgatgggaaataaaaacgatgtgatggacgcccgagccatctggctggcggttcagcagccggtaaaatccgtcgccgttaaaagcgaggagcaacaggccacgctggggttacaccgaatgcgccagcaactggtgaagttcaggacagcacagataaacgcgcttcacagtctcttgctggaatttggtgaaacgacgcacaaggggcgtgctgctttggcgaaggaggtgccggaagccctggagcgtctgaaggagcggctaccgctctacctgataaacatgctggatgaacaatatcagcgaattactgaacttgatgaacatcttgaccacattgagaagcagttgcaggcgatagccagacagaatgaaacctgtcagcggttactgaacatcccaggcgtggggccgttaatcgccaccgctgccgttgccacgatgggagacgcctccgcctttaagtcgggacgggaattcgccgcgtttatcggtctggtgcccagacagacaggctcaggaggaaaaatccgcctgctgggaataagcaaacgtggtgataaatatctgcgaaccctgtttattcatggtgcaagggcggcagcattactgaccaaagaacctggtccatggataaccgaactgaaaaagcgtcgtccggccagcgtggcaatcgtcgcaatggcaaacaagctggcgcgaacggtgtgggcaatagccgctcacggacgtaaatacgacaaaaatcatgtcagtatcaggcctgattaa

SEQ ID NO: 22826 - DNA, 1437 bp, Escherichia coli; identical to SEQ ID NO: 8053

SEQ ID NO: 22827 - DNA, 1470 bp, Escherichia coli
ttgtatgcagaggtgtgctctgttgatgaaatgaacctcgccaaaagagacggttttaagcggattgtttttgatggccctttaaaaaaaacgagtgaactattaaaggcaatagagattggggcattaattgaagttgacaatattgatgaatgtaaaagacttaatgaactatgtaagttgcataagctgacatgtagaattcatttgagattatcgcattactatgatgataatttatcaagatttggcttatctgaaagtgaggctattaatttactggagatgttgatcagtaagtcagagtatctcattttagacgggttccatttacatgttggctctaatctacccaatgcggaaaaaatatgtaaagctattatacagtatcatgagttgattcttaggtatatgccagatgatggcactcttaatcttggtagtgggatacctgcagattctttctcagcatccagtgataacccaactccatgtccggaggtatttttctcatcgatatatgatacaataaaaaattgcttcggtactgtatgtgataaatggaactatatttttgaaccagggagacatctggtcgaagactttggctactttatagggaaagttattagtactaaaaacaggtatggtgttaaagttgctcaaactaacattggtataaactggataccttcgatcagaaattgggaccattcatttacattgtttcataatcataaccatatttcagatgataaatctgatgagtatattattgctggattcaattgctttgaatgtgattgcttgtttccttcagttattcttcccagtaacttatctgattatttattttctgttcgagggtgtggtgcttatgatatgcaaacaggaaaccagtggacgcgtaatctttatgctgtatataccataacaaatgatgttgttaatatatcaaggattcacagaagagaacttgatttccggaagtatgatgtatctcttacgccatcaggaataaaagtaaatgatgaaattacattattgtatccagcgttaaaatacgctgaagagttatatttgctcattaatcaaaacaaaataaatttcattaaaagcatggcatggccagcgtttgttaataacatttctgattctgtttctttcattgagcaatcaatgattgataaccagaatgaaaaagcattaatcctctttattaaatacaaaactaagatagctggcgttgtatcgtttaatattattgaccatgccaataaaacagcatatattggctattggttaggtgctaactttcaggggaaggggattgtaaccaatgctataaataaactgatacaggtatatgggggagtgaatggatgcctgaaattcttaatggagatatattgtttattgaggacagtcggaaaagcattgcaacaattgaacgattattctctatgctaa

SEQ ID NO: 22828 - DNA, 462 bp, Escherichia coli; identical to SEQ ID NO: 22791

SEQ ID NO: 22829 - DNA, 420 bp, Escherichia coli
atgtacgcaaaatcttttctcgcacttgatggcaacggacgtctgaccggtgcccgtaccgcacagaccgcaccttatgcttactacacctgccacctttgcggcagtgcactcagataccacccgcagcacgacacggaacgtccctggtttgaacacactgacgacgggctgacggagcacgcgcagcaatgtccttatgtcaggccggaacgcagagaaatacggttgattaaacgtctgcagcaattcgtcccggatgccttacccgtggtacgtaaagccagctggtactgcaggcaatgtcaccacgattattatggggagcagtactgcacacactgccagaccgggcgcttcagtgaggacggggagcagaatgaacggtataaaaacggggctggggatcacgccgggtga

SEQ ID NO: 22830 - DNA, 1191 bp, Escherichia coli
atgaaaactgtatttacaacattatcagtcatattcggcgtgatattttctcacagtgttctagctcaggacgttactatttattatacgaatgacattcacgcacatgtcaatccggcaaaaatcatcgctgttgataagaacagacttataggtggtatggctaatattgcaggcatcgttaatgaagcgaagaaaaaaagcaaagatgtgtttttctttgatgcaggcgactattttaccgggccgtatatcagcaccctgaccaaaggtgaagctattattgatatcatgaacactatgccctttgatgcggtgtctgttggtaatcacgagttcgatcacggtgtgcccaatatggtgtctcagttatcaaaagcaaaattccccattctgctgggaaatatctactacaccgatacgaataaaccagtttgggatcatccgtggaccattatcgaaaaagatggtttaaagattggtgtgattggattgcatggcgcattcgctttctatgatacagtcgcggcaaaagcacgtgaaggcgtagaagccagagacgaaattaaatatttaaataaagcacttgcagaattaaaaggtaaagtcgacattaccgttttgctaattcacgaaggtgtcccggcgcgtcaatcaagctttggtagtaaagatgtggagcggctactacaggcagatattgagacagctaaaaaagtgaatggtgttgatgtcttaattaccggtcacgcacatgtcggaacaccgcaaccaataaaagttaataacacattaattgtatctaccgatgcatacggcaccaacatcggaaaacttgtgcttgattacaatccgaaaacgaagaaaattgatagttataatggtgagttaatcaccatctttgcagatcaatttaaacctgacaccatcgttcaaaatactattgataaatggagtgcaaagcttaacaaaataacaaaggaagttgtcggccattctcccgtagttttaacacgtgagtatggtagttcctcttctaccggcaaccttattcttgatgcaatgatggaaaaaacacctgatgccgttgccggatttcaaaatagcggtgggatgcgagctgattttcctaaaggcgatatcacactgggagatgttattcgtataataaatagtaacgtcctgagctag

SEQ ID NO: 22831 - DNA, 303 bp, Escherichia coli; identical to SEQ ID NO: 6057

SEQ ID NO: 22832 - DNA, 342 bp, Escherichia coli
atgaactcatgtagaaccatcactcattatcgacatgagtcatttgcgcacgaaagaatctactcttctgtgatgcagttatacaaaggtaaccggaaagaagaaattcatacattattgagtaaaaatagaacttatcataaaactcgttatttatggaatgttctacttaatggcgattttgaattattaaatcaattagttgaaagcaatgaaaaagaattgaaagattgtaatcttcttggcaagagagataagaggcgagcaaagatattagcatcaaaaaactatattctctggaggatggtaagactggtaaatagaaaaaagaataaacgttag

SEQ ID NO: 22833 - DNA, 201 bp, Escherichia coli; identical to SEQ ID NO: 19064

SEQ ID NO: 22834 - DNA, 996 bp, Escherichia coli
atgaatgaatttataaaagaacggttttcgtatttagcagataataaaaaagaaaacgtcccagagctaaatgtttcctacggtatcgataagaattttttgtatggtgctggcgtttcaatttcttccgttttgattaataattcagatattaattttgtctttcatgttttcactgattatgtggatgatgattatttaaagtcatttaatgaaacagcaaaacaatttaatacctcaattattgtatatttaattgacccaaaatactttgctgatctgccgacgtcacagttttggtcgtacgcgacatacttcagggtattgtcctttgaatatctgagtgaaagtatttccacactgctgtatctggatgccgatgtcgtttgtaaaggaagtctgaaacctctcacaaaaattatatttaaagatgagtttgctgcggttattcctgacaatgatagtactcaggcggcatgtgcaaaacgtcttaacattcccggaatgaatggacgttatttcaatgcaggcgttatctatgtcaatcttaaaaaatggcatgaagcaaatttgacaccgtatttactcacgcttttacgaggggaaactaaatatggctctcttaaatatttagatcaggatgcgttgaatatcgcatttaatatgaataatatctacctcgcgaaggattttgatactatttataccctgaaaaacgaacttcatgatcgtagtcatcgaaagtatcagcaaaccattaccgataaaacagtattgattcactatacagggataactaaaccatggcatagctgggctggatatccgtctgcatcatactttaatatcgcgcgtgaacaatctccctggaagaaatatcctcttaaagaggcgcggactgttgcagaaatgcagaaacaatataagcatctgtttgcccatggtgagtatattaaaggtataacttcattaattaagtacaagcttaagaaataa

SEQ ID NO: 22835 - DNA, 141 bp, Escherichia coli; identical to SEQ ID NO: 6191

SEQ ID NO: 22836 - DNA, 141 bp, Escherichia coli; identical to SEQ ID NO: 14405

SEQ ID NO: 22837 - DNA, 246 bp, Escherichia coli; identical to SEQ ID NO: 4533

SEQ ID NO: 22838 - DNA, 669 bp, Escherichia coli
atgtcaaccccgcgtcagattcttgctgcaatttttgatatggatggattacttatcgactcagaacctttatgggatcgagccgaactggatgtgatggcaagcctgggggtggatatctcccgtcgtaacgagctgccggacaccttaggtttacgtatcgatatggtggtcgatctttggtacgcccggcaaccgtggaatgggccaagccgtcaggaagtagtagaacgggttattgcccgtgccatttcactggttgaagagacacgtccattattaccaggcgtgcgcgaagccgttgcgttatgcaaagaacaaggtttattggtgggactggcctccgcgtcaccactacatatgctggaaaaagtgttgaccatgtttgacttacgcgacagtttcgatgccctcgcctcggctgaaaaactgccttacagcaagccgcatccgcaagtatatctcgactgcgcagcaaaactgggcgttgacccactgacctgcgtagcgctggaagattcagtaaatggcatgatcgcctctaaagcagcccgcatgcgttccatcgtcgttcctgcgccagaagcgcaaaatgatccacgttttgtattagcaaacgtcaaactctcatcactgacagaactcaccgcaaaagaccttctcggttaa

SEQ ID NO: 22839 - DNA, 417 bp, Escherichia coli
atgaacgcaaaagaaaaaaatattatcaatacattaaaaatagtgtcagcagagcaagacaagctgtccagggcagcccagaaagataatcaacatatggcagcgctttacgcactgaccatcgcaatagccacctctgaagcagccaaagttattgaggaacagagcaaagaaatcgacactcttaaaacacagtcaacagttgcagccatgaatccgtccagcattggacgctgcatttatattcttggttcagcaatgatgctgcaatacaccattattgccgaactgcacggcaaatacctgataacgccttaccacacaaaagagtcagagcttctgacaaatctccacctgatagaacgctctcaagctgtattcattgatgacgcgcaacgtgccgtatttaacgcatag

SEQ ID NO: 22840 - DNA, 468 bp, Escherichia coli
atgaaacgtaaggtattttacagctttcactttgataacgatgttatgcgggtacagcagattcgtaacatgggagtgctggagggggatgaaccggtcagcccaaatacttgggaacaaattaaacgaactgagcagggcgtgaagaattggattaatcagagcttaaatggcaaatcctgcttagtagtactgatcgggagtcaaacggctaatcgcccatgggtcaagtatgagatcgaaagagcctggaaagagggtaaggctgtggtgggtatttatattcatcgactgaaatgccctcgtaacggctatgggacaaaaggaccgaatcctttcgaccaatttacatttaagcgaggcgatcgagtaattaaaccactcgtatatgaacctaactttaacgacgcttatagcgatatcaagaacaatttggcgacatggatagaaaacgccattaaacaataa

SEQ ID NO: 22841 - DNA, 810 bp, Escherichia coli
atgagtaataccgacgcttcaggtgagaagcgaatgacaggcaccagcgagcgacgagaacagatcattcagcgtctgcgacagcaagggagtgtgcaggttaacgatctgtcggcattgtatggcgtatctactgtgacgatccgcaacgatctggcgtttctggaaaagcaggggatcgctgtgcgtgcctatggcggcgcgttgatctgcgatagcaccacgccgtcagtcgagccatcagtggaagataaaagcgcgctgaacaccgcgatgaaacgcagcgttgcgaaagctgccgttgagttgattcagccaggtcatcgggtgatcctcgattccgggaccaccacttttgagattgctcgtctgatgcgcaagcacactgacgtaattgcgatgaccaacggtatgaacgtggctaatgcgttgctggaagcggaaggcgttgagctgctgatgaccggcgggcatttgcgccgtcagtcgcaatctttttacggcgatcaggctgagcaatcgctgcaaaattaccacttcgatatgctgtttcttggtgtagatgcgatcgatctggagcgcggcgtcagtacgcataatgaagatgaagcccgtttaaaccgccggatgtgcgaagttgcggaacggatcatcgtggtcaccgattccagtaaattcaatcgttccagtttacataagatcattgatactcaacgtatcgacatgatcattgttgatgaaggcattcctgcggatagcctggaagggctgcgaaaggctggggttgaagtgattctggtcggggagtga

SEQ ID NO: 22842 - DNA, 156 bp, Escherichia coli; identical to SEQ ID NO: 21060

SEQ ID NO: 22843 - DNA, 1650 bp, Escherichia coli
atgaaaagagttctgacggcgcttgccgccacactccctttcgcagctaacgccgcggatgctattagcggggccgtagagcgccagccaacaaactggcaggcgattattatgttcctgattttcgtcgtgtttacgctcggcattacctactgggcgtcaaaacgcgtacgttcgcgtaatgactactacacggcaggcggcaatatcaccggttttcagaacgggctggcgattgccggggactatatgtccgccgcctcattcttggggatctccgcgctggtgtttacctccggctatgacgggctgatctactcgttgggcttcctggtgggctggccaatcattctgttcctgattgccgaacgtctgcgtaacctgggacgctacacctttgccgatgtagcctcttaccgcctgaaacaagggccgattcgtattctttcggcctgtggttctctggtggtggtggcgctttaccttatcgctcagatggtaggcgcaggtaaactgatcgagctgctgtttggccttaactatcatattgcggtggtactggtcggcgtgctgatgatgatgtacgtcctgttcggcggcatgctggcgaccacctgggtacagattatcaaagccgtgctgttgctgtttggtgccagctttatggcctttatggtgatgaaacacgtcggctttagcttcaacaatctgttcagcgaagcgatggcggtacacccgaaaggtgtcgacatcatgaagccgggcgggctggtgaaagatcccatctccgcgctctctctggggctagggctgatgtttggtacggctggcttgccgcacattctgatgcgcttctttacggtcagcgatgcccgcgaagcgcgtaagagcgtgttctacgctaccggatttatgggctacttctatattctgacctttattatcggcttcggcgcgatcatgctggttggtgcgaatccggaatataaagacgcggcgggccatctgattggtggtaacaacatggcggcagttcacctggcgaatgcagtgggtggcaacctgttcctcggctttatttcagcggttgctttcgccaccattcttgcggtggttgcgggtctgacgctggcgggcgcatcggcggtgtctcacgacctgtacgctaacgtcttcaaaaaaggggcgaccgaacgtgaagagctgcgggtatcgaaaatcaccgtcctgattttgggcgtgattgcaataatcctcggcgtgctgtttgagaatcagaacatcgccttcatggtaggcctggcgtttgccatcgcggcgagctgtaacttcccaatcattctgctttccatgtactggtcaaaactgaccacgcgtggcgcaatgatgggcggctggctggggctgattaccgctgtagtgctgatgatcctcggcccgacgatttgggtacagatcctcggtcacgaaaaagccatcttcccgtatgaatacccggcgctgttctctatcagcgtggcattcctcggcatctggttcttctcggcaaccgataactcagcggaaggcgcgcgtgagcgtgaactgttccgtgcgcagtttatccgctcccagaccggctttggcgttgagcaaggccgcgcgcattaa

SEQ ID NO: 22844 - DNA, 3318 bp, Escherichia coli
atgagcaaacaatcacagcatgtattaattgccctgccccacccgctgcttcacctggtcagtttaggtttagtctcgtttatcttcacccttttctcacttgagctttcgcagtttggcacccaactcgccccactgtggttcccgacgtccatcatgatggtggcgttttatcgccatgccgggcgcatgtggccggggattgcgctgagctgctcgctgggaaatatcgccgcatccatcctgcttttttccaccagctcgctgaacatgacctggacgaccatcaatattgttgaagccgtggtcggggcagtgctactgcgtaaattgctgccgtggtataacccattgcaaaatctggctgactggctgcgtctagcactcggcagcgccattgttccacctctgttagggggtgttctggttatcctgctgacgcccggagacgatcctctcagggcatttttgatatgggtactgtcagaatccatcggcgcactggcactggtgccgctgggattgttatttaaaccacactatctgctgcgccatcgcaacccacggttgctttttgagtcgctgctcacgttagccatcacactgacgttaagctggctttcgatgctgtatctgccgtggccttttactttcattattgtgctgttgatgtggagcgccgtgcgcctgccacgaatggaagcctttttgatcttccttaccacggtgatgatggtgtcactgatgatggccgctgatccctccctgcttgctacgccgcgtacatacctgatgagccatatgccgtggctaccgtttttgctgatcctgctgcccgccaacatcatgaccatggtgatgtatgcctttcgtgcggaacgcaaacacatttccgaaagcgaaacccgttttcgtaacgccatggaatattccgccatcggcatggcattagtgggcaccgaggggcaatggctgcaatccaacaaagcactctgccagtttctcggttacagtcaggaagagctgcgcggactcacctttcagcaactgacctggccggaggatctcaataaagatctccaacaggttgaaaagctgatcagcggtgaaataaacacctattcaatggaaaaacgctactacaaccgcaatggcgatgttgtctgggcgttgcttgccgtctcactggtgcgccacacggatggcacgccgctctattttatcgctcagattgaagacattaacgagctaaaacgcaccgaacaggtgaatcagcaactgatggagcgcatcacgctggctaacgaagcgggcgggattggcatctgggagtgggagctgaagccgaatatttttagctgggataagcggatgttcgagctgtatgaaattcctccgcatatcaaaccgaactggcaggtgtggtacgagtgcgtgctgccggaagatcgccaacacgccgaaaaagtgattcgtgattcgttgcaatcacgctcgccctttaaactggaatttcgcattaccgtgaaagacggcattcgccatatccgcgccctcgctaaccgggtactgaataaagaaggcgaagtcgaacgcctgctcggcattaatatggatatgaccgaagtgaaacagcttaacgaggcattgtttcaggaaaaagagcgcctgcacataacgctggattccatcggcgaagccgtggtctgtattgatatggcaatgaaaattacctttatgaatccggtggcggagaagatgagcggctggacgcaggaagaagcgttaggtgttccgctcctgacggtgttgcatattacttttggcgacaacggaccattaatggagaacatttacagtgccgacacctcacgttccgcgattgaacaagatgtggtgttgcactgccgaagcggcggcagctacgacgtgcattacagtattacgccgttaagtactctggacggcagcaatataggctcggttctggtgattcaggacgtcaccgaatcacgcaaaatgctgcgccagctgagctacagcgcctcccatgatgcactgacgcatctcgccaatcgcgccagttttgagaagcaactacgcatcctgctgcaaacggtaaacagtacgcatcagcgacatgccctggtgtttatcgatcttgatcgctttaaagcggtgaatgacagcgccgggcatgcggcgggcgacgctttactgcgcgaactggcgtcgttgatgctgagtatgctgcgctccagcgacgtgctggcgcgactcggtggcgatgaatttggtctgctgctgccagattgtaatgtcgaaagtgcgcgttttatcgctacacgcattatcagcgccgtgaatgactatcactttatctgggaaggacgtgtacatcgggtaggtgccagtgccgggattaccttgattgatgacaacaatcatcaggcggctgaagtgatgtcgcaggctgatatcgcctgttatgcctccaaaaatggtggacggggccgggtgacggtttacgaaccgcagcaagctgccgcacatagcgaacgggcggcgatatcgcttgatgaacagaggcggatgattaaagagaatcagttgatgatgatcgcccacggtgtcgcttcgccgcggatcccgcaagcgcgtaatttgtggctgatttcacttaagctctggagttgcgaaggcgagattattgatgaacaaacatttcgtcgtagcttcagcgatccggcacttagccatgctcttgaccgacgggtattccacgattttttccagcaggccgcaaaagcgattgccagtaaaggcttaagcatcgccctccccctttccgttgccggtttgagtagcgccacgctggtgaatgaactaattgagcagctggaaaatagccctctaccaccacggttattacatctgattattccggcagacgcgattttagatcacgcagcaagcgtgcaaaaactgcggctggcgggatgtcggatcgtattcagtcaggtgggccgcgatctgcaaatcttcaactcgctgaaagcaaatatggcagattacctgctacttgatggtgagttatgcgccagcgtgcagggtaatttgatggatgagatgctgattacgattattcaggggcatgctcagcgactcgggatgaaaaccatcgccgggccagtcgttttacccttagtgatggatacgctttcgggcatcggcgtcgatctgatttatggcgatgtgattgccgatgcccaaccgctggatttgctggtgaatagcagttatttcgcgattaactga

SEQ ID NO: 22845 - DNA, 192 bp, Escherichia coli
atgctaacactgccgcacttccagtttatctacgcgttaatgggtgctgaaaggatcctgttctccgtcgattatccctatcagaccctggacggtgtaaaaacctttatagacagtctgcccgtcaacaaggctgaaaaagaggccatcgcatttcgcaatgcagaacgtttactgggcatcacggcgtag

SEQ ID NO: 22846 - DNA, 204 bp, Escherichia coli
atgaacacattattcgtactcattttgactgtacatctcaatactggtgagtcgcttgatgcaatcaccggcatgtacaactcaatgaaagaatgcatggctgccgcagcggaacagaaaattcccggcaactgttatccggtcgataaagttattcacatggacaataacgaaatcccggcaggattaaaaacagcgccgtaa

SEQ ID NO: 22847 - DNA, 189 bp, Escherichia coli; identical to SEQ ID NO: 8040

SEQ ID NO: 22848 - DNA, 261 bp, Escherichia coli
atggattacacaaatctacctaaacaaacttttgctgatttaatcgcactcaggcaagcagtcgtagctctaatcaacttgttgccggagaaggaaaaggaattagttaaagcgcttcttaacagaactgccgccgatttttcatcatatccactgacagatgaccttgcggaccttcctgaattaattgcagcgtccgccaataagcttactgaagagatttaccctcctcaaaaatcttcacaaaattcctgcgagtaa

SEQ ID NO: 22849 - DNA, 435 bp, Escherichia coli
atgccgggcaagtcgagacccatcaattttgtgttttgcgatcacctgagcacgagaagcactttcgctgctgcgcgatcccaacaccacaatcacttcatcgaactggctgactttatctttaataaagtcgctaaccgggttgattttcatacgctcggtacaccagcgaaaactacgggtaggggcaggatagcctttacccagcaaattaacccaaaaggtttcattggttttcggcgttaccgcatgttgagtaattggcaagccattacgtttagcgccggcttcgatctgcaacatggttttcttaatgagatccaccactaccggtgtttctaccagcgtatcggacgacacaacaaaaacatctttactacgcatttccggaggcaagcccagcaaagccagatacaccagcgtaataaccgctga

SEQ ID NO: 22850 - DNA, 495 bp, Escherichia coli
atgatgaaaactgttaaacatcttctgtgctgtgccattgccgccagcgcattaatttccaccggggtgcatgctgcgtcctggaaagatgcgctctccagcgccgccagcgaacttggcaaccaaaacagcacgacacaggaaggcggttggtcgctcgcgtcattaactaacttgcttagcagcggaaaccaggccttaagcgcagataacatgaacaatgccgcaggcattctgcaatactgcgcgaagcaaaagctggcgtcggtaaccgatgccgaaaacatcaagaatcaggtactggaaaaactgggcctgaacagtgaagagcaaaaagaagacaccaactatctggatggcattcagggtttgctgaaaactaaagatggtcagcaactcaatctggataatatcggaacgactccgctggcagaaaaggtgaaaaccaaagcctgcgatctggtgttaaagcaggggctgaacttcatttcctga

SEQ ID NO: 22851 - DNA, 1050 bp, Escherichia coli
gtgcgggtattacttagacctgttctggtgccagagcttgggctggtggtccttaaactaggccgtgaatccatgccggtattccacaatacccgggtactggtggagccggaaccgaaaagcatgcgtaatctgccgtccggggtcgttcctgccgttcgccagccgctggtggaagacaaaacattgctgccgtttttcagtaacgcacgggtgattcgtgctgctggtggtgctggtgcattgtctgactggctgttgcgccatattaaatcctgccagtggccgcacggcgattatcatcacagcgaaaccgtcattcaccgttatggtaccggcgcaatggtgttgtgctggcactgcgacaaccaactgcgtgaccagacatccgaatcactcgagcaacttgctcatcaaaacctgtcagcatggatgattgacgtcatcggtcacgcaataagcggtacgcaggagcgtgaattatctctggctgaattatcctggtgggcgctccgcaatcaggtggcggacgcgctaccggaagcggtattacgtcgttcgctgggattaccagcggaaaaaatctgctcggtgtaccgcgagagcgacatcgtaccgggagagcagaccgccaccagcatattgaaacaacgcacaaaaaatcttgcaccgttgccttacgcccaccagcaacaaaaaccaccacaggaaaagacggtggtaagcatcaccgttgatccagagtctccggaatctttcatgaagctgcctaaacgtcaccgttgggttaaggagaaatacacacgctgggttaagacacagccgtgtgcttgctgcgggatgccagccgacgatccgcatcatctgattggtcacgggcagggcggaatgggaaccaaagcacatgatctctttgtgttgcctttgtgcagaaagcatcacgacgagttgcatacggataccgtggcatttgaagagaagtatggctcccaactggagctgatttttcgatttatcgatcgcgcgctggcaattggtgtgctggcctaa

SEQ ID NO: 22852 - DNA, 228 bp, Escherichia coli
atgggtatagttttgctgtggtccaatattttatattatttattgattacggatttaactactcagcgcccaaaatcatatcaatatcaagggaaaatactgatttgtcgtaggaaatttaatatatccagtatggttttttcaagggctggaaaaaatgttaggaatagcgataagtatgttttccgcacgcttacttacactatgtttaacatttttattggttaa

SEQ ID NO: 22853 - DNA, 429 bp, Escherichia coli
atggaggtgggacgggtcaacaagacgctgtacctcctcaactacattgatgatgaagaatatcgtcgcaggatactgactcagcttaaccggggagaaggccgtcacgccgtggcaagggcgatctgttacggccaacgtggtgagattagaaaacgttaccgtgaggggcaggaggatcaactgggtgcgctggggcttgtcactaacgcagttgtattgtggaacacgctttatatgcaggaagcgctatcacatttgcgcagcgctggtgagatcccggaagacgagcatatctcacgcctgtcgccactgatgtacggtcatatcaacatgctgggacattatacgttcacgctgccggaaaatattctgaagggagagttgaggccattaaatttcaattcaaacaatgaattattgccttaa

SEQ ID NO: 22854 - DNA, 420 bp, Escherichia coli
atgaagcccaaaagtatcagggcggcacttcagttgatgttgccggaaatagaagaaatgctgtcactgggagtttccagggaggaaatttataaggcagtttctgaacgcttcggcctggaaggtgtgaacgttcgtagctttgatacgtccctatatagagcgcggcaaatccggaaaaatggaatgcacaatacacatgaaaggatgccgaacaatgatgatagtgtattgcacaatacacaaaaaggaggtagcgagaaaggtgcagaggaaagtgtattgcacaatacacaaacgccgcctgagcctgaaccgcaaggaagtgaaaaaaaagaaagtcccggcattattgataaagagttcttcaataaaatcagtgaagatttcgaccctaagatgttcaataaaaaattctga

SEQ ID NO: 22855 - DNA, 2214 bp, Escherichia coli
gtgcccgaatttctgcgtaccctgaatatcaatcatagtgctttggccagcatacctgcccatcgcattgcccggctgcgtcggcagggtgaacgctacttcaccgacggtttgcgtgacatcacttcggaccgccgctgggcgatccttgccgtctgtgttgtggagtgggaagcggcgattgctgatgccatagtcgaaacccatgacaggatcgtaggaaaaacctggcgggaagcgaagcgccagcatgacgaaacaatttccggctctaaagccacactcgcggatacgatccgtaccttcaccgcgctgggagcttcgttgcttgaggcccgcagtgacggaaccccgctggagatggctgtcgccagttcggttgcatgggaccggctcgctcaactggtagcgacagggactcaactcagcaacacgctagccgatgagcctcttgcatatgtcgggcagggataccatcgctttcgtcgttatgcgccccgcatgttgcgctgtctgaagctcgaagccgcgccggtcgccggaccattggtagcagcagctttgtcgatcggagagatgaaaggtgttgcatcgccagaaaggcgtttcctgcggcccagctccaaatggaaccgtcatttacgagctcaggaaaaaggagatacccgtctttgggaagtggcggtactctttcacctccgggatgcttttcgttccggagatgtctggctcgctcattcgcgccgctatggtgacctcaagcaggtactggtgccgatgatcgcggcgcaggaaaatgcaaaactggccgtgccttccaacccacaggattggctggcagacagaaaggcgcgactcacgatcgctcttaagcggctggcccgggctgcccgtaacggcactattccgcacggtagcatagaagatggaacgttgcggatcgacaggttgacagcagacgtgccggatggtgccgaggcactcatactggatctgtatcgccgaatgccgtccgttcggattaccgacatgctgcttgaagttgatgcagcccttggtttcacagatgcgtttacccatctgagaaccggggctccatgtcgcgaccggatcggtctgctcaacgtcctgctcgctgaagggctcaatctgggcctgcgtaagatggcggaagctacaaacacgcatgattactggcagctctcacgccttgcccgctggcatgttgaaagcgaagccatgaaccaggcattggcaattgtggtggccgcgcagggtaaactgccgatgtcacgcgtctgggggatgggcacgtcagcatcgagcgatggtcagtttttcccgacagcgcggcatggcgaagccatgaacatggtcaatgccaaatatggttctgttcccggcctcaaagcgtatactcacgtaagcgaccagttcgcgccattcgcttgtcagtcgatcccggcgaccgtgagcgaggcaccgtatattctcgatggactactgatgaacgaggtcggtcgccatgttcgcgaacagtatgccgatacagcaggattcaccgaccatttgttcggagccagtagcctgctcggctacaatctcgttctgcgaatcagggatctgccatcgaagcggttgtacgtatttaatcccgatacgacccccagggagttacgcaagttggtaggtggaaaagcccgggaggatcttatcgttgcgaactggcctgatattttccgttgtgccgcgacgatgaccgctggcaaaatcaggcccagccaactcctgcgcaagctcgcttcttacccacgacaaaacaaccttgcagttgcgcttcgtgaagttggtcgtattgaacggacccttttcattattgagtggatcctggatacggacatgcagcggcgtgctcagatcggtcttaacaagggagaggcccaccatgcgctcaaaaatgcgctccgtatcgggaggcagggggaaattcgcgatcgcacgacagaggggcagcactaccgaatcgctgggctcaatttattgactgcggtgatcatttactggaataccgtccatcttggtcatgccgtcacggagcggcggaacgaagggttggatgttccccctgaatttcttccccacatatccccattgggctgggcgcacattctactgactggcgaatatctttggcccaaggaaccgaaagcttag

SEQ ID NO: 22856 - DNA, 1026 bp, Escherichia coli
atgttgacccaggagcaaaccgtggaaatcagagttcttgcccgacagggccactccatccggcacatcgcccgcacgttgggggtctcgcgcaataccgtgcgccgctacctccgcgatccgtcggtagcgcgataccagccccgtgaaccacgccccaccaaactggggccatttgaatcttatctgcggcaacgggtcgagcaggcccaccccatctggctgcctgccaccgtcctgaatcgggaaatccgcgctcaagggtatggcggcggtctctcgttattgcgcgccttcctcgccacgctcaagcccgcccgccgcgaagcaggtccggccgtccgtttcgagaccgagcccggacggcagttgcaggctgatttcgtggtcttgcgccgggccagatcccccatgtcggccttcgtcgccacgctgggatacagccgcatgacgtttgtcaccttcgtaccggacgaatccttcgagtccgtgcgggactccctgttgctggcttttgactatctgggcggtgtgccccgcgaggtgttgttcgacaacatgaagaccgtggtgctggaacgcgatgcctacggtgacggcaagcaccgttttcaccccggcttgcttcaactggccgatgacctggggttccggatccggctgtgtcgcccgtatcgggcccagaccaaaggcaaggtcgagcgcttcaatcgctacttccgcgagagcttctacaacccgttgctgacccggatgaagggcacggggctgctgctcgattgtgctgctgccaaccgacgcgtccgtgactggttggcagacgaggcgaatgtgcgggtccacgccaccctgaacgagcgccccatcgaccgttggcggcaggagcgggaacacctgcaacccttgccatcccgtgtgcggcgcgacgaggcccccctgctggataacagtctccgcccggtaccactggaatctctccagcacccactgtctgtctatgacgcaattggggaggcctgccgatga

SEQ ID NO: 22857 - DNA, 780 bp, Escherichia coli
atgaacctccagcatgagcggatcgacgccctgtgccagcaactcaaactcgaacgggtggcaacgcattaccccgtcctggcgcagcaggcggtgcgcgaggacttcagcttcaccgacttcctggaacacctgttgcggcatgaagcggggtgtcgccagcagcgcagccgcgaactgctgacgcggatggcttgcttcccgggcatcaagaccctggaggactatgacttcagcttcaaccccggcgtgcccaaggcactggtgcaggagctgggcagtctggcgtttgtcgaacgggccgagaacgtggtgctgatcggaccctctggcatcggcaagacccacctcgccatcgccttgggttacaaggccgcgcaagccggggtcaagacacgcttcatcacggcagccgacctgatgctgcaactgagcacggcgcagcgacaagggcggctgaaggaatacttcaaccgcgccatcctcggtccacggctgctggtgatcgatgagatcggctacctgcctttcggacgcgaggaagcgaacctgttctttcaggtggtggcgaagcgctatgagaaaggggcgatgatcctgacctcgaacctgccgttcagccagtgggccgacgcgtttgccggcgataccaccctgacagccgcgatgctggatcggctgctgcaccatgcccatatcctgaccctgagcggcgaaagctaccgcttgaaggacaagaggaaggcgggagtggtcaggaaaaattccaaacccgaatga

SEQ ID NO: 22858 - DNA, 690 bp, Escherichia coli
atgtcactgtatcgccgtctagttctgctgtcttgtctctcatggccgctggctggcttttctgccaccgcgctgaccaacctcgtcgcggaaccattcgctaaactcgaacaggactttggcggctccatcggtgtgtacgcgatggataccggctcaggcgcaactgtaagttaccgcgctgaggagcgcttcccactgtgcagctcattcaagggctttcttgctgccgctgtgctggctcgcagccagcagcaggccggcttgctggacacacccatccgttacggcaaaaatgcgctggttccgtggtcacccatctcggaaaaatatctgacaacaggcatgacggtggcggagctgtccgcggccgccgtgcaatacagtgataacgccgccgccaatttgttgctgaaggagttgggcggcccggccgggctgacggccttcatgcgctctatcggcgataccacgttccgtctggaccgctgggagctggagctgaactccgccatcccaggcgatgcgcgcgatacctcatcgccgcgcggatgcggtggttgccggtcgtgtttccctttagccaatcaacaaactgctgccgctgcggcgcagccagtgcagagcccagtgtcagtttttgtaagctttccgtcacggcgcgcgatacctcatcgccgcgcgccgtga

SEQ ID NO: 22859 - DNA, 330 bp, Escherichia coli
gtgacggaaagcttacaaaaactgacactgggctctgcactggctgcgccgcagcggcagcagtttgttgattggctaaagggaaacacgaccggcaaccaccgcatccgcgcggcggtgccggcagactgggcagtcggagacaaaaccggaacctgcggagtgtatggcacggcaaatgactatgccgtcgtctggcccactgggcgcgcacctattgtgttggccgtctacacccgggcgcctaacaaggatgacaagtacagcgaggccgtcatcgccgctgcggctagactcgcgctcgagggattgggcgtcaacgggcagtaa

SEQ ID NO: 22860 - DNA, 1320 bp, Escherichia coli
atggctgccagttaccttccttaccgacccgaccaatcctatctgctgcccccttctctgggagagtggctacctgaagggcatcttgcctacttcatcagcgagactgtcgatacgctggacttgagcgcattccacgcccggtatgccggcggtggtccgggcaatcagccgtttcatccggcgatgatggtcaaagtgctgatctatggttacgcgagcggcgtcttctcttcgcgcaaactagccaggaagctgtacgaggatgtcgcgttgcgtgtgctggccgctggaaacttcccggcccaccgcacgctgagtgacttccgtgccctacacctgaccgagcttgagaatttgttcgttcaggtggtgcaactggcgcgcgaatgtgggctggtgaagcttggcacgatcgcggtcgacggcaccaaggtaaaagccaacgccagccgccacaaggcgatgagctataagcgcatgaagccggccgaggacgaattgcattgcgagatcaaggcgctgcttgatcgcgccaaggctaccgacgaccaggagcgtaacgagccggagctggacattcctgccgagatttctcgccgcgagaagcgcctggaggcgatccaggcggcaaaggcgcgcctggaagcgcgccagcgtgaagcggaccaggcccgggggcgcagcgaagacgatggccgccggcctcgccatccggatggctcggacaagggcggtggctcgtacaaacgcgagtttggtgtgccggatgaccgtgatcaggaaagcttcaccgatccggacagccggatcatgaaacacgccggtggtggctccgagcagagctacaacgggtacacagcggtcgatgccgagcaccagatcatcgtggcggcggagttgaccaactgcgccgcggacagtcaggcgctgctgggcatgctggcagcagttcaggccaacaccggagaaatgccggcccagacgctggcggatgcgggattccgtagtgaggctgttctggcaaaggtcgccgatcaccacggcgatgtcatcgttgccctcggccgcgagggacgtgaagatgccaaggtcaatgccaagacccatccgcatacggcggcgattgcggcgaaattgaaaacggagcaaggcgatgcagcttaccgccggcgcaagtcgatcgtggaggctccgaatggttggatcaaggcggtgatgggattgcgtcagttcagcatgaggggcctggacaaggtgcaagccgagtggaagctcgtctgcatggcgctaaatctgaggcgaatggcgtatctgtga

SEQ ID NO: 22861 - DNA, 675 bp, Escherichia coli
atgttagttgaatggggtggcgattcctgggcttccgctgacaacttcatgaatggtcgtaccaacggtgttgcaacctaccgtaactatgatttctttggcctggttgatggtcttgattttgcgattcagtaccaaggcaaaaacagcaaccgtagcactaagaaacaaaatggtgacggctatgcgttgtctgtagactataacatcaatggttttggtatcgttggtgcatatagcaaatctgatcgcaccaacgatcaagttgccgatggaaacggttcaaatgctgaactgtggtcattggctgcaaagtatgacgcgaaaaatgtctacgcagctgtaatgtacggcgaaactcgtaatatgactccgggttctattgatacaggtgttgccgatcgagaaggcaatacaataatgcgtgatcaacttatcaatgaaacccagaactttgaagcggttgttcagtatcaattcgactttggtctgcgtccgtccttaggttatgtgtactctaaaggtaaagatatcaaaggggtacccggacatagatatgttgacgctgaccgtgtgaactacattgaagttggtacctggtactactttaataagaacatgaacgtttatactgcatacaaattcaacatgctggataaagatgaggtagcctga

SEQ ID NO: 22862 - DNA, 393 bp, Escherichia coli; identical to SEQ ID NO: 11160

SEQ ID NO: 22863 - DNA, 639 bp, Escherichia coli
atgcaactgcaacatggaaaaaataatacacaacaatatatatttggcgactttgtattaaaaaacaatggaatattattattcaaaaacaaagaatatcatattcccccgaaagaacttggcgttattattctattgcttaatgctgacggtgaaattgttagcaaagaagagattatcgataaggtctggagcgcgagtgttgccagtgatgaatctctaacacgatgtatttatgcattgcgcaaacttttgcatgagaataaacagtgtaagtatatcgaaacggtctatggtcgtggataccgttttactgtacctattgtgattgtgaccgataatgaaccggtaaagtcgaccactactcttgccgtttttccctttcgtactgaaggttcgatcaatgttctaaaactccattacgaacttgtccagggcctttcaaaatatgctttttgtggtttagatattttacccgcttcggtaacaaatgaggccagtgatttttccactatccatcagtttatcaataaaacaggtccagaatattatattatgggtcaggtcgttcactatggtaaaaactggcgtttatttattgagttaattcatgccagaacacataaatcccaatattaa

SEQ ID NO: 22864 - DNA, 534 bp, Escherichia coli
atggaaaaacggctgcgctggtactggcgtaacccttccgatctttgcccgtggcacatggatgaaacctacgtgaaggtcaatggccgctgggcgtatctgtaccgggccgtcgacagccggggccgcactgtcgatttttatctctcctcccgtcgtaacagcaaagctgcataccggtttctgggtaaaatcctcaacaacgtgaagaagtggcagatcccgcgattcatcaacacggataaagcgcccgcctatggtcgcgcgcttgctctgctcaaacgcgaaggccggtgcccgtctgacgttgaacaccgacagattaagtaccggaacaacgtgattgaatgcgatcatggcaaactgaaacggataatcggcgccacgctgggatttaaatccatgaagacggcttacgccaccatcaaaggtattgaggtgatgcgtgcactacgcaaaggccaggcctcagcattttattatggtgatcccctgggcgaaatgcgcctggtaagcagagtttttgaaatgtaa

SEQ ID NO: 22865 - DNA, 747 bp, Escherichia coli
atgacaacggataacacgaacacgacacgtaacgattcactggctgcacggaccgatacctggtttcagtcatttctggtctggtcacccggacagcgggatatcatcaaaacggtggcactggtgctgatggtactggaccacatcaatctgatattccagctgaagcaggaatggatgtttctggccgggcgaggagcctttccgctgtttgccctggtgtgggggctgaatctgtcccgtcatgcgcatatccggcaaccggccattaaccggctgtggggatggggaattattgcccagttcgcatattatctggcaggctttccctggtatgaggggaatatcctgtttgcctttgcagtggcggcacaggtgctgacgtggtgtgaaacgcgcagtgggtggcgtacagcagcggccattcttctgatggccctgtgggggcctttgtccggcaccagttacggcattgccgggctgctgatgctggcagtcagccaccggctgtaccgggcggaagacagagcggaacgtctggcgctggtcgcctgcctgctggctgttattccggcgcttaaccttgccaccagtgatgcagcggcggtggctggtcttgtgatgacggtgctgaccgttggtctggtgtcgtgtgcaggaaaatcattaccccgtttctggcccggggattttttcccggtattctacgcctgtcatctggctgtgctgggcgttctggcgctgtga

SEQ ID NO: 22866 - DNA, 726 bp, Escherichia coli
atgttgccaggatgctgcaaaaatggaattgttatcagtaaaatacctgttatgcaagcagggttaaaagaggtcatgaggactcacttccctgaatatgaaataatatccagcgcctctgcggaggaccttaccttattacaattacgtcgttccggattagtcattgctgatttagccggtgaaagtgaagatccacgttctgtttgtgaacattattattctttaatctcacaatatcgggaaattcactgggttttcatggtgtcacgctcctggtattcccaggcagtagaactgctcatgtgccctacggcgacgttattgtctgatgttgaacccattgagaatctggtcaagaccgtacgttccggcaatacgcacgcagagcgtatcagcgccatgctgacctccccggcaatgactgaaactcatgattttagctatcgctccgtcattctcactctttcagagcgcaaggtactgcggctattaggtaaaggatggggcatcaaccagatagcttcattgcttaagaaaagtaataaaactatcagcgcccaaaaaaacagtgcgatgcgtcgactggcaattcacagcaacgctgaaatgtatgcatggataaatagcgcgcagggtgcaagagaacttaacttgccttctgtttatggagatgccgcagaatggaacacagccgaattaagaagagaaatgtcgcactcatag

SEQ ID NO: 22867 - DNA, 147 bp, Escherichia coli
atgtctggcaataacgtttttgatgggttgttttccagcccggagcgcgatattgccaccagtcacagaaacaccgagaacaccagatttcagcggtcgctgaatttgaacgagatcttttacttgaacgaacttattcagggatag

SEQ ID NO: 22868 - DNA, 918 bp, Escherichia coli
atggttcagaaaattttgtcggataaggttatgaatgaaagaacaaatgcgtattactcttattatcttggagagcgtaatatctccgtactgccccttaatgtttatgatcccccggaacgttttatcgcttacataaaaaaaaacagagaaaatctgaacatcacactttcagattttgaacttgaacaaataatttctggtatgcgtctgaaggccctggccttcctggtccccctggaaaaaatatcctggatcgcgggcagtgaacgcgcatgcttattttcctggtatctgttgatgcagtttatccagaataacagggcaaaaataagcgcagacttgcttcaaaagaataaactgtatcttaaagaagagtatctggaagggaatgccttcccgtcggactcatcgacacagttcagacaaatactcagagttctcgatattctttctgataagaatttgcgggatgagtggataatccagaccaaagacagatggatgcgggcatttaaatcaaagagtcctttcagttacctcctcccggagaacgaacatgaatgcatatggacatggaattatttgaagggaaaaaatattgcactggaaaaactggccagttttcctggttctgctgatatttaccacgcaattcacctttcatttgacatatgggttacctgtccactcacctcacctgacgatataaaaaatttcagaaacagtttcaataaggccaaggcgcagcgcaagtacaaaaaaatgcaggaagataaagtcaatgtacagttttttcttgacgcagaaaccagggcgcagctcaaagaattatcgagggtcagaagactcagtaccggcgaaatgctgcatgacctgattgttgaagagtataaaaggtaccgacattccagataa

SEQ ID NO: 22869 - DNA, 207 bp, Escherichia coli
atggctaccccagtttcactgatggatgaccagatggtcgacatggcatttctcactcaactgaccggcctgacagataagtggttttacaggctcatcagggatggggcctttccggctcccatcaagctgggccgcagctcccgctggctgaaaagtgaagtggaagcctggctacaggcgcgtattgcacagccccgcccgtaa

SEQ ID NO: 22870 - DNA, 441 bp, Escherichia coli
atggtcacagggccctttttcagtgattccagtaaagacaggcggctgcaatcagttggccccagcagcatctccagctgtgaacgctgttcggctgacggtatcagtgccagtttgttccacaggcgcaacgtcgccttttcccttacctctgaaatcaaccgggtcagcgtagtggctccggggagaataatacgatgttgcataagccaccctgtcgccagatcgaaaagcaggccaggacgttcgttgcttatccagctccgggtatataaaagaggcactgttgcaaagttagcgatgaggcagccttttgtcttattcaaaggccttacatttcaaaaactctgcttaccaggcgcatttcgcccaggggatcaccataataaaatgctgaggcctggcctttgcgtagtgcacgcatcacctcaatacctttga

SEQ ID NO: 22871 - DNA, 282 bp, Escherichia coli
gtggcattcagtggcgctaagcatgagagagagcatactgatatttactcctcatgccgtctgatagtgcggaaaaacggtgctgaaatttataaccgtaccgcgctggataatacgctgatttacagtggcgttattgatatgcctgccggtcacggtcacatgacgctggagttttcggtgtcagcatggctggtaaatggctggtatcccacagcaagtatcagcgatttgctggttgttgtgatgaagaaagccactgcaggcatcacgattagctga

SEQ ID NO: 22872 - DNA, 399 bp, Escherichia coli
atgttgcgtgacccagattgggtaagtaaaatcacccaccttgatcaagatgtactgaatgtattattgaatggtaaagtgaagtttatttcggggaaatataatacccgatatagtattaactatgaattaaaagacaaagttgataatccagtcaatgatgacaccgtgtttatacactatgtgggacctacaaaaccctggcatgagtgggctgattatccggtgtcacgtagttttttgatcgccaaagcagcttctccgtggtgtaaagaagatttacttaaacctgtgaatagcaatcagtatcggtattgtgcaaaacataaatttaaacaaaagcattatatggcaggcatttttaattatttaaagtattataaagaaaaatgcttctaa

SEQ ID NO: 22873 - DNA, 309 bp, Escherichia coli
gtgtcaggagcatatgcctctgttattgatggaaatatctttctggccggtggtgcatatttcccgggggcggcagaaaagtatagcaatggtgaatactggtctcataaaggactggataaagcctattcaaaagagatatatcagctaataaaaaatgactggaaaaaagttggttctttgccggaaggacttgcttatggtgtaagcctgccctggcagggggggatgctcattctggggggggagaaaaaagatggtaaagctgtttcagatgttatttatctgaaaaaaatgacaaacaaataa

SEQ ID NO: 22874 - DNA, 174 bp, Escherichia coli
atgcagcctgtccctgaaggcgtgattcaggtaccagaatcacccgacgccccggaggcgctgccggggtgtcgttccatttctgatgatgacctgtgcacctggtgtacccgcctgctttaccgttccggagagctcagcctgtgcagactgagtacaggcaatggcatctga

SEQ ID NO: 22875 - DNA, 1227 bp, Escherichia coli
gtgttttatcccgaaaccagcccggagcggctggcagaactgaccgatttgcgtgatgagctgcaggcagaagccgggcatctggaagcgcagtatcagcaggaaaaggcactggtgcagcagattatgacgttgcgtcaggaaggaacagacagctctgaactgcaacagcaactgcggacgcatcagggctttgcaccgctgctggcgctggatgtggacgcccgcgccgtcgccacggtggtggcggactggactggcatcccgctctcttccctgctcaaggacgagcagagctacctgctcagtatggaacagagccttgaaaaccgcgttgtcgggcaacgcccggcgctctgcgccatcgcacagcggttgcgggcggctaaaaccggcctcacgccggagaacggcccacagggggtattcctgctgaccggccccagcggcaccggtaaaaccgaaactgcgctcacactggccgacaccctgtttggcggtgaaaaatctcttatcaccatcaacctctccgaatatcaggagccgcataccgtctcccagcttaaggggtctcctccgggctacgttggctacggtcagggcggcgtacttaccaaagccgttcgcaaacgcccgtacagcgtggtgttgctcgacgaagtggaaaaggcgcaccgcgacgtaatgaacctgttctatcaggtatttgaccggggctttatgcgcgacggcgaaggccgggaaattgacttccgcaacaccgtgattctgatgacggctaatctgggcagcgaccacatcatgcaactgctggaggaaaaaccggacgccacggacgcagacctgcatgaactgctgtatccccttctgcgagaccattttcagcctgcactgatggcgcgttttcagacggtgatttaccgcccgctgggacaggaagcgatgcgcgccattgtggaaatgaaactggcgcaggtggttcgtcgtcttcgtcagcactatgggctggaaacggaaatcaacgacagcctgtacgacgccctgaccgccgcctgcctgctgccggacactggggcgcgtaatatcgacagcctgctgaaccagcaaatcctgccggtattaagccagcagttgctggcgcagcaggccgtgcatcataagcctgcccgactgcggcttggctgggataaggaagacggcattgtgctggaatttgatgagaaataa

SEQ ID NO: 22876 - DNA, 447 bp, Escherichia coli
atgcttaaattagttgagtatgatcggacctttcttgatttaagtatgaaatggttgtcggatccagaaatagcaagtttagttatggtgccttctttcactaaagtacaacaggagtgtttttttaattctcttccaacaagagaaaattattatatcaagggattaatatacaatggatatcctattggggctgcaggtataaaaaatatatataaagaaaaaggtgagtactggggatatataggtgagaagcaattttggggaaaaggtataggaaaagatattattcggctcataattaataatgcaaaaatacttgggcttacatctttgtatttaaatgttcatagagataatgagcgcgcacaaaaactatatgaaaaatatgggtttattaggatgtctgttcgcggcagtgtaattttgatggagcggagtatttag

SEQ ID NO: 22877 - DNA, 879 bp, Escherichia coli
atgaaaggaattattttagccggtggttctggaacaaggctttatccaattacaatgggggtttcaaagcagctattgcccatttatgataaaccgatgatttattatccattatcggttttaatgctagcaggtatacaagatattcttattattacaactccagaagatcaacaagggttcataagattacttggggatggatgccaatttggtataaatattacatatgcaattcagccaagtccagatggtttagctcaagcatttattattggtgaaaactttattggaaatgatacagtatgccttgtgcttggagataacatcttttttggacaaggttttactcccaaaatccgggatgctgcaaaaagaacatcaggtgccacagtctttggatatcaagtaatggatcctgagagatttggagtggtggagtttgatagaaattttaaagcgttaagtattgaagaaaaacctgctaacccaaaatcaaattgggctgtcacaggattatatttttatgataataatgtcattgatattgctaagagtattaaaccctccaaacgtggtgaattggaaattactgcagttaatgaagtttatctcaaaaaaaatattttaactgttgaattactaggccgaggttttgcatggcttgatacaggaactcatgacagtttgattgaagctggcagttttgtagaaacagttcaaaaaaggcaagggatgatggtagcctgtcctgaggagatagcttggaggaatggctggttaagtaacgaaaaactttatgagcttagccaaaatttaattaagaaccaatatggcatttatcttcttaaactattagaaaataaatatatagattaa

SEQ ID NO: 22878 - DNA, 303 bp, Escherichia coli
atgcagctaagaattaccagtcgaaaaaaactcacctctctattatgcgctcttgggctaatttccatcgttgcaatttatccgcgtcagacggtgaattttttctattcgacagcagttcagattacagactacatccatttctacggttatcgcccggttaaatctttcgctattcgcattcctgccagttacaccattcacggaatagatgtttctcgctggcaggagcggatcgactggcagcgggtggcaaaaatgcgcgacaacggtatccgcttacagtttgcttttatttattaa

SEQ ID NO: 22879 - DNA, 243 bp, Escherichia coli
gtggctagaaatgatccacaattcaacgtaagaatgcctgatgagataaaacagcaacttacgcatattgctgcaacaaatcgccgctcgataaacgcagagattatttcagctatcgaactatggataaaaattcataaagggcagctaataccttcaagtagtcgaatcctgacaaagtctgagcaagaggcgtttgatgtagctattgatgtgttaaaacgtgtaagagatggaggataa

SEQ ID NO: 22880 - DNA, 234 bp, Escherichia coli
atggagcaacaacaagggtcgccattatcattgattattatggtgatttttttcgtttttatcttttttatacctgcgttaaaaatatccaaaaaggccggttttgactggaagatggctgtatgtttaacaatccctggctttaacgtggtggcgtggctcgcgcttgcgttcatggattggccaattcacaagtatctaccaaaagatgtgaatcgtaaggatgcaaaatga

SEQ ID NO: 22881 - DNA, 210 bp, Escherichia coli
atgaataaaaaacagtttattaagtcaaaaacgtcaagcaaggaagagctagagaaagagctaaactccctgaaatatgctctgtgtctggtttactcaagactgccaatggaagataaaaacgccatttacaatgaaatgattagcagccttgattttaacgatagagacctagcatcccacctcaacagcttccgcgtccctgagtaa

SEQ ID NO: 22882 - DNA, 186 bp, Escherichia coli
atgaccatagaagaacgcctgaacaacattgagttgaaccaaaccctgcttgaccagcgactttcagagcttgagcttaaagatcttgatgcgcaaatatcagaagcagaagccaagctctccagcttaaaccaccgcaagaagcaaatccgcaacagaattactcagggacgcggaagctgttga

SEQ ID NO: 22883 - DNA, 537 bp, Escherichia coli
atgagtgaattaattgagacttctgattttgactttcgccagttagttaccgcagcagagggtgagccgataactgacaccttccaaatcgcaaaggcttttggtaagcgtcacgcggacgtattgagggcgctgaaaaattgtcattgctctgaagatttccggagagcgcatttttgcgttgccgaaaaaatcaatgacttagggattttcgacaagaagcagatttactaccgcatggactttagcggcttcgttatgctggtcatgggatttaatggcgcaaaagccgacgccgttaaagaggcctatataaatgcctttaactggatgtcagcagaactccgtaagtacagcgaaagttatgaagcagaacgtaacgccgtaatgctggagtacatgaaagagaaggatgttgccagcatgtcaggtcgcctgctaaatcgctggggaaaaattaagaagcctcagctactggcgagaattgaacgccttgaacagcacgggcaaaccgtaatcccaggactcactaattaa

SEQ ID NO: 22884 - DNA, 492 bp, Escherichia coli
atgttaaaacgtgaagatgcattgagactttttaattacaatccagatactggaattcttacatggaagaatccacctcggtcctctagatttatctatggcgctgttgttggctataaaaccaatggatatctgcaggtaaaactttatggaatgcggctatatgtccatagaattgcatggctgatggtttacaatgattggccaaccgatgtgattgaccatattaatggtgataggtctgataaccggatagccaatcttcgtgttgttactaacactcaaaactcatggaacagcaagatgaggaaaaacaattcatctggtgtgaagggggtgacttttaattctgctgcaaacaagtgggttggaagaattagagtcaatggtaaaaggattcatgtagggtgttttgacgatatcgaggaggctagaaaggcaatggaaaatgccaggataaaatatcatggtgaattctccagtatgggatag

SEQ ID NO: 22885 - DNA, 363 bp, Escherichia coli
atggattattcacagttaagtgattttgaaattaacttaaaaatcgcgcatatcgtgctaggaaaaaacaattacgactgggatccagaaaagaaagaagtttgcttggctggaattgatggtggtgagtttttgccttgtggatatttcgacccatgtaatagggccgctgacgcatatccgatcatcactgaaaacaaaatcagcactatgtggatgacggcggaaaaagaatggtgcgcatggtcaggaggtgatttagaggaaggttgttgggttcctgactactgcttctgcggtgaatcgcctctccgcgcagccatgattgtatttctaatgatgcaggtcgctaataatgcttag

SEQ ID NO: 22886 - DNA, 3093 bp, Escherichia coli
atgttggcaggggggctggcgatcctcaaactgccggtggcgcaatatcctacgattgcaccgccggcagtaacgatctccgcctcctaccctggcgctgatgcgaaaacagtgcaggacacggtgacacaggttatcgaacagaatatgaacggtatcgataacctgatgtacatgtcctctaacagtgactccacgggtaccgtgcagatcaccctgacctttgagtctggtactgatgcggatatcgcgcaggttcaggtgcagaacaaactgcagctggcgatgccgttgctgccacaagaagtacagcagcaaggggtgagcgttgagaaatcatccagcagcttcctgatggttgtcggcgttatcaacaccgatggcaccatgacgcaggaggatatctccgactacgtggcggcgaatatgaaagatgccatcagccgtacgtcgggcgtgggtgacgttcagttgttcggttcacagtacgcgatgcgtatctggatgaacccgaatgaactaaacaaattccagctaacaccggttgatgtcattactgccatcaaagcgcagaacgcccaggttgcggcgggtcagctcggtggtacgccgccggtgaaaggccaacagcttaacgcctctattattgctcagacgcgtctgacctctactgaagagttcggcaaaatcctgctgaaagtgaatcaggatggttcccgcgtgctgctgcgtgatgtggcgaaaattgagctgggtggtgagaactacgacatcatcgcagagtttaacggccaaccggcttccggtctggggatcaagctggcgaccggtgcgaacgcgctggataccgctgcggcaatccgtgctgaactggcgaagatggaaccgttcttcccgtcgggtctgaaaattgtttacccgtatgacaccacaccgttcgtgaaaatctctattcacgaagtggttaaaacgctggtcgaagcgatcatcctcgtgttcctggttatgtatctgttcctgcagaacttccgcgcgacgttgattccgaccattgccgtaccggtggtattgctggggacctttgccgtccttgccgcctttggcttctcgataaacacgctaacaatgttcgggatggtgctcgccatcggcctattggtggatgacgccatcgttgtggtagaaaacgttgagcgtgttatggcggaagaaggtttgccgccaaaagaagctacccgtaagtcgatggggcagattcagggcgctctggtcggtatcgcgatggtactgtcggcggtattcgtaccgatggccttctttggcggttctaccggtgctatttatcgtcagttctctattaccattgtttcagcaatggcgctgtcagtactggtggcgttgatcctgacgccggctctttgtgccaccatgctgaaaccgattgccaaaggcgatcacggggaaggtaaaaaaggcttcttcggctggtttaaccgcatgttcgaaaagagcacgcaccactacaccgacagcgtaggcggtattctgcgcagtacagggcgttacctggtgctgtatctgatcatcgtggtcggcatggcctatctgttcgtgcgtctgccaagctccttcttgccagatgaagaccagggcgtatttatgaccatggttcagctgccagcaggtgcaacgcaggaacgtacgcagaaagtgctcaatgaggtaacgcattactatctgaccaaagaaaagaacaacgttgagtcggtgttcgccgttaacggcttcggctttgcgggacgtggtcagaataccggtattgcgttcgtttccttgaaggactgggccgatcgtccgggcgaagaaaacaaagttgaagcgattaccatgcgtgcaacacgtgctttctcgcaaatcaaagatgcgatggttttcgcctttaacctgcccgcaatcgtggaactgggtaccgcaaccggctttgactttgagctgattgaccaggctggccttggtcacgaaaaactgactcaggcgcgtaaccagctgcttgcagaagcagcgaagcaccctgatatgttgaccagcgtacgtccaaacggtctggaagataccccgcagtttaagattgatatcgaccaggaaaaagcgcaggcgctgggtgtttctatcaacgacattaacaccactctgggcgctgcatggggcggtagctatgtgaacgactttatcgaccgcggtcgtgtgaagaaagtttacgtcatgtcagaagcgaaataccgtatgctgccggatgatatcggcgactggtatgttcgtgctgctgatggtcagatggtgccattctcggcgttctcatcttctcgttgggagtacggttcgccgcgtctggaacgttacaacggcctgccatccatggaaatcttaggccaggcggcaccgggtaaaagtaccggtgaagcaatggagctgatggaacaactggcgagcaaactacctaccggtgttggctatgactggacggggatgtcctatcaggaacgtctctccggcaaccaggcaccgtcactgtacgcgatttcgttgattgtcgtgttcctgtgtctggcggcgctgtatgaaagctggtcgattccgttctccgttatgctggtcgttccgctgggggttatcggtgcgttgctggctgccaccttccgtggcctgaccaatgacgtttacttccaggtaggcctgctcacaaccattgggttgtcggcgaagaacgcgatacttatcgtcgaattcgccaaagacttgatggataaagaaggtaaaggtctgattgaagcgacgcttgatgcggtgcggatgcgtttacgtccgatcctgatgacctcgctggcgtttatcctcggcgttatgccgctggttatcagtactggtgctggttccggcgcgcagaacgcagtaggtaccggtgtaatgggcgggatggtgaccgcaacggtactggcaatcttcttcgttccggtattctttgtggtggttcgccgccgctttagccgcaagaatgaagatatcgagcacagccatactgtcgatcatcattga

SEQ ID NO: 22887 - DNA, 861 bp, Escherichia coli
atgagcagcaatacatttactctcggtacaaaatccgttaaccgtcttggttatggcgcgatgcaactggcaggtcctggggtttttggccccccaagagatcgccacgtcgctataaccgtgctgcgtgaggcgctggcattgggcgtcaatcatattgataccagcgacttttatggtccgcacgtcaccaatcagattatccgcgaagcgctttatccttactctgacgacctgacaattgtcactaaaattggtgcgcggcgtggagaggacgcatcctggttgcccgcattttctccggcagagctgcaaaaagcggtgcacgataatctacgtaatctcgggctgggcgcactggatgtggttaacctgcgcgttatgatgggggatggtcatggcccagcggaaggatcgattgaagccagcctgaccgtactggcagagatgcaacaacaaggcctggtaaaacatattggtctgagcaacgttacaccgacgcaggttgcagaggcgcgtaagattaccgaaatcgtctgtgtgcagaacgaatacaacattgctcatcgtgctgatgacgcaatgattgatgctttggctcgtgacggcattgcctacgtgccgttctttccgcttgggggctttacgccgctgcaatcctccacactttcggatgtagcagcgagcctgggcgcaacaccaatgcaggtggcgctggcgtggctgttacagcgttcaccgaatattttgctgatcccagggacgtcttctgttgcgcatttacgggagaatatggctgctgaaaaattgcatctttctgaggaagtgttgtctacgttggacggtatttcgcgagaataa

SEQ ID NO: 22888 - DNA, 228 bp, Escherichia coli
gtgccgcaacgaaacgacaggagccgcagcacaccgacgaccagtccgaagaataattcctggttcaggatgcaggctggtcaccagagtgacgcggatatttatatttatgacgagattggtttctggggtgttacagcgaagcagtttatcagtgatctgaatgcactgggcgatatcacccacattaatctccatattaattcaccgggtggcgatgtcttgtaa

SEQ ID NO: 22889 - DNA, 1509 bp, Escherichia coli
atggcaattcttgatgatgtgattggcgttttttcaccaggatggaaagcggcaaggctgcgttcccgagcggtgatccaggcttatgaggccgtaaaaacgacgcggacacacaaagcccgacgggagaaccgaactgccgaccagttaagccagtacggggccgtgtcgttacgtgagcaggcccgttaccttgataacaaccacgatctggtcattggtgtatttgacaagctggaagaacgggtggtggggaaaaacgggattattgtcgagccacatccggtattacgcaatggtgccattgcccgtgacttggcagcggagatacgtacccgatggagtgaatggtctgtcagtccggaagtcaccgggcagtttacccgtccgatgctggaacgtctgatgctgcgtacctggctgcgcgatggtgaggtgtttgcccagatggtttccgggcgcataaacagcctgacgccttctgccggtgttcatttctggctggaggcgctcgagccggactttattcccatgaccagtgatgagagcaacaggctgaatcagggcgtgtttgttgatgactgggggcgtcccgaaaaatatctggtgtataaaagtcgtcctgtatccggacggcagatggaaaccaaagaagtggatgcagagcgaatgctgcatcttaaatttgttcgccgtctgcaccagatgcgcgggacgtctttattgtccggtgtgctgatccgcctcagcgccctgaaagagtatgaagattctgagctgactgcagcaaggatcgccgctgctctggggatgtacatccggaaaggcgacggacagagctatgaaacggatggtaatgacagcaaggagaatgaacgcgagcttaccattcagccaggcattatttacgacgatctgaaacccggcgaagaaatcggaatggtgaagtcggatcgtcccaatcctaaccttgaaacttttcgtaatggtcagttgcgtgccgtggcggcgggcagtcgtctgagtttttccagtacggcacgcaactataacggcacttacagcgcccagcgtcaggaactggttgagtctactgatggctacctgatcctgcaggactggtttattggtgccgtcacccgcccgatgtatcgtgcatggctgaaacaggctgtggcatccggtgttatcaggctaccccgcgatcttgaccgttcttcactgtataccgcggtgtattccggaccagtgatgccgtggattgaccctgttaaggaggctgaggcctggaaaatccagattcgtggtggagcggcgacagaatcagactgggtacgtgctggtggtcgtaatccggatgatgtcaaacgtcggcgcaaggccgaaattgatgaaaaccgcaagctggatctggtatttgataccgatccggccagtgataaaggaggcagcagtgccgcaacgaaacgacaggagccgcagcacaccgacgaccagtccgaagaataa

SEQ ID NO: 22890 - DNA, 1026 bp, Escherichia coli
atgcacattttatctgtttcaaaaaaggaagttggaagagctggggatagattagtttctcagtttggtacaggtgaaaaatataaagaggaagatgtacaaattcttcatgagtggaggatgttgcatttatatcctttaagtaaaatacaattttatatggaaagagaggctatttccttaaacaaaaatgcgttactatcctctagaattaagaggatgccttccattgttactaagctttctagatttcctgatatgaagttaaataagatgcaggatcttggtgggtgccgggctattttaaataatctggatcaagtgtatgatttagttaataaaataaaatcatctaaattctcacatgaactagttagaatggatgattacatgatagacgtgaaagattctggttatagaagctttcatatggtctattcattccaaaataaaaaatttccatctttaaatgggttgcgcattgaaatgcaaataagaacagctattcaacatagctgggctacagcagttgaaatggttggtttgtttcgaaaggaatcattgaaatctggttttggtgatgcaagatggcttaggttttttgaattggtatcagagcttttttataaacttgagtatgaaaaagaaccatctgggagttatataaaaatatcagaagaattaagttatttatccgtcgagttgaatgttttcgatatattagctgcttacaatgccgtagttagccatattgagggtagcaaaaaatatgataaaggactttgcataattgttgttgataccataaagcggaatataaatataaagagcttcgaaaatcacaatcatgcgaaggcggcagaagcttatgtcgagtctgaaaaatactgcgcggaaaataaaggctgtgaagtggctatggtttctgttagttcaattagtgaattaaaaaatgcatatcctgcttactttttagatacgaaaacttttttaaattatctcagtaggtatgtttttataaaataa

SEQ ID NO: 22891 - DNA, 216 bp, Escherichia coli
atgagcggtaagcgttatcccgaagagtttaaaactgaagcagtcaaacaggttattgatcgcggttattctgttgccagcgttgcaacacgtctcgatatcaccacccacagcctttatgcctggataaagaagtacggtccggattactccactttttcatcaagccaatccgcccaccactgcatcatttctctgcgcttatcgagatactga

SEQ ID NO: 22892 - DNA, 360 bp, Escherichia coli
atgattaatccaaatccaaagcgttctgacgaaccggtattctggggcctcttcggggccggtggtatgtggagcgcaattattgcgccggtgatgatcctgctggttggtattctgctgccactggggctgtttccgggtgacgcactgagctacgagcgcgttctggcgttcgcgcagagcttcattggtcgcgtattcctgttcctgatgatcgttctgccgctgtggtgtggtttacaccgtatgcaccacgcgatgcacgatctgaaaatccacgtacctgcgggcaaatgggttttctacggtctggctgctatcctgacagttgtcacgctgattggtgtcgttacaatctaa

SEQ ID NO: 22893 - DNA, 654 bp, Escherichia coli
ttgctgcgccgtgaagggcttcatgttaatcataagcgcgtgtaccggctttatcacctcagtggtctgggcgtaaaacgcagaagacgtcgtaaagggctggcaacagaacgtctgccgctgctccgtccggcggcgcccaatctgacctggtcgatggatttcgtcatggacgcactttccaccggtcgcaggatcaagtgtcttacctgcgtcgatgatttcacaaaggaatgcctgacggtcactgttgcctttgggatttcaggcgttcaggtcacgcgtattctggacagcattgcactgtttcgaggctatccggcgacgataagaactgaccaggggccggagttcacttgccgtgcactggatcaatgggcctttgagcatggtgttgagttgcgcttaatccagccgggcaagccaacgcagaacggatttattgagagctttaacggacgatttcgcgatgaatgtttgaatgagcactggttcagcgatatcgttcatgctaggaaaattattaatgactggcggcaggattataacgaatgccgcccgcactccacgctgaattatcagacaccgtctgaatttgcagcgggctggagaaagggtcattctgagaatgaagattccgacgttactaactga

SEQ ID NO: 22894 - DNA, 426 bp, Escherichia coli; identical to SEQ ID NO: 18912

SEQ ID NO: 22895 - DNA, 351 bp, Escherichia coli
atgatctcactcccatcaggtacccgtatctggctcgttgccggcgttaccgatatgcgtaaatccttcaacggactgggagaacaggtacaacatgtgctgaatgataatcccttctccggtcacctgtttatcttccgtggccgacggggtgacaccgttaaaattctttgggctgatgctgatggtctgtgcctgttcaccaaacgcctggaggaaggccagtttatctggcctgcggtacgtgacggcaaggtatccattacccgctcgcaactggcaatgctcctcgataagctggactggcgtcagccaaaaacattccgccttaacgcactgacaatgttgtaa

SEQ ID NO: 22896 - DNA, 378 bp, Escherichia coli
atgaaaacattacccgacacgcatgtacgggaggcatcgtgctgcccgtctcccgtcaccatctggcagacactgctcacccggttactggaccagcactacggcctcgcgctgaatgacacaccgttcgctgatgaacgtgtgattgagcagcatattgaagcgggcatttcactgtgtgatgcggtgaactttctcgttgaaaaatacgcgctggtacgtaccgaccagccgggattcagcgcctgtacccgttctcagttaataaacagtattgatatcctccgggcacgccgggcaaccggcctgatgacacgcgacaactacagaacggtaaataacattaccctgggtaaacatccgggggcgaaacaatga

SEQ ID NO: 22897 - DNA, 918 bp, Escherichia coli
atggctgtgctgatttttctgggctgtctgttgggtggtattgctatcggtttgcctattgcctgggcactgttgttgtgcggagcggcgttaatgttctggctggacatgtttgatgtccagatcatggcacaaacgctggtgaacggagccgacagcttctccctgctggcgattccgttctttgtgctggcgggtgaaatcatgaatgcgggcggcttgtcaaaacgcattgttgacctgccgatgaaactggtggggcataaacctggcgggttgggctacgtcggcgtgctggcggctatgattatggcgagcctttctggttctgctgttgctgataccgccgccgttgccgcgctattagtgccgatgatgcgcagcgctaactacccggtcaaccgggctgcggggctgattgcctctggcggcattatcgcgccaattattcccccttccattccgtttattattttcggcgtttccagcggattatccatcagtaagctgtttatggcgggcattgcccctggcatgatgatgggcgcaacgctgatgcttacctggtggtggcaggccagtcgccttaatttaccccgccagcaaaaagcaacgatgcaggaaatctggcactcttttgtctccggtatctgggcgctgtttcttccagtcatcattattggcgggtttcgctccggtctgtttacccctaccgaagccggggccgttgctgctttctatgcgctgtttgtcgccacagttatttaccgtgaaatgaccttcgccacactttggcatgtgctcattggcgcagcgaaaacgacctcagtggtgatgtttctggtagcctcggcacaagtttccgcctggctgatcaccattgctgaactgccgatgatggtttctgatttactgtaa

SEQ ID NO: 22898 - DNA, 459 bp, Escherichia coli
gtgccagacgacgagattgtgcagcaccgcagagtcgccctgttggagttgatccaaaagcatattcgccagcgcgatctgatggggcttatcgatcaactggtaatattactggttacagagtgtgctaatgacagccagataactgcgctgttaaattacattttactgactggcgatgaagcgcgttttaatgagtttatcagtgaacttacccgtcgaatgccacaacaaagggagcgaataatgacgattgcagagcgaattcataatgatggatggctgttagggatggaaaaggggaaagaagaaggggaacaacgcctccttagattgcttttgcagaacggtgcggatcctgaatggatacaacgatatactggactttcggcagagcaaatgcaggcattagagcaacccttgcctgaaagcaagcgcgatccatggatcgagtactaa

SEQ ID NO: 22899 - DNA, 756 bp, Escherichia coli
atggaacatgacacgcggggcggcattcgtatggacagtcgctatgttagctgggaacgtctggaccatttcgacggtgtgctggtgcgcgtccatacgttaagcgaaggcgtgcgcggcgatttcggcagtatcagcattgcattaaccctgctgtgggcgctctttaccaccatgttactcatctcctggtatgtgattcgccggatggtcagcaacatgtatgttctgcaaagttcgttgcagtggcaggcgtggcacgacaccttaacccgtttatataatcgtggcgcactgttcgaaaaagcccgtccgctcgctaaattgtgtcagacgcaccaacatcctttttctgtcattcaggtcgatcttgaccattttaaagcgattaatgaccgctttggtcatcaggcgggcgaccgtgttctttctcatgctgccggattaattagcagttccttgcgtgcgcaggacgttgccgggcgggtcggtggtgaggagttttgtgtgattctgccaggcgcgagtctgacggaggctgcggaagtcgcagaacgtattcgcctgaagttaaatgaaaaagagatgttgattgctaagagtacgacgatacgcatcagtgcctcgttgggggtaagtagcagcgaggaaaccggtgattatgattttgaacaattccagtcactggccgaccgtcggctttatctcgctaaacaggctgggcgtaatcgggtattcgcgagcgataacgcttaa

SEQ ID NO: 22900 - DNA, 948 bp, Escherichia coli
atgaaaagtcaagtatgcgttattggttcgtttaatgttgatatcatcagttatttgccgaggcttcccactatcggagaatcgcttctggcaagtaattttatattttcaccggggggaaaaggttgtaaccaggcgctggcagcaagctttgccgatactgatgtttatttcataacaaaagtaggtacagatcactttagtgattatgcgatcaactttatgaattcgtctaagatttataaaagtataatttatcaaacgaaagaaacgcaaaccggaactgccacgatccttgttaatgaaggtactggcgataatgttattgcgatctatcccggtgccaacatgacaatgtcgtccgatgaaataactattcagaaagaagcgattattaattctgatgtcatacttctgcagctcgaaacaaattataccgctctgcaacaagcgatcacattggcgcaaaaaaacagtatcccggtcattattaacccggcaccctataatgatatcgtcaacgaacttattcaggatgttgattatatcacccccaatgaaacagaagctggtttactgtccggcatagacgtacacgatcttgaatcagctaaacgagctgcagaagctatccacaataaaggggtaaaaaacaccgttatcacgctcggtagcaagggctcgctcgcatttgatggcaaaaaattcattcattcgccagcgtttccagcggtcgttaaaaatacggcaggagccggggatgcttttaacggcgctctggcatcaggacttgcgaaaggaaaatcactggaatcagcactgtgttatgccagcgcctttgcatccctggcggtggagacaagcaatgcttccgacatgcctgaacatgaatctgtgatacatcgaattcagagtatacattatcagcaaactatttttacgcattaa

SEQ ID NO: 22901 - DNA, 177 bp, Escherichia coli
atgttctggaaccttgaagtaataacgtcgaccggaaaatcactctgcatcatcactcagattcaatttaacataatatacattatgcgcaccaacataaaccaagggagaatccagccgttggcggtcatgattgtcctgctcattaacaacggccacaccccatatcttacttaa

SEQ ID NO: 22902 - DNA, 654 bp, Escherichia coli
atgaaattctccaaattttctgagttggtgaatcgtattttgttgaatcgtattttgtccaacaaccacagccatcgtcgcgatatggatgtaacgatcgttgttcattcgcctggcagcattggttcaacaccttcagttgaggttcagtcaattcatgctggttttgattgggattccgggaaagtgcttattttcccagcacagccactgaccacgctaacaccagagcaggttgctgatatcactgatagtgtgcgcaaaggtcagtcttggcacgcatatcaggaatataaaaagcataaagagcagttggaaaaattgtcgattgaactggatgctgcaaaacagcgcgtagcagaactggaggccagtcgcgtgacgctggcggaggagaactcgtggctgaagatgctcatagaagatcatgctggttgtactgctgtctgcccaaattgctctcatgaagaacccagtgaaacagacgacattgtttggtcttaccgttcacgggaaacgccagccaccgatgctttcctggctgaagtccgggcgcagggcgtggagatgtttgcggagtgtgcatacacgcttgaacatcatgatcacgcagtagccttcgccgctgagcttcgcaaaggaggcaaccagtga

SEQ ID NO: 22903 - DNA, 579 bp, Escherichia coli
atgacgttcatcaggcgttttacagacagaaaagtgtcaacgtatatcaggactagtcatgtagcctatgaggatgagaacctccgggggcagggaggttcgactcgagcgaagcgagagaacgttgcgccagcaacggcccgcagggcgagccacgaagtggcgagtaatcctctatcaccgaccaaattcgaaaagcctgctcaacgagcaggcttttttgcatctgtagcccatgaggatgagaacctccgggggcggggaggttcgactcgacgtaggcctgataagacgcgccagcgtcgcatcaggcaaatgtaccggcccattgtcggattcggcgcgaccgccttatccgatctacacaccacacatttccctgccaaatttgcgccccatatctcactatccattaacggatttgtgacagaaaccattgtctttttttatatttgcttaaatctttttttgcgttacttatggctggcgctggcattttccgctgtgcgttttagcgttcatggtattaatcgctcagatatccacctttacctcagatttttttcattaaatgcataa

SEQ ID NO: 22904 - DNA, 408 bp, Escherichia coli
atgatcgcgtttatcgatctggataacttcaaattaatcaacgatcgttttggtcataatagtggtgatttgttcctcattcaggttggcgagcgccttaatacgctccagcaaaatggcgaagttattggtcgtctcggcggtgatgagtttttggttgtttcactgaacaacgagaatgcggatatttcgtctctgcgagaacgtattcaacagcaaatacgtggagaatatcacttaggtgacgttgatttgtattatcccggtgccagtcttggcatagtagaagtcgatcctgaaacgaccgatgcagacagtgccctgcatgctgccgatatcgcgatgtatcaggagaaaaaacacaaacagaaaacaccttttgtcgcgcatccagcgctacattcctga

SEQ ID NO: 22905 - DNA, 327 bp, Escherichia coli
atgaaagttattaatgcacctgctgcaagaagtgtgagaatcgccggagttgaaattatcgatagtgtcaaagcggtcgcttctgtttttactgaaatcttgttgtttatggtctggtttccggcaattgtctatgggctttatcgtgttgttatcgttttgtgggatgattccttaaagccgcaatcggtcatggggtttattaatttcatggttgagttatacagctatgtacttccttcgctggctgttatcgcagtggctttaatcgccgttttattcctttttaaaagactctcagcaatatgggagggaagaaagcaatga

SEQ ID NO: 22906 - DNA, 474 bp, Escherichia coli
atgagacattttcttaatgctctttcctttgctgttgccctgttgccagcgacattgtgtgctgctcagattcaggggaaggttattcgtgtacttgatggtgacaccattgaagttttgcaggagcaacaacctgtcagggttcgtctcctgaatatcgatgccccggaaaagaaacaaccctttggacgctggtcaacaaatcaacttaaatccctgctcgcaggacaatccgttaccgtctcttatacgcaaacagatcgctacgggcgagtcctgggacgagtggtgacagcgaacggcactgaggctaaccgccagcaagtgctaaaaggggctgcatgggtatatgacaggtacaacacggataactcattaccggctctgcaacaggaagcacagacacagaagcgcggcctgtgggctgatcctaatcctgtccccccgtgggagtggcggcataaacagagctga

SEQ ID NO: 22907 - DNA, 978 bp, Escherichia coli
atgagatattttaccgaattaatctgtcaactctacaggttaacagaacaccataaactgaccgctgcaacgtttaaaaatgtcgctgatattaagttagtaaaacctacagcggatgcagacaccatattgcagcttgaaaatatatttagcgaatactcgctgagatatattgacagagatctggctgaaattctgagcaacataataatcaaggaaaaaaaacacgttctggatttcgattttaacaaaatacagtctctgactgcctctaagagcttcggttgtgggtggaataaggtcatcaatggtagttggttcaaaaacctttattcttggggggaggggatgtatcctgccaaaaacctgaaagctgaaaacacttcagactggaaagataatatatggcacattgagcatgaaggtttcaacccacgcgatcctattaatgttaaatattactcttggtttgaccgatatgtagcttcaaatagtggtggttcacatcatgcagcaatggttgtatatcaatcagtcagagacgggttagagtataaaagagaagcagttattaaacaactgagtatagactcaagcactgttgaaatacttgacaagaattactattcattcatattccagatcaaaacccttcataaggaaactggaatttatacatccgaatatgagtttacagatgctttaaaagactttgtacaaaacagacataccacacttaaacctattaattacgtttccaacatcagattagtatttattcccaaagatgcattaaaaacaaataacgagacattccgcaactggttttattctgcaattagctgcggaaaaataatatcactccctgattatctgaaaaatccagcacattaccatacacaccattactcacatgaactagactcgataacacttggtgacccaagcagaaaatataaacagaaaggagattcttag

SEQ ID NO: 22908 - DNA, 357 bp, Escherichia coli
atgaaatatcaggtcaaagagtttattaacgaaaaatattctaaggctgttaacattttaaaggataacctcaaagaacactaccatgttttttatggtttgagattaagtgagattctttttcctgccagtgaatacggctctgatatgttttttaacgagtttgaggtgattaacagtgttatcttaccgttggtgatttttgatttaatagaccgaaagccgattatggttatcggcttcgataagatacctgatgccagtttgttggaaggaacagatattgtggttcttgaatgtagtaccctcgccgatcttctaacaaatgataatgttgcttttttatataaaagctaa

SEQ ID NO: 22909 - DNA, 699 bp, Escherichia coli
atgaaaaatatcctactggcatcattgttagtggcatcgccgggtgcatttgcagccagctttgactgccaaaaggcttcgacagcaatcgaacataaaatctgcgataacgaacgtctgtcaaaattagacgaacagcttagctctgcctattctagtgccctcaaaggaaacccagagaacgcagacaccctaaaaatggttcaacgtcagtgggtaaatatgcgtggaaaactcactgataataaggctctggagctggcttatcttatccaaattaatggcctcaaaggtttggggagttcagtcagcgtaacagcggccaatgacatacccacgtcggcgcagaaacattctaaagagcaggaagatacaagtaaggcagaagctaagtcggtcaagaacggcaataagctaaccttagagtcattccgagctaaatatgtagaagtagatggtgagtattacagcacgacatccattcctagaggcagttcgttcttgttcacttgcgctagtcgtattgctgatgaccaagtgaatatttggaagaaacaggcagccaaagagggcaaaatcgacctattctttgaggttgagaatcacttacacacggctatgttgaacgccaattttcagaagttgaattcagaccctgccaaaagaggtatttgtaatctgattaacgcagtgccgtaa

SEQ ID NO: 22910 - DNA, 222 bp, Escherichia coli
atgaaacgtattttacctctgatactgactctggttgccggcatggcacaggctgacagcaacagtgattaccgggctggttctgattttgctcaccagatcaaagggcagggaagcagcagtattcagggctttaagccacaggagagtatccccggctataacgcgaatccggacgagacaaaatattacggtggcgtgactgccgtaagcgtaaactga

SEQ ID NO: 22911 - DNA, 423 bp, Escherichia coli
atgacagcacagatagcggcttacgggcggctggtggctgacccgcagttaaagaccaccagcaaagggacacaaatggcgatggcgagtatggcggttcccctgccgtgcagccaggcagatgacggaacggcgacgatgtggttatccgtcctggcgtttggcagacaggccgacgcactggcaaaacaccacaaaggcgaactggtgagcgtggcgggtaacatgcaggtaagccagtggacaggccagaacggcgaaacgcggcggggctggcaggttatcgcagacagcgtaatcagtgcgcgaacggcgcgaccgggcggcaaaaaaggccagcaggggcaggccactgacgcactgaacagggcaaaacaacagtcggggaatgataatccgtacggcgataatataccgttttaa

SEQ ID NO: 22912 - DNA, 252 bp, Escherichia coli
atgaccaaaattcgcagagacagaacacaggcaaaatataaagcgttagacatgacagagctttccttaaaggtggcaatcaaagcgatagaccaccacacacgggcaggatacgcgaaggaacatcccgacctgataagcgcattcatgaccacagcagcggcaaactttgccacgctgacagaacgggagattgccgaagcggaacaggtgacaaccatcaatgttaaaaccggagagcagacagcatga

SEQ ID NO: 22913 - DNA, 198 bp, Escherichia coli
atggttgctgtaaatcatataccacaccttgtacacacacaaacggcctttgtgtggcgttttctggcactgagtgccggagaatctcaaatcatccacgtaaccgcctggacggaacgcgaagcgcgtagccgttgcccgtccggttgtgttgctgtattcgctgcaaaaatccgccagggagtgagtcatgcttaa

SEQ ID NO: 22914 - DNA, 579 bp, Escherichia coli
atgaataaaaatattgccgtgacgggcaaggggtacgctcgtccagtgaaaaaattctgcgatattcgtgatctcgtcgttctgcgctttgatagtgtgaacgttcgtgtggtgtatctgaacggcgatccgtggtttgttgcaaaagatgtttgtgctgcgctggaactaaccaattcgcgtacggcgttgcagatgcttgatgatgatgaaaagggagtaaatttaacttacaccccaggaggaaatcagaatatgagaattatctctgagtcaggtttctacaaactaatagcccgcagccgcaaagcaacgacgcctggcacatttgctcatcgtttcagtaactgggtattcagaaatgtgataccgggtatcagaaaaacgggggcttatggtatcccatggggtgcattacaggatttttcccgccgtaaagagcaatatcaaataagtgccagcgagaaggggagggagctacaggcatgtaagcgcaaaaagcgtgagctggaggaagaagaaaaaaggctgatacgtgaatatcagcctgagttttactttggtaaccgcattcagtga

SEQ ID NO: 22915 - DNA, 258 bp, Escherichia coli
atggcaatttatgctcttgttgatgaaaacgatttgcacacaatgaaggacattgatcggttcattcgtgaaaaagagtgcatagcacttaccacgctggcaaactcaacacgctggaaaatggagcaggcaggtaaattcccgcgacgtatcaagatcggtgaacgtgctgcagggtatcgactttcagaggttcaggcatggatccgtggtgagtggcatcctggatggaaacctggaaaaacaaaacagcaataa

SEQ ID NO: 22916 - DNA, 1242 bp, Escherichia coli
atggctattgaaaacaaactcagtgacaaactgttaaagagtcttgtcggaaaacggcaggacaaacaaaaaacaatagcggatgggcgcgggttgtctgtgcgtgtaagcatggttggggggatcagctttgttttttactatcgtcttggtggcagggaatcccctccggtatggcttacacttggtcgctatcctgacatgtctcttgcaacggccaggcgcatgcgtgatcagtgccgtgaatggctggctgaaaatctggacccccgcaggcaaataaaacttgctgccgaaaaaactatgcaaccagtgaccgtaagggatgcgctgttttactggtacgacaatcacgccacaacagccagaaaagagcatgaatatttaataaaacgatttgaaaagcatatcttcccctatatcggtgatatggctatagaacagtgcaaattacacacatggcttaccgtctttgacaggatcaaaaaaaatgcgcctgttatgtctggtgcaatttttcttgatatcaaacaggcgttgcgtttttgtcgcgtcaggcaatacatcgcgtgcgatccctttggagatattaacgtaagttatgtcgggcgctcatccggtataagggatcgcgttcttaatatcaatgaaaccgctgatgtatggtcttatgcttacggtaataatttgctaactctgtcatcaatatataaccgaagaataatggttatctgcctggtgtttggttgccgacagcaggaggcgaggctatccacctgggacgaatgggatttaaaaaactgggtatggacagtcccaaaagagcacagcaaaaacaaggaggctatagtaaggcctgttcctgacggaataaaacaatggatcgttaatctttacgcagaaacaaaaaatcgcggttatgttgtcggttgtgctttgcaaagggcgacaataacaggggctgcaaacagaatatgcaggcgtcttggtcatgatactaatggcttgtggtgcatacatgatttcaggcgcacattttccactgcgcttaatgatatgggggcggatccttatattgtggaacttcttttaggccataaagtgaaaggggttgctggtgtttacaataaaagcaggcatataaagaaaaaacttgaggtgcttaatatgtgggttaattaccttaatacgatagcaggatttaacaacaacgttatcgagcttaataaagaggtggtgtga

SEQ ID NO: 22917 - DNA, 354 bp, Escherichia coli
atgtttaagcccaggatttgcagctggataggtttacttcccctgtttatgctgagtcttccagtacaggcggaacttcgatgtgttgtaaatgcagttgatattgaaccatttttttctgcggctaccgctgaagataaacaacaagttgaacaagctatcaacagtagcgtgaatcttgtccccgtcggtttatctgcatcggactggaaagtgcatcgtggcgatttaatggtagaaggtaatatagagagtaatcaaaaattgattgttcttggcaatttgacagtcaaaggtaatatttccactttctctctttctaatccatgggttattctcggtaacgtaacgtaa

SEQ ID NO: 22918 - DNA, 1020 bp, Escherichia coli
atggcaataacccgaaaacgtcgtagtacaggtaaagtcactattgctgatgtcgcgcaactcgcgggagttggcacaatgactgtatccagagcgttacgcactcccgaacaagtttcagataaattgagggagaagattgaagccgcagttaatgaattagggtatatgcccaacctcactgcaagcgcactggcatcggcatcttcacacacgatcgcaatggtcgtgccaaacctggctgaagcgggatgcacggaaatgtttgccgggctgcaacatgtgctacaaccagcggggtatcaaataatcctggctgagtcacgccatcgtctggaacaagaagaaaaactgctggaaaccctgctggcttctaatatcgctgcagcaattttgcttagtgttgagcataatagtaccgtgcgtcacttgctcaaaaatgcctcgattcctgttatagaaatcggtgccattcgtactgatccgatagatatcaacattggtattgataatgttgcagcaatgttcgagctgacggatatgctggtacaacgtggttatcagaatatcggtttgctatgcgctaaccaggaacagtggatctttcagcagcatttacagggatggtataaagctatgttacgccatcatatgtctcccaaccgtgttattaacgctgctctgccacctgttttttccaccggagcatcacaactaccggaatttttgctcgcatggccggaactggatgccctggtatgtgtgtcagatgagttagcctgcggtgttctctatgaatgtcaacgaagacggatcaaagttccagacgagctcgccgtagtaggatttggtgacagtgacgtcagcaaagtttgccaaccatcattaacaacaatggccgttcctcacaggaaaattggtctggaagcaggaaatgttttgctggaacgaattaaagaaggtaactggagcaatcagatattcattgagccctgtttatgtttacgtgaaagctgctga

SEQ ID NO: 22919 - DNA, 444 bp, Escherichia coli
gtgcttaatatctggctttctgattcaacaatcgcattacgaaagaatgccgcaacctggcagcaggcattagatatctgtgccagaccgttactggatgcagagataattacgacggattatctcagtgcgataaagacacaacatgaaaaactggggccttattatgtcctggcacccgggctggccatgccgcatgcccgaccagaagaaggggcaaaaggattaggtttatcattattaaaacttgaagaaggtgtcagttttcatacagaggaatttgatcctgtagatgttatcattttacttgccgcaccagacaaacacagtcatatcgaaatgatatctgcactggctgagttattctccagcgaaaaagatttacatgaattgcatcaggctcgcaatgtggaggaaataaaaaagataatttcacggttctga

SEQ ID NO: 22920 - DNA, 306 bp, Escherichia coli
atgggacttcttcaacttaaaatggtgaatataatgaaaattatggctatttgtggctcagggcttggtagtagttttatggtcgaaatgaatattaaaaaagttctgaaaaaaatggatatagaggcggaagtggaacattccgatctctcatcagcaacgccaggggctgccgatttatttgtgatggccaaagatattgctgccagtgccagcgtaccggaaagtcagttggtggttatcaacaacatcattgatattaatgaactcgaaacgcaactgcgtaactggttagcaaaacaataa

SEQ ID NO: 22921 - DNA, 1389 bp, Escherichia coli
atgtttatccttgaaacgctgaattttgttgttgatatacttaaagtgcccgcgatactggtcggcttgattgccttaattggtctggttgcccagaaaaaatctttttcagatgttgttaaaggtacaattaaaactattctcggctttattgtactgggcggtggtgccactgttttggttggttcgttaaatcctcttgggagtatgtttgaacatgcctttaatattcagggcatcattccgaataatgaggctattgtttctattgcgctggaaaaatatggcgcatcgacggcccttattatggcatttggtatggtggcgaatattattgttgcccgctttacccgccttaaatatatcttcctgaccggacaccacacattttacatggcctgcatgattggtgtgattctgacagtggctggttttgaaggtatatcactggtctttaccggttctcttattctgggacttgtgatggcatttttcccggcattagcacaacgctatatgaagcgtattacggggaatgatgacattgcttttggtcactttggcactctgggatatgtactttctggctggattggcagcgtgtgcggtaaaggttcccgctccaccgaagagatgaatttgcccaaaaatctgagcttcctgcgcgacagttccatctctatttctcttacgatgatggtgatttatctgatcatggcgatcagtgctggtcgtgagttcgttgaaagccagttcagtggtggtcaaaactaccttgtctacgccatcataatggccatcaccttcgctgctggtgtatttattattctgcaaggcgtgcgtttaatccttgctgaaatagttccggcatttaccgggttttcagaaaagctggtgccgaatgcccgtccggccctcgattgcccggttgtgtatccgtatgcgccaaacgcagtgttagttggtttcttgtttagcttttttggcggtctggtagggctatttttgttgggacagatgaaactggtgttgattcttccgggtgtcgttcctcacttttttaccggggcggctgctggcgtatttggtaacgctacggggggacgtcgtggcgcaatgattggtgcttttgcgaatggcttattgattaccttcctgccagtactgttattgccggttcttggggcgataggctttgctaatacgaccttttccgatgcagattttggtgctgtcggcatcgtcctcggaaacctggcacgttatctctcaccttttgccatcaccggacttgtagtagcgctatttgtgctgctggttgcctggaacattttcgccagtaacaaaatcgctgccaaagcgcagaagaagagtggagccaaatcatga

SEQ ID NO: 22922 - DNA, 831 bp, Escherichia coli
atgaatgttaaagaattgactcaatttgcacgggatatacgtatccagacgcttaaatcattaactcatctcggcttcggtcattatggtggcagcatgtcggttgtggaaacgctggcagtgctttatggcgctgtaatgaaaattgatcctgctgctcccgactggcctgagcgtgactattttatcctgtccaaaggacatgccggacctgctctctacagtactctggcgctgaaaggctactttccactggaagaattaagcaccttaaatcagaacggaacccgcttaccaagtcatccggatcggctaaaaacgtgtggtgttgatagcaccacaggatcgctggggcaggggatatccattgccggagggatggcgctgtcgcataaactggcggggcgcaagaatcgggttttttgtattgtcggcgatggcgaacttaatgaaggccaatgttgggaagctttccagtttatcgcgcatcatcgtttgaataacctcactgtgtttgtggactggaacaaacagcagcttgatggtcaactggatgaaattattaatccatttgatttggaaggaaaattccgggctttcggttttgatgtcgtgacagtgaagggcgatgatattgagggcttgttgaatgtagttaaacctgtcctgccagctgaggccagaccgagagtggtcattctcgatagcattaaagggcagggggtgccgtgtctcgagcaactcagtaattctcatcacttacgcctcacagaagagatgaaggggacgctaaacgaaacaattcgccaactggaggctatgcatgattaa

SEQ ID NO: 22923 - DNA, 954 bp, Escherichia coli
atgattaatctcgcaccggcaggacaaaaagacagcattgaaatgcgcaaagtttatgcagattttatcgcgcaacagagtaaaaacgtcagttctgtcattgctcttgaggctgatttaatgagttccatggcaatggacagcgtggcgcaggattatccagatcacgtcattaattgcggcattatggaagccaatgttatcggcacagctgcagggctggccttaaccgggcgcaagccattcgtgcatacctttaccgcatttgccagtcgtcgctgttttgatcaactctttatgtcgcttgattaccagggcgctaacgtcaaagttatagcttctgatgcgggtgttgctgcttgccacaatggcggaacacatatgtcatttgaagatatgggaattgtgcgcgggctggcgcattcggtggtgatggagatgacagatgccgtaatgttcagcgatatcttgcgtcaactcgttgcactggaaggattttattggattcgtaccattcggaagcaagcagcgagtatttacgcaccaggtacaacctttacaattggcaaagggcaggtattacgtgaaggtacggatgtcaccttaattgctaatggcattatggtggtggaagccctggaggccgcacgtcaacttgagctggctggggtaagtgtagcggtgattgatatgtttacgctcaaacccgttgatcggatgttaattaaaaattatgccgaaaaaacaggacggatcgtaacatgtgaaaaccatagtattcataatggattaggttcagcggttgctgaagtgcttgtagaaacttgtcctgtgcccatgcgtcgggtgggggttaaagagcggtatggccaggttggagctcaggactttttacagagagagtacgggttaaccgcgcaagatattgtggcggcagccagagagctattgtaa

SEQ ID NO: 22924 - DNA, 1482 bp, Escherichia coli
atgcttaaaagacgtgatgcttttttaaagaaaagcgcgctggcagtgagtgtggccctgctactctcatctcaggctcaggctcaggctcaggctcaggctcataaaacacttactgagtcatcgacgggtattatctggattgataatggaactcagtcacttgaaagtgcaagtgtgattgacagaaatggaaatgctaacgatggtggtagtgttactgttactggaaaaaactttgctgttggttccgatgcaaaaatttgggatgcggataaatccatggcagtgggacataagacagctgtttttaatgcagacaacagtgtcgctctggggtatggctctcaggtgaatggagaaagcaatgtactttctgtaggggccggtccttcaggatatggattttcagttgatggtgcaccggaaacccgccggattataaatgtttcagatggtgttaaggatagtgatgcggccacaaaaggacagatggacaacgccattgcagatgctgtacgggtgtcgggggatgccctgcgcggtgagataggcggtgtatacagagatgcccgtgctcatactgacagtcaggttacagcagtacgtgatgaactgaaggcagagggagacagtctgcgcggtgagataggtggtgtatacagagatgcccgtgctcatactgacagtcaggttacagcagtacgtgatgaactgaaggcagagggagacagtctgcgtggtgagataggtggtgtatacagagatgcccgtgctcatactgacagtcaggttacagcagtacgtgatgaactgaaggcagagggagacagtctgcgcggtgagataggtggtgtatacagagatgcccgtgctcatactgacagtcaggtcacagcagtacgtgatgaactcagcagggatattattgcaggcacatcggcagcggtggcgtatacggatgcatcttctcttgctcttcaggatgaaataaaagaaaaagcggatgaaacagttcaggtttcccgggcttatacagataaaagtgtacgggatgtccgtaaagaagcgaaaagccaggcagaacatctcagcgatgtgcttgtgaagaacagggcgcagacggatgcagcaatagcctcaaatacagcagcgataaggaataacagtcatcgtctggatttgacggaagcctggcagaagatggcgacagagagaatgaataatatgcaggagcagattaaagagaaccggaaggagttaagggagagtgcagcccagagcgcggcactggccggtcttttccagccatacagtgttggaaaatttaacgcgacagcagccgttggtggttaccgtgatgagcaggccattgcggtgggcgtgggctaccgtttcacagagaatgtggcaggaaaagttgcagttgctgcaggtgggtcatccgcatcgtggaatgctggtgtgaattttgagttctga

SEQ ID NO: 22925 - DNA, 456 bp, Escherichia coli
atgctggatataatcctggcgacgagagatatttattttgaaaaagccctgcgagagatatttggaaccgtaagcagtcgaatcagatatatagaagatgccatatcagacagaagaagggtgcagtcaggcaggtcattcagatattattttgtattctgtgatgatgagtatacagatattgttcgtattctttttaccggagaggcctgctgtattctgaataagtcgatgctgaatctgagagcggccggaggtgtgttgacgctggaagagcgcagagcggtactgaaccggtattacagaggtttaagtattgcggagattacagaagagacggggcagaatgacaagacggtatacggtcatcttcgtcgtgcactgcagcggtctggattccggaaggggcgttttataaaggggagagaagcggcgggggattcaggtgttgaataa

SEQ ID NO: 22926 - DNA, 339 bp, Escherichia coli
atgaaaaaatactcttctcccgtccttgcactcattcttgttagcaacagtatggtatcctccgctgccacaaaagaaatctcaaaaacagcttatgtctgtaatggaaataagacaatggaggtggtctatatcaacaccactgctgggaactcatatgcagtgattaatcagatggatgagatgatacctatgcagctaatgaaaatggcctccggagccaattacgaagccatcaataaaagatactcatataaactgtacacaaaaggtaaaaaagccaatctggtggaagggaatgataatcctgtcttaagcaactgttcatcggccgaatga

SEQ ID NO: 22927 - DNA, 1344 bp, Escherichia coli
atgcacaactccaaaatccggctggctatactggttggctgcatggctctgagcgccaacctgtgggccaaagcgcagccggtgcaggcaacgctggccgggcatgcaattctgccggcaaaatccgctgtttcaacaccgaaggatgcgccgggcgatttgcaacagagcggcaaatacaccagcggcaaacgcgtcaccgagctgggcagcgtggcgggcaaatccgcagaacgcctgacaggactcagcctgccgatcaatggtcagccgttgcagggccactcaggtatcaaacacatgcccgacggtacctattgggtgctgactgacaatggcttcggcagcaaagccaactccccggacgccatgctgtacctcaaccaatacaagatagatttcaaagacggctcggtagtaccgctgaagacgctgttcctgcatgatccggataaaaaggtgccgttccacatcatcaacgagagcaccgaactacgctatctgaccggcagcgattttgatccggaaagcttccagttttccgacgatgccttatggatcggtgatgagttcggtccttacctgatcaagaccgacctgaacggcaaggtgctggcggtgttcgacacagaagtggacggtaaggtggttaaatcgccggacaacccgacgctgactctacctagcgctccggacggtaagctgaacttccaggtggcgcgttccaaaggctttgaaggcatggccatctcgccggacggcagtaagctgtatccgctgctggaaggggcattgtgggacggtgagcagttcgagaacgttgacggaaaacgctacctgcgtgtgctggagttcgatgccaaacagcaggcctggactggtcgcagctggcagtacgtgctggaagacaaccagaacgccatcggcgacttcaatatgatagatgatacccacggactggtgatcgagcgtgataacggcgaaggcacggcggataaagcctgcgtcgccggcgcgccgaccaacaactgcttcagtcaagtagccaggttcaaacgggtgtataaaattgctttctcggacactaacgtcggaaaacctgtcgaaaaactgggctatattgacctgatgaagattcaggatccgaacaagctggcacgcaagccgctgaacgacggtgtgctgaccttcccgttcttcaccatcgagaacgtggatgtggttgacactaaccacatcatcgtaggcaacgataataacttcccgttttcctccagccgctggcctaatatggcggatgacaacgagtttattctactggatgtgaaggattttctgaagtag

SEQ ID NO: 22928 - DNA, 210 bp, Escherichia coli
atgagttcattttactctgacagttcgcacaacaaacggatgaagggtcattccactgcccctgggcagtattccctgctggattttacgcacgtgccttatccccacaggcagcagcagaccaaattcactcaacagcccccggatttcattacgcaacgccgttcgctcgcggatgattctggcccggacccggtattcttcctgtaa

SEQ ID NO: 22929 - DNA, 1317 bp, Escherichia coli
atgaaaccgttacattatacagcttcagcactagtgctcggactgacgttaatggggaatgcacaggcagtgacgaccattccgttctggcactctatggaaggggaactgggtaaagaggtgaattctctggtccaacgttttaacgccgaaaacccggattacaaaattataccgacttataaaggcaactacgaagagagtttaagtgcggggatcgcagcatttcgtaccggtaacgctccggctattttgcaggtttatgaagttggcaccgccaccatgatggcgtcgaaagccattaaaccggtgtatgacgtgtttaaagaggcggggattaactttgatgagtcgcagtttgtgccgacggtttcaggctactactccgacagtaaaaccggacacttactctcccagccgttcaacagctcgactcctgttctctattacaacaaagatgctttcaagaaagcaggattagacccggaacagccgccgaaaacctggcaggatctggcggactatgccgcgaaactgaaagcctccggtatgaagtgcggctactccagcggctggcagggctggatccaactggaaaactttagcgcctggaacggtctgccgtttgccagcaaaaacaacggctttgacggcacagatgcggtgctggagttcaacaagccggagcaggtgaaacacatcgccatgctcgaagagatgaacaagaaaggcgatttcagctacgtcgggcgtaaggatgaatccaccgagaagttctataacggtgattgcgcaatgacgactgcctcttctggttctcttgccagcattcgcgagtacgccaaattcaactacggcgtaggcatgatgccttacgacgctgacgcgaaagatgcaccacaaaacgccattatcggcggagccagcctgtgggtgatgcagggcaaagataaagaaacgtataccggcgtggcgaagttcctcgacttcctcgcgaagccagaaaatgctgccgagtggcaccagaaaaccggttatctgccaatcaccaaagcggcgtatgacctgacccgtgagcagggcttttacgagaaaaacccaggggcggatatcgcgacacgtcagatgctgaacaaaccgtcgttaccgttcaccaaaggactacgtctgggcaacatgccgcagatcagagcgattgtggatgaagagcttgagagcgtgtggaccggtaagaagacgccacagcaggcgctggataccgccgttgagcgtgggaatcagttactacgccgctttgagaaatcgacgaagtcttaa

SEQ ID NO: 22930 - DNA, 261 bp, Escherichia coli
atgtctgacactggttctaattttgagatgactggaactttgccggggctggagcttcgtaaacgtaaaactcctcaggaaaaaattggcattattcagcagacaatggagcctggcatggcggtgtcacatgtggcgcgtttgcgttgtattcagccctgcctgttgtttaagtggaaaaacaatctctggaaggaagtctcactgctgttgcttcaggagagggtgtcgttcctgcctcagaactgcctgccgctataa

SEQ ID NO: 22931 - DNA, 261 bp, Escherichia coli
atgttaggagcgatagaaaaactctttggcgataaagtaccggaacagtccatccggtggttgacagataacggttcagcgtatagagcgcatgaaacacggcagttcgccagagagttggatctggagccctgcacaacggcaatcagcagctctcagagtaatggaatggcagaaaggttagtgaaaacgatgaaggaagactacattgcgttcataccgaaaccgaatgtaataacggcattgcataaccttgcatag

SEQ ID NO: 22932 - DNA, 177 bp, Escherichia coli
atgatgaattctcagacaacaaaagatatcaccggctttcgctcttattttccagatgtattgcgactaatattcgaagagcaattatctgttcgggctatcgcactggagcagttaggcctcagtcattccaccgttcataatatctttcaacggtttaatgcctctggcatgtaa

SEQ ID NO: 22933 - DNA, 813 bp, Escherichia coli
atgcgctgtaaacatgctgtcattatgtgcatttataatggtgacaatgttaataatgttaaactagcagttgatagtattcttaatcagaccgttaataaccatttatatatttatgttgatggggaggttaatccatttctaaatacgtatttaaataaagaagagtctaatcatcaaatttttatttttcgatctgagtttaatctgggattggcatatgggttgaattttttaattgataaaatccaaagcaagagctatgaatatatatcaaggatggatggcgatgatatttcattgttagaccggctggaacgacaggagctatatttaaacaaacatcctgatgttgatgtaatcggttcatattgtactgaatttgggagtgattgttcgctacctgtaaaaaaactacctcaatatcatgatgaattggttaggtttagtgtcttacgttgtcctttaattcatcctacagtaatgtttagagcgaaagtgtttaaacatggtcttcgatatccaattaatacatatttatcagaggacttagcattatggtatgagatgatatatttagggctgaagtttgggaatgttccagatgttttacttaaatataggttgacggatagcaccataagtagacgtaaaggtttaaaaaaagctgggaatgagatagcattacgattctcctacatgaaaaagatgaaactaataactttgagtaatttaatattgttgtcattcaaatttatatcccactttatgccgcttattatcacaaaaataatgtacaagaaacttagataa

SEQ ID NO: 22934 - DNA, 222 bp, Escherichia coli
atgcgcaagcttatcgggcctactattcgctctgcacatgttggctggataagatgcgccagcatcgcatccgggaaaaaaaacgggcaaggtgtcaccaccctgcccgttttctttaaagctgcaaagattatttcgcgttgtaattacgcagagcgttacgccccaacacaatccccgcgcccaccataccgcccagcagcactgccagaatcaatgtaa

SEQ ID NO: 22935 - DNA, 333 bp, Escherichia coli
atgcgttctgatcaggatatttataatgacattggttcggtgttgctatcgatcactcctagtgatgcagtcaaaatcattctgtgtgcaaagttagaaccggaaagcgactgtggtgagtttacttatgactatgtagataaacagggcaatcaacattggatcactgaaaccgcagatgccagtgaaagacttttagatcttttggtggaactaagaaatttgtttgtggataactttaaatcacaagaaaagccattctggcatggttgcgaagtcactgtgaatattgaaacactcaaaataaacatcgactttaaatatgagaattaa

SEQ ID NO: 22936 - DNA, 1107 bp, Escherichia coli
gtgagttcggcgatggtgaagttaggggatgttattaatgttcactacggaaaagcattaaaagctgatcagcgagtatcgaatggaagtgtccatgtttttggtagttcaggaattgtcggcaaccacgataaaacgctttgcagctatcccacgataattattggtcgcaaaggcagcgttggtgctattacctgggctcctgacggaggttggatcattgatactgcttattacgttgagatcaaagataataataagttagatctccgatacttgttttatattctgagcggaattgatctcactaagaaaacgattaccacaagtattcctggattaaatagagacgatctctatgatacatttattaaattaccaccttttgaagagcagaaacgaattgtggatcttctcgataaagctgagggtatacgccaaaaacgcgaacaagccatcaaactggctgatgattttttgcgggctaagtttctagagatgtttggaactcctgcaaacaacatacatcgtttcccgaaaggaacgattcgcgacttggttgattcagtaaattatggaacttcagcaaaagcctctattgattctggtgaatatcctatattacggatgggtaatataacatatcaaggtaggtgggattttacagatttaaaatatcttgatctcagtgtaaaagaaaaggataaatatttggttaaagaaggcgatcttcttttcaatcgtactaacagtaaggaacttgttggtaaaacagctgtgtatgaagaagacaggcctatggcatttgctggatatttaatccgcgttagacctaattctatcggaaataactactatatttcagggtatcttaattccatccatggcaaaatcacattgatgaatatgtgtaaaagtattgttggcatggctaatattaatgcacaggaattgcagaatatagagatattaatcccacctaagcatctacaagatgagtatgagattatttataaaaaaataaaaaaaggactaagcatttatgataaaagcgcaatgcaacttcaacttttagcatcaaacctatcgaataaatatttcatgtaa

SEQ ID NO: 22937 - DNA, 930 bp, Escherichia coli
atgagtaccgatctctcaaaactttgcgcagatttcctacgtcaaaatcatgtttctcaatccactgaaaaactaaaagcttcacatgcaagagagctggttgcagcatttttcggttacaagagccatgcggcactcatggccgagaagacctacccgctggttcagctcgaagaggcgtatatcttcattcctgatataccgttgatgaatgacagacgctcgaaactcaacggtttgccaaatgaccttacccagtcaattgacctcgccaggcttctatcagacatgcttaccagtgaagggctatgtggtggaaatgtctggatccatgacacactggaaaactatattgtcgaagtcttactacccgattgccaatctcttatagatgaccagctttccggtttgatggctgaaaccaatgcggaatttttcgatgcttattatgacgatgtgcaaatcgaggatcgtggtgacaaattggtggctattgccaaaacccagtacaagggcgagacactggacgataggccgttctgtggtgacacccttgatattgttgtgaaggtgatattgccccgcatggctggcaagcgcggtttttacgatttagagcttgaagctggaggctgcgtcaatgacgactgggttgacccggagctaaagtatggcaaacctcctcagagcagactggcagcggagcttggcataacagacgaagatcttgacttgctggaatgggacacacaggaaaacagtagtgatgacggtttaatctatgactttgtgttgacctttgacaaaagttgtccgcctgagattttggagatgatcgaaggattatcggataatttgacgatccgtgtttctgcaaatgcgtttgacaacccttatccggatgaaaacatgcattacgaatatccgtag

SEQ ID NO: 22938 - DNA, 495 bp, Escherichia coli
atgcacctcccaccgcaagcggcgggccccgaccggagccattttagttacaacactcaaatacaaccgccaagaaaaccccggtccagcgcagaaccgaaaccacaaagcccctccctcataactgaaaagcgaggccgcccccgcccgaagggcgggaacaacatcgcttttaattatgaatgttgtaactacattatcatcgctgccagtcttctggctgaaagtcctcagtacacgctcgtaagcggccctgacggcccgctaacgcggagatacgccccgacttcgggtaaaccctcgtcgggaccactccgaccgcgcacagacactctatcatggctgaaagcgggtatggtctggcagggctgggggggtaaggtgaaatctatcaatcagtaccggctgacgccgggcttcggcggttttactcctgtgccatatgctacaacggagtgccgccttccatgccgctggcgcggcatatcctggtga

SEQ ID NO: 22939 - DNA, 1869 bp, Escherichia coli
gtgaataaagtttattctcttaaatattgccctgtcaccgggggacttattgttgtctctgaacttgccagcagggtaataaaaaagacatgccgaagattaacgcatattcttctggctggcattccagcagtctatctgtattaccctcagatatcccaggcgggcattgtccgttccgatattgcctatcagatttatcgtgatttcgctgaaaacaaagggctttttgtacctggtgccacagatattccggtatatgataaggacggaaaacttgtggggagactggataaagccccaatggccgatttcagcagtgtgagctcaaatggcgttgctacgcttgtatcacctcagtatatcgtcagcgtaaagcataacggaggatatcagagtgtgagctttggtaatgggaaaaatacatattcccttgttgaccgtaataaccactcttctgttgacttccatgctccacgtctgaataaactggttacagaagttattccctcagcgataacatcagaaggaaccaaagccaatgcttataaagacactgaacgttacaccgctttttatcgggtgggtagtggtacgcagtacactaaggacaaggacggaaatttagttaaggttgccggcggatatgcttttaaaacaggaggaaccacaggagttcctctgatatctgatgcaacaatagtctctaatcccgggcaaacctataatcctgtaaacggacctttacctgactatggtgcccctggggacagtggttctcctttgtttgcttatgatgaacaacaaaaaaaatgggttattgttgctgtattaagagcatatgcaggtattaatggtgctacgaactggtggaatgtcataccaacagattatctgaaccaggttatgcaggacgatttcgatgcccccgtggactttgtttccggactgccccccctgaactggacatacgacaaaacatcaggcacaggcaccctgagccagggcagtaaaaactggaccatgcacgggcagaaagacaatgatctcaatgccggtaaaaatctggtattcagcgggcagaacggtgcaattgtcctgaaagacagtgtgactcagggggccggttatctcgaatttaaagacagttacaccgtatctgctgaatccggaaaaacctggacgggtgccggcattattactgacaaggggacgaatgtgacctggaaggtcaacggggttgccggtgacaacctgcataaattgggggaaggaaccctgaccataaacggaacaggtgtaaacccgggaggactgaaaacgggagacggtaccgttgtacttaaccagcaggcagacactgcaggtaatgttcaggccttcagttccgtgaacctcgccagcggacgaccgaccgtggtgctcggagatgcccgtcaggtcaatccggataacatttcatggggataccggggaggtaagcttgaccttaatggtaatgccgttaccttcacccgactgcaggctgccgattacggggcggtgattacaaataatgcacagcaaaaatcccggcttttactggatcttaaggctcaggatacaaatgtcagtgttccgattggcagtatatccccctttggcggtaccggcacaccgggaaacctatacagcatgatactcaacggccagacccgcttctatattctgaaatctgccagctatggtaacatcctgtgggggaacagcctgaatgacccggctcagtgggaatttgttggcacggacaaaaacaaaggtaagcgtaaactgaccgccgtatgtagccatcagacgagaattggtaacttagacgcccatctgatatag

SEQ ID NO: 22940 - DNA, 747 bp, Escherichia coli
ttgtgcagcgaaatacgccgggcgtggaaccaaagtaggggctctgcgggggcgcgcacgctggctgaaatgctgacccaaaacggcgtcccgatgagccgttaccgtgccgggcgtctgatgaaatatctgaacctgagcagttgtcagcccggaaaacatcagtacaaaaatgctcgtcaggaacatacctgcctgccgaatctgcttgagcgccagttcgctgtgcccgagccagatagggtatggtgcggagatattacgtatatctgggcaggaaatcgctggtgctatctggcggtcgtcatggatctttttgcccgcagggttatcggctggagcctgtcagcgaatgccgatactgccctgataagcagtgccctgcggatggcgtatgaggtgcgtggtcagccgcgggacgtcatgttccatagcgaccagggaagtcaatatacaggactgaaatatcaacaacttctctggcgttacaggataaagcaaagtgtcagccgacggggaaactgctgggataacagtccaatggaacgcttcttccgcagtctgaaaacagaatgggtgccaaccgatggctacacaggcaaagacgtggcccggcagcaaatcagcagttatattctgaattattacaatagcgtcaggcctcaccattataacggagggctgacgccggaagagtcagagaacagataccatttttactgtaaaaccgtggccagtattacttga

SEQ ID NO: 22941 - DNA, 267 bp, Escherichia coli
atgctgcggtgtttcaccaatgccgggcagatcgaccagcgtcattctgcgttcaccgaactgcagggtaagacgatgagcctggcgggtgcagccgttcagaggatgtgtggcgcagatacgggactgaaaaatggcattacacagactgcttttgcctgttccggatttacccataatgccaatcacgggctcgtaatgaataacactgtggagatgttcaaggattttctggcgaatttcttcaggaagaaacgtcagatgtga

SEQ ID NO: 22942 - DNA, 981 bp, Escherichia coli
atgacggcacaacaaagtgatgcgctgcgtgagattgctaataaggccagagttaccaccattcttcagtgtaaggcctggaaagatacccagcgaatactgaagcgcagcggactcgtgtgcagagaacggtcagagccgtttgatccggagaaacattttgactgttatacggtgcgttatctgtacctgcttaacataatggcacttgagctaaagtcagatacacggattaaggttgaggtggggcaatggtatcgcatgacgggtaaacgtttatcacttaatgtcccgccttttatgctgatcccgcgtaatatccggagaaaagtggacggattcagacaatccagacaatccagacaatccagacaatcagaagatgaagcaaccaaaaatccgcctcaaccgttcacgggcagtttgtataaggttttgagcagggacagcgattcggctgagctggacgcctggtttgctgaaccgccgctgacacggcaggaagtgtgggaggggaggcgtgttacagattttgatccatgggcgctgtcttcgtttatttgccgttcagaatccccgacgtttgaacttttttaccaggaatataagcgactgggattaaaatctctttttgtatcaggggtaatgtttgaacagtttttaacagggctaagtttcagaaaatatggggactgggttgaatctcagttactggaatcactgggaaatgtgatgtttttcatgctgctttatgacatggaaaatctggataagtttataaaagaactgatggacattaatgttcaaagtgaagattcgaaggaaaaagggaaatcacgaaaagagagaatgctggagtatatcaactcatatatccgcaatgtttatggaagattcctttgtacgtcaaaagaaaggtacgaacagcataaacgcaaaaacagcagcaaaaagaaaaacggttctggtggaactcattaa

SEQ ID NO: 22943 - DNA, 855 bp, Escherichia coli
atgtctgtgcattcaccagatgaatctgatcatgtttttagtcggatggaatatgaatattaccgacataacgataaatcaccttctgttaatgctgataatgcaggcagagacgttgttccggagtgggtgcaaaaagaccctgtagccgcattctgggtatggatgtttatatatcatgttcctgacagtattgtccgactctcaggtgagcaatatgcagattacggaatttcctgtctgtatgccagactgtttgccacagaagcagctccagctaatcatcaggcaaggattcgtgtgacgagaaaatggctacaggagcttataaggctaaccgggacagaaaatgtatctgacttcttgtatgtcgttcattttttatggtcatatgctgaaaaagtgaaccccatgacatggcttggttcccggcggatacatatcaaatgggcatgggcgtatctgcaaaaacattgcactgacgaagaacgtcactgtcctgatatttcagaatttaaagcttcaggggagtcacgtctgttcataatagcttatgtgcgccgtgtcttcatgaaaatctattctgtcggtactgaacctcaaaagttaaaagaattagtttatcagcagaatgattttctcaggcgcatgaagtgctcataccagaaaatgttccggtatgagaaaaccgattcccgggtacagataagtgccctgatttctccggaagccaggaatgcactccggaaaatggcaaaaaagaataatctgacgcaggctgaaatcctggataaactcatcttatcagctgatcgtctgtttatgcagaaaacagcaggggattattcccgttaa

SEQ ID NO: 22944 - DNA, 492 bp, Escherichia coli
gtggctattggcgatgatgctatccgtgatgctttttatctttttacacagcaagtcgctgaaatggataatgaatcactccctaaagacgtctggggaacaccttgtttcacttatttgatgactagaaaacaatttaaccaaatgaaggtcatttgtcagaggaatggttgggatgtacccacatcaccggcgatacctatcacttggagtatgttcaagcatgtgctctctgctcgaaaatcgaaggataaattaagctggcaagaatgcgcagaaatcttggcaactgctttttctgtgcagagtaatgtatacgttagcagagattattcagagcagacgattgtacttaatgcttcttgtcgcatcagcgttgcaggggcaggatttttcgcaatggcgattattgatgtctctgaaaataatttggcccccgtaactgcatatcatgtgacggaggccaaatgtaaagctatatcgcgagggtga

SEQ ID NO: 22945 - DNA, 255 bp, Escherichia coli
atgagcagaacactcgaacagaagattgccgaagctgaggccagattgcagcgcctgaaggcgaagagcaggagtctggacacagcgcagaaggtcgttgtgggtgcagcattgctggcaaaggtcagaaagccggaggaagtgcagttgcgggcctggttgctcccgttcctgcggagagaagttacacggcaggctgacttgaacaggatacagccactgattgacgagctggaggcactgccagaacggtga

SEQ ID NO: 22946 - DNA, 858 bp, Escherichia coli
atgaagaaagcagcaattttaattgatgcgggttttttcatgcagcgtgttcatgctacgcatcgtaaacacttcgccgagcatgaactgactgcgcaatgcataatgaaagtaatatggtcaatggttctttcccatcttaatggaaaacgtcaatcacaagaacgtagggaaccgcttgagctttatagaatttacttctatgactgtccaccactcgacattcaaacacgccttccacttcctgagcctggcaataagacgcctggtcgcaagaatttcaaactcgaaaaatcatatattctgagaacggagctgcatgaagagttaagaaaaactcgaaaaacagccttaagattagggaatcttgttgataataagcgatggcaactaactacattctcccttgatgctctgatgaaaggaacgaaaaaatgggatgaactgacaaatgatgatttttactatgacatcaaacaaaaacaagttgatatcaagctagggatggatatcacgactttagcttatgaaaaacttgttgatgtaattgtccttgttgctggggactcagactttgtgcctgccgccaaacacgccagaattaaaggtattgattttattcttgatccactaagacagaatgttaccccatcactgtcagagcacattgatggagttcagtcatacagcttgatatcaggacttgccgatgctttacatgttgagccagacccggcacctgactggtgggaagatcgaaaaaaaggcaagcctaggggaaaaaacaatagcggtaaacgcaggtatggaaacactcaagctgagtctgcaaagaaacatcaaagaaataaacgataa

SEQ ID NO: 22947 - DNA, 1866 bp, Escherichia coli
atggccacccgggctctttcactggagttggatgaacttcgagtcctcaaaacgccgtgtattctccactgggatttcagtcacttcgtcgttctggtcagcgtaaagcgtaaccgttatgtactgcatgatccggccaggggcataagatatatcagccgggaggaaatgagccgatattttacaggcgttgcacttgaggtctggcccggaagtgaattccagtcggaaaccctgcagacccgcataagtcttcgttcactgattaacagtatttacggtattaaaagaacgctggcgaaaattttctgtctgtcagttgtaattgaagcaatcaatctgctaatgccggtggggacacagctggttatggatcatgctattcctgcgggggacagagggctactgacgctaatttctgctgctcttatgttttttatattactcaaagctgcaacgagtacgctgcgcgcatggtcttcactggttatgagcacgctcatcaatgtacagtggcagtcggggctgttcgatcatcttctcagactaccgctggcgttttttgaacgccgaaaattaggtgatatccagtcacgttttgactcccttgacacattgagggccacatttaccaccagtgtgatcgggttcataatggacagcattatggttgtcggtgtttgtgtgatgatgctgttatacggaggatatctcacctggatagttctctgctttaccacaatttacatttttattcgactggtgacatacggcaattaccgacagatatcagaagaatgtcttgtcagggaggcccgtgccgcctcctattttatggaaacattatatggtattgccacggtaaaaatccaggggatggtcggaattcggggggcacactggcttaatatgaaaatagatgcgataaattcgggtattaagctaaccaggatggatttgctcttcggaggaataaatacctttgttaccgcctgtgatcagattgtaattttatggctgggagcaggccttgtgatcgataatcagatgacaataggaatgtttgtagcgtttagttcttttcgtgggcagttttcggaaagagttgcctctctgaccagttttcttcttcagctaagaataatgagtctgcacaatgagcgcattgcagatattgcattacatgaaaaggaggaaaagaaacctgaaattgaaatcgttgctgatatggggccaatatccctggaaaccaatggtttaagctatcgttatgacagtcagtcagcaccgatattcagtgctctgagtttatctgtagctccgggggaaagtgtggctataactggtgcttccggtgcgggaaaaaccacattaatgaaagtactatgtggactatttgaacctgatagcgggagggtactgataaatggtatagatatacgccaaattggaataaataattatcaccggatgatagcctgtgttatgcaggatgaccggctattttcaggctcaattcgtgaaaatatctgtggttttgcagaggaaatggatgaagagtggatggtagaatgtgccagagcaagtcatattcatgatgttataatgaatatgccaatgggatatgaaacattaataggtgaacttggggaaggtctttctggcggtcaaaaacagcgtatatttattgcacgagccttataccggaaaccaggaatattatttatggatgaggcaaccagtgctcttgattcagagagtgaacatttcgtgaatgttgccataaaaaacatgaatatcaccagggtaattattgcacacagagaaacaacgttgagaactgttgatagagttatttctatttaa

SEQ ID NO: 22948 - DNA, 219 bp, Escherichia coli
atgtccggttctgatggtgatatcaccgcgggtggtttcgatattcccggaggtattaatcacttcagcattcgcggcaccactgacatctttctgcatcaccaggctgtcacccgccagcatatcgccgtgatggttccggatggtgctggcaaacagcgagaggttattgcccgcatacaacagtgcggtgttaatgactgccccggcggccgttaa

SEQ ID NO: 22949 - DNA, 588 bp, Escherichia coli
atgaaaaaactaacctttgaaattcgatctccagcacatcagcaaaacgctattcacgcggtacagcaaattcttccagacccaaccaaaccaatcaatcaaataactcagcagagactaaaagaagtccttctctacgatgagttaacaggggaattcacatggaaagtaaagaaatgccagagaatgaatgcaggggatatcgcagggcataagagtagcgaaggctactgggtaataaaagtcgatggaaaactttataaggcacacaggctggcgtggctctatatgaatggcagtctaccaaaaagtgatatcgaccacataaatctcgttagggatgacaatcgtatagcaaaccttagattggcaactcgatctcaaaacatccaaaacgtaaacaaaaaggcaaataacaaatcaggatataaaggcgtttcatgggataagaaatcaagaaaatggagggcgcaaatcgtaatcaacaagaggaaagttaatcttgggttttacgatgacccaaaggaagctcataaagtatatgcaaataaagcggatgaatgtttcggcgaatttgcgaggtattaa

SEQ ID NO: 22950 - DNA, 132 bp, Escherichia coli
atgaatacgcctggcgtacattccaccgagcgcgccggtatcaacggcaactttcggcacatcaccttcgcccttcagggctctgacacgaccatctgcagttacacggttagcgcctgcagtgacagttaa

SEQ ID NO: 22951 - DNA, 330 bp, Escherichia coli
atgcgaaacaaaggctttaatccacctgatacacacaaagaagctaagcgtttgcgcttccttcgttccattgatgaaagaactcaaatctcttttgtgaaagttgccagaactgagcttctgaaggctgaggcgagggcgttgctcccgtctctaccaaaagaggagggatatacgttcattccaaacgcatttctggaaaagcttctcaaagaagacatatccgtaagtcagtttaacgatgttcttaaggtctttcgtaagcgtaaactgaccgccgtatgtagccatcagacgagaattggtaacttagacgcccatctgatatag

SEQ ID NO: 22952 - DNA, 351 bp, Escherichia coli
gtgatctttccctggttaatcatggctgaacacgatattacgccagaaatcaccatttccaaaacacagcgccgctataaagtcggctatgtcagagcccgccacataaacagcaaaacctacatgaccacgtactactcacgacaccccagcctgaacctcaagggcgactggctgaaagaggccggatttgataccgggcggggtgtcacggtgaagatttcggaggggtgcctgaccatcatcgctgacagtgacgaggtgcaggaactgcgggaggaactttatcaggttaaacaggtggttaaggggatgcggagcgggatgtttagtgtgctgaacgataattaa

SEQ ID NO: 22953 - DNA, 369 bp, Escherichia coli
atgattaataataagctaattgaaattgataactgtttatccaccccgtcattttttgattttcttaaatcattaaatgttgatagtgcattagactcaagagatgaaccggagtttgatgattgctggatgagtgagtttaattcattagataaggaaagttttcaggatgatgatattgagtttattgattccttgcgagaaaaggcatttaaatactcattcagggtgattaataattctgaaatatcttcgcgtatatctgatgatattgagataatctccaaaagttttgtactcggaaaggaaaactcttggtcgatcactcacttatggtcatcatataaaaatagaaaatttcctgaataa

SEQ ID NO: 22954 - DNA, 732 bp, Escherichia coli
atgaatcaaccaatacacaatgattactggttatcccgttttgaaagtattctcaacagtgccctggtgcaacaccgtgccgtctcgttaatccgggtggatttacgtttccctgagcatatgcctgtcaccatcatggatcccgatccggattcagcggtgatttctcgttttttcgaatccctgaaagccaaaattcaggcttaccagcggaaaaaacgacgtaccaacaagcgtgtgcgtgcaaccaccctgcattatttctggtgtcgagagtttggcaaggaaaaaggcaggaaacattatcacgtgatattactgctcaacaaagatacctggtgctcgccaggggatttcaccgttccttcttcgctggcgacgctgatccaactggcatggtgtagcgctctgcatcttgagccctggcagggtaatggactggttcatttttccaggcggacgcctttccgtaaaccggcatcatctgatgctcgcccttcttccgatgatacgcctttgtcgggtggatgttctgaaaccaggaaggcttcagacaaaaagccgggtgaagccgctgttctctggatcaagcgtggtgatgtggaagcgatgcagaaagccatggagagagcccgttatctcgtgaagtatgagacgaagcagcatgacggttctggtcaacgtaattatggttgcagccgtggagcggggcgtctactggatggcaggtga

SEQ ID NO: 22955 - DNA, 381 bp, Escherichia coli
atgaatgaaatagataaaatctgtagtgaacttggtgtaccagtgagtgataagtttacacaagattgggcttatgaactgcctgaaaaatatcgaactaaagagtggttaagtaaatatattgctgcatatttaaataatggctactcacaaaaagggaagaatgaattaatgactttagcccttgatgtctgtaatgatttattatcttctggagtacctccttcagataaagttattgtaaaagcactcaacactctgcttgataattataaaaatcatatagatcttattaattactgggccttggatgacgaatctttagaagacagttttgcattaactcctgaaataagggaattaaaaaaaagattgatttag

SEQ ID NO: 22956 - DNA, 429 bp, Escherichia coli
atgagtgctgttggcgcagtaaaggaaatccagaaaatgcaaatagactactcagtaaaagaaaaaacatacgaacttgtcgataagctcatggatgcccaacagcagcaaatgtcacttaatgagcttttgatgatttctaaggacaagattattgagcttgaagaaaagataaatcgagcctctaagtgggaagaggaaaagaaaaactatgagatgtatacacctactgttgctacggtggtttatcgtctcaaaaaatcggcaaataccggtcagccaatgcactatctttgcgctcaatgctatgaatcttctgtgaaatccatacttcaatacgaaggatttgcaccaccttctaaccataggatgagatgccataggtgtaacgcctcctatctgttccctaaatctgcattttctaaataa

SEQ ID NO: 22957 - DNA, 528 bp, Escherichia coli
atgactatcaaatcaaatacgccagcacacgacaaggactgctggcaaacgccgctttggctttttgatgcactggatattgagtttggattctggctggattcggcagcgagcgacaaaaatgctctgtgcgctcactggttaactgaggccgacgacgcgctcaattctgagtgggtaagccacggtgcaatctggaataacccaccgtacagcaatatcaggccgtgggtggaaaaagccgctgagcagtgcatacaacagcgacagacggtagttatgcttgtgccagaggatatgtcagtcggatggttcagcaaggctctggagagtgtcgacgaagttcgcattatcactgatggacggattaattttatcgaaccatcgacagggctggagaagaagggaaacagcaaaggctccatgctgctgatttggcgaccgttcatcagtcctcgacggatgtttactaccgtatccaaagcggcattgatggcgatcgggcagggcgtcaggagggcggcatga

SEQ ID NO: 22958 - DNA, 408 bp, Escherichia coli
atggtgacgtcattcagctatgcaggagacaagaatcgccagctgacccgttacagcgatacccgctggcatgaagattctgtgcgtaaccgctggttcagcgtgatggcggggccctctgtgcgcgtgaatgaatggttcagtgcgtatgcgatggcgggcgtggcttacagccgtgtgtcgactttttccggggattatctccgcgtaactgacaacaaggggaaaacgcatgatgtgctgaccggaagtgatgacggtcgccacagcaacacgtctctggcgtggtgggctggcgtgcagtttaacccgaccgaatccgtggccattgatattgcttatgaaggttccggcagtggtgactggcgcactgatggtttcatcgtgggtgtcggttataagttctga

SEQ ID NO: 22959 - DNA, 519 bp, Escherichia coli
gtgaatgcgaacgccgggacgctcaacaatgtcacggtaaatgaaaactgtacgattaagggcatgctggaggcgactcaggtcagaggtgacttcgttaaagctgtatccaaatcattcccgaaacaggctggtacgtggggtaacacggaaacaccaaacgggacggttacagtcaccatcagtgatgatcataactttgaccgtcaaatcattattccgcccattatctttaacggaatagcgtatagcgatccgggaagtggtaataacccgggaggtacaagatacacgggttatggttttgaagttcgcaaaaacggtgtattaatcgcatccagagaaactaaaggggccattcccggtagctacagtgcggttattgatatgccgagtggcaggggaagcgtcactctggagtttaaggttttccataaaggcaatcagtgggcaggtaatatcaccgactgtacggtgattgtgaccaaaaaagccgcttccggcatcagtattcgttga

SEQ ID NO: 22960 - DNA, 291 bp, Escherichia coli
atggctgatatagcaacaatgagaatgaaggctctgcacttctgggataaacacggtatttctgcagcttctgaagcctttggcgtatcctgccgcacgctttactggtggcgtcagttactgaacaagggaggacctgaggggctaatcccgcacagtaaggcacctctggtgcgacgaaaaaagcactggcatcccgatgtgctgaaagagattcgacgcctcaggacagagctgccgaacctcggtaaagagcagatttttgttcgcctgaagccctggtgcgcataa

SEQ ID NO: 22961 - DNA, 261 bp, Escherichia coli
gtggcgcacaggaatgttgatgttgtatgcataatgcggctgatatgtacagcggtgcgccgaaccacagttatacgtaattgcctgccagcattccgctatccgctccgcaaagggatatatttttttaaccctctgacgatcgatccagaaaacgacatgcgcatgaaaaccatgatcagccgtccattcaatcacccagaagaaaccaacgatattttcaaattgttccacctgctccagcagcatacgcaactgtaa

SEQ ID NO: 22962 - DNA, 588 bp, Escherichia coli; identical to SEQ ID NO: 469

SEQ ID NO: 22963 - DNA, 336 bp, Escherichia coli
  misc_feature (277)..(286): n is a, c, g, or t
atgattacttatgccggatataaagtgaaaattatttttataatttttttattcttagtttgccatgtcgtagcctatgctgaaatgggccaggatcgtgaattttgctatcctgggactccagaaaacaatactaccccagcgacctttttttatgattttggtacagttattatttcagatgttaacaacaattcagctggtactgttttaccatctcaaaactggaaaataggtcgatataaagcatactgtaattctcttgatgattatgaannnnnnnnnngtttatttttcaggtatttcaggaatagatccttcaggtgcttcaggtaa

SEQ ID NO: 22964 - DNA, 1341 bp, Escherichia coli
gtgagtgatttttctgctttcgataacgccctgcgctcgctggagtcgatcccgctggcccgcgtcgccgggcggctggtgcgcctgaacggcattctgctggagagcgtcggctgcccgctaatgaccgggcaactgtgccgcatcgaaagcgccaatcacacgctgatcgacgcgcaggccgtgggctttaatcgcgacatcacctacttaatgccgtttaaacagccggtcggcctgatggcaggcgcacgcgtcttcccggaagaaaaagcccacgacatcctgattggcgaaagctggttaggccgcgtggttaacggtctcggcgaaccgctggatggcaaaggccgcctgaacggcaacgaccttctgccgccgctgccaccctcggtcaatcccttaacccgccgttcagtggacgaaccgctggacgtgggcgtgaaagcgattaacggcctgctgaccatcggcaaaggccagcgtgtcgggctgatggcgggcagcggcgtcgggaaaagcgtgctgctggggatgatcacccgccagaccaaagccgacattgtggtggtcgggttgattggcgaacgcgggcgcgaagtgaaagagtttattgaccattcgctgggcgcggacgggctggcaaagtctatcgttgttgtcgcgcctgccgatgaatcgccgctgatgcgcctgaaagccaccgaactgtgccactccatcgccgcctggtttcgcgaccgcgggcatcacgttttactgctggtggattccctgacccgctacgcgatggcgcagcgggaaatcgccctctcactcggtgaaccgcccgccaccaaaggctatccgccgtcggcattcggcatgatccccaaactggtcgagagcgcaggcaacagcgaaagctcaggatcgatgaccgccatctacaccgtgctggcggaaggcgacgaccagcaagatccaatagtcgactgcgcccgcgcagtgctggacggacatatcgtattaacccgcaaactggcggaagcggggcactatccggccattgatatcggccagtcgatcagccgctgcatgaaccaggtcaccagcccggaacatcagcaatccgcccgtgcgatgaaacaacactacgccgcctatatggagatcaaaccgctgatcccgctcgggggctacgtggcaggtgccgacgccagcgtcgacaaagcggtgaaaatgttcccggctatcgagcgatttttgcgccaggagatgcacgaacccgcttccctcgaactggtgcaaagccgcctgcaaatcctctttcccaacggcaaaaaggcagaagggcaataa

SEQ ID NO: 22965 - DNA, 537 bp, Escherichia coli; identical to SEQ ID NO: 16554

SEQ ID NO: 22966 - DNA, 327 bp, Escherichia coli; identical to SEQ ID NO: 16555

SEQ ID NO: 22967 - DNA, 768 bp, Escherichia coli
atgagtaatgatagaggtagttcaagtggtgaaaatcagaaaactgaacaatgcatacaggaatttcaagttacgaatcaattcaagaaaatgatgaaggagtctctagaggaacaaaaaaaggtaattgataaaagggtaaaaacattaacgcactggagtgatgaagcagaagatgaattcaggagaatatttggcgtgccatctgaaaaaataataaccataaaatttaaactgaacggagaagtaacaaaagaaacaaaaagtgcgcgagcagttattcaagaagccgtggacagaatgaaatttatatgtgataaattatctgctgataaaggggagtgcaaagaagttacttttatagataaatatcttgatagcaatgataattactatgataaagatgttactaagtggaagtgtggcaattttgtaaattctacggacaatgatgcttatactgctaacgtcacccctgatcatattataggtgtttctccagacaaatatgtagatgtagtgacaataagaataggccagcggtttgtatgtaaaccaatgacaggaaaggattctaaagtttcatcactttgccatgaattaacacatttagtcagatatggccccaaaggtatgtatggcggtatgcaatcagaggatatgcctgttgataaagagctccagaatgcgaaagagtatgacatctttgctgataaattaataaaaaataaggatatgacactctttgaaaatgcatataatatttaa

SEQ ID NO: 22968 - DNA, 303 bp, Escherichia coli; identical to SEQ ID NO: 5063

SEQ ID NO: 22969 - DNA, 213 bp, Escherichia coli; identical to SEQ ID NO: 9293

SEQ ID NO: 22970 - DNA, 702 bp, Escherichia coli
atggttgatttgatagcttacaaatccaatgccttagtcgaagccagctacaagctcacgttacaggagcagcgtttcctgttgctgtgcattagtcgattacagtcaggtgttgatgctcctccacctgaattacaaaagaccatgactattacggctgtggagttttttaattcatttcctgacatgggaagaaaccatgccgaagaaaagttacaggaagcgatcgatcgtctgtgggacaggtcgatcattcttaaggatggtgaaaaacgcgaggagttccgttggatccagtatcgggcgcagtacctgaaaggcgaagcaaaagttcaaataactttcgcagatgctgtaatgccgtacttaacgcaattaaaagggcaattcacaaaagttgtaattaaaaacatatctaatttatcaaagagttatagcatcagaatatacgaaatcctccaacagttccgtaacacaggggagcggatgatttctctagatgatttccgcagcatgctacaactggaagataaatataaagatttcaagacgttaaatagagccctcataaaaccggcagtggcggaactgaatcaaaaaagcgatctggccgtaacggttgagacaatcaagaaggggcgcactgtcgtagccctgcattttcgcttcaaggaagacaaacagatcaagatgacgatctaa

SEQ ID NO: 22971 - DNA, 867 bp, Escherichia coli
atgtctgaaatcacagcctctcgtccggaagtggtcaacgggcatacggacgttatctgctcaaccagtatccgccacattctggctgtacgaaagagtgcgctgctgcaaatcgacacacttatccggcaactggcagaaatctcagcaatgacagaaagcatcggaggaaaaaccgcactggactgggcgatgaaacaggattttcgctgcggctgctggctcatggagaaaccggaaaccgcaatgaaagccatcacccgcaatctcgatcgcgaaatctggcgtgacctgatgcaacgttccgggatgctgtcattaatggatgcgcaggcccgtgatacagggttcaggtcactggagtacgataactttccggaaatcagtgaagcgaacattctgagcacatttgaacaactgcaccagaataaggatgaggtgtttgagcgaggggtgatcaacgtcttcaggggactgagctggaattacaaaaccaattgcccctgcaaatttggcagtaaaattatcgtcaacaacctggtgaggtgggaccggtggggggttcatcttatcaccgggcaacaggctgaccgggttgctgacctggaaaggatgctgcacctgttcagcggcaggcccatccccgacaaccgggaaaatatcatcatccgtctggatgaccacattcagtccgttcagggtcaggagtgctatgaagatgagatgttcagcatcagatactttaagaagggctccgcacacatcacgttcaggaagccacaactggttgacaggcttaatgatattattgccagacactacccggaagccctggcaagcacagtgaacaaaagccgcaagacataa

SEQ ID NO: 22972 - DNA, 195 bp, Escherichia coli
atggggtttataatgaataaagatagatctttaaatgaaatgatgttaagcttgtttaataaatcaactattgttgacttgtcaagtgagacaatatctgagagtaaatctctttcaggccgtatttatcaggatcctgaacataacggggaatttgaacttgatcgtgtaaaccaaatggaacaggaatattga

SEQ ID NO: 22973 - DNA, 234 bp, Escherichia coli; identical to SEQ ID NO: 8563

SEQ ID NO: 22974 - DNA, 537 bp, Escherichia coli; identical to SEQ ID NO: 13721

SEQ ID NO: 22975 - DNA, 432 bp, Escherichia coli; identical to SEQ ID NO: 9330

SEQ ID NO: 22976 - DNA, 528 bp, Escherichia coli; identical to SEQ ID NO: 15035

SEQ ID NO: 22977 - DNA, 282 bp, Escherichia coli; identical to SEQ ID NO: 15041

SEQ ID NO: 22978 - DNA, 537 bp, Escherichia coli
  misc_feature (326)..(335): n is a, c, g, or t
atgtcaccaaaggaaatcatctttgtgactcctgaacctcaagagatgcctgatgtatgcaaaactgaatcattacttgagcttgagcgtgaatattacccactactgaaagcacaaagaattaaacttgatattgcttacgatgcggttaagaacttcgaagaaacctcgaaaccttcagaatatgatattgcttacgagattaagtcaaacccgtttatctattatgaaggaaactttaatgatggttttggtacagcgattgaagacgttcctaaagttcttcaaagtatccctgaagggttccggttaattgatgtcagacnnnnnnnnnnagaacgtttagagactattcggtctgtttgtgaaaacttaaagttacaaactaagccagccttaagaattaaaaccaaacatcaaattatcacctcacgcaaaccaaaaacacgcaagattccaaagtggtgtatcgaccgtatcccttccgatgctcaaattataggtgaaacggaactacattatcttgtcaggcattaa

SEQ ID NO: 22979 - DNA, 570 bp, Escherichia coli; identical to SEQ ID NO: 13730

SEQ ID NO: 22980 - DNA, 675 bp, Escherichia coli
gtgataagcacgccggagggggagcggtatatcccttgtgtgaatatttccgcagagccggaggcgtattttcgtatcgcaccggaagactggctgcgggcagagatgcagggggagattgtggcactggtccacagtcatcccggtggtctgccctggctgagcgaggcggaccggcggctgcagataaagagcgcactgccctggtggctggtctgccggggtgacattcacaaattccgctgcgtgccgcacctgacgggacggcgctttgagcacggggtgacggactgttacaccctgttccgggatgcataccatctggcggggactgaaatgccggattttcatcgcgaggatgactggtggcgcaacggtcagaacctttacctggacaatatggcggtcaccggcttttaccgggtgcccctgtcctctgcacaggcgggcgatattctgctgtgctgctttggtgcttcggtaccgaaccatgccgccatttactgcggcaacggtgagctgcttcaccatctgcctgaacaactgagtaaacgggagaggtattccgaaaaatggcaacgacgaacgcattctgtctggcgtcaccgccactggcacgcatctgccttcacggggatttgcaacgatttggccgccgcctcagcctgtatgtga

SEQ ID NO: 22981 - DNA, 210 bp, Escherichia coli
atggaaacggaagcctttggtgacagtaatgccacgcgaaccacagacgcatttctggaaacggagtgcgtggaaaatgtcgccacaaccgaaatcattaaagcaactgaagaaagtaacggccatcgtgtcagtctgccgttatcggttttcgatccccaggactaccatccactgctgattaccgtttccggaaaaaacgttaactga

SEQ ID NO: 22982 - DNA, 234 bp, Escherichia coli
atgctgggttacacagagtatgtcctggctgaaggatctttctcatacgggcaggcggttgctgtcataaccgcttaccgcaatgtgtttatccaggatgacccgggaatgcatttccgtcgggttatccgcaacgcggaaggtcagcgacgctggcgctgccggaactctgaagctgatgccggaaaacagcttaatgcgtggctcgccagtggagggcttctcagacaataa

SEQ ID NO: 22983 - DNA, 627 bp, Escherichia coli
gtgtctggaggatatttttatcaagataatttagagcgtttttcttatggtattaacggtggggttgctattcatgatgagggtattacattgtcccagccgttgtcattgaatggtgccaatgctttgctcaaagtagaaagagctaatggtataaaagttcaaaacggtattggaatctatactgattttcgtggttataccgtcgttcctaacttaacatcatattccagaaataaagtgtcaattgatactagttcacttgatagaaatatagaagtatcaagatctggcagtacggttgttcctactcgtggggcattagttaaaactatttttgaaacgaatataggaatgaaagtattggctgagataaaagatgaaaaaggagttcatattccttttggtagtgttgtttcaatcgatggaacggagaaaaaatcaggatttatcgttgacgataatggggttgtttacctcactggtatgcctaataaagggactttaaatgtacagtggggaagtgataatagtagaaaatgcaaatctgaatttaacttgggtgaggtgaatagtacttatcttaagaaaatatatttgacttgtaattataattattctggttaa

SEQ ID NO: 22984 - DNA, 456 bp, Escherichia coli; identical to SEQ ID NO: 12502

SEQ ID NO: 22985 - DNA, 210 bp, Escherichia coli
atggaaacggaagcttttggtgacagtaatgccacgcgaaccacagacgcatttctggaaacggagtgcgtggaaaatgtcgccacaaccgaaatcattaaagcaactgaagaaagtaacggccatcgtgtcagtctgccgttatcggttttcgatccccaggactaccatccactgctgattaccgtttccggaaaaaacgttaactga

SEQ ID NO: 22986 - DNA, 1032 bp, Escherichia coli
atggaaaaactgcgggtaggaatcgtttttggtggtaaatcagcggaacatgaagtgtctctgcaatcggcaaaaaacattgtcgatgccattgataaaagtcgcttcgatgttgtgctgctgggcattgataaacaagggcaatggcacgtcagcgatgccagcaattatctgctaaatgcagacgatcctgcccatattgcgttgcgtccttcggcgaccagccttgcgcaggtgccaggtaaacatgagcatcagcttatcgacgcacaaaacggtcagccgttgccgacggtggatgtcattttcccgattgtccacggtacgctgggcgaagatggttccttgcagggaatgctgcgggtcgccaatttaccgtttgtaggttctgatgttctggcttcagcggcctgtatggataaagatgtcaccaaacgtctgctgcgcgatgccgggctgaacattgcgccatttattaccctgacgcgcgctaatcgtcacaacatcagttttgccgaagtggagtctaaactggggttaccgctgtttgtaaaaccggctaatcagggctcttctgttggtgtcagcaaagtaaccagtgaagaacagtacacaattgccgtcgatctggcgttcgagttcgatcataaagtgatcgttgagcaagggatcaaaggtcgtgaaatcgaatgcgcagttcttggcaacgataacccgcaagcaagcacctgtggcgagatcgtactcaccagcgatttctatgcctacgacaccaagtacattgacgaagatggcgcgaaagtggtagttccagcagccattgcgccagaaatcaacgataagatccgggcgattgccgttcaggcttatcagacgttgggatgcgcaggcatggctgtttttaaccccagagaacgaagtagtgatcaacgagatcaacaccctgcctggcttcaccaacatcagtatgtatccgaagctgtggcaagccagcggtctgggttacaccgacctgatcacgcgtttgattga

SEQ ID NO: 22987 - DNA, 174 bp, Escherichia coli; identical to SEQ ID NO: 20951

SEQ ID NO: 22988 - DNA, 750 bp, Escherichia coli
gtgctggtcattaaacgcgtattcaggctgaccctgcgcgctgcgcagggctttattgattccattttttctctgatgaacgttccgctacgctgcccggattacagctgtgtcagcaggcgggcaaagtcggttaatgtcagtttcaaaacgcccacccggggtgaaatcgcacacctggtaattgattccaccgggctgaaggtcttcggtgaaggcgagtggaaagtcaaaaagcatggccaggaacgccgccgtatctggcgtaagctgcatctcgccgttgacagtaaaacacatgaaatcatctgcgctgacctgtcgctgaacaacgttacggactcagaggccttccccgggttaatccggcaaacccaccggaaaatcaggtcagccgccgccgatggcgcttacgatacccggctatgtcacgatgaactgcggcgtaagaaaatcagcgcgcttatccctccccgaaaaggtgcgggttactggcccggtgaatatgcagaccgtaaccgtgcagtggctaatcagcgaatgaccgggagtaatgcgcggtggaaatggacaacagattacaaccgtcgctcgatagcggaaacggcgatgtaccgggtaaaacagctgttcgggggttcactgacgctgcgtgactacgatggtcaggttgcagaggctatggccctggtacgagcgctgaacaaaatgacgaaagcaggtatgcctgaaagcgtgcgtattgcctga

SEQ ID NO: 22989 - DNA, 972 bp, Escherichia coli
atggcggaagtcaaacgcaaatggggcgaccgctttgttgccgtcacgcaaaaaaacaccggtaaaggtggcgcactaatgcatggactaaaatacgccacgtgtgatcaagtatttttaagtgatgcagatactttcgttccacctgataatgatggaatgggctatatgctggcagaaattgagcgcggcgctgatgccgttggcggaattccctccaccgcgttaaaaggggcaggtctgctgccacatatccgcgccaccgtaaagttgccgatgattgttatgaagcgcacgctacagcagtttctgggcggtgcaccgtttattatcagcggtgcctgcgggatgttccgtactgatgtattgcgtaagttcggtttctctgatcgtactaaagtcgaagaccttgatctcacctggacgttggtggcaaacggctaccgtattcggcaggcgaatcgctgcatcgtatacccacaggaatgtaacagtccgcgtgaggagtggcgccgctggcggcgttggattgtgggctacgcggtctgtatgcgcctgcataaaagacttttatttagccgcttcggtatcttcagtatatttcctatgctgttggttgtgctttatggcgttggtatttatctcactacctggtttaatgaattcatcaccaccgggccacatggtgtggtgttggcaatgttcccgcttatctgggtcggcgtagtttgtgttattggtgcatttagcgcctggtttcatcgttgctggttgttggtgcctttagcaccgctttccgttgtgtatgtattattagcttatgccatctggattatttatggacttattgccttttttactggacgcgaacctcagcgcgacaaacccacccgctattccgcactggtggaagtgtcaaccgcttattcccacccttctgtcacaggaactgaaaaactatctgaagcttaa

SEQ ID NO: 22990 - DNA, 321 bp, Escherichia coli
gtggcaaccctgttcccgtcatcatttccggtactccccgttgctgcgcctgtcggctggaatcttccggcgtttgtgtcgctgatgatccacgccctgccaccgcaggcaaccagtgcggtttattcacatatccggggggaaaaccgctctgaacaggcccagaaacacgcacaacagacttttggtgacgccatcgggaaaagttttgacgacgccgttgcccggttcacttttccggtctggatgttacagcttctgcgtaaagcccgggaccgcattatccgcctgctggaaacactgtgggatcgtctgttctga

SEQ ID NO: 22991 - DNA, 234 bp, Escherichia coli
atgcgtgatgatcgttttaattccctgaaacaagaattttccggcgttcctgatgatgcggctgatgcgctttcgtcaatgccagaacttattagagcggcttttttcttactttccacgaaagaatataaatcaacgggacttgatgtactgaatatcgccgccgattatgcggaatatgtggcagaggcgcgttacagaagaaaatttcctgaggatgtaagccatgcgtga

SEQ ID NO: 22992 - DNA, 297 bp, Escherichia coli
atgacagcagaaaaaataaccctggaagaggccaaacttcactgccgcatagacggtaacacagaagacacactgattcaggcatacataagcgcggcgctggaggtatgccagaagcatattggcaggcgttttgatgacggactggaatttacccctgcaataaaaattggttgcctgatgtacatctcgcaactgtacgagtaccggacaacgcttggcgataccgatacaaaagaaattcccctgacgatttccgcgctctggtcggtttatcgtgatgtgggggtgtactga

SEQ ID NO: 22993 - DNA, 339 bp, Escherichia coli
atgatagccggaaatatgcgggaccgggtgacgattatgacatttaccacacagcgcctgccgtcaggtgcgatccagcagatatggacggaaggggaaaccatctgggcagaggtcaaggggatcagcggacgggaattactgaccgcaggcgcagaaaccgcacctgcaacgattcgggtatgggttcgctatcgtggcgacatatccgccgccagtcgcctgaaagtgcttaccggcgcttttgccgggagcacgcttaatatcatcgggatccccttacctgatgcgaaaagaacccggctggaaattctggcaaaggtgggtacagaaaaatga

SEQ ID NO: 22994 - DNA, 282 bp, Escherichia coli
atgattaaagacagcaaagcggaagaactggaggctaaagggctgtaccggagagcagcggcacgttgggctgatgttatgtggctggtgagcactgacaaggagcgcgaacaggtggcaaagcgtcgcgcggaatgtatccgtaaggcagcgcgccaaccagtcataccggataatttcggaatactgaaagaggccataaaccgcacacataccgggatgggcttacagaaacctggcggtgagatgttcaggaactacccgaaaaaaagggataattga

SEQ ID NO: 22995 - DNA, 720 bp, Escherichia coli
atgaaattacctaaaagactctattatccgttacctgaagcggcagaaaagttaggatgtacaataagggatctctatcatttcgctagtacaggtgccattgatatttctgtatttattcctgagcatagtgttgggaactgtgaggtttattttcttgagggatttaaagataataaacggaatggactaatattccaggacggcaaaacaattaatttagagaagaaaatagatgatagattatatatagcaaattttattgctggttttttctatgtaaacaaaaaggcgttctctgatattgagtttaaacataataacatcataagctcaccaacattatatttttaccctgatagacttggcggtggattagaaataactccagaaggggaaaatctcaagccatttgatatagatgttgattatttatgtgtgatggcagatgatttaaataatgtaaaagatgaaggtagttttcgtaatcttacagaagataaccccaaaagagcagcaaaaaggaatgaggttatttactctttaattaaacttattccagaaatgggtgatgtagacctagacacggaatcattacctaaaatagcagatttaattgattctatagctgcatccagagggatagaatttcccaaaacacattggcagacatggcaaaagtatttggggcgtgaatctcaacaaaaacgcaaaaagtga

SEQ ID NO: 22996 - DNA, 168 bp, Escherichia coli
atgagtaacatttttcacagcattcgaacaattctatttcatcgttatcccttgtcctgtaaggtgttccccttaatacgtccgttacttatcctgccgaacgcaaccgaacgcgccggatacatgagcggggttatcgagtcgttagatcgaggtatccggttttga

SEQ ID NO: 22997 - DNA, 480 bp, Escherichia coli
atgggtttcaaaatagttaggtccagccttataaatgaagttattgctgaaactcctgtcgctgaataccctattacggaatttgaagattacaagcgcatttgcatagaagagggagacattcctgctccctcagagactgatcagaatatatattcttcctacctagaaactataggtagggataggtttatgaccagccctatcgaagccagagagcaagaattgcatcacacccatatttggcaagaaggatgtgtatgggaagaagacgatgaagacgacgatagcctaaaagttcaatgggcgtgcaccagtgatagctatgtggtgtattcgtactttattgatcgtgatggcgatcatcatttttatattattgattattgtaatgatggcgcacatggcttgatttcgaataggtcacaggttttggactgggcaaaccaggctgagagatataagctaagaaattgttaa

SEQ ID NO: 22998 - DNA, 147 bp, Escherichia coli
atgccaaaagttaacgaaggacgtaaggctcgtagagagcggcctgttgttcgacgttctgccgagcaaagagcaaggctgagtgctgcatctgaaattctggcacttaaattagctgagaaacgtaattcatgggtttcaaaatag

SEQ ID NO: 22999 - DNA, 228 bp, Escherichia coli
atgacgaaaacagcacgagcggtattccagatcctgacaagccagccggacaaatacaacatatccattgacaggctggcgcagctatccggtgtaagccgccagggagtgaagcgggctattgcctttctggaggaaaacggtgtgattgttgttaccagaacggtgattaacgggagatataccgagaacatgtaccgaattatagacaggggcgcacctaaatga

SEQ ID NO: 23000 - DNA, 603 bp, Escherichia coli
atgaacgaattaatctcaaacgaccttacgggagcacggatgacaacaattgacatcatgaacctgttgaacgcgaatcttccggcaaataagaaacacccgtatgaccattttgagatcatcaaaaaggtcgaggatttaatgagaatgaatattattcatcttcgaaaaaaaatcgaagttgataataatcaaacacttatcaatcactctaaggtcagaggttatgagtttataggcaaacagggcgagcgtgacagtattgtagttatcgcgcaatttcagcctaaggtgactggtgttctttacgacaaatgggacgcattgcgcgaagaaaaccgccagttaaaagagcatttactcatgctgacaaaacaggaggatttaaaaaaggacgcagaaaggcttctcaatgaactggatcacggtgacgtggatgtgaacgcggttactgagcttttaaataggtacaatcacagcagtcaccacgcagggcagcaactatctttagtgcgaaaaacgaagccaattgtcaaacaacttcaccataatactatcgagttattacagccagagctaccgcttgaaactgcggagcagtaa

SEQ ID NO: 23001 - DNA, 267 bp, Escherichia coli; identical to SEQ ID NO: 6604

SEQ ID NO: 23002 - DNA, 915 bp, Escherichia coli; identical to SEQ ID NO: 6605

SEQ ID NO: 23003 - DNA, 210 bp, Escherichia coli
atgtttgagtccggccttcgcaccatcggaacatcaatagacgtcaacggacgtctttttttgtgcctaaaatccagtatccgcaaggctttcctcgctttttcactcaacctaagtcaacctgattcaatctacatcaacttactgatgcgggtacaactgcgggtatttcccggttcgataatgtttgtacccacacagaacccttga

SEQ ID NO: 23004 - DNA, 2133 bp, Escherichia coli
atgctttctactcaggatataaacggtttttttaatgctgttgactctctcaaaaggtttaaacgagcagaaataagggacaacaaagataaaccacttattgattcactttacacagatctattgccaaacaatcacgtcttcaaaatgtgctacggggaaaacactacatttttaattggaagaaaaggcacaggaaaatccacaataattcttaaacttgaaagtgagtacagaaaagaatcttcatacctcccatgctatatagatacaaaaacagtattcgaaagtgttagaggtgagtatcaaaaaatagactacctaaaagggaagatacctgaagagcatctagaaaaatatttagtcgagcgtgcattcattaaaaacatcttgaaatcaatcggtgacgaattgaatattcgagcagaaagcatattctcaaaactagcagggattgttaatgcaagcaaaaaacaagcggtaaaagcaaaaataacaaaactacttttaatggtggacaataaccaaataataaaagaaattgaaatacccgtaataacagaagtaaatactaaacttactaaggcgaacgaatcagaaaatggaactacccaaaactataactctgagctaactgtaaaaatcggaacatcacaacatgaaggtggtggaaaaataggagcggtaaaaggaatcacctcaagacagaaaaacaatgacgcttgggaaaagagtttctctacagcccttctaaaggtttttcaaattacatcagtaattgaagaaattaaaatcatattaagagagctaggagtaaaaaagcttgtaatatttttagacgatttctctgaagttgaagagaagacgctaaaaaacttcgtcgatgttgtacttgctccgctaaataactgggctaatgatttcatttgttttaaagtcgctgcctacccaagtcgcatatattatggcgacattgatgttggcaaaatagatgtggtaaatttagatttttataatttatattctaattatgataaatctacgatggaatccttatcagctgacttcaccaagagacttttaaatcaaaggcttaatcagttttgcacattgaagtttgaagattattttgatacatcttcagctactccagaagagtactatgatcttatatttaaagtatccatgaatgtccctagaattataggatacattctttattactgccatcaaaccaatgtatctcttggcagaaaaataaataaaggctcaatcgagaaagcagctcagacttattatgagcaagttgtatctaagtttttcgatattgccacgcatagtctgatgtctttcagtgaaaaagtttctgaacttcagcaaaaagagattctaaatctcttcgttcagaaattaaaaacgattaagcgacaaataataacaaatgaactaactggcacaatttacaatagagacagaacaaatccttattgtagtcatttttattttcaacctaatcttgaacattttctgcgtacattggagcttaatttcttcattaccaaatataatgaattagtaaataaagacggaaacaaggtctcgatatatggaataaattatggattagctcgaagtgaaaacctcaaatggggaaaacctgaaggtaatcagttccgtagttatttcgtagaaagaccatttgatttcaacaaagatatcgaagatttcttaagagaatcgaaaaaaatcgtatgtcttaatagctcttgtgataaaacctatccatatgaagaacttgcatttcttgaatataataaaatgagatgtattgaatgccagtcgcctgttgaagtaagatcgttttctgaaagtatcagttctgaaatatctaaaattgacaacgctaaacttttaccaaaattagaattaatgatattacatgaactgaataaggcagacgatcatctcctagctcgagacattgctgaggaactagacgcttcatcacaattaattgccaaacgggctgaaaaattagacagaaaaggtcttgtttttagagataaaagtgatgcattaattaagtattcaataacaaataaagcagtagaaggttatttctatgatgactaa

SEQ ID NO: 23005 - DNA, 1233 bp, Escherichia coli
atgtcgctgccgcacctctctcttgctgatgcgcgtaatcttcacctcgccgcgcaaggcctgttaaacaaaccccgccgtcgagcgtcgttggaggatattccggcaacgatctcccgcatgtccttgctgcaaatcgataccattaatattgttgcccgtagcccatatctggtgcttttcagtcgtctgggaaattatcctgcccagtggctggatgagtctctggcgcgtggcgaattaatggaatactgggcgcatgaagcctgctttatgccgcgtagcgactttcgtcttattcgccaccgcatgctggcacctgaaaaaatgggctggaaatacaaagacgcctggatgcaggaacatgcggcggaaattgcacagttaattcagcatattcatgataaggggccggtacgttcagccgatttcgagcattctcgtaaaggtgcaagcggctggtgggaatggaagccgcataaacggcatctggaaggtttatttactgccggaaaggtgatggtgattgaacggcgcaacttccagcgcgtttatgatttaacccaccgtgtcatgcctgactgggatgatgagcgcgatctcgtttcgcaaacagaagcagaaatcatcatgctggataacagtgcgcgtagcctgggcatattccgcgaacagtggctggcagattactatcggctgaaacgtccggcactggcggcttggcgcgaagcgagggctgaacagcagcaaatcattgctgtgcatgttgaaaaattgggcaatctttggctgcatgctgatttgctgccgctactcgagcgtgcgctcgccggaaagctcactgcaacgcacagcgcggtactttcgccttttgatcctgttgtctgggatcgcaaacgcgcagagcagctttttgattttagctaccggctggagtgctataccccagcgccgaaacgccagtatggctattttgttctgccgttattacatcgtgggcaattagttgggcgaatggatgccaaaatgcatcgccagacaggcatccttgaagttatctctctgtggttacaggaaggtattaaaccaacgacaacgctgcaaaaagggttacgtcaggcgattactgatttcgctaactggcagcaggcaacgcgggtgacattaggacgctgcccgcaaggcctctttactgattgccgcaccggctgggaaatagaccccgtcgcataa

SEQ ID NO: 23006 - DNA, 210 bp, Escherichia coli
atgcgttatagcgcgatgccgatgcgagtgccacttttccattcactcgctgaattaatggcaacgatgatgaggtattactgccatggtgaggtacctgaagcaatgttgcctgcacttgctgccagtaacggcttagcatcttttgttcagcgggggcttcaatatcaccggttagaagaatgctattcgtcccgtcatcaaccttaa

SEQ ID NO: 23007 - DNA, 1104 bp, Escherichia coli
atgagcgagtatatagaaattgcctatgcagcagctacacataggctgtgctttcttacaggcactggattttcaaaggctgtttctgatgataaagccccaagttggcaatctttattggagcaactgtgcggtttattgaaggatggtgactcactcaaagaggaattatttcctgatggaaaagcaaaagaccttagccttgaagaggctgctcaggttattgcactaaaatttatactttcggggaaaaatatttaccaggagattgagaaaatcatagcctcaatcgaacttgatccatcaattgaatatattcaagactttttcaaagaaaacacatttaaagtaattacgacaaattatgacaagttagcagaaaaactggctggagagaatcgaacgtgtacaatcacccccggcctgccaattccaaaatataattgtgaggttaaagtctaccatgttcacggctctatagactccccatcagatatggttgttactagcgaggattatttcagatttataaatggtaattcttacttttcaaataaactaagcacagttctacatgaaaacactattgttattcttggctattctctaagtgacgcgaacctcaaggcgattataaatgaatataaggtattttcacgggacaacgtaatgtcctccaatattttccttatttcccgagggaaactattgcaacctattaaagattactatttttcctgctttgggattagggttatagataaaacagaggtgtctgatttctttagaaaacttaacaagaaaattccagaagcaaaaaaaataaaagacaaattgaggcactcaatcaaatcggtaataaaaaacggaagagagtataaaatagagttcttgaagttagaggattctttttatcatatcatttcctccatttcatcatctggatatagctggaatgatgaaaaggtattaaatgttttttgtgatataatagataaaaaaatagatcttactaaagagtctggcgcatgggagcagtatgaacacctggcaaaatggcttatttatttcggtagtttattggtgatgctgccaacttactga

SEQ ID NO: 23008 - DNA, 285 bp, Escherichia coli
atgccaacgaaagctgaattacaggtgcgcgtagatgagcttgaaaaagagaacgcgagcctcaaaaaaatgctgtcgcgggcggaaagggaattatcaggcaaattattgccagaagaactgccaccagcagatatacctgatcgagtgtcctggtggatgaagtatttccgtgcaccgtgggaggcgttttggtgctacgaccatcgcagatggtgtgatgaacttgatagcaattttccctactttgcggaagggaacacctgccctcaatgcaggggatag

SEQ ID NO: 23009 - DNA, 123 bp, Escherichia coli
atgtcaaaagtaaatgttttgattttttcagcaattgttggctttggttttactgccggagtgcagatttatattacgtgggaaaaaatcatcaactacgcatggagttgttttattaagtga

SEQ ID NO: 23010 - DNA, 135 bp, Escherichia coli
atgccgcaaggcgcggcatgtatccaatcaatcacaggagctgaaaatatgaacacggcattcaaaatcattatggccgcgatctatttctggctgttctctatcacttttggcggcatcgtcgcacatgggtaa

SEQ ID NO: 23011 - DNA, 213 bp, Escherichia coli
atggatctaatagggatctgtatggacctaattattggatctatccagtggataatgtggataagtgaaaaaccggccaacaaagccggttggaaggaagctgtattattctatgctttcgatgagaagaccatgttcataacatttaagctcatcgccttcgtacaggaattggtatccaataccaccattttcatggacattagggaataa

SEQ ID NO: 23012 - DNA, 573 bp, Escherichia coli
atgcttgtacatagcattctctgcatgtttactcctttgccaagtgtgtcacaacatgctttggcatcctccacgtataaaggacgcggatttcttctatgttcaggttgtagcctgaatcattttggtgatttcctgcttcaacgggcagccgggcttcactctctatcaactggtgagaacggcttgcccggcagcttcgatgtgtgctggagggagaataaaagtctaagatgtgcgatagagggaagtcgcattgaattatgtgctgtggagggatcgctggtatcaaatatgtgtgctggagggaaagacagagaattacatgtgcgctggagggaaaaactgatggacagatgtgtgctggagggaaagtctgggcaaactgcggggcgtccccctccagcgcacatcaaaaacaggaaattggacaagccttcccggcagcacacattttttgaatgcagctgccctccagcacacacttattcggggagtttcagctttggattgcgagaatggacgattacaaaactttcccggcctttcttctcaattgaacagtcgagatag

SEQ ID NO: 23013 - DNA, 156 bp, Escherichia coli
atgaagcagcaaaaagcgatgttaatcgctctgatcgtcatctgtttaaccgtcattgtgacggcactggtaacgaggaaagacctctgcgaggtacgaatccgaaccagccagacggaggtcactgtcttcacagcctacgaatctgaaaggtaa

SEQ ID NO: 23014 - DNA, 648 bp, Escherichia coli
atgagaaaactattactatcgttattatttatggctgggactgttaatgcagcatcaagcgtaaaggagatttgtaccgattatacgaaatatcttgggcacgtttacggctttgctgtcagtcaagacgaatccatgcgcaagaagttactgtcagatatgaaacgccttaaactttctgaagcgatggtgcagcaagaactgtataaagtcgcaaccaacgaaaatgctaaatatcaatattctcgcctgttaaatcccgacgcaaacgagatcaatcgaagctctttcgattatatggtaaaggcatgcgaaaccgctcctgattttgctattcctagctggggtgtgctggtggcgagcaatgccgttaataaagaagacgttggaagaaatggcattgactcaatcagaaatgcccctggaatgcgccatcaaaacgtgcagggtacgcttgaagagcgggccagggggccgggtacaaactccccaatgggaaacctctcaccagaggaattgcaagagtataaccaacggatggagcagtatgagaaagcggcacgcgaacaaatggaacaacaaaagaacggctcacttaatacctttcagcaaggtttaaaagcgcttaatttaccatatgaatggtaa

SEQ ID NO: 23015 - DNA, 477 bp, Escherichia coli
atgcgcatcaaacgattttttctaattcttgctttgcttactccattttcatcaatggcaaatgtaagcaaatggtcaaccggcgagactcatggtgttcgttcttatgctgtttccagcaaagataattatacgcttacatttgagtgcgatgttggatttaataatacggatcccaatcaagtaggaacacgactactcactctcatgaaaacagaacctggcggtgagtcatttgatgctaaaaaagaacaaataacgctgaaagttggtgatgatgaatatcctataagttctatcggttcctctgtgggtgatagttactggtatggtttttggtcagatacccctgatatggaagtaaaaacattcgatgcatacgtagacggaaaaaaaatcgcaacatttacgctacgtaaggccgcagagcttttcaacgcggcacctgaagatggctgcctgaagcgcgcaaaatga

SEQ ID NO: 23016 - DNA, 237 bp, Escherichia coli
atggttattgtctggtataattgtaaagataaacgtgtcagtagtattatcggcaaaactattatattctttaatatctatagatggctcactattgtaaaaccatattttttctatctgagaactatgttcagttacgttccagcagccatgttgcagaaaatagatgatatgcaggccaaaatcgttatctatttgcaaatgtttatccagcttatcaatttcaactatctttga

SEQ ID NO: 23017 - DNA, 633 bp, Escherichia coli
atgactgataagaacgggcagaatattgaagtgtcctatattttcactgataccatagatgataaatctgatggaaaattatgcttaaaaatctgtaactcttgcaaccaaaatgattctagtacacatgaatataaaatagatcatcaacagttgaaaaatcacataaggcaacttgaggagtgggcccttcttgaaaagttttatgataacaacgcttattattctaaacgtacaaaacaattagagaagaaaattgccgatgcggggtttataacagggaaggttaatgccgataactttaatgtaaaagagtttaaagacgatatagcctcgatgctttgtgaacagccccccatgcgtacacaccagatttcttcatccggatacttatctgccgataaagtgcctgatctctataagacaaatttgaaagacgcgcagagagatctgaaaacaacaccggttgacatcgatggtgttagtctaaaatcaaaaactcgggaaaaaattgcggaaaaaattgcgaaaaaaactgaggaaaaaattgcgaaacaaaatgcgaagaccattgaggagaagaatagtgaaaaaacaagaaagaaacaaatcctgaggataattttgtcttaa

SEQ ID NO: 23018 - DNA, 276 bp, Escherichia coli
atgactctcaataaaaccgatcgcatcgtcattacgctgggtaaacagatcgttcacggcaaatacgtgccaggctcgccgcttccggctgaggcggagctctgtgaggggtttgcaacctcgcgcaacatcatccgtgaggtgttccgttcgctgatggcgaagcggctgattgaaatgaaacgttatcgcggcgcgtttgtggcaccgcgtaaccagtggaattctctaacggatataataataattgctattattgacttatcaaaaaactga

SEQ ID NO: 23019 - DNA, 1164 bp, Escherichia coli
atgaacccaatggatcacattcagcttagcgatattcaacgtatctatcctgcgacgacggtggttgagctggtcttcagcgacgcgcaacaggcgttgtttgtcagcgcgccggactgggaagatgaaacgcagtcgcgggtgctgcgcattaatccgcagacactcagcgtggaagcggagatcgcattgccggtaaaaggattcggtgtggcgctggacgataagcgcggtttactttatctcacgcagggttttaatggctcggtggcggtggtggatatctgcaagaaccggcttatcgccaccatcccgctgatggaagaggtcgtttttgagcaacgctaccagcaggagggcatttccggcgcgcggctggcgtttttgatgcgcgaactggcgcgctttggcgtcagtgagggctatccctggaagcttcgcgaactggtgtttgatccggtcacggagcggctgtttctgccgggactggggctcgggatcgacagcgttttatttgttatcgatacccgcgagcgcaggctggaaaaagtgctgccgggctttcgctataacgtcgtaggcatcacgctggatcgccaggggaggagagtgtttgtgtcgaatatgcagggacagctttttgttgtcgatccggacacgctgagcatcgtccattgccacgaggtggcggccgatcagttactgaatatggtttatgaccgccgtcagaacagactgtttggtgtggatcagggaatcgatcgccgagactggcggaacaaccatcttgaacgggactacgttgcgcgcagtcaggggcatgaagtttttgtgctcaatgcagattcggctgaaattatcgcccggatggcaacggatgaaatacctatcggtctggtatgggatgatgagcaagaacgactttatgttgcgaatcggcgagggatacgcgtcgataagggggaaggaacgcttactgtctttaatactcgcaattatacgagagtgcagacactacaaatttcccctcatcctaatagtctggcattcgacacggagaaaaaatatctatttctcacggtaaagaatgacgaaacgttaattcgggataagcaaccagaatgtgtagctcgccttcgtttgattaaaaagacggtagaataa

SEQ ID NO: 23020 - DNA, 2760 bp, Escherichia coli
atgagtacgattttttatcagtccggcatgcagcgtacggaaaaggccagcgaggctgaagaacagatctggtttgagcatcaacagcagcagcatggtgaaagccagcattgctttgcctggacgctcgatagccgcgtcgataccgggcgtttagtgaatgcgctcactctggtgcagcagcagaccggcgcggcgaacctgaactatgactatgatgacgcacgcgggttggttcgacggccagcctccgtatcgccgggcgtgacgatacaggccattcgtcatgaacggcaggcgtcagaggcgttgctgcggttaaaagagacaccgttcgatctcgccagcaccacgccgctccacttttacctttttattggtgaagagatctgcatcctgggaatggtggtccacgatatcctgttcatttcgctgggattgccggaaatagtgcagaccgtcagcgcgttttacaacgggcaagacggcactcagccgcgcgagtcctcgccgcccggaagtctgccatctcccgtgggcagtcacttattgtcatcctgcgcggcgctgccgggacacgtcggccacggcgttcacctgcgcactactctgccggtcagcgctggcccgcaggaacaggcactcagcgagtggaccgcaggcgttgcgctggcgctcagcgagatcgccggacaggcgcagatcacgctctggtttgagggcgaccgctttcagaatggcaaccccgcgccgctggtgctgacctgcgcgggtaaatcatctgcagaacttgctgtactcattcatcggcacgtgcagggccacgatattatgctcccgctggctaacgaaggtgtgccgttgcgcgtgtgctggcagactgcgttatctttacacgggattgtgtgtgagcctttatcattaccgccggggcatacgcgctggccgttgacggtggcgtttcaggatcccgcgcaggtggagattatcgccggggcgcagatcgcaggctgggtcgcggaatacttactgtttaagagcattcaatgccaggacgcgcaggtcagccaactgccggttagcgttgtcgtaccgcagtctacttactctggcgaagcggatgttcagcagcgcattctggaggcgtttcgcgaagcgctggcgatgccggaaatgggtgaaaacgacgacttctttgattttggcgggcattcgcttattgccacacgaattatcgggcgcttaaaaaacgactatagcattgagatcaacattaacgatctgttcagttatccgaccgcagcgcaactggcggcgtgtgcgaaaatggatgaggcacaggccagcagcgcggtgtgcgaaaatgcgtatgtcagccagcttcaggcacctctctccctggcgcaaaagtcgttatggaagatttacaaggcgctgggattcagcgaagcgttcaatattccgtttgcgctgcgctttcttgatgctattgatgaagagattttccgccaggcgttcagcgatatcctggtgcgtcattcgggtttgcgtagcgtgtttgtggacattggcggcgagatttaccagcaggtcattccgccccagatgctctctcagtacgaatggttctggccctcggacagccagcagcatgagcctcttaatcaggcgctgaagcgcgccgcagatcatcattttgaactggataatgagctgcccattcgcattacctttttcagggatgagaaaaatggtcaacaggtggtgtctctgctgttccaccatatcgtgctggatgagtggtccgccaatctgctgatggatgagcttgctctggcgatgaggagtcgctcagcgggtcgtacgccggagtggaagagcgttccgccgccgttccatgcatttgcgttgcaacagcatgaagaggggcttaacgatcggcatctgcgttactggctcgatcgcctgcacggcgtgtcgccagcgatgcccattttcgccgccaaagagcaggtgagggaagcctccggttcacacggcggttgggtggaatgcaaagtcgaacgcgaggtggcaaaggggctttatcagctggcgaaacagcagggcgcgtctctgtttaacgttgtctacggcggtattgcggctgcgctgcatttgcttggcaacctcagagagctgacgataggtacctccgcctccggacgtaatgatgcacaattctttgatactattggctatttcaccacagtggtggcgcatcgcatacagtttacccaggtgccaaccatcaatgccctgatcgatgacgtgaagcggcaaatcaatgattcaatgccctataccgacattccagtcgacctggtggaagaagcgctgttcggcgataagcttgcgcaggacagccatatgttcgaggttttcattcagatccacgccaaaaacaagctcaacggtgcgttccgtcttgccgacgaccgggaagtgcgtttccgtcaggttgatccggaaaaaacggagtcagtgctggggttacagtttgaagtgatggaggaacaaatcgacggagaaccagacgtgcgagtgatgctgagctatcgcgcggaccattattctccctctcaggttgatctcatcgcccggacaactcttcagctatttacggtcatggccgagtcggtggggggcccggacgtaacgatggcatccctgcgcgagaagatgaacatcgcccaacaggaaggacaacaacatttatga

SEQ ID NO: 23021 - DNA, 2097 bp, Escherichia coli
atgagcgaaccagagagtgataaagcacaacagatatttttaaaataccgacgccgcagtacggcgaagaaataccctgttccttacgcaatatttggtttatatgtatttgccgccggagacgtcatggccgcagaagaagtatctctgcgtgacgataattatcaaccggatacgattgtggtcaccggagagaaagtggcccggacgctttacgataccagcggcagcgtcgaggtatttgatgacgcacgtattaatgcgatgccgggcgcgtcccaggtctcggatctcttaaaaatgaccgccaacattgtcgataccggtatcggcaacgatctgcctacgattcgcggtatcgacggctcaggcccggcaaacggggcgaatgctttcctgaatggcacccggccgcggttgaatctttcgctggacgggcgttccctgacctacaacgagctggcgtttgggccgcaatccttgtgggatatggagcgggttgaggtctggcgcggaccgcaaagctatatccaggggcgcaacgcgattgcaggcatcgtggtgatgaccagtaaagatccgaccttcgactgggaatcctcagtgaaggcgggcggcgggaatcaaagctctaccgtggcttccgcgatgttatccgggccgattattgaagatcaactggcggttcgtctcagcgccgataggcagcggcgcgacagcttcgtcaatttaatctcctacgatccggtgggcgatccgcgggaaattgaaaccaccaatctgcgcggcaagttattattcaacccggccgggcttcgcgaactcaccactaaactgaccgttaaccactttgacagtcgggcgccgcagaatgagacgctgagtccgaaaaatcatgtcagcgctcgtttcgacccacggcgtccggtgtttgagaccacctcgaccagcggtatctgggatctggcctgggaagcctcggaaagcctcagcttggagaacaagctgatctacaccgattttgacaaccaccgtcgcaccgtagaaagcctgccgtgggccaatattgacgggaaagagttccagaccgagccgctggtccgctttggcgtcaaaggcgataccctgcgcggactggtgggtgtgcgttatttccacgcctcgcaggatgagtttgtgaacctgttcggcggcagtaagttcaaggataaaacggaaacctactcggcgtttggcgaactgacctgggccgtgacctcagaggtggatatcaccgccgcaagccgcgtcgagcgcgagcatcgtcagcgcaaaggcggtgcgacccggaaggtggattttgatgaaacctgggacgttttcctgccgaaacttgatattgcctggaaaccgttaccgcaacagacgttaggcatgaaggtgtcgcgaggatataacgctggcggggcgggaatgacctttgtcgcgccgttaattaactatacctacgatcctgaatatgtctggagctatgaattatacagccgtcatgggatcagtgactggaatctggaattaaccagcaacctgttttacaacgattataaagatatgcagttaccgtattatcttaattccaacagcagttcgatggtgatcagaaatgcggataaagtcgaaacgtacggcgcggaactgggtgctatctggaaaccaacgctggattttgaactgaacagttccgttggggttttaaaaaccaggattaaaaaattctccagcagcggaatagacggacatgaattaccgcgagcaccgtcattaacggcaaacctcggcgcgaaatatatgctgatgcccggactggaattgagcggagacgttcgctttaccgatacctattattcccagtatgacaacgatagccggggcgaaattccctcgtcatggatagcgaatatgcaggtggcttataccttcacccatggccgcgtcagcgtctttgcgcaaaacctgtttgattctgacaagcggattatggtgatcgacaacgatgtttcgacggcggtgttgcagcgccctcgtcttgtcggcgttgccgtgcaactggatttctga

SEQ ID NO: 23022 - DNA, 984 bp, Escherichia coli
atgagtcagagggccggatgggtgtgcgccgtcctggcgctgttgcttggggtgacgggcctgtatgccttgctgatcgggcgttttatgcttcccgtggagtcagccttccaggcgctgcggggagaaggtgatccgacggcgcagcatattgtcaggatgatccgtttgccccgcgtcctgaccgctattctggttggctttgcgttaggcgtttccggcgcgctctttcagtcggtatcgaaaaatgtgctgggttccccggacgtgatcggttttaccaccggcgcagcgaccggggcgattatccagatcattttgtttgaaggaaacccggtcgccattgtgctttctgccatggccggcgggttcgccaccgcgctgctggtctattatctggcgcgccattatggcgtggtgaagggccagcgactggtgctgatggggataggcgtcggagcggtactcagcgcgcttaatgcgctgctgctggtgaaaggtgatatcgacaatgccgtgaccgccacgctctggctggccggtaccacgcagggacgcaactggtatcacgtggcaccggtggcgttaagtcttctggtgctgcttccggccattgttctgcacgccagagcgataaatatcatggcgatgggagatgatattgccagccagcttggggtgcgcgttgagcggacgcgaagaacggtaacgttctgcgccgtcacgctggccgcggtggccaccagtgcgacagggccaatcgcgtttattgccctgattgcgccgcagctggcgttacgcttaaccagaacgccgggattaccggttttcagcgccgggctggctggcagttgcctgcttctgggtgccgatatgcttacgcaaattcagccgctggcattaacccttcccgttggcctaatgaccgggattatcggcggcgtttatttacttattctgctgttgcgaatgccttccgtttag

SEQ ID NO: 23023 - DNA, 1014 bp, Escherichia coli
atgtttgcgcagtgtccgggacgtgggatgcgaagtgcaggactgggcggtggttttcttattctgttgatgctgggtttctccagtctctggtttggttcgcggacgatcccgcctgcggtgatctggcaggcgttgacgcagttcgatccgcaaaacagcgcgcatctgctggtctggcatttacgcctgccgcgcacgctgctggcgatggtggtcggcgcggcgcttggcggagccggggtgataatgcagacgctgacccgcaatccactggcggaccccggtctgttaggcgttaacgcgggcgccacgctggcgattgtgctgtcgattgcctttttaaatgtcaccagcgtcagcagttatatggtattcggtgtggctggtgccggggttatcagtattctggtatttatgatgggtggcctgaaccacgccaatccgattcgtatcgtgctggctggcgcggcgctgactatcgttctgctgagtctgacgcaattggttattctgaacagcgacgccgacgccttcgacaggtttcgtcactgggtgacgggcgcgttgcagggacgggggtatgacgtgctgctgccggtctcggtacttgcgtgtgtcggcattattctggcgctggcgggagggcgaatgctggacgtggcggcgctgggactggacacaggacgcgcacttggcattaatccgcatgtgctcgcagggagctctgccgcgatcatcgtcattctggcgggtgcggccacggcagcggccggaccgatcggctttgtcggtctcaccgcgccccattttgcacgggcttttgtcggctcgggacaccgtctgctgctgccgtgggcgatgatgttctctgcaatactggtactcagcgcggatattctcgggcggatgattggtcatcccggcgagattggcgtcggcattatggcagcgttaatcggcggaccgttcttcgtgctgctggttaaacgctggcagggggcgcgcgtatga

SEQ ID NO: 23024 - DNA, 987 bp, Escherichia coli
atgaacgtttgtagggaaaaacaacgccattggtttaagagtgtcatgtgggcgctcggactggtcatgtttgcggggcaatgcgtcgcacagggctggccgagaacgtttcataatgccgatgacacggtcacgtcgattcctcagcagcccaaacgcatattatcgaccgccgtcagcgtcaccggaaccctgctggcgattgatgcgccgcttgtcgccagcgccacggcggtgaacggtcagtttttcggccagtggcaggacgtcgcaaaagccaaaaaggtcgcgaaggtgtggccggcgggcagcgtcgatctggaacaggcgtgggccgcagcaccggatttaattgtggtatcaatcaatggcgcggattccgcgcgggcacagctggcggatttacaggccattgcgccggttatcgtggtcaattacggcaatcagacctggcaggatctggcgcgccagttgggcgacgcgctggggctggagcaacaggccgccgcacgtattgccggtttcgatgcgctgatcgccagtaccagaacgcggatccgcctgccggaagggcaagccaatattatcaatttcaatgggccgggcactgtcaaccccgtggcgacaccggaaagcgttcacgcgcggctgttgaaatcactgggattcaccctcgaagcgcccgaccccgcatggcaaagtcatctcacccgctcgggcgattttatctgggttgaatatgaaaacctgacccagctgaaagccgaaacaacctttttgctgagcgccagcgatgtgcgtatagacgaatttatcaacgatcctctgttacagcgtttgccttcttcccgcgcccgccaggtctacagcctggggcctcacgcttttcgcgtcgatttctacagcgccagtgaaatggttaaggcaatcgccgatcgttttgtcgttgaaacgccgtccgctgcggccacgccggaggcgcgctga

SEQ ID NO: 23025 - DNA, 4395 bp, Escherichia coli
atgaaatcattgactccgatgcaggcggcctcctgggtcggcaggcaatcgccccaggagttgggcggcgttgccgctcacttatacgccgaatttgacggatttattcatgacagcgcgcgcttccggcaggccgtaaacgcgctgtatgcccgccaccccatgctgcggttgcgcatcagcgatgaggggcagcagtacgtagtggcggagcatcctccgacgagtcttgatgattaccgccactgcaccgacaaagacatccagatccggctggcggagaaacgtcaccgcatggagaaccagcaactgctgcgcgaccggggcgtgccgtgtgaaatcagcctctcattgctgccggaagggaaaagccggttgcatatcgatctggacatgatcgccgctgatgccgggtcatttcgcatcgttatggaggatctggcgcgtttttatgcctctccgcccgacgatattattccgcaacaggaggtggcatggtttcactatctggaccagcgtcttcacgatccgcagttgcagacgctcagaacgcgcgaccgtctctggtggcaggcgcaattaccgacgtttccccctgctccgcgtcttttttcaacgaaacaacgctgtcaaagccgccgattagccctgtctcttgaccgcgaaaccagcctcgcccttaacgcctgcgcacgtcagcatcatctgacgctcagcgcgctgttcctgtcgctgtttacgctgacgattggtgaaggacttgcccagccagctctgcgcatcaacgtgccgacctttttccgcgatccggatttcccccaggtggaacaactggtgggcgattttacggatttgctgctgttcagcggcgaaatccgcccggcgatatccctgctgcaccacgcacgagagacgatggagcagcttcatgaacgggtcgcacacggccactatcctggtgtcagcgttatgcgcgacctgtcgcgacagcacggtagcctgcaatactcgccggtcgtttttacggctggcttcggtattcgcggcggcgcgctgttctccgaacgcgtccgcgaacagctcggtacattgaattgggtgatatcacaaggcccacaggtcgcgctggacgcgcaggtcgcctggtatggcgacgagattttgatcaactgggacgtgcgggccgacgcctttaagccagggctgcctgaacgcctgtttacgcattttcacgcgctcgccagtcgactggcgcagcagcccgaccatatccacaatccggtttcgcagtggcttgcccgcccgccggaggtcgaacacaatgcccgattcggggaggaaaggatgacgagacccttaacgccgttacagcaggcctatctgctgggaagaagcacgcagtggccgctgggcggcgtgtcgatgcatgatttcagaacctttcgcggaccgctggaaccgtcgcgtttctgtcagcgcgtcgcggagctgatcgcccatttcgacgccttacgcacggtgatcgacgccgaaaaacaacagcaaacggtgctacccgccctgcccgcgcctgtggagcggatagacctcaccaccttcagcgaaaatgatgcggagcagcaactccggcagcttcaacagcgctatcagcaacgttgtcacgatctcgccttcccgccgtggaacatcgttctgatcgccatgccagcgcaaggcgggtatgtcgtctttaccagctttgatgccctgattctggacggtcaggggatctcgcacattgtcgcgcgcctgttcgataatcagcctctggagccactggtgccgcggagacccgacgtcgaatcgccgggaaccgcccacagccgcgaagcggccagagagtggtggaaagcgacgctcaacgacgcggtcacgccgtcgcgtttgccctggcaacgaccgctgagcgaaataacgcgccccgaatggcgacgtgaaagccggacgctggcggcgaacagccgaaaaaccctcacccggctcggcgctaaaagtggattattcgccaacagcgtgctgtcggcagtcgtcctcgacacgctggcgctgtgggcggaggatgaaacgctgctggtcggcgtgccctgcgcgtttccggcgacggcagaacagcccaacaacgcctcaacgtttatcgcggtacgctatcagcgcaccggcgaactggaagagaatgcgcagcgtttgcaggtggatattctccacggcctggatcatctcgcctggtcgggtgtcgatctggcgcgccagctggcgtcgcgaaacgcaaaccagcccgtgctgccgctgatcctcactaactgtctggcgtgggaaacgttgcccgccggatccgccatccgggaagaagacggtctgacccagacgccgcaggtggcgctggacgtgcgtctgatgaccgacagcgcgggcaatctgcggctggttgcggactatgtcgtacaggcgctgcccacggaaatgatacgggccgtgctggaagcaattacgcggcgtattcagttaatcgtcgaccgcgaatcgctgaatatttcgctgcgtgaggcgctctcgtattcccattaccaggcaaacacgccgatgacgactgcggtcgggtatgactttctgggcaacattgccggacatttgtttagcggtgacgacgcccgcacggcgctgatttgcggcgacagacgctggagctggaaacaactcggtcagcaggttgcgcgcgtggcaaacgggctgctggcgcgtcagctgaaacccggcagcgtggtggcgatttcactgccgcgcagcccggaacacgtcattatttcgctcgcctgcgcgctgaccgggatcgttcgcgtgccggtggacatcaactcaccggcggaacgcacgcgctatctgctggaaaactgtcgtcccgacctggtgatcagccaggaagatgcgcaggttgttggcagcgttacgccgctggcgctggtgtcggataacgactcccccccgccattcgccgggcaaagcgccagtgagcagccgtcatattatctctatacctcgggcacaacgggtaaacccaagtgcgtgatgctcaataaccgcgccaccgctaatgtgctggcgcaaactatcgcccgctggcaggtagacgagcgcgacgtgtttatttccgtcacgccgctgcatcacgacatgtccgtttttgatctgttcgccgcgatgagcgttggtgcaacgctggtgatcccggcgcaggagcaggaaaaagatgcgatcggctggagtcgtctggtagaacagcaccgggttacgctctggtgttcagtacctgcgatacttgaaatgctgctggattgtgcccaaccggcgcaacttcacacgctgcggctcgtggcgcagggcggcgattatataaaacccgctacgctccggcgtttgcgggcgctttgtcccgcgccgcgtctggtttcgctcggcggtccgacggaaaccacgatctggagcatctggcatgacatcacccccgacgacgttgagcacgttccctatggccaaccgctcgccggcaatcagtattacatctgccatgacagcggcgaacattgcccctgcggcgtggcgggccgcattcatacggctggcgtcaatctcgcctgcggctatctggaaaacggtgaacgagtcgaccatgattttgtgaatcttctcacccccgaaggtgaaaccgtccgcgccttccgcacgggcgatatcggcttttaccggcctgatggcgtcattatgttcgccacgcggatcaacggttacgtgaaaattcgcggcgtgcgcgtttcgctgccggagatcgaggacgtctttcgccagcatcccgccattcacgatatcgtcgtggtggactacgcgacggacgatgctaatgaaaaatctctcggggcgatttgccttgtcggcgaccacgtcacgccgggagcggcggaactgcgcgctttcgctcagcgctaccttccctgtacgcatatcccgggacgatttattacccgccacgccttcccgctgacggccaacggcaagatcgatcgccatgcgctgcgcgccagcctggcgcaaacgcctcagtccccatcgcctgcgctgaacgcccccgcctgcgcagcgcgtccggctattgaacaaaaaatactggagatttactgcgcggcaatgcagcagcctgcccgcgcggaatgggatgctacggtgccgttcatcgtgatggggttgaagctgaaccatctgaagacggtcagagaacgtcttaatgccgagtttggctgtcgcctggccgggcacgatctgattaagtgcaaaaatatccgagacgtttgcgcactgttgaactaa

SEQ ID NO: 23026 - DNA, 1335 bp, Escherichia coli
atggaaaggtatgatatgtcacagactattcagtccagtcactggtcgccgctgacgccggcgcagttggatttttgggaagagtttacgtttcacccccatcagccggtctcaaccgtcgcccactgtataacgttacgtggtgccattaacgaacgcgcgttgcttgccgcgcttcagcaggttatcaaagaaaccgaggtattttccgtccgctttcgcttagttggggaagacgccatgccggttcagtattgcgatccccaccagtgtcccgacgtccgtattatcgatctgcaacagcggcgctctgcgcagacggtcgcacaggccatgatgcagggtgatattgacggacaactgaatctgttgcgccagccgttggccgcggtatggctgatacggttctcgcctgagcactatatggtctatattcgtgcgcatcatattattgtcgacggtttcggcatggcgttaatagaacatcgctgcgcggaactgtatcaggcctattgcgagactacgttgacgggggttccactcagcccgtttgctgattttctcgcagaagagcagcactacgcgcgcagcaaaaagtgtcaggcggatcgcgcgtactggcaccggcttctcgaacaggcacctccattaaaggtattacagaaaggcggggaggattacgcaacagaatccctgcacagtgatacatggcttccggcctcgttcactaaacatattcttgcgctggccgagttgtgtcggattggctggcctgatgtcctgctggtcctttccgccgcatggatggcaaaacagatccctgatgtgcaacataacggcgtcttgcctgtctgggtgccggtgatgaaccggcgtggccatgcagcggccaatacaccgtcgctggcggtgaatatattgccggtatttatcactttcgatcccctggaaagtcttgttgatttcctgaagcgtaccgccatcgcgctccatgatatgcgtgcacacagccgttaccgcattgaaacgcttgccgccgatcagggcattggcaagggtatgcggtacttcttctcgccgctgattaacgttctgcctttcgatccgccggtctttgccggctgcgaaacggcgcgtcaggtgatggccagcgggccaggagacggctttaatattacctggcgcggtcgcaccgattgcagtgaacttcatgtcgatattgacgtggaagcgggcatgttcccgggactggatccgcaggccatgctcaccaacttaaccgactggctctcgcacgtcttcgcttcgcagtacgaacctcagccgttgctgtaa

SEQ ID NO: 23027 - DNA, 1245 bp, Escherichia coli
atgttaagggcaacaaaagtacgcatctatccaaccacagaacaggctgagtatcttaatgcccagttcggtgcggtgcgctttgcgtacaacaaagctctttacatcaaaaaacatgcttaccagagacacggcgtgaatttaagtccgcgtaacgatctgaaaccgttgttgtctgtagccaaaaagtcccgcaggtatgcctggctcaaagagtttgattcaatggcattgcaacaggcggtaattaatcttgatgtggcattttccaacttttttaatccgaagcggaaagcgcggttcccgacgtttaaacgtaaacacggaaaacaatcgagctatcactgtgtcggagttaaggtgctggataatgccatcaaaattcctaaactgtccccaatagaagcacgccttcatcgtgaacttcatggaaagctgaaaagcatcactatcacccgttcagcaacggggaaatactatgcttcaattctctgtgatgatggtctggaagctccggtaaaacccacgttgatatcaacagttactggcctggatatggggcttgagcactacgccatcaggtctgacggagcaaaaattgcgaatccccgccatctcatcaatgccagccgtaatctgcgacgcaaacaaaaagcgttatcccgcaagcaaaagggaagcgcgaatcgtaaaaaggccagaatccgtctggcagcgttacacgaacgggtggctaatgcccgtgctgattttcaacacaagctctctcatacaattgttgacgaaaaccaagcggtaattgtggagacattgaaaacggcaaatatgatgaaaaaccaccatctggcaagagtgacaggtgatgcaggctggcacggcttcatcacaaagctggagtacaaggccgcagaaaaaggcgtgcatctggtaaaactcgaccagtggtttgccagttcgaaacagtgccatagttgtggttacaaaatgccggagatgccgcttaacaaacgcatatggaagtgccctgaatgtggggcggagcatgaccgcgatatcaatgcagcgcttaatatccggcaaaaaggaatactggaactaaaggcggcgctgcccatggaggccagcataaatccgtcgtacagacggttgcggcctgagaagtgggaagcctcgcccgacagggcggggagtagtcaccaaatcctcgccaatacggatggcggggaaaagcctgaaggccaataa

SEQ ID NO: 23028 - DNA, 189 bp, Escherichia coli
atgttgacccgcaaaagtatcgatacagttctgctctctgttggtgctgagaagctctcacaacgtgaatgggactggatgaaaatgctcaaacccatggccccaccacctgcgatggtggcggcctccatcctgaagcgccgtggcgatacagcagcccttaccctgctacaggataccgggggttaa

SEQ ID NO: 23029 - DNA, 474 bp, Escherichia coli
atgaataccctgcacggtgacagccgatcccgtgccgtccgaacgactgggaaacgccgggatataggcgcaggccacaatgtacaacctggcaagaccacgcgctatacgcgacggtgcaaacgtggatgtcaacgcgctaatggggcaactaccgggaaggcatcgccgcctcctaaccgacagttgtccgaaaaagtgtcctgctatcacgaaaccgacctattgcacgcggcaggttcatggtatggcgccagcgcgagtatccgggtaggctgcccaaccaaggaagccgcgcgccgtggagcgcccctggtgcctgttacggccgattacacggaggcaatacgcctcgtaacggcggcaacttactggtcgatcgtgctacgacaaggcaattcgaaacaagttgcgctacaaaaatggcgactaacagcacagcggatattatcactgagccatgcatgcgcttaa

SEQ ID NO: 23030 - DNA, 684 bp, Escherichia coli
atgcccgccacgctgttatacgggcggcaggcaaacacgcctgtgcgctcgtttatgttccgtcaggaaggacgcgaagcgctgggctttagcccggaactggtgatgtcagtgacgggcaataaagtggtcactgaaccgcttgcgggcacccgcgatcgcatgggaaacccggagcataataaggcgaaagaggcagaactgctgcacgacagtaaagaggtgcttgagcatatcctttctgtcaaagaagctattgctgaactggaggccgtttgccagccgggcagcgtggtggttgaagatttaatgtcggttcgccagcgcggcagcgttcagcatctggggtctggcgtgagcggtcagcttgcggaaaacaaggatgcctgggatgcgtttaccgtgctgtttccgtcgattaccgcctcaggtatccctaaaaatgctgctctgaacgcgattatgcaaattgagaagacgccgcgagagctttattccggcgcaatcctgctgctggacgatacgcgctttgatgcggcgctagttctgcgttccgtatttcaggatagccagcgctgctggatacaggcgggggcgggaatcatcgcgcaatctacgccggaacgcgaactgacagaaacccgggagaaattagcgagcattgcgccctatttaatggtgtag

SEQ ID NO: 23031 - DNA, 1479 bp, Escherichia coli; identical to SEQ ID NO: 6748

SEQ ID NO: 23032 - DNA, 990 bp, Escherichia coli; identical to SEQ ID NO: 6828

SEQ ID NO: 23033 - DNA, 255 bp, Escherichia coli
atgaataaactccggcagctccgccgactttcgacaatgaagttatcgctggcggcgatagtttttgactcgattttcatggcggtatatgtgctcaatgagacgtggccactggaaccgctattgtatgccgggcttcggctgtgcctgacatttatgagcatggctgcaagattgatgcagcagaaagaaaccgcttcagattgtccacgccgcgcggtgcgcaaatatatggcacgcaggcgaaggcgataa

SEQ ID NO: 23034 - DNA, 678 bp, Escherichia coli
atgaataacatgacaacgaaagagcttttgacggcacttccaaaatacaaaagccataaaacagttcgcgcctcaaaaatcaaagatatcgaaattatcgccctaatggatgtggtccttttttgcaacatcgaagtcgttgagccagaaggggtaaaagtccatgttgataaaatatttttgcaaaaacaccgaccagaaattggcggatatctggtcgcttatgaggacggatctctgtcctattcaccagaaaaaacatttgaagaaggctttagtcggactaacgacttcttcgaaaatggggtatcgctcagcattgaaggtcacaatggggtgacattcattacagccagggacgtaactatttctgctggcggtatcgctactctacaagaagaaatcgaccttgaagcagccgacttttctgacgcgctgatgtggctgaaggatggcaagaaagttgcccgacgcgggtggaacggcgaaaaccaattctgctggctggttcctgaaggacagtacccggcacgaatggaagccattaagggatatttccccggcgacctcgttccgtatggtgcttatttcgccttaaaaaatgcacaaggtgtagttgttccgtgggttccttctgtaggcgacttactggcatgtgactggtttgtagtggagtga

SEQ ID NO: 23035 - DNA, 855 bp, Escherichia coli
atgtacatcatttcaagcaaaaacatgctgaaaaaagcccagtcagagggatatgccgtccctgctttcaacattcataaccttgaaactttacaggtagttgttgagagcgctgcacaacttcgctctcccgttatgctggcgggaacaccgggtacttatcgttatggcggcgtgggaagtttgatttcgttagtacaatcgctggctcgcgagtacaacctaccgttagtcctgcatctcgatcatcatgaagagtgtgatgacatttttaacaaggtccgcgcagggatccgttctgtcatgattgatggttcccatttgccatttgaagacaacattgcgcgagtgcaagaagttaccgccttttgccatcgctttgatgttagcgttgaggccgagctagggcgtcttggcggtcaggaggacgatctgctggtggatgaaaaagattcagcttatacctcaccaaccgcagcggcagagtttgtccaacgcacacaaattgactcccttgcggtagctataggaacagcacacggtttatatacgcacgaaccacgactggattttgtgcggctggaacagattcgtcagcgagtggagattccgctggtgttgcatggtgcttcgggcttatcggaacaggacgttcagcactgtattcgccgcggtatttgtaaagtgaatgtcgcgacagaattgaaaattgcgtttgccgatgcgttaaaaggatatttctacaacaatcctgcggcaaatgatccacgccactatatgcagcccgcaaaggccgccatgaaagaagtcgtaacccgtattattggcgtctgtggtagtgaaggaaaaatttaa

SEQ ID NO: 23036 - DNA, 468 bp, Escherichia coli
gtgagcagagtcgccgcgattatttatgctctggttatctgcaccatcgtctgcctgtcgtgggcggtcaatcattaccgtgataacgccattgcctacaaagaacagcgtgataaaaaagtcagtgagctgaagcaggcgaacgccaccatcgctgacatgcagcagcgtcagcgtgatgttgctgcgctcgatgcaaaatactcgagggaattagccgatgcgagagctgaaaatgaaactctgcgtgctgatgttgccgctggtcgtaagcgcctgcggatcaacgccacctgctccggtaccgtgcgtgaagccaccggcacctccggcgtggataatgcaaccggcccccgactggcagacaccgctgaacgggattatttcactctcagagagcggttgatgctgatgcagaagcagctggaagtggcgcaggaatatatccgcactcagtgcctgaaataa

SEQ ID NO: 23037 - DNA, 294 bp, Escherichia coli
atgaaagtgacacccgatcgcatcacggactacaaagcaccatcggcagaagaggctgccgtcgccagtcaggccgcgaagcgtccgccggtagtcaactatccgggggaaggtttccgggaaatgacaaaggcgcagtgggccgccctgccccgggactgtaaggccgtgcgcagtgtggcagagacagaagaccacggggcataccgctaccgccgcacaatggacaataatttccgcctggtgaatgtgtatattaccgacatgaaaatcacggaaatcccacagaaataa

SEQ ID NO: 23038 - DNA, 150 bp, Escherichia coli
atgggtggccagtatctgctttttgccgccatcttcaagggggaggggggggatcaaatctctgcaacccaggctgctcagtaccgccgcctgacctttcctcgcatcgccgcaggttcgaaaacttttttttggaatgtgattaaatga

SEQ ID NO: 23039 - DNA, 516 bp, Escherichia coli
atggataaaaccagaaaatatgacagagccttacaacttgaaatcctcaatgcccttatagattgcgcgcctaactctttaaacaaggcacaggagcgagacctcattgagaagtttgacagttacgatcactttgtggcgtgcatgttataccttgaaatgcatggtctcgtttccacccccttcatacgcagtgacaccatggctggcgttgagtttatcttctgtgcccctaactgctacattacagaaaaaggaattgattttcttctcgatgatggcggcttaagtgcgatccttaaagttcagacctttcggttacacagtgacacgattgttgcccttgaggatataatccgtgtcgcaaatatatctgaagatcagaagaagggattgatttcaaaactccgagagcttccgggagacgccataaaacatttgaccctacagttactgactcagggggttctgaatctgccgaacgcacttcgactaattcaaacaaccctccagtag

SEQ ID NO: 23040 - DNA, 3888 bp, Escherichia coli
atgaataaaatatactcccttaaatatagtgctgccactggcggactcattgctgtttctgaattagcgaaaagagtttctggtaaaacaaaccgaaaacttgtagcaacaatgttgtctctggctgttgccggtacagtaaatgcagcaaatattgatatatcaaatgtatgggcgagagactatcttgatcttgcacaaaataaaggtattttccagcccggagcaacagacgtaacaatcactttaaaaaacggagataaattctctttccataatctctcaattccggatttttctggtgcagcagcgagtggcgcagctaccgcaataggaggttcttatagtgttactgttgcacataacaaaaagaaccctcaggccgcagaaactcaggtttacgctcagtcttcttacaaggttgttgacagaagaaattccaatgattttgagattcagaggttaaataaatttgttgtggaaacagtaggtgccaccccggcagagaccaaccctacgacatattctgatgcattagaacgctacggtatagtcacttctgacggttcaaaaaaaatcataggttttcgtgctggctctggaggaacatcatttattaatggtgaatccaaaatctcaacaaattcagcatatagccatgatctgttaagtgctagtctatttgaggtcacccaatgggactcatacggcatgatgatttataaaaatgataaaacatttcgtaatcttgaaatattcggagacagcggctctggagcatacttatatgataacaaactagaaaaatgggtattagtcggaacaacccatggtattgccagcgttaatggtgaccaactgacatggataacaaaatacaatgataaactggttagtgagttaaaagatacctatagtcataaaataaatctgaatggcaataatgtaaccataaaaaacacagatataacattacaccaaaacaatgcagataccactggtactcaagaaaaaataactaaagacaaagatattgtgttcacaaatgggggaaatgtcctgtttaaggataatttggattttggtagcggtggtattatctttgacgaaggccatgaatataacataaacggtcagggatttacatttaaaggagcaggaattgatatcggaaaagaaagcattgtaaactggaatgcattgtattccagtgatgatgttttacacaaaataggccccggtactctgaatgttcaaaaaaaacagggggcaaatataaagataggtgaaggaaatgttattcttaatgaagaaggaacatttaacaatatataccttgcaagcggaaatggtaaggtaatactaaataaagataattcccttggcaatgatcaatatgcggggatattttttactaaacgtggtggcacgctagatttaaatggacacaatcagacttttactagaattgccgccactgacgatggaacaacaataactaactcagatacaacgaaagaagccgttctggcaatcaataacgaagactcctacatatatcatgggaacataaatggcaatataaaactaacgcacaatattaattctcaggataagaaaactaatgcaaaattaattctggatggtagtgtcaacacaaaaaatgatgttgaagtcagtaatgccagtcttaccatgcaaggccatgcaacagagcatgcaatattcagaagcacagcgaatcattgctccctggtatttctttgtggaacggactgggtcaccgttttgaaagaaacagagagttcatataataaaaagttcaattctgatcacaaaagtaataatcagcagacctcatttgatcagccagactggaaaaccggggtatttaaatttgatacattacacctgaacaatgctgacttttcaatatcacgcaatgccaatgttgaaggaaatatatcagcaaataaatcagctatcacaatcggcgataaaaatgcttacattgataatcttgcagggaaaaatattactaataatggttttgacttcaaacaaactatcagtactaatctatccataggagaaactaaatttacaggtggcatcactgcacataacagccaaatagccataggtgatcaagctgtagttacacttaatggtgcaacctttctgaataatactcctataagtatagataaaggagcaaaagttatagcacaaaattccatgttcacaacaaaaggtattgatatctccggtgaactgactatgatgggaatccctgaacagaatagtaaaactgtaacgccgggtctccactacgctgctgatggattcaggctgagtggtggaaatgcaaatttcattgccagaaatatggcatctgtcaccggaaatatttatgctgatgatgcagcaaccattactctgggacagcctgaaactgaaacaccgactatatcgtctgcttatcaggcatgggcagagactcttttgtatggctttgataccgcctatcgaggcgcaataacagcccccaaagctacagttagcatgaataatgcgatctggcatctaaatagccagtcatcaattaatcgtctagaaacaaaagacagtatggtgcgttttactggtgataatgggaagtttacaacccttacagtggacaaccttactatagatgacagtgcatttgtgctgcgtgcaaatctggcccaagcagatcagcttgttgtcaataaatcgttgtctggtaaaaacaaccttctgttagtcgacttcattgagaaaaatggaaacagcaacggactgaatatcgatctggtcagcgcaccaaaaggaactgcagtagatgtctttaaagctacgactcggagtattggcttcagtgatgtaacaccggttatcgagcaaaagaacgatacagacaaagcaacatggactctgatcggctataaatctgtggccaacgccgatgcggctaaaaaggcaacattactgatgtcaggcggctataaagccttccttgctgaggtcaacaaccttaacaaacgtatgggtgatctgcgtgacattaacggtgagtccggtgcatgggcccgaatcatgagcggaaccgggtctgccggcggtggattcagtgacaactacacccacgttcaggtcggtgcggataacaaacatgaactcgatggccttgacctcttcaccggggtgaccatgacctataccgacagccatgcaggcagtgatgccttcagtggtgaaacgaagtctgtgggtgccggtctctatgcctctgccatgtttgagtccggagcatatatcgacctcatcggtaagttcgttcaccatgacaacgagtataccgcaactttcgccggccttggcaccagagactacagctcccactcctggtatgccggtgcggaagtcggttaccgttatcatgtaactgactctgcatggattgagccgcaggcggaacttgtttacggtgctgtatccgggaaacagttctcctggaaggaccagggaatgaacctcaccatgaaggataaggactttaatccgctgattgggcgtaccggtgttgatgtgggtaaatccttctccggtaaggactggaaagtcacagcccgcgccggccttggctaccagtttgacctgtttgccaacggtgaaaccgtactgcgtgatgcgtccggtgagaaacgtatcaaaggtgaaaaagacggtcgtatgctcatgaatgttggtctcaacgccgaaattcgcgataatcttcgcttcggtcttgagtttgagaaatcggcatttggtaaatacaacgtggataacgcgatcaacgccaacttccgttactctttctga

SEQ ID NO: 23041 - DNA, 147 bp, Escherichia coli
atggccggtctggtctgccagattgaacgcagtgttcatgcattacgtgagacgtttgaccttgaggccgctccatcgggtaacgatgcccccgcctggctgaccgaaccggaacctgaaatcaaccgaccggaggatatgcagtaa

SEQ ID NO: 23042 - DNA, 240 bp, Escherichia coli
atgaaaatttctgatattgaaaaaaacatatataaaggactagctgaatttatttcacaaaaaatcagagatgaacatgatatatgccttggacagtttgaatcagaggaattacttgatgagattcttaaaagagtaatcccagtcatatataatgtggctattgatgatgctataaaatcagtaaggaatgttggggatagattagaggaggaattagatatgaggaaggtagtgtga

SEQ ID NO: 23043 - DNA, 894 bp, Escherichia coli
atgaataatcttataaaaaaggaaatcatagaaaaatttaagaaatataatttccagaaatatccgtttgtattcacggatgttaattataaaaacttaatcaactggaatgatcttaataaattgcttgaaaaagatatattgcactatcctagagttagaatggcaaatgacaactttcccgaaattagggggtataaaggatttataagatacacatatagccaaacaggcgatagaacaccacatataaatcgccatcagctatataaatgcttacgtgatggcgcaacccttatagtagatcgatgccagtcattctttgaatctgtagatgaaagcagactatggttatctaaagagttagaatgtacatgtagtgctaatctatatgctgcatttacagcaacaccaagctttgggcttcattttgacaatcatgatgtaatagctgttcaaattgagggaataaaaaaatggaaagtttacaaccctacctattcataccctctcgaagatgaaagaagcttcgattatctaccacctaatacctccccagattatgagtttgatataaccccaggtcaggccatatatcttcctgctggatactggcacaatgttacgactcagagcaaacactctcttcatatatcttttacagttataagacctcgtcgattagaactatttaaaacattatttgatgaattaaaaaacaatccatatatgcgggaacctatagagcatggtgattcattatctgataaagaaaaaataaaaactataataactaatgctataaatagttttgatattcagtttgcagaaaacatgcttaaagctcaaagcagaacttatcgctataaaaaaataaaacttgaacatatataa

SEQ ID NO: 23044 - DNA, 1593 bp, Escherichia coli
ttgaattttattgaaaagtacatcatcacatttaataaatgtaatttgttttttattatattattatcaactataagtagttttcttttcgttctattcggatatttaataaaaacagttattgacaataaagattcaataggagaaataaactcattattaatatttatagcatgtttcttatcaattagattccttatgcctgctggatatagcatatcggaatacttgactcaaaaaacaaatatagaattatctgtaaagcttagagagcaagttattgataatatacaaaattctcaccaagagcattttttaaagaaaaataaaggagaactaaataaggttatagaaagcatgctttcttctgcatcatcattattttatacaatatgttctgatgtagtaccattattaatacaaatgattggaataatcataacaatttgtataagtgttaatacattaatagccattgagtttataataataatggcaatctatataatatttgtcataaaaatgacacaacgtagatttccaatgatgaaatcagttgcacttagctccaaattcgcatctggaagaatgtttgatatgatgcacatgtatcctatggataaagctttccataccacggataaaagtcgtaaacgagtaattcaagctgtaaatacacattcagaaaaacaaagaaaagtaaataatgaatttttcctgtttggtatcagctccgcttttctttcagtcatttttagtagtctgattatcctatcagcatactggatgtttcttcatggtagagcaagccgtggtagtattattatgcttgccacttttttattccaagtttttctcccattaaatcgcattggttatctatttagacaaataaaaatggcaagaacagaaattgatttatactgtgccgaaataaacgacataaaaaaaacaaattacacagacaagcaatatcttcatgtaaaagacaatatttgcaatattgaaatatacaacaaatcattcaaccataaattaatattaacaaaaggcgttgttacctttataaccggtgagaatggttcgggaaaaacaactattgcaaaaattctctctggcaatataacaacagaagaaaacacaataaaaatcaatgggatacaacaagaaaaagcaaattctccttttgttaatgtcttatacgttcctcaagatctagatctcatgcctggaactatagaggaaaatatattacattattccggcattaataatttaaatacaattaaaaagctgctacacagatttaagttcgacaaaccactagattatgagatcaaaggttacggacataatttatctggtggacaaaaacaaaaattaggagtatctcttacatctggaaaaaacgtagacttgattattttcgatgaaccgacaaaagggtttgattcacttggtataaaaataatcagtgattatataaaagaggaaaacaaggaaaagcatatcattgttatatctcatgatgaacaacttataaataatatacctaaagcacagattatagatatcacaaaacatgaggtttaa

SEQ ID NO: 23045 - DNA, 699 bp, Escherichia coli
atgctacaacataagatgaacagcagttcttatgcaaaagttcataatgttagctcattagaagatatcatgagttatcacaatgatgatgttcttctaaaatttcgtaaagaatggaatgtaacaccagaagaagctgatgatatctttaatgaaacaaagaaattcatctggctagcctcaacatgcctaacggaatgctacaatataaaagttcacgagcaattacaaattatagatgaaatgtggcatacgtttattcaatttacagatgcttataccagcttttgtgaaaaatatcttggtgcttacctccaccattatccaaatacaaatgacatgctaaaaaatgagataaggcatgttaatgagcatggtataacattccaagaatatcgttttaacgaatataaaaatcaaattgaaaaaatcgctttttacctaggtcatgaaactgtcgcaaagtggtatggtgattatgctgtaagatacagcataaagaacattaatactataagaattccaaaagaatccatatccagtgattcttacatcgaaaaagtaaagagtatcactcaccttccagccgcagaatttgtaaaaataataatgcgaaaagatgtttggaatgataatggttctgtttgtggttgcagcggtaaaggatgtggcgctgggtgctcatgtaattctagataa

SEQ ID NO: 23046 - DNA, 1581 bp, Escherichia coli
atgaaacaaaagaaagcctggagtttttttcagagcctggggaaggcatttatgtatcccattgctctgctaagtgtatgtggcatgatgctagggctgggaagtggtttagccagtgatgatatggcaaagttaattccatttctgactattccaataattaaaaccatacttgatttcattgttagccttggtttgtttgcctttgttaatttacctgtattgtttgcgatagcaattcccttaggattattaaaagagaaagaggataaagcctatggcgctttttctggcttaattggttttatggcgatgcatctgggaacgaacttttatcttaaacagcacgacttattggtcgctgctgaccaaatgtcgacacatgggcaaaccatcattctggggatccagtcctacaataccagcgtgttagggggaattgttgctgggttattagtcgccagcatgtataaaaagatcgttaatttacgcattcctgaatcattaggtttttatagcggcccacgtctggtgcctatcattacactgattgtgatgagtggatttggtctgatcattccttttatctggccgccgtttttcaatctcttcatgctcattggccactggatatcaacttccggtcctgttggttatttcttctatgcagttgccgaacgcgtgacgattccttttggcttaaaccatctggtgacgtcagttttccgctttacgccaatcggcggttcggctgtgattggcggcgaagaatattacggcaccctgaacatgtttatggcatacgttaaagagaatgcggtcattccgctggatttggcggggaaaatggagcagggcaaactgatgattcagtatggtctggctggtgccgcgctggcgatgtatcgcactgctcatgctcaaaacagaaaggctatcaaagcattgcttatttccggggtgcttacggtgattattggcggcgtcagcgaaccgattgagtttctgttcttatttgtcagtccactgctgtttgtcttccatgcctttatgaatggattcgctaacatggttctgccatatatgggcgtgaagatgggatttactggcgatctgattcaatttattagctttggcgtattgcgtggcacaagaacaggttggccgatcgcggtgtgtgtcgaagtggcctatttcttcatttattactttgtgttccgttggaccattcttaaatttaacctgatgaccgtaggccgtgaagagtccagtcctgtcacgctgaacgttcacgaagatacggctatagcggatatcccaactcctgataaatcagagctgcaagcggcggagcagatggttaaggcacttggtggtaaagagaatattaagtcactggataattgcgtaactcgtttacgtttaacaatcgcagatatgggattgattgacgaagttgcaataaaaagagctggcgggattgcggttgttaaacttgatcaaaataccctacaagtcattatcggtactaaagtcatcgccttgcgtcgggatatggataactacatggggatatgctga

SEQ ID NO: 23047 - DNA, 303 bp, Escherichia coli; identical to SEQ ID NO: 7218

SEQ ID NO: 23048 - DNA, 999 bp, Escherichia coli
atgaaaaatcctgaacttaagaatctgacggattactctccagcagataaaccgtgggatgaacaccgaagcttttccgacgatgtgggcggtatttatctgcgtgctgccggatttgagcactacggcgaacgtgtcggggcttgtagtggtattttgcggtttgggtggtcaacaaacacagagaccggagaaacgcgcctgcggttgcgtgatgcacggttctgtcgcgtccggcactgtccgatctgtcagtggaggcgttccatgatgtggcaagcccgtttctatcagtccctgccaaagattgtgacggaacatcccggcgcgcgctggttgtttctcacactgacagtgcgcaactgttccattgacgcgcttggtgagacgctgaccgcgatgaatgcggggtttaagcggttgaaagagcgtaaggaatttcggcatgtgttgggctgggttcgtaccacggaagtaacgcgcggcaaggatggtagcgcacatccccattttcacactctgctgatggttcccccttcgatgttgtccggccgtgagtatgtgaaacatgcccgttgggtggaactgtggcgtgattgtctgcgggtggcgtatgacccgaatgtggatatcagagtggtgaagtcacggaaaccaaaagacgatgaatctttaccttgtgttgttgcggaacagctgcgcagcgcggtggttgaaactctgaaatattccacaaagcctgctgatatgctggctgatcctgaatggttcctcgaattaacacggcaggtacacaagcgtcgttttgttgctacggggggagcgcttaagaacgttctgcaactggagcgggaaacgaacgaggatttaatcatggcggatggcatggcagagggtacagatgacggttcccgtctggcgttttcgtgggtgccggttgtcaaaaaataccagcgagatcgggcgaaagataaacgtcagctaagtggcgaggattga

SEQ ID NO: 23049 - DNA, 303 bp, Escherichia coli; identical to SEQ ID NO: 7218

SEQ ID NO: 23050 - DNA, 999 bp, Escherichia coli; identical to SEQ ID NO: 23048

SEQ ID NO: 23051 - DNA, 435 bp, Escherichia coli
atggctgtgcgtgcgcggttatacgattacacatcctgtcccgatttctgcgggtttgtgtcaccggaacactggcgcaatgtcggcagtttttgcgccgcgccgccctccacggaagcgcgcagttctggcaaccggacagcaaatcattctgccgttttcgtgccgcagctgttccgcgcgatcgacaaactggctgtcggggaatctcacgaagtgcgcacttatacaatctcaacttcgtttcgattgtgcgcggtctgcgacgcggtgaaaaccgcagataacaggcaaaaaaatccccctgtgtcagggggccgtcaaagtcaatttcctgatgatagttgttttgaggtgttgctatacccgctcaatttgccgcaggaacacagcaaaaacaactccgatgacgggacaggatgtgtaatcgtataa

SEQ ID NO: 23052 - DNA, 534 bp, Escherichia coli
  misc_feature (505)..(514): n is a, c, g, or t
atgggtgacaaaactgttgccgttgaggcatttgaaggcaacaatctggttctgattgatgaagggcataaaggcaccggaagtgctgctggtgcctggatgcgccgtcgtgacaaattaacacgtgacggatttgcgtttgaatattcagcaacttttggccaggcagtagccggtggcaataatgttgaggcagttgaaacagaaattcagaagaaaaaagcaaagctgctttttgaaacaacggccttaggtaaactgaacgaagaagagttagcgcaaatagcattaaccagcgaagaaaaacgagatgcgcgtattcaggcgacgcgagaggtctatggaaaatcgattctgttcgattactcctataaattcttctatgaggatggttatggtaaagaatcactgattcttaaccttaatcctgaagaggataaaaaagatgagcgtcggtatgagtattttaccgcgtgtttgctcagcttttatcagcaacaatatnnnnnnnnnntaagaataaagaaaaattaa

SEQ ID NO: 23053 - DNA, 843 bp, Escherichia coli
  misc_feature (741)..(750): n is a, c, g, or t
atggctaaaaaaccaaccaccggtaaagctgttaaaaaagagacaaacagcaaactgagctttcataagcaactggttttgaaccgctttatgttccatttttttaaagatggcacattgcaaggtttaaagaatcggttaggtgaagatcgctttgaaggcatccatgaagatggccaaagcttgttcttccatgagctgagtaactatttattcgaggtcgatcttatcgatctcgatgaactgcgtcgttacgatctcaatatcgtacagcactggcagcagataactgagcaccgtaatcgcaaagaagacaccgtgctgaatatgaaatattttcagtacttgtcgcttctgtttaccgagatctacctggactggtacttcaatcgtaaacagcaattactcgatgggctaaataacgagctggcagcatacaatgctgaaaatgataaaacagcaaaagaccgggctaatcagttcaaatcatacattctagatgacttgaataaacttgcatactggaacgctaccggttcgggtaaaacactgctattgcatgtcaatattttgcaatatttacattatttccagaacggtaatacccaccattacccggataaaatcatcctgcttacgccggatgaacgcctgtcgaagcaacatttagatgagctggaaaactcaggatttacccaataccagttattcgataagagtaaatctgcgcccttcaaaggnnnnnnnnnncgattgaagttattgatatcaataaacttgccgatgaaatgggtgacaaaactgttgccgttgaggcatttgaaggcaacaatctggttctga

SEQ ID NO: 23054 - DNA, 282 bp, Escherichia coli; identical to SEQ ID NO: 7228

SEQ ID NO: 23055 - DNA, 531 bp, Escherichia coli
atgttaaaaccctcttatacgatagaatgggaagcaaattttaaggcttcagttcggtgttgtaatactcttaccatctggcttacctcttgttcgacggttttatccaccctttgcaatactgaaagcatttgttcacgcgtttttgatagattactcatgtcctgttgtaaaattgccatgtcggcagagtttccagcaacaaaacaattcatcgtcgatgttgctattgcacagatgagtaagcctattttctccaggccattacttattttggcaatcaacttcaacactacggctgatgtttgtagcacgctgcatacgctgtctaatacctttataatattttttgaaacggaattaataatggattcaatggttgattttatagtgcttgttatttctttggtgacttcttcggcggctgtttttgataatgcagaaacaacggcccctattgctacagaacatattacagctgcaccaatcattactgtcgccatgacaatagaagcggctgcacttgcgtaa

SEQ ID NO: 23056 - DNA, 327 bp, Escherichia coli; identical to SEQ ID NO: 21877

SEQ ID NO: 23057 - DNA, 177 bp, Escherichia coli
gtggcagcccgtaatacgtcaggagacgcgggaaaagtgaattcccacacgcgttataaacttacccttgcggagctggaagcctttaactctgccgttgacaaccggctggcagaactgacaatgaacaaactttacgatcgcgcgccggcttccgtctggaaatatgtcacctga

SEQ ID NO: 23058 - DNA, 222 bp, Escherichia coli; identical to SEQ ID NO: 6534

SEQ ID NO: 23059 - DNA, 447 bp, Escherichia coli
ttgctcgttgttgccataggattgtttgcggtcacgctagtaccaacggtaaaatttatgcgtaggcatttaaccgtcgggaaaagtcgggctgtaatgctctcatcattcctgattgtctatgctgtcaggtttcatggcgtgttttcagatttgaatggaagtggatatacgattaacggctataacacagtatggacattcttcttcctgtttgcctgccttttgacttatctcggttgttccgggaacagagaaaactatggtacatatatacctccagccactgcgcatcctaatggtaataaagcctatgcttcccaatcagagattgataccgatattgctgtgaaaggatcaagtgtgttattcgatccaaatctggatattgtggaacaacagcgttatcgggatgctattgaaaagcggaataatgatagcttgtaa

SEQ ID NO: 23060 - DNA, 312 bp, Escherichia coli; identical to SEQ ID NO: 7309

SEQ ID NO: 23061 - DNA, 216 bp, Escherichia coli
atgaaagatgttttagacactttgcgccaagtgcgtgaaaagagcaaacacactgtagacaatagctctttgaaagaactggatgatgcgattctgacccttgaaaagagaatcgaggagaattctaaaggccacacagccttagattatctttcttatatcgcgaagatctttgctttaattaaacttctgagcggtgattctgattttcattga

SEQ ID NO: 23062 - DNA, 264 bp, Escherichia coli
atggaaagtatcttagctttattcgaactgataatggtgatgttaaatttttggggcaatcagagccaggtcatgcttttactagccctgatggtgaaattaacgataactactttgatcctgaatcccgtccctggaataaattaccaacagggacttattcaaaatggtcaccatggtataactgctatggcattgccgggaaaaaatgtttttcgttttcattacgaccagccgaagcagaaaaagattcatttgctctga

SEQ ID NO: 23063 - DNA, 699 bp, Escherichia coli
atgcaggatatccggcaggaaacactgaatgaatgcacccgtgcggagcagtcggccagcgtggtgctctgggaaatcgacctgacagaggtcggtggagaacgttattttttctgtaatgagcagaacgaaaaaggtgagccggtcacctggcaggggcgacagtatcagccgtatcccattcaggggagtggttttgaactgaatggcaaaggcaccagtacgcgccccacgctgacggtttctaacctgtacggtatggtcaccgggatggcggaagatctgcagagtctggtcggcggaacggtggtccggcgtaaggtttacgcccgttttctggatgcggtgaacttcgtcaacggaaacagcgatgccgatccggagcaggaggtgatcagccgctggcgcatcgagcagtgcagcgaactgagcgcggtcagtgcctcttttgtactgtccacgccgacggaaacggacggcgctgtttttccgggacgtatcatgctggccaacacctgcacctggacctatcgcggtgatgagtgcggttatcacggtccggcggtcgcggatgaatatgaccagccgacgtccgatatcacgaaggataaatgcagcaaatgcctgagtggctgtaagtttcgcaataatgtcggcaactttggcggcttcctttccattaacaaactttcgcagtaa

SEQ ID NO: 23064 - DNA, 300 bp, Escherichia coli
ttgctgtccgcacaaggggcaacgctgttaagaacagcaatgctggattattataaccaagacactacgggaacctcggggatagtcggcatgggattcaacaatgaagattccattacagaccttcgtgagggcagctttaaaatgccggacgggacaacattcagcgatcctgtcatggcaatgtcagacaatggtatgcaggctactattctgacctctatcagaagcgggtatgcgaagggtatcactgtcagaccccgtagcattgcacttaattacattgtgagggcagtttaa

SEQ ID NO: 23065 - DNA, 534 bp, Escherichia coli
atgttgcactgggcaaataaggaccagtactacattaaaagcggtgaaaactttgctaattattcatttaaattagatgatggtcgtaaagttagctttaaattgctcgcagcggacacagcaaaagataaccgtaaagataatgaattagatcgctgctttgtacttattgagccgcatgttcgtaccaaaattgatgaagaaggcgatgagtacgaacaagaatataagccagtagaagtggtgaaaacttcatctgtggttgacggtaaactcgttgaaacagaagagttagttattcacttcgaatataaggccatgaaaaagggcactaagcaggatgctttagtgcagtccgctatttcaacaattctggctgataaaacagttcaacagcattgggttgatcttgctaaacgtgcgccaacagaaaaaaatccgtcacgtacagagttggagcgtcatcttacaacttatacccagcgtaatacagcagactactttattcataaactgtctcttatacacatctga

SEQ ID NO: 23066 - DNA, 444 bp, Escherichia coli
ttgcctgttggtgtaccggttccatggcccaccgccacaccgccagcaggctggttacagtgcaacggacgcgcctttaccaaagaacaatatcctgttctggccagagtctacccgaccctccgtcttcccgatttgcgcggtgagtttatccgtggatgggacggtggtcgcaaggttgataccgggcgtgcgctactttcatttcaggaagggactatcgtatccggttttgatgataatgataccggagatatcagttcgctcggctctacacaatacggatttggtgacgctttaacctctaatcaactgggggtcataaatggcaaaaagtggatatttgatgcatcctctaaaggtgcacaaagatatgactggtgggcttatgtatcagctcgcccccgcaatatcgcatttaactatatcgtgagggcggcgtga

SEQ ID NO: 23067 - DNA, 189 bp, Escherichia coli
gtgacttcagcatttgcgctggtgatgaccgtttttcttataacgggtgagccacaaaatgtgattaccggaatttatgacagtaagtcatcctgcattcaggtaagggacgaacaaaaaatccccggtgaatgcctcccgttaaaaaaagtatcgctgaacctgaataacgaaataccggctggataa

SEQ ID NO: 23068 - DNA, 324 bp, Escherichia coli
atgtatcccaaactggcaaaagcctaccccaccaataaattaccggatttacgcggtgaatttatccgtggctgggatgatgggcgcgggattgatgcgggacgtaccctgctttcagggcaggatggtacaagtttttctcattacggaggtaatttcgacattgggtctggtcattcaatcaataactatgaccaaattgtttctaaccaaccaggattttcccgtttttcatttgcagggccttcacgaggtgatggggttaattatgtaaccattcgtcctcgtaacattgcgtttaattatatcgtaagggcggcatga

SEQ ID NO: 23069 - DNA, 327 bp, Escherichia coli
atgacactgcaggttgaattctggacggtggtgggctttctcatcaccttcctgagctttgtcggcggtatggccaaatggctgttcaataaagcggaggaacgtcaggctgcacgttttgcctctcttgagcagtcactgcagcagtccgcctccagttggggcgagctggaaaaagaattgatgcgatttaaagcggatttaccgctgaattatgtccgtcgcgaggattatatccgtggccagacagtcatcgaggccaaactggacgcactttacaacaaactggaagtggtacagcagtaccgcaataccggaggtcaataa

SEQ ID NO: 23070 - DNA, 894 bp, Escherichia coli
atgacgaatttaaaagcagttattcctgtagcgggtcttgggatgcatatgttgcctgccactaaggcgattcccaaagagatgctaccgatcgtcgacaagccaatgattcagtacatcgttgacgagattgtggctgcagggatcaaagaaatcctcctggtaactcacgcttccaagaacgcggtcgaaaaccacttcgacacctcttatgaattagaatctctccttgaacagcgcgtgaagcgccaactgctggcggaagtacagtccatttgcccgccgggcgtgacaattatgaacgtgcgtcagggcgaacctttaggtttgggccattccattttgtgtgcgcgacctgccattggtgacaacccatttgtcgtggtactgccagacgttgtgatcgacgatgccagcgccgacccgctacgttacaaccttgctgccatgattgcgcgcttcaacgaaacgggccgcagccaggtgctggcaaaacgtatgccgggtgacctctctgaatactccgtcattcagaccaaagaaccgctggatcgcgaaggtaaagtcagccgcattgttgaatttatcgaaaaaccggatcagccgcagacgctggactcagacatcatggccgttggtcgctatgtgctttctgcagatatttggccggaacttgaacgcactcagcctggtgcatgggggcgtattcagctgactgatgccatcgctgaactggcgaaaaaacagtccgttgatgccatgctgatgacaggtgacagctacgactgcggtaaaaaaatggggtatatgcaggcatttgtgaagtatggactacgcaacctgaaagaaggggcgaagttccgtaaagggattgagaagctgttaagcgaataa

SEQ ID NO: 23071 - DNA, 138 bp, Escherichia coli
atgtttgagtttaatatggcagaacttcttcgccaccgctgggggcgtctgcgcttatatcgtttcctcggttctgttttgaccgattaccgaatactgaagaattacgccaaaaccctgacaggaacaggagtatga

SEQ ID NO: 23072 - DNA, 384 bp, Escherichia coli
atgcgtgatattcagatggttcttgagcgttggggtgcgtgggcggctaataatcatgaagatgtgacctggtcgtccattgccgccggttttaagggattaattccttcaaaagtaaaatctcgcccgcaatgttgtgacgatgacgcgatgatcatttgcgggtgcatggcccgtctgaaaaagaacaacagcgatttacacgatttattagtagattattatgtatgtggtatgacattcatgtcactggcaagtaagcattgctgctcggatggttatatcgggaaaaggttacagaaggctgagggcataattgaagggatgttaatggcattagatatccggttagatatggatatcgttgctaataattctaattga

SEQ ID NO: 23073 - DNA, 672 bp, Escherichia coli; identical to SEQ ID NO: 8037

SEQ ID NO: 23074 - DNA, 489 bp, Escherichia coli; identical to SEQ ID NO: 7638

SEQ ID NO: 23075 - DNA, 315 bp, Escherichia coli; identical to SEQ ID NO: 5096

SEQ ID NO: 23076 - DNA, 732 bp, Escherichia coli; identical to SEQ ID NO: 14583

SEQ ID NO: 23077 - DNA, 330 bp, Escherichia coli; identical to SEQ ID NO: 8750

SEQ ID NO: 23078 - DNA, 450 bp, Escherichia coli
atgatcccggatgcaatcaccttcactggcatctgttactcacatcgtgtctttgttgcgttgaatgaaaaacctaatgtgacagcaatactttgtggtggtacgtatcgtgccagaagtgatgctttttacgatgccagtaactcttcgccattagactctctcaatccgcgaaaaatatttatttccgccagcggtgtacatgatcactttggcgtcagctggtttaatcccgaagatcttgccactaagcgtaaagcgatggcccgtggactaaggaaaattttgctcgcccgccacgccttgttcgatgaagtagcctctgccagcctcgcaccgctctctgcatttgatgttctgattagcgatcgtccgttaccggcagattatgttacgcactgccggaatgcttctgtaaaggtcattacacctgattcagaagacgaatga

SEQ ID NO: 23079 - DNA, 192 bp, Escherichia coli
gtgcgtatacgtgttttggttgatacatccggcaaagtcattgatgccaaagtaaaaaaatcgagtggcagcaaaattttagataaagcagcaactaaagcctacagcttatgtacgttcaaaccagcaatgaaagatggcgtgcctcagcaagactggtatgaaattgaatatccattcgtaattgaataa

SEQ ID NO: 23080 - DNA, 1263 bp, Escherichia coli
atgatcaagattggcgttatcgccgatgattttaccggcgcgacggatatcgccagttttctggtggaaaacggtctaccaacggtacaaattaacggtgttccaacaggtaaaatgccggaagcaatcgacgcactggtgatcagcctgaaaacgcgctcctgtccggtggttgaagccacacagcaatcgctggcggctctgagctggttgcaacagcaaggttgcaaacagatctatttcaaatactgctctactttcgacagtacggcgaaagggaatatcggcccggttaccgatgcattaatggatgctctcgacacgccgtttacggtcttctctccggccctgccggtcaacggacgtacggtttatcaggggtatttgttcgtaatgaatcaactgctggccgaatccgggatgcgccatcacccggtaaatcccatgaccgacagctatcttccccgtctggttgaatcgcaatccacagggcgctgcggcgtcgtttcagcacatgttttcgaacaaggtgtgaaagccgttcgtcaggagctggctcgcttacagcaagagggctatcgctacgcggtgcttgatgcgctgaccgaacaccatctggaaattcagggggaagccttgcgcgatgccccactggtaacgggcggttctggtctggccattggcctggcccggcagtgggcgcaagaaaacggtaaccaggctcgcgaagcagggcgtccgctcgctgggcgcagcgtagtgctctccggttcatgctctcaaatgaccaaccgccaggtggcacattaccgtcaaattgcaccagcccgtgaggttgatgtggcacgctgcctctcaaccgaaactctggccgcttatgcacacgagctggcagagtgggttctgggccaggaaagtgtacttgctccactggtttttgccaccgccagcactgacgcattggcagcaattcaacagcaatacggtgcacaaaaagccagtcaggcagtggaaacactgttttctcaactagcggcgcggttagcagcggaaggcgtgacacgctttattgtcgcaggcggtgagacctccggcgtagtcacacagagcctgggcataaaaggttttcatattggcccaaccatttcccccggcgtgccgtgggtaaacgcactggataagcctgtctcactcgcccttaaatctggcaacttcggtgatgaagcctttttttcacgagcccaaagagagtttttatcatga

SEQ ID NO: 23081 - DNA, 231 bp, Escherichia coli
atgcaaggcattaaaatatatacaattctagcctcttctcttatatctggtagtatttttgctcaaacggaaatttcgactgcaaattcgtctacagttaatgcaagttatgttgaaccttcagcggaaaaaataatatcgccaagcgataaactcaataacctttttgaaagaaatatgtctcagccttatattttacaaaaaattggcgagagaacttattatgtttaa

SEQ ID NO: 23082 - DNA, 681 bp, Escherichia coli
atgagcaaatacaccgaactgatcacgaactaccacgccaccaaacctaaatttcttgcacatgttgatctgatgacccggccgcttattgatgttgcggctgccaccagagggctgattactgcatttgatattgactctgcggttggtgtgcaacttgacattcttggattgtggatcggacgtagccgtgttgtcagccagcctatctcaggtgtctatttcagctgggataccgacgggcttggatatgatcagggtgtatggcaggggccatacgatcctgattccggatacatgtacctcagcgatgaaacttatcgtgtcatccttaaagcgaagattgcgattaataactgggacggacggaatgattcgcttccggcaattcttgacgcggcgacagcaggatccggactgcgaatgcagatagtcgataaccaggacatgacgatatcggtctggctctttcctgatactgatatttcagatgtatcgcgtgagttaattgctgcaattaaacagggatatctcacagtaaaagccgccggggtttgggcgggtggcattgaaacaccttcggtggaaactccatcggaaggttcaaaattttttggttttgatatggataacgaattcatcagtggttttgatgtaggggcatggggagtattactctga

SEQ ID NO: 23083 - DNA, 366 bp, Escherichia coli
atgactaaatcagttttcaaagtacgcctctcaaaatccgtaggggaagagttgatcgcttatatcgaggagatcatccccgctgaagccagaaaaatgggtgtaagggcgcgggtaggtgattcagcgccttctgcatcctcacccgcatcagtgatactcggatacatttttgaatttatccaaaacaaagatgtttgttatagcgtcgctgctgttgtggccgcatggattagagcaaaacacagtaagaagataatcatcaaaaaaggcggctacaaaatcgaagcaagcaacctcaccgatgaagaactttttaaactattcagtgaggctaaagaagaaatcgaaatcaaaaaggaatga

SEQ ID NO: 23084 - DNA, 1431 bp, Escherichia coli
atgatggcaatggagagcgtgacctcaatgacttctactctgacatccaaaccgacgcttaatccggctttacgtagtttctggactacgcgggcacgtaacaaagtgctttatggtggccggtcatcgtcaaaatcatgggatgccgctggcattgccatatttctgtcgaataaatacaccctgcgtttttgttgtgcccgtcagatccagaacaaaatcgaagagtcggtgtataccctgctcaaaattcagatagacaggtttggcctgcggcaccgtttccgtattctgaacaacaaaatcattaaccgggttacaggctcggaatttgttttttatggattatggcgcaacatcgaagaaattaagtcactggaggggatcgatgtgttgtggctggaagaagcccacgcactgacggaataccagtggaaaattctggagccaacgatccgtaaagaggggtcggaatgctggttcatattcaaccccggacttgttactgatttcgtctggcgcaactttgttgttgatccgcccgaaggcactctcatccgcaaaattaactatgacgaaaatccgtttctgtctgacaccatgcttaaggttatcgacgcggcgcgacgccgtgatccggatggttttaaacatgtgtatgagggcgttccggagtctgatgatgatgcggcaatcatcaaactgtcctggatagaagccgcagtggatgcgcacaaaacgttaaatttcgaacccagtggaagaaagcgtattggctttgacgtggctgacagtggtacagataagtgcgctaacgtttaccgtcacggatccgttgttttctgggccgacgaatggaaggccaaagaagatgaattactgaagagctgccagcgtacttatcaggcggcgctggagcgtgaagcagatattgtttacgactctatcggtgttggtgcgtctgccggtgctaaattctctgaaattaacgctgaccggaagagcgagaatgcatacgcgagacgtgtgaattaccagaggtttaacgccggtgctggtgtgcatgagccagatgacgaatacaacggcatccccaacaaagactttttcgcaaatcttaaggctcaggcatggtggctggtggctgaccgtttcagaaatacgtttaacgccattaacaacggagaacagtatcctgtggatgagctgatcagcatagattctcgttgtccgttgcttgaaaagctgaaactggaactgacaacacctcatcgcgattttgaccgtaacggacgtgtgatggtcgaaagtaaaaaagacctcgcaaaacgcgagataccgtcaccaaacgttgctgacgcattcattatggccttcgcgccaattgatacatcgctggatatctgggaacagctggggagacaggcctga

SEQ ID NO: 23085 - DNA, 750 bp, Escherichia coli
atggcaaaaccggactgggaggccatcgaatcggcataccgggccggagtccttagcctccgtgatataggcgagaaatacggcgtaacagaaggggctatcaggaagagggctaaaaagcttggttgggtacgcagtggcggtacgcaggtttgcaaaaatggtacgcaaaaaagaaaagtgcgtaccagcagaaagcctgccattactggccttacacaaaaaggtacgcaaccaaaaacagaagctacaccggatacgaaaccgatacgcggaatgcgtaccgatcccccgactaacccattccaacccggtaaccagcaggcattaaaacacggtggttatgcccgtcgccttctgctcaaagatgaggtgatagaggacgctaaagcgttgacgctcgaggacgaattatttcgccttcgtgctaacaaccttgtcgctgcagagaatattggtcggtggctggtgtcgctggaagatgctaatggggaccaggaaaggaagatgctgatggaaaatatcagcgccgccgagaaagcaatgatgcgcaatacagttcgtattgagtccatcgttggcacgcttgcgacggtaggaaaaatatttgctgatacagcctaccgcaaggccgccactgataaggtgtctctggaggctgatcgtcttcgccgtgatgcaggtattgatgatggcaatggagagcgtgacctcaatgacttctactctgacatccaaaccgacgcttaa

SEQ ID NO: 23086 - DNA, 279 bp, Escherichia coli
atggctagttttactgtccgcgttgagcttgtgggtgcatcatccgatgactacaatcgccttcatgaggcgatggaatcccgaagatactttcgcgaaattcaagatggagctggaaactggttttatcttcctgacgctgagtacacagccgaaaaaaacgcatctgctcgcgcagtccgagatgaagttgtagccatcgctgggacaataaaaaagaaccctcgggtgctagtcacccaggcggcagatcgctcatggcatttaatcaagaagtga

SEQ ID NO: 23087 - DNA, 231 bp, Escherichia coli
atgaaattttatgaattatcttctgagtcccgatctcaggccaaaatcacactgggtcagttgattgtggctcgggctaacaccgggatggatgattttgaaaatttggggcattgcatcgctgccgcgtttattgcgatggagcgccatgaaagcgcccctgaggttggtgaggggcgtagcgggaacggaatacccgttaatggcgatcaaaactcacttcttgattaa

SEQ ID NO: 23088 - DNA, 582 bp, Escherichia coli
atggctactcagatttctgtcgaaactctttccccaattacacacaaccaaattcccgttatcactaccgagttactggcacagctttactgtaccgagatcaacaacatcaaagtaaattacacccgtaattccgagcgttttgttgagggtaaacactttttcaaggttgttggtgatgagttgaaaaatttgcgggttactttaagtaactcacaaaatttgcaaccatctttaagagggttacaaatttccccgaaagcccgctccctcatcctctggacagaacgcggagcagcccgtcatgccaaaatgctcgaaaccgatcaggcgtgggatgtgttcgaaaaactggaagactgctatttcagacaaaaggatccgtcagcgccagtttcatgccagaaaagttacgacacgcgagttctctgttatcagcaaggcggtgtcactgtttccacaattcagttgcgggatgatgatattgttatttcccttgagtcatggctggaactggcgagagccaatggttggtttgttgttcgcagagataaactggtggaaaggctgatgcagctttaa

SEQ ID NO: 23089 - DNA, 555 bp, Escherichia coli
atgatttacccaacaaatacaggcaaaagcggggaacaccttcgtctcaccacgctggaaagtgtctggattcagggaaaactgcgcatgtgggggcgctggtcgtatattggcggcggtaagacgggaaatatgtttaaccagttgctgacctctaaaaagctgacaaaaacggcaattaacgaggcgctccggaggatgaaaaaagcaggtctggacaaacctgaacttgaggcttttttgcgggatatgattaacggcaagcaaaagagctggctggcacattgtactgattcagaggcattaataatcgacagggttattggagaagtgttggcagaacacccaggattgatttgtatcctccggcaacgatatgaagggagggggatgactaagcgaaaaatggctgaattgctgaatgattcacaccctgagtggtgttacgccacgtgccgtaatcgcatagatgcgtggttgaaaatggcagagtttatgctctatctgccgatgcgtgatgcattctcttccggggatttaaaaaccgtctgttga

SEQ ID NO: 23090 - DNA, 762 bp, Escherichia coli
atggagactgtttttgacgcactgaaagcaatgggaaaagccacatccatagaacttgctgcgcgacttgatatcagtcgtgaagaagtgctgaacgaactatgggaactgaaaaaggctggttttgttgataaaatcgcgtacacctggcgtgtggctgataacaacgttcagcaggaacagccagcgcaggcagaactgccggaagaaaccaccacagcaacagtagcgaaaatctcagagtgcgatttaaccgcgacgattgaacaacgcggaccacaaacggctgatgagctggctacattgtttggtaccacatcacgcaaagtggcttcaacgctggcaatggcaatcagcaaaggtcgtctgattcgcgtaaatcagggcggtaaatttcgttactgcataccgggcgataatttaccagcagagccgagagcagcatcggtagcggaaactgatggtaaggcctttcctcagccagcaggtgttgcgttaccagtacaggaggctgcaacacaggaagatattaaaacagaaatggtggcggacattgtgcagtcgctgccatcgtttactgaaacgcgagcggatgacctggttttaccatcgcttcatatggcaaaccgcgaactgcgccgggcgaaaaatcatgtccagaggtgggagcgagtctgcgccgcgctgcgagagctgaacaagcaccgggatattgttcgacagattttcgattcctccagtcgtattgtgtcggaaaagtga

SEQ ID NO: 23091 - DNA, 747 bp, Escherichia coli
atgaaaaatattgcgacaggaggcgttctggagcgtatccgcagactgaccccaccacatgtaaccgccccattcagaacggttgcggagtggcgcgagtggcaacttgctgaaggccagaaacgttgcgaggagatcaaccgcctgaatcgtcagttgcgggtggaaaaaatcctgaatcgctctggcatccagccgttgcaccgcaaatgctcgtttgcgaattaccaggtgcagaacgaagggcagcgatacgcgttaagccaggcgaaatccatcgccgatgaactgatgaccgggtgtacaaattttgcgttcagcggaaaacctggtaccgggaagaatcacttagcggcagctatcgggaatcgcctgctgaaagacggtcagacagtgattgtggttaccgtggctgatgttatgagcgccctgcacgccagctatgacgacgggcagtcaggcgaaaaatttttgcgggagctgtgcgaagtggatctgctggttcttgatgaaattggcattcagcgcgagacgaaaaacgagcaggtggtactgcaccagattattgatcgacggacagcgtcgatgcgtagcgtgggaatgctgacaaacctgaactatgaggccatgaaaacattgctcggcgagaggattatggatcgcatgaccatgaacggcgggtgttgggtgaattttaactgggagagctggcgtccgaatgtcgtccagccaggaatagcgaagtaa

SEQ ID NO: 23092 - DNA, 423 bp, Escherichia coli
atgaaaatcaggcatgagcacatcgaatcagtgttgttagccctggcagccgaaaaagggcaggcgtgggtcgctaacgcaattactgaagaatatctgcgccaggggggcggcgaattgccccttgtaccaggcaaggactggaacaatcagcagaatatctatcaccgttggttgaaaggtgaaacgaaagcgcaaagggaaaaaattcagaaactgatccctgcggttctggcaattcttccgcgcgagctgcgtcaccgactctgcatcttcgataccctggaacgccgtgcattactggcggcgcaggaagcgttgagtacggcaattgatgcgcatgatgatgcagtccaggccgtttaccggaaagcacatttcagcggtggtgggtcgcccggcgattctgtcgtagtgcattga

SEQ ID NO: 23093 - DNA, 219 bp, Escherichia coli
atggttggtgaagatctggttgttattaacggtcaattgtgcagcaaagatgtggcagccatgcttattagcaaggttcttccaactgtgctggatgtcattgcagaaaaagtaaaggctggtcgtccagacaaggaagttgaagaggcggcaaaaacagttgttcatgccgctacagaagcaattattttgaagagcctagtttcgcccaagccttaa

SEQ ID NO: 23094 - DNA, 195 bp, Escherichia coli
atggataataaagacaaagcctggctacttgctttagctttcagcatcagatcgcagcgagaaacaactcatcaagaatttttctcggaaatcgagaatgctgagaatgagtttttgtcactactcaatgaacgtgatgctaaaaaaagcgccgattcacttaaggcttgggcgaaactaggctcttcaaaataa

SEQ ID NO: 23095 - DNA, 276 bp, Escherichia coli
atgattaccagttatgaagccactgttgttactactgatgacattgttcacgaagttaccctggaaggaaagcgtattggctacgtgattaagacagaaaataaagaaaccccattcactgtggttgatatcgacggtccatcaggcaacgttaaaacacttaacgatggtgttaaaaaaatgtgtctggtgcacataggaaagaatctgcccgcagaaaaaaaagccgaatttctggcaactctgattgcaatgaaattaaaaggtgaaatctga

SEQ ID NO: 23096 - DNA, 663 bp, Escherichia coli
atgtcaattgagcatattttaatcggaaaacatcatgggggttctgattactggaggactccatttttgttatttaagaacttacaccgtgaatttattttcagtctagatggtgctgcaactgagcatgacacgctgttaccacgattcaccgatgatataagccgtcaatcatgggttagtgaaaaggtcttctgtaacccgccgtacagcgatattccgtcgttcctcttaaaagcgtctgaagcggatttagtagctttcctgataccgcatagagccaacaccagctactggcttaggcacatttacagcaataaccactgtcatgaaatccgtattcttcatcgtgcagttaaataccttccaccagcagggcataacgggcttactattcgttcaccgtttcctagtgcagtcgttgtttttaaaaaagaaccacgaaagcacgaaattacacagaccgtttgttgtgctgatacgttattacctctgatgattattaaccgtggtggactaagaggaaggcccaccatttacccacctgagacgctcgacagcttcataaaactatacaggcaaggaaaacccattaagtacattgcagatgctctcagaatgcctctgagcacgtcatacagaattgctcaaaggttgagctaa

SEQ ID NO: 23097 - DNA, 987 bp, Escherichia coli
atgtctaaatataacccaaatcagttttataaatttgatgtgcgaatctctcaactttcagaagaaattaacgcagcagcaagattgatttatatggtcatggtccatagctgtgacttctatgaagagaaatacaaatcatattcaccaagcattgaccatctcgcttatatggctggcgtatcaaagagaacagcaataagagccgttgagacacttgaaaaacacggtttaattcaggtgcaaaagaatcaggggcgtcaaagcacttatcgtgtattcacactggatgataagccggaattacttgtaagacctacatcacaggaagttgcagcctcagtaagacaaaatgacaccactaccagtgacaaaatgacaccactaccagtgacaaaatgtcatgggggtagtgacaaaatgtcacccgtgttagataagttattagataaaacattagataataatattatagataagagtaaagagactggacttaatgatgatattaaagaagatgactttctttctttggatgaattaaatgattttctctctatgaatgaatgtgattctcttggtattgaagaggctattaaagagactgttaaaacatctgacttagatgaccttgaagtaagctctaaaaagacttctaaacaagacagagaaatctctgatgtgaatatcgatagtgaccataaaaacacacagtgccccgccactgatgatgagttggaccccttcgatgattaccttgatgatgaagaagaccctgaagaggaattgaaacgtgaacagcgtaaagcagaaattaaagaaagattcagaaatgcgaagctaaagaacaaggttagtgacctcgatgactttgatgatagtgacgatgattttacttacagacccaaaaagaaaactcacactgattcaaagaaagagaagattaaaccgaagatgtattttgctggtggagggattaagcaatga

SEQ ID NO: 23098 - DNA, 324 bp, Escherichia coli
atgaacaattacgaattacagatttttgttgataacgacaccgctcttatgattcaggctttcagtgatgtaggtgttggcattgactttgataagttgttagagttaatggctgataatgaagaaaacgtctctgactttattcagtcggtggagtttaacgagcctcgaatgatgctaccaatttcagattcgaacatgaaaagattgattatcgagcaaacgaacaaatacagcgttagccctgaaagatatctgaaggcagctatagcaattttgtacgctgacaatattttggtgacggattcgaaggtggtgcattaa

SEQ ID NO: 23099 - DNA, 711 bp, Escherichia coli
atggcaaatgacatttatattagtggaagaaaaattgatagcttcggtgactggtcaccacagactgaacatccagctatcgctattcagcgtcaagaacacgatgcgagaattgcacttgagcaatcgctaaagatgtcaccaaaaacaaccatctttgtgtctcctgagcctcaagaaatgcctgatgtttgcaagggtgaagcattacttgagcttgaaaagaaatattacccactgctgaaagcacagcgtattaaacttgatgacgcttacagcaaagttaccttgatgcaatcagctattgagccgtcagaatttgagattcaggatgaattgtcacagaaaccatttgtctattaccaatacgaagataatgatggttttggtatttatccagaaaacatcccagccgcgattagtagtcttcctgatgaatatcgaattgtgaagatggttaaagcatcaagaggtgctggtcagtttatttatatgaccaataagagcgatgaagaactcgctgaacttgctagacagaacatcttggcatcacgtaacaagcagcttgatagtgctaagttgtgtctttcaagagagcttcaggttatgaaagggattgtgaaagaatatgaagatgctaagaagattgctatgcaggctgatattgagcagttagtgaagatttctagcaaatatgcaaaggctatttaa

SEQ ID NO: 23100 - DNA, 216 bp, Escherichia coli
atgattgatttaactgaacgctatgaagttattaagtctgtttgtgagaacttaaagcttcagactaaaccaaagctacgaattaaaaatcagcatcaagttatcacctcacacaaaccaaaggttagaaggattccttcatggtgtattgaccgtgttcctgctgatgctcaattaattggtgagtctggttcttacacttatatccttcattaa

SEQ ID NO: 23101 - DNA, 1644 bp, Escherichia coli
atgaagctgctagtaacatacatcaggtggagtactaaagagcaagactcaggagactccttaagacggcaaacaaacctcattgatgctttctactctaagcacaaaaacgattattaccttcttcctgctcacagatacgttgataagggtaaatctggttttcaccagcaacataagaatcaaggttctgacttcagacgtatgtttgaaaatgttatgtctggggttattccagaaggttccctgattgttgtagagaactttgaccgcttcagtagggcagatatcgacacagctatagatgacgttaggcagatactgaggaagggagtctctatactgactctgggtgatggtgaactctacgacaagtcggccttgacagaccctgtgaagttgattaagcacatcatcatagctgagcgagcacaccaagaatctcttgttaagcaaaagcgtatagctcaggtctggaaccataaaacacagcttgcaagagaacttaagaagcctatgggtaagcaagcccccggatggttagagctatcagaagacggttcacactacatcgttgatgaagataaagcgtcactggtgaatatcatctatgacaagcgtctttctggtatgtcgatgtttgctatctgtaaatggctaaacgaacaaggttacccgaccattaatcagcgtaaggtcagaatatccaagaccaagaaaccggatggtaactggtcagcattaagcgttaaacacatcctgacttcacgaagtgtattaggttaccttcccgctaagatttctacagaagaccgtaaaacagtgttacgtgaagaaattgaagggttctatcctcagattgtcacagattctaagttttacgctgtacagcaactgttagaggaaacagggaaggggaaaacatccagcggtgaacactggctatatgtgaacatactgaaggggcttatccgttgtaagtgtgggcttgtaatgactcctacagggatacgtaaacccgtttatcaaggtacttaccgttgcaatggtaataaggagtcccgttgtagctacggtacagtgtccagaaagttacttgatacgcagctttgcagtcgtctgtttagcaaactatcacagctacacgatgaagctactgatacagccagattagatgagctacaacgaagattaaacaccgttgatagtgaactggaaaaactcactgagacgctgatacagcttcctaacatcactcagattcaggaagcactacgggttaagcaggaagaaaaagatgaactgacatttcagttatcacgagaaaaggcgagggtaaaatctgtatcaagcttggatttaagcggtcttgatatggagtctgtagaggggagaactgaagcccagattatcattaagcgtctggtgaaagagattgttgtttctggtaatgaaaagctggtggatatatatcttcacaatggaaatatgattcgtggttttcctcttgatggtaaagatgaccacaccttaacgcttgaagaagcaaccgatgagatgcagtcattagatgatatgcttatttttggtgaaccagtaacaaggatttatcctgctggtgatatggaagaggtggacgcttag

SEQ ID NO: 23102 - DNA, 1146 bp, Escherichia coli
atgaacattcaacagcgtatagcagaacgcttggttcaggccagaaacgacgcgggaatgagtgcaagcgccgtcgcagatgcgatcggtgttgttcgtcaaacctacagtaagtttgagcaggcgttaggcgtcccaagcgttacccaactcatcatgctctgcaagattttcgataagcctatcgggtatttttatgagcaagatgatggcgagtttcgttttgcaatgcgggcagatagtccggatttgttggatgccaaacttcgcaatgagttgattgaaaagttaaaaaatatcaatgcaattgaggaagctgctgatgctaatttgccagaagatcttcctaactcaatgcctatttttaccgccaaagcagaagatttgcgaagagtcgaagataaggctatggaagaacgtttccgtcttggtataggaaacgctacttgcgttggtgacattgtagccattttggaagcatcggatattcgagtaatcccgttcaatcgcgaagaaaccgataaagggatggtattcggattttctgcgttttcgaacaaatacggtaccgcgatttatgtaaatgttcacgacagcatttcaatagaacgtcaaatcttcagtatttgccatgaatatgctcatcttatcttccaccgtgatgagtatgatggccctgctaaaagctataaaactaatggcaaagcaatttcaccggaagaaaaagttgctaatcactttgctgcttgttttttggtaccagaaagcgcattgcgaaaacaattcgtcatgcaaggtggtggatgggcgtatgaggaaaccgtccttagactaaaaagcattttcagagtatcagccacttgcatcatcgatcgtcttagtaaatgtaatttaattaatcaacaaaacactagatacctatgggcaaccgccaatcgtaaaggttggaagagacacgagccaaatcccattagggaagcactaaattataaaggtcgcctaaccgtcttatcgcgtaaagcatgggaagccggttccgcgtcggaaaccttcatatctgaacttttagaattagacagaaaaactctcagcaatcttctggatgaatggtacgacgaacaggaggccggagaggatgccgtttga

SEQ ID NO: 23103 - DNA, 519 bp, Escherichia coli
atgccgtttgaatgccccagatgtgttatcgatacgaatgtactgtctgatttttacgaaggtaaatgcttagatattatctggcaaatttacccgggtggtgtgtggattgacccctatgtctgcgaggaactaaaagctaaatacaatcttgatgttcaggaacagcttacacgcctgcaacttccatacaatttcaccaatgattacgaacctgaacattttattgaaatggctgagataaaaaatcgcaggagagcattgaagtatgcggacataagctgcgttgttaacgcgagaatacatgatgcaacatgtctttcggcggataatgcggtttataaaacgtgtgcggaacgcggtgtaaaagccgcccgccacggagggctacttcaagaggctgtgcgcaggagacttatacacaaacaacaagccttaatgcatttccaatttttcctagatcgtgggttaacgatgaaatcttctgttcgagaacagattcttgccagtttcgaatga

SEQ ID NO: 23104 - DNA, 729 bp, Escherichia coli
atgactacacgctatttttcgtcacttattgaacaatcgttgtctcgttcaactgaagcaacgctcagtatcatgggcgttaccaacccgcagctgcgtgaacatctcgcgcaacaaatgggggctgattgtgggaaaccgggctcattccttgcttctccggtattccagcaaatgtttggctggaaggagtcaaaccacacgatgcgcagcctgacggaaggcaacgcattgttgagcaaagcagtggttgattcactggatgatcagaataatggccggtaccggtttggtgctgactggaggccttttacgcaccagttagccagttggaaagctttgctggaaaagaaacattcagtggtggtaaccagtggtacgggttcaggtaaaacggaatgttttatggtaccggtgctggaagatctttaccgggaactgcatgaaaatggcaacaatccgttggtcggtgtccgagccctttttctctatccattgaacgccctgattaattcacagcgcgagcgtctggatgcctggacgcgtggttttggtacagggatccgctactgcctttacaacggcaacaccgaaaacctacacgcttcggtaaaaagcgaacaggcaaaaaggccgaatgaggtgctctcgcgcgaaaaaatgcgtgaagaacctgcgccgattctggtgaccaacggcacgatgctggaatatatgatggttcgctag

SEQ ID NO: 23105 - DNA, 198 bp, Escherichia coli
atggacggagaaagctttaactttgatgacaatgatattgaatttattgcttcaatgtatgcatcatgtaaattatcaggaagtatcgcccccataatgcatataatggttagcattccaagaaataagaaaaaacaattctacgaacgagttgagcattattgtagtttatattccaataaaaacccaccttcttaa

SEQ ID NO: 23106 - DNA, 600 bp, Escherichia coli
atgcgtaaagtttgtgcagccattttgtccgcagccatctgtctggccgtatccggtgcacctgcatgggcgtctgagcagcaggccacactgagcgcagggtatcttcatgcccgtacgaacgctcccggcagcgataatctgaacgggattaacgtgaaataccgttatgagtttacggacacgctggggctgattacgtcattcagttatgccaacgctgaagatgagcaaaaaacgcattacagcgatacccgctggcatgaagattccgtgcgtaaccgctggttcagcgtgatggcggggccgtctgtgcgcgtgaatgaatggttcagcgcgtatgcgatggcgggtgtggcttacagccgtgtgtcgactttctccggggattatctgcaggtgaccgacaatacggggaaaacgcacgatgtgctgaccggaagtgatgacggtcgccacagcaacacgtctctggcgtggggggctggcgtgcagtttaacccgaccgaatccgtggccattgatattgcttatgaaggttccggcagtggcgactggcgcactgacggtttcatcgtgggtgtcggttataaattctga

SEQ ID NO: 23107 - DNA, 1569 bp, Escherichia coli
atgtacgcgcgcgtggatgaagaccagcccttcccggcggtgccgaaatggtccatcaaaaaatggctttcgctgcctggagaaatgcgcccgctgatcctttgcgaatatgcccacgcgatgggtaacagtcttggcggcttcgctaaatactggcaggcgtttcgtcagtacccccgtttacagggcggcttcgtctgggactgggtggatcagtcgctgattaaatatgatgaaaacggcaacccgtggtcggcttacggcggtgattttggcgatacgccgaacgatcgccagttctgtatgaacggtctggtctttgccgaccgcacgccgcatccggcgctgacggaagcaaaacaccaacagcagtatttccagttccgtttatccgggcgaaccatcgaagtgaccagcgaatacctgttccgtcatagcgataacgagttcctgcactggatggtggcactggatggcaagccgctggcaagcggtgaagtgcctctggatgttggcccgcaaggtaagcagttgattgaactgcctgaactgccgcagccggagagcgccggacaactctggctaacggtacgcgtagtgcaaccaaacgcgaccgcatggtcagaagccggacacatcagcgcctggcagcaatggcgtctggcggaaaacctcagcgtgacactcccctccgcgtcccacgccatccctcaactgaccaccagcggaacggatttttgcatcgagctgggtaataagcgttggcaatttaaccgccagtcaggctttctttcacagatgtggattggcgatgaaaaacaactgctgaccccgctgcgcgatcagttcacccgtgcgccgctggataacgacattggcgtaagtgaagcgacccgcattgaccctaacgcctgggtcgaacgctggaaggcggcgggccattaccaggccgaagcggcgttgttgcagtgcacggcagatacacttgccgacgcggtgctgattacaaccgcccacgcgtggcagcatcaggggaaaaccttatttatcagccggaaaacctaccggattgatgggcacggtgagatggtcatcaatgtggatgttgcggtggcaagcgatacaccgcatccggcgcggattggcctgacctgccagctggcgcaggtctcagagcgggtaaactggctcggcctggggccgcaagaaaactatcccgaccgccttactgcagcctgttttgaccgctgggatctgccattgtcagacatgtataccccgtacgtcttcccgagcgaaaacggtctgcgctgcgggacgcgcgaattgaattatggcccacaccagtggcgcggcgacttccagttcaacatcagccgctacagccaacaacaactgatggaaaccagccatcgccatctgctgcacgcggaagaaggcacatggctgaatatcgacggtttccatatggggattggtggcgacgactcctggagcccgtcagtatcggcggaattccagctgagcgccggtcgctaccattaccagttggtctggtgtcaaaaataa

SEQ ID NO: 23108 - DNA, 435 bp, Escherichia coli
atgtacggaacatgcgaaacgctatgccgggagctggcagcaaagtatccgggagacacgccactgatgctggttatctggtccccggaagaaattcaggccctcgctgacggaatggatatttctctgtccgatcatgaaatcagaaccgtcctggcgcgcctggaggacatcccggaagaccagcggactgaatccggtatttcttccggcgtggcgatggagatcatcaataacgtgagagaaaaccgccaggtgaccgtccctgctgaactgctggcgtccctgattcagaccgctgaacaggcattgtggaagcgtgaatgggccgcccgtgataacggcctcgtcgtcccggaatgcgtcacccgccgtcaggcggtggttaatcaggcccgcgccctgctgaaaaacaacacacacgaaaacgactga

SEQ ID NO: 23109 - DNA, 501 bp, Escherichia coli
atgtctagagaaggctcgttggacttattgcaagaagttgaagaaagtcttgacataatgagacagacacagcatatcaagcctgtaaaagtcaaagctattttggaaaacttacgaagttccttagagtatctcgctaatgatacctatgataaatatatttctccacgcagtaatgatgagcgccccaaaatatatttcccttacggaaaaaaagagtttattgataaatttttctcaaagacgctaaaaataaacccaccatcatcttctccattatataaaatttttacttctatacaggattatcacactggcgaatcttggttggaaatgatgtgtaatctcactaatgaagtaaagcacagacaaccaatccccttaagagaagagagttctgttaaagacctaagtgtgagcgtagatggttttggtttaatcacagcaggaagctcagcaaaattctctttaaaaacaaccacatcaatggcaaaaaattag

SEQ ID NO: 23110 - DNA, 537 bp, Escherichia coli
atgaaaattaatccggatcttataggcgttgtcgttattgctggcctttcggtcgctctcgtcaagagttgctctcacgccagtaatcttcagagcgataacgacgttctgcgaagtgacaactctatgctggggcaggtaatcgccacccaggcattcaacttcaatcgattcaatcaggttgcagaacatgccaacagtcttaactccctgatcgacaccagcaccgaaaaaaccgtaatcgaataccgggagattctccgccgtgaaaaaacctgtgatctgcctgttcctgctgatatcgctggtgggttgctcgaatacacgtaccgtttacgtgccagcgccatgcacaccgataccggcagacctaatgaagcctatgatcgtaccgctaccaccagctcaatgacctactgccaagctgtcttgtggattaagccgctactggcgttgatagaaaaaggaaataataatttttcgagtattcgtgaaattgatgagttgcgttacagaccatctgagcatggccagtaa

SEQ ID NO: 23111 - DNA, 216 bp, Escherichia coli
atgaaatccatggacaaaatttcaacaggcattgcctacggcacctccgcaggcagtgctggctactggtttttacagctgctcgataaagtcacgccctcacagtgggcagcaataggtgtgctgggtagcctggtatttggcctgctgacgtacctgacaaatctttatttcaagattaaagaagacaagcgtaaggctgcacggggagagtaa

SEQ ID NO: 23112 - DNA, 297 bp, Escherichia coli
gtgaagaagcaccagaccacgttgtctgatgagctcgagcgcaagatcattcgcctgttcgcgctggggatgagctaccaggatatcagccgggagatcgaagatttatatgccttcagtgtttccacggctaccatcagtgcggttaccgataaagtcattcctgagttaaaacagtggcagcagcgcccgctggaaaaggtttatcccttcgtctggctggacgccattcactataaaatccgcgaagatgggtgttatatcagagcaaggcagtttataccgtactggcgctga

SEQ ID NO: 23113 - DNA, 261 bp, Escherichia coli
atgaaggtcggcttctttttactgaaatttccgctgtcgtcggaaaccttcgtcctcaatcaaattaccgcgtttattgatatgggatttgaggtggagattgtcgcgctgcaaaaaggcgacacacaaaacacccacgcggcatggacgaaatacaaccttgctgccagaacccgctggttacaggacgaactaaatccgctgggattatgcaacaactggggctaccagagatggcaattgatatccgtcatttattag

SEQ ID NO: 23114 - DNA, 192 bp, Escherichia coli
atgcaggcagccctggatcatctccgggcgcagggtgaaacactgaatgatgaagatatcgcacgcctctccccgctttgccacggacatatcaatatgctcggccattattccttcacgctggcagaactggtgaccaaaggacatctgagaccattaaaagaggcgtcagaggcagaaaacgttgcttaa

SEQ ID NO: 23115 - DNA, 354 bp, Escherichia coli
atgaataaaacaatttgttttctattggtttttgcaatttcaggatgcgtcaacccttataactacagagaagaacaaaatgttattatctcgttcaaaacaaattctccaccacaagaaatacaagaatgcattctcagtgagtggcagcgtacacctctcttagccactatcacgtctcaaaaaattggcaagtattacagcgtattagcggttgcagataatgccgacatttataagttggcagatggttctactatcattgatttttattcccttcgaggggtcttagaccccaccaatgggaaaagcaagaggattcagggaattaaatcatgtattagcactaaataa

SEQ ID NO: 23116 - DNA, 1482 bp, Escherichia coli
gtggagcaggacatcctgaacagcttccgtaaaaacggttttgagctgatttcaccgcgctttaaccacatgcgcaatttcctgacctgtctgccctttatggccgggaaagggttgtttaaacagctgaaagaggccggagtggttcagcgcgcagagagctttaatgttgccaacctgatgccgttagtggcggataaccccctgacaccggcaggtctgctggcacccacctaccgtaaccagctggcgtttatcgatattttcttccgggggatgaataacaccaactacaacatggcggtctgtggcacctccggggccggtaaaaccgggctgatacagccacttatccgcagcgtgctggactccgggggctttgccgtggtgttcgacatgggggatggctacaagtccctgtgtgagaacatgggtggcgtatatctggacggtgaaaccctgcgttttaacccgtttgcgaacatcaccgatattgaccagtcagcggagcgtgtccgtgaccagttgtcagtgatggccagccccaacggtaacctggatgaagtgcatgaaggtctgctgctgcaggcggtcagggcctcctggctggccaaagagaacagggcacgtattgatgacgtggtggatttcctgaaaaacgccagtgacagcgagcagtatgccgggtcaccgaccatccgcagccgtctggacgaaatgattgtgctgcttgaccagtacactgccaacggcacttacggccagtattttaactccgatgagccgtccctgcgggatgatgcgaaaatggtggtgctggagctgggcggactggaagaccgtccgtcactgctggttgcggtgatgttctccctgattatctacatcgagaacaggatgtaccgcacgccgcgtaacctcaagaaactgaacgttattgatgaaggctggcgtctgctggacttcaaaaatcgcaaggtcggtgagtttattgagaaaggttaccgtaccgcccgccgtcataccggtgcctatatcaccatcacacagaacatcgtcgactttgactctgacaaggcctccagtgcggcccgtgcggcatggggtaactcctcctacaaaattatcctcaaacagagtgcgaaggagttcgcaaaatacaaccagctgtatccggaccagttccagccactgcagcgcgacatgattggtaagtttggtgcggccaaagaccagtggttcagttccttcctgctgcaggtggaaaaccattcctcctggcaccgcctgtttgtggacccgttaagccgcgccatgtacagctctgacggcccggattttgagtttgtgcagcagaaacgcagagagggtatgagtattcatgaggcggtgtggcagctggcgtggaagaagtcagggccggagatggcttcgctggaagcctggctggaagaacatgagaaatacaggagtgttgcatga

SEQ ID NO: 23117 - DNA, 246 bp, Escherichia coli
gtgatttcccacacacgttataaacttacccctgcggagctggaagcctttaactctgcggtcgatcaccggctggcagaactgacgacaaattttacgcgtgtggatccagtctggtcacctgagtatccggtaatcacaacggtctggtgttatctgctctgtgtgattctttttaggtcttctccggttgttggtaacctggataataccgcgaacgttaagcggtatcgtgacaacgaataa

SEQ ID NO: 23118 - DNA, 1314 bp, Escherichia coli
  misc_feature (1240)..(1279): n is a, c, g, or t
atgtataattttatcactataatgtatgatgtcttttcatattttggtgttctggctaaaaaccagaatacccgtgacatccgaaatattaaaaatttttcctcacatcaacattcactgggcgacatgtttgatgaattaataaacattattgataaagaacaagtattgagtacagaacaacgaaaagttatatttaggagatatgaagatctctatgttaagctaatgcactattctgtttttacagacaaaacacatcaaataataaaacaaaaatattttaatgacattgtaccaatgattctcgcactcgacatcaggaacacatatcgcccggataatgagatggcattttactatcatattcattcttttctcactcagataccggataatgaggatgatatatatcatgctgcaaggacatatcagcgaaattacgttaagttatgtttatccggatacacaccagcgaatgcgcatttcaaatatatctttgatggcgtatatgaattcattcgtaatattcgcaaaaacagtacaccaggaaaaacaaaacttaccgcaactatcaacacatgcaaagaaacctgtaaacatctgctttatttaagtaatgaagacaaggaaaaaataatttctgacttagataaaattcaagttgcatgttattatctcactatattactggctttcgaaagacgaacttcattaacaagcgccctggcaactttatataaaatgctgataagcgaaagagaagtttcagaatatgaatgccagttattatatttaaccaacccaatagatgtaatgaatacactgaacaaatacatatattactttcctaatgagaactcaccattttatacactgaaaattgacagtgcattatcgtgggaggccattgacgcaatacgagactatagtatttctgatatttatctttatcctgaacaaaaaacaataaattgtgtcgttgagattgaaaacattgtctttggcggttacatttatacattgaacaacggcgtcacattacaaaacatagaaaacactttaaaagattcttcatgccattatgtcttaaatggctatacggaatttgttaactgtttgatacaacttacttcaggaaagactgaaagtgttcatcgcaccatcaataaactgaactatgagaaattaccttttggatttatcattgccgcgtttgctatactaaagatagcatttnnnnnnnnnnnnnnnnnnnnnnnnnnnnnnnnnnnnnnnnaaaaatcatgtaaatatccgagcattattaaatga

SEQ ID NO: 23119 - DNA, 3516 bp, Escherichia coli; identical to SEQ ID NO: 4891

SEQ ID NO: 23120 - DNA, 189 bp, Escherichia coli; identical to SEQ ID NO: 17693

SEQ ID NO: 23121 - DNA, 189 bp, Escherichia coli
gtgacttcagcatttgcactggtgatgaccgtttttcttataacgggtgagccacaaaatgtgattaccggaatttatgacagtaagtcatcctgcattcaggtaagggacgaacaaaaaatccccggtgaatgcctcccgttaaaaaaagtatcgctgaacctgaataacgaaataccggctggataa

SEQ ID NO: 23122 - DNA, 564 bp, Escherichia coli; identical to SEQ ID NO: 5765

SEQ ID NO: 23123 - DNA, 264 bp, Escherichia coli
atggcaactttgacaaaaaaagaacgggcatggttgaacgaattacaggaagttcttgatcgctgtccatcaccgaaaaaaattggcttttacaccattggcgataaaagcatttacctgtatgacctacgccgcatggatgaaatcatggaggctcttgataatcgttcgtcgatggattggtgtgttgctgttcatgatatgaatgcagggtttgatgaaaagattttgttcccctcatcagttgaaagcactgcgggttaa

SEQ ID NO: 23124 - DNA, 213 bp, Escherichia coli; identical to SEQ ID NO: 20334

SEQ ID NO: 23125 - DNA, 315 bp, Escherichia coli
atggaggagtaccgccgctggcgtgatgagtcctggcgatatgacggaagcgacaaatatccgtggcctcagcctgtgctgtaccacatctgcctcgaaatgcgtaccagagggattgagcgccagatgacgcagggtgagttaaaacgacttgcggaacggcaactgacgaaatgggcaaagcatgttggtaacgggatgagtgttccgccagtgcgacgacaactggaaggggcgaaacacccgcaagggccaacgccaattgaacggctgaaacaggaatacgaacgccggaaggcagctggttttatttga

SEQ ID NO: 23126 - DNA, 1032 bp, Escherichia coli
atgtggacccgtgacggcctgatgtttttcagcgcccggggtgatgaaattccgccgccgcgctccatcactttccatatctggacggcgtacagtccgttcaccacctgggtacagatagtctatgactggctggatgcactgaaagatcccaacggcctgaaaacctttgtgaacaccacgctgggcgagacctgggaagaggccgtgggcgaaaaactcgatcaccaggtactgatggataaggtcgtgcattacacggcggcggtgccagcccgggtggtttatctgacggcgggcattgactcgcagcgaaaccgttttgagatgtatgtctggggatgggctccgggagaggaagcctttctggtggataaaatcatcattatggggcgtcccgatgaggaagagacgctgttacgtgtggatgtggcgatcaacaaaaaataccgccatgcagacggaaccgaaatgaccatttcccgtgtctgctgggacatcggggggatcgatggcgaaatcgtttatcagaggtcaaaaaaacacggtgttttccgggtgctgccggtaaaaggtgcatctgtttatggcaagccggtgatcaccatgccaaaaacccgcaatcagcggggcgtgtatctgtgtgaagtggggacggacaccgcaaaagaaattctctatgcccgtatgaaagccgatcccacgcctgtggatgaagccacgtcgtatgccatccgttttcctgatgatccggagattttttcgcagacagaggcgcagcaactggtggcggaagagcttgtggagaagtgggaaaaaggaaagatgcgtctgctgtgggataacaaaaagcggcgtaacgaagcgctggactgcctggtgtatgcctacgcggcattacgtgtgtccgtgcaacgctggcagcttgatctggctgtactggcaaaatcccgggaagaagagacgacccggccaacccttaaagaactggcagcgaagctgtccggaggagtgaatggttacagtcgctga

SEQ ID NO: 23127 - DNA, 246 bp, Escherichia coli; identical to SEQ ID NO: 4533

SEQ ID NO: 23128 - DNA, 552 bp, Escherichia coli
atgaaaatcacccctgaacaggtttgtgaggctctggatgcctgggtatgtcgaccaggaatgacacaggagcaagcgacgatattaatcacggaagcattctgggctctgaaagaacgcccgaacatcgatgttcaacgcgtcacgtttaatgatggcgaggttgatcaacgggcgctgggcgttaaccgggtgaagatattcgaacgctggaaagctatcgacaccagggataagcggaaaaaattcacggcgctgattccggcaattatggaggctatccgaattagtgatttcaggttgtatcgtgagatcagtgatggaaaaagcattacgtacatgatcgccggattaaacaaagaatatggcgatgtggtggagtccgggctgctttttgcggatccagctgttgtggaacgtgagactgacgagcttatagaaaaagctattgctttcaagcatgcgtatcgtcagcaatatcaatattactttgcagataaacaaatgtctgccaggggtttgtatgagtatcgatgcactacgatgggctaa

SEQ ID NO: 23129 - DNA, 648 bp, Escherichia coli
atgaaacgacatctgaataccagctacaggctggtatggaatcacattacaggcgctttcgtggttgcctccgaactggcccgtgcacgggggaaacgcgccggtgtggcggttgcactgtctcttgccgctgccacgtcactcccggcgctggctgctgactctgttgtaccggcaggagaaaccgtgaacggtggaacgctgataaatcacgaccgccagtttgtctcaggtacggctgatggaatgactgtcagcaccggactggagctgggggcggactctgataacaacaccggcggtcagcagatagcccggggtggaacagccagaaacaccagagtcaccgcaaacggtctacaggatgtcatggcaggtggcagtacctcggatacggttatcagtaccgggggagggcagaatttgcgtgggaaggcttccggtactgtccttaacggcggtgatcaatggatacatgcaggcggcagggcatccggaacggtgattaaccaggatggttaccagaccattaaacatggcggactggtaaccggaacctcgtcaacaccggtgcagaaggtggtccggattctgaaaatgtgtccaccggtcagatggtcggggggattgctgaatccaccaccataa

SEQ ID NO: 23130 - DNA, 930 bp, Escherichia coli; identical to SEQ ID NO: 7703

SEQ ID NO: 23131 - DNA, 408 bp, Escherichia coli
atgagcagctcacttcctgacgatatcaatgcactgaaacgtctccttgccgaacaggaggcgctgaaccgtgccctgctggaaaagctgaacgagcgtgaacgcgaaatagaccatctgcaggcacagctggataagctgcgccggatgaacgtcggcagctgctccgaaaaagtctcccgtcgtatcgcacagatggaagctgacctgaaggcacttcagaaagaaagtgatacccttaccggtcgggttgacgacccggccgtgcagcgcccgctgcgtcaaacccgcacccgcaaaccgttccccgaatcactcccccgcgatgaaaaacggctgctgccggcagcgtcatgctgcccggaatgtggaggctcgctgagctatctgggtgaggatgccgcctaa

SEQ ID NO: 23132 - DNA, 1266 bp, Escherichia coli
atggcacagaacaatgctgacagactggtcattgacggcggcagggcaaccggaaaaaccatcctgaacctggtgaacgccggcaacagtgcgtcggggctggcgaccagcggtaagggtattcaggtggtggaagccattaacggtgccaccacggaggaaggggcctttgtccaggggaataggctgcaggccggggcctttaactactccctcaaccgggacagtgatgagagctggtatctgcgcagtgaaaatgcttatcgtgctgaagtccccctgtatgcctccatgctgacacaggcaatggactatgaccggattctggcaggctcccgcagccatcagaccggtgtaaacggtgaaaataacagcgtccgtctcagcattcagggcggccatctcggtcacgataacaacggcggtattgcccgtggggccacgccggaaagcagcggcagctatggcttcgtccgtctggagggtgacctgctcagaacagaggtcgccggtatgtcactgacgacaggagtgtatggtgctgcaggccattcttccgttgatgttaaggatgatgacggctcccgcgccggcacggtccgggatgatgccggcagcctgggcggatatatgaacctgacacacacctcctccggcctgtgggctgacatagtggcacagggaacccgccacagcatgaaagcgtcatcgggcaataacgacttccgcgcacggggccggggctggctgggctcactggaaaccggtctgcccttcagtatcactgacaacctgatgctggagccacggctgcagtacacctggcaggggctttcgctggatgacggtaaggacaacgccggttatgtgaagttcgggcatggcagtgcacagcatgtgcgtgccggtttccgtctgggcagccacaacgatatgacctttggtgaaggcacctcatcccgtgcccccctgcgtgacagtgcaaaacacagtgtgcgtgaactgccggtgaactggtgggtacagccttccgttatccgcaccttcagctcccggggtgatatgcgtgtggggacctccaccgcaggcagcgggatgacgttctctccctcacagaatggcacttcactggatctgcaggccggactggaagcccgtgtccgggaaaatatcaccctgggcgttcaggccggttatgcccacagcatcaacggcagcagcgctgaaggttataacagtcaggccacactgaatgtgaccttctga

SEQ ID NO: 23133 - DNA, 432 bp, Escherichia coli; identical to SEQ ID NO: 7321

SEQ ID NO: 23134 - DNA, 141 bp, Escherichia coli; identical to SEQ ID NO: 9350

SEQ ID NO: 23135 - DNA, 435 bp, Escherichia coli; identical to SEQ ID NO: 5323

SEQ ID NO: 23136 - DNA, 720 bp, Escherichia coli
atgagcgcacgttcacaggcactggttcccctcagcgcagagcaacaggccgcatggcgggcggtggcggagacagaaaaacgccgccaccagggaaacacgctggcggaatatccgtatgcgggggcgtttttccgctgtctgaacggaagccgcaggatatcgctgtctgacctgcgatttttcatgccgtccctgaccgcagaagaactgcgcggcaaccgttctcagtggctgtatgccgtcgatgtgctgattgaaactcagggcgaggtctgccttcttccccttcccggcgatgcagcagagcggctgttcccgtcggtgcggttccgtgtcagggagcgcagtcgccacaaatccgcactggtcatgcaaaagtacagccgccagcaggcgagggaggcagagcagaaagcccgtgcgtaccaggcgctggtcgctcaggctgaaatcgaactggcattccattcgccggaaacagtcggaagctggcatgcacgctggagtgaccgggtggcagagcatgacctggaaaccctgttctggcagtggggtgagcgttttccgtcactggccggaatggaacgctggcagtggcaggatatgccgttctggcaggttattgcggaagccagtcttgcagcaagagaggccggtcacgctgtccgtgagatggagcggtggatggtgccgaacaaactccgggaggcggcgtga

SEQ ID NO: 23137 - DNA, 435 bp, Escherichia coli; identical to SEQ ID NO: 4023

SEQ ID NO: 23138 - DNA, 402 bp, Escherichia coli; identical to SEQ ID NO: 14401

SEQ ID NO: 23139 - DNA, 498 bp, Escherichia coli
atgaaatccgcagcatggcggatgcactggcaaaaatccggaaatgatgacgctggcggggaaaaatctccgccttttccagccggtccccggaaagagcaaaaggatgtcgctgcaggctccgctttacccggccatgcggggcatggccttgtgggttttcagttatgtggcctcagcgtcgtgtgcgggctgtgccgtgcctccatcgtagccgggctggcagggatgcaagggtacgcttcgccgctgcggtcacccggtccctccttcccgtctgccgtgattttccggtcgttcacccgctcagatttcgcggtctcaccctccaactcccgtcagccgtgtgcgtcaggctgcggcttcccttgcgccctgtgcatccccgccttatcgcccggcttttatggaggcacggcaccgcccggtgtcgcggaatatgtgaacaacggaggaaaacatcatgcaatatgcgaaacctgtcactctgaatgttga

SEQ ID NO: 23140 - DNA, 378 bp, Escherichia coli
gtggcagaagatgcgcggcgtatcagggcggcgctgaccacaaccggtcagacgttgctgacccgccagacgcgccgctttcgcctggttgtgaaggaaagcgatcacccctgctggctcgatgaagacgacgaaaacctgcccgtggtgctcgatgccatcctgaaccggggcgctcgtttttcgtcggtggaaatgtatctggtcagtgagtgtgtggagcatatcctgtccagtgggctggcctgcgatgtgctgcgtatacctgatgaaccgtcccgtcgctggtttgaccgggatattctgcgggaggttgttatggaggcacggaatgaaatccgcagcatggcggatgcactggcaaaaatccggaaatga

SEQ ID NO: 23141 - DNA, 270 bp, Escherichia coli
gtgtcctggcgttatggcaacgtgtgtgtccagcgtggtgtgcagttgcgcagcgaggatgatgcggctgacgacgctgaccgcacggaacaggtgcaggagaaagcgcccgtggaggaaatcagtctgccactgctgacgaaaatgtcttccgaacgcacgctggcagtccaggcagcactgatgcagcaaccggacaaatctctggcactgctggcatggacgctctgccctgatgaatcccctaatgatttttaccaaaatcattag

SEQ ID NO: 23142 - DNA, 576 bp, Escherichia coli; identical to SEQ ID NO: 5316

SEQ ID NO: 23143 - DNA, 798 bp, Escherichia coli
gtgtcctggcgttatggcaacgtgtgtgtccagcgtggtgtgcagttgcgcagtgaagatgacgctgctgaccgcacggaacaggtgcaggagaaagcatcagtggaggaaatcagtctgccgttgctgacgaaaatgtcctcagagcgcacgctggcagtccaggcagcactgatgcagaagccggacaaatccctggcactgctggcatggacgctctgcctgaatgtgtttggcagtggggcgtacagcaatcccgccagaatccgcctggaatgtgagcattattcgctgaccagcgatgcgccgtcggggaaggaaggtgccgcattcatggcgctgatggcagaacactctcgttttgctgccctgctgccggaaggatgggaacgggatatgacgacgttcctgtcactcagccaggaggtgctgttatccctgctcagtttctgtaccgcgtgcagtcttaacggtgtccagacccgcgagtgtggtcacacgtcacgcagtccgcttgactcgctggaaagcgccatcggctttcacatgcgcgactggtggcagccgacaaaagcaaacttcttcggacacctgaaaaagccgcagattatcgcagccctgaatgaggcagggctgtccggtgccgcacgggacgcggagaagatgaagaaaggtgatgcggctgaatatgcagagcaccatatgaaagacaaccgctgggtgccaggctggatgtgtgcaccacgtccacagacggataccactgaacgccctgataacctggctgatgccgcctga

SEQ ID NO: 23144 - DNA, 510 bp, Escherichia coli
atgatcactcactatgatataaaaacggagacacagaaactaaaggatgtactctctgtagagggagttaatattccgccattattacaagtcataaaaccaggggtgtatgtatttttatgggttttattatggccgacatttcttcgtttgctggcagataaagttgatatccgagatgccggatttgatatatgttttagtggcgtaatgggttttatcctttttgttgccattactaatggaatgatgttgtatcttgccatccctaaaaaattcagagatgagtcgaaagttatatcttttatgtatgataagaacaaaacttatatcttgtcgtttgtgattgttttttcaatagtttcctttgctcatgcgttcttatttgggtttttatcaataactctgtttgtaattatttcctttatttatactatagatataaatcgttataatctctctgcaatagtctcagtaataggtctgttcaaaaaagagtctgttagttaa

SEQ ID NO: 23145 - DNA, 315 bp, Escherichia coli
atggaggagtaccgccgctggcgcaatgagtcctggcgatatgacggaagtgataagtacccgtggtctcagcctgtgctgtatcacatttgcctcgagatgcgttcaaaggggattgagcgccagatgaccgaaggggaattaaaacggcttgcagaacggcagctggcgaaatgggcaaagcatgttagtaacggcctgagcgttccgccagtccggcgacaactggcggcacccaaacgcccgtcggggccaacgccaattgagttgctgaaacaggaatatgaacgccggaaagcggctgggtttgtttga

SEQ ID NO: 23146 - DNA, 231 bp, Escherichia coli; identical to SEQ ID NO: 15042

SEQ ID NO: 23147 - DNA, 231 bp, Escherichia coli; identical to SEQ ID NO: 15042

SEQ ID NO: 23148 - DNA, 213 bp, Escherichia coli
atgaaactggccctgacgctggaagctgacagcgttaacgtacaggcactgaacatggggcgaattgtcgttgacgtcgatggtgttgagcttgccgaactgattaacgtggtctgcgataatggctactcccttcgtgttgttgatgaatctgaccggacctcaacagacagcaccccccccctctgctgccctgagcggtatacgctgtag

SEQ ID NO: 23149 - DNA, 429 bp, Escherichia coli
atgtacgggccggaacagacggaataccgcctccgttttctcccgaatgttctgtgcctgtgcgggagaaggctgaatgccggccatatcccattcatggcagggctccgttttatcggcctgcgtcaccacaaacagtacccgctgatgtccccggtgcaggatgtgtcgccagaaatactcatccacagacagggcgcggtcatcggctttaatcagccacagcaccaggtccagttcgggcagaatgtcacggtacagggcttcatactctgcatccctgtcccggctctcgcccaccccgggcaggtcagtgataaccatgctgtgaccgtggccactcagacggaagcgccgcacttcccgggtgccggcgtgaacatcactgaccggggtgacctccccctgaaacagtgcattacagagtga

SEQ ID NO: 23150 - DNA, 510 bp, Escherichia coli
atggtcgggaagcgctgtcatgagcgcactgaccagcgtatccacttcccagccggtgagggccgatacggccacaaccggatgtacaggccggaacagacggaataccgcctccgttttttcgcgaatgttctgtgcctgtgcgggagagggctgaatgccggccatatcccattcatggcagggctccgttttgtcggcctgtgtcaccacaaacagcacctgctgatgtccgcactgcaggatgtgtcgccagaaatactcatccacagacagggcccggtcatcggctttaatcagccacagcaccaggtccagttcaggcagaatgtcacggtacagggcttcataatctgcatccctgtcccggctctcgcctaccccgggcaggtcagtgataaccatgctgtaaccgtgaccactcagacggaagcgctgcacttcccgggtgccggcgtgaacatcactgaccggtgtgacctccccctgaaacagggcattacagagtga

SEQ ID NO: 23151 - DNA, 201 bp, Escherichia coli; identical to SEQ ID NO: 8170

SEQ ID NO: 23152 - DNA, 222 bp, Escherichia coli
gtggaaaaccattcctcctggcaccgcctgtttgtggacccgttaagccgcgccatgtacagctctgacggcccggattttgagtttgtgcagcagaaacgtaaagaggggctgagtattcatgaggcggtgtggcagctggcgtggaagaagtcagggccggagatggcttcgctggaagcctggctggaagaacatgagaaatacaggagtgttgcatga

SEQ ID NO: 23153 - DNA, 723 bp, Escherichia coli
atgcgctttgaagggaatgcttctacaaggattgcctgtcttgagccacgtatagatgagcttgagcgcgagctggaatcacttatccaactgaatggcacgccctccgggaatattcgtttatcagccggggaacatgctgcgcgcagtctggtctggccgaagctaaaatcgttcctcagagaatatcccgaaatcaatgtcgaactggtggtggataacggttttgtcgatattgttgaaggtcgttttgatgccgggatccggctgggtgaaagtgtggataaggatatgattgcagtgcgaattgggccggatatgcggatggccatggtgggatcgccggcgtattttgctgcaaaccctgcgcctgaaacgcctcacgaactacaaaatcatcgctgcatcaatatgcgtctgccaactgccggtggactttatcactgggagtttgaacgcgaagggaaaccgtttcgggtcagagttgatgggcaactgacgtttaatttgctgccagaaagaattgatgccgcattatccggatttggtatcgcctgtgttcccgaaaacgcggttcagcattatgttaagtcaggcgagcttattcaggttttacaggagtggtgtccaacttttcccggatattacctttactatcccagccgtaagcagcatccgcctgcttttgcgctgttgattgatgcacttcgctacgcggaataa

SEQ ID NO: 23154 - DNA, 162 bp, Escherichia coli; identical to SEQ ID NO: 8614

SEQ ID NO: 23155 - DNA, 903 bp, Escherichia coli
atgactaaatataacccaaatcagttttataaatttgatgtgcgaatctctcaactttcagaagaaattaacgcagcagcaagattaatttatatggtcatggttcatagctgtaacttctatgaagagaaatacaaatcatattcaccaagtattgaccatctcgcttatatggctggcgtatcaaagagaacagcaatcagagccattgagacacttgagaaacatggtttaattcaggttcaaaagaatcaaggtcgtcaaagcacttatcgtgtattcacactggatgataagccggaattacttgtaagacctacatcacaggaagttgcagcatcagtaagacaaaatgacaccactaccagtgacaaaatgtcatcagtaccagtgacaaaatgtcatgggggtagtgacaaaatgtcacccgtattagagttattattagataaaacattagatgataatattatagataagagcaaagagactgaacttaatgaagatattaaaggagatgactttctctctatgaatgaatctgaccttgatagtgaagctactaaagagacttctaaacaagataaagaaatctctgatgtgactgttattagtgaccagaaagatacacagtgccacgccgctggtgatgatgaactggaactcttcgatgattatctggatgaagatttagagcgtgaaaaggaattgaagtgcgaacaatataaagcggagaagaaaaagagattcgaactggcaaaacaaaagaacagacttagtgaacttgatgactttgatgatagtgacgatgattttacttttgcaccaagaaagaaaacccgcatcgagccaaagaaagaaaaagttaaagtcagatgtgtttatgctggaggaatgttttaa

SEQ ID NO: 23156 - DNA, 294 bp, Escherichia coli
atggctggatgcttaatcctaaatgaggaaacagcaaaagcgggtgaaagctattacagaatttcccccgatacattccagaaagcgacagatagagttaccgataagctttatagagttgagggggaatatcacgagaaggtcgccaatgaaatggataagcaaggattcaagagcctttcaactacagagagtggcgttctggatataaaaattaaagcaataaagcggctatactatggcttggggttctaccgtgggcgtggtgattgtagtcctttaagtcaaaaataa

SEQ ID NO: 23157 - DNA, 963 bp, Escherichia coli
atggtatttttattcaatactacccagtttcctagcaattactccaataataatgtagaacacaagcctcataacatattgaaatatataaataatttcataattacttatcaaaaaactatgcagttgttagccatccctctctcggctcttatgaatcgccatttacaggactatctaactgattggattcgcattaaaatttctcaaaccagagttttctatggagcagtaattgtgagtagtgaagaaagtatcacggaatcagttaagcagactttgaaggaacgagtagctaaccctttatggggttacatcattttgtcatgggtaggatttaactggaaaagcattgctatcatgtgtcttagtgaggcttcggttgttactcgtattcaacaaatcacatcgacggaagacttctatctaaaaacattatgctatcccgtagtgctggggttcattttggcgaccttttttccttacatcagcaatcttgtaacactacttcaagtcaaggcaaccgcatggcgcgtaagacaaaaagtagaagctgaaaatcttgaagagtcagccagactggcttcaaaattgaagattgaggcgcaaaagaacaaaatcgaagaagaagttttaaaaattgaagttctcaaaaaggagagagagcaacttcagaatgatatcacggatagtaatgcgagagccgatgcggcgagactccttacagaagatgctgtgaaagagtattggagatgggttgataagactgctgaattattgattaccttggataacttcaataaattaggcaacggcatgtcaatgaatcagtttaaagagagcgtaaaaaacattattgcagatgatgcgcttgatgccgcactgaaaaatgttagagacaagcagagccaaatgaataaggtgaaaagtaacccaacttactctgataccttcaggaggtag

SEQ ID NO: 23158 - DNA, 1545 bp, Escherichia coli
atgaagaaggtttatagttacattcgcttttcgtcaacgaaacaagcatttggtgatagtcaccgcagacagagcaaggccatacaggattggttagccaaccatccagaccacatcttagatgagtctcttagttttgaagatttaggacgttcagcctttcacggtgaccatctaaaagaaggtggagcactcagggcttttcttgaagctgttaagcaaggtctgataccgtcagattctgtcttgctggttgaatcgttagaccgtgtaagccgtcagtcaatcagccatgcacaggaaactattagaggtattcttgagcaaggtattacagttgtcactctaagcgacggtgaaacgtataaccgccaatctcttgatgattctctcgcattaatcagaatgattatcctacaagagcgtagtcataatgaatctgttatcaagtctgaccgtattaagaaggcatggtcacataaacgacaacagtttgaacaagacggtacaaagataaccggtaattgccccggatggttaaaactcaattctgacaaaaaatcattttcgctaatacctcaccacatagaaacgattcatagaatctttgacgaaacactttcaggaaaatcactacatgcaatcgccagagatttaaatcttgaaaacatccccacaattacaaataaaagagtggacacaggctggacacctacaagagtacgtgaccttttattaaaggagtctctaattggtgttgcttacggagtcagtgactatttcccccctgctatttcaaaagaaaagtttcatgccgtacagatgattagaggtcaaggcaaaggcaagaagccaacctcacgacaaccaagttctattgatatcctcaaagggatatgcaagtgcgcagaatgtggttctacactgcgtcagcgtaataccaagaagacaccagaaggacgctaccctagaggctatcttgaatgtcgtaatcgtcaacttggacgttgtaattctaaggcatttaaccgttcattgattgaagatatactcattcaaaaggtattccccacacttcagtatctgagccttaaaagtaatggtgacaatatttctgttaccacgcttaaagctgatatcacatcactagaaaaagggattaataacctaatcagtcttgcagaaaaaggattaggtgaccttgacacattagcccaaagaataacaaataaccgtgttgaacttgaatctaagaagaaggacttgagacaagctgaagctatcctgtcattaaggtcagataacgatatacaagacagtgaccggaaaactgtagagggacgtatcaaactacaacttgccataaagtcattcgtcaaagagataatttttgactacgacaagcaagaaataactatacgcttattgaatggtaaatctttctctggtatttcagttgcacgagaagacaaagacttcgaccatagttcaatgtttgaagtgcttcaaaagtcattattagacgttgatggagtttgcctgtaa

SEQ ID NO: 23159 - DNA, 636 bp, Escherichia coli
gtggcggtgccggaagagacggagaaaaaagcgcgcgacgtcaacgagaaaacggcgctgttgaagaagaaatccgccaccgagcttggcgagctggcgaccagtatcaataccatcgcccgtgatgcgcatatggaagcgaatctggagatggagattgttccccagggattacgcgtgctgattaaagacgaccagaaccgcaatatgtttgaacgcggcagcgcgaagattatgccgttctttaaaacgctgctggtggagcttgcgccggtgttcgactcgctcgataacaaaattattattaccgggcatactgatgcgatggcctataaaaacaatatctacaacaactggaacctttcgggcgatcgcgcgctttcggctcgtcgggtgctggaagaggctggaatgccggaagataaagtgatgcaggtaagcgcaatggcggaccagatgctgctggatgccaaaaatccgcaaagcgcgggcaaccggcgcattgagattatggtgctgaccaaaagtgcgtccgatacgctgtatcaatactttggtcagcatggggataaagtggtgcagccgctggtgcaaaagctggataagcagcaggtgctttcgcagcgagcgcgttaa

SEQ ID NO: 23160 - DNA, 1269 bp, Escherichia coli
atggcaaagctaacggacattcagatcaaagcatgggtgagggctggggaacgatttaatggtcgatctgatggcaatggcttgtatctatgctttcctaaaaactacgctatcccattctggcgtttccgctatcggtttgtcgggaaacagagggcaatggttattggaacctactctgaattttcactcgctaaagcgcgagaaacggcgaaagagctttccgcacgtgttgccttaggctatgacgttgcaggagaaaagcaggaacgtaaggccgaggctatcaaaaagattgaagaacaaaaaaatgcgttgaaggtttcagatctggcccacgagtacttcgaacgccagatcttagggaactggaaacatccagatatcctgcgccgtcgtatcgacaaagacatcaatcctagtattgggcatcttaaaatcgaagatgttcgcccccgccatattgatgatatgttgcagaagatcatcgcgcgaaacgcccctacagtggctaatgatgtcctccgctggacccgccgcattttcaactatggtatcaaacgccatatgctggagagtaaccccacaacagcgtttgagatcgctgatgctggaggtaaggagaaatcccgtgaacgctggctgagcagagaagaattgattaaattctttcaggccatgcgggtgactcaaggattttcccggcaaaacgagctgactatgaaacttctgcttgcactctgctgtaggaaaatggaactctgcgctgctcagtgggctgaatttgatttaaataactcagtctggcatttacctgccgaacgggtaaagaacggtgatgctatcgatatccccttacccgcgataaccgttgaatggttgaaggaactacaccagatgtccctcaatagccagtgggtgctacctgcgcgtaaaatgcaacacagaatgatccctcatatacaggaaagtacactgcccgtagcactggcaaaagtgcgcagcaaccttcctgatataccaaatttcaccatccatgatttccgacgtacagggcgctcacacttagctgctttaggcgttgaccctgttgttgcagaacgttgtttaaaccaccgtatcaagggtgtagaaggcatctataaccgttatgaatattttcaagaacgtaaagcagccttagagcagtgggcagcattactggcctcactggaacgcggtgaggattacaatgtgatgccgataaaaaacaacaaaaaaatcagttag

SEQ ID NO: 23161 - DNA, 1062 bp, Escherichia coli
atgaataatatcgacaatgggaagaagtcattaaaaattggggtaagcaaagatgggcacccactgagaatgcgtgtggatgcgattactattgtaaccatggcagaaaacaagaatgagagaatacttattaaacgttgggttgggagtattttcgaagatccaacgccctattctttaagacctgcgacaatatcgaagaatggaaaaaaactctatcaaaaggggtttgttatatactctggaaataccatgctgctgaggtttgaatataaaccagtaagaagaaacattggcaatataagaatggagtttcgccctcaacatttggatgaaaagggcatggacagccttattctttggatggctgaaagtggcctcggtgagtttattttcaaactcttaaaaagagcgtggattacacgcttagatgtggctctagatttgtataagtgtacccttgaggactatttttttgggatgaaacgctgctatacagggaaaatgaaccttggcacggaaactaggggattaacgctgggaacagtaaattctcatattcagatgtctatatatgagaaaattgatctgtctgatgctgagacatcctttaaaacagtaaaagccgagggcaaaaatactctcagcgtggatcagttcgcgggtttccttcgtatcgaggccagaattcgcccaaaaagtatacctcactcaaagcagagtaagaatgctctgcttctggctgatataggcaaagtagagaacccgtatgaagatctacagatctatcagaaaggtctgaacgaagcgctgtatctcactgagagtcgctttaaatatgaaaaggggcataatctggtgaaaaataaacacgactttttgaagtctgttaatctcaggaaaatgccgaagcgtcttgagaatgtgttcagaatgtatgaatatgatcttctgaataagtctgaaatatggtgtgcttggcccagttgcgtagctaaactcggcctgttaagcaacgcgccgttgtgggtcaacagcaacagaatacgccgatttggttaa

SEQ ID NO: 23162 - DNA, 198 bp, Escherichia coli
atgaacgaactcaaattgatcaaacgtcaggccgtactggagcgctgcgccgtcagccgggcaacgctctaccgaatggttgcagcaggcacattcccgcgtccggtatcgctaacaggagggcgtgcggtggcatggttgcaacacgacgttgaggcgtggattgcctccagggtacccacagggcagcgaaagtag

SEQ ID NO: 23163 - DNA, 498 bp, Escherichia coli
atgaggaacccgcaggtaaaaaagcgtgaggctgccaatatcaggaaaaaaattcagcgtgatacgttggttaaaaaatttggtaggttaatggaaatttatatccataaagatatggagaaatgtcttgaggaaattatcaggggaggagggtttcccgctttagatgttgatatgttgaaaacaactgaaggacgttgttttgttatagcagaattgattggcttcacttatttgcaacaatgttctaccgtcaaaaataagaatgaaaaaataattcgtgaaattcatcaaaaggtatgcaaaaagagagttagaaaagataaaacagtcaaggccgttgcgttggaattgaataataatagcgttttttcaataggtaaaaaagacggtgatattataatagatgacggggagtggactgatgccaaggttaaaaaaatgagtgaattttcaacggtcgctaagattattattaatctggataaaaatacatga

SEQ ID NO: 23164 - DNA, 765 bp, Escherichia coli
atgattagtatttgcgaatatacgtcattggattgggtatatatttggatgagatattttataatctcatttatcacatattcaatatttgcatacatcattaagagaatattatacccgttcagaaaagagttttcttctcctcctattacaagatggcagaatggacatgaaagcacattttttatcagccctgattactggtgggcatttcgcttcaaatcccgactaaaggcaaacgttacgggtgaaaaggtgaaggaagagttaaaagattatgtggatataaacaataaggttaacttttgtattagtgttattatcatggtgcttaactttcttgtttatgaatatgctcatgattacttttattcaaaagcgttaatgtgtatagcttttattcgatttatttctagaagttatgagatcacatatgcttttgtttgtgacatatttcagcagcatgaatccgttacggggttaaacaaacatgaacgtattcggctagctctatttagctatttagagatatttttttattcagcggcggcatatatgttattaccgcaaataaattctgtatatgatgccgttacaatgtcgttgagtgttggcacgctaacgaatgtggggtatgcatttaatttttgtgggcaaaacacacctttcattacaaacattgtgtttgttcaggtttttgctacattgagtcttgtagtactaagtcttgcagtatatctttctaggaaggatggtgacacgtaa

SEQ ID NO: 23165 - DNA, 324 bp, Escherichia coli
atgaagaagcgtattattactgcgctactcgtcacaacagcatccgccccggcgctggcaacttacccggcaagccagcctgctcaggccgcagaagtgatggtcaggatgtgtctacagcaacgtacaggcgttgataagaaaacggcgatcggtagagtctacgacaccgtaagcgactggcccatagcctcaacaacagaggttgctgcggctatggatgaaggatggaagttcgctgtacagaatagcggggctcagtgcgagaaaatttatctcgtaatgattgatatgctggcggggaagacgcacctaaagggctga

SEQ ID NO: 23166 - DNA, 495 bp, Escherichia coli
atgaaaaaaacatttatggtctcactaccgagtatcctactgcttacattatcagcagaagccaaagtgttaccgatccagtcatacaacgtcttaacggagcagttcagtcttttgaacacttgcagagctgagggatatattgtcgatacagcagtacttaagcggcttgataaactcatcaaacgctttgaataccaggatgcctccggtaccacaacccgcatcaccccggcaatggagcaggaatatcacaatcgagcggatatggacgtactgaatgcacgaatgcttggtcagcaggatcaggcctccattgtatgcaataaagtgcttaaagatttcactgaccggttcgatgagcttgaggaaaagatctcagccacgaactcgccgcaaaccgaatcccctgctttagcacccgcccctaccgagccggaagaccgcccgatgaaatgggaaaacagcccggttcagggtattccaattcagtga

SEQ ID NO: 23167 - DNA, 174 bp, Escherichia coli
atgccttcgaacgtcattatccacgggctgaaaaaattattgcagacgctttgggtaccacacctgaatccatctggcctcagcgctatgggggaaagtaaagaagtaaaaccgacagattctgatatcacaaaccagaaccagtctgacaactacatgatttttaagtattaa

SEQ ID NO: 23168 - DNA, 381 bp, Escherichia coli
atgagtaatgaacagatgactgggcccagtgatatcggtgcgatagaaagtggagagtggctaacagcagagcagtttgccggaatggaagggatgccgggcactgcgaaaggggcacggctacgtctggaaaaactcacagctctgcacccggaaatccgccgcaaacgcacgagtgggaagggatttctgtaccatatcagcgcggcagggatggcgctgaaaagtgagagggatgcgacagatgcctcagcagacgagcaacttaacctgtggatacaactgtttcgcacaatgaaaccggcctccagggataaacttttacagcaggctctgactcaggttgcgagggacctggctgaaggagacgttaaccagtaa

SEQ ID NO: 23169 - DNA, 543 bp, Escherichia coli
atgacacttccccgagacgtccatgcgtcccgtcagggccagcatgactacttgtgtggcatctacagcctgattaacaccctcagttatctttatgacggcagagttcggcgagaaaaattgatgtaccacctacttagcagctataaacgacgatgggatttatttgatctactgacgcttggcttggatgaagagcaaatggaccacctgattggtgatgtcctgttgaaagggcattacgcccgacattaccctctcaatattcacacccctttccgttaccgctcccgacgtacccgacagattctcagcgacatcaacgactggctggcaccatcggaaaatcaggcgcagcgcgtggtgattctgggcaccacctggcactggtctgtggttattcgcacggattccacccggctgttcttgtttgacagcttagggatacatagtcagcgcagggacaccttctccattcagccagagctgaaacggcatacgctgctgacggatgcaatttactttgttgaacgtgaattctga

SEQ ID NO: 23170 - DNA, 1797 bp, Escherichia coli
atgcttgagaagttagaattaaccaaaaatgcacaattttatatttccaagggaaatgaaccactacctccaatagaagatgcatttatcttggatatattaaatgcttctgatgacaatattgaacctgatgctctatatatactaaatgaatttagaactcgaagccatttaattgatgaagatatcccttatttatattcagtcaggatattccccacgattaggccagtttacttcattgggaaagatgaaggtgagcttggcctatatgacagaattcatgcgtttattattatttttgaatttgaaaatcacattagtataatcaaaaaaagctgctctaatatatctgaaaaaattgagaaaaactttgacctgattactaacacaatgatagctgagactttcaatgattctgatgtttctttccaaagaatatccttaagaaacatgacggtatcggacaaagcaataaggcagcgatcttatgaagctccggatttaaagggcactttctctactcatgctgctggaagatcaataccgctattcttgaaattcagacaaggatcaactgtaagaactatttcaggaaccgggcgtttagtcgagtcatctaatagaattaactttgataacttagctctttgggtttacaatcaactttctctaataaaagatggtgggggcgaaaaggattttttagatgcatttgcgaagcagaagaaacttcatgaagtgcttgagcactcaaaaccaaatgcaattttaattgaaagctcatctttatatgaccaactcatcgaagatgatattaaaattagatatgaaaacaaaaaaggaatagaggttgaactaaaaacgaaggaattagagcgattgataaagcatctcgaaagagtttaccccatcgattcagaaggaaaaataacaactaaatttggccgggcatttatcagaataaataataaaactttaaccttcgactcctcattcttgagatcattaaaagtaaatgtatcaggaagtaatgttacgctacaaagttatataattaaaaatggattttatagtataacttttgatgatccccgctatatgtattttattgggaactgttttcaagatgactcaggcatcgcagaaataaatagtatattagatatgttaagacccgtggaaaatatggattccgtaactagtgaaaaaggtaacttcaggaaaaccagtgtccaattttcgaaagggtcaatgtttaatctagttgagaagatacataaaaatgatgactatgttttttgcgatgatttaggtaatgaatgggctgatcacataacctttaataaaggtgactcatgcatcaatttcattcattcgaagcatggaccggttagtacttccgctagtaacttgcatgatgttgtcggacaagcggtaaaaaacttaggttacatgaattttagtaaagctgattttatgaaaaaattcgaagctaaatttgtagagaaatataattcaactaaaggtgagacaaatataaaaaggaccagaaaaggcaactcaaatggtctggatgaatatatttctaatcttttaaaggattttaaattgcatagaaaatgcattctgagctgttcctttgtatcaaagaatgaaataaaggatgagtttaataaaatatccagaggtgagaaggtgaatgggcacattactcaattgctatggatattgtcatctttttctcatgcagtaaaagaagtaaacgcaatcccaattatctactgctcagagtga

SEQ ID NO: 23171 - DNA, 1128 bp, Escherichia coli
atggctatagaattttatggcgagcggcttcggctcgctcgtttgttaaaagggtatactctgcaagagcttggtgatgctgtttgcgtgacccggcaaagtatacatcagtacgaaagtgacgttcgggcaccagctgatgacgtgcggaatgcattggcagagtttcttcaggtttccaccgatttcttcgggatacctctttctggtgacgttaagccagagcaatgccattttcgtaaaagacagacaacgcctgcaggtgttaaagagcgggttcaggcatacagtactattcttgagcaactcgttgctgagctgcatgaacacctagatatgcccgagaacggttttaatttgattgataatagtaagattgtagaattaacacctccattgatagaaaagattgctgagggggcccgtattcgttgggggctaacacctgatgcccctatagataatatggttaacgttgttgaaaatcagggagcaattgttacctgttttgatggcgtgtctgaaaaagttgatgctttatctgttaatagaaaattccctataataattcgcaacactgcgaaagaaagtgcctgccgaatgcgttttgacttggctcatgaatgtggtcatttaataatgcatgatggtattgagactggatgtaaaaaaacagagcgagaggctgatgcttttgctagtgctttcttatttcctagaaagtcttttgccagagaatttccgtcctgcttaggtgttggcggaatgattgactggaaaaaagtgtatgctttaaaagctcgatggaaagttagtgctaaagcaattatttatagagcacatttcttgggatttattaacgcccagcaatatagaagcgctaatgtttggttcagtcaaacacgacaaacgaaaaaagaaaaactggacgatcaaattccgttagaagaacctcatgttcttgaggaaagtttaactattttgaaagaacatctgggtatatctttcggcatgttagctgaaaagattaaaatcaaaccagaattattggcagatatatcaggtgttaaatacgtacctgacatagatgatggctatgacgatattgttgttccattcaagttttga

SEQ ID NO: 23172 - DNA, 615 bp, Escherichia coli
atgaagcaaccgtgggagctaaacccagctctaacaatagagcgacttaaacaacttgcatccctaattcgaaatgtcagggatgatgtgattgatttacataatgaagagcttggtgattctgctcgttcaactgggctgagggcctatgaatgttgccgaacgaggataattcgtgctgcaactcaatatgaagagtggccctggcttggcatagtgaaagacgatgggaaatttaccttttctattgattcagtgccagtccgtttgtaccggggaggccctaatcgcccggaagagcgcaggctgataccttgcgtagaagcgctgagtcagatgagtttattgcctgttgaagtaggcaacgctgcttcagttatttggttttttgctgttgaagttgatgatttccgctatgttgagcgtgtaacctttactggctttttagaaggcgtgcaggtttcatgctgggaaattcctttggatgaaagagttcctgctttcagctccattgataccgaattacctgagccagtcaaaactcagaaagcatcaatctctgttaaaaggaaagataaaaaggccgagaatgatgactcgaataatggttcgtaa

SEQ ID NO: 23173 - DNA, 192 bp, Escherichia coli; identical to SEQ ID NO: 14879

SEQ ID NO: 23174 - DNA, 357 bp, Escherichia coli
atgaaaatattcattactgagcaacaaaaagctgaacttgaacgccttcatgattccagtcgtgacgggcgagtcagagatcgtattaaagccattcttctggcttccgaaggctggagttctgccatgattgctcaggctttacgcctgcatcagacaacgatttatcaccatatcagcgaattcctgaataaaggaaaactgaagcccgaaaacggcggctcagacagcaaactcagtgctgaacaaacggccttttcatcagccagttatccgataatttatttcaccatacccgcgatgttattgcgtttgtcacccggacatggaacatcattttcagcattccggggatga

SEQ ID NO: 23175 - DNA, 444 bp, Escherichia coli
atgccacacaagaaagtagcattacagctcattgaagaaacacttaaagaactcgagtcaccaaaaggttctttgttatcggctatacaaaaactacagcggacttcggatatcatcaatgatgatgataaaaagatatggtgtgctattcaattaggtgatactaaatatacaaagccaataactgaattgcttaagtttgttattgaggctgaaaatacaaaaaataaatctttccaagaaaatttagacaaacgaatacaagaacttgccaaattaggagttaaggctaatatacattattcagatgaagaactcacattaaaaaatattgaaagtggtggtggatataataacattgggtttattgaagagaaatatgccgatcttgtaagaaaaaaacaaggcaatgacggaacgtattacaaatatataatcaactaa

SEQ ID NO: 23176 - DNA, 279 bp, Escherichia coli
atggaaggtaaattaattttttgttccgatgcaatactgcggtttcagtccgattacgatgaaacctcggcggttccattgctatccatccagaacacgatagccaataccgatcccttctttcttcttcgcttcttccatatcctgacgcttgtaagcgcgataaaccgagctacgacggtcaatcccaatccattcaatatcccatgtcgttggcccggacggttttcttacctcatctatataagcaccaacatctctgtccagataagctgctaa

SEQ ID NO: 23177 - DNA, 1617 bp, Escherichia coli
gtgtttcagcacaaagaaaaaggttcatgttttgaaatacttgacggcatgcaacggttagaagcaattacttcttttattgatgggaaatttagtgtcgatgggaagttttttgatctatcagttgttgcagaaactaaccaactattaattaacaaagaattaattcaaaacgaacctaaactcgagtttgactcctgtaaagcattgcttaattatttattaccaatatcgacatcttcatatacatcaaatgagcatgtagatgaaacattcagaagaataaatactggcggcgtaagattatcaacacaggaagtaagacaagcaggcaaaacttgtgacttctcccagttagtccggaaatgctctatatatataagaggtgatgtatcacatacagatattgttgaattggggaaaatgagagcaatcagtttaacaaaaaacgaatctgattacggtataaaaatcagcgatactttttggaataaaaatcatattgtcactacagccaatgttttagcgtcacgtgatgaagaattggttgcgcacattctactgtctattttactaggaggtaaaagtcaaaccgcatcaaatttcctgaatgatgcatatcttgaaggtgcccctaccaatgtaaaagctaatgattcaatagctaagcacggaatagataacctatataaacagttttgctttgtatatgatgagataaagaaaacaataaacgaattcccttgcatttactccaagcatctatataagagcaagcctgtaggtgtttcagattcttttcaggtagttttccttgctttttatgaacagatgtttaagcagaataaaaaaatacagaactataaatcactatccaaattaatgaaaggcttagccagtgagtgtatgtcaggattaagcaataatagaaaatggacatctgctgacaggacaagaatgataagggctgtatcaggtgtgctctcaccacagtttattgctagagagggaatggatccactatcacaatcttgggtagagaaccttgaaaatattttaaatcaatcccgaacagaaaatgtttgctatgattttaagattggtttttacccgctcaacgaatccaatgattttaattccgctttactttctaaagtcgtaaaaacattaaccgccatggcaaattctcatgcgggagaaaattatatagttgtaggtgttgctgataatcatcgtgatgcagaaaaatattgcgagaagtataaatccaaagctagaaaatgtggtgagttttatataacaggaataaaccacgaagctgatgcgaatataacgaacattgacaggtatcaacaaaaaataaagcaactaattgaaagggaaccaataaatgacacaacaaaaagattaatattacgaaatatcctactttgcaaatattatgacaaagatgttttaatcttaaagataatccgtggtaaagatccaattaaatatgatgggagtatttatattcgtaaaatggctaatacagaccctaccccaatcgctcaggacgatgagttcgaattttataaagaatttatcgagcaatcttcacgttatccatatttatag

SEQ ID NO: 23178 - DNA, 171 bp, Escherichia coli
atgagctttgaagctaaaaaggaacatgccattgccatcatggaaagcaagaaaatgtggcgtagtaactatgcgcctcctttgctacgcctcgcatggaaagctggcctcaagatcccaccgttgctttttgcctcgttctggcaaataaccttgctgatgggaggttag

SEQ ID NO: 23179 - DNA, 243 bp, Escherichia coli
atgattgatgaattccatgttatgtatatgtacaaaaaaattcaagctgaagcggctactaccgacatcaaaacactggaacagtttttgaagaagttccgccaagttgttgcggagcgccgggaggaatactatcgggagattggtgagataaaagcacgtaagttgagaatgaaaagagcacaaagattacttgagaaaatgacatgtgatcgtgtttcaccagaggatctcaaggaatga

SEQ ID NO: 23180 - DNA, 318 bp, Escherichia coli
gtgcataaacgcatcgatattaaaaactggtcaggcaatcaaaaatcctctggctgtttaccccatgaacgtgcatggctcgatcatatctatgatgatttaggttatgtcgatacattccgtgaagtccgtcaagaagcagaactgtactcttggtggtcaaatcgcgggcaagcccgtgctaaaaacgtcgggtggcgtattgattatcatgcctgctcacctgactggaaagaacgcacagtcaatgcttgggtatataaagaacaatggtttagcgaccatgcacctgtgattattgactataaaatcggctaa

SEQ ID NO: 23181 - DNA, 1827 bp, Escherichia coli; identical to SEQ ID NO: 8859

SEQ ID NO: 23182 - DNA, 921 bp, Escherichia coli
atgctctatttcaacagttgggaacgtccaactgatgatgtagttgatgaatcaacgcatggttttatggagggctttaataaactttttaccgatcttttctcaacctttaagctaaaaaccttcagaacccatcttggtatgtatctatttggtttcggcgctgaatggctatttacagcgacatttacctatttcattgttttcaaccttgaacaaccgagaacatttgtttctgagatgaactcattaagcagtatttgtcagttcttctctacagcattctttatgatgtggtgtgccaaacgaggatttaaacgcccatttatcattgctatcttaattgttgtatcttcagtgattggttatgttggtgtgtactatcttaatattccccatctgacctggctcattattggcatcactatctggtttggtctggggacggggggggtatattacattccgtggagtgtatatgtattccttgccgatgttgatgaggtcttaactggtcgtcgtcgtgaaggtctttatgctggtgcaatggttatggccggtaagttaatgagagccactgtagtattttgtctgggggttgtcctcagtctgtttggttttgagtcaggcattcatcatcaatcagccagtgcagtaaatgcaattaatggcgtcatgatatttggtgtggctggtatggcgttaataggtatctatttctctgtaaaaatgaaattagataaagcatctcacgccgaaataactaaagaattagagcgtctgaaaaaaggtggcagaaaagaagatgctacaccggaaattcgtaagcttgttaagcaactgactggttatgaatatgaccagtgcttcggtaataacaatgttggctttaaatttgaaaacaaagcaggggcattctag

SEQ ID NO: 23183 - DNA, 162 bp, Escherichia coli
atggttgacgcatcagctcaaccccatatagttgtaacacttgagccaaacccttgggccgctttttactttgatattaacattgctaatacagggaacgcacctgcctataatgttgaggttgtgtttgatcctccactagtaaatgaagtggtttactga

SEQ ID NO: 23184 - DNA, 156 bp, Escherichia coli
atgctcaccagcggtgaactgaatccccgccatcagcataccgtcacgctgtatgcgaaagggctgacctgcgatgccgacaccctcgggtcctgtggttacgtttatctggctgtttatcctgcgaccgaaacggaaagtaaccctccggaatag

SEQ ID NO: 23185 - DNA, 441 bp, Escherichia coli
atgaaacgacttctgcttttgacggcactcctgccgtttgtcggctttgcacagcccattaatactctgaacaaccccaaccagccgggatatcagatccccagccagcagcggatgcagactcaaatgcaaacgcagcaaatccagcaaaaagggatgctgaatcagcaactgaaaacgcaaacgcagttgcaacagcagcatttagaaaaccagatcaacaataattctcagcgggtgttgcagtcacagccgggggagcgaaatcccgcccggcagcaaatgctgcccaacaccaacggcgggatgttaaacagcaaccgtaatccggatagtccgttgaatcagcagcatatgttgccggagaggagaaacggcgacatgctgaatcagcccagcacgccgcagcctgatattccgttgaaaactattgggccgtaa

SEQ ID NO: 23186 - DNA, 2001 bp, Escherichia coli; identical to SEQ ID NO: 21081

SEQ ID NO: 23187 - DNA, 693 bp, Escherichia coli
atgtggtggggcgggttgttgtactggctggctgcattagtgacgctgctatgggcggccagccagatccaggcgctgaaaagactgaccagtgccatccgccagacactggaagaacaaccggtgctcaacagtaaatcgtggctgagcagtttgcaaaacgattacagccttcctgaaacgctgacggagcgcatctggctgacactcatttcacaacggatttcccggggagaactgagggaatttgaactggcagacggaaactggctactggacaatgcctggtatgaaagaaacatggcgggtttcaacgaaaagctgagagagagcctgtcatttacccctgatgaactgaaaaccctcttccggaaccgcctgaatttatcaccggaagcgaatgacgattttctcgatcgttgcctggacggcggtgactggtatcccttttcagaaggtcgccgttttgtatcattccatcacgtggatgagcttcgtatctgtgcctcctgcgggctgacagaagtacatcatgccccggaaaatcataagccggatccggaatggtactgctcctctctttgccgcgaaacagaaacactgtgtcaggaaatttatgaacgcccttacaacagctttatttccgatgcaacggcgaatggtctgattctcatgaaactgccggaaacctag

SEQ ID NO: 23188 - DNA, 651 bp, Escherichia coli
atgtttgcttccggagggcagggacatgggtttgccgctgaacggggaaaccatattgtcgacagagtccgtctgaaaaacgcacggatcctcggtgataataatgccagaaatggagcagacagactggtcagcggaacagaaatccagacgaaatattgttcaactgcagcccgtagcgtcggtgcggcattcgacggacaaaacggacagtatcgttacatgggaaataatggccccatgcaactggaagtcccccgtgatcagtatgccggcgctgttgaaaccatgaggaataagatccgcgaaggtaaagtacccggtgtaaccgatcccgcagaagcgtcccggctgattcgtcggggacatctgacttatactcaggcccgtaatatcacccggttcgggaccatcgaatcggtcacttatgatattgccgagggttcggttgtcagtctggcggccggagggatcagtattagacgtcaactagttttgccgactcgcgccaactatactggccgcacccttcagtgcgacatcaagtcgcgcttgttactgccttcgctgtctttttcctgtagctttcacctttcagttcgaacatatatccgtgatggatcagccggtctgccgccgccaccgccatag

SEQ ID NO: 23189 - DNA, 684 bp, Escherichia coli
atgctgaagcacattgatttttcgactgccagcccgactgtccgactggctcttcagaaggggaccggtgcaggaaatatcagtgccctgaacaaagtaatgaagggtacgctggtgacatctctggcactggtagctgtcacaaccggccctgacatgatcaaaatgttgcggggacggatctccggtgcgcagttcatcaggaatcttgccgtggcatcttccggtgtggcaggtggagctgtcgggtcagtggcgggcgggatactgttcagtccactgggaccatttggtgcactgacagggcgtgtggttggcggtgttctggggggaatgattgcctccgctgtatcaggaaaaattgccggagcgctggttgaagaagatcgcgtcaaaattctggcaatgattcaggagcaggtgacatggcttgccggcagtttcctgctgaccggacatgagattgaaaatctgaacgagaatctggcccgtgttatcgatcagaatgctctggagatcattttcgccgccggtatacaacaacgggccgcgaccaatatgttaatcaaaccactggtggtcagtatcatcaggcaacgccccgtcatggaatatgatgcatcccatctcggcaatatggttaaccgactggaagaagcattacccccggagttaccggcataa

SEQ ID NO: 23190 - DNA, 324 bp, Escherichia coli
atggccgttactttcttcagttgctttaatgatttcggttgtggcgacattttccacgcactccgtttccagaaatgcgtctgtggttcgcgtggcattactgtcaccaaaggcttccgtttccatttttctggtcaccagcgtctgagcatatttgtctttgagttgcagagtgatggtgagggggccaaatccttcatcgtttccgccattatccagccggaactggtaagcacaaatatttcccgggagccatatcgtatctgtattgcgtatactgatgtaacgttgatcctgtgcccggagtggggcagaccacgttaa

SEQ ID NO: 23191 - DNA, 465 bp, Escherichia coli; identical to SEQ ID NO: 15842

SEQ ID NO: 23192 - DNA, 324 bp, Escherichia coli; identical to SEQ ID NO: 23068

SEQ ID NO: 23193 - DNA, 681 bp, Escherichia coli
gtgctggccgccacaccgaaagctgtcaaggctgcatatgatttggctaatggaaagcaagcggcagacgctacgctcactgctctagcggcactagctaccgcagcagataaactcccttatttcacaggggttgatcgtgccgcgttaactgcactgacaagtgttggacgtgcaattcttagtaagcccagtattcagagcgttcttaattaccttggtttgggggaaggctctgcactgcctgttggtgtgcccgttccgtggcccttagaaacaccaccaacggggtggctgaaatgtaacggagcagcattttcttctgaaaagtacccaaatctggcaaaggtttacccaacgttaaaattacctgatttacgcggtgagtttatccgtggttgggatgatgggcgaggtgtggatgcgggaagggtcatcttaagcatacaggggtggttaacaggaagtcattatcataatattcggtcatgggacgcgtgggataacacggtattggtgccaaatgacagagggggggatagtctgttgtcgacagataacgccgtccaagaaggagcgattaatggtaaatttaccagtcaatacagaacggagttatctggggggaatgaaacccgcccacgtaacattgccttcaattatattgtgagagcagcataa

SEQ ID NO: 23194 - DNA, 735 bp, Escherichia coli
atggatatagcaaagaaactatcactaagtgatgaaaataaagaagaactattaattgaattagtaagatttgataatgtaaagaacataaaatcgattgatattgattttcttttgccttcaaagaatgatgagacgctattaaaattatattataatgtaaagcaaagcatcccggaaaacatcgtaaagagatattctcatattgatgatatgccctattttgtttttgagttttatttagatgagttattgtcaaaaaaagaatttgaaggctattacgagtacttaaacaattcaaaaaacaaagtgcaatatcttgacaataacattaataaatataaatacatcaagtgtatctttaatatactcggccctaatgctttttatgaggaattatgtgaagtatctaaagaggattgtctacataaatcctttaattatttgtttttaaataatataacttctgatgcggggctttttcataaaataataaagactttaataactttggggttacataatttttcttgtttggaagtttacaattacatactgtacttttataagcaagagcggcctgatctggctaaagatgtcatgtatatcttttctattaaacaaaatgttaaacaaaatgagcgattttataatgattccaaaaactggaaaagtcatgatgactatgacacattagttaaagcggtatctgagcttgaaaattcgatgaaataa

SEQ ID NO: 23195 - DNA, 201 bp, Escherichia coli; identical to SEQ ID NO: 8170

SEQ ID NO: 23196 - DNA, 945 bp, Escherichia coli
atgaaaaaaagcagtaaaagaataaaaaataaagattttgctaattcattattctgtaaaatgtggggaggagttttaagatctgagtctttatataatgcttataaaaagaaggggtatacaataatattttaccctcaccctaatcttgctgattacattagtgacttaaatattccagattacgttaaaattggtagtttagagaatgaaagtatccagagtattttcaaaaaaactaatttgcttattacggattattcatcggtggcgtttgatatagcgtatatgaaaacgccagttatttattttcagttcgatagcgacacttttttttcaaatcattcatattcaaaaggatattttgattataatgattttgggtttgggcctgttgtaaaaaatataaatgacttatctgaacaactaaatctaatagttgataataactgcaatcttactgatttttatatgtcacgtataaagtcatttttcccattttcggataataataactcatctagattatataaagttttgagtgttggagtaaataaaaaacatgatttggaaacattgtataattatttgctaatgttcacttcaattatcgatattgaaggtatagcgctaatgttaaataactataagcaacaactacaaaaaatattatataaagagggttgtgatatatgtgtggttataaattgcttatatttgattgctaatgtaattgatgagcctaaattaaatttagccataagaaatttactagatggcgtggaattaactaacggggcacttaaaaaaaatcattcttttggaatgaataatggtgtcgatagccgtatatcatatattgaagatcaaatagaaacattatcaacaattattgatactaatagtaaactgttaagaggtgatgatgccaacttactgatttag

SEQ ID NO: 23197 - DNA, 201 bp, Escherichia coli; identical to SEQ ID NO: 11564

SEQ ID NO: 23198 - DNA, 549 bp, Escherichia coli
gtgaaaacgggggccgaagccatccgggcgctggccatgcagatcccggcgtttcgtcagaaactgagcgacggctggtatcaggtacgcattgccgggcgtgatgcaggtgaaactgaattatcagcccgtcttaatgaaccgctggcaaatggtgccgtgatccacattgtgccgcgtctggcgggagccaaaagtggcggtctttttcaggctgtgctgggggcggcgctgattgcggtggcatggtggaaccctgcaggttggttgggggctgccgcaattacaggaatgtatggtgcgggggccagtatggtgctcggtggtgtggcgcagatgctggcaccgaaagccagaactccccgtacacagacaacggataacggcaaacagaacacctatttctcctcactggataacatggttgcccagggcaatgttctgccggttctgtacggtgaaatgcgcgtggggtcacgggtgatttcgcaggagatcagcacggcagatgaaggagatggtggtcaggttgtggtgattggtcgttga

SEQ ID NO: 23199 - DNA, 174 bp, Escherichia coli; identical to SEQ ID NO: 22718

SEQ ID NO: 23200 - DNA, 576 bp, Escherichia coli
atgcctaagggtatctatgacaaaacaaatagtgggtatgtcgaaaactggaaagatatatcaaaatcaatacgagaaaaggccaagtatacttgtaataattgtggtgtgaatttatcaaccgccaaaaacttgtgccatgtccatcataaaaatggcatcaaatatgataatcaccatgaaaaccttcttgttctgtgtaaggattgccatcgtaaacagcccctccatgaaggtatattcgttacccaagctgagatggctatcattcaacgtttacgttcccaacaagggttattaaaagccgaatcctggaatgaaatatatgacctgactgatccatcagtacatggtgatattaatatgatgcaacataaaggctttcaacctcctgttcctgggttagatcttcaaaactcagaacatgaaattattgcaaccgtagaagcagcatggccaggccttaaaattgcagttaaccttactcccgccgaagtcgaaggatggagaatatataccgtgggtgagctggttaaagaaatacaaacaggagcctttacgtcagcaacgttgtaa

SEQ ID NO: 23201 - DNA, 756 bp, Escherichia coli
atggaagccgttaaaactaatatccttggtacggaaaatgttcttgaagcagctatagcgaatgaagtgaagagggttgtatgcctaagtactgataaagctgtatacccgattaacgcaatgggtatttcaaaagctatgatggaaaaggtcatggtcgcgaaatcccgtaatgttgatcgcaataaaacagtaatatgtggtacccgttatgggaatgttatggcatctcgcggttcagttattccattatttgttgatcttattagagcgggcaagccactcacaataactgatcctaatatgacccgctttatgatgactcttgaggatgcggtagatttagttctttatgcgtttgaacatggtaataatggtgatatctttgtgcaaaaagcacctgcagcaactattgacacattagctattgctttaaaggaattactaaatgttcctgaccatccggtaaatgtcattggaacgcgtcatggcgagaaattatatgaagctctacttagtcgtgaggaaatgatcgctgctatagatatgggcgattattaccgtgtcccgccagatcttcgtgaccttaattatggcaaatatgttgagcaaggtgatagccgaatatctgaaatagaagattataactctcataatactcaacggttagatgttgaaggcatgaaagagctcttgctaaaattagcctttattcgagcaattcgtgctggtgaaaaatataatctggattcatga

SEQ ID NO: 23202 - DNA, 462 bp, Escherichia coli
atgtctttggcacttcatggaaaatatgaacttgaacttgctgctcaaaaagcattagagcttttacattatgtatcagacataaccaatgtcgatggaaaaattttagctattatgggactgataactggtctgtctggacaagcaaaagtatctcatatcttatttgaacaggctaagatacacacaactgatatagcctctctctactactatagagcacttgtcaattttcataatgaaagaattgaagaggcaaggatttgtatagacaaatcactacaactcgaacccagaagacgaaaagcagttgtgataaaagagtgtgtagatatgtatgtgcctaacccgctcaaaagcaacatgaaactctactataaagaaacttcgagtgaaagccatcgagttataattgacaacattttgaaactaaagcaactgacaagaatttgtatgcgataa

SEQ ID NO: 23203 - DNA, 816 bp, Escherichia coli
atgaagtatacagtcgttggtagttcaggtttcattggttcacatatggtaacatttttagaatcaatgaataaagaatgtttctgccctgacagagactatctttataacaaagaaattgaccttggtaccgtcttttattgcgcaggctatggcgattgcaaaagtgatgcctataatgttgtggatgcaaatgtcaataagctaaaagtaatacttacacaagctaatttccagaaattagtctacatttcttccactcgtgtatatttgaactccagagattctgcagaaaattcagatctaaaaatttgtcacaatgatggtcgcaagcttttcaatttgacaaaattggttgctgaagagttatgtctaagaagtaaaaagaacgttgtggtcgtccgaccatcaaatgtttatggactcgcactaaatagcccgttattccttccgcaaataataaaaaatgcaatcaataacaatcatgtcgatatgtatgttagctctgactacgagaaggattatgtatcggtagatgatgtggttgccgtcatgtataagctagcagaatctataacttcacccggagatatttataacattgcatctggatataatgtttcagcaaaatccatcgctgacattttaatatctgaaacaggttgtaatatacagtggcacaagaatgatacatgcgaaacatttcctgttatcacgatgcaaaaaactaactcaatagtcccacatcattataaaaatgtattgaatgatttagtggatatgataaaagaattcaaaaaatctcagggaagataa

SEQ ID NO: 23204 - DNA, 543 bp, Escherichia coli
atgaaggtaattgagactccacttgctggttgtgtaatcattgagccaaaagtctttggtgactctcgtggtttctttttggaagcatggcatcagaagaaatatcacgacataggaataactgaggcatttgtacaagataatcgatcacgctcagcaagaaatgtgcttcgaggtttacattttcaaaaaaataatcctcaaggtaaattagtaagtgtcatcagtggagaagtttttgatgtggctgttgatttaagacctggatcttcgtcttttggaaagcatgtaggtgttatactttctggggataaaaataatcaaatctatatcccacctggatttgcacatggtttttgtgtattaagtgagtatgcggatttccattacaaatgcacagacttctatgatcctaccgatgaaggggggataatctggaatgacaaagaactgaatatacaatggccgatagacatgccaattatgtcatctaaagacaacgcgttaattagtttttcagaatttaaagaagctagcttataa

SEQ ID NO: 23205 - DNA, 753 bp, Escherichia coli
atgaagtttttaccctatatttttcttctctgttgtggtctttggtcgaccataagtttcgcagacggagattacatcgaatatcgtggcatcagtagtaacaaccgtgtcacacttgatccactacgtctgagcaacaaggaattacgttggctcgcgagcaaaaaaaatcttgtgattgcagtacacaagtcccaaacagctacgttgttgcataccgattcgcagcaacggattcgtggtattaatgctgattatttaaatcttttaaaaagagcgttaaatatcaaattaacactccgggaatacgcagatcatcaaaaagcaatggacgcgctggaagacggtgaagttgatatagtgttatcacatttagttgcttcgccgcctcttaatgatgacattgctgcaactaatcctctgataattacctttcctgcgttggtcactacccttcacgattcaatgcgaccgcttacctcatcaaaaccagtaaatattgctcgagtagcaaattatcccccagacgaggtaattcatcaatcatttccaaaagcaacaattatctcttttacaaatttatatcaggcattagcatccgtctcagccggacagaatgattactttattggtagtaacatcattaccagcagtatgatttcccgttattttactcactccttaaatgtagtgaagtattataactcaccgcgtcaatataactttttattaaccagaaaagattcaatctga

SEQ ID NO: 23206 - DNA, 936 bp, Escherichia coli
atgaatagtatagcaattttagaagcagtgaacacctcttacgtaccattcaacggtcagcaaattatcaccgccatggctgccggagttgcatatgttgcgatgaagccaatcgttgaaaaccttggaatgagctggtcaacgcagcaaacaaaactcatgaagcagattagcaaattcaactgtgttcatatgaacatggttgccgctgatgggaagcttcgtaagctactctgccttcctttgaagaagctaaatggatggctgttcagcatcaaccctgagaaagttcgtgctgacatccgtgataaactgattcagtaccaggaggaatgctttagcgtgctgcatgactactggactaaaggccatgtagttaacccacgcaaagctaaaaaggcgttgccgggtaaaatcaccactgaacagcaggaagccattaaacaactcgtcatgagtcgcggtcagtctctgccaaaagaaaaacaggcgaaggcgatgatcaccatgtggtcgtcactgaaatcccattttggatgttcgtacaaagaaatcagtgatgagcagtttaccgaagcactgtcacttgctgctcgcgttccgcttgaaggtgagttcattggcaaacaagagaagaaaaccaacgagctttctgcaaaagaagcaaacagccttgtatggttatgggattatgccaaccgctcacaggcgttattccgcgaactgtatccggcattaaaacaaattcaatcgaactattccggcagatgctacgactatggtcatgagttctcgtatgttatcggaatggcgagagacgttttaatcaatcacacacgagatgttgatatcaatgagccagacggaccaacgaatctttccgcatggatgagacttaagaataaagaattacctccttcagtacataactactga

SEQ ID NO: 23207 - DNA, 336 bp, Escherichia coli
atgagatttctatcactgttcttgttagcagttgtctcttcttccagtgctgagctgcgcgagcttcaaacgggtaatgaccttctttacaacattcaacaaggtaaaaagggtgatgatttttcatcgctttacattactggatatttgcgcggagtaactgactcattgatactaattggttctctatgtcctcctgatggcgttgacatgtatcaatacaccgatatcgttgagaaatatctaaacaaaaacccagaatcaagaaatgagagcgcagttatactaacagccctagcagtaggaaaaacatttccgtgcaaaaagaatcaataa

SEQ ID NO: 23208 - DNA, 516 bp, Escherichia coli
atggaactgaatgaatacttcgaataccgcgatggttctttggtttggaaagccagaagctctgaatttttcaacaacaaaaagaatcgcaactatcacaacgtttggaatgcaaaacacgctgggaaagttgctggtcttttagaaagcaatggatatatccgcataagaattaacggcattaagtggctagcacaccgcatcgtatgggtaatgtttaacggagatattccagaaggcatggaaattgaccatataaatgggattcgccacgacaacagaattgaaaatcttcgtcttgtgaaaaaatcagcaaaccaaaggaatagaatcaaactatctaaaaataactccagcggaatatctggagtttacttttgcaacacgcggaaaagatggatcgcgcataagcgactgcttaatgcaagagtgcaaaaagtatgttcttcattcgaagaggcgaaagaagtaatcagaaagtttgacgaggaaaacaacatcacgatatcgaaataa

SEQ ID NO: 23209 - DNA, 207 bp, Escherichia coli
gtggttgagttgattttctctgcattgaggcttctcggtgctctgtggatggtggcgacgttcattgtggttgctggctgttttgtccggttggtaggcgaaggtaaagacctggggaatatgcttttaggtagcattttcctgtgggggattatcggtgttgcgcctgtcgctgtagcaaaaatggcgtggcgttttgttagttga

SEQ ID NO: 23210 - DNA, 225 bp, Escherichia coli
atgaatcagacatacattccatcatgcttgagaaatctgccaaagcagaaagcaaagccccgcaagcaagccataaaggacgctaaggcagaggttattgatcaagcaatacaattgctcagggaggagttaagaagtggcaagctcgaaggaatgatgatgccctatcagcgcggatatctatcggcgattagtaagttggaagtattgaagagtgaattatga

SEQ ID NO: 23211 - DNA, 252 bp, Escherichia coli
atggagtttcatgaaagtgcgatttgtgattttcgcgctaacgcaaattcagtaaaaccacagccaattgcagttctttttaaaacaatgggtgcgtgggctgttttatgcttcgcctctgacgacactgacgcgagaatggcaataggccaagagatggagatggacccgacaaacgatgaattcataatttatggcgctccatctaattacttacttgatacctgcaacatttacaacaaggctgcctga

SEQ ID NO: 23212 - DNA, 297 bp, Escherichia coli
atggaatttaaaggtactgaaggtaagtgggaaataatgatggatggcggtgagattaaaatcatccaggcagactcacttgaaaatggcgcaggctggcgttcgtatattgcaatctgtgaggaagttcaatgcattgaagatgccaatctaatagcggcagcacctgaccttctcgaagcacttcagttattacttaagcaaaccaaaaatagaacaaagacaacatatccagaatggtatggagctgttaataaaggtcttgcagcaatcagaaaagctcttggggaagaatga

SEQ ID NO: 23213 - DNA, 645 bp, Escherichia coli
gtgagcaaccgcttttacatgatgtgctcgcgtgaaactgtgggtaataacgcttcattccattgccataacggcaatggttacagttctgatatcgatagcgctcatgtttacacgctggaagaagcccaaaaagcctggaattgtggacgagatatcgatcagcctgtttgcgctgatagcgtggatgcaatggcagtgtggcacgttgattgccagtacatccctacagaaagcctgattgagtcagattgcactgcgtatgtagcctacaaaaaaggtagctggaacggcaacgatgtttactggcttcaacatggtggattgccaaccgatgacttcagtaaagcgaccatctttagcgtcgccaacaaaaaagaaccaggaatagtttggttgccattttccattgctgatgcagcaaagcgtcggacgttcaatatcaataattttaaccgcagaacaatggttcagggcgcaggtttggtcatgcctgactggttgaaaaaacaaaacagaagaaaaaagtcgcgaagcggtaaggtgcgctggaattgtccgcattgcggaaaaattacctggcagtacagcccatatgattttgaaggatgtcgtgattacaactgtgaaggatggcgagtatga

SEQ ID NO: 23214 - DNA, 285 bp, Escherichia coli
gtggctaacctgcaacttgccgtcaaaggtgaatacttcgatgccataattcgcggagagaaaacggaagagtatcgcctgtgtaatgactactggaataagcgaattatgttccgggagtatgaccgcctgattatcacaaagggatatccgaagcgcgacgattccagccgtagaattgatgttccgtatgacggatatgaaatcaagacaatcacacatccgcacttcggcgataaaccggtaaaagtgttcgcgataaaggtgaatatcggcaatgaataa

SEQ ID NO: 23215 - DNA, 174 bp, Escherichia coli
atgacgccaaccattgaacttatttgtggccatcgctccattcgccatttcactgatgaacccatttccgaagcgcagcgtgaggcgattattaacagcgcccgtgcgacgtccagttccagttttttgcagtgtagtagcattattcgcatggtaatgactccaacttactga

SEQ ID NO: 23216 - DNA, 513 bp, Escherichia coli
atgtttttgagtgagtatagcgggaaggttatacctactggtgagtttaaaactgatgactttctgatttcgctaaaagatgcttttaaacaacactggcgtcatggtcatcatcctgatctgggaaaagatactctttttgaaagaccagacgaagtattaggcttccatctcagaaaggttcatgtcaatattggtgaatatgcatcatattcatactcatgtactgaacagtgttgggatgagtggtcatatggattgattgatgaacaaggaaattacaggccaaaaccaaccagtaacgcatatctcatatatgcagtcaatgaaataagagatgcagccttactagcttattgggacccgcccgcacacaccaaagctaacgcaaaagtttggatggattccgtattgaatttcacaaaattatttcatgaacgaacgaatacagctccacttagtagaaatgtttatccgtgggattattcgtacaaatccaaaaagcctgcatag

SEQ ID NO: 23217 - DNA, 327 bp, Escherichia coli
atgacaaaacttggattcgtgatgagaggtccggtaagaagcggaactcatgcaaagcgtagcaagagtcgtatttttactggtaaggttgtagcacgtaaatcagctattggctcgttcaatagtgaaaatgcggcattgcgccatatttttatcagcacaaagccaagagcatccgctgatgtgcatacaatgtctattcctatcacaaagaatatcaagcggataaaaaagctctcatctgcagaatcaaaagagatatctttccgccagcttaactcattagaaacgcatatgaaggaagaggaattcgatgtttttgagtga

SEQ ID NO: 23218 - DNA, 867 bp, Escherichia coli
atgaaaggaattatattagcgggaggttctggtacccgactttatccgattactcgaggggtatcaaaacagctcctacctatttatgataagccaatggtatattaccctatttcagtattaatgctggcagggataaaagatatacttcttatttctactcccgaggacttatcatcgtataaacgcctgctaggagacggatcccggtttggaattaaccttcaatatgctattcaaccaagtcctgatgggttggcgcaggcttttattattggtgaagagttcatcgctggtgatgaatgtgccctggttttaggggataatattttcttcggtcaaagtttcggtcgcaaactggaacaggtggcttccagaaaaagaggagctacagtttttggctatcaggttatggatcctgaacgatttggcattgtagaatttgacgaatcatttaaggtgctctctgtcgaagagaagccacaaacaccaaaatctaattgggccataactggactctatttctatgataatcaggtggtggattttgcaaagcaagttaaaccatctcctcgtggtgagcttgaaatcacttcaataaataaaatgtatcttgagcgggatatgcttaatgtagaactcttgggaagggggttcgcttggttggatacgggaacacatgatagccttattgaagcttctcaatttgttcatactatcgaaaagcgtcaaggatataaagttgcttgcttagaagaaatagctttgcgcaataaatggctgactgcggagcaggtcctgactgaggccaggattatggagaaaacacagtatggtcaatatttatttcaattaattggaaagtga

SEQ ID NO: 23219 - DNA, 531 bp, Escherichia coli
atgaaaaatatacaacaagatattcaaagatataaagaattgattgggaatgaatctgcttttaaatttaaagactattttagaatttttagccctcgtttgattcccaatgtaatatataggacatcctattctttaaaagaaaaaggattcagaagaatatcaaaatgttgttcacttttaaacgtcctcatttttaacattgagatcgcaactgaatgtgagattaaaggtggacttttcataccacatacctttggcatagttatcggtgcggcgcgtataggtgaaaactgcactatatatcaaaatgtcactattggtgcaaaaacacttgatatgaaatataacaaggaacttcgtcctgttattggcaacgatgttatattggccactggatctgttattttgggacctattgttattaacaatggagctatagttgcagcaaattctgtagttctaaaagatgtcggtgaaaaggaattagtaggcggcactccagcgacatacctaaaaaaattagattaa

SEQ ID NO: 23220 - DNA, 1092 bp, Escherichia coli
atggctaatatatattttctttttggtactcttttcatttttagtccggttttttttattattcagttttgcgttttttttctggtgtttatacagggtaaatgtaaggtttcatcgcaagggttgatatttattctggtatcgttcacatcgcttatttttcatgtattctttggcgtagtggataaaatatttatttttactttggtatgctgcttttatgcattgacagtaccatcaatctatagctattgtgtaaaaagaattaaaagctgtgactggcttaaggtgatcgatttttgcatcaagtttcacatttttactttcctgttgcagtatttagctttcaaaatcattaatgtggatatcgattatgggaagttcttgttaggtcctccacaccgtagcagttatgacggtttcgattacagagcaacaggagtatttgccgaaccgagtattttctctatacatatggtcacattattagtgatgaggtatattgtagctaataataactcattactaagttatatagcattaatgtgtatggtgttatccggttcgactttctctgttatctgcgttatgttattttttattcttacctgtagattgacactaaagtggatcgcaaccgggttaatatcgttagtactggtttctccgataatatatcaaaacattatgtggcgtatgtcttatatttcatctggtagtgatggtagcacatcatataaacttgagttgatgaaatcattctttgatagccctcttgtttttaatattggccacggtatggttgggtattatgacaatgcaccagactattttcagtctctttttgatatgacgttattcggaagtaatttcatcgtttttggcttttggttaggcagtatccttagtgtatcatggctggtattgttcctaaaatattcacgattctcacttagattgatgttattatgcctgctcccctgccttaaactaaccttccttttccctatgttttggctatatctggtgtttttagcaggatacgcaggaataaaaaatgaaaaatatacaacaagatattcaaagatataa

SEQ ID NO: 23221 - DNA, 972 bp, Escherichia coli
atgattagcattattagccctgttctcggtagctcatcaaaagtagaaactttcatctcagctctgctcgctaatactcatggacaaaagaatatactaaagaatattgaacttatcatcatcgatgacggttctgaggtgaatttggaagacacaactattgccttttctgaaaaatttaatgagcgcgaatggcggttagtgttcttacgtaatgaaataaatgaaggtcgcgccttttctcgaaatagagctgcgaaatcagcaagcaatgaatggttattttttgtcgacatagacaatttgctccagcaaggttgtcttgatagcctgcattcaatgattttgtcctgcgagaagccttttgtagcaagggctaatgtcagatgtcggcaagatttaacccgcgacagcaattacctacactactttgactcccgatatttggggaatagatataaaggaactgttaaaattgagtatcgctactttgcaagcgatgctttcctgattagcaaatccgagtttgaagcacagaaagggttcgatgaatcattccggcattatggttgtgaggatgaagaatttggggcgcggcttcgtttaagctctgttccgtttttcttttgtagcgatgctttactctacgataacgacacccctaccctcgatagggcatgtgaaagaatgattccttatgcaaggtactcagtaccgcttttggttaagaaacatcctgaaattgtagataaattgctatttccccaggctgagcggaaaggtagtatgaagtcaactgtgcttagagtagctttgtcttgcgctaatagtattaaacttaataaatttgtaagggttgttcttaataagttagacaataggaataaatttaaaatcagagcaatattttacaagttagtcttggctatgtattatatagagggttattcaaaaagggaaagaaatggctaa

SEQ ID NO: 23222 - DNA, 1257 bp, Escherichia coli
gtgaataaatcaattattgcgggattgcttgtcctgttgtttgagcgatttgtacagattattagtgctatttatgctaaccatcttatctcaaaagcgcttccaattgagcagtttggcatttggcaatatgcatttactttttcaaatattttaatgtcactaacttggatgtgcgggtcagaatcagttgtccctcagttatcgcgctattcattacgcaagaaattgatttattgtaatacaattttttttgcaagattatctgtatcatcattagtcgctactgtcagtgtaatcctcgcaattacagctgaaagtgagattgtaaggtattacttgctattttcgtccgttactctcttggcacgagagccattgatggtaggctttgcaaaatggcaatctgaagggaaattatacctctcaggtatcatccagatctttggctgcattatcaggatactaacactatattacttatttatagtgataaatttcgatatcaagttccttgcattgccatgggtactggagggcatttttgttgcgatagtcatgtactgttgttcaatttgtaagttccccagaataagtcttgttagactaaatgatataggcttcctgttaaaacgcagttttttcatctggggaggggttgtagcctatgcattatttatgaaaattgacagattcttactgaaaggtaacatttcaccagttgattatggtatatatagtgctgcatcacagattaatgagaatacagcttcagtaaccttaatattgatacaggttttggcccccatccttttatacaaaaacaagaagtggaaaattttcaacagaaatcttattgtcttatccataataatgtttactgctttttcgttattctcattttcgttaaagccatttacaccatatatctttacatttgttttcggccatgactatgtcacatcggcaaattattataatattctggtctttttgttgccattttttgctgtcgataatttgatcaacgcagctaaccttgcatcaaagagttactactattacaccattaaatggtgtcttgtatttttattatgtctgagcatctatagcgcattgaaagtctctgctattactgcgccgataccaagcatctttattgcattatatatttctcttttcttttcaatattagtttcaatctattggtatttaactgtaactaaaaaatatttaatggaacgtgcaaatgattag

SEQ ID NO: 23223 - DNA, 1122 bp, Escherichia coli
atgaaggagaataaccttaatcgcgtcatcggatggtctggtttactgctgacgtctttattgagtaccagcgcactcgcagacaatatcggcaccagcgcagaagagctggggctgagcgattatcgccatttcgttatttatccccgtctcgacaaggcgctgaaggcacagaaaaataacgacgaagcaaccgccatccgcgaatttgaatatatacaccagcaggtgccggataatattccgctgactttataccttgcggaagcctatcgccattttggtcatgatgaccgggcgcggctgttgcttgaggatcaactgaaacgtcacccaggagatgcccgacttgagcgcagtctggcggctattccagttgaagtgaaaagcgttacgactgttgaagaactgcttgcccagcaaaaagcgtgcgacgctgcgccgaccctgcgttgtcgcagtgaagtcgggcagaatgccctgcggctggcacaattacctgtcgccagagcgcaactaaacgatgcgacgtttgctgcatcgccggaaggaaaaacgttgcgaaccgatctgctgcaacgcgcaatctacctgaaacaatggtcccaggcagatacgctatataatgaagcacgccagcagaacacattaagcgcggcagaacgccgtcagtggtttgacgtgcttcttgccgcgcagctggatgatcggatcctggcgctgcaatcacaggggatcttcaccgatcctcagtcatatattacttacgcgaccgcgctggcttatcgtggcgaaaaagcgcgcctccagcattatctcattgaaaataagccgctgtttaccacggacgcacaagagaaaagttggctctatctgttatctaaatacagcgtcaaccccgttcaggcgttggcgaattatacggtacagtttgccgataaccgccagtatgttgttggcgcgacgctaccggtgctgttaaaagaaggtcagtacgacgcagcgcaaaaactgctcgccaccctccccgccaatgaaatgcttgaggagcgttataccgttagcgtagcgacccataacaaggctgaagctctgcgtctggcacgattgctgtatcagtaa

SEQ ID NO: 23224 - DNA, 291 bp, Escherichia coli
gtgagcaaatcaccccgccataaactgaacaaaacagacaaacgacttctcgacacccttgttgctgccggatatgagcatgacaaagcccgtgacctcatccagaaacaggtttacacgctgacactggctgatcagcgtcatgtggtcagtgaaatcagtaatggtgtgaatcccacccaggcttactcggcggtataccaggcaagacgcattcgcctcgcccgtaaatatctgaacggtaaaaaggttatggaagaaaccggggaaaatacgcccccatcagcgtaa

SEQ ID NO: 23225 - DNA, 279 bp, Escherichia coli
gtgaaaaaatgtgtgccagtcctgctttttagtgttctttctgcttcggttgccagtcatgcggacagcaatgtttttcaacaaaaggccgagaagacaaaaaacggcattgttgcggatgttaatgccagacagaaaatgttcagtaacagactgaagatacaacttcagatcgatgagttgagagcagagctggctggcaccagagatgcccaaaaaagagaggatttgcgtaaaaaactggagtctctggagcggcaaaagaaatccttacgctga

SEQ ID NO: 23226 - DNA, 423 bp, Escherichia coli
atgaaatctgccgctgccaggctgcttctgatacctctgataacagcaacaatagctcttacaggatgcacaccaaagaccagcctggaacgacatacccggcattatgtttatgcttcagatgatggatttgatcctaacttctacacccagaaagcagacaccatacgtatgatgctcccgttctttcagcagttccgggatatggggatgaaagacaaagcagccggagtatcagcagaaacggcacagcaacgtgtaaaagaattccactcagaaaaattttttcactcactccggagcacaacagcctttgctggcagaaaatacacaaacagcgatatgccttcgccgaaaaaaatgaaactaatggcagacaccatttctgcggtttatctcgatggatacgagggcagacagtaa

SEQ ID NO: 23227 - DNA, 222 bp, Escherichia coli
atggtaccggaacgcgttaaaaacgcatccgggcgcgattctggcgtgtcgtttttgttgctgtgttttgcctctttgccagatcgcgctcattcctcagcctcatcccgcgatgtctgcgtatgtcatcaactgaaaagatggaaaaaaaacagtgtcatgaggtttacgcaggcaaaactagcgttattcacatggctgaatagctatgcatacggttaa

SEQ ID NO: 23228 - DNA, 348 bp, Escherichia coli
atgataccggtgaaacgcgaaaggatgctcacgatacgggtcacggatgaggaacatgcgcggctgctggcacgttgtgagggaaaacaacttgcgtcatggatgcgtaaggtctgcctgggggcaccgccatcgaaaacgtcaggtcttccgacactggcaccgccgctgttgcgccagttcgcttcggtcggcaataacctgaatcagatagcccggaagataaacagcggacagtggtcggggcatgaccgggttcatgtggtggctgcactgatggccatcggacgtgaactgagtgagctgagggatgaggtccgtaaacagggagaacgggatgatagttaa

SEQ ID NO: 23229 - DNA, 288 bp, Escherichia coli
gtgtcagaggttttcaccgtcatccccgaagcgtgcgaggcagctgcggtaaagctcgtcagcgtggtcgtgaagcgcttcgcagatgtcagcctggtcgtcggcgtccagttcattcagtttttccagcagggtcagcgtctggcttctgatgaagcgggccatgttaagggcggttttttcctgtttagtcacagttctgtttctccatgtgtggggagtctgtcggaggtttttaatgataccggtgaaacgcgaaaggatgctcacgatacgggtcacggatga

SEQ ID NO: 23230 - DNA, 1209 bp, Escherichia coli
atggataagagttcgaaggtggtgggtaatgtaattaatgaaaaacaaaagcagaagaataaaattgctacacagattagtgaaaaacagaagaaaatcgaggagatgaaaaaagtattcaagcatcattcttatcatggtatcactgatcttgagagggatgttgatgagttgcaaaaaaaatcaaatcagcttgatgcagatattagcaaacttaattcttataaaaatacattgcaaagtaaaattggtgatgtgaataaacagaaggaagctgaagaaaaggctcgtgaaaatgcagaggtcgctgaacatgaaactcttaatgaagagaaacaggcggtggcggaagcagagaagcgtttagctgaggcgaaagctgaactggcgaaggctgaaagtgatgtacagagtaagcaagctactgtttccagagttgcaggagagcttgaaaacgctcagaagagtgttgacgtgaaggtcaccggatttccgggatggcgtgacgttcagaaaaaactacagcgtcagcttgaagctaagcaggctgagtactccgcagttgaaaatgaacttaagaatgctgttagtttcagggatggtaaggccgctgaggttaaagaggcagagcagaaattaaaagaagctcaggatgctcttgaaaagagccagataaaagatgctgttgatactatggttggattttatcaatatataaccgaacaatatggagaaaaatacgcaaaaattgctcaggatttagcggaaaagtctaaaggaaagaaaattcaaggtgttgatgaagctctggcagcatttgaaaagtataagaatgtactggataagaaattcagtaaggttgatcgggatgctatttttaatgcgttagagtctgttaattatgatgagttatctaagaatttaacgaagatatcaaagtcgcttaaaatcaccagtcgagtatcttttctatatgatgttggttctgattttaaaaatgcaatagaaactggtaactggcgacctttgtttgtcacgctggagaaaagtgcggtcgatgtaggtgtggcaaaaattgtggcattaatgtttagttttattgttggtgtgcctcttggtttctgggggattgcaattgtcacaggtattgtttcttcttacataggggatgatgagttgagcaaacttaatgagttgttagggatttaa

SEQ ID NO: 23231 - DNA, 540 bp, Escherichia coli
atgaagaaagtttttctttgcgccatcttagcctcctttagctatccggctatcgcctcatcattgcaggatcaactctcggctgtcgcagaagcggaacagcaaggtaaaaatgaagagcaaaggcagcatgacgaatgggtcgcggagcgcaacagggaaatccagcaagagaagcaacgtcgcgcaaacgcccaggccgcggctaataaaagagcggcaacggcagcggcaaataagaaagctcgtcaggataaactggacgccgaagccactgcggacaaaaaacgcgatcaaagttatgaagatgagctacgcagcttagagattcagaaacaaaaactggcactggcgaaagaagaagcccgcgttaagcgcgaaaacgaatttatcgatcaggaactgaagcacaaagctgcgcaaaccgatgtggtgcaatctgaagctgacgcaaacagaaatatgactgaaggcggtcgcgatctgatgaaaagcgtgggcaaagcagaagagaacaaatcggacagctggtttaattaa

SEQ ID NO: 23232 - DNA, 1401 bp, Escherichia coli
ttgcttaagccaataacattggttggtgatgcaacgttaattcacaacggatttagaataaaatctagcagaatccgatcacttttatctggcgttcagaaatgcaaggattactccgagtcttcaagagcattttattgctatgcaaatgaagaccaaagagattatgacgatattcagattttatttaatagatttgaaggtttcttttactctacggcatttgttgcaaaaaactattatttggagaatgaccctaattcaagaactgtcaaaaatacaaaagtaatagggtgtacatcagttgctcctgattctgtaaatgccggtcattttcaacatataggcgttacaaatgctgaaacatcgcataactcaacttatggcggacaaaatgcaacatcatacaacttcattaaccagaatggatttgtaaggattataggaaattatgaccataacaatagctatggttcatgtgagcttgagaactcaatggtgagtaactcagtcatatcatgtaatacgttttcgtcatatttatgggtggatgatacaagtaatgttactatttctggaaatacagtttcatcaaggatcaaagtaacatcgcaaactgacgatgttcataatataaccatatcagcaaataccacaaaacggattactatagagcaatttggagaatctccaacaggtctggtatatggtgcattaatttcctgcaacactattactggcgacagtgatggaagttcagacattttatgtacgtcacttgttacaggtgaaatttcatcaaattattgtcatggatcagaaaaaaatatatcaattgtccgcctggattcttctgatataactgttagaaataataaaggaaacaaaggattacttacaataagtaacgatggtggaaggataattgaatatggcaatgattctatggttctgtctggaagcatagatagcagacatatacataatttattacatccagacacatcgtatttagatctaccggggaaatatctgcacggaactaaatatactggcagtatcccccccggttccacaggaactgtatcacttcaaataccatcaggggcaagccttgttttcaggggtgtttctatatgggttctaattagagatgttagcaataacaatatatcgtcattcagaattgatggttcatatagagttgttggtggaagtgttggtcttagttttgctgatgcttattcgaaactcggggtggatgcaaactctataacagtgtcaaacaataacagcacttctgacaatatcagcatagcaattaaaaacacagattcatcaaaaacccttcaggttactgttatgccggaggtttcaagcaggttaggtattgaggaatag

SEQ ID NO: 23233 - DNA, 231 bp, Escherichia coli
atggcactatcgcaaggtcgtacacgtgcagtattacaatacgtttatgacataaaaaatatcgcgacacaccaacaatgggttaaaagtaaatttgccgcagtaggttattcatctgcacatcccattcttgataaaaccggcaaggaggatcctaatcgctctcgtcgtgtcaccttcaaagttgtaacaaatgccgagttgcagattagaaagattattcaggagtaa

SEQ ID NO: 23234 - DNA, 345 bp, Escherichia coli
atgatagtggaaatcaccattaggatatttatcgatataataaaaatgcatcaaggctttttggaatgcattgacgtcaaaaactatcgcatcgccttttttattagagtgagtccattttcccatattgctttggatatgttcactgaagtcctgccagtatgcgctcattatctcaacgctatttgcatagatttcgaggtagtcgctaccgagcacactcatcaaatcagcaatatcactgcatatatatttatcacttttgaactactggccgttaaagtactgctggttgctgaacttctcatttcaggcgcagaactctctaaagaagcgatagcgtga

SEQ ID NO: 23235 - DNA, 645 bp, Escherichia coli
  misc_feature (629)..(638): n is a, c, g, or t
ttggcagaactactgcgtacatatgccccccgtagttatccaagaacgatattcatttcctatagcgatgttctatttagcatatatgccgcagagtttatccgccggactcatacggtcggacaccctaaatgggacacaattttagattctattgactggaaagttccgtatgttcatcgacagaagctggttaatgatggcattcgctactggaaaagaaagataagaaacctggggcaagcttcgggttatctgcatacactggcttgtgaaggtggtttacctatccgcatgattgaaaatgagagcggttatttgattacctatttcagaaggatatatcaggcgcttcgtgggcaagcatctcaatatcctgccgctaaaattgcacaagaattaggcgatacgattcctgtcacaatgcaaaacgaactggtctatgaaatagccggtgaattctgcgagactctctgccgattacttagtgagcatccacctcaaagcagtgatcccgtttctgcattacgtaagctctctccagactggcatcttcaacttccactcgttctccccgaagcgaatgctgcagagattgtaaggcgattactttctcaatcttctgaaannnnnnnnnncttctga

SEQ ID NO: 23236 - DNA, 357 bp, Escherichia coli
atgccactgctggataagctgcgtgagcagtacggggtcggaccggtatgcagtgaactgcatattgccccgtcaacgtattaccattgtcagcagcagcggcatcatcctgataaacgcagtgcccgtgcgcagcgcgatgactggctgaagaaagagatacagcgcgtatacgatgaaaatcatcaggtgtacggtgtgcgtaaagtctggcgtcagttgttacgggaaggaatcagggtggccagatgtacagtggcgcgcctcatggcggttatgggacttgccggtgttctccggggtaaaaaggtccgcactacgtcagccggaaaaccgttgctgcaggtgaccgcgtaa

SEQ ID NO: 23237 - DNA, 465 bp, Escherichia coli; identical to SEQ ID NO: 15842

SEQ ID NO: 23238 - DNA, 207 bp, Escherichia coli; identical to SEQ ID NO: 6172

SEQ ID NO: 23239 - DNA, 399 bp, Escherichia coli
atgtatcccaaactggcaaaagcctaccccaccaataaattaccggatttacggggagaatttattcgcggttgggatgatgggcgcggggtggatgctggccgcgctttgcttaattggcagccacacacaattttggaccatgcacactatatggaattatggacagggggcggactcgccgcaggaagtgcacgggaaggcgtaaatccaggaatactagctacatacggtgacgggggaatagttaaaacggacgaacccggtcataaggtgccttcctcactacgagctattagctctcgtagtgttaaacgttatggtgaaattagtggaaatgtaggtacagaaactcgccctcgcaacgttgcatttaattacatcgtaagggcggcataa

SEQ ID NO: 23240 - DNA, 855 bp, Escherichia coli
atgctggcggtgaccgcactggtgcccgccgtctggctggtgacaaagatctccaccgtaccgtccggctgcgtggtgaccgtcggagcaaccgttgcgctgttgtctgccaacacgctgaccgtctgtccggcaagcgcattcccgaacgcgtcagtgaccctcgcctgcagcgtgttcgccgtcgaaccgtctgccaccgcgttatccctggtgactaccagatccgctatctgcgccgtcctgacatcggcgataaacgtcacggtccggctcaggctgctgctgttgatgctggaggtgactgtactggtgcccgccgtctggctggtgacactgatctctaccgtgccgtccggttgcgtggtgaccgtcggagcgacagttgcgccattgcctgccgtcacgctgaccgtctgcccggcaagtgcattaccgaacgcatccgtgaccctcgcccgcagcgtgttcgccattgcgccgtcagccactgagttatcctgcgtcacctccagactcgcgatctgcgccgtgctgacatcggcgataaatgtcacgtcccggctcaggctgctgctgttgatactggcggtgactgtactggttcctgccgtctggctggtgacactgaactccaccgtaccgtccgactgcgtggtgaccgtcggagtgaccgttgcgctgttgcctgccatcacgctgaccgcctgcccggcaagtgcattgccgaacgcatcggtcaccctcgcccgcagcgtgttcgccgtcgaaccgtccgcctctgaaccatccttaatgaccaccagatccgcgatcttcgccgtcctgacatcggcgataaatgtcacgttctga

SEQ ID NO: 23241 - DNA, 819 bp, Escherichia coli
atggcgaagcccttctgcgcccacgctaaaatccacggtctgcgtttccagcagttccgttttaatcagccacagcccggcgcggtgtgcctgcccccggctggtacagccaaaggcatccatcttcgtgacgttacgaccgtaacgggcaatggcctgcgtgtcctccacaagctctgttgccgtttcccagccgttatccgggtcaatccagttcacctcaacggcattatggcggtccttcagggcgctgaagctgtagcggaacggcgcgccatcatccggcatcaccacattactgcggttataggtccacaccttatccgacggtcggtcctgcacgaacgtcagcgtctgcccgttccataccggcatacagcgcatcgccgagcagaaatcactgagcacatcccacgccttacgctgcgtggtcaggtacgcattacaggtgatgcgcggctccgtgccgccaaaaccgtccggcaccgactggtcgcaatactggccgatgacatacagcgtccatttatccacatccgccgcaccaagacgtttccccatgccgtagcgcggatgggtcagcatatcccacagacaccaggccatgttgttgctgtatgccggcttaaacgttccgtcccagataccgctgtattgccgcgtctgcgggttatagttcgacggcacctgcagaatgcgcccgcgaagatgataattacggctcacctgctggctgccgaactgctccgagtccacctgcacgccgaccagtgccgtgttcgggtagcactgtttcacatcgatgatttcggtgtatga

SEQ ID NO: 23242 - DNA, 1110 bp, Escherichia coli
atgcggcgtggcggttatctgaaaatagcccggcgtcagctcaatccgcgacggtgctgccggtgcggcaatccggaacgataccgacaccggatcgccctgctgcccccacgcatttactgcccggactgtcagcgtgtaacgccccagcgccagttgcctgaagcggtatgtggtttccgtcgtccgggctgtgctgacaagccgctcactgccgtcatccgctgccacggtcaggcgaagcataaagctcacccccttcaccaccttcggcgtgtcccatcgcgccagtacctgatattccccgctgtctgcggtgacttcggcagtcaggtgctgcaccgctggcggcgtgacaccattcaccgtgccactctggtcgccgtcaaagtgcgccccgttatccacgatggcctctttttccggcacatgctgcacggcggtgatggcatacgtgccgtcgtcgttctcacggatactcacacagcggaacaggcgctgacgcagcgtcggcagcttcagcccccatacgctatattcggcaacgccgtcaggaacacggctcacttttaccttcacgccgtcggtgacggactggacctccacgctgaccggattaccatttccgtcaaccaggcttatcagcgtggtgccggaggatggcagcgtgatttcacggtcgagcgtcagcgtccgggtctggctgttcaccgccagcacgcgcccgccaatgctgatccccgcatagtcatcatcacagatttcaataacatcacccggtacatggcgaagcccttctgcgcccacgctgaagtccacggtctgcgtttccagcagttccgttttaatcagccacagcccggcgcggtgcgcctgcccccggctggtacagccaaaggcatccatcttcgtgacgttacgaccgtaacgggcaatggcctgcgtatcttcaacaagctctgtcgccgtctcccagccgttgttcgggtcaatccagttcacctcaacggcattatggcggtccttcagggcgctgaagctgtagcggaacggcgcgccatcatccggcatcaccacattactgcggttataggtccacaccttatctga

SEQ ID NO: 23243 - DNA, 915 bp, Escherichia coli; identical to SEQ ID NO: 11095

SEQ ID NO: 23244 - DNA, 399 bp, Escherichia coli; identical to SEQ ID NO: 23239

SEQ ID NO: 23245 - DNA, 324 bp, Escherichia coli; identical to SEQ ID NO: 23068

SEQ ID NO: 23246 - DNA, 699 bp, Escherichia coli
gtgctggccgccacaccgaaagctgtcaaggctgcatatgatttggctaatggaaagcaagcggcagacgctacgctcactgctctagcggcactagctaccgcagcagataaactcccttatttcacaggggttgatcgtgccgcgttaactgcactgacaagtgttggacgtgcaattcttagtaagcccagtattcagagcgttcttaattaccttggtttgggggaaggctcagcattgcccgttggcgtacctgttccgtggccctcagccacacctccaacggggtggctgaaatgcaatggtgcagcattttcttctgaaaagtacccaaatctggcaaaggcttatcccaccaataaattaccggatttacggggagaatttattcgcggctgggatgatgggcgcggggtggatgcgggacgtgctttattgagcattcagacaggaatgctggaaaagcaccgacatattgttgtagccaatgatggttacgacacaaaagatgaatgggagctggcgacaattttcaaaaaaacatacacacaaggacgggggcttgatgcctcaaatacaggagggaatttgattccatcaccgacacttcattctcgagggagtattggtaatactggcgggagtgaaacccgtccacgaaatatcgcatttaattacatcgtaagggcggcataa

SEQ ID NO: 23247 - DNA, 447 bp, Escherichia coli
atgttctatgcgcagaaaaataccgataacacctatatgttaagcgttaatggtgcatgtcatgccaccgcatttaaccagcattccgaccgggatctgaaagacaacattcaggtgatcgataatgcaaccgaccgcatccgtaaaatgaacggctatacatacacgcttaaagaaaacggtatgccctatgctggtgtcattgcacaggaagctctggaagcaatcccagaagttgtaggttccgcaatgaaatatcaggacggtgcgagcggatcggaaggtgaagaaggtgaacgttattacacagtagattattctggtgttactggcttgcttgttcaggtagccagagagtcagacgacagaataacagcactggaagaagaaaacgcagaattaagacaaagattatctgtaattgaggcggcgcttgcgtctaaataa

SEQ ID NO: 23248 - DNA, 471 bp, Escherichia coli
atgctggagccacaactgcagtatacctggcagggactttccctggatgacggtaaggacaacgccggttatgtgaagttcgggcatggcagtgcacaacatgtgcgtgccggtttccgtctgggcagccacaacgatatgacctttggtgaaggcacctcatcccgtgcccccctgcgtgacagtgcaaaacacagtgtgagtgaattaccggtgaactggtgggtacagccttccgttatccgcaccttcagctcccggggtgatatgcgtgtggggacctccactgcaggcagcgggatgacgttctcaccctcacagaatggcacttcactggttctgcaggcaggactggaagcccgtgtccgggaaaatatcaccctgggcgttcaggccggttatgcccacagcatcaacggcagcagcgctgaaaggtataacagtcaggccacgctgaatgtgaccttctga

SEQ ID NO: 23249 - DNA, 411 bp, Escherichia coli
atgccaaacaatttgcctcacaataaagaaagtttattttatctaaatgttctggatatccctccaaacaacccacaaaatgcaggaaaaaacaaaattaaacttgcattgcaaaaccgtataaagttactttggcgtccaagcggaatcgctccggtagataaaaaaagcctttctcaattaaatatcaaaaagaaaaataacgccatctcaataaacaacgaaacagccaactggataacggttacaactatcaaagcacaaaacgtgaaagttaataatgaaagtatcttactgcctccattttcgaataacgacattacattaaaaaataaccacgcatcagaatatgaactaacggtagttgatgattacgggaataacatccatagtaaaatcgccgcgagataa

SEQ ID NO: 23250 - DNA, 399 bp, Escherichia coli; identical to SEQ ID NO: 23239

SEQ ID NO: 23251 - DNA, 810 bp, Escherichia coli
atgctttttgatgtttttcagcaatactccgcggggatgcccatactggcaaccgtcggaggattgatcatcggcagttttttgaatgtggtgatttggcgttaccccatcatgctgcgccaacaaatggcggagtttcacggtgaaatgccgagtacgcagtcaaaaataaacctggcgctgccacgctcgcactgtccgcattgccagcagaccatccgcgttcgtgacaatattccgctgctctcatggttgatgctcaaagggcgctgccgcgactgtcaggcgaaaatcagcaagcgttatccgctggtggagttattgacggcactcgcttttttgctggcgagtctggtgtggccagaaagtggatgggggctggcggtgatgatattatccgcctggctgattgccgcgagcgtcattgacctcgataaccaatggctgcccgatgtttttactcagggcgtattgtggaccgggctgattgcggcatgggcgcaacagagtccgttaacgctacaagacgcagttaccggcgtcctggtggggtttatcactttttactccctgcgctggatagccggaatagttctgcgtaaagaagcattaggcatgggcgatgtattacttttcgctgcgttaggtggctgggtggggccgttgtcgctacccaatgttgctttaatcgcatcatgctgcggcctgatatatgccgttattacaaaaagaggatcaaccacactgccttttggaccgtgtttaagtctgggcggtatagcaacactttatctacaggcattgttttaa

SEQ ID NO: 23252 - DNA, 501 bp, Escherichia coli
atggaaataaaaaaacctacaaaaaaagagttatatgactatttactatcgaaatatatagaagataaatgcaaagaagaagctgatgaaatcaataagaagtcgatgagtcgtgtcaataaacataaggagcggctgatggagattacgccagaaatcttcttccgtttcttgtctgagaagggggtttccagtgtctgcccttcatgtggatcgtctcgattatctgtgcctgaaagtatggatctttgctgggataaaaataagaaaccagaaaattttaacaatctacccttggaggagcagagtgagttaattaaagagaacataaagcattatgtatcttatacttttttgggtgatgttaagagcatacctgatatgcgcaaaacttattacacgctgcattgcctgaattgtggttacctgagcctttaccgtacgtctgcggtgctgaagtggttggagaaagacaaagcacaggatggtgaaaatgggtaa

SEQ ID NO: 23253 - DNA, 2151 bp, Escherichia coli
atgagtaccacaacacgaaaatttaaaaccgttatcaccgatacgggtgcaaaaaaattagctcaggcagccgcgccagatggtaagcctgtccgcctgactcatatggccgtgggcgacggtggcggcacgttgcccacaccagacagtaagcagacccgtctggtgcatgaggtgtggcgacacactgttaatcgcgtcatcctggacgcaacacatcagaaccgcattattgcggagctggttattcctcctgaaacgggcggattctggatccgggaaattggtgtatttgatgagcacggcgatttaatcgcggtgggcaatactgccgaaagttacaagccagccgttgccgaagggtccggtcgtgcacaaacatttcgcaccattctgaccgtatccagcactgccaccgtggcgcttaccgtggataacaccatggtgatggccacagtggattacgtggatgacaaactgaaagagcatgaacagtcacgacgtcacccggacgcctcgctgaccgcaaaaggctttgttcaactcagtagcgccactaacagcgtgtctgaaacgcaggctgcaacgccgaaagcagtaaaggccgcgtatgatcttgctaacggtaaatatactgcgcaggatgccagcacgacgcgaaaaggccttgtccagctcagtagcgccaccaacagcacgtctgaaacgcaggctgcaacgccgaaagcagtaaaggccgcgtatgaccttgctaacgcaaaatatactgctcaggacgccacgacggcacaaaaagggatagtccagctcagtagtgccaccaacagcacgtctgaaacactggccgcgacatcgaaagcggttaaggcggtaatggatgaaacgaacaagaaagccccattaaacagcccggcactgaccggaacgccaacaacgccaactgcgcgacagggaacgaataatacccaaatcgcaagcacggctttcgttatggctgcgattgccgcccttgtagattcgtcacctgacgcactgaatacgctgaacgagttagcggcggcgctgggaaacgacccgaattttgcgaccaccatgactaacgcgcttgcgggtaagcaaccgaaagatgccaccctgacggcgctggccgggcttgctactgcggcagacaagtttccgtattttacggggaatgatgtcgccagcctggcaaccctgacaaaagtcgggcgggatattcttgcgaaatcgaccgttgctgccgttatcgaatacctcggtttacaggaaatggtaaacagggctggtaacgccgtgcaaaaaaatggcgatactttgtccggtgggcttacttttgaaaatgactcaatccttgcctggattcgaaatactgactgggcgaagattggatttaaaaatgatgccgatggtgacactgattcatacatgtggtttgaaacaggcgacaacggcaatgaatatttcaaatggagaagcaaacaaagcaccacaacaaaagacctgatgacgctgaaatgggatgcgctaaatattcttgttaatgccgtcattaatggcagccttggagttggtacgacgaatgcgttaggtggtagctctattgttcttggtgataatgataccggatttaaacagaatggagacggtattcttgatgtttatgctaatagtcagcgtgtattccgctttcagaatggagtggctattgcttttaaaaatattcaggctggggatggtaaaaaattcacgctatccagctccaacaactccacgaagaacgtagggtttaatttatggggcgcttcatcaagaccaactgttgcagagcttggtgatgattcaggctggcatttctatagtcagcgaaatacagataactcggtgatatttgctgtaaacggtcagatacaacccagcaactgggggaattttgattcacgctatgtgagagatgtcagacttggcacgcgtgttgttcaaactatgcaaagaggcgtgatgtatgaaaaatcaggccatgcaattacggggcttggcattgtcggcgaagttgatggcgatgatccggctgtgttcagaccaatacaaaaatacatcaatggcacatggtataacgttgcacaggtataa

SEQ ID NO: 23254 - DNA, 2805 bp, Escherichia coli
atgtggtggctgagccgggatgtgtcactggcggcgggtaatcatgttgatgttcttgctgccaccagtacagatacgtcctggcgctttaaggaaacgaagaaatccggtctgacgggtaccggcggtattggtttcaccattggcagcagtaagacatcgcacgaccgccgcgaagccgggacaacgcagagtcagagtgccagtaccatcggctccactgccggtaatgtcagtattaccgcgggcaaacaggctcatatcagcggttcggatgtgattgcgaaccgggatatcagcattaccggtgacagtgtggtggttgacccggggcatgaccgtcgtactgtggacgaaaaatttgagcagaagaaaagcgggctgacggttgccctttccggcacggtgggcagtgccatcaataatgcggttaccagtgcacaggagacgaaggagagcagtgacagccgtctgaaagccctgcaggccacaaagacagcgctgtctggtgtgcaggccggacaggctgcgacaatggcctccgcaaccggtgacccgaatgcgacgggagtcagcctgtcgctcaccacccagaaatcgaaatcacaacaacattctgaaagtgacacagtatccggcagtacgctgaatgccgggaataatctgtctgttgtcgcaaccggcaaaaacaggggcgataaccgcggagatattgtgattgcaggaagccagcttaaggccggtggtaacacaagcctggatgccgcgaatgatattctgttgagtggcgccgcaaacacacaaaaaacaacgggcaggaacagcagcagtggcggtggcgtgggtgtcagtatcggtgcaggtaaaggtgccggtatcagcgcctttgccagcgttaatgcggcaaaaggcagggagaaaggtaacggtactgagtggactgaaaccacaacagacagcggtaaaaccgtcaccatcaacagtggtcgggatacggtactgaacggtgctcaggtcaacggcaacaggattatcgccgatgtgggccacgacctgctgataagcagccagcaggacaccagtaagtacgacagtaaacagaccagcgtggctgccggcggcagttttacctttggctccatgaccggctcaggttacatcgctgcctcccgggataagatgaagagccgctttgactccgttgctgaacaaaccggaatgtttgccggtgatggtggcttcgacatcacagtgggtaaacatacccaactggatggtgcggtgattgcctccactgccacaccggataaaaaccacctggataccggaacgctgggtttcagtgaccttcacaacgaagcggattataaagtcagtcacagtggaatcagtctgagcggtggtggcagcttcggggataaatttcagggtaacatgccgggtggcatgatatccgccggaggtcacagcggacatgcggaaggaacgactcaggccgcagtggcagatggcacaatcaccatccgggacagggacaatcagaagcagaatctggcgaacctgagccgtgaccctgcgcacgctaatgacagtatcagcccgatatttgacaaggagaaggagcagaggcgtctgcagacagtggggcttatcagtgacataggcagtcaggtggcggatattgcgcgtacacagggagaactgaatgcgttgaaggccgcgaaggaagcaaccagcgaaacacttcctgctaatgcaacagagaaacaacgccaggaatatcttgcgaaactgcgtgacacgcaggcttacaggaatgaaatggcgaagtatggtaccggcagtgaaattcagcggggtatccaggccgcgacagcggcgcttcaggggctggcggggggtaatttagcaggtgctctggccggagcttcagcaccggaactggcacatctgctgaaatcaacagaaaaagacccggcagtaaacgccattgctcacgccattctgggcggcgcagtggcggcaatgcagggtaataatgccgctgccggtgcagcaggcgcagcaacgggagagctggcagccagagcgattgccggaatgctgtatcctggcgtgaagcagtcagacctcagtgaagagcagaagcagacgataagtacgctggcaaccgtgtcagcagggctggccggcggtctaaccggaaacagcaccgcatcagcagcagtgggagcacagagcgggaagaatgctgttgagaataactcactcagtgctggctggaacaatatcctgccatcaggaacacaggattacggacaggccgtagcctcgtggaatcagtatgctcaggacaataatctgacaccggagcaggttcaagaagggatgaatcgtatagctattggtgaagggccttcttgggggacaacatataaagtacacccggtagttcaggctggcggtgatgttagctttatccggggttatactttaagcggaactatagatgacaatcatatttcagttaatcaaggggatatttatagtataggtgctcatggcggagcctcgatcggattatcctttggcccgtatttcccgggattaataaattcaaatgataacgattattcgataaatggtggttttggcgttggtgcagtggggctttctacgggtaaagatggtgttagtttcacttttggttttggcccaagttggggttggagtgcaactgaaattaaaggcgttgacgttaatggcacttcaacaagtgaggtttatcgatatgattttaaataa

SEQ ID NO: 23255 - DNA, 240 bp, Escherichia coli
atgatcccggtagtgaccatgatgggcttacagtttggatttttactcggtggttccatcgtggtggagaaagttttcaactggcccggacttggacgcttactcgttgactccgttgaaatgcgcgattacccggtgattcaggcggaaattctgcttttctcgctggaatttattcttatcaacttagtggtggatgtgctttacgccgccattaacccggctatcaggtacaagtaa

SEQ ID NO: 23256 - DNA, 834 bp, Escherichia coli
atgagtgatgggtggttagattctactatgcaagcaataaacgataggattaaaagcccattatggggatatatcattcttgcatgggtatggttcaactggcctaacttagcaatgctctttatgagtgatgcgcctgttaagtttcgaatagattatatactatctcaggaatatttttacgctcattatctgcttgctcctgtcttttttggaggtgtgctagctgttattactccttatgctcaatggttactttctcttgctcaaaaatgggctacagataaacacaatgaaaatgtttatcttacaaaggaaaaagaatacttggattcaatcaggttaacggggttaaaggttcgggctgccagagaagaagagaaagaaaatgctaaaattgatgctgatattaaagcggaagtagagcgtggtaagcgtgaagagctggtcacagaagagctacagacagagaagaaactgattcagaaagaaattaataatttaaagcagttagtatctaaagaaaaacaaaccattgaaaatatcgagatagaaaaagagagactacaggatttgattgttgcctcacttgaggtaatggatgatttctttaaagttgataatagccattcattacagcaattgaagagtagggtagaagaacttttaacagtttctgatattgaagcttctaccatacgtaacgcgctacgacaaaagaaagagctaacttcatcacagacaatgaaaatgttcgatatggtagaggctaaaattaaaaaggaaaaagaaaaaggtaataatatagagtcgaatgaattaattaaccaataa

SEQ ID NO: 23257 - DNA, 324 bp, Escherichia coli
atgactgaaccgaaacagtctggtattaaaaaagggttcctctttgggagcagaatcggagagcagaataaaacttacacgctaagcttggatgcatgttgtccaaccgaagcgattatagagctgaaaaacgttctggttgcacttgaagagagaagaagtcatttcgccagcggagaaaacaacgtcatgctaattggcgatgtggcggcgacatcacgatataaaaccgcacctaatcctgcgattcagttatccttcgaccaacgaatactggaagcggaatcagcagttcccagaacggttcgtcctcaccagtcttaa

SEQ ID NO: 23258 - DNA, 576 bp, Escherichia coli
atgggaacgtattacacacttgattccgctagtcgtctgccttcgccttgtcatgtaattaccggaaaatacgagcctgaaatgccagaactggccgcttttcttcatcagatgtatcccaatggcctttcgagtcacgggtataactatctctataaccccggccctaaaatggaagatgacagtggaatcagcagaagtctgctggtcggtctggtgtttgagttagttcgccgtagccattttcctgataaaccttcccgctatcagtcactgtttgcctgtcagcatctgagtgaagtcaggaagttcagggaattactggctgatgagagaggcgaagacgaaataagaacggcaccgatatatgaagtcatcacaaatgagcaggtgcatcgcggagatatgaggttattgaacagtgattgcccggtgctggaactgtatcaccgtgcttggctttactggtcgggtgaagcagccccagttaagactggtgaggacgaaccgttctgggaactgctgattccgcttccagtattcgttggtcgaaggataactgaatcgcaggattag

SEQ ID NO: 23259 - DNA, 612 bp, Escherichia coli
atggggctaattaaacgatatagaacagattatccgaaccaagtacatcaactttctgttgctgtttcaaagcattattatgcgggagttgatggattgcttaagtaccagaaaaaaccatttgatataaaacttagcaatgcaagtaaaactggaaaagatcatttactagtctattcgttacgcgatcactacagtggtttgttttatatagaattggcatttctttctacaccacaacctataacagcttttttgggaagggcatggaggccaaaggaagataacgtgttacagggtcttcctgatatgctgatgatccccaaaactgtagaagatgagttccctaacgtatgtaatgccgtttataaccaaggagttgatcttttaaaagtaaccagcggttttcagagtggagggcttatcgccatacgagcggtagaggaagatcttaaattctacacaaatactcctatagcacgagttcgtgaggttgcggttaaaacatgcagatacaatgctaatgatatcgcccgaaccaataaagaaacaaagcaagagatgtggttacgaaacgtcggtcagatagatataccttctccagatttttga

SEQ ID NO: 23260 - DNA, 195 bp, Escherichia coli
atgatatttaaatgtattcagtgcgagagggatataacagccctgcgttttcacagcgccatcgccgtgatgtccggtaagtaccacgtacctgcagtacgtgtcaccctggtctgtccgtactgcagccagcatttttcggcggacgtgcccgtcatggaattcttccgccctgacagggaggacgcgcaatga

SEQ ID NO: 23261 - DNA, 273 bp, Escherichia coli
atgattaccccacaggacgcagaaaaacggacccgcgaaattgtcgcggaatatatccgtgaatgtggttgtaaaacccccaaccatatccggctggtattaaccaaattaatcagcatggccgcgcaggctattgtggcgaccaacggaaaggaggctgccctgcaggtactggtgaacacactcacccacacggcagagcatgaggtgccgtaccggatggaaactactgcagaaggcggcctgcacatcaccgtcgaccggaagcactga

SEQ ID NO: 23262 - DNA, 159 bp, Escherichia coli
atgaaactgccacctagtaacctgttatggtgtgtattaatagtgtgtctcacactactggcattcacctacctgaccagaaaatcgctctgcgaaatccggtacagggacacaaccagggaggtggcggcttttatggcctacgaatccgctaagtag

SEQ ID NO: 23263 - DNA, 261 bp, Escherichia coli
atgacactcactgcatattaccagctaaggaatacaaaggccgcaggtcttggtttcgaattgctgaccagtgaaccgggagcctttattgtgctggaagaatgcagttatgagaaaccgtatgaaattgcccgttatgggcataacgggagtgcaggcgatcgttcgaatgcgttcagctgcgcgatgaataaagcccgtagtctgcagaattacagtggagcaaagctggattacaacgtttacgaagaaactgcctga

SEQ ID NO: 23264 - DNA, 471 bp, Escherichia coli
gtgatcctctacaggctgacgaaaacaaagtatctttctacggcctggaccggatatggtgcgaaagaggctggtgggcgctggaatagcgtgggggtgtcaatggtatatgtctccgaaacggcatcactaacgatgctggagacgctggtacacctgcatgcggcacagataatggactctttcactctactgagtatcgatgtgcctgatgaactgatccaaagcgcaaacatggatgaattaccgggcaactgggctgatgaggatgcgcctcaggaactggctgattacggagatgcctggtcatttaccaggagctcggttgcactgcgtgttccctcagccttatcgccggtagagttcaattatctgttaaatcctgagcaccctgagttttacgggatcgtgcagaaggctcaacagataccgttccggtttgatagtcgtcttaaacctgacaggaagtga

SEQ ID NO: 23265 - DNA, 444 bp, Escherichia coli
atgaaaacttttagtttgtcctcaactccagccagaccacagcgcctctggcaggttgccgggttaaataatgctgatggtgtagcgctcctgggccaaatcaatgaaggcctggacgggaaggtggccaaccggatcactgactgggccagaataacccagaatgacctgagaaaaatgtccggtatcccgtcgaccacttttagccgcagtgtgaaggcacgttttaacccggaacaaagtgaacgtctggtacggattatccgcgtcattgatcgggcggtagatttgtttgaaggcgacaaggaagccgcacagaagtggttgaacgaacctaaccgggcattgagctggaaagtgccagcagacctgatggcatccgagacgggagcgtatgaggtcattaagctgattacgcgtctggagcatggggtgtactcgtga

SEQ ID NO: 23266 - DNA, 1272 bp, Escherichia coli
atgtatgctctggcggatgtgaacagcttttattgcagtgttgagaaatgcttcagacccgatttacgcgataaaccagtggtcgtcctttctaacaacgacggctgcgttatagctcgttgtaaactggccaaaaaattcggcattcctatgggtttaccctggtttaagttgcgtgagcagcgcttcccggagcccgtgattgccttctccagtaactacgagctgtatgccagcatgagcgccagagtacatttctgcctggaggaattatcatcccgtgtcgaagagtattccatcgatgagtcttttatttgggctggtgggattgataactgcatgacgtttgaggaatacggacatcagctaagggatcatgttttccgctgcacaggactgacgataggggtaggcctggcccctacaaaaacccttgctaaagcctgccagtattccagtaagacctggccccagttcggaggggtactcgcactgactgcaggccagcgtaatcggatagataagatgctttctctgatgccggtagaggaggtgtggggggttggtggacgaaccacaagtaagcttcatgcaatgggcataaccactgcgctggagctggctcgtactaaccctgcattcataagacgaaacttcaccgtagttcttgaacgaacagtgagggaactacggggggaaagttgtatcgacctggaggatgccccgccaccaaaacaacagatcatatgcagcaggagctttgggcagcgtataacaacgtatgaatccatgcggcaggcaatttgccagtatgctgaacgtgctgcggaaaaattgcgccaggaacgtcagtactgcggtcaggtatcagttttcataaaaacctcgcctttttcaaaacatgaaccctattacagcaaagtctccagcgaacagctctgcattccatcacgtgatacgcgggacattatcgcggcggctggccgggctctggataaaatctggaaagaaggacataactatgcaaaggcgggagtcatgctcaacgatttccgtccctgcggagttacccagctatcgttatttgatgaagggaggtcgtatgcaaacagtgacgcgctcatgaacgtactggatacgataaacaactcaggcaaaggcaaagtatggtttgccggtcgtggcatcgcaccagcgtggtcaatgaagagagatatgctctctccagcctacacaacgaggtgggactcgataccgatcgctacactctga

SEQ ID NO: 23267 - DNA, 423 bp, Escherichia coli
atgttcttaattccaatggaaaatcctgagaaaatcgccatccctttatttctcgagcggtgtgcagctggcttccccagccctgcccaggattatacttccagtgagctagacctgaacgattattgcatcaggcatccatccgcaacatatttcgtgcgagctcagggaaacagcatgcaggatgtcggtatgcgtgatggagatttgctggtggtggaccgttctctgcgtcctcaacatcgcgatatcgtgatcgccgaagtggacggcggcttcactgttaaacagctccagaccactcccagactggccctgttgcctatgaacaatgcttattccccaatttacccagaccccgatgaactgacaatttttggcgtggtgactcattgggttcatcgtgcccggggtaatctgtaa

SEQ ID NO: 23268 - DNA, 1032 bp, Escherichia coli
atgagaactttaaacttcaacggtaaaatttcgactctggaaccactgactgtaacagtaaaaaatgcggtctcaacttccggccatcgcttgcctcgtaacggtggattcaatgcagccccgtactttccaggtaccagcattcggggaactcttcgtcatgctgcgcataaggtcattgtcgatcgtgtgggccttaatgcagacggaaaatcatctttcgacctggcagaacatttcatgctggcccagggggtggatatcaatggtgaagccgaaaccttcgcgccaggtgaaatcaatgctggtgctgaactacgtagcaaaaacccgttaatcagcttgtttggtcgttggggattaagcggcaaagttggtatagggaatgctatcccggatggtgataaccagtgggggatgtttggtggtggtgcccgctcaattatgtttcagcgtgacgaaagtctgatggagtttcttgagacagaccaggttgatcgtcttgaacgcctgctcgaggaacaggctgaggcaagtgtggatatctctcagatcaaaacagagcaagatgcactcaaaaaggcgatgaagtcggctgataaagacaccaaagctgagcttcaaatcaaagtacgggagctcgatgaaaaaattcaggcccgcaaagatcagaagcaggaatctcgcgagtcaattcgccgcccgattgacccgtatgaagcgtttatcaccggcgcagaactcagccatcgcatgagtattaaaaatgcgactgatgaggaagcagggcttttcatttctgcattaatccgctttgcagccgaaccacgttttggcggtcatgcgaatcataactgcggtctggtggaggctcactggacagttacgacctggaagccgggtgaactggtaccagttacacttggagaaatcgtcatcacaccgaatggtgttgagattaccggggacgagttgtttgctatggtaaaggcattcaatgaaaatcaatcttttgatttcactgcccgctaa

SEQ ID NO: 23269 - DNA, 708 bp, Escherichia coli
gtgttaaattttaaaccgtatcgggtcatcatgtcttctctgacaccggtggtcatcagtgggatagccccatcgctggacggcattctgtatgaagcactgtctcaggcgatacccagtaacgagccaggagtcgtattggctcgtcttaaggaaatacttctattcaacgatgaactgggtgttttccatgcttcatctctacgttttggcataacgcccgaacaggggattggggcgacaacaagcgtacgttgcgattatctcagtcccgaaaaactgagcactgcaatgttctctcctcgtatccacaggggggtgtttacgcgtgtcctcctgaccgggggccccacgaagagaaggatgacaacccgtccagcttattctgcaccctatttaacgtttgattttgtcggctcttctgaggctgtagaaatactgcttaaccatgcccatgttggcgttggttatgactttttctctgcagctaatggagagtttaacaatgtgacaattcttcctctcgatatcgacacgagtatatccaacgagggtatggcattgcgtccggtacctgttaattcgggtctgaatggtatcaaaggagtatcaccacttattcctccctatttcgttggtgaaaagctaaacattgtccacccagcaccagttcgtactcaattgatttcttctttattgcgaggctaa

SEQ ID NO: 23270 - DNA, 1875 bp, Escherichia coli
atgaatacatcagcggtatttgagtctgccggattgtcgttacgtaaggtccaacaggattatatcgaggctgcagctggtgcgctgactcaggatcataaagttgcactgattagtgctgaaacaggtgtaggaaaaacgctgggctatctggtaccggcgcttctgattctgctgaaaaacccagaggcaaaatttgtgatagccacgaattctcatgccctgatgcaccagatattcagaagcgatcgtcctctccttgaacagatagctgaacaatgcggcataaaagttactttttcccggcttatggggaaagcaaattacgtatccctggagaaagtacgtggactgttactcatggacgaatttaccgatctggatacggttaaggtccttgaaaaactcgctaactggtcaaaacctctggttgagtttgaagaagagtatggtgaactgccagcgcagatcacgccagagatggtcacctactccatctgggatgatatacaggacattgatgatattcgcctgaatgctctcagtgctaactttatagttacgacccatgcgatggtaatggtcgactgtatgtgtaatcaccgcatcctcggtgacaaagaaaatatgtacctcattattgatgaggcagacatttttgtagatatgcttgaggtctggaaacagcggcgcttcaacctcagagagttgaccagtgcgttcaatgaacatattccacgtaatggcgtgcatgtcatcgaccagttaatgaacgacgtgacttcgatagcgggcgatctgcatttttgtagtacgcctgcagcggttgccttgtttgacaatagctttaacgccttatcaaaggtagggcgggaaataaaaaatgaagcggcccggaaagctttctttgactgtatctacagctgggaaatgctcggattgtccggggggcaaaagggtgtaggcgtttccaataaacgtcgtgaaccagccctgatcgctgtaaacccgtttatcgggatgaatgtgggcagatactgcactcaatggcgtagtgcgttactgacgtcggctacgctctcaattaccagtaccccagagaccggaatggagtggttatgtaaagctctggggttaaccagcgatacgatttcaatcaggaaaatattctccccagacgtctatggctcaatgaagctgaccatcgccggtgctgattttccaaaggtgttcaatgacccgaaagaacagatattttcaggtcaatggttaaaggcagtagttgaacaattgtcctgtattcaggggccagctctggtattaactgccagccattatgaaaccaggatgattgccaatcagctgggtgaggtctcgcaaccagtttatattcagaaagcaggtcaggccctgtccgaaattattaaacagtatcaggagataccagggattcttatttctgccggtgcttctgttggtgtgagcccacgaggcgagaatggggaacagattttccaggatttaatcattacccggatacctttcttacctccggacagaatgaaggctgaaagcctttatgggtatctgaaggaacgaggctatagtcgtacctttgaggcagttaaccgtaacatctacctggataatttgcggaaagttattcgtaaagcaaagcagtctatagggcgggggattcgtagtgaaaatgataccgtcaggataattatcctcgatccgcgtttcccggaacctactgacctttcgtctaaacatcggtcgcttgaacacattattcccgttcgatttcgtcgtgcatatcgttcgtgtgaaattttatctccggcgtattgtgaagaggatatccagtgttaa

SEQ ID NO: 23271 - DNA, 567 bp, Escherichia coli
atgatttactacgataatgcgtttcggttgcgtatccgtcacacaagtgtttaccagatccaccagcacctggattttttcatgcaggaacgtaagggagagaagctgccgtactcttttaaaatttttcccggtaccggggatgattcgttactcctggtccgcacagccacagctctggagttgccaggggagaaaaaaagagagcttattctctctgagggccatgaaatcaagttcattacgtcaatggccatctttcataaaggaacaaagtcagaaggccgtggccgacgccagtttgctccatccgaagaggctagttatcagttggccctcaccaaattagcgaaggctggttttaaacccggtcaaatcgtcgtcagtggcccgaaattcgtccatatcgtcaaaggaaatgctggacgcggttttacgctacccgtattcacggtacagggtaccgccataatcagcaatcaacaggaagctgaagttggaatcgtttatggcgtaggccctaaacgcgtatttggttgcggtttcatgcatctggcggggcagtag

SEQ ID NO: 23272 - DNA, 792 bp, Escherichia coli
ttgaatcatcctgtagagtcagtatatagcgctctgacgagtattttattgccctatatgggtgagcctgtgcctgtgcaacgaaattgctcatgctgcggcagagcgccctcagagttcgacggggtaggcttcgagctggtcaacgcctacagggaacgtgttgtgcattgccgtccttgccagacattttttgtttctgctccagaactgatgggcgtggagaaccccaaaaaaccaacaaccggccagaaatttggcatgtggtctggtgttggggctgttattaacgttgaagacaattcttcggttcttttagcccctcagggagtggtcaataaactacctgagcattttttcgatcacgtagaagtcatcacggccaccagcggtcagcacctggaatacctgtttaacaccgaacttaaattcccgctgatttatattcaaaacttcggcgtgaaaacctacgagcttgttcgctcactgcgggtcagtctgagtgccgacgcaatttatacctgtgccgatcaactactgacccggcagaacgaagtcctttacatgctggatttaacaaaggctaaagaactccatcaggaaataaaaaactactccaaaaaagagatagacatctttatcagaacagtaaccctgctggcctattcgcggataactcctgaagctgcctcgaatgagtttaagaaaaacaacctcattccgttactgctgcttctgccgactgatccccatcaacgcctgagcattttgcacctcttgaaaaaggtataa

SEQ ID NO: 23273 - DNA, 414 bp, Escherichia coli
ttgaaattcaataacaatcaaaatgaaaaatgtctcaataaggtgttgagttttttttcagaaaaagatactaaccttattgtcgttataatagggccttccgggtcaggaaaaacccttctggcgaagcgtgcattaattgagggtttatttatttcaccagaagagccgattgcaagcgaggaatttattcagagtttatcaaataaagatatcatcattgatgacgttgttctttttgatgtgcgaaatgtgttgaaatacgttcttcattcacttgcttcgggaaggaaagtaattttgaccgggcgtccggaagatgagtctttgtatcagaagcttctgttaaatttgcctaaggaaatttcaccattttttattaagctggtgggtgagaattccttgtatctgtga

SEQ ID NO: 23274 - DNA, 489 bp, Escherichia coli
atgaatcttgataaaaacttacctgctttagtaatgaaaaatcttgaggataacatgggggttattaccaaatatctcaagcaaacagaagataacgctcttgtatttattattggagaaacagggtctggtaaatcctgtttggctgaacttgagtttccggatgctctctacccgactgctcaacaatttgaagaatgtgatcacatttcggaaatgttcacaggtttcgatgtagtgattgatgacattttccgttttgatgctgacaaagtcctggagtgtattctggctgtgcatgcttctggccataaggttctggtcaccggacaaccgtcagaccatgaattgtgcattggtttaatgtcacgcttgccagtggggtatcgtactatgtacgtgactctgatgggccatcaagacctacaagagatgtctggcgatggcaaggacaagggtaattcggaaacaaaaatcgtcctgcattag

SEQ ID NO: 23275 - DNA, 411 bp, Escherichia coli
atgacgcagagtgaaattactgttaattccttttgggattggggaacgtcattattaacaagtaacggagcagtaattttttatgccttgcttgtggtattggttcttggcgctgttttgtttaaggacttttctttactgacaacatttgcttccggactggctggcattgcactcctgtgtggagttatgtccgtgctggtggttttggtgttggcaagcgaccagaaggaacaggactggcgagactttgcagctgagcattgcaaagttatagaaaaaagagaaggtgctaccacgacgggagtgggtgtttcactaaaaggtcaggctggtgtttttattggaggtgaacctgaccagacagggtatctctgtgatgatggtgtaacgtactggaagaatgaataa

SEQ ID NO: 23276 - DNA, 408 bp, Escherichia coli
atgaaaggtatcaatcaatccaatggtaaccatttaaagtttctgtatggagtgacctctacagatcgtcttattcagcacgaacatgccgataaattcattgatagctgcatttcaaatattggcagcattcataaaatgtccctgacttgttatcgggctggtggaccattaactgagctggtgcttttttacggttcggataagacattctcaatcaccattggcgttggcgatgtagatgtttccatggttaatgaagacgatatccgaatttctcacaaacaaataactttgcctgatacgaccgatacattaatactcgttactcgcattgcaagacgtagtgggctgaagccgatgttacctgaagcagaacaattcagcacagttttagactttgtttga

SEQ ID NO: 23277 - DNA, 396 bp, Escherichia coli
atggcatttataaagggttctcttttttttattattatggtgctattggtctacggagccacgggattaaacgccaaagaatcaattgtgtttgctgcatttggttttgggatttcagcgatattatgttcattcgtaggcattatgggtgtgttggttgtgactatgtgtttgtttgcattcgaagaacttggcgcgttgcctagattatttggtgcccagataattttaattgctttgtggaaccttatattgaccgtggttttgccggatggaaaagcacgcaccatactcggttttgatctctacaacatttcatcgtatttgctttacggtatgaccgtccttttaggtataggctcggtggcaatgctttttaacaaaaataactcctga

SEQ ID NO: 23278 - DNA, 183 bp, Escherichia coli
atggttctttttttaaattatcttacaaatatcatgcgaagattttttgatattgttctgggtaaagacccacatcgctttatcgtggtgttaatcctgagccttacactcggctttgtttttaatttactaataagatatatttcaccgctggttgcgtcgcagggatttaattgcgcgtaa

SEQ ID NO: 23279 - DNA, 1242 bp, Escherichia coli
atgactactgcaactatggcaactccagctaaaaccaaaaacgaaaatgtttctctgcgtaccttcttagaaaaaaatggtatcggtggtcgtctgggcaatggtcttgttatggacccgacgcatctgaacatcatccctggctttaacacacgtaccgctggcctgggtgaggcttactgggaactcccggaagttaaggaccacctggcgcgtctggctcagcaatatgccgatagccctctggaaatggcccctatggttgtccaggttcgtgatggtcaggttgtcattcgtcagggacactgccgtcaccgtgcaatcccactggctaataaaattcgcgcagaacggggtgagggcccggttgataaaattcgtgttgacgaattccgtggctctgacagtaaagcagaactttttaatcttaaaggaaacgatcaacttccggtctcgatcgttgctcaggctgagtccatgtatcgcatgcacaacagcgctgaagagcctatgagcatcgaagagctggccgcagaccgtaaagtctccgtaacccatgtccgtaaattgctcaaagttcacaccgccccggaggcgttaaaaggtctgatcgttaaaggtgttgtagcatactacgcagcgctcgacgtgatggagaaatacccggataactgtgtcgctatcattcaggaagcgtttgataagtttggcaaagctaccgacaaaaccattggtcaggtccttcttgctaagcgtacaggtgaaaacgacactaatggtgaatctgatggcaatgtgacaaccattacaacgactgatgcaggtaacggatctaatagtgcctctgacgcggctgctggtgtcattgaaagctctgcaggcaatgatgcaggcgttgcgggtggcggttcagaagaaggggaaggcggtgaaaaatccgaaccgaaacggacccctgcggcgaaacgcgaacctaaacaaaatatcaaatctcagccgtcggtgttcgacgtgctgccgaaaaaaatctccaaagagattgtagataactctcttgatgttattaaccgtatcgttaccgaagcgaaagaaattccctttatggaagacggtgcagaggttctcgctaaagcccagtatcaattgacgttaacctatgaagagtttttgcagctgactgcagccaaagacagctacgataagcatctggaaaaaatccagaaaaaaaactcagagcaataa

SEQ ID NO: 23280 - DNA, 165 bp, Escherichia coli
atgaaaattaatgaacaattactaagcgcactgcttgcggctcttgagtggattgatgccgttccttccgatacggttttgcccgcaatgccaggatttgaccgcgatgaagtgaacgagttgatcgcaaacgctcgcaaagagctgcaaacagagacgaactaa

SEQ ID NO: 23281 - DNA, 456 bp, Escherichia coli
atgaacattcaggattctttagaaattcttcttcgctggctcgaagataatgttgaaatggaaaccgatattttattttccgataacgtagattccgctgccatgatacccgccgttcaggcagctatcgcgttagcggaaaatgcaaaacacggcaccgctaatgccgatgagccagtatctgtcctcgataacgactgtcagacaaccagtgggatagacgaccagggcaacagcattgatggaggcaaagcattacagatagccgatcacgagcgcaagttagtggcggttacccatggacaggtcattacagaagctctgaacgccacctctgactttctggatacggattgcgtcatggaccgcctcgggatatcgtacgaggacgctgagcttcgttcttccggcgcgatggaactgcataatgcgcttatcgagtggtcgaaagattga

SEQ ID NO: 23282 - DNA, 609 bp, Escherichia coli
atgggaactcttttttacgatctccctgttacggacggtaaatccggatcgtggacattggatacattcaccatctctcaggagaaagcgcatatgctctctctcagggccgacgtaacaggcaatcagaatgaatacattccacctggtaagtatcgtcgtctctcaaataatggcgaagtcgtcatgtccaatacaccgatggaaattaacacgtgcatggaatttattgagcgggcaacggggcgcgtgcttatcaacgggcttggcctggggatggttctccatgtcattttgcaaaaaaaggaagtgacccacgtaaccgttattgaaaaagagcaagacgttatcaaccttgtcgctccggcctttatagatgataagcgtgtggacattatctgtgcagatgccatgacgtaccaaccacccgcaggggttacttatgatgtatgctggcatgatatatggacgtatttttcagcggaaaatcttcaagagatggagaaccttgagagaaagtacctttttctttgcaagtggcaggcatcctggggaatgcaggaatgcttaaatgcatttatcaattccaggaatcaatctgacgcctga

SEQ ID NO: 23283 - DNA, 450 bp, Escherichia coli
atggtaacggaaaaggagttgattgaatttgaccttctcagaaaggtcggcagtcgctggaaataccgttattccatcggcgcaaattatctctttgccagcagtaaagaaagtgctgtcgaacaagcaacacaagcattcaggaaagctcggccaagtgagcttttaacccgtgacgaacggtatgagaaagcaaatcaggaggaaatcaggttgtcagacgttcgctggaaacacctcagcctcgacgatttgtacgcgctcctgaaccggatgaatggcgataggacaacgctacaggacgcatcctcccgcgagttcacaggaaatggtggacggcgtacgtcagctgccgtggctgctcagggagcccgtgatacggccatcatgtgcggctgtcttgaacgttacattgtgtggcggcggcaaaagacacatttcagcgactga

SEQ ID NO: 23284 - DNA, 186 bp, Escherichia coli
atgaaaccttatggcttgtcttattctgtaactggttgcacctgtggattatgtcgttccaggggataccgtaaaaataatgcctacagtagtgtactgcgtgccgataaacatcgcgcacgtcaggcagcaaaacgtgacattaaaaaccttattcttgaatcgtcaaaatcattcattaattaa

SEQ ID NO: 23285 - DNA, 768 bp, Escherichia coli
atgagccacgaaagtaacaaagccctactcaatatagagacccacactcttccggatgattatcccttttcagtcgatgaactggaccggatcatcgctggcgaagtggtttcaccccatcaggcagcaataatggcccgagagttaaaaaaacgacgtcaggccgaaacttctacgccagttgaggatgattacctggcgaacatgctctggtatgcggaagaatcggtttgtcaccccgacccaaattatcaatgcgagtttggccgtctggctgcgcctggtgttattgccgccgttatccgcgaactcctgcagcatcgcgggtttgcgaaaaataataggccggtggtatacacatcccgcactgagcttcagtgcgaagatggttttggggaaatctggcctgaacccatattagacggttctgatatagcactctatctctatgcctctccatctcctgaacgcgaccagatccgccgtgaccacgccgagtggtctcaggatacattcggcgatgttggcccgactggcccgctgaagcatctcagtctcgaggcgctggaaaccgcagaagcgcccggtaactatgctgaatgggctgatatgcaatttttactctgggatgcccaacgccgagccggtatcactgacgagcagattacccgggcgatgatcgaaaagctgaaagtgaacaaatcccggaactggcctgaccctgaagatggagaaccacgctttcatattcacacaccggcggaatag

SEQ ID NO: 23286 - DNA, 525 bp, Escherichia coli
atgaaacagaatttaaatcacctgaaaccgggtctctatgctgtctggtatttcgattgctgggatgttgatggtgatctgtattataccctcgcgacccaggacgccaaccaactctggcgtgaagagggaacaggcctcgatatgttgcgacaccaaggcgatacatttttaaaagcttgggcgctggatgatgcctcaaatctgctggcacagagcaacaataacctccagctcacccagcaaagtctaaaaccgggcctctatgcaatccactatttcgacaacggggatcctggcaacgaaccgacgcatatcctcgtgacactggatgataatcagaaatggtacaaccatgaaaatggacgggaaatgtttatgtctgaaggcgatatggtgttaaaagcctgggcactggatgatgcctcaaatctgctggctaagacggttgaccccagccagctggtggacatcattcaaaaaaatgagattcaacaacgctttctagcagacctggatatttaa

SEQ ID NO: 23287 - DNA, 288 bp, Escherichia coli
atggaccaggatgacgttttatcaaaaatatccagtgaaaatacaacagctcatgagctgttaagcgaagctatgccaaacgcagcctctcgattctaccggaccgcaaaaaacctctcccgacttctggacgaggtccgcgagcacttcccggatgcttcgtattatgcggcgtctggaagtttaagcctgctgcttggggaaagtcataataaacatgaccagccccagcaggagttactagctcatgcggcaccggacctaagagtggagggcggagactggtaa

SEQ ID NO: 23288 - DNA, 177 bp, Escherichia coli
atgtttaggtggaagatgaaagtcactgtaaaatcaatgaaagtattacttgccagcaccggaaaaaaaatgaagttaacgggcagtaataaaaacggggaccgcttctatgttgtgacagggtggagcggtgaatacaccattcggggcatcgcctggcaactgggattggtgtga

SEQ ID NO: 23289 - DNA, 273 bp, Escherichia coli
atgaagcttactaacgcacagatctacacactgcggcgattatccggggggagtaaatatcaactccgtggtgacggaaaaaaggcgcgggaatgcaggccaggatcagggatattcaccgatgatatttctgcaccatctattcctgtcctgtttcgtctcgggctggtggactatgtacataagggggggagagaacacgccttgttttatgcggtcacgcttaccgacacggggaaacaagccgctgccaccatgaatatcaaggattga

SEQ ID NO: 23290 - DNA, 207 bp, Escherichia coli
atgagcaatttacttgaaacagctttaatggaactttctgacggctcgcgagagaaaatgacagatttaactagtataaccaagcgcatgacagatttagctagtataataaccaagcgcatgactccttgccccaactgccgtgtcttacttcctcctgatgctacacagcatgtttgtgttatggaggttattacctttgagtag

SEQ ID NO: 23291 - DNA, 198 bp, Escherichia coli
atgatgccctccattgaagaaatgggcaagcgagcagcactgctaaaatggaagcgccagtttgggccattcgaaaaatgccctgagtgttacggccttctatccggttgtatgttatgcggtggtaacggcagggtgattcaggaagatattgatgcctggaataaccctatttcgaagatgaggcgacagatatga

SEQ ID NO: 23292 - DNA, 900 bp, Escherichia coli
atgaacaattcatttgagtgcagcaagagaaccgatatcaccgaacaaccgcagagccatgatctactcatcgcaaacggaaatgaaacggccaatttgctacgccacctggcaaataacgagatcgactccgactattttgcagttgtctcggaatgcgaaagctacgggcaagaaactgacgcagagctatcaatcacggcgtttgcccttcgtgccgctggttacgttgatgcgctggtagagtcactggagaaggccctgcagcgtattgctgagctggataaagactgcagagtatacgaaaataacgtaaaaaatcttcttgaacgtgccggttcagcagagtcctcgtgcgcagaggctgctcggattcttcaaagtggtgagcgcatggcattaactcgcgccatcactattctgctggcaaatggcatgaaggtggaggctgagccagtggcggtatgcactgtaaagggcggtcaaatgtgccctgatggtgtgcacgaacttttcgccgcccctcagccaacgctggtagtgccggaagaagctactccggacagtatcgagattcttgccagcgccaggcgtcgtgaccacgctgtattccagtgggatgaagaccagcgaaatgcggccgctgattcctggaacgctttccgggccgctatgctccaggcagtcaactctccggtaattggcattgaccaggcaacaggtgctgacagaacagtggaagttcgctacgtagcacctcctggttacgtgatgttaccgaaggaaccgacaaaagagatgattgatgccgggtggctgcactacatggccaccaagaacccttcatcaaaaggcacatacaaagccatgctcgcagccgccccacaggaggtgaaatga

SEQ ID NO: 23293 - DNA, 336 bp, Escherichia coli
atgagtaatgtatctgtaccaaaaattcctctatcaaattttgagtgcgttcattgcggtcgcatttatcatgacgcagacctttgttcttcagacgattgccctggtaatgacatagctatgccagaacttctgaaccactggacagtggatgaagtagctgaatgtctcgatggggtggggcaagaactttacagaaaattatggtcatatattgaagcaacaactgatggcgaagcgccactggctaaagttgcatggggtgatttaactcgtgagcataaggttgaactggtccatgccatccagcaagagtttcctgacgacgatatttaa

SEQ ID NO: 23294 - DNA, 216 bp, Escherichia coli
atgaatgattccaccgttgtaaaagaatatagaagagcaaagttacgagctgctgctagtgcaatcgagttggccatcaccgcaatggaagatttaattaacgactacgaccgcgaacataccaagtttagcggatgtcatccgaggcagggtcatgcaagtacgttgcggcagatgcagcaaattcacaaggcattgaaacgggggcgaacatga

SEQ ID NO: 23295 - DNA, 387 bp, Escherichia coli
atgagtagagacgaaaatattcaggctgtatttgatctaaaagctggttatacacttgggctcgccgacatcgagattcttaagagagtggcccgcatggcgctgaccgcaatggacggcgagccggtagtgtttacagacgaacgaaaccttcatcatattgccatgggccgagaaacctctctgatttggggaaagcagaactcagagacaggggatataccgctctatcggcacgcgaagctagtgccggatgcattgatacaagctgtagcattttatgagcaggttaagcgtgaaaatccgccagtagaaacgggagcttataaagatgccgttgagtgggtactgcgagaagcgtgccgggctgtcataaaggatgaatga

SEQ ID NO: 23296 - DNA, 324 bp, Escherichia coli
atggcattcatatctcaactgggaacaataccaaagcgtagcggaagagtgccaggttctaagttcgtttcgtttagaaagacaaaatctggtgctactggtgggcttattactaaggacactggactgcgcggaactaaaatagacattcagattgatgaggataataaaactatccgtcttggcgagtacgagaacggagtgacggtaactcaaagacagggcgtattcagttgctcggttagcgtatttaatgcagtgggaaagtgccgaatatccctgactgatggcggggacgggtggtggtacggaagttataaataa

SEQ ID NO: 23297 - DNA, 645 bp, Escherichia coli
atgacaacagaaaccttaagcagagagtggttacagcatcaaatttcagcaattgaaggcgctggcatcactgacagcaacacattggctgctttcaagctggcgctggccgcgatgagtagcaagccggtagtggcggatgaggtcgagcatgttgccgctgtattagagcttatcggtagctttgaggctactgatattgatagcgacacagtagatttacgttttgagatcgctgatatcgacactggctctgacgtatccattactgaatatgccgcacgcggttccgctattatccgcatgctgactggcatctcatcggaattaccagatggttacgttctggaggcgctgaagaacacgcaaaccgagaatgaactggcacgaggccagttattcatagcccagcgaacgctattaaatcagcagcgaaagattgcagagctggagtcccgcaccgtgcagctgccgaaacctaaagattctgacccgggttggaaaattgatccagaatttatcagcaaagttcagaacgcaatagggtacgatgaccaatgcgaatgttgggagggtacaccgtccatggaggtagtagaggccgttttgctggccgccgctggcatcaagatggaggttgaatag

SEQ ID NO: 23298 - DNA, 228 bp, Escherichia coli
atgacaaaatataacgagcttgactcaaaaatactgactaaaattagcgggcatccaacgccattttccagtctgtacgtcaaagatgttgcagaagaatgtatccgacttgcaacggaggagaataaacctgaaccttttcgcattctcgatcgccgactccaggcgctacgtaaagctggtgtaatccgcagcacaactaagggatgggtgagggctaaatcatga

SEQ ID NO: 23299 - DNA, 279 bp, Escherichia coli
atggctaagcgcgatttttacccaactggtgcgacatgctggcagggcgggagttgcacacgcagggggatcacacgtcgtcatcgttatgtcgctggtggggatggacgaaaattcgaatcgtgcccctacactgacgactggtacgcactcggcgacacgattgacacctttggaaatccataccggtatagaattactggtgagaaggccagagttcttactcagttctgcatagacaatttaaaacatgagaaatctgacaatgacaaaatataa

SEQ ID NO: 23300 - DNA, 498 bp, Escherichia coli
atgaaattttccagattctttgagctgataactgccatatgggcaaacaaaatcaaccagcgccgcgatcctgaagtcacgatcatcatccactctccgggaagtgtcggagttactccatcagtagaagtcgagtccatcgaggccgggttcgactggagtgccggtcaggtgttgatttacccggcacagccattgaccacgcttacgccagaccaggtagcagacataaccaccagcgtgcgcaaaggccagtcctggcatgcctatgaggcttacaagaagcataaagccgaaatggctaccgccgcgactgagtattcgaaagtagcaggacaacgtgatgaattattgatagcccttgaagccctttctgctgcttgcgacaccggcgaacgtgaccgggatggaaagcaaagcggagtagttattcctgacaaacatgctgtatgggctgcgcgtgaagccatcgcccgcgtcaaaggtggtatagtatga

SEQ ID NO: 23301 - DNA, 219 bp, Escherichia coli
atggccactcacattcgtaattttggctggaaccgggtaaagctttcgacgctcacatatgaccagttagaacaactaaaaaagaaagttgaagaagaacacgcctgtaataatgggatcttcctttatgacaaggctgggttgaaaaaactggatgctttgagctgggctgtatatcacaaaatgaaagcagacaaaaagtccggccaggtaagttaa

SEQ ID NO: 23302 - DNA, 252 bp, Escherichia coli
atgtttaaccaaactgaaaagtctattgcccagattgcggaatatattccccgtgcctgtcgtgatatgaagttaaaagaagccaaggcacggcttgctacaaaaatcgcactttatattactgatggcagtgatgccgaggtgcttaatgcaaccttcgctcgtgcacttaacagccacacccgggaggcgttcttttctaacgtatctgcatctattgattataaggatccatcattacaatcaaagtaa

SEQ ID NO: 23303 - DNA, 315 bp, Escherichia coli
atgggcaaagaatacggatatagttcggtacagcaagatgttcccgcaaccgataatgacgttcgacatgatgtgattgtcaccggctgtgtgacaaaatatggcagagggattcatttctgtaatgatgagctcctaagtggtgctaatcataatctctggttcccgttgagctctgaggaagactggttttctggcattgagcgcgtgctgatgatgaatggactggcggagaatgtcgtcaaacttagccctcttaatgacgggaaagattatcacgactggaaagtgacgtataaccgccggaacgtctga

SEQ ID NO: 23304 - DNA, 321 bp, Escherichia coli
atggctattgaaattaaagaacgctataccaccgctgttatcagcacagctcacatttctaaagatgatgcagtgttattaactgaagccagttataatcctcgttctgaaaatggtcgtaactggattcacgcaaatgaatatggttacattattcggataacttgtgataatcaggaatggaaacaacatttacgtgatgatggtatctcctggcctactatcgaaaatatcgaaaaagtacttaacgcagggttcgaatgtgttcactttgatcgtgacgcagatattgtggatgaacttattgcgtgggactggtaa

SEQ ID NO: 23305 - DNA, 870 bp, Escherichia coli
atgtccatcgaaaatacattgattgatgaattaaacacatcagagaacacaggagatattattccttctgtacctattgatttaatcattgctcaacgtactgctggcattgcggcgtttatggaaggtttagagaaactcagagaagcagaattgttgttcgcagctgctgctgaaaaggattggttctcagggctggatgagattgtggcgtcaggtaggcgttgccgcaaagaaaatgaaatagaggctttacgccgcagggtggctcgttgtgttgatagcagtatctggacgcgcctgatgacccagacagggatgtttacgtttatgagtagtgagcaacatgataaatggactgaccaggtatacagtgaagaatgccctgaagttactctggacaatgtcatcagtacgtttcagcatcttcatgcctcaaagaacgaaacatttgtaacaggtattattgacgttttccgtaagctgtcctgggactacaaaacaaataatccttgccgtctgggcaagaaaattatactcgaaggtgttttatccataaatgtctcgcgaaaccgatacgcttcggtcaggactaatgcgcagaactggattaatgatctcgcccgtgctttctgccttatcgacaagaaaaacgttccagattcacggatagcagaagggagccagtacagggattttatcaacttaaacagttatacgttaaacggtgtgtttacctgtgagtggttcactattaaatctttctggaaagggtccgctcatgtgacgttcacacgtccagacctcgttgacaaaattaatgagattgtggccagtagataccctgatgctttaccatccagagtatga

SEQ ID NO: 23306 - DNA, 582 bp, Escherichia coli
atgcatcttcatcttgtaccaacactataccacaccatttcaaataaatgccgacttgaatcagtgacgatcccggaactgaagtttgagattaaaggcgatgcgctttcatgcggaagaccgtttcctaataaacggcttaatgtgggtatgcaaaaaaatcgtaaagcaatgattggcttacttcttgaatatgataaaaaagtaagtcattttacaacacaatataaatggtacatagaagacatcggtattgttcagcacaatattaaaactatagtgctggattgtgattttgatctaatatcacaatatataggcttaaatattgggcttgatgaatttaaaccgaggctccatccttcttatcacaacgccgcgccggttaaaatacaaccaatgatggaatcatatcgaaccggagaaccggtcaataaattacatcatgatgtatgggagaataatgttttattgtccaggacggaaacattgctcttgcataccttggaaacagacagactctccgaatacagtttattaaccgacagacttccccagctaaactctgcaatttgcatctga

SEQ ID NO: 23307 - DNA, 294 bp, Escherichia coli
atgtgtgacagaactgtttttttgaatttccagtctcaagatacgacaccttttataactgaggtggaaatgcttattggaggagttccacgactcatgtatcccgatggaacagagcagtttgctgatgatgaaaccgattcactcctgatttattctcctcgactgaccgaacttgaacttgaagccttttgcgaagcgaacattgagcattatcggacttttcacgaggccaatttaaagcaactactcaggggagaccacgtaccattaaccccgttctgggctgaataa

SEQ ID NO: 23308 - DNA, 582 bp, Escherichia coli
atggtatacacaggcataaccgaccatgccagactcagacttatgcagcgttctcgacttcctctgcatgtactcactgatattctcgataaaagggaatatgtcgacttgggttccaagcccgggatattaaaagaacacattctgatttatagtcgtctggatgaaagatggtacgttctaatcagggacataacatcaggatgtatcgttacggtgttaccagagaactatcatgattcttcatttattaaaattaaagagtcagataagcaatcagcatatgatttagcaaataaaggcaggggttcgcgttcggaatttattagtataaatctatgttataatgatttcgatggttaccggtactcaaagaaaatttattccattccagtttcgcaggttgatttgtcgcaagagtcttttttaaagtcaaaattcatcaaactacttaaaagaaagattagggaaaacattgcacgggggatttcatttgatgacaagacgattgagcctggttatacacctctcttcctgaacgtgaagttcagccaagataagtacaaaatactctatttttga

SEQ ID NO: 23309 - DNA, 384 bp, Escherichia coli
atgctgtttcggaaactggtgttgttgggaggggcctgtaccttacttttggcctatcacggtggttattggctaagcgactggccgtggttgttttattacgcgttggtctcctggtggttttcatttagctggtatattttcattacccctaaagttccagttgttccaggcaacataaataaaaacgaaaaatcattatccatagcggggaaacctctgactcaccggtataaacagagtgatagtgatgattcctcactgattatccatagcatttatttatcatcaacaagcaacgtacaatcggatagtaccattattaatggaggagattgcagttattcggacacttcagattcagggtgcagtggaggtgattaa

SEQ ID NO: 23310 - DNA, 480 bp, Escherichia coli
atgagtaacatgaccgtgtcgttttacagcaaaaaacatcatgacactgtagcaagcgctattaaggcccgtgcaacatcatcaattgagttgctctgttctcctacactgaatcagcttctggagctgacaaattcaatctgccagtgcgcagggattgaaaaccaggttggcatttttgtagcagactcagacactgacaattccgcacccggtgaacaggtacctaatacccatgcagtctggctatataaccagaaacggcatagtgctgcccgtgatgcgattattaagaaagatattacgcaagtgaagattgatgagccgatgacgcttaatgaacttctggcgatcattgatgtggtctgtcgttgtgctggtattgacgaggatgtagtcggtattgctgagccgatgatggcggttattgatgctgggcatcgcgggcaatctacggctcaggaattgatgctgcactga

SEQ ID NO: 23311 - DNA, 1545 bp, Escherichia coli
atgtattcgtatgaagatcgccttcgagccgtgaggttgtacctgaagcttgggcgccggatgagcgccacactacggcagctgggataccccaccaagaactcgctgaaggcctggttggcagaattcgaacggaatcaggatcttcgccgaggctatcaacggataaaacggcagtacaccgatgagcaaaagcaacgggcagtagatcactatatcgaacaaggctactgcctgagtcacacaatccgaagcctgggctacccaagccgcgaggccttgcgtgcctggatccgtgatttacgccctgaattcgctaggacggtcgtcggcagcagcgctcccacagtcgcccgctctcgcctcgagaagcagcaagccgtcattgcactgaacctgcgcgtaggttcggcaaaggatgtggccgacactgtcggtgtatcgcgaccaacgttgtataactggcagcatcgattacttggcaaagtgcccctaaaacccatgacaaagaagaaaggtgacacctcgctcgagcagcggcatgaggcactactcagggaactggccgaactggagagccagaaccagcggcttcgcatggagaatgcaattctggagaaggcgagtgaattgataaaaaaagacatgggcatcaaccccctcgaactgacaagccgagaaaaaacgaaggtggttgatgccctcagagtcacgtttccattagccaatctgttgtgcggcctgaagctggcgcgcagcacatacttctatcaacgcctgcggcagacgcggcccgacaagtacacgcaggtgcgtgaggtcattcggactatcttcgaggacaactaccgctgctatggctatcgacgcattgatagtgccttgcgccttggtggcatgcgtgtgtccgagaaggtcgtgcgtcgcttgatggcgcaagagcgtctggtcgtgagaacaccgcgccgccggcgcttctcggcgtatgctggcgacccgacaccagcggtcccgaatctgctgaatcgcgactttcacgcgtcggcgccgaatacgaaatggttgaccgatctgacggaaatacacattccggcagggaaggtctacgtctcgccgatcgtcgattgcttcgatgggctggtggtggcctggaatatcggcaccagcccggatgcgaacctggtcaataccatgctggatcacgcggtacggacactgcgacccggtgagcatccggttatccattcggacaggggctcgcattatcgctggcctgcgtggatccgccgcactgaaaatgcccaattaacgcggtcgatgtccaaaaagggctgctcgccagacaatgctgcatgcgagggctttttcggacgattgaagaccgaactaatctacccgaggaattggcagcacgtgacgctgaaagacctcatgacgcgaatcgatgcctatatccactggtacaacgagcgccgcatcaaagtgtcgcttggcgggcgtagtcccatcgagtatcgtcatgcggtcggattgatgtccgtataa

SEQ ID NO: 23312 - DNA, 471 bp, Escherichia coli
atgatctctactcaaaccaagattacccgcctcaactctcaagacgttggtgtaatgcgggcaatgctaggcatgttcggcgaggcttttgaggacgctgagaactattgccgcgctcaaccaagcgacagttacctacaagacttactgtgtggctctggcttcatcgcaatcgctgcgttacaggggcaagaggtcatcggtgggctcgccgcgtatgtgctcccaaagtttgaacaacagcgcaaagaaatctatatctacgacttaggcgtgcagggagcctatcgccgacgaggcatcgccacagccttgatcaatgaactccagcgtatcgcacatgatattggcgcttatgtaatttttgtccaggctgactatggggacgatcctgcggtagcgctctacacaaaactcggtatccgggaggacgtgatgcactttgacatagaacctcaacctgctgcctaa

SEQ ID NO: 23313 - DNA, 246 bp, Escherichia coli
atgagaaatggttttgtcagcgatgaacaatatcagcactcattggccgtttttaaagagcttcttgatgccgatgtttatgaaagcggtaataaaaaaattatcgaaaagttcgaatcggctttagatatttgtttggcttatgaacgtcaatgctctagtcaggatttacataagtctctcataagttcttattcagtcttgcagcccaagcgggctgcttatccgattatatccatatattga

SEQ ID NO: 23314 - DNA, 150 bp, Escherichia coli
atgaataattctgagaaagagcgttttaacaatcgggtttgtgtggggcaggtacgtatcagcgcagacgtttatataaactccggtatgtctgaaagcgcggcagaagtgatgcattcaaaaatgaatttaataagtatgaagttctaa

SEQ ID NO: 23315 - DNA, 471 bp, Escherichia coli
atgaaaatattcaccttattaacattcacaatcgccatatcgtcgccctctttactgattgcagcggaattaagcggcaaagtaacacgcgttctcgacggcgacaccatcgaggtactacaggataaaacgcctgttagagttcgccttgctaacatcgatgcgccggaaaagaaacagccctttgggagctggtccagtaaacagcttaaaagtctgatagcagggcagcctgttaccgttacatatatgcaaaaagaccgctacggacgtgttatcgggcgcgtcttcacggcgaacggtacggaatcaaaccgctttatggtgcaatccggcgctgcatgggtatatgaccacttcaacacagatacttccttgcctggtctgcaacgggatgctcaagagcaaaagcgtggtctatgggctgacagtcaaccagcgccgccgtgggaatggcgtcacaatcattag

SEQ ID NO: 23316 - DNA, 1248 bp, Escherichia coli
atgagcatattagatgatattcgtactatcggcctaaagatgaaaaatgaacaagcaagcctcaaggaaataatcttggagtcgagtcgggttgatgtttcggatgaacaagtcgatggcttagatcgtcttatctataaccattgtttaaataaaaaaactctttcggacttctttggtaaatcaagaaacacttttagtagaattcttgctgaactacatgagaaaaaagtgatcggtgaacctatcttccagaataagagtcacctgtatacacgttgggatgttcaaaaaataatggaagcgatgggcactattcaatatcgtgaaatgtatttgccccgagttattgttacggaaaaccataaaggtgggacaggtaaaagtacaacaacagcaacacttgctaccgcggccgctttggatcttaatctgaatgcaaaaatctgcgtaattgatcttgacccccaaggctcgttaggcaataaccttatccactcaactagtgaagatagtgtttacctaaccataaccgatgttctgcttagtgaaattgaagataatgactttacacaatatataaaacagggatatacggaagcacaaattattggtgctatggcattttcaacccatctccctaacatggatgttataactgcattcccgacagatgatagatttactgataagtattggagcctcgataaggaggcaagactcaaacttctgacacgttttcgtgatgtggttatacctgtattaaaggaaaaatatgaccttatatttatagatactccgccacaagattctccaattatttggtcaacaaacgaagcagctgatgcaatacttgttcccattacaccacgagaatatgattttgcatcaaccacaaactatatgattacgatttcagaccgacttgagcagcttccatctaagggaacaaatattaaatggataaatgttcttgcagtaaacgtagatgatagaagtcaacatgagattcgtactttaaataaactagtaagaactgtacgtgatcggttcatgacaacaaatattaaacattcagaggctttcgttgcagcggctgaaaaaggtcgtactgtactcgatattaaaaaatcagaagaactttgttcttcaaaacaatatgatattgctgaaatgtcggttcagtcggtgtatcaacaacttatcaatgaaattaaaagcttctcagttagggaggagggtaaataa

SEQ ID NO: 23317 - DNA, 1011 bp, Escherichia coli
atgagtgatgttgaacgcggtacaagcaaagacaaatacttaaccggaaacagcaaacgtacatttgtcgatcaaaaaagcggacttccacctttacgtacttctcctacacagaagcgactatttactctagcaaatgggcgtaaagttgaagctcgctacgttgtcgtccctggctcagaagttgctaataaaacgctcgttcatgaactaaacccacgaaatcaagaggcagttgacgatctctctacaagagaaattcttcctttaattaaagagaatggggttacaactgaagctattgccgtctaccgggacggccaattttacctaattgaaggaagtaggcgtcgtttctgctgcataaaatgttcggttgatttacctttatgggccttcgatgtagaggttagccgtgaagatgtcgattgtattgttaatgctgcacaaacggcaaaacgattctcgtatcgtgaagttggaattaaataccttgaaatcatgaagaataagggttttaaaactaatgaggaacttgcttcttatcttaatattggtattgaatcgataagaaagagaattcaggctgcaaaaatcagtaaagaacttattagaatattcccagatagtgaggggatacctaatacttattatagtaaattggctagaattgaaaaaaccgctaatgctaataacattcctctgacagagctaacatctgaagtaggggcggatgacaataaaattactaacattaatgatattgaggaagttcagaagtcaattttagatggtttacattcagttcttagtattctttgtaatgatgtaaataaaccgcaaaaatggacagtgactgatattgctgcttttgataataaggatacttacgctagggtaaaaagaagcgccgatggccagaaagtaagctttgaatttaagcgtattggtcaatcaacaataaatgagattgaacgcttaattaaagttagtattagcaaagcaaaataa

SEQ ID NO: 23318 - DNA, 2316 bp, Escherichia coli
  misc_feature (2304)..(2313): n is a, c, g, or t
atgaaaattaatttacagactactttaatactaattgccctctccgctttttcactcccctcatatgctcgtgtgtatgaatatgtattcaaggatgtctatggaacggataaatcagtcagtgcggaagcaggtatcctaaatacaaatgaaaaaattcaggtaagaataatatcgggactcgacagaaaaattcaggtaaccgtaaagaaagacaatgttggagtatatagctttactactgagagcgtgacggtcaatgaccgtataaaggcatcaactggtgaagaattttatggtaaaacgctgacattgccaccactgagtgatggaagttatgtaataacgtcagatatcctgaatactcaaaacactgttatcgacagcacgtctcacaattttattattgatactgtagggcctttgtcagataacctgagcgtggaccaaaaccccggatatgatatggtcttaacaggtgagcgttgggaactaggcctcggggctgaagcaaagctgtacctgaatgtgaaaaacgtcaaatctgccaccggttttgataaagcgactattcaggtgataaaacctgatgatactgttttttcaactacagatatggtttatgacagtggatcagcatccctttcaataccgtggacaaaagggaatatgagtcggtcatcatggatgcctgtatcaaacgctgatgtggaatatcgtttccgtgtgacgctctatgataaagcgggaaaccataaagttttgccggatcagaagttcatatttgactcagatcttggtgaatatactttatttgctgtttatgacccgacttctaaaacaagcgtagttccgggatttagtgaaggttacatagcatataagccgggaatgaccgttaaccaaaaccctttaacactcgtgtacagggttccatcgaataatcgaagggaatacagtaaagctggtttgaaatttgggacgattatttccgaagcgaatggatacagttatgtatccgcgaaaacggcctataaggtagcttacgtcatccataacggatatcaatggggtggaggctcactctcctataatatcaatttaggaagtgaggctccggccagcccggcagcacctgaagtatggttaacatcagatataaaaggtgaaatgaatgcaggcagctatctttgggattccaaagatctacccgtgaaattcagctctgtaaagatcactgcgtctccgcgaaattatggtcagagagcgatgagtggaaatactgagatttgtcagatacctgctggtgagactgagtgtactggtgcggtatcatggtctattccgaaatcagggaatggtattacaacatacttcttcagattgactgatatggataaaacactttcatcagtcactgtagaaaaaagacatcactggaacactgatctgttacccaagataactggatatagttaccaggaggaaaacaaaactgtactcttatttgtgacgcaaccagggcgcggaaaattccgcgatttgttgcaactcaaatctgctgctctgattgattcagataccggggaccaactactgtcaggtatccaaacagctctatctggcgaggattacacatacagttttgatctcagcaaactggccgaaggtaaatacaatttaggctttctggcaaaggacagctttaacaatgaaacttcatcaccattcataaatctgattaacgacaagacacctcctgttgttaattttaaatatgaaaatgcgccgctatcccccggtgctactgttttcgggcttgagaacatcagtataacgctaaatgatgagttaacagcacccagccttgtcagacttgaacttaaaggaggaccagcgtcggatagcgttatcttggggtttaaccagaatacggacggtagttatacacctgattaccctcgtctcttccccagtctggatgcaaatacggacaaatatacactaaccgcatatgctaccgacgcgaaaggtaacactactcaaaaaagcattcagttcgcctattacccaaaaaacctggtcacccttgagaagctgaaaactttgggtgttgtaaaggcgctaaaaaccagtgacaacacaccgttggccgtcatgcggacgggacagctacgacgtaacgatggctcactggctaagggtatacaaacggcaaacatcacggtcaggaaggacgcagattatgcgataaatatccttgggaacgttattcaccccggggagacaaaagaaattcagatnnnnnnnnnntga

SEQ ID NO: 23319 - DNA, 2406 bp, Escherichia coli
atgaataccaagataaaactgctgacaacgataatccttgcgacgatgtccttttcatcgcattcacgggtctatgagtacaccattaaggatatctacggtgcggagaaatcagtcagtgcggaaaccggcattcttaacactaacgaaaaaattcagttgagcctgatttccggcctagatcgcaaagtacacgtatctgtccggaagtcaggaacggaggtttacagcacgacaaccgatagcattaaggtaagtgatcgaattaaggcatcaacaggtgaagagttctacgggaaaatcatcacgcttcctccccttagtgatggaccgtatcaggttatctctgaaatacttaacacacagggtgctctggtagactccaccacacaggatttcaccatagatagtgtgggccctacagcggacgatttgagcattttacagaaaccggggtatgaaatggtcacccagggagaaaggtgggaactgggccttggagccgaccaaaaactatatgtgaacgttaacaacgttaaagcagtcgctggtttcgataaagctacattacaggttattaatcccgataatagcgtctattccattactgctatggactatgatagcgggtcttcctccctgtctgctgcatggactttagggaatcggaaaaaggcctcctggatgcctacatcaaatgctgatgtagagtatcgtttccgggttacactctttgacaaagcaggctcccgaaaagtattaccggaacagaaatttgtatttgatgaccaactgggtgaatacactcttattgctatacgggaccccgaagcgcaaacaagcgttgttccagggttcacttcgggttatatagcttataaagcgggtatgacagttaatcaaaacccgattaccttaatctatcgtatccccatcaacaatgtaaggaaatacaacaaagctggtttaagttttggctctatcatttcagaagctaacggttacgcctatgtggcggcaacaacagcatataacaacaggtacgatatacataacgggtaccaatggggcggcgctactgcaaactataaccttaaactgggtcccgacacgcctgtcggaccggaaatgcctagtagcgtttggctcacgacggacacaaaaggtgaaattaattcttttaactatttatggaaaacaagtgaactaccggtgaaatttatttcagcgaggatccgtgcttctgcgagaaattatatccaaagagcatttacaggtaacctggaaatctgtcaaatccaaccaggtgagactgagtgcagcgggccggtaccgtggtcaattgctaaaagtggcaatggaggcgtgacatattcttttaaaatgtataatgaggacaagacactttcatcaattaatcaggaaaggaggaactactggaacacaaaccttctaccgaggataaagggatatgactatcaggaagataagaaaaaagtacttttatttgttacccaacccggtaatggtaccttcagagatcaacttcagcttaagtccgctgaactgattgatgctaattcaggtatgcaggtgctgaatggagccaaaatagcgctttctggtgaagattatacttatgcgtttgacttaagtaagttggctgaaggaagatacgacttaaactttctggcaaaagataccttcgaaaatgaaacatcttctccattcatcacgttagtgcatgatatgactccccctgagatcagctttaactacgacaatgccccgctcacctccggcaacacggtctatggtctggagaatatatccattaaactaaacgatgagctgactaaacctactcttctccgcctggaactacgaggggggcctgcatctgatagcgtagtccttggtttcaaccagaatgttgatggtagctacacacctgattacccacggctgtttcctactctggatacgtcgacggataaatacactctcactgcatatgccacagatgctaaaggtaatacgtcccaaaaaagtattcagttcgcctacttccctaaaaatctcgttaccctggagaaactgaaaacactgggcgtggttaaagcactcaaaaccagtgacaacacacctctggcagtcatgcgtaccggccagttgagaaggaacgatggctctcttgcccagggtatgcagacggcaaatatcacggtcagaagcgacgctgagtatgccatcaacattctgggaacggtgatccatcccggggaaactaaagaaatacagcttgacctcggaactggtgaaaactctacggttccgatttttccggctatcaacgggtctacgggtcaaagcaacttcatcatcgagttcccacaacttaactaa

SEQ ID NO: 23320 - DNA, 2406 bp, Escherichia coli
atgaaattcaaactcaaacttctggcggcattaatcctcggcaccctttcattgccgggccattcccgtgtttatgagtacacaataaaagatatctacggtgtggagaaatccgttagcgccgattcagcgaagctgaacaccacggagaaaatccagcttagcctgatttcagggctggacaggaaaatccgtgtgacggtgaaaaaaggcgacgcgaatgtctacagcacgacgacagaaagcgtgaaagttgccgatcgcatcaaatcatcatcagatgaagagttttacgggaaagttataaccatgccaccgttaagtgaagggctgtataccattacctcggaaatattgaatacccaggatgcccttattgattcgacaactcaatcattcctgattgatacgtctggccccacagccgataacatgaggattgaccagcgtccgggatatgacatggtgcttaccggaaacctctgggaactggggttgggggcagaagcaaaactatatgtcaccgtcaaaaatgtgaaagcgacggccggttttgataaagctactatccagatcttaaatcccgataataccgtctattccaaaatggacatggtttacgacagcggttctgcatcgctttctgttccgtggactaaggggagcgcggttaaagccgactggatgccggtgtccaatgcggatacagaatatcgctttcgtgtcacgctatacgacaaggcaggtacccgaaaagtcctgccggatcagaagttcctctttgactcggatttaggcgaatacacgctagtcgcggtgtatgaccctacagctgaaaccagtgttatacccggattcagtaaagggtatgttgaatataaatcggggatgacggtcaatctgaatcccattacttttgtctaccgtgtcccttctacgaaccgcagggagtacagaaaaggtgggctggccttcgggaacataatttctgaggctaacggctacagctatgtgtcggtcacgaccccttaccagacgctctctgttatccataacggttatcagtgggggggggccagtgttacctacaatattaaaatgggtgcagatgcgccggtaagcccgactactcctgacgtgtggattacctcggacaagaaaagctcggtaagctcatatgatttcctctggaaaacatccgatctcccggtgacatttcttactgcccgcgtgaaagcgtcggcacgaaattacattcaaaaggctatgtctaataccggaggtttcttatgtaacattcctgtcggcgagctggagtgtgaagggaaaattgttgggaatattcaaaaaagtggtaacggccatatgggttttttcttcaagatgaccaactcagatggcacccttttctcacaatatgctgaaaggcggcaatactggaatgctgaccagttgcccagaattactggttatgattatcaggaagacaagaaaaaggttctgctatttgtgaatctaccggggaacggcagtttacggtacaaattgcagctcaagtctgcggttctgattaatgcggattcaaatgtccaggtgttaaccggtaccaatacagcgattgctggtgatgattacacctacacgtttgatttgggagctctcccggaaggcaaatataacctttccttccttgccaaagacaccttcgataatgaatcgtcatcgccgttcatcacgctggtgaacgatatgacccccccagacgtcatatttaattatgaaaatgccccgcttgcttccggttctaccgtgtatgggctggagaacatcgcgattagcctgaatgacgcgctgacaaagcctgttctcgaacgccttgagctgaaaggtggccccgcatctgatagcgtgattcttggtttcaaccagaatgccgatggctcctatacgccagattatccacgtctgttccctacccttgtcgaaaataccgataaatacaccctgacggcgtatgcaacggataccaaagggaacgccactcagaaaagcattcagttcgcctactatccgaaaaatcttgtgaccctggaaaaactcaaaacgctgggtgtggtgaaggcgctgaaaaccagcgacaacactccgctggccgtcatgcgtaccgggcagttgaggcggaacgatggctccttggttcagggtgtacaaactgccaacatcacgctcaggactgacgctaattatgcgatcaacatactgggtactgtcattcagccgggcgaaaccaaaaacatccagatagacctcggcgctggtgttaacacaacggtcccaattttcccggcaacaaacggcgctaccgggcaaagcgatttcatcattgagtttccgcaaattaaatag

SEQ ID NO: 23321 - DNA, 129 bp, Escherichia coli
atgccaaaaaagttactttccttctccgttgcaaaaacaacgcatgtttatgattctgctcacctggcctacggcttatttcacctgctcgagatcagcacgcctgctcttctgggctggcgaatgtaa

SEQ ID NO: 23322 - DNA, 678 bp, Escherichia coli
atgctcagttccaaaaccagaattgccctgattgattatgaaaatatcggaagccttgagggggtttcccttcatgactttgacaaagtgcttttcttcacgggcgctaaacaggaaaacattaaaattcccgttacgtccctgagctctgcaatttctgtatgcattattccggcgactgaggtatccaaaaacaatgttgatttccatctggttctggaactcggccagctgaccgcattgtccggggatacgtcacacttctctgttatctcccgtgacaagggctatgacggcattattgcccgtcttaaagcagcagggatcagctgtacaaggttctctccagccctgcccgctccgcagccggttaaagacacggcttcaacaatgaaagtgatgaaagccaaagagcatgacatggggtactggattaacagactgaagctttcctgcgcatcctcccctaaatcgctcccggccacgccaatgggcttacaaaattacctttcaaatgtgacagggcaaaaatcctgctcattgctgaacgagcggattaagcaggagctaattcgtcttggtttcatcacgatttacgaaaaaacgctggtctggaatcgctcattacattcgccagcccagaagagcaggcgtgctgatctcgagcaggtgaaataa

SEQ ID NO: 23323 - DNA, 420 bp, Escherichia coli
atgatgagctcgaaacacgtggtcattagcacgaagcatccggttgccggatacctgtacctggaaacgatccccgatagcgaggtcgggttttcagatatctatcagataacagacagtctttttcgtgcagacgttctgccctgtgactggcgagagcataagcggcagtggggtaaggactttttgggccatggctcatgggatgtgtactacatcaaacagcatgtgaaccgaattaactggtttggcaatgacagcattaagaaaattaagttcagatacagcctgtcccttaaagagctgattgactgggtatccgaccccgaccattggatagatattgccgtagaggtagatgataccagtggttccagaccaatggccgtagccatgtttaatcagaaccagcacgtttag

SEQ ID NO: 23324 - DNA, 354 bp, Escherichia coli
atgcatgcaactcatctgacgaaaaaatttaatgttttggcggtcgtctatttcacaatcattgcttgtggtcagattgttctgttccctcattctcagcccattttcctgttcctcgtgactatggctatggcggttcgcttatttgccctgcggcctcaatataaaaatttacgatttctggttttgtccatcatctcacaccaccttgtttttaccattctttcactcatccaactctatatcgatgccaggtatagcagggcaagtttcattgagtatcaaatggtttatgcgcctttgctcatcgggatgggatatgtgtatttcaacgtctggagagcgcgtacctaa

SEQ ID NO: 23325 - DNA, 507 bp, Escherichia coli
atgttgattaacaataaagttaaaaaagaaataaaggcaaaaagaaagaaggcgtccaaaatattttggacgtgccattacatcgaaaagaaatatcctcaacctatttttatagcccttttttggttaccttggcttcctttaatagcatatataaagctattcccgcaattttctcctttaattgcattggcgatatacggacttgggattataacaatactttctgtatggttctatttggattttcctaaaagctggattgattcactggaccgtcaaattttgaagtaccggtcagatatgtcattcattgatgagctcaaagatgtacacactgatgattttattgaacatggcaaggaaatactaacgattagcgacattcaatattgggctaatgaccaagaatggcaactggataaactacatagaaaatatagtcgcgtcaaaatcaaaaaagaggtggttgttaaccttaaaagttttgaaagtaaaaaggactga

SEQ ID NO: 23326 - DNA, 579 bp, Escherichia coli
atgtctgaaaagataatcaaaagggggggggagctcatagagttgccctctcataacaacaatgccgtaaaaaccgagatgcagaccaggacagaaaaacccaaaacgaaaatcaccaaagcgcaaagagaagaactcagattaaaatttgcgtgcaggtgtgcctactgcggctgtgagctgaaggaaaagggctggcatgccgatcatgtagagccagttcgtagagatttcgatatagttcgcgcgccccaggggagtagggtgagtcacgttgcacgaagcaatggacgagtatttcatcctgatcgccatgatttagataatcttttccccgcgtgttcagcatgcaaccttttcaaagcgacatattcaatcgaaggattcagggaacagattgcccaccagcctgagcgtgctcaggcatactcagtcaatttccgcacagcccaacgatttgggctggtaacggttattgagaaacctgtggttttctggtttgaggcgtacgatgcctcaaaagaacttgaaccccagctttcttattttttggcacaccgggaggcttatcaggattga

SEQ ID NO: 23327 - DNA, 315 bp, Escherichia coli
atgcaaaaaaaaatgcttacagtgttgatctgtgccacagtctttctttctggctgtaaggaagaaggtataaccccaactggcaaagcatgtatgggcaccgataatgactcattgattgaaggcctgaaggggaagtgccagaaaggcgatactatagcgacaaagaaccctgcatatttttgtgatttcaaaagtcagattgcttttaataattacaatagtgctatatgtatctataccggaatgcaagctgaggaacggattaaagaagccgacatcagtccaagaaaagacagcaaacctcaatcctga

SEQ ID NO: 23328 - DNA, 411 bp, Escherichia coli
atgccatctcagctcccccttgacccaaaacttccggccaattttgatgacacccctaatagtgaacgaagcaaagaacagctagatgaatggtgggatcatccttatgggatcactaaaccagacggctcatttactgacagatgtcttaacggtggagcgagggaccgctcatcggtgcttggaaaggtaagaacttacgaagcggcttgtgtcctggctcacgacgcccaggcaaaatgggtcaaaacccgtctgaaacctatcttcatgtactctaacgaaccgcccttcaggctagtggttcagtcccagcgaccagattacgaagaaagcatcattggggagttcaatactattgatgaaattaatttgttcttgttaaagcagcaccccacccgaactacttga

SEQ ID NO: 23329 - DNA, 360 bp, Escherichia coli
atgtttaatagcctttctgattatctacagcaacaacgagatcgcgaggaggctctgaaacgaaaactaagccagttgaagccaactgttaggaatggcgaggcaggagagataatcgcagcgctgattgacctcggctcagtggggggcgattttaaaaaaacgacgtacgattatatctatgagtattttgcatccgcccgctgtattgatgtgttggtggtaatgttattcctcaatatgaagcatccactctccgatggagcaataaaaaaagcctatgcaagacagtccgacagtgaagattcgaggtctgcttacataagcttgatagttgacactattgataaacgccggtaa

SEQ ID NO: 23330 - DNA, 444 bp, Escherichia coli
atgtcaactatccctcaattagctaagctgggtttttcctcagatgttgttcctgtgatcaataccccagcgcccaatatgactcgcggatttgagcgctttcatatcagctataacagttcatctgccgggtatggctgcgatacaaccgctctggttctggatggccgtgtgtttttcgtactgaacggggaccatgcctgtgatatgaccaaagctgccgcagcacgcggtatcgatggctgcattgacgtcttcatagaccgtatcgagtcggctagtcgacacagcgagcataaaatggctattggtctgacaaacgatgagttcggattgatgccgaccgcgctcgctgtcatcggagaagagaacatcctccgtcttctatctgctgtgacaggaaacgttcaggacttttcagcgtacggtattaatcaggattaa

SEQ ID NO: 23331 - DNA, 204 bp, Escherichia coli
atgaaacttgaagatttaacaggtgacgaccgtactctggttgtagtcgctctccaggctcttttccgggagcgaagtaactcatatcatgcagcctgcaccgcctgccagcttgcaggcgagaaaccaccagctgagaatcttttttgcgtggaggaaagtatttcggcaattcgccggatgggagctctcccgcagagatga

SEQ ID NO: 23332 - DNA, 273 bp, Escherichia coli
atgaagccagatatgaaatcaaccaatgagaacgaaaacagacgcggattgctcatcagtgcaggtcagttgctgtttggtgagcgctggcaaacagaactcgccagagcccttggactgtcggacggcagacgcatccggcagtggctttctggtgacagaccaatacctgtcggtatatgggatgacctgcgtgaactcctggaggacagaagctccaaaatggagctgatagttaaacagattcaagccagtaagaaagataaaatgtag

SEQ ID NO: 23333 - DNA, 435 bp, Escherichia coli
atgacgcaacaattttctcctccgtatgaggtggtggaaatgtcccggcgtatttttgaaaatttaatctccagtactcttaagacatctgataccacaggaacctgcatgtatggttcgattctggtatccatgctcctggagaaattttcaggtgtcaggacacgtatcgccggtggagatggtgttgatgatggtggaatacttactgccgccggtatgaaagggcattattgggttgttgccaacgtaaatggaatgctctttgttgtcgatatcacggcagatcagtttggcatggacaaaatcgtatacaaagggctaaaggatgctccagagtatattgagggccaccaaatcaccattgatgagcatgttcatgagacccttcaccagatcataggaagttacagttcagaatataaccagctgtga

SEQ ID NO: 23334 - DNA, 330 bp, Escherichia coli
atggataaacgttacgagttggctgacaagcacgggatgtcccatgaattcatcgactggtttttcgataaaaagaaggatggttctggggacctgtggtttgtcatgatgtcggcaatgtgggagggctataaagcccgggacacccattcgacaaaagcatttgcgtaccaccaagagcaacaaaattttgaagcatggtgggaacagaacaacgaaggggggcctctctctggttgggagaatctccgagctaaagatggatataatgacgaagacattgacaaacaatgggaggcctggctgggcagagctcgttatactggttaa

SEQ ID NO: 23335 - DNA, 1416 bp, Escherichia coli
atgtctgaatttgattcccttgcggaagagctggtggaagaggcacgtaatgaagaggccagacaacagcaaagggacctgtccctgatagggaaagtccttgaaatctatgatcagaagtttgttgccgaacttttgcgtaagctgggaaattcagactggaccagggagaccctgaaccgctggattaacgggaaatgtgggccacgttcacttaccgtaactgaggcatcgcttcttgaaagactgctcccgcagccgccagcaaaccatcccaattatgcttttcgcttcatcgatctcttcgccggtatcggcggtatccgtcatgggtttgaagccattggcggccagtgtgttttcacaagtgaatggaacagctattcagtcaaaacttataaagcaaactggtactgcgatcccgaagcgcatatcttcaattcggacatccgcgatgtgacactcagtcataaggaagatgtcagcgaagaagatgcctacgcccatatcgataaatcgatacccgatcatgatgttctgctggctggtttcccgtgtcagccctttagccttgcaggtgtgagcaaaaaaaactcacttggccgtaaacacggttttgaatgtgacacccaggggaccctattctttgatgtggctcgtatcatcatggcaaaaaaaccggccatctttgtactcgagaacgtcaagaacctcaaaagccatgataaagggaaaactttccgtgtcattatggataccctgaatgagctcggttacgacgttgctgatgctgaagctacaggtgcggatgatccaaaagttatagatggtaagcatttcatccctcagcaccgggagcgtattgttctggtgggcttcagacgtgacctgaatttaagtcagggatttagccttgctgacatttcttcgctgtttcctgaaagaaaagtgctgttcagagaactccttgacagtgatgttgatgataaatacacactaacgccaaagctgtgggattatctctataaatacgccaaaaaacaccaagagaaaggtaatggctttggctttggcctggttaaaccagacgatgataaagctatttccagaacaatatcagcaaggtatcacaaagatggcagtgaatcgcttgttgatcgtggttgggatagcgaactcggtgaaaaaaactttaatgaccctgataacatggccagacgtcctcggcgtctaacaccgcgtgagtgtgcccggctaatgggatttgagcagccagggaaagtaacttttcgaatcccagtatccgatactcaggcttaccgccagttcggaaattccgtcatcgtgccggtatttgatgcggtagcgaaattgctggagtcacggatcatcgaggctgtaaagtctcggaaatag

SEQ ID NO: 23336 - DNA, 1203 bp, Escherichia coli
atgagtcttctggcggagtggttgcaaacaaagtgttctgcgaatgtttgggtattcgttaagcgcttatccgctaacgataccggcgctacaaaatcccaccagtctggtctttacatgccgggtgccgtcattgatgagctgttcccctccctccgtgatactcagttaagaaatcccgaagctcttttttccgttcacgtgtcatctcatcctgattgtcctgacctaaatgatgtaagggccatttactacaacaataaatttttcggcggcacccgtgatgaaaagcgtctgacgggttttggtaaacaaaatcctctccagaatccggagaataccggcgctctggcacttctcgccttcgatcatatgccaggaacatcttccagttattgtgatgtctgggtgtgcaaagacctgagcgaggaagagattcctgaaccaataattggtgaagttatcccgggagcaacaatatttggccctggagacaaaataattggagggttcgttacagagacccctccaggaagaacaaagtataagttaccaccggaatggaatcactatttcccttcaggcagggaaattattggttttgctgcatgccattacgataaaaagacaagcgatccggatactcaactgacgcgaagaagaaaaattgagtttgaaattttccttgccgttgaggaactgcacgtgttggggcagatagccaaaggttttgcaactgtgaatgattttattacgcttgctaactcggtgagtaaccgaaggaagtctcgtgccgggaaaagccttgagctacatcttgagtcccttttcaccgaacacggcgcaacgagcttcgaaacgcaggccaccacagaaggtaagaaaaaacccgatttcatcttcccttccggtgcagcctatcgcgatcctgactacccggcagaacggttacgcatgttgggggtaaaaacaacctgtaaggaccgctggcggcaggtactgaatgaggctaacagaatagatacagtacacctgttcaccctacagcagggcgtatctgtcgcccagttcagggaaatgcaggctgagggcatacgactcgttgtaccggaagggttacataaggcctttcccgaggaaattagaggagagttaatgtctttgtctgcgtttatcaatgaaattaaggaactctattcttga

SEQ ID NO: 23337 - DNA, 315 bp, Escherichia coli
atgaatgtccataagagttatcaaactatcacccactaccattttgattggttgaccccagctggcgactaccccaagtctgctattatggtagttgaatgcaaggatggccgttggattatagttcaggagtttggggaagattacggctgcttcgaaggtgtgctgaagaatgaatgcgatcttatcactaagcctactttttatcccgacttgcgaagtgcagctatgtccggttttggtatgatgaagcaattatacccactgtacgatgataatctctttaatgaattcctctcagaaattccggaatag

SEQ ID NO: 23338 - DNA, 510 bp, Escherichia coli
atggccaatatccttatgcacgattgtcttgtgaagttaaacaatctcttacaggctattgagaatgcacccgttgagtgcgatggtcatacattaatgataagcagtgctctaaatcatgcaggcatttctcatcaacgaatgtgcggggtagttaaaaaccccaaaacgtattttgagttatatccacatttctggattgagataggtgaattcactctggattaccgactcaggatgtgggttgagttatattcaggtggaaaactatcagagggtgcccctcacggcatatttgatgcgcgtgggcttgagtatctttacacttctggaagcatttgcccaccacctgccctggactttaatttattaaacttaatcagtgatggttattacgaaaaaattaactttaccgagctaacaacactggcacattctgtagatattagtttaatcagtgatgttaagaatgttacaaacaccggggttgcagagtacaatgataattaa

SEQ ID NO: 23339 - DNA, 480 bp, Escherichia coli
atgttaagaatgttacaaacaccggggttgcagagtacaatgataattaatcaaaaagtattagaagctgatattacaaatataatcaatacatttgaaaggctaatggatgaaagtaataaaagtattataccagtaaaatccagacatgttgatgacttggccttgttcgaaaacatgtatatacgtgcacgtagcaaacatgcatctttgctgggtaaacctgttctggttgtttcatcagtttctgtatttatcactaatcaaggctgcttcagtacacttctttctcacttaaaagcccattgtaagaacaagagttacctgttaaaaattgagagcgtaatctctcaggaactcaggagatatcttgtcaggcaaatgttcgtattcattggagaagaatgggagtgcgggtctggttattgggtgcctgaagatgatccagtatacccatctttaaatacactaccttattga

SEQ ID NO: 23340 - DNA, 657 bp, Escherichia coli
atgtcgacaattcatctcattacaacatgcgcgaaaaagaaagcaggacctgtacatgacactgtgtttccctaccatacgacagatactgagattgcctatcagcaatggaaaagtcttgtgcagtcccgattcactacatgtaatgatgatattaaggaaacggaaaacatatactgtagtgctcactggagtacagctaagtctattgcaaactctaattctcatatctgtttatgggttatttctgcaggtctgggcctacgacacagttctgaccccgcgatcccttatgatgctacgtttacaaagataggaagaaagagcgccagcatatggggtatgctgacttctgaccccatactgcctggaaaagtcccttcccttgcggaactgtttagtatgtaccggcatgatatctttatcattgcggcctctcccgtttacctgaacgctgttgaggacgatctcgttaaaggagtggcttatcttccctgtccgataaagcagcttaaaatcgcttccagcgctgcctacaatggaagattaagagaatatgtgcgatgcggcggaaccagaatgatgaaagaccttaatgcaaacatgacgactctaaacattaaacatgctggcatgctgattcatgagctggggtaa

SEQ ID NO: 23341 - DNA, 957 bp, Escherichia coli
atggaaaataaacaaagcactaaaaaacaaactctgattcacatcgccttggtagtaggtggttttgttgctggttcggtaatttgggggaatggcagtaatattatgaactcaaatgactcggctaatgagtctgtcaaaaaacagcaaatcgaactggcaaatagtatcaatgcattagctcaaacagcgaaccaggtaaataagccagccggtttagtcctgactgagcaggacaaggaacttattggaaaaactgcggcacaatatttgatcgaacatccagagaacctggtggaagctggtaagcgccttgaagccaaccgagatggtgaaaaaacctcagacgttgtgaatacaaaagacgtattgcttgaaacaaaattcacgccaaactacggcccagataacgcagatgtagctgttattgaatttttcgattacatgtgtcatttctgtcagcagtccagtcccgtgcttgaaaaggcgattgcagaaaataaaaatgttcggactttttttaaagacttcaccatttttgctgaccgcacacctatctccgggatgggggcaaaaattggtctctacatctttaataagtacgggcaggaaaaatactacgagttccataataaactcatgagtgaagcgggtagggcaatgaaggacaggaaggactatacaccttctaatctggcggccctggtcaatggtttgggatataaagaaatactggatcagcaaggtaacttcttgcttactgtcgaaatgcgcgatcagcttcagaatgttcttgatgcaaatatgatgctggcggataaactcaattatagcggcacgccagtgtttattgttatgaacatgaagaacccgcaaaacaaaaccacaaccattatgcccggtgcgcctgatttttatcgcttgcaacaggcaattgataaggcaaaagggaactaa

SEQ ID NO: 23342 - DNA, 342 bp, Escherichia coli
atgggattaatcagaacagtggtatacctgggtatcattggaggcatctttgcctatacacaaacaaaagatagccttgaaaatatttcggttccggatgcggagtttccatcgtcaatctccaggaataactttatacaatcgacatgggtgaacgagcattacacttcactgaagaatggcccgattgctgacggtatatccagtattctggatgatgctcaggatatcagggggtctgtcaataatgttgtcatgacggccggtaatgtcgatatccagaaggctattcaggatgcagtggatgaactagacagcaatagccgtaaatccagtaagtaa

SEQ ID NO: 23343 - DNA, 312 bp, Escherichia coli
atgaagaaattaatagcagtggcagcggtagtggttgtttcatttgccgcccaatccagcgtttgcgggccagttgcgtgcaaagttactttcgtcgatgtcgacggctcgcaaaagccgatcatgcttctcgatgacaaagtttcaacgcggaagagctcaatgaaccgtgtatttgatgatgtgtactcgcacggccgtaaggtccagactgacctgaaatcaaccactccagttgccgggcatcctgataaatcatcacccgtgcaaatgagcagggaattaagtcctgtggtcatctacagcgcataa

SEQ ID NO: 23344 - DNA, 729 bp, Escherichia coli
atgattaaacccattgcagttgctctgatattgttaactctatcggcctatgctgatgttgatttacctgcagaattaaaggaaaaaattgaagccgttggtatcaaccccgtctctgcagagaaatctccggtaagtggtatttactcagtcttttcaaaagaagggacgagttacgtcacgtctgacggtgaatacatcttcaccggaaatttattcaaagtgaaagggacagaagtggaaaacaccacggacgagtttatcagtaaagggatgcgatcctatattgagaagctcgatactatcacctacaaagcaccagatgagaaatatgtcatcggtgtttttactgatatcacctgtggcttttgccagaaactacatagcgacctgcaatcctatctggataaaggcatcacaattaaattcatcgcatacccacgtgccgggatgaactccatgatagcccgaaacatggcatctgtctggtgtgcagatgacaaacctgcagctttaaccagagcaatgaaaggggatggtttacctgaaaagcaaccgacaaaggcctgcatggactccattcagagccaatttaatgcagggaacatgttcaaactctcaggcacgcctagcggtttaagcctgaaaggtgagccgatggtatttgcggggttacgtgaccctgaccagatgctgaacagccttaaaacggccaatcagaaaaaataa

SEQ ID NO: 23345 - DNA, 615 bp, Escherichia coli
atgactagattattttttggagcggtgctgttcgccactttaaccgtcaatgcaaatgcagcattcaatcccccaccggatcgaccgaagccccaaaatgtacccgaaacggttaaaaacgaatgtttaactgacgccgcgcgtttcttcgggattgaccgtgaccttgtctttactctttttgataacgaaggtggaaagattggctctttcgtccttaacaccaatggcacatgggatattggcccaatgcagattaactcatcaaatctggctgaggtgaaatcccacttccccgcgattacctggcgtgagctcgcttatgacgcctgtgcttctttttgggttgggacatggtggctgcaccggaaaattattgaccgtaaagggaacgtgtttgaaggtattgctgactacaacagtaaaacgcctcgcgtaagagccaactatattttcaaatttatggaacgttataaccggcgtctgcagcgtaacggcaaaatgatgcagctcaatgcatggaccggtcttgatcgtgtaaagcagaatcctccagaggtaacgggtaagctcgctaacaactctcatcagcaatcctggcaatcctataattga

SEQ ID NO: 23346 - DNA, 225 bp, Escherichia coli
atgctgctggtggtgctttatcattcaccgggtagtgcccgtgaagatgcaggggaaggggacgagccttgttccatatacgccccgccggaccatcagcttatgctggtgaggcagggaggctttcccctcaggttttgcaagttcctcataaacgctcactctcttgtgaacggcacaccaaaagttggacactcacaagggcaaccagcgaaggtgcagtaa

SEQ ID NO: 23347 - DNA, 3342 bp, Escherichia coli
gtgaatgaatcatcaataaaaaccgaaaatgtgttcctcttctggagagccattgaagccttaacccctcaggatattgataaggaaaatgcccgcgacaaactcaacccggtttacaaagtaggcgcaggatccatgcttccctgggatgacccggaacatacccgtaaggatgttgcgcctggcaaagtgtggcgctactccgctcaggcgggtgtttatcatctgagcgtgatttccaaaatgctggaggataaaatcggtgcccatgaagcggtacctgaagaacgtaaatcagggaaatgcaggctttttgatattggtttcaatgaagaaggcatcccccagccagccacgttcatgttatccctgtcagcatggtcggcggctcagatactcaggcatgatcgcggcgtttatgctcttcatgctcccctttgctccgatgtgtccgacctgcccgcaccaaacgacagcctcccgctggtggatagcggtttttacgattttgataatctgacccttcatctcatgcagtgggtggacaatgaggcttatcgattacaggaggagggacagaaggccgatacaggatggttgaagacgcttgagaaactggtcatcgcaaaactgtatttcccggaagaagccatggatacgacgatcgtcagtgtggttaagtgttccctgaccaggaaggcgaaagtcatccaggaagacagtgcaaagaaagacaataaaaagaaagaagcggtgcccgatgacctcattaacagttttttcattcaggaactgcgaaagctcgacgcggagtggaggcaaggagggggtggggccggttttaaagactttatcatggcgataacccgggataaccaacagcgcctcgatatacgcactgaagaaggcctggattttgcttttgagaaactgttgcccacacagccaccagctggctcctggccttcaaagtacccgctggcattcagccagcagctggccgtcaatgaaatctggaccagaaatcacactgaaccgggtatttttgctgtaaatggtcctccgggaacggggaagacaacactcctgcgtgatgtggtggccgcagtcgtcaccgatcgggcgagtaaactggttaaactcggagactctgcatttaaagccaaagacagcctcaaatacgatgacaggctgataccctattattcgcttcacccgtccctggcggggagtgccatcgtgattgcatcgtccaataacggagccgtggagaatatctcacttgagctccccgggatggaagcggtaccggaggatgtgtcagatcgcagcgattactttggcgggctggctaccgtaatacttagcaggccagcctggggacttctggcggcaaggctgggcaataaaagtaacagagagcagttcgttaacacactgtggtggggaaatctgcagaaaagtgaaaaaggcgatgaagcacctccggagaagttttcacccggacgtggagaggggctgaaataccatctgaatttactgcgaccgccccggaaagtcagagagcctgcactgacctggactgaggctgtcacacgttttgaacaggcacaggcggtggaggaagccgagcgtcagcaactggtcgccagttcagggctaacgcataaaattgagtggctcgaagaacaacgaagagtgtgggaagaaaggaagcagaccgcaacgcttcagattgaggaatgccggaacgcgctacaggcgctctctgacagactcgccgcgatggaaatgaccctgaccctgtccagtggagaacgggacgaactcgatcagcgcatccaccagcatgaaaaaaataaacccggccttctggctaatctcttttcgctggggaggatatcgaaggcatggtgggatcgttatcaacggctgacagacgaatcagatgctttgcggacgacgttgactcagcaacggcaggaactgcagctggcgcaatcagaaaaacataatgcagacaatgaactcaggagcctggagcgtgagctcactcaggtgatcagcaacggtcaggcggtctgtaaagagaaggaacagaataataccttgctgaagcaggctataaccgatctgggagcctcctggccggagcggactgcaacagatgaacaaagggagttgtcagcaccatggcttcatgagcgctggagaaaggcgagggaggacgtgtttatcgcagcattagacgttcaccgggcgtttattgaaaataatcctgtaaaaatggccgctaatatagggcttgcaatggactggttaaaagggcgaaaactgaccgaaaaacaggcgggtctggctctcgactccttatctctggtcgtcccggttatatcaagcacctttgcgtccatgccccggatgttcagggatacaggtcaggaagcgataggctggttgctgattgatgaagccggacaggcacaacctcagcatgcgattggggctatctggagagcaaaacgcacggttctggtaggtgacccaaaacaactggagccggtcagcggtattccgtccattgtagagggggcgctggcaaaacattataagatcccgtcctgctggtggcccggaaaagtctcagcacagatactggcagaccagacgatggacgttggcacctatctgcccgacccggagtcagaacagatttgggtgggctgtccgttacgggttcaccggcgctgtgatgacccaatgttcagtatcagtaaccatattgcctatgacgggctcatggtccacgggaaaaagccgggcctggtggatttccctgaaagcggatggctggatgtgaaagggaggacatgcgagggaaactgggtagtggaggaaggggcggcggtggaaaagttacttttggcgttgcgtcaccagtattcactcactcctgacgacgtgtttctgatctcgccattcagggactgcgctaagcagcttaaccggatcgcaaagagactgggattcaggatggacagaacggggaccgtacataaaacacagggcaaggaagctactgtggttatcctcgtgctgggaggcaacataaaaagtcagggggcgaaagcctgggcggcggaaaaacccaatcttctgaacgtcgcggtaagcagggcgaaacaacgcatttacgtcatcggcgaacgtgcattatgggagaagcaaccttacttttccacgctgtcccgggctctgggaaggctggatgtgccggtgagcaacagcaacccgcgtgcgatgtcatatatggaagagtacttaaccactgaatggcgctga

SEQ ID NO: 23348 - DNA, 291 bp, Escherichia coli
atgatgtacgaactgtttggttttgaacttgccgacttcagagagctcttctatgtcttttgcctgggcgtgcttgtctaccgctactgcactgtcggacacaaatacccgctcttcggtagacgtaagaaagaagtcagtacggcagaaacagttgaatccgataaagcacctgaaaaagacaatgcaacacctgtctttcttgatgtgaatctaactgattattacgactaccgtacaaaagagcactggagtcctatcaacagagagctggataaattccaacaataa

SEQ ID NO: 23349 - DNA, 3909 bp, Escherichia coli
atgagtaattacactatttataccattggtgatattgattttgtttatacggcttttaacgggatcgcgctgattttttccactcacggatccaatgaatggctcagatttgctgcatatgcagcagcaattggacttttttataaatccctgcggtgggttcttgcccccacaaaaaacgatgtcccgatcttctcctggataatggggttgctgttctattccattgccgtaattaaagccgatgtaacactggaatcggttaaaacgggggaggtcaggaacatagacgatgttccgttatttatcgcgtcaaccggtgaactgacaaccggattactgcacgggctcattacggactggcgagcagcgtttgacccgcttacgccggtgggccaggtcactgacacgctcgatgacagcctgacgctgggcccaatgaccaaaatggtcaaatacatggagtggggtggggaatccagtggattctgtcaggctttcccaaatacgatgagcgggagtgaaaaacctgttacttttgatgtctgcagaatcatccagtctattgcacgcgattgtattaaaacgacccaagactcagaggtcaatacaccactcagaggggtggcgttgaatgaaatctatgccacagatcttgcgtcagtaatgaacgtgatggattcaatgacggccaacagcctgaagacagccagcgtcccaatggtgacatcgacaggtttgcagtatgcgtcgtgtacggatgcctgggcggcggtaaaagcttcgttcgcctcgccacagggcgtatctatcatgaaacatatagggcagatgaatcagtttattgaaccggctaaagaagaaaccggacaaaaaagtgactttctgcaaggtgtggcatcttcgctttttggaagcgctggtcaggctcacgatatcaccacaggggcttttgtcctcaaccaaatagataaaggtgtgctgcagtatcgcaagtcgttgggtatcgccgcagattaccaactcttcgaagcgagcatgaaacgaaccaacgccatggtcagtcaggggcaactctggctgaacatctcaggcgctgcaatcagttttctcgagatgttcagttatatggttgcgccctttgctctgattgcgatcctcttcctgggaggtgaaggcataacttcagctgcaaaataccttcaactgatagtcttcgttaacatgtggccgataacagcggtcatggtcaatgcatacgtaaaaatggtattaaatcagcagtttgacacatggtcatcgctgggtgtacagaccactatgaactgggcgaatatggggagtattcaggagacgtacggcagctacctgtcagtagcttcagcgctgtattgcatggtgccgatgctgacgctgttcctgttgaccaccagcatccacccgatgatgggggcgttgaaaaatgtgactccggatgctcctgccaatactggacatgtcacaccagaagtgtggtcggcgggtaatgcgggtaaacagtcctttggtgaccagacacacacagcagccactgcaaccggtggaggtatgtcatctggcgggcttctggattctccgaccaggatgatgccaacgcttgggttggggtcatcgttaagtgataccgttaacgcagcagggcagcactcgatagggaccgacagattgtccacgctcagctcaaggcaggcttttaatgaagcttggaccagtggaatgcaaggcagtcgaacgcaaacagcaggctcaacaaaccagggtggaatgaaggctgttactgacgttgcggccgcaatgaccggtagtctcgggaaagacgttggagtatccgcggaagctctccaatctatggcagctgcagctgtacttggtggtatggctagcttaggttttagcctaggaggtaaagctaaaggaggaggtgggagtggctctgtaggtaatttggttggaaacatagcggctagcatacaaaataacagtcaactatctgatagggtaaaaaaaggcttaactgacaatctgttaagtgcgatgaaaaatggtgatggatttgccaaagacatagcaaagcttgagtctaatgtgatacagaatgggttctctaattctgacagttaccaaaaaacggcccaaaggatgcaggaacatgcccaggctgtcactaataaagagagtaatgcattcagtaagacaggtgggcaggcttctcaactctcactcagtaacagtcttaatattgacggggctaaactatcagacaccctgagcaaaccagcgaccgcgcaatcggtaggtgatttctttgcctctattggtggaaaccgtgaagctgcggttgctcaatggcaatccatgaaaaatacattaaacagcagtaacacattgggagaccagagaaacggtaatgatgcctttgttaaaatgatgtttaatgaagcagagaaacttactcatatggatgcgggggagacggttgcacataatttgggcgatatccagaaaacatctcagatgctgaaaaatgctgtcagcatcatgggggccaatgccggtatgattgcgcccgcgacggaaaaactggatcagtttgtcgcactgggttctggtggcaactatgccagcggacatgagcagcagcaaatcgcacctgacacgtcagcagtccctactgccggacaggtttctggtaatgttgcgaatcaacaaggggcggtgaccggtggactcgctgaacgggagcaggcttcgaaagtacagccttcaacgcaagttggtggcatgacagctgacaagcttaatgaaggggatgccagagcttatgttggcaataccaacggggaaaataacggcagggtccatactcaggcagatactcaacgacttcaaaatgttgaagataagttgccaatggggaacgtcaatcagacccttgataaggctaaacaggcagcagataccgatgctcctttacagtcaatagttgcgggtactcaaagcacagtgttgggtgatccagaatccagcgatatcaatgccccaactcagcaagctatgagagacatgcaatcgcatgatatgccgagaagtgctgagggtttcagcccttccgggaataaagaaaaagatgcgaaaaatgccttaagccaggcggcgttacacgctgaagtagcccgcaatcagaccggtgaggccagagaaaacagtctcaaagaagcagatgcatggcgttctgcattcaaccagatttcaggtaagaattattcaccatccgacgttgaccgtgttgcccggttagccttggatggtaaaaataatggttatgaaaacggacttccggacgtcgtgaataacgcggtcagcaatacgggcaccacggccagccgagtaccgactggctctgctgattatgagttgggtggaggtatgcgcgacagcaacagcagaagtccgaatctgttagataaagggcaggcagccagagaacaggtgtttgatggtaaccgtacagtagcaaaaacgttaaccggagccggttcagaccgttatgtcggtgattccatgaagttagaaaacggttcatccggtcaaacgctcatcggcaacatgagcaataatatgcagttacgacaggcgctcaatttagctgacaacaacccgggtatgacggacgataaattaacccgtcttcaggacgcgcaggacaccgcaatgaggactgtccagaataaactggctgacgacccacgatatgggccggaagcggccgccgcttaccctgcgtttatcgccagccttccggaaaggctcggaaccacagaaggcaaggattatgcgaaagccttcctggacaagcaccgaaaacactaa

SEQ ID NO: 23350 - DNA, 1410 bp, Escherichia coli
gtggctactgatgttccaaaagtaactttcatgaaaaagttacttttatcggccatgttctttggtgtgttctccatgcagcaggtccatgctgccaacgtcatggagggcatatttaaaggtatggtggcttcaacagatcccgcttccgtaagaacggcatcacgtgtcggagctgttggggggagtttctcataccgccagcctcaggtgaataccaacctcgtcaatgtcagtttcccgaaagccagcgtcgggtgtaacggcatcgatattttcctcggcagtttcagcatgatcaatggtgatcagcttgtgcagattggacgcggtattgcgcaggggtcagcggtatatgcttttaacacggcagtatcggcaatctgtgccgattgcgcagcgatcattgccaacattcaggacaagctcgcagcactgaacaaatttgccaaagacagctgtaacgcaacctatgagtttttgcaaaacgggctgggtacacctcaggaatttactgagaaaatagggctcggcggcggcgctgttgactccatggtatcaggtatattcccggattttggtagcaccatgagtcagcctgccagtgaagtcaacaaaaagaactatgcaaaagatcctgatgcctttaaagagaaatatgcagggaatattgtttaccaaggattcatgagcattgataacggcaatatgaatgtggggggcgtgactgaattaacaggttacaaactggccgaacaaattatgtcgcttacaggaacacttatcgtcagctgggatagtaatggagaaaattcagcgataacaccgatcccacctacgatgaaagccgctgatttcataaaggggacagggtccggcaacgttaaattaaatgtttgtaacccaacacctgatttacgcagtaacaggaaagcacagtgtcttgaaatgcgtcaggactctatacaatttaaaggtctttctgaaaccattattgaaacattactcgaaattcagcgggctgtcaggaatgacactgagttgacgcaagaccaacgtaaacttatcagtatgttaggtgttaataacatcattccgactcttcagaccttgtcagctgctgagggggttcaatacatcaatgatatcagtacgatcgcggccaaaaacttcacaatagagttgctgagtagtgtgcagaataaaatgacgaatatgactttgccttcagaggcaatggcatcgtttaaggaccaactagaaaaaataaaccaaaccttcagaaaccagatccgcagtgcttcagaggttcagtccatacagaacactgaggaaaaaacggtcctggcttactgggatatggcatacgttaaaaaacggacctatggcgatagcgggaatggtggctga

SEQ ID NO: 23351 - DNA, 1038 bp, Escherichia coli
atgcagaacaccaaaacttttatcctgaaagccgccattagttcgttgctggtgctttccactatgagcctggcggatacgcagaaagttgagaacacaccttttgtttcgggacaatccctgaaaaaaggtttcttctggtataacgataaagaaccggtaaaagatgaagaagaacaaacacaacagccattaacggggtcgccgtctcaggacaaaaaagaagagcttaagctcgattcacgctggctaaaagaaaatctgctgaatcttcgttatgcggcaatggataacccgaccaacgaaaacctgtcccgctattatactgcgcaacgtttaatgctggatattgccacccgtttctctgaccggacccgcgactatttccttaataacccgatgatgtcagaaaaacgacgacagccaaccgaaactgtcgcgttaaatgcacaccgtgcaggacttgaggaaaatcagcaaaaagcacttacctccatctttcagaaaggtggattgtttttctttttccagagtacctgtgcgtactgtcacgagcaaagccagatactgaatttcatgcagaactattatcacattgacattatgccggtgagtatagacgggcgacctcttcacaatggtttatttccccgttatggacgggcaacgatggagatgatcaagcaatacgccatcacagaagttcccactatttatctcatgtccaatgatggttctcaggctacacgagtcagtaccggtctggtgtccgctgacgaactgaaaaatacgattattcttgcggccagaggtatgaaccttctcgacgaagcgacattccagaacacgctcgatattaagaaacaatatgccattggcgacagagatgttctgaccgtgaacaaagagcgctatgaacaggatccttatctgcttcagcacataatggatgaaaaacttagcgggtacgacatgccaacaaccgatcgggttaataccggtatttcagaaaatgaagggggcttaagtggctactga

SEQ ID NO: 23352 - DNA, 543 bp, Escherichia coli
atggaaaatcagcttttacacacggcaagcaccatctgccatatcgcgtttgcatcgacgggaataacgacaccgtcagatgagcagggtttttttcatctttccgacagcatccataatcgcctgcgtgcgatttctcctgaccttcatgtccgttgtgcctcttatttattcctgcctgtcattcatacagagttaaaaactggcgaccttaaaaaccattttcctgcttatatcctgcaacttgttcaggaacttgcaccgttaaaaaggactacctgtccatccggaaaaatcaggtttgataaagagctggacgccatgttttcagccagtccagatgctgtcagcattcgtctggccgaatatctttcgggcccatcccgttttctccggatgataaaaaaccctgaccgtaaggcgagagttgagaaaatactcactgccagaaaatgtaatctttcgcatcagctggcactcctgatgcaggcagaagaaaccgtgtccagatttaaatcgccgggtagtacctggcgtccctga

SEQ ID NO: 23353 - DNA, 525 bp, Escherichia coli
atgggctttaaaaagagcgaggtaagccagataaatagtctggcaagtgccataaagttaatagaatttgatgccaataaatataccataacacatttgtatggtcgtaaagttgccgacagcctggagtaccccaaagggataaatacaagaaaaggggtaggtaaatggctcggtgaaaaatccgccatgttgctgtcaaatgtcgttgtaaacaatgctattcatatttttggatatgaccctcaaaatcctacagaatcaaccagagaaatggattttaatgcacttgttgatttgttaattaacacgggctatacgccggaatactacccgctcaaggtcaacaggattgtcgaagttctcaacgggatgtcggaagctgactataaagactattgcctggtatgtaaaaagcccttcatacatgcgccggacaggtatgattcctgcccgacatgtagcgcaaaaaaatgtaaagttgctattatgcgttattctcagtccgtaattccctttgaataa

SEQ ID NO: 23354 - DNA, 756 bp, Escherichia coli
atggacgtacaacccaacgtacagactgacacggtcattaaggcgtttctccgctcggagttgcagttgatacgtagtcagaaaaaactactcagtgtgttgcctcgtgatctcgcgtcggactaccgctatataccggacaacctgctggagcgttttttccatcccgccacggatgcgcgtctaaatagaattgccctgtcagaagccaggccaggtagcctgctagttccccgtgtcaacgggaagcctgttttatggggtgagttaataaaattaattctggatgactctcagttactgaagtttgaaacgtacggcagaccttttgacagtaccgagatgaaaccaaatgagccatgcgaattattgagcgggaagcagtatgtttataaacccgtcgaccttgagttattcaggaaaaacatcgtctctatacagatgaatttccttgtcaatctatggaatctggccagatttaaaccggcttatgtcagggcttatttggccctgtctaatgacgcttttcagatgctccttgatacagagatgtccgcctttgtggaggtgacaaaagtggttcttttcccccggtttataacctatgataccggacgacgtgatcacaaagtatatgcatggggttacgagattatggctgatgttctggaaggtttcattccaagggaaaatatggaaaacttacgggtcgaattttctcttaaagattcatatgagaagctaaagttattttag

SEQ ID NO: 23355 - DNA, 435 bp, Escherichia coli
atgatttgggtagaacctgggagtaacgtcatactaaaaattaaagaagctgaaaaactctacgatttcattccaatagtctacattacagggaagaagaaaccaaatgtacttactgttttacccggtaaagcaattagtgctgcaaaagagacaaagctaattgaatataaagtttctccaaatcaaaaaagaatgtctcataatgataaggttgttaagttatcaggctttggtaatataaataaactgaagaaaggtttttatgaagtacaggtcgacaaatttacttctgtgagctttgataaggaggcttttataattacccgaaataatatgcttgcgggatcacaatattacactaaaaatcttgttgcctatccacatgaaaaaataataatgaatattagcggagaaactcatgttgaaaaatag

SEQ ID NO: 23356 - DNA, 387 bp, Escherichia coli
  misc_feature (68)..(77): n is a, c, g, or t
atgttgaaaaatagtctgatgttccttgtaataattttactaacagcttgtcaccacacacccggatnnnnnnnnnncaatggttataatgagtttatgactgtagataaactttccttatacggaaatcgttgcggatatgagtctcagggggagttgctcattcctcccgctgcagtcagtacatatatggttcctaatgtagcattattaggtctgtgctatacagatgatataaagttgattttcattaacaatacattcaatggtttgtccaaggataagaaggatacaactgtccctattgaagtgatgatgcagtttaagcttacttctgctaaagaaaaagaggaatttaatgatgttatttatagctcgtggaattaa

SEQ ID NO: 23357 - DNA, 417 bp, Escherichia coli
atgatgttatttatagctcgtggaattaaaaaagtttgcttagctggattcgctattgttctgacaacaagtgcatcatgggcctttacctatacgattgactcaaatccccaaggagctgtagtcattaatgtgatcacaaaggaaagaatgggtttgacaccaattaaagtggatataccagatacacaggaaggaaaaacatttggtatcctttacaaagactaccgaaatgttgccctcatgatatacaaaccagcaccaaccgcagagagagcttttactaatagtccacccgttgtggtcactagcgctcttcctggtgaatatcccttaagtgtaaatattgatgaagtacgggataaagttgttgtggatttgcgtccagtcatgtcacaacctgttactttacaataa

SEQ ID NO: 23358 - DNA, 2718 bp, Escherichia coli
atgaacaattcacgtctcgcaaaagaacttgaaagatataacttagggcacttcattcccgtggtcgacagaatggtggatgccccttattttttgctggaagataacgcggtaggtttcttttttgtctgcaacccttctcctggattgtatgataaccaacaaaacctattgacggatctgtttaaaatggattttcctgcggagtccattatgcaaatgacactggctgctttaccggatgtcaacatatcattgtcccgttggttacgtcgcagaggtaacaggatgggaggtagggataatgaaaaagcggatcttcttaccgtatactcactggattacctgacaaaaagtcaatatgagcctttgaaagaagctgatggcattaagatcacgcaagctgatgatttgaagcttaggaatttcgagttgtgggtaacggttaggatacctattaaaggtttttctcctaatgaatccgaatccatgcgactggatggcctttttaaagaccttctatctaaactagaaggtttaaccttgtcaccaattgttggtaatgctgacacatggttgtacagtgttgataaaatattaaaccccggaaaagactccagatggaaatatggtggacttgaagctagtacattaatgccattaaataatcaggtcaacattccaggaaggaaatatgaggtgggggaggattatttcgcgtcattgtctgctgctgatgatgagacagctcaacgatattttaagcatttgtcgatgacaaaattccctgaatatgtcaactttggtgctgtttacgagttggttgttgactggatgactggaagcaaaaccattttctctccttttattatcaacttctgtatacaattcccacatcaaaagaaaatacagaaagagtatcttcgttataaagcgataacagataatcagtcaaaaatacctattgttttaaaatatcttcctcgccttgccgatatggacaaggattactcggcattgactagagagttggaggataaagctaaactactacaaacttacatgacatttatcgtcatggataatacactggaaaaagtgaaaatagctgcaaaaagtctaattaactattacagcgagaaaaaaatcgttgtggctaatgatagttatatttgtttttcaggtgtcatgtcggctttacctttatgtaatgatccggcgacttttagagatatggatcgtggtgatgtaatgactaatacgggtgcggctcacctagctcctatctttggcccgtggaaaggaaactccacaaatccagtcattccatttgtaacccgcgagggacagttggttatgattgatattttcgaaacttcagccagttacaacgtatgcgttggggctacctcaggggcaggtaaatcatttgcagcaaacaacattattctcaactatctttgttctggcgagcatataaatccgctttatcattttgatgatattagagatctgcttacggcagataaatacgatccgcctctggacctgaatggcaaatttaatgcgtcaccagatggtgctcaggtgtttgttgttgatatcggacgttcatatcaagggcttgctgagcaatttgaggactctcaatttattgattttggagttgacgctaccttttctcttaaccctttcgctttcctggtgagaaaatatacaggagatgaatcattggagggattaacgggaaattcaggtgaagaaagtaaagaatcagacattattgctcaaacaatcatggttctgaatcaactaaaactaatggcttcaagtaatggtaacattagttctttacaggaagcagtaatgcttcgtcttattgctgaggaatcaaatagccctgaagatggatatcttccttcagttactggcttcgctaaaaaatgcatgaagcatgagaaacaagaaattaaagatataggcattcaacttggaccttggtgtgaaggcggcatttacggtaggaggtttacaacatcattgccacccattaattttaatagccgcttcattgtacttgaacttgaagaactcaaacctacaccacatcttcagtgggttgtgttaatgtcgataatccaggcagcacagcatgctatgtttattaaaaaggatggtcgtcgtcgtttgtttatacttgatgaggcctgggagtatatcggcgaaagtaatggtgatgatgctgctgttaacttttttactaaattccttgaagcagcatggcgtcgtttccgtaaaacaaactgtgcagggatctgtattacacagagcttcgaagacttctacaagtcgccaatcggtgtagcgatagccaacaactcaccatggaaatttattatgaagcagagcccagaggcgattgattcaatggagaaaaataaatatatttcagcatcagcatcagaatatgaacggatgaagatgatcaggactgtaaagtatgttttttcagagattatgattcgttttgagaacgtgcaacaaatcgtccgtctttatgttgatcgtaaaatggaactttgttttactacagacccgtctgaccgacgtaaaatatggaaccttgttaatgacggatatacgtatgccgaagcaattgacaggatttatgaagaagagctagtacagttaggcatgaaaacaaggcaggttgcttaa

SEQ ID NO: 23359 - DNA, 738 bp, Escherichia coli
atgaacaacatcacgaaatttctcatgtctgttgctgcggtgtcttctttatcagggtgcataggtcaatctgagagcagctgcccaggtattgaaaaaggtgtgctgtgtatggggccacgggcaattatggaagcaactaacaatcatgacgatctcaaatatttaaaaaaggaaggtgatgagggaaagcaggatattgcagatagcaaatatccaacgtcgttgactccgccaccgggcgtgcagtacccaaagaaaccggtagtaagtgctggccctaaacccttgttcaccggaacttctaagccggtgaagccgctgacaacagcgagttatgtgtcgcagcagcgcgtaccagcaggaaagggactgtattcagaatttgatggcaagccggtaaacccaacgctgagttcatatcaagagcgtcagtatcaggtacagggtacgagacaagctgttatcgctcctgagccgctggctgtgttaagacaaggcaaagttatgcgtgtgcttatcgcgccttacacagacgataacgacgctttgaacctccctggctatgtatatgtcaatgttaagcctcaaacgtgggtggcaggtgattcagcattaaaaaatccggcgcgaattgtcccactggaaattcaggaacgcgctcgtgacaacatgcagcagcagcaacgtagtactaaaggcgtaacggcgaatggggttagcggtagttctttctag

SEQ ID NO: 23360 - DNA, 858 bp, Escherichia coli
gtgattatgagaaagttacttatcaagttgctcgtgtgtatagcactactcaattcaactcattctgctgcagctgataagtatgatgcagaagctgcggcgttaacacgcgctgctgctgaaaatggtctcgctttaaatcagtcgtcaaggggattagttagcaagcttagtccttaccagccaaaggatgctgtctacttaccgacgggtgggatttttttatttgaggatcagcgaagtggcctcaccctagttaccacaacgggtcgctactctttttcagaaggtaaagtttatgatgttctcaggaaaaaacaagttcaatcgatatcagatatccgagaaagttactttttaccattgaacgaagcaccgttcaaacctgaggatgcctttactatccagttcgggaatccgtccctcaaacgacaggcagttatattcatttctcttgattgtcaagattgtattgactttctgaaaaagatgaatgaagaaagggaacttgttcgctttgatattgttattttacccagccctggcgaatcagctaaacgggtaaaacaaatgtggtgctctgttaaagctggtaaaattaccaattacgatattcttcagtcgttattaggaaaatcaaaagatataaacaaccggcttattcctcatgaaaatctgaaagattgttcagtagaacctattgttacaggtctatacctggcatccatttataacgttcaaggcatcccatctgtagttcgtgaagatggagtgttgggcaatggattaccgactgattataaaaactggttaaaactgaatttacaacctttgcttaaaaatccctttaacaaataa

SEQ ID NO: 23361 - DNA, 465 bp, Escherichia coli
atgactcaaccagtaaaagatgaagaccaacatgacgctgattttgaaaaagtgtcaagcgaacagaaaagcctgacattctcactgtcttattctttagtcgaaaaggctgttaaaatcatcattgtcgtcgctatcctggtatgtatttcagtgtatattgggaagagaatgaatgaaggagaaggactgtttcataagagcgtaaaaattgccattcttaacccttctgcattaaatgaacagtatttaaaagcacacaatggaaaaagtgaaggttatctcccttatattcgcaagttgatggcactttaccgagcacgtgatttcctggtgctcgatatgaattatgtcattacacgaccatcaacagtaaatgaaatagcttacatagatgaatcagaagtagaaagcgaactgactgaatatggtatagaccctaaatattttgagggtaaacagtga

SEQ ID NO: 23362 - DNA, 1371 bp, Escherichia coli
atgaaaactttgaagctgaaggaattgtgggaagaaaataaagcaattcgaattgcttttttgcttgtactagcattagcggctcttgtgatggtaaccatcacgcttatgggcggagatgattcgagcaagaaagctaaaaaaattaagcctgtgactaacttgcttgacacttcttccatcgtcaatatggatgaagaaggtcagaaaaggtttttgcaaacagttcagcaggaaaaccgtaaagatcaacaaaacatgttggatcaggtaaagcaaattgaaaaatataaggccgaaaattccagtgagctgactgaacttaaaatccaaattaagcaactgaaccaacagatctctgatatgcagaatggaaagggacctgcgagcaatcgtagtctagacaaccgcgtaggccagccggtctatgaaaatcagcagcaaaatccagcctatcagctaaaccgtaatgcagaagggaatcgcaatcaggaaataccagttgcaggagggattgcgcctcaacgtactcagttggtacgcactataaccagcaacagcattaccacggccaataacggtgtgcttgaagtgacaccaattgttgaaaagaacattactaacgcgaatcaaaagcgggtcgttaaagctggacctggagctgctatcgcaggagatggtactaagccggttgatagcaatgctcgccactcaaagcgtgctgaagaccagtatttgcctgctacgtctcaactgtatgcagttctggtgactggtgttgaagcgccgacatcattgtcgtctcaagaagaacctttgggagtaacgttcagggttaaacgcgatgtgtttttacccaataactacagaatggatctacgtgactgcaacctcttaggtactgctcgtggagatatggcttctgaacgagtctatatccgcacaactagtctgagctgtgttaattctaaaggcaaaagctttgatatcaaattggaggcatacgctgttagtgaaatcgatggtaaagccggtatcaaaggtacgcttatctccagaaacggtaacgccattatgggtagtgcttttgcaggtggacttagtgcgctggcgcagggactgagcccaagcaaagttagccagttgaatatcgaccctaactcacaagcacaataccagggacctaatattggtgctcttggcgctgtgggtgcaagcggtatggtctcaggaggattaaacaagctgacagactggtatacccacatgattgatcagcagtggccagttgtagagctttctccgggtattaatgcgacttttgtcgttcttagtggtgcatccatcccaaccaatttatcggcgaaataa

SEQ ID NO: 23363 - DNA, 414 bp, Escherichia coli
atggttcaaattgtgccatcggaatatacagtgcaagaatcagcaccccctagctttgatgattttaaggtatatgactctgacaaattgctatctgataaggatttcactcgaaagagtagttttgattcaaaaccggatgaaagttttgatgaaaaaagcatcaccacacttgatcagaaaaccaatgaacaggcaatagagttgcctcacattgaactggatagtgatagtcagttctatgagcaactcgaaaataacgttttcaaaaatttacgggctgagcctccttactctgtaccgcagatagatgaaaaggtcaggtcattgagggtaaagagatatttaccaccaagtaataaaggtcaatataatgaaaactttgaagctgaaggaattgtgggaagaaaataa

SEQ ID NO: 23364 - DNA, 1170 bp, Escherichia coli
atgaaaagaaaactcttaggtatactaatcacattaaacgtgctggctccatttgttcatgcagatgaaccgttcagtattccggcgtcggcagtgaatacacaagctttcgatgaaccaccagattccgccgaagctatgaatattgtaactaatgcagttaaacaagttccggggacagtggctgttaatcaaccaccaattgacagcaatcagccgcctgttaattcgaaccgcccgacaactgcactacctgctgcccccggactttcaccagcgagtgcttcttcaccagcggttcggtcaatgaccgattccctgttgaacaataccccttctgaggggcctgggcagaaagcggtaaacgaagcaaaaaaacggtatcagccaatgcaaaacgtcacggtgccgccgggtggaaacattgttctccctgtttcattaggtttacaaaaccgtatccagacgacttttaagaacgtaagcgtttctacaactgcaccgtcagaagatacaaccatctatgtagaaggtggcagtgtctttataacaactgtaaaagatgcgcctataggtatcatgttgtccgaagaaggggttcctgaatcaacatataacctgacattgatccccatcgatgtaccgggagctatgattcgtgttcaaacacagttaacgcgaaacatggccattgaacgtgatcgccatatcgctgaaaacacaaataaagaacttcttgaaaaagcgcaatcgggtgagcttgacgaaaaagctattgctcaggatgaccgcaaacaaaggataatagatattctttatcccgttgctaacggtgaggtacctaccggttttgcactccaactagataaactttcggttatacctaataacgaaaaatccccttgccggtttaatttttacgcaaaacttgggcaacgtcttattggggctcgtgaactggttgatgtcattcttgtgcaaaacacactgacatatccatcggttgttgatgaccaaaaatgcataacaccaggtgtgattgctaccgcaatctttgataaagcattcttacaaccgggtgaaaaaactgagctgtatatccttcgtgacaagctttaccaggaacgggagtcacgagtaactaaacgaccaagtctgattaatgaatga

SEQ ID NO: 23365 - DNA, 861 bp, Escherichia coli
atgaacgagaaaaagtcacttttagagaacgtcatgaacttcttcaggtttgtaccgaagaagaagacagttgataaatcaaaggatgatgaggctgacgacgtccagcatgaaaaaactgaaagttacagcaatgataaaattcagcgtcataagtccatcctgaatttgtcaaaagaactcgagcctcccaaaaaagggaagaaaacgggtgctgaacttacctacagtcagttaattcagcgtgacaaaaaattaatcttaaacaatggattattgacggtgattgctggccttttggtaattaaagtggtctttttttccacaactgaggtcattgccatccctccggatatgactgaggaagtttccgttgccggaagtaaggccagtgagtcatataagacgcaatgggggctatttatagcaaccacattggggaacattaaccctaagaatgttactttcgttaccagttatattcttaagatgtttccggcatctaaacagagcgagttagaagcagaactcaaaaaagcctcggatttaatgcttgccagaaaggttgatcaaacgtttgttgcagaggacgtcaactttttacccagtgataatgttctttatgtatggggtactcgcaaaactaaattcctaaacgtctctgataaggaacaaactgagcgttggacttacgagatggttttgagtgtgaaaagtgggcgacctcgaatactgtatttgaaccagtattcagggacccctaatatcaaaaaagttacagttaacgggaaggtattggaaaaagagttcactgaaaataccgatatgaacaagcaactgaacgaagcagaagctcaataa

SEQ ID NO: 23366 - DNA, 369 bp, Escherichia coli
atgatccagaaatcaatggctatgagcggcactactgctaactacactctggctgaaagcctgcgtaatatgcttagcaataaaatgttccaggtatttattgcgctgttgtgcgctgcgttgttctcatctattgctttggcgggcggggatgacggagccttgggtgaaatttggacccaactttcagaagctttaagtggcgcgcccgggaaggccctggccgcatgtatgctgatctctgcattctacttctccatcggccgtccgaacccgggtttggcactcgtttcattccttatgatgatgattttggctaacggcgaaaaaatcatcaccggattccttgatgcgggtgttgtgctttaa

SEQ ID NO: 23367 - DNA, 315 bp, Escherichia coli
atgaaaagtcggatggtagaggtcgctgggttaagtcttaaaattaccttacataacaacatgttagctttgagttataatattgacgggctcagtatttacaatacaagtcgtattattcgcaactcaaaactaaccgaatctgagattttctcaagaattgacgctgattttgttagcaaagttttttctgtaaatatcaagcagataaacaacatcgtacattctaatgtctgcgtaatacctatacagactcaagctaaacaggttaacgttgcagctggagtaatggcgtcttgtttcaagaattactga

SEQ ID NO: 23368 - DNA, 669 bp, Escherichia coli
atgtgggtcaccaaagataatgaaattatctcagatgctgaaccggattcagacggttttatggaagttcgccgtccatgccctgactgtttaggttcaggtataaactgcctccagtgtgctggttctggctcattgccgcctgttatggaaaaagtatatcctgtgtacgagtgggcttctaaaaactctctacagatgccatttaaatcacctgaacaagcacttattaaaagctttcttaaagttattttagaggctcccaatcagggtaaaagtaatttttactcagcactcatccaaaaattggataaaagttactttcctacaaagttacaatttcgatgtctgaaacctaatgggtatagaaaaagttcagcaatcggccttcaagttcggccctttactgccaaaatcggtaccaaactgtatctggctctcaccgtaattaaaattcaggtgctcaccagaaaatactcttctgagaatttttcgtctttacttttggagacctctgaccaccggcattttattgcttatgatacgcacccatcagggttcaatctgggcagtataattaattgcaatatccaagttgttaaacgactctgggttaataatatgagtatattgctggtgaaaatgatctcatcttctctgattaagtga

SEQ ID NO: 23369 - DNA, 798 bp, Escherichia coli
atgaatagtcataagaattacaaagagttagggttattgcaggatttttttagaaaaaaccataaagctacttttaattgtgatcaaaataaagttgagatcacctcttgtgatatcactccacttcttgttaaaggtaaaagtaactttcaacaggctaagttttgtttatccggaccggtgatgcatttgcggtatcaacctttatggtttgctattttgctggggctgaacgcgagacaaccaatccatcaagaacttcagttcaatatttcacttgttgaacttatagaaaaatcgggacgtgtttgtcaggcactcggaatcaggcaagtcaactatacacttgctgaagtttcttactttttgttgctgctcatagagttcagaatcgagatacaaaaaagtaatatctgtcaaacctgctcggtttttacagaaatcagtcacgatatagattttcagtctatcagcatggctagtgttactatcaatcctagagtggttgacaaactttgggaactgactaattcggcgtctgtttttttgacaactctcttttttgccaagcgcccggaactatactgcctactgcaaaagttactttcaaaaactgaagaggtttcccttagtgacattgctcctgcaacgtttcaacacgtacagttgttatgccgtcatggcctcgtcacctacactaaaaagcataaaatacttgatattcatagtgttagcgttttaattgaaggtctctacccctgtctcttatacacatctccgagcccacgagactcctga

SEQ ID NO: 23370 - DNA, 1179 bp, Escherichia coli
atgaaacaaacagctgacttttttatctctacagagcggaacgggaggctagtcaaaaatttgcgggaatttagtgacgcaaatcctgacatttgccacaaagcggttaatggccaaccgtttatgatcgatccaagggcattagtgttagttccaaactggaactgccgtgagatgggcttgggtgaggcatactacaaattacctaaacctgccgagcatattcagaatcttaaaaaagcatttctgaatggggcagacattgaccctataactgtcgttattgttgacggtaaaccacttgttcgacaggggaactgtcgtacaagagctgcgcttttggctcaacaagaatcaggtctgcccatcctagttagattgcgtgagttccagggggacgagatagaacaagaatggcattctctggatggggcgaaatctcttcccctttgccccgtaggtcgcggcattgcctatagcagactggtaaatgatgccgggatgtctgttgagcaggttgcacaacgggaaaacatttctgaaatggcagttcgccaaatcatttctcttgcaaccatcgatgacgaattaaagacgttgatcagtcaggatgtgatttcgtacacactctgtcttgaattaattcgtgatcttggtgaaaaggaagctcttgataaaattcgggccgacctaaacgccaagataaaggttattaataattccaccgggagtgatacccttcctctgaatgttgccgaaataattaagtctcatggtagtcctaaggctgtcagggtcactaaatcttcactgggagtgcaaccaattcctcctaaactggcacaaaatctcgcagccagtactaaagaggtttgcaacagattacgagcctccctgccctcttcgtttgatctcaatcagattggacccaacgaaaaaataaatattgaagttgacagacatctaattgaacttatatttaactcagatgactctattcgtggccatgaagctaagctcgagcgtaaaacaacaaagggaaaactttctagttctgacccatcagtaacatcagaggtaaactctaatgcgctgccagctaatgatcctatggaggagcccgcttcagaaagtcaggaaaacgaattttcgctattgaatttagattccgcagtttga

SEQ ID NO: 23371 - DNA, 129 bp, Escherichia coli
atgtctgatagtaaaatcaacgagatgcagggaatccccccttttccagaaaatggagaacctgttgcagtattggttccaccggtagcaatgaataattttccggaggctaatccagaagaggattaa

SEQ ID NO: 23372 - DNA, 2439 bp, Escherichia coli
atgcgcttttcactattcttacatcattctgcttttgctttgagtctctcaatagccgcgagcatgttttccaacgcccaggcccgggtatacgagtacacctttacagatatcaatggggcgcaaaaaagtgtccctgaaagtgcgccctatcttaatccacatgggaattttaacgctctcctcattggtggcttggaccaacaaatccgcttaaccgtaactcgcgatgctgataacagtgctgtttacagcacaacaacaagtatcatctctgttgatgacaggatttcttccgctaatggaaatatgttttacggaaagactgtcactattccacctatcagtgatggtcgttacaccataaaatctgagattttagactcaaaatcgaccgttgtttcaacaacatcccatccttttataatagatacggtaggccctacgtctgataacttctctgtaccatggattcctgggtacaacatggttgtaacgggacctcgctgggaacttggccaaggtcaagaatctgccataaatcttgcaattaagaatatcaatgatctatctggttttgataaggctattgttcaaataataaaaccagatggatcaatacaatccagctatacaatggcctacgacgatgggtcaagagctgctacagcccctataactaaaggtggtggagcgatagctaaagctacatggatgccagtgtcggatgccgatgtagagtttcgctttcgagcattcctttatgataaagccggaaatgttactcaagtccccgaccaaaaatttgtatttgattcttctgcaggtgaatatgagctatttgcagttgcagaccccaattcttcaactagtgttgttcccggcatttcgtctggctacattaaatattcagcagggatgactgttaatactaaccctgttactcttgtgtacaagattcccaaacataattatagggcttataacaaagctggtttatccttcggttctttgcttactgaagataatagttatgtatatataaaacaatccaccccagttggtacatcatttactattcataatggataccaatacggaggaggtaacgcttcgtataatgttaagttaagttcaatcgctccgaaatccccatcaataaaatcctactcagcaaacttttcaacaattggcgatttttctgctggcacaatgaaattcacaaacatagatttgccaggtgagtatcaaagtataactgtgtttgtagaccctagggattatgtgcagtcattttataaccttacacaaggctacgaagtttgtactattgagcccggagaaagttcttgcactggtcctttttcatacgcaataaataaggggaatggttacatagctcattattttatagttcgcaatcaagataagacacttacatcaaatcaatttgagattcgtagcatctggaatacggatttaatacctaagatcacagggtatgattacaaagaagagaataaatctgtccttgtttatgtcacacaacccggcaatggcaattggcgtgatgtcttgatgctttctaagctagagatactggatacaatttctaatacggttcttctgacgggcacaaaagccgcgatgtctggagaggactatacttatgcatttgatttatcggctatacctgaagggaagtatgatttaaccttcagggccactgatacttttaacaacagttctcagttgccgttcagatctcttattatagataactcccctccttcaatttcattttcgtatgaagggaaaccactgttatcagaaagtacagtctatggattagaaaacatctcagtagctgtatctgatgctttaagtaagtccaagatctctcaaatggttcttcaaggaggccctgcatcagatgatgtagaattaggatttacccataacacagatggttcatacacaccactttatcctcgtttgtttccttcacttgatgaaaaaactgataaatacacacttgtagttaaagctatagatgatgcaggtaatgagtcatcaaaatctatccgttttgcatattatcctaagaatctcattgttcttgataaacttaatacccttgcggttaacaaacctttaaacctttcttcaggtgaacctctggctgttcttaaagcaagtcagttacgccgtaatgatggttccttagcaaaaggcgtacagacagctttaattactgttaggggtgactcagcattcccaattagtgttattggaaaccttgtttctccaggtgaaacgaaagaaattcaaatagatttaggttctgtaggaaatgacgttgttgtccctatattcccaggagtatctggcgttgtcggtgcctccggttttattgttgaattccctcaactaaaataa

SEQ ID NO: 23373 - DNA, 417 bp, Escherichia coli
atgcgtaaaatattagggctattgttgctgtctcttgctccccaagtttcacacgcagatacagctcctttcactctgtcgcaaatttgcctggcaggcgtggccaccttctacggaagaagcatcgatatcatgaaagcccaagttttaccggaaggtgaaattcgcgttacctacaacagacctgaagatggcagaccgttttcattcaaatgcaggaatcaccccaagagcaactatcgcctcaacctccttgacgaaagccttaatggggcgcggtggtacggagaggatatggctgataaacagacattttataccgtaaaagacaatatcctaatcataaggaccgtaggtaatggtgttcagttagcggaggatttctacagaccgtctaactttcccccatctaagtag

SEQ ID NO: 23374 - DNA, 459 bp, Escherichia coli
atgcaattaaacaccagacaggaaagagtatacaccctggctaacatactgggctcagggaagcctgtatcggcgcaatccatcaccgcgacgctggcctgttctgagccgactctaagccgggcgcttaaagagctgagggaaacctacgctgctgaaattaaatacagtaaggctggccactcctatcagatggtaaactccggattactggataagaaaacactcaagagaatgagtgaggcgctggaccttaatactgatttaaaaacacatgaccagggggcacgggtggtactggataaggatataaaaacttccgtttccctgtcgattagacgccgtattctccggaaaatagataaactggcagagttgagcggaacatcaagaagcgaagcagttgaaaaactggtcgaaatgaagatagatgaaattataaaggtcttgaaaaaataa

SEQ ID NO: 23375 - DNA, 1224 bp, Escherichia coli
atgggattcagatttcgtaaatcgatcagcattatcccgggggtcagggttaacctgagtaacggggcccccagtctgagtattggcccccgtggagcttcgctgtcagtgggaaagaatggaacgtttgccaacctgggccttcccggaacgggactgagttaccgcacccggattgacagaacagcacgggaaagagtgaataccaggcatcaggcagatcccggtctgaggtctgaactggagctggtggtggaaaaactgatgtccaccgtaacagcgataaccaatatccatgaactctccccttccccaaagggagggaatacctgggccacgctcgagacacagtacctggcgctccgtcagggcagtttcactcttcctgcgccggtacgaccaaacaaacctgaatatatacctcttccaccagaacctgatgagcatgccggtcgcggtttccttgggggatggcttgaatctgatgcagcccgacaggagcgacagaacgaaaatcttcggcggtggcagacgtccgtcgctgatattgaacgtgaaaatgcgttgctgaaacagcgttatgagaaacagcgtatagcgtgggctgagcagtacgcagaatggcagcatcagtaccaggagcatgaaaaaaatcgcacggagtctgtagctttagcgaaagagcaattccgatctgacgcccgcttctttgaacattgtcttgaggaagttttctcgcaaacagaatggccgcgagaaacactggtgtcgtttgaggtacggcctgaagaatcaacagtctggcttgatgttgatttacctgagattgaggatatgcctgataaagtgtatagcgtgaatgcccggggaactgatatcaatgaaaaagccatgacacagaaagcggtccgggaaagttacgctaaacacgttcacggatgcctgctgagattggcagcaatcgtttttcagacgcttccgtttgaacaggtcgtcatttcaggcttcactcagcgggtaagtaaacgcactggatatcttgaagacgagtacattatttcctggcgggtatgccgctctgaaatcgagctaatcaacttcgggaatctgcgtggccttgaccccattgaagcattaggtgatcgaggtctgatcaggaaaatgagtgcgacttacatttttcagcctatagaaccactgacccatatggcaggtaccgactga

SEQ ID NO: 23376 - DNA, 957 bp, Escherichia coli
atgaaaaaacaacccaacccatgggaactcggtgccacgctgtatatgcctgccacacgcaaggatatcgctgaggtcgttctggaagggaaaataccggggctacgctctctggttgtctgcctggaagatgcggtcagcgagcatgacatccctcttgcgattcagaatctttcactgtttttgaagcaattgagacacgcaagagccgtcaacgatgatgagaagtacccactggtatttatccgcccacgtcacactgatatggggggatggttaacgactaatttggacctgagtgcagttgatggttttgtactgcccaaattcaccctttccacgctcccggtttggtgggacatcatggcaggaacatcattgatgatgatgccaacgcttgaaaccgaagaagtctatgatgttattaaaatgcaggcgctggcaaatgaactttcgagtcatgactgccgtgaccgcataatcgctttgcggatcggcggaaacgatctcatgaacgtcgtgtctctgcgacggccacgggatctgaccctttatgacactcctatgggttatgtcataaaaatgcttgtgtcagtattcgctcctcgtgattttgcgctaaccgcaccagtatgcgaacacatcgacgatcacggcgttctgggacgagaactctctatggatatcgcccatgggctggtgggtaaaacggccattcatcctgatcagattagtgtgatagaggaggcgctaaaggtgtctcctggtgagcattcagatgcgttacgaattctgaattccacccaggcagtcttcaaatctcagggagcgatgtgtgaaccggccacccatcgccggtgggctcaggggatcctgggacggggacaggtatacggtctgactacggggcaaaatccggaaggaatcaggcttattccagtttctaagcagcactaa

SEQ ID NO: 23377 - DNA, 1080 bp, Escherichia coli
atgtcgcattttgccccgttttctggttcctataaaccggacgatgttcactttttgctgaaacccattgtcatggagatgacaccggttgacctgaaggaagaactgattcagtcaggaaaaatgcattattccgacatgttaagccaggaaccagagcctacccgctggcacctggatcttttcacccgtgcgcttgactcgggagctgcacgtctggcacgggaggtatcttatcttgctcgtgaactggcccgtcgtgctggagatgaacccattgtcctggtcagcctggtcagagctggtgttccactgggggtcatgctgcatcaggctctgcgtgcgatgggaaaacagtctttccactacgggatcagcattatccgcgacagggggattgatgctgcggcgcttgattttatcgaatcacgccatggtactggtggcatagtgtttgtcgacggctggacgggaaaaggagctattaccggcgaattatcccgcacactgaaggaccgtcccggttatccggagcagcctcgactggttgtgctggctgacccctgcggatgtgcctggcttgctgccagtgacgatgactggcttatcccgttcggtatcatgggcgcgcctgtctcgggtctgatttcgcgctctgtctgggccgaagaaggcctgcatggctgtgtggtttgcgatcaccttcagtcttttgaatgcagccagatgctggtggatacggtagcacatttccgtgaacagcttgacggtaaaccccttcccgcttctggctgggacgcagggaaaaatgccgcacgctggcagctgagcagaaaagttatccagagccttgctgcgcgttatgaggtggacagcattaaccgcattaagccgggtatcgctgaagcgacgcgggcggttctgcgtcgtgtacctgatcatgtttttgttcgccagatggatgacccggatgtttctcttctggttgggctggcaaaagagaaaggtatccaggtgacggaagccggggatacgctcggtcagtatcgtgcggttaccattatcaaaaaggtacgctga

SEQ ID NO: 23378 - DNA, 774 bp, Escherichia coli
atgaataagcccgtcgtcttcagcgacctcgatgacaccctgttccagacccgccgaaaaatggttgatgaacttgcccttgaaccgttccggaccggcgcactggatcgcagcctcacgcctcgcagttttatgaccgaagagcaggccatgctggtggactggttgctggaacatgcggacctcattccggtgacggccagaggtacggaagaaatcagtcgggtacagatccccttccgttcctgggccgtgaccactcatggcgcggtgatccttcgtcctgatggtacgccagacagcgactggaaagcccatatgctggagtgcctgtcctcctacgccgaccgcttaacatcaatgcaacatatcatcaccgagctcatggatgcgcgaggcattaatgcctgggcacgcctcaactacgaatatgagggtactccggtgtatctggtcatgaagcaccgcgacagcacgaagcttgatgaactgaacgctgtcggggatgagattgagcgcgttttttcgaccgaagggttttacatccaccgtaacagcaacaacattgcctggttaccctgcccggtagaaaaagggctggccgtttcatggttgctggagaaactgcgtcaggagcgcggggttttcccggtgatggggctgggtgacagcctgagcgaccatcggttcatgaaactctgcagctggtttggtcttccacgccagagtcagtttgccgaggccatatcacagcgtatttttggagagcaataa

SEQ ID NO: 23379 - DNA, 1143 bp, Escherichia coli
atgtcagcaattgatggtaatttcgtttatcagaagacattatcctgtgggcgaattgaggtaagcagcgaggaaaccgattatcctcttactgatctctttgatatcgccgaacggcggaatccaaaacgcgcatttctgtttgtcagtaaagtgctgggtcgacatattcctgtctctcctctggtcatgcgcaatgtttatacacagctggcggagaagtttcccgggactctggacgggccggtggtatttatcgggatggctgagacggctgtcggcctcggggcgggagtgtttgatgaggtgcgtaagcatcaccctgactgtatttatctgacatcaacccgccatccggtcgatgccgaactgttgtgcgagtttaaagaagagcacagccatgccacagaccacctgatctactatccagtttctgctgccatgcggcaaaccgtagcggaggcacaaacattagtgctcgtggatgatgaagccacgacggggaaaacgttcctcaatcttctcgcctcattacgtgcatcgggtgcactccggaaggtacgacgggttattgctgtcacgctgactgactggagcggagaagcactcagtcagaacagccccctgcccctacatacagtatcgctcatctccggcaactggcgctggacacccgaaccggatgccccgcttcctgtcatgccccaggtaaatgtgacctccagagggagcgtcccgatcacaggcaaacaatcctgggggcgactcgggatgcagataccggcgagtgacctgggtctccaggttcaggtttcgcacggtgaaaacattctggtactgggcaccggtgaatttgtctgggagccgttcctgctggctgagcgacttgaagcggcaggtgctcaggtcgtgttcagttcgacgacccgctcaccgatttccactggttatgctatccagtccgccattgctttcagcgataactacggactgggtattccaaattatgtctataacgttgctcatcagcagtttgaccggatcctgatttgttgcgaaacgccagcttccagcgtggacccccggctgcttgaggcgctttccgctgttgctcccaccgtagaggtgattacctatgaataa

SEQ ID NO: 23380 - DNA, 1059 bp, Escherichia coli
atgaaaaagaaaatttggtttatggaagggctatcttcccagcgagacattatccttggagtgaaatcatttgcggaaaaggaaaatcaggatattgaaatcttttcttctcatcgcaacgagaggaaagagatcttgtctgtttccgatttttcaatgatcgaacctaacaacgaagaagaacgtctttcttttattcattccattactgacgctcatggtattaatgcgatacatactggtcgcaactgtaaatggtttgaaagccaccgggaaaacattcaacgttctggtgtccacctgactaccgggtcaacggggactcactggtttgaattagccgatgaaaaagttactttttccgagtttatggaaaaaaatggacttccggttgtcccgtcggttcgggtaaaaaatgtagacgagcttggtactctgctgagtcatccccctttcccttctgattgcctctgcattaaacctgttacaggcatttatggcatgggattctggcgttttgatgacaatgtttccccggtagcttttctcaacaatcctgagagccgtgttatccacccatcacagtttctggctgctcatgcccggatggactgctttactccacaagtactgatgccctatttacccggaccagaatactctgtggatatggtggtaagtcaaggcacggtcctggccgctatcgggcggcgtaaagaaggtgtgcttcagtatctggaaaatgaaggggaagcgattgaacttgccatcaactgcgcccgcctaatgaacgcagacggcatggtcaacgtacagactcgccataatgccgaaggcaaaccactattgctggaaattaacatgcggccatcaggtggtatcggttatacgcagcacagtggcgtgaatcttccgggtctgtatgccttccatacacttgggctgatggatgatgatcaggtcaggcagtcagcgaaaagtgatttttcacctgcagtcgtccgctctgtcaccgatgtcattctctatccggcatcattgaccaacagaattgattaa

SEQ ID NO: 23381 - DNA, 585 bp, Escherichia coli
atggtttctttaagtaaaaaccagacagtatcactcagcaaacaatccactgctctcagccagcttcagttcggactgggttgggatcctgttaagaaaaagggattatttggcagcatttttggtggcaatgattccatagacctggatgcaggttgcgttcttctggatgccgcaggtaataaaattgacaccatctggtttcgtaaactgaaatccagctgtgggtctgtcgtccactccggcgataacctgacgggtgagggggatggagatgatgaaatcattcgcgtcgatctcacaaaattgccggcaaatgttgaatacctcgcctttaccgtgaacagctttcgtgggcagtccttcaacgatgtcgataacgccttctgtcgcgtcgtggatcagaccaataaagaactggcccgttatcagctgacggaacaaggtgctcatacgggtatcatcatcgcttccctgcgccgcaacaacggaaactgggattttaccgcccacggtaaagcaagcggtggccgcacaatcgacgatatgcaattcgatatcgtaagtacggtggtaaaagcatga

SEQ ID NO: 23382 - DNA, 1152 bp, Escherichia coli
atgaatctgacaccggggggcaatgcccctttaatagctcaggatctccgcgtgagggtcatttctggtggtcctgttgacgcttcggcgtttcgattattcgctgacgggaaagttcggggtgacagcgatatggtcttttacgggcaaccccgtaatgaagatggttccattagcttcagtgctgaagggaccaatagcgttttcatcgttgatctgtcccgcctcaagcccgacgtgcagaaagtcgccttcaccgttacctgtgacggcagtcataccgtttcctccctgaatcatctgtccatacaaattgaaagtggcaatacctcgctgatcagtggtcaggtagaactgagtggccgtcaggaagccgctctgatcctcggtgaagtctatcgcaggaatggtgactggaaatttcgttttatcgcccagggcttcaatggcggcctgaaacctctcgctgagtactatggcgtcaacgtcgcggatgagccagctccagtcactccgccaccagcgcctccggctccgcctaaagttagcctgagtaaagtttctctgaccaaagagaagcctgccatcagccttgccaaaaaagacaattttggtgaaatccgcatcaatctgaactggcatcgtggctcgggttcaggcgggttactgggcggtatgtttggttcgaacaaagctatagacctggatctcggtgcattcgttgagctcgcagatggctataagtcagttgttcaggcactcggtaatgcttttggtaactatcactctgagccatatgttcaactgcagggtgatgatcgtaccggcgaggctctggatggtgaatggctacacatcaatggccgcgaatggaaagaaattcgccaggtactgatatatgcctttatctatcagggcgtgcccagctgggacaaaaccgatggcgtggtgacattacatgttccggagcaaccaccgattgaaacgcgtctgactgaaggtgataacaaacgcacgctgtgtgcgattgcccgtctggtcaacgagaacggttccattcgtgtggaacgtattaaccagtacttcagaggccaggaggaaatggaccgcgcttttggctgggggtttcgctggtccagaggttccaaataa

SEQ ID NO: 23383 - DNA, 456 bp, Escherichia coli
atgagttttttcgacaaagtcaaaggggctttgacctcgggtcgtgaggaattgacccgccaggtaggccgttacaaaaacaagaaatttatgcagggtaccgtcgcggtatgcgcccgtatcgctgttgccagtgacggcgtcagctccgaagaaaaacagaagatgattggatttctgcgatcctcagaagagctgaaagtcttcgatacagcagaagttatcgaattttttaacaagctggtgaccagtttcgactttgatctggaaatcggaaaaggcgaaacgatgaaatatatcctcgccctgaaagaccagccagaggcagctcaactggctcttcgtgtcggtattgctgtcgctaaaagtgatggcaacttcgatgatgatgagaagagtgctgtccgtgaaattgcccgttcgctgggtttcgacccggctgaatttggcctctga

SEQ ID NO: 23384 - DNA, 1041 bp, Escherichia coli
atggtttccactcacatcggttttccggctgaaacagtgacggtctttgttgctctgtcggtcggcgccatctttattgacctgttcatgcaccgacatgacaagccaatttccctcaaaagcgcagccttatggtccgttttctgggttattgtcgcgatggcatttgccggtttcctttttgtgcatcacggagccgaggttgccagcctgtttgtcacgggttatgcccttgagaaggtgctgtcagttgataacctgtttgtcatgatggcgattttctcatggttctcagttccggaccgttaccgtcaccgggttctgtactgggggatcattggcgctatcgttttccgggggattttcgttgcgatcggtaccggtctgcttagccttggcccttatgtcgagctgatctttgccgttgttgttgcctggactgcggtcatgatgctcaaaggcggtggggatgatgacgaaattgaggattattctcagcaccttgcttatcgcctggttaaacgcttcttcccgatttggccgaaactgtccggacatgcattcctgctgacacaaaaagaagtggacgccgaactggctaagccagaaaacaaagacgtatctgtagggcgactgaaaaaggcagcgctttacgccaccccattgatgttatgtgtggctgtagtggaactctctgacgtaatgtttgccttcgactctgtcccggcaattattgcagtcagtcgtgaacctctgattgtgtatagcgccatgatgttcgcaatactgggcctgcgtactctgtattttgtactggaagccctgaaacagtatctgtcccagctggagaaagctgttatcgtcctgctgttcttcattgcgtttaagctgggtctgaacgctaccgatcacatctggcaccatggttacagcctgtctgcgaccaccagcctgtatgttgtactgggtgtactggctcttggtattctggccagtgtcatctttccggaaaagccggaagctgaaaataaagaaagctga

SEQ ID NO: 23385 - DNA, 579 bp, Escherichia coli
atgagcgtttcactctctaaaggcggcaacgtttccctgagcaaaaccgcgccaagcatgaaaaatgtcctggttggccttggctgggatgcacgctctacggacggtcaggactttgacctcgatgcttccgcatttctgctggcagccaatggcaaggttcgtggcgatgcagatttcattttctataacaacctgaaatctgctgatggttccgttactcataccggtgataaccgtaccggtgaaggtgatggcgacgatgaatccctcaaaatcaaactggacgcggtacctggggatgtcgacaaaattattttcgttgtcactatccatgatgctcaggctcgtcgccagagcttcggtcaggtttccggcgcatttatccgtctggtgaatgatgacaatcagactgaagttgctcgctacgatctgacagaagacgcttctactgaaactgccatgctgtttggggagctgtatcgtcacaacggagaatggaaattccgtgcggttggccagggttatgctggtggactggcttccgtgtgcgctcagtacggcatcaacgcgtcctga

SEQ ID NO: 23386 - DNA, 576 bp, Escherichia coli
atggctgtttctctcgttaaaggcggtaatgtttctctgactaaagaagccccgagcatgaatgttgctctggttggcctgggctgggatgcacgcgttactgatggtcaggcatttgatctggatgcatcagtattccttgttggcgaaaacggtaaagtgctgtccgattcgcatttcgtattttataacaacaccaccagcccggatggcgcagtacagcatcagggtgataaccgtaccggtgaaggcgacggtgacgatgagcaggtcaaaattgatctgacaaaagtggccgctgacgttaagaaactcgtattcgcagtcaccattcatgaagcagaaagccgtaagcaaaatttcggcatggtcagtaacagctttatgcgtgtggtgaacaacgataatggctccgagattgcacgctttgacctgtcagaagatgcctcaactgaaaccgcaatgattttcggtgaactgtatcgccatggcgcggaatggaagtttaaggctgtaggacagggctttgctggtggcctggctgcgctggcaacccagcacggcatcaacatctga

SEQ ID NO: 23387 - DNA, 1242 bp, Escherichia coli
atgcaattacaatcaggacagaacattccgcttcacacagctacactgactctccggcttgattatccccctagtcctggatttcacagtacccctgagacttgcctgtttatgctgaatgctgagggaaaagtgacaggcgatgctgattttatcttttacaacaatctcagtgccgccggtggcagtgtgaagctcaaccccggtcaccagtacgcagtcgttcattttgcgcttgaccagatcccggatacgattcagaagattgcaatcactatggtgatagatggcagtgatacgataagcggcctcgcgcaactgaaactttctgctgaaagtcaggccaccttttttgtcgatctcaatggccgcacagaaaaggcagtaattatgggggaagtttaccgataccagggcaactggaagctcagggcgcttgggcagggatttaatggcgggcttgagccactggcagttagctatggtgtggacgtggaacctgcagcagaagttgtaccgcaaccagccaggatcagccttgaaaagaaactcgaaggtaaagcgcctgcgcttatcagcctggctaagaaagccagtatttcactggcaaaacacaaactggataccgttgaagcacgagtcgcttttgttctcgatgcctcaggctcaatgaccggccagtttaaaaaagggcatgtacaggccgttcttgaccgtatagctgtcctgtctgtccagttcgatgatgacggcacgatggatgtatggggctttgctgagcgtcacaagaaataccctgacgtcacactggacaaccttgacggatacattgctgcaattcagaacacgggtaaacgatctgcctgggaaatccttcccggccttggcgggacgaacaatgagccgccagtcatgaatgaggttatcgattatttcaaggacagcaccctacccgtttttgtcgtgtgcattacagatggcgggatcagcaaaacacgagaaattaaagaggccatccgccgctcagccaactatcctgtcttctggaagttcgtgggactgggcggatcaaattatgggattctggagaggctggacacctttagcgaccgtcgcgtagacaacagcaacttttttgcgatcgataattttgcccacataaaggacgaagagttgtatgaaaaacttctcgaagagttcaaagactggcttggactggcaaaaaaggaaggcattatctga

SEQ ID NO: 23388 - DNA, 648 bp, Escherichia coli
atgaacgtcattcagccccgcatgctttctgtatttgattttgacggtacgttaacgcggcatgatagctttatcccttttctgcggtttgcctttggcaatcgggcgttttcgcgacgtatcgtcagcatggctctacccacgttacgctgtatgggtaagcagatgacgcgtgatgagctaaaagaaacgctcattacaacttttcttactggtgttgaggaaaagtgggtgtcttctaaagcagaggaattctgtcagctctactggcatcgcctcatgcgcccggcaggtttgattgctgtggcgaatgaagtcacttccggcgcgatcgtcaccttatgttctgcgtcgccggaaattgtactcagaccctttgccgaaaaacttaggatcaaactgattggtacacaattagagacaagagacggcattctgactggcagaatcagtggtcataattgcaggtgctcacagaaaattatccggcttgaaaaagaatatggacctctgactgactatcatcttcgggcatggggtgatacgcggggtgattatgaactcctttccgcagcgactgagcctcactggcgtcacttccatcaaggtttccgtcgtaaacttccgtcgaagctaatcatcagataa

SEQ ID NO: 23389 - DNA, 330 bp, Escherichia coli
atgacggactggcgtatccctgaaggtgaaccggtttgccatgaagcggatagcagaatttatacggccacctaccatctggataaccagacctcaatcgaggtggcggacgatacaggtcagctttgcttaggtgtattactggaaatcaatcatggcgtgcctgcactacatctgaatgtgtcgggaggggataagcttctccacgtacatgctgcacaaggtggacttgtcctgacaccagacagttccggggtacggtttcagggtgctgaatgtgacaggtatgcttacagagatcagaactcattacttgtgaaggaacagtaa

SEQ ID NO: 23390 - DNA, 390 bp, Escherichia coli
atgacaaagcaaatattacccaatgaactggctgaaatcgtaaccggtcttcttattaaacctgaactgctgggtgaacttgactcccgtgaggcgcaccaggccttcatgctggatatagggcgggtaattgctgatcactgtggtggacgggtcaacggcattacggatggcgatgtcgcaaagccctatctttcagacatagagtgtacccccacactccacattgaacccgatgaccgtctgccttcgactgaacgtaacgtatggtcaaattatcatgttgaagcctgggcagacgagggacaggaaactatcctcgacagggcgatccgaaactctgacagagctgccctgcaatctctgcttattgtggccgcacaaaaataa

SEQ ID NO: 23391 - DNA, 759 bp, Escherichia coli
atggctgactattattcagaatgtgcttgccttatcgaagcaaatcctactcaagctgatatattacttgaggcaatgaatgaattgtttgaaccggatgatagttttattcaaaaactcatttcatgtgataacacaaacggcctgtcagaaatggagattattgtacgtcactgtgtcctgaaccatccattcagaaatgttgcagatatttctgaagacctggactggcattttgatggggaaaaatgccctgaaggttttcttattaacagtgatctcggtgatttcaattctgaacatggtgcgctgtttgctcaggcggcacttattgcatttgacaggaacgaattgatagagttcaaaattgcttttacatgcagtaacttaaaaaggcctgacgggtttggaggcgctgcctgtgtcgtgagcaaggatttcatccggtggacaggtctacacaattttctggaggctgaacgaaccgctttcgccgagaagatgaattacttcttttgtgaatttacagaggtcgtcggtgagcttgaatatccagtatcgtttatattgcgttgcccgaacagcgttaatgcagcgcataggtatgatgagattcagcttaactatcgcgatggtggggaaaaagatgccgaaggagggatacaatttagttctggctctgccatcaaaaaatccagtatgaaaccaatcactcctgatgagttccgggtgatgaaatcgtacctgaacgtcatgtga

SEQ ID NO: 23392 - DNA, 612 bp, Escherichia coli
  misc_feature (43)..(52): n is a, c, g, or t
atgtgcaatggcttctatttcttctgtggagaatcgcagagcnnnnnnnnnngaaaggtcgattcgagttacgatccatttgttcgtggcgaagcaactaaagttgaatacctgcgtgctatcgatattctgattgaatctcgtggagagtgttttattctccctctttcctggtctctggcagtttccatgttcccggagttacagaacagggtttttcagcgccgcgaacaccgtgaccggattcatgatcaaagggtggagcgcctgacaaagaaagaatctaacctattgaaatatcaacttgaaattaacgttgcaaaatccaggctttacttgtctttctgtgttccaggtcaacataaacgctggttagaagagtggcgaaacgatacccatggacaaggacttacaactaatcatatttacctgctgattaaggaatggtggtcatcattctggataacttcatacagaaaggactatatttggtgttacacactggctgaattgctggacgagattgattatgttcttagcactattacaattatggagtttaacgtctgtttttcggcgctaccattatctcttatatataaaactggatag

SEQ ID NO: 23393 - DNA, 603 bp, Escherichia coli
atgactatcatgaaagttcattattcaccaactgacgggatccctttgcactccctttatctgaaggaaacttcaaccactgaacgatcaggttcagtactggggggcggcatttcgggagactctgttattctgggaggcggaggttatgccggttcggaaatgcagaagacgactcgttctactgtctttgcaccacctgatgaagttactgctgagcctgacaacacaaaaatggtcctccggatttcctgtgttatcggtgtaatgtttttacttataattattaccttattcagtaatgctgttgttgatatttttgacgtaaacgtatctaaaacaatgtcttctttcctggaacatgctcccttctttatcattggactatctgtcatttgtgctttctttgttataggaatgaccgatcatgattacaccccggtacttgaagagcataaaaggaatgaagcgcgtttgtctgtataccacaggctacgctatgtcgaagctgataatattgtttttgatccgcaatcaatgaaaggatgttatgcagaaagaaaattcattgcttcactagttgaaagctgtatcactaagtaa

SEQ ID NO: 23394 - DNA, 669 bp, Escherichia coli
gtgtcacatccaataatcaatgtcggtcgttatcatggtggttctgatgactggcgtacaccgtatcgtttatttcgtaacctacaccgtgaatttggttttacgttagatggtgctgcaactaagcatgacacgctgttaccacggttcaccgatgatataagccgtcaatcatggcttggtgaaaaggtcttcgttaacccgccgtttagcatggctgaaaagttcctcttaaaagcccctgaagctgatgtgtgtgtatgtctggttccgctcaggtcaaagacaacttactggcttcggtgtgtatatacaaaccccttcctgcatgagattcgaacgttgcaccgagcagtcaaataccttccaccagcaggaaagagaggtgttgtagtgcgctcaccgtttccaagttgcgttttgatatacaggaacacaccccgcaaacctaaagttgaaattacccagacaatctattgtggtgacacaatgcttttacttgccgtggttaataggggtggtttacgtggaagacctcatatgcacgatgcacagacgcttgacaggctgattaaaatgtatgaccaagggcaacccatcaagagcatcgcagaatcgctaagaatgcctctaagcaccacttacaggattgttcaaaggttgggctga

SEQ ID NO: 23395 - DNA, 1131 bp, Escherichia coli
  misc_feature (1064)..(1073): n is a, c, g, or t
atgactgtgaacaagaaaacggaaaaaattaacaatgaaatcaaagaacaagccgcattctcattcaatgtcgtagggggtacgggtaaagttactaactttacccctggtaacaatggtaccgttcaacctgttgctttgttgaggcttggggtatttgtcccggcccctccgggcgtagcaaagaaaaacctcccagagggtttggttacgatggatgtgtcacgcgatttacagcatatgcagatcgcatccagtgaaggctacaaagaaatatcgctatccagccctcgtcttgatatggggacagatttccgtgtatggcttggtatagtccgttctttacatgaccatggccattactcaggaaggattaagcttccttttagcaccttccttaaaaattgtgggtttgacccctcgaggtcgaataagcccatgaaacaacgtatcgatgcttcgatgattaaactgaaaatggtcacttttcagttccgcaatgaagattcaaccctcacgaccggcctcattaactgggcacggtacaacataaaaaccaatgagattgagatagagggagatccccggattcaggagctctatcagattgactataaggtttatcttcgccttaaggctcttgataacctgcaaaggaaagagtccgcccaggccttgtatacctacctcgccagcctacctaaagaccccgcaccaatctcaatgaaacgctttcgcgaccgtttacggctaacgtccccagtagcctctcagaacatgatcattcgccgttcgttgaaggagcttgagcaaatcggttacttgcaatacagagaagagaagattggtcggtcaataaagttccacatacttaaacgaagtccctcgctggatgccaaaaagaccatcctggtcccggctgcacataacccagctgatgacgatgcactgatacataaacttaaaatgctgaaggctgcaggttactcagaaactgagattgctggcgttctggatgccctcgataagttgcagagggaaggaaaaccggaatctgaagtcgnnnnnnnnnngatgccgattttgaggagctttaattcaggaaatcaggcgtacaaaagagggggatga

SEQ ID NO: 23396 - DNA, 138 bp, Escherichia coli
atgtcgttagaaaatggttctttcaaggataaacgtagctacgaaagctatggttcgggccttagatttcgtacagcaaggggcgcagaagacagcaaacgctatctggcaatgttttctgaacccaccggaccatga

SEQ ID NO: 23397 - DNA, 792 bp, Escherichia coli
atgaatgcttttaataatctgtttaaccgtcactgtcaaaacactctgctggctcgcggatggcctgccgatatggaactgaactattcattagcttactgccagggagatggtgtggcattttacggcgtgctgcatgacaaagaaatattgtccttattggctggtctggtgaaatataatcatatcactgcaaaactggcagaagaggttgctgaagtaatcaaagacagcgaaacaaaactcatccttgaacgcaacggttttgggtaccgatattctcatgcaaataccatccgagtcctgttagaaaattacccagaagatatcggatatgaagatcgcttttatgacgttctggatagtatccaggggagcattgaggagatatgtagcacgcttgaaaatgacggttataaaatccatgaaaatatgagcccttcctatgcaggcgaccttgttatgtcacgtgccacagctaatttcgaaatcattgtaaccgaaagcgaagaggaattttgggacacatcagatgcctgggatgatgaatgtaaagatttatacatagctgatcttcttaccgggagatatgaactgaagaatcttgaaataatcgtgaggggaagaaccacaggaaaggtatacggacaacattacgccgaactggtttcaattaacaaaaatagtccggtgcgacgttggtttgaccgcgattggttaaggttagcatttgaggaagcgcgggtaaaaattgaagatagccgtaaggaacttacaaacataaggttatag

SEQ ID NO: 23398 - DNA, 354 bp, Escherichia coli
atgtttagcaagttctttgttttgaccagtattgttgtttggattatgccggtgatgactatcgctggcgcaattttccgtaaggacctgttaacccgaaaagaatggatttttctcgttttctttagcattgtcggtgcatcctacgtttcttattccagctggcaggacaggaacataggcctggtgccaatagggaaagaatatttatcttgccagttaaaatcgcgtaatgaacccgaccccgaaactttcaggactgtgacccttgattgtggcggagaagaaaaaatggctaaagaggaattgtatgatgcagctgtaaaagccgccataaaatacggttacgagtaa

SEQ ID NO: 23399 - DNA, 3381 bp, Escherichia coli
atgcctgacattatcccgcaccaacaacagccggaacgtcttcataaatttcactccctcaagggagggcaatactggcgcgcaaaaaacgatattcctgagcaatgtattgaacaggatgaagtgttgctgattgagtcgctccgctgggttgataatgcactccatactgtgatcctccgcacccatccgtcaaaatacggtaaagactttgttttcaaatttaccgatgctgctggccgtagctgccgcaccacgaaatcgtttaaagagcatcgatttctgtttaatgactttctggataaatttgaatttgcagatgatgggcaggatatccggagccaggaactgcttgcagctcaaaaccgggttagccagctgactcagcaaatgaccgaaaccatgtctgatcctgaagcactgcgtacggaactcctcggcagggttgaagcaaagaaagccagttcatcgacgccaggcgatgacaaaaagcaacttcctatggttatggagctgtcttcatcaactgagatagcgtctcttggcacagctctgtcatcaggtatcgatgaagccaaaatagcacagctccagcaggctgttgagttcagacatgaaatcgcacaggcgcaaatcgactggattaaagaaaagaataatgcgatttcgagagccgtcatggctattactccctatctggaagagtcggctgccgcccagcttgccattgccgaagaaagtcgcgaaacgctgaataaactgatggacggtataaagtcccttgacctctacatcgggaaagatgtggtcgtgaacactatcagggagggtgaatcagcaccgccacacattcccttgacgttcgtacagcgtaagctggccgtcgatgaggaaacggctgtttttctcgatataggagaatggtttgattttgaaaagttgccactttttttccatgcattaaacaaccatccagggctggtggagcagatcttcccgtcacagcgctgcgtggtatgtatgaccactacccgtcgctatattgattatcaggaccgttgggctaactgggagctcaatgcaaaaaaccagacggtctttctgatggttcgggacggcgaacggctgttccaggtttactctggagtagagtctcacctcggcgctcatacactttttccaaccaccgatgaacagggaaatatctttcgaggcattgacggttcgcaggttacgttcaatgacgtgtcatacactgacaagcttaaagcgcatgagatggttgctctgcattattaccggtttcttatcctgtgctgcgggctcgaccaccggcttaagctgtttggcgagttctacgaccctcaggaccgcttaagtttcgtctctatggcgttccaggagaagtattgtcgattcatttatgatcatgatggtactggccttctggacgatcctgatgcgaaagtgcgcccctctattgaggagtatataacccaggccaatagccatttgcgctcaggttcaagggtgttctgcgagtggagagctgtttgtacaccaaataccgcgccgggcgttgtgaaagtcgatactggtaccagttaccgatcctattattttaccgccgatttcatcaatgatgagggaatggcggtggcctttacccgcaacaatgagatttgcgtggaggttccggtcaaaaaagatatctaccgtcgcacccgggctaatgatgtacgtgaatttaatgcgaaagtatccctcactaattttcagcgtgatccgtgggatgacgcctgcagcgtgggattcctctgtctggacgcggttaaagccgatgatctggattattacatccacagccgttccagccgtaaaaattttatgtactacataaagctcttcaaacgcctttcagctgtcctgagagcggaagaagagcaggagaagccctatcggcaaaagctcatcagagcgctggtggatggcaacataggcactaaaactaatcgtgctgaaatcgtcgacaagacagtcatcacctggcgggcggacaaaaaaggtcagccgcttagtgaaggaattgacaacgagaaaagctggaaagcattacttggcatgatggacctgatcgcctggcgcggtttgagccatagagaggctgcagtggagatggccatctcccggggtagcaaaccgttacgtcttatagtcacgacaaatgccagactggctctgtatgttacccctacagccgaggaacgtgacgatcgcgtggaaaaacataagtgggccatgctgctgacctttaaaatgtcagcaaaagggctgactcttgattccagcaaacctgcgttgctaagcaaaaatagtgtttgcgaaacaaccctctatgaatggccggaggccaatgagtggaaagggttgaaatcagtgttctccagctttcacgaaaagcaaagagcgtttgaatatattgagacaggcaaagaggacctccgaaaactgtctccggctaacccctcagaatttgaggctggggtacgtgaatggatgacggcctactgcgaaatgaatgattaccgcaaaaccgggggccaggtgcagcagccgagattgatgataccggtaggcatctacattaaccggggagactggcagtatatctacgtcacaacagaaagtgaggccgctgggtatttttatcacaacagcagcgaacgcctgaaaaaggaactttatcaggaatatgtttcacgctttgctcacccggaaggaaagctcgaaaggcttgaaactagggggaacaggctggcattgggcatgacgaacagaactcccgacatcggcatgttctgtgcagatcgcaatgttgaaatggatagcgtgaattatggacctttatcttacagcgcctacagccagcttcagcgaattgaaaaccgattgttttttgtcctcgctgaagcggaacgcgggttacatcgcaggatttatattgccgataaccttaaaagcgataatggtgagtttatcatagataaactccttggttcttcacatctacaggtgcagtctgccgttgatgtattcgaagtcattctacctaagtcgttgtcagaagggccgctgccggtaatcaaatcgagtggtgaaatctaccgtattcaccactggtttgatatctgtccaaaaggcgctgaccctaacgtttcattgagcaatatcgaggcacctgtaagtcaagttaccagacacagtttcgatagcagggaggcggcaattatgcatatactcatgcagaaggataccgttaggaaaaatatctccgaagacagattcaacacgccagaaggcgttgtcgaaaggtggtattag

SEQ ID NO: 23400 - DNA, 1245 bp, Escherichia coli
atgtcgcgtctgaacatggatttaatcgaagctatttattccgaatccgaccgcgaactcactaataatgagttgtatcgggaggttcagtctcgccttgctattccagatgatgcgttcaatgcaaaagaaaaattcggtacggcgggtgttccccataataaaattaaacaccgtattcgctggtttcaacaaaccctaaaatccatgaacgtcatcgagcgtttaagctctggccgttctctatggcgtcactgtcggaaaaacaaatcaggcctatccgaggtcagagaaggggcttgtttagtggcattcagtacagatctcggggtggcgattttaggcaactctacaatggtgttaccaggcaataccgagccggtccatctctgcctgacatctccaccgtatccactcagaaagcagcgggattatgccgcagccttcaaaaacgacagtgactatattgatttcatcgtggaagccattagaccaatcgcccgccagctggttaacggtggttctgttgtgctgaatatcggtcaggatatttttaatccgggtcagccttctcgttccctctaccctgagcgcctattactggccttgtgcgagaaactagacctctacctgatggaccgggtgccgtgggtgaatatgagcaaaccaccctcaccgacatattgggcctgccgtaagaaagttcagctgctggccggtcatgaaatgattttctggctgaccaataatcctgatgctgtccgctcctgtaaccagcgcgttttgcagccccacactgagagccacagcgcgttggttgccagaggcggagagaaccgtacgaccatctacggtgacggtgcccatgtcgtgaaaccaggggccttttctcaatccactgacggggctattcccaaaaatgtaataatccgaggccatgcatgtgctgacactcgccggtttcatcaggaggctaaacgcttagggcttcctgctcatggggcgatgttccctacggccatccccgattttttcatacggttcctgacggaggaaaacgagcttgttgttgatccttttgccggttctctcaagacaggcctggccgccgagcggctcaaccgcagatggatgtgttttgatagtattctggaatggttacgaatttcagccaccggctttttttctgacttcccgggatttgagatgaacccgattattgataacggtgagttgttcgcgtaa

SEQ ID NO: 23401 - DNA, 246 bp, Escherichia coli
atgaacacaacttttctggggcagagtgagtttatcaagcatgaaggtcttttattcttgttatctgacgaaagctgtttagctattaaccatattgaatgggctgaaaaaatattgtccagtgataatgttaaatatcaaaatggccggatgtctcatgaagtcgcctacgaagttatggaagaatcccaagatatcttattagaatatttgtgtctgactttaccgcaagttcccacccgataa

SEQ ID NO: 23402 - DNA, 648 bp, Escherichia coli
atgtcgacagagagcagctcaaaaatcacttttacttttaacggtaaggctcctcaaaactggagaactgccttgaatagtaaaaagaaagggtcctggattgatccgcaatccagcggcagcaaagtactgcaagaaatcctcagtaacaccggaattgatgcggacagcctgagcggtaatgatgttctgattttttcggtgccctctcagcgtgagattttgtctgaacttcttgggatctatgccgtttcagatgccagagtgttgcttattgccgctacgcaattctgcccaaacctttctggtgtgctggtaacaacccaccagcttctttctgatggcagttccgttgccagcgaacaaaaagctacacgtaaccttttgttcatgacacacaacggtatctgtattcagtgtgatttttctttgaatcttgatccgtccaaactacccggtgcccgtttctttgcctgtgaagctgatatggaacaagcaggtattgagcgctggggcgagaatggtggagatgcctggcgtgccgtagctacgattatgcatggcgaaaaaattctcctgaatggttccggccagatattaaaactggatgacaggccggaagaacgaattaacgctgtcagcaattaa

SEQ ID NO: 23403 - DNA, 174 bp, Escherichia coli
atgccaactaagaatgaggctttaaatttattagcggttgcgattcaggccgcaaccgacagtggtcttttcgataatgagatgttaggcgctgttgctaacgcagactccattaatgatttctgtgatgccgtatcttttttgtccggagaaaaaaacaaactccaacagtaa

SEQ ID NO: 23404 - DNA, 924 bp, Escherichia coli
gtggcaaagcaaaagttcaaaatcaccaactggcccacctacaataaagccctcatcaaccgtggctccctcactttctggctggatgatgaggcgattcaggcctggtatgagtcagcaacaccttcttcacgaggcagacctcagcgctattctgaccttgccatcacgactgtgctggtcattaaacgcgtattcaggctgaccctgcgcgctgcgcagggctttattgattccattttttctctgatgaacgttccgctacgctgcccggattacagctgtgtcagcaggcgggcaaagtcggttaatgtcagtttcaaaacgcccacccggggtgaaatcgcacacctggtaattgattccaccgggctgaaggtcttcggtgaaggcgagtggaaagtcaaaaagcatggccaggaacgccgtcgtatatggcgaaagttgcatctggcagttgacagcaacacacatgaaatcatctgtgcagacctgtcgctgaacaatgtgacggactcagaagccttcccgggtcttatccggcagactcacagaaaaatcagggcagcagcggcagacggcgcttacgacacccggctctgtcacgatgaactgcggcgtaagaaaatcagcgcgcttatccctccccgaaaaggtgcgggttactggcccggtgaatatgcagaccgtaaccgtgcagtggctaatcagcgaatgaccgggagtaatgcgcggtggaaatggacaacagattacaaccgtcgctcgatagcggaaacggcgatgtaccgggtaaaacagctgttcgggggttcactgacgctgcgtgactacgatggtcaggttgcggaggctatggccctggtacgagcgctgaacaaaatgacgaaagcaggtatgcctgaaagcgtgcgtattgcctga

SEQ ID NO: 23405 - DNA, 735 bp, Escherichia coli
atgaattttaacgacgagcagaataatgccagcgacaaacatgcagatgatcctgtgcaatcaggacagagcgaacaaaacacaattaggattcttaaaccaggatcaaataacgacctgattgaccaacttcgtggtgggcctctggacaaaacatccgttaactatgaataccactcaccggatcctactgaaactgcccaacgtcttgctttaattaattatttgtgtgccggagaagaaaaaatggtgccttttaatcctgttaatttgcttcaaattatgtcatctcacaagatggagacagatgatgttgcgctaatcgccggtaccgattctcttgcagtggagtcctggttccaggatggggtcgccagtgagacagcactgcacaacatcgcatgtgcggtcggggtatcgacggaatggattcggggctttgtctccggtaaagatgaaacccttaaggcaaacagtgaaggcctgacgaaagagttgcagaatcttccccctgaagaaatcgccgttctggcaaaaagcttcagtttgcgtttgaaagaaatcagcgaagccgggtcgatcgtctcacttaatgaggtttacaatagtgataccgaagagctcctagctatttatcggctaatgcctgaaacagaaagacaaaatctatatcgtgttgtttgtttaagacacaaagaactatcacgactttacgaaaaatatattaaatcttaa

SEQ ID NO: 23406 - DNA, 390 bp, Escherichia coli
atgttagagaaaatttattaccttgccctttttctgattgcgatttgcattattcgcggtttcgttttcgcatggagcagacgcagtccattggccctgacgttgaccatcagtgccctggtgatttgtctggctttccatactctggataactcggtagcaacaggtatggatcagatattgtccggtacaagggactttacacagtgtgacttcattgaccagcaatcagctgaaatcagcggtcgtggctatccggtcgttgtcctaatgtgcgatgacggtcaacaggttgttaatgctgacgtttactcacgacagctgatgcagaatcaggattgcaacacgttcaggggggtgacaagttgtcacttactgccagaaaagtaa

SEQ ID NO: 23407 - DNA, 318 bp, Escherichia coli
atgcaccatgtagcagagcatcctgaggaagaaatccgggctatcgagttatatacattgttgggccgggaaggcgtgcaggtgcgtctgaacagtctctctgttaaggctatatctcgttgggagcaagctctacctttgcctcctgattttacggggacaccatttgattttctgacggatgctgaacgcgaagaaaggcatcttttgttaatcggacagatgctctgcattgatgaacaggcagaggcccgcgagcgtatcaaacagcgtttagccagtcgtaggaaaggtagcagccagcaaaatgctgactga

SEQ ID NO: 23408 - DNA, 312 bp, Escherichia coli
atgattcattcatttgaagaaaaaaatcttgagaagttatttacgagcgggaaatcgcagtcagggcttcctacggatattactaacagtcttaaaagagcccttaatgagttacacgctgcgggaagcgaagccgacctgatccgtcttaaaagccgtaactatgaaaaaatccaccatacgcggttacgcgaacgtgaaagggcgggcgatatgtcctctatccgcgtgtcttcaaaataccgcctgctgtttacgtgggccaatggtggggctaatcgggtcaaacttaccgctcatgcccatgcttaa

SEQ ID NO: 23409 - DNA, 273 bp, Escherichia coli
atgtcagctaactttaattgtcagattgtttctaccgaacagagtgaggcagttataactggcgaagatgccgttactactatcttggaacaactggaatcagcaggcatccaggtggaatcacaatgccgttctggttattgcggtgcatgtcgactcaagaaaaaatcgggtgaagtgaagtatgataatgacccgctggattatgttggacaggatgaaatttttccttgctgttgtcgaccttgtggcttcctggtactgtatatttaa

SEQ ID NO: 23410 - DNA, 219 bp, Escherichia coli
atggcaagtaaaggcattgaaaaattagtctctgaggcaagtaaaaaaggatactctgtatttcgcaaaggagacaggatagagatttgtaaacctaacagaaaaatggtgcgtctggttattttacctgatggtacgggatacaggggagatgttgatctaacgctggcaaaagccatcagaacgcaaaagcaaatgaaagaggtactaggcctctag

SEQ ID NO: 23411 - DNA, 621 bp, Escherichia coli
atgtccgaccatgtgaagttttatgattactatattgtggaagggccagagattcaggctctaattgagtccttcgagccgatttcacagaagcggtcagaattaattaaagaagccatgacactcgttgaagccgtaggctgggtcgactcccagagttttggtgataagggggataaaatacagtcattcgtctggaaagcagatcacaaattcccgtgcgaaatcacgatcaaaagacgaagctatatggataaggtaccggtgattgtagcccgggggaaaggaaatacatcggatgggcgggaattcaacaaaaaactcgatgtaattattaaaaatgttaataacaaactcggtcctttcccatgctggtcttcatacataattaatcattttggcatcatgcacagcgcccacggtggaccagtggccaatcgccctttcgctacagctatcctgacaacttacggtggtacaatctctggaaggcaggatgcattagctttcgccatacctaacaggaatgatgggtataataaaccagttatcatccccccaaacttcaagaaactaacttatggacagttttacgacataacacacccccatcttgtttag

SEQ ID NO: 23412 - DNA, 156 bp, Escherichia coli
atgaagcgttacacagtaatactgtgtgataactttaggtttgctgattatcatgttttagctgaagacaactcagttgctgtcactagagcgatatcagaatactgctgggacgattcagaagagagaaaagaggaacggtgctcagatcgctga

SEQ ID NO: 23413 - DNA, 435 bp, Escherichia coli
atgcaaaaagataaaacaggcagtatcgaaccaacaaccttgggtgctggggggcatttccgcatcaaagatatgtttcggttaaagatgccctgtgctaactgccctttcaggaaagaaggggccatccatctgagccctggtcgtctatcgtccattatcgataccctgctaaaagatgatcacacaaccttttactgccataaaattgtacattctattgctggcgggcaatttgaagatggcttgtacaccccttcaacgaaagatgctatgtgtgcaggtgcagcggcgtatctcatgaaagcgggcagacctacaataggtatgaggattgcgtacctgacgggagcagtgaccccaagtgagtgggacaaagctgcggatatggtaattgatcctccctttgataaaaacagcaaaaagcctggataa

SEQ ID NO: 23414 - DNA, 309 bp, Escherichia coli
atgggaaacttttattgggcaatttgccatcactgtgatggccacggtagcatggacaaccctgcattttcagatggttttaccaactctgaactttacgatattgagccagaggaacggcaaaggatcgttaacggtgcctatgatgtcctttgcactacctgtaaaggcagcgggaaagtgaaagttccaaatatccgcgagatgtctttcggcgaaaaaagagcgttagtggaaagacggcgtgaacagcgtgaactggatgagctgagccaaatggaaaaaatggaacggatgatgggatgctga

SEQ ID NO: 23415 - DNA, 963 bp, Escherichia coli
atgacggcacaacaaagtgatgcgctgcgtgagattgctaataaggccagagttaccaccattcttcagtgtaaggcctggaaagatacccagcgaatactgaagcgcagcggactcgtgtgcagagaacggtcagagccgtttgatccggagaaacattttgactgttatacggtgcgttatctgtacctgcttaacataatggcacttgagctaaagtcagatacacggattaaggttgaggtggggcaatggtatcgcatgacgggtaaacgtttatcacttaatgtcccgccttttatgctgatcccgcgtaatatccggagaaaagtggacggattcagacaatccagacaatcagaagatgaagcaaccaaaaatccgcctcaaccgttcacgggcagtttgtataaggttttgagcagggacagcgattcggctgagctggacgcctggtttgctgaaccgccgctgacacggcaggaagtgtgggaggggaggcgtgttacagattttgatccatgggcgctgtcttcgtttatttgccgttcagaatccccgacgtttgaacttttttaccaggaatataagcgactgggattaaaatctctttttgtatcaggggtaatgtttgaacagtttttaacagggctaagtttcagaaaatatggggactgggttgaatctcagttactggaatcactgggaaatgtgatgtttttcatgctgctttatgacatggaaaatctggataagtttataaaagaactgatggacattaatgttcaaagtgaagattcgaaggaaaaagggaaatcacgaaaagagagaatgctggagtatatcaactcatatattcgcaatgtttatggaagattcctttgtacgtcaaaagaaaggtacgaacagcataaacgcaaaaacagcagcaaaaagaaaaacggttctggtggaactcattaa

SEQ ID NO: 23416 - DNA, 375 bp, Escherichia coli; identical to SEQ ID NO: 13684

SEQ ID NO: 23417 - DNA, 975 bp, Escherichia coli
atgaaaactcaaaacactccagctgatcacagcgacattctttttacccatatcgtgaatacgctggtggaccttgctaaacatgaaggtactttaatgacgtttgaaggccttctgcggaacggtatcggggtagatgaagagatgatggatagcatgctgggggtgagtcaggacatagctgctcagtgcgtggttcagctaagggattgtggcgccataacgagccctgcggtatatgagatggttacacacgttgaacaactggcgatgcgtttagccccagactggtggaagaaaatcgtgccatgctcggttcagccgctgcggtactaccaggaagaggctagggcaaaacgcgagcgatttattgtctgtcagagggagcgccagtaccccttcaacgtctacgtaacaggtcaggtagaatatccggaagatgacccgatatatggcacgtacgttacagaaggtacgttcctggtaggtaaagcgaaaaccatacatgatgccctggaatgcgcaaaagaagcttttacgcggggtgaatggattgtcctggaagaagaagggcgggatgagttcgttgaccacctgacaggacgtgaccaggggccggtgagtttttccgaaaggactatagagatccgcgatagaggtgacaggctggtgttaacaggcaatgcccgcacactggagtggcaccgccatgtaaccagccctgatgagatcgaaaagataaaagcacagcaaaaagacctctatcagaaagcaagctatgagagtggctgggacaactacgagactgcacgacagctgcggcggcaagctgaacagttatctctcggttttgttgaagaatgctggcgtaaccatccggaagtaattcaggcggtagagaagttcgagtatccggtgtttatagatgaggagatggctctttttaatgcagatcaggatgctggtattgactga

SEQ ID NO: 23418 - DNA, 135 bp, Escherichia coli
atgcagatcaggatgctggtattgactgatggtcagctggtggccgacgcgaacattatgaaccggaatcgcccggaacaggtgttgctggtcggttggctgtctatggccaccactttagcccatttctcctga

SEQ ID NO: 23419 - DNA, 378 bp, Escherichia coli
atgtccaggtttctgaaaggtgttggtcttggtatggcgggcattgtgttgctgctgtgcggacttatcgcgctgtattattttgagtcgaaagcagcgctcagagctgatatcaaggcctgtcccacggttacagctggtcaggcaaccgatgccgtcattcagaacatactcgggaacagagagcgtgttttctctaagccgcagctggagcgtcgggacatagtgattgaagaactaaacgtccagataggctattctggaacccttgtcccattcaggatcaacggtgtcgatgatcgccggttttttggcatgtcgggatgtgcctctctcgacactgttgaatatgccacagagtttttgacccagcagtag

SEQ ID NO: 23420 - DNA, 297 bp, Escherichia coli
atgaagataagtataaaggatgccccacccaggtcagaaaccataatccgcaacattatttacgctgtaagagcaacggcgataatgacggaatattatctgcgctcattcccggtcgtgtttttttatgtgctggtgggatttgcattagcatttgattccacgggtgtccctttggctaacctgctgcaacaaggaatgttaactaacattctgacctgttcggttatgggtaacctcctctggctgggggttaacctggcattaagaggtgattccgttttcaaaaacctgtga

SEQ ID NO: 23421 - DNA, 1068 bp, Escherichia coli
atgcgctgcaaaattagcaaaacctcgatctcacttatttgtctgatgctggtggccacctctgcggaagcagggtataaatccaatcggtcttcctacaaatcatccttccgcccatcgaccattaccaagtcgtacaactcttcaaccagaagccaggcaagccgcacggttaacgatacgccagcaccggctagcaccaaaccactgaccaccagccagaaagcgatgattgcaggttctggagccgcattaacggtcggggcagtttccgcgtcctcagggaataaaccgtcagagagcacctccgggaaggtggagaaccaggctggagggtatgatgttgtcagtagtcgatctcaggccaagggagataacgaaggcgctgctgcaggcactacgccaaagaaaccagtgagcgggtcggagctggtggctaagaaagggactatacctgcatcaagtccaacatccgaaaaatcgtcgtctctcccgtcgtctcagagcattccaggaagttctgagcggggctcttcatctgtaaaattcatcccaccttcacagaaccttgtaagtaacatcatagagaaagataaaagtaatcatttcggtttctcgcatcttgcgatgctgtactggataacgagcagcagcaacagccatgcatcctcgcttacatccagcgacaaagagtggattcagcaacagatagaagagcaggaaagtagcggtgcaagccgcgaggcagctatcaatgagctcaaagctgccggggtagatacctcatcgatgacggttgcggataacagccaacacgcgtcgactgtctccttctcctacgatatgccgacagaattaaaggcgggtaaggtctggacgttcgttgtaaatgccacatggaatgataaaaaacaggctccgtcatgcaagttgcaaggcgcaaaatttatagcagacaaagacaagttatacggcatgtggaaagcacctgaaactgtcgggcagaaaacgcaaatgaagtgtaaagcgtttggtgtggaagaaattaaaacgctggtgtcttcctga

SEQ ID NO: 23422 - DNA, 348 bp, Escherichia coli
atgtatagccgtttcatgaacgatccacttgatgaggaatacctggtttcccctggcattgtgggttcctatgctgatggtgaaatcccggcagaagagattgaggtaagggaggcggtaatacgattcaaagtcacaggcgatcaggtgttgtccatgaacctgttccacaggctgtttcattaccagcgttacagtgaggttagggcatcattcaacaaaagcaggttagcgctggtggacgtggttaatcgttccccattccacaaagcagcaatgcggcgtatctatagtgatttgccagagcaaagcattgcccgtagggttctggttgatttcattggatag

SEQ ID NO: 23423 - DNA, 357 bp, Escherichia coli
atgacatttctcaaatctctggactcgtcgccgttcatcgcaacatatcgttgggcggggtcattcgatggacggtatatgccacaggcatattcgcttttgctggaactgaatcaacacacttatctgccggtggttaatgccgagtttgatatctgtgtcatcagctgcggcaaagagtggtggtgcttcaggctagtggatgtgaaatctgatgaacgtcaggaaggaatggtagcccggacggcataccggttaaaccagtcaatggggattgctgagcagatggttaacatgatccgcgcctggcagtccgttccgtaccttaatcctcctgcatctgactactttagctaa

SEQ ID NO: 23424 - DNA, 774 bp, Escherichia coli
atggacctgaccatgttgtcgaccatttttcttgtgttcgtcatgctgatcctgtcatgcatcatcctgtgcatctggccgcttatcagtaacatgttcagcgagcagcgcacacgaaatgcattaaaggaggtgttagcagaccttgaagggacgcttatatctgacattaccctaccgctcaacgcctcccagacaacgcagatagaccatatctttatcagcacgaagggtattttcattatcgaagagaaaaactataccggtgacatttatggtggtctcgatgataaaacatggacggttgtatacggtttcggtaaagcgaaacataagatgttaaacccgtttgttcagaacaaaacccacatatccggagtgtgtcgggccataaagcggggtgatgagggtattgttaatgttgtgttactgacgggctccagtaagtttatggtagacccagcaccggagtggttgtgccgtaattgtgatgacctcgggaacaagttcactgcgtacgatgctgagcccgtgtttagtgttgaggagactggctggatcgaaaatgacctgcgtaaaacaatgctgccgcagacgctgttgaccgatctgggtcacgtctattcactgaaactgaaacaccgacaaccaatatctgtaccgcacagggtgacctattttacgctactgactaccaccctgttcttccgtgcgctgaaaaagttattttcgcgtaagcgctcagaggtcatccacaagcagtaccgtgaatag

SEQ ID NO: 23425 - DNA, 1137 bp, Escherichia coli
atgtttaaaaaaagaccatcgaaacctgaaacaggctcggttcaggacgtggtatcgcgtgaaagtaagaagttttaccgtttgtataaatcgcatgtgttatcaaaaataaccctgacgattattggtattgggtttgcaggttttagcggctggtccatgtatcaggataaacagaaaaacggtaaaggggcagaccatatcgcggttatccgtatccatggtgaaatgggtactggctcgcctacaggcgacggtgtcattattgcccgcgctttacgtgaagcatgggataacccgcacgcaaaagcgatcctgattgaggccgaatctggcggcggtggtccgtctgacgctattaatatttatcgtgagataaacgagcttcgcgacaccctccatggagtaccggggctcacaattgaaaactccgaccccacaacatccccgaataaaaaggacatgccaccagcgccctctgaagcggttaaacaggcgttgctgaaagccgtgggtactgggcatggcaaactgccagccgccgcccgggacgtccgccccatcattgtcagtattaaaaatatgtgcgcctccgcctgttattacgcagcctcaccggctgatgcgatctatgcggatcccaacgccatcattggcagtattggcgtacgtatggaccactgggatgtgtctaggattatggaccgtctcggtgtggctaacgaaccgttgacggccggagcctggaaggcctcgcttgacccctggcgtccgattgatgacgaaaccaaggcctttctgcatagtgagttactcaacaaaatgcatgaccagtttatcaatgatgtcgaagccggtcgtaaaggaaagttactttcgcgtgaacaggcggacaaagaacagctctacacggggcgtttctggctgggtgaccgtgcgaagcagtttggccttatcgatgatacagccaccagcacagaggtgcgtgaacgcctgagtattgtctacggcaccacgcgttttcgcgactacaacgcgccaaaagcatcgttaagcagcatgttaggattgtcactggacgtgaaccttaaagaggctttatccagtgcgcttcacaccaccagcacagtgaggtag

SEQ ID NO: 23426 - DNA, 675 bp, Escherichia coli
atggctggaaaggatatgtcggcgcagagaatgacgatgatccggtttggattagggttgggtctgctgatttattttctgtttaacgtttacctggaagacactaacaaactttataaggatatcaccgctgaggtgaacgccagtaagttgcttatggatgtggagagatggcaggaggtaacgcgtaatacggaaaagacgtttaattacctttttgtcgaactaaacattacggcttacctgaataagactctgttgcccgaggatgataaaaccaaaccggcacgcggaatgaatctcgcggcaaacaaattcatgagcccgagctataccgctgcccgaaacatccccttaatggtgtatcaggcgatttaccgctggtatttgctggctggctggttttttacgttcctccccctgatgatagctctggcactggatggttattaccagtggaaaatgaagagatttgtttttggcgatgttacaattcagctttatcgcctctggttccgttcgctgtcgataatcggtgttttgataattgcttatctggtcatccctaacctgaatttattttatggactgacacagtattttccgccacttgccttggcgttgctcgctattgcaattaaccggcttctcgcgcactaccaaaaactcatgtga

SEQ ID NO: 23427 - DNA, 1098 bp, Escherichia coli
atggaatgcaaacaggtatcaagggaatcgttattcggtatgaattcctcccagcccaaatacatttcacgtgcaaccaagacactgaaactgtatggcatagatgttgatgacgaaggcctgccggaactactgtcacgttatgcgaagaagcttactggtgacatttccaagatctacgcccaatacacggttgatagtctcgacgtgctggcccgcacgctggcggagttttttattatccgttatgcggtgactatcgttacgcacgatgatacagaggtcacctgcaactggtctgtatcccagggcccttttaccgagtggctcaaggagcagctgagtaactgcatggcgaagacccacacggttgaagtgcagattgataaaaatcaggaacgcatggctttcatccagctcaatgccgagcggcttggctggtacctgctgcctgagtttattgatattgcaggcttcctccctgttttccttgagatgcctgaacaggttgaataccaggtaatgcggcgcaagcgacacggtaaggtgccatacatccaccagcacgatctggggattttcgaagaggatgctttgatatccggtttgaaagaaaagttacttttctggagtggcaacctgagcgatccacatgatgaatacacgtctcttttcaaccgtgttatagatctttccattctgggtaaccgccaccagcccgcgatgtaccgtaaaagcagcattattcagtcgttccttgatgaattttccgcctcggtgctgactcttcccgttcgctttaacgacgatacccttatcgcactctggacgccatgggcagagccctttagtcagttctcgcgcttgcggccggttgaagaagatatggtatacacgccaaccccgggacaggtgcgctggaaaaatgaagatgttcgcagaaaagtaactttttctctcatctcccggttaatcgcgtcggatgacctggcgtgttcgggaattcttcacggctggaaaaatcattacctcaacagagaaagcaacattcgcctggcagccctttgggcagagctgttcactaataaaactgactga

SEQ ID NO: 23428 - DNA, 2127 bp, Escherichia coli
atgaaacgtagaagccgtaacaatctccatacgcaggaaatgctctaccgccctgcccttgaatttcgttcagcgctaatactcatacttttttctgcttacgtgcttatagactcatggaccagtaagtacggtatcagtgaaatacccttctattgctctctggggttaatagcgatggcaggatggagggtatggcacggggtaccggtcttcatagctcactggcgattatttcatcgcacgatggattttttatcactagaagattttcgaatgattaataatgcacatttttttgctgatgaccgtaagtatcagaaactggtcagtttgcaggagtctggtggagcaccatcgaagaaaagtgtttacaagctccttcgtaagaaagaaaagattgtgatcccccagcgtacaacgtttctgtgcaatggtttcaaatggggaccggagcactctgaacgtacctaccaggtgcacaacctttccagtgatatgcatgaggtgcagttaccgtttatattgaatcccgttacccgtcactatcgaaaacttgccttcgacctgggcgggaattatgcgattttcggcgttgataaaaaaatcccgatattcgtcaatgaagaaaatttctttggccatactcttattacaggaaacgtaggtaccgggaaaacggttctccagcgccttctctccagttcaatgctacaccttggacacatcgttctcgttgttgaccctaaaaacgactatcagtggcaggaagggttaaaggaagaatgtgaaagtcttggtaagccttttatgcatttccacgcaggcaatccttcaacgtctgtatcttacgatgtcagcgctaactatgttaaggatacagacctttccgcccgtattatgagcattatttcaggcactgaaggaggtgaagatccgttcgtgcgtattgcagaggggcttgtcacaacggcgataggtgccctgaaactgggtggtacaaaaccgactatccagaatatttactacgccatacgctctaaacaggatctcattgttaccactcgtaacgctctcaggggtttttatacttaccatctcggggctgactggcatttaactgttcaggtatctccaaatcttacttttgcagacgaaatcgaaaagctgaaagaatatttccactgcaactactttgaagacaattctcccaaaaacatgcatggcatggatacggttctggaatgttttaaatacatctccggcgatgaatcgcactattacaaaatcactgccagcctgatgcctatgctcaagcgattgtcccagacccctatggatatattgctttcggcgaacgatgtcgagaaccctgagcgtaacatcgttaacagccatggactctttaacagcggtggcgtgctttacatttcgctggacggcctgtctgatccggcaacagcacgggacctctcccagctgattacttctgatattgccgctgaggcgggtagtcgctataacacagcatctgatttgtccactgtgcccagggtttccatattcattgatgaggctcatcaggcagttaatatgcaactgattaaccttctcgcccagggacgcgcggccaagatcgcattgttcatctctacgcagaccatttctgattttgtatcggccaccagcgccgatactgctgaccgtttaacgggcctttgcaacaactacatttccacacgtgttactgacgcgaagactcaggagcttgttctgaccaaagtcggccagactaatgtctcaatgaaccaggtcacttacaccaccagtgctggtacaaaacagtcacatacagatttcaatggttccatttccgagcgaaagtcgacaacgatggtaaatgctataccacaggaattactgtcgatgatcccaacccttcacttcatcgcctgcttacaggacgggcgtaaaattgtgggccagatgcctataaccgtgccgggcaaatcaatgcgtaggtcaacaaccgtctttgatatggtaacgacttcgccctacaaactaaaaatgagacgcaatctcaatgtggaagaaatacttagcaaatcacagaaggtgggctaa

SEQ ID NO: 23429 - DNA, 2064 bp, Escherichia coli
atgctgtcggcattgggtaattatacaaccagtgatgattttatttctcgttgcatgagaacggccgactggcattccaccggcaccgataccagctaccggtatgataaacaatccggtattcgggcctctgatactgctgcacgtgccatcgcgattctgaaagacaacatcagtactcttaatatcaatggtttcgactcatcgtcagtaagacatgacagaaactcaccgcctccggtacatattatgattatcgggggctatatagagccatacggtgaacaacgggtcgctcactttttccatcgcggtgactttacggaaaatgacatacaacgaatgtttgatgagggtatcaaaggcctgagctggttctctctcttaaaaataaaatgggttggttttctgtttaaatacgatattctgcccgaaagtacgccgggtattttcagtattaatgagactaatgactatgtttttgtcgaccgcaaggggaatgacacgctctatgtacgccctctttcgcatggtacaaaatcaatccgtcttggaataactcaaaccagtgataacgcttcagtctcaacggctgacacacaacgtgcagcggaaagtaacagtacagtttcagatactgataatactgctgattctgaaaatgatgaggcgacttccggtgagaatcagcaggttcaggaaaacacaaataaaacatctcttagaacagatgcatctgaacctgagacacaagaacctgattctaaaaaacctgttaaaacccgccgtaaaaagggtgaagtgagtcctgatgagtacatttccagactccagcatcagttcaaaaataatgccattaatgctcatgaactggctttaatcgatggggtcctgtatgtatcagaaacacatattcgctccatagcaccgcttgaagagccgcgcttaatggagaccggtctttttgttctttctttacggtcaggaagtctcgatgaagaattcagtattccgtgcaatgacgggaaacgatatgttcagttaaatgacgaagtatcgcttgtccagttacgtcatcaacctgatattagagaggttgagatgctgcctttgctttctgcagatttatttggtggggttaagactgatgatgaaggggtttctttcacttttccgccgcaactggctaaggtgaatcctgagccactccctccggaacgttatgaagagcaggcacctgaactgaatcgaactgaacatgaaccgactgacataccatcagcggaatatcccgatgcgcaggaagatgatgttgaacaattctgggtggattacgcttcatattcatacggtgatgactgtattaacagtgagacaggcccgataaatcaaacctgcgagagcgctgatgttgatgtagcacaggacaaaaagtcactttcagatcgtacgccggataatagtacctctgttcacgaactccctccggcagagatggagcatgatttcgagctaacggaagacgaagtgcaagaggaagattctgttgagggggtcgttgacattaacagcgattttgaagcgctgtttgcccgtcagagtcaaattatcactgatccggctgtcgtcattgcacacagccttgagcagttaaaatccagtactccaccagatcagcagcaagttgaaaccagtaatagcgatacgctttcatccgatatcgacacgattattactctcttaaatcgtgtcaggaacaataacaattctgctcatgtaagagtattgctacgggtggttttggtaactgatataaatctttgcatccgtcttcgaattctagatgatgtcggatcctggggttttaatcaggaagaaatcggtcaactcaaactatcactgtctcattttcctgtagcctcgctaaaggtcacgataggccaaccaattcgacactacatgatccgccttagtgaccttcaacaaggtgctctgcgcaataacattttctacgaagaatttatttcgttttttaatcatcaggaagtaagccatgaaacgtag

SEQ ID NO: 23430 - DNA, 777 bp, Escherichia coli
atggcatcttctttcagtgatgctgaaattcaaaactttggttttcgttttggttttatcactctgaccgaggaggactataataatgctctagctcactctcgtgagctaagaaagttactttcttctttaaataagcaaactgtacggcgtaacaacaggctaactgatcgtggatctcgtattcatagtagaaagcttgttgaagtacctatgggtgcaacctctgtgtttaagaaaaacggggagggatacaaaaggactgatgtaggtgtaataaacctgcgtgatatctctgtatcaatgcatgacgtatcagttttagccttaaaagcaaatcttgcatttacccttgcttgtgaatcggtgaacaatattgatgttgctgatcttgtttatccagttcaaaaagaaggttatatagatatacttaagttttttaataaatctgtatctagttgcttttcaaattatgaaaatgtttctagcggattacataccccaactgcgacagcgattaattcatgcgtggaatatttctcacgtttgaatttctcacgtaaagttatctttattgcgactgatggtgacccatctgaatcaatagatgatgtatgctcagcagttaaaaatgctaaaaaacatggcatagatattgtttgtgtcggttatggcattgataaacctctaggctttgatggtgtttattttaaaaaaataaacgatatctctgaattaaattctttgtataaagatttaatcagaagcctagtttaa

SEQ ID NO: 23431 - DNA, 231 bp, Escherichia coli
atgaaaggtaataagtatattaaacgtgttcgcgttgactctcgtcaattagacagtgggatgattggaaccaaggtatacgtcacagaaggggaagttgttaatggaattatgccggttgaacgattagttcgtgatgccacattttccgaagacaattccgaagcaatggattcagcagttgaaagactggtggcgaaatatattgctaatggtttcgaagtcttataa

SEQ ID NO: 23432 - DNA, 1245 bp, Escherichia coli
atgagtcattctacaaattataattcaccggctaaaacccctatgcagtacgcgcaagaaacttttgaccttgtcaaatctcatgtgcagcagctgggtggatggcgtaatgtattaacgtactatcctgagtttcaggaggctttagaaaaagctccacgttctgtcaaatgcccgtttactggtagtggcaaaacgaaattcagatttaaagataggacgctagaaagtgttcatgctattcatgaggattatccccataatacttttattgatggcattgatttaattgctgaactaaaaagcattagtaaaacgcaggctgcaaaaaacattcttgaaatgcttggtgtttccaaggatagaaagttaactgaagccgaccgtgttaatattgttctttatgacaaaaaagctcaatctttttcagatattggtgaggaagagagacttagtcgtataaataagttagaagccgtgtataaatacacaaaatttgtgacacccgattcattggttgctcgatatctatcagggcgcggtataaaacggatgctcacaaaaattccagctagtctggggtttaatgctaagatgagatactggcccggttctaataagccagccagttttcatccaacgatggttgctatttttaacgataaattcggtcgcaattgcactatccataaaactcatcttactgatgatggacttaaaaaagctgatgttgaaaacccaaagttaatgatgaaaccggtctaccagatgaatggtggttcgatgcagttatttaaaccaacttactgtgatgaaactaaatcatggtttttgggggttagtgaaggtattgagaatgcgctatcagtaactgaggcgacttcaattccttgctgggcatcttcaagttcaacatttatggaaatgctggaaatacctgagtatttaatgccaccttctgattgccaatttattgaattgtcgatttgggcagataaagatcgggtaaatccaaacaccggtaattcagctggtgagtctgctgcacgtgttctcaagagccgtatggagcccttacttgctgaacgctatcctgaagcaacagtccgggttgagattcatttgcctgaactggatatacctgatggtgcgaaaggtgtcgattggaatgatgtattaatgctcaagggtcatgaagctttcccaggcaaactggaagaaagattttttgacttgattaaataa

SEQ ID NO: 23433 - DNA, 540 bp, Escherichia coli
atgaacgtttattatgattatgatatcgaatcggtttttaactgggttaaggaacacttcattctgaagcattccgcttctcttgttaatagcccttggtatgactacgacatagagatagatttgcgcttagttaagcaagcgttgataaatggtaattttgaatttttatatgttgttcgtgatcatggcacaatgttgcttttgctttctgagtttcactcctccaggtctctagactgggaaggtagcgagagctttgagtactatcattgtaagatgataagtaaacaaggtattaagttgaccaaaaaagcagcaggtgaacttttagatcgtgggcctttactcaactccttcagtgccggaagtaaaaactcctatctgaaagagattttagagtttgttaataataaaggctttaacttttcccctgcaaagtcactttttgactgtaaacgcataggagacgagttaaaccttccctcaatgagtaacttcatagcaagagttgagaaccatatgctccgtatgaactaa

SEQ ID NO: 23434 - DNA, 219 bp, Escherichia coli
atggactacaaacacgagtgctatgacctggaaaagttacttttggctgatgatgagtttctgctctaccttttggggggggagaatgcagaagctttacgtagtgacttacaaatacgctttaacgccggtgagcgacttataactactcaagaatgccctgaattttcacctgtcaagggctgccctgggcacgattgcgagactatcgatgagtaa

SEQ ID NO: 23435 - DNA, 609 bp, Escherichia coli
atgagtaacccgtttgatctttcaatgtatgcattagtcggcgtaatggctatcatagccgttgcatctacctggtatccaaaagaccgtaaaattaacttttatattttcctgttgagtatagtcacttttttgggactggttgttttgggattccttaactggttcattgaaggctcagcttatggggctcttgtcagctgcgtatgtattattttcctctgcatgacccggctccggttgattgtgtatcgctataacgtgaagtcgagtgttaaacgaattgtagcttccgttaaggaaggtaaaagagtggcttttattgcgcaccaaaatttggagctgagggaagtcgtggtatcaatgttcagctcaatgcttccagagcagtcgcgtgttatacatgggccatttggtttcggaatggataatgagattgaattcattaaacagcgaaacagtgcagatgaagggtatctcgttatttttcttaaccagcaagactcttactcctggttaaaactcatcgcgggtgaatcacctgaaaaagcgattgcgtacaactttgacttcatccctgatctggagagtgaacatgaaactaaatga

SEQ ID NO: 23436 - DNA, 243 bp, Escherichia coli
atgaaactaaatgagacgtctggcgtatgcgaagatgtgcatctaaatacatttgtcatcgacccggcaacagcccgacgttttgagtgcgttaaagagatggttcgtaagcaggggttcaataacatcacggagccggaaatcattgatgccatattgtctgaaataacagctgcagatgcagccggaatttttattgagtacaagttaaaagccaccaaacctttgctttctacagattag

SEQ ID NO: 23437 - DNA, 465 bp, Escherichia coli
atgagaaccagtaaattgaatatgattttaaaagaagaaattgttttgggtatctacagctggcttcatatgactccggtcagcatgctggtaagaaacataaccagcgatcagggaggggattacgcgatcgtccgctttaccgtcgatagccggggggtccagatggggcctaaggcacagggccagcttctttgttcattcgggtttaatgtaaaggaatcctgtgaggccgaccctaaagacggtccaggcctcataaaggccgaaatgatgaacggtgttatgcagctggtaccggaatgcattgagctcacagacagccaaacccaggcaatcaggaaagaagtaaccgtgtttaacagggtttgtgcaatgcaactcctgggggggcatgggaatgcaaggtctctgtgggagaaagaaattcttccccgcatgaaagtgcgcagacaactacattga

SEQ ID NO: 23438 - DNA, 408 bp, Escherichia coli
atgagcaaagtgcattgtattagtggtattacctggaaaaactccgatagcgcgtctttcaaagtatatgccagcattgctgctgtattcagccttggcctggtcacagctaccgtcaggaactatgaaattctacaactgactgttccgtatacctggtatgttttcttcactgcattctggcttctgttcccgtcctttacggtctctttccgggagcgggaagggcgtctgtttacctcgatgggtttttacgggttaaaactgttcactctcgatcgccctgtctccgatgggtactggctggtcacgatggagaaaaaccgttatcgcctcgtcagagtatgcagggacgggcgacgccagcctgtatggctgacgtttaagtctttaccagagtttgtttaa

SEQ ID NO: 23439 - DNA, 960 bp, Escherichia coli
atgaatactgactttgcccattacaacgaagagcaactacgcaaactcggtgagctgcacagtttactccgtcacagcgatatcggctcatcttaccttgcctcgctcccggagccccgtagtgttgaggagttgaatccgccacaggaaatcaatgtgactcattcggtacccgacgtcgacaccctggtggatatttaccggcagcagcgggttgataaagtccatgtcagggatgagcattattcaaccaaaatcacccgaaaataccccgggttcgttgtggtcagaaacaatcatgatcaggtgatgtcgctggtgggtgaaatcaaccggcttcgtgacaaatttgctgatgctgtaaaagctatcactcattaccaggactcccggtcagaaattctgcaccaggtttacccgtggctggtgactttacaggtgtcccgtaatatccggatcgttactgagcaaattcgctccctggggttcacctggcaaatccctgtcattcataaatttacccggctggaaacggttatcgaccgcttacgcagggagataactgagctccagccggatatcagtctgacaaaacaggatgttaaacggctgaaacaggaacgaaccgaagaaatcatgatgctgtcgttgctcaatgatgaagtgagtcatgacgatgaaaatttgagaaaatttcggcttatccgggaaagtaactttccggctgttaacgtcaatatccggtacaccagtcctgaagatccagatgatgttcatgggccgtacaaactcaactttcgcgcgcctttaccattaattttgttcagcgaaccgggccggtttaatccgttaaaaaattacgtaaaaggtgaaaggcagaagcgcggcgattttaatgaaaaatatcgttctgtcctgccccgtatagggctggtggaagtcatcagggagtcaaaatga

SEQ ID NO: 23440 - DNA, 759 bp, Escherichia coli
atgagccggattttaaccgggatttgtgaagctgatccggccaggaggttatacaaagtggccgtcagtaggggaaacacttttctgtctgcaaaagaacgttttcgtgtacaggtctgtttcaaaaatgccataacacatccagatgaagatcggctgctggccgagctgttgactgttcatcacttcctggctgacacctctattttatggcatatggagcaaaaaacttatgcatgcaccacgacatgggccaccacgtccacatggctgccagagatatatcagcgtcaggccagcacgcccaatgtggtaaagattatcaaatttatgcacgcccggtttccaggccttaaaacggttgcagaaacaaatgagcagggttacgaacaggcgcttatcagtgtggattttgaaattccttactggccggtgctgccgaaattcgaatctgatataggaacgatacaggtaacgattgccgggatgatccgttacacagaaacgatgagcaataaagattgtaaaacccctctcgacttaatgataaaaagttttaagtcagggttgatcccgatagagaaaatgccgttgagtaagactgaaaggcttatgcctctgaatatcaacaccgctggtaagatatttacacacgcgacatggccgagatgtcgttacattttcgtaccggatgaggcgggagtaatgaaactggttaacgtggtcaaattaagattaaagcctctggaggaaaaatga

SEQ ID NO: 23441 - DNA, 324 bp, Escherichia coli
atgacttacgctattttcttgttagtaactgctgtttgtgcattcggattaaattatctgacaaacaaaatctgttccggtacgggtatgattaaccagagtggaggctctaatgtacacgccttacggtgtatcacatcgttcctccttctccttgtctcactctggcttcctgtcaaacctgccgtgatcaatctggcagtagagtttgctgcactggtgaatttcattgcatctgtcactctctataccgttgcaaatttccgggcaaaacggagattaaaaaaacaaagaaaagaagaaaaagctgctcaaaaaggataa

SEQ ID NO: 23442 - DNA, 318 bp, Escherichia coli
atgaataataaaagaacgattaccactcgagagcagattaaaattaatggggaaattcgtgagagaacagcaacccatattgttaccggtgctcatgggtacgaaaccctttgcataagtggttatattgtcgaacataacgagatgggtgaggttatccataacagcgaaaagttagcggaagatttgttacctgttacctgccccacatgcagggtcatttggtatcacacccatgaatttacactcgatgattttgacagtctttcaggaaaaggggattttgttgtgacagatttgaaagaactgaatatctga

SEQ ID NO: 23443 - DNA, 1137 bp, Escherichia coli
atgacagataaaaccaaactggttgctatctcacgaaccgatgacataagtgctctggatgcactcaagctgttgcggtttcgccggtacaatacggccagaagtcagttaagggtcacgagtgtctggtctgcatggtgcgccaggcacggtctgacccccttcccggtcacagcggttgatgtcgagcgctatattaatgggctgaatggatccgttaaaatggcgactatctctcattttattgcatgcctttcaagcgttaacagcagcctgggttttccagacttccgcaacgttctgataaaagcactggttcaggtatggcgggcgcgggagaatgagaaaaaaatcgtcaccggtcaggcccttccatttcttatatccgatctcaatattcttcgccggtcgctgcataaaagcgacgacctgagagacatacgggaccttgcaatgatatgggttgggtttgaaaccctgctgcgtaacgtggaaattcgaaggattaaaaccggcgacctgaaatggcaaaatgacacgtcctgttaccttctggatgtcatgcggaccaagacaagcctttcaagtaacctgacatttcagctctcaccacaatgcagtcagcatgtcagacggttgattgagacggtggaatacaccgataccgaaaccttcgggcaccgttttctttttcagcctgtaaacatccatacgaaccgatatttcccgtccaccagcagtaagctatcccggggtaaatccatagacaggatgctggtcaaagcaggattcagtgaggggttactgacgcagttacagaatgaatcaaaggtatcacgggaagatgttggaatgctgtcctctaattcactgaaccaggcatttgcacgcctctgggggattgccgggaaggtcagcgacagtaaccgacagtccgggcggtaccggacatggacaggacacagtgtgcgtgtggggggagccatagagctgtttaaggccgggtactccctggaaaagattaccgagatggggaactggtctgatccaaagatggtcttccgttatatccgtggatatcttgccagtgaaaaagccatggtaagctttatgcgtaatcatctggacgacatatag

SEQ ID NO: 23444 - DNA, 255 bp, Escherichia coli
ttgttgaaaagcccaaatgcgcacagtagcctgagagaaacctatctcctgaagttcagaaagtgcagtacgactgaaacccttgaccgagtgtttgagcgtatcctggataaattaaatgatgaaggtggggatatgaataagataaccagcctgaacggagcttatgatcaccgcagggctgagatctacatgaaaaaaaactatgacaaaatacctgcttccatgtggcatctcatccccgatgagatatga

SEQ ID NO: 23445 - DNA, 1068 bp, Escherichia coli
atgcgacgtaatgcacaaaaatggatcccgtttggatttgatacggattcaaataaaattgttgatatcgccagcgttgaaaatgggctttcgtgtaactgtatctgcctcatctgtgggacctccctgattgccaaacagggtcaaaataaaaaatggcattttagccacagcacagaagtaaaaggggtttgtagtgagctcacactacaacatataaaaaaatacataaaggtgaaaatacaggaaaaaaaataccttgctctccctcatcttctgcagggtaaggagaaagggatagttaacctcaaaaatctcgctggtggtgggattgtttgtggccttaatgctgacctcacagggatatgtaacgatacgacaatcgggatatttattaatgatacgtcggaggatatccagcccaatccagacctgttagcgcaaacagaccagctggcgctggtggagatcgatgccgttcggattgaaagtatcatcgctccatatcgtgagaatggggaaggcataaagatgatggatgcgatagaaaagttacttttcgtttctgaggaagcgaaaaaatggatctaccatcctatgatgaagaaggttaaacaccatactttacaccagtaccggcgtgagctgtctaccagtggaaatcagatccttgctttaattcctcatgaacttccgataagcatgaacgccctcccatcctccccggcacagcagtggcatcaccttcgagccacgattaaccttctttgtcgcctgagccgttctgatatccctcaaggcagtattgcctttgaagaactggtttattatatcccccggcttctggaagcatctgaatctatcaatgttgccgcctacgaacgatggtatgacttctatatacggaaaaaaggagagggtgtactgaatgaggctgaaattgaatttttgtcttttatagtgaaaatcattaactggaacttgtccatacataaccttcccaccttcgatagcaagcaggcctttcgggattggtttttgctaaatgatcctaacaagtcgctatag

SEQ ID NO: 23446 - DNA, 147 bp, Escherichia coli
atgaattcccagacaacaaaagatattccctgcttccgttcttatttgcctgatgcactgcgtttaagatttgaagataaactgaccatccgggccatcgctcagcgtctgggtctcagtcattccacaatacatacgcttttttag

SEQ ID NO: 23447 - DNA, 774 bp, Escherichia coli
atgatttacactaatcagcttcgttacagtggcaaagatggcgtttactttcatctacaaggccaaccagataatttcttgtcactatcagcaactgaaaacatggaatttgatagccctatgatggttaccactcaaaatatgcaatcagggcagactgtaacagataatgttcaaagagcaccaagaactatttcaatcagtggtgtggttgtggttggtgaatccggtagtatccttatctcacgaggtaataagctggtggagaacttcatcgacacccttgaaacttggagagaccagaaacaaattatttcagtgatttgtaaagatggtatcaagattgatgactcaattattaccaactttaaagcctctaaagatgttactatctctaacggtcttcgtatccagctaacttttcaggaaattaactttaaagctattgtaggtcaaactgatgtctcagcagctactggaaagacttctaccacaaatgatggtggcgctacttctaagaagaatgcgggtaacgtgactactgaacgcaataacgcacctatgctgatgtgtcaggaactgtacagttactcagcgtctgagctatctgatgaagcattaaaagcccgtagtaattgctctaaaaatgtcacggtgaaagatggtgtaagcaccttcacagactcagctaattcaggtgctgcaaaggtactcaagtcgggtaatgctttacggaagttttctgtgaatccgaacaagaagggcacttattga

SEQ ID NO: 23448 - DNA, 237 bp, Escherichia coli; identical to SEQ ID NO: 2051

SEQ ID NO: 23449 - DNA, 789 bp, Escherichia coli
atggcctatcgttccgcaccgctctatgaagatgttatctggcgaacgcatctccagccgcaggatgctgggcttgcacaagccgtgcgggcgacgatcgccgaacatcgtgaacatttgctggagtttatccgcctggatgaacccgccccacttaacgccatgacgctggcgcaatggtcatcacctaatgcgctaagttctctactcgcggtctattccgatcatatctaccgcaaccaacctttgatgatccgcgaaaacaaaccgctgatctcactgtgggcgcaatggtatatcggcctgatggtaccaccattaatgctggcgctgctgactcaggaaaaagcattagatgtgtcgccggaacatgtccacgttgagtttcacgaaaccggacgcgccgcctgtttctgggtcgatgtgtgtgaagataaaaacgcaacactacattcgccgcagcagcgaatggaaacgttaatcagccaggcgctggttccggttgtgcaggcactagaagcaacgggagagattaacggcaaacttatctggagcaataccggttatttgatcaactggtatctgactgagatgaaacagctgctcggcgaggcgacggttgaatcgctgcgctatgccctcttttttgagaaaacgcttactaccggtgaagataatccactctggcgtaccgtggtgctacgcgacggcctgctggtgcgccgcacttgctgccagcgttatcgcttaccggatgtgcagcaatgtggcgattgtacgctgaaatga

SEQ ID NO: 23450 - DNA, 678 bp, Escherichia coli; identical to SEQ ID NO: 2048

SEQ ID NO: 23451 - DNA, 726 bp, Escherichia coli
atgttgccaggatgctgcaaaaatggaattgttatcagtaaaatacctgttatgcaagcagggttaaaagaggtcatgaggactcacttccctgaatatgaaataatatccagcgcctctgcggaggaccttaccttattacaattacgtcgttccggattagtcattgctgatttggccggtgaaagtgaagatccacgttccgtttgtgagcattattactctttaatctcacaatatcgggaaattcactgggttttcatggtgtcacgctcctggtattcccaggcagtagaattgctcatgtgccctacggcgacgttattgtctgatgttgaacccattgagaatctggtcaagaccgtacgttccggcaatacgcactcagagcgtatcagcgccatgctgacctctccggcaatgactgaaactcatgattttagctatcgctccgtcattctcactctttcagagcgcaaggtactgcggctattaggtaaaggatggggcatcaaccagatagcttcattgcttaagaaaagtaataaaactattagcgcccaaaaaaacagtgcgatgcgtcgactggcaattcacagcaacgctgaaatgtatgcatggataaatagcgcgcagggtgcaagagaacttaacttgccatctgtttatggagatgccgcagaatggaacacagccgaattaagaagagaaatgtcgcactcatag

SEQ ID NO: 23452 - DNA, 771 bp, Escherichia coli
atgcaaactgagcaacagcgagccgtaacacggctttgtatccagtgtggattatttcttttgcaacatggtgcggaaagcgcgttggttgatgagctttcctcacgactgggtcgggcgttgggaatggacagcgtcgagagttctatctcttcgaacgccatagtgctgacaaccattaaagatgggcaatgcctgacatcgacacgtaaaaatcacgatcgcggcattaatatgcatgtggtgactgaagtccagcacattgtaattctggcggagcatcatctgctggattacaaaggcgtagagaaacgatttagccaaattcagccattacgttacccaagatggctggtagccttaatggttggcctttcctgcgcctgtttctgtaaactcaataaaggtggctgggatggtgccgtcatcaccttcctggccagtacggccgcgatgtatatccgccagctgctggcacaacgtcatcttcatccacagatcaacttttgcctcaccgctttcgccgccaccaccatttccggattgcttttgcaacttcccactttcagcaatacccccaccattgcgatggccgccagcgttctgctgctggtgccgggctttccgttgataaatgccgtcgccgatatgtttaaaggccacatcaataccggactggcacgctgggcaatcgccagtctgctgacactggctacctgtgtcggcgtagtaatggcactgacgatttgggggctacgcggatgggtgtga

SEQ ID NO: 23453 - DNA, 474 bp, Escherichia coli
atgggtgtgatcgaatttctgttagcgttggcgcaggatatgatcctcgccgccattcctgcggtcggctttgcgatggtgttcaacgttcccgttcgagcgttacgctggtgtgcgctgcttggtgcgataggtcatggttcccgaatgatcttaatgaccagcgggctgaatattgaatggtcaacctttatggcctctatgctggtcggcaccattggtattcaatggtcgcgctggtatctggcgcatccgaaagtgtttaccgtggcggctgttatccctatgttccctggcatatcagcttataccgcaatgatttcggcggtaaaaatcagccagctaggttacagcgaaccgttgatgattaccctgttaaccaactttcttacagcttcatcgattgttggtgcgttatccatcggtctttccattcctggattatggttgtaccgcaagcgccctcgcgtataa

SEQ ID NO: 23454 - DNA, 540 bp, Escherichia coli; identical to SEQ ID NO: 2044

SEQ ID NO: 23455 - DNA, 738 bp, Escherichia coli; identical to SEQ ID NO: 2043

SEQ ID NO: 23456 - DNA, 495 bp, Escherichia coli; identical to SEQ ID NO: 2042

SEQ ID NO: 23457 - DNA, 1479 bp, Escherichia coli
atgttgctgtcctcgacgcgtaaggactggctgggtaacgtccgtggtgacgttctggccggtattgttgtcgcgctcgcactcattccagaagcgatcgccttttccattatcgccggtgttgatccccaggtgggcctctactcggcgttctgtattcctctcgttatggccttctttggcggacgtccggcgatgatttcgtcctccaccggtgcaatggctctcctgatggtgacgctggttaaagatcatggcttacagtatttactggctgcctccatactgaccggggtattccagctgatagccggatatctgaagcttggcgggctgatgcgttttgtttcacgctcagtggtcacggggtttgttaatgcactggcaatactgatttttatggcccagttgcctgagctgaccaatgtgacatggcatgtttatgccatgactgcggcagggctggggatcatctatctcttcccttatatcaacaaaaccattccttcaccgcttgtgtgcatcgtggtgctgactgggattgccatgtggctgcatctggatgtgcgaaccgtcggggatatggggaaacttcccgacagtctgccggtcttcctgctcccggacgtgcctttaaatcttcagacgctgctcatcatcctgccatattctgcggggcttgcggtggttggcctgcttgagtcgatgatgaccgccactatcgtggatgacatgaccgacacgccaagcgacaaaaacagggagtgcaaagctcagggcatcgcgaacatctgcacatcctttatcggaggaatggcaggctgcgcgatgattgggcaatctgttatcaacgtaaaatccggtggacgcggacgactttcaaccctcacggcgggcgtggtgctgctttgcctgattgtgttcctgcgcaactgggtctcccaaatcccgatggcagcgctggtcgcggtgatgattatggtttccatcgggacattctcctggcgctccattgccaacctgcggacacaccccctttcaaccagcgtggtcatgcttgccaccgtcgcggttgtggtggcaacacataatctggccttcggtgtgctgaccggtgtactgattgcttcgctcaattttgccactaaagtatcccggttcatgcgtgtaacctcagttctggaggggacgagccggacgtataccgtcaccggccaggtattctttgcatcagcagaccgctttacgagccactttgatttccgtgaagcgattgagaatgtggtgatagacgtttcacatgcccatttctgggacatcacgtccgtcagcgccctggataaggtggtcattaagttccgcagagagggcgccggggttgaaatacgtgggatgaatgaagccacccgcaccatcgttgaccggtttggtgttcacgataaacctgaagaagtcgaaaaactgatgggcggtcattaa

SEQ ID NO: 23458 - DNA, 828 bp, Escherichia coli
atgaataatactgttacagcctgtgtggacggttcactttcaacgcggtcagtgtgtgaatatgcggcgtgggcagcccgcactttgcaatcacagctagcactgttgcacgttatcgaaaaagacagcaccccggtagtgtcagacctgaccggcactctcggcatagacagtcagcaattgctgaccgatgagctggtagaaattgaagggcaacgtaatcgcctgctgatggcccaggggaaagcaatactggaaagttgtgctgaactgcttcaaaaacagggaagcccggatgtgcttttgatgcaaaaacacggtacaccggatgaagttctggcagagctgagcgaccttcgtctcatggtgctggggcgtcggggtagccagcatccggtaggctctcatctggaaagcgttattcgtctgcaaaagaaacccctgctggttgttccggagaactactcagtgccttccagagtcatgctggcttatgatggcagtgaagaaagcaggagtaacctggaacgtctgacgatgagtcccttactcagggggctggagtgccaccttgtcatggtaaacggtaagaaggaagagctgctgaccgcacagcaaattttacgtgacgcggatatagaaaacagcacaacacatcttaccgggcaatcagtcggggacgcgcttattcgttacgccgaggaaaatgctgtcgatctgatagtgatgggggcctacggtcattccaggttgcggcagttctttatcggtagtcatacctccgaaatgctgcaaaagacgcaacaaccgcttcttatcctccgttag

SEQ ID NO: 23459 - DNA, 426 bp, Escherichia coli
atgagcaacattaccatttatcacaacccggcctgcggcacgtcacgcaatacccttgaaatgatccgcaacagcggtacagagccgaccgttattcattatcttgaaaccccaccatcacgagctgagctggtaaaactcattgcggatatggggatcacggtacgagcgctgctgcgtaagaatgtcgaaccttttgaagcgttagggctggcggaagaccgctttactgacgagcagttaatcgattttatgttgcagcaccctgttctgatcaatcgccctatcgtggtaacgccgctgggtacccggctatgccgcccttctgaagtcgtgctggatattcttcccgatgcgcagaaaagcgcgttcacgaaagaggacggtgagaaggtagttgatgaaaaaggtaaccggctgaactaa

SEQ ID NO: 23460 - DNA, 321 bp, Escherichia coli
atgctacagcctgttcagctttttaaactgctcgccgacgagacccgttcaactatcgtgatgcttctcagggagtccggtgaaatgtgcgtctgtgacatctgtgcggcaaccgcagagtctcagccaaaaatttctcgccatatggccctcttacgtgaagccgagctggtcatcgaccgtcgcgaaggaaaatgggtgcattaccgactgtcgccacacatgccagcatgggctgcgggtattattgatacagcctggaactgtgaacgagaaaacatacgcaacaagctcagtagcgtggcatctgtctcctgctga

SEQ ID NO: 23461 - DNA, 705 bp, Escherichia coli
atgaccgacttaccagcaatcgaaccggcttattttgatgatgcgcttgccagcaaacttacgggcaacaacgaaaccatgccgcgaattctcatcctgttcggttcagtacgagagcggtcctacagtcgttttgcagcggaagaggccgggcggttgctggcaaagatgggggctgaggtgaaaatatttaacccatccggtctgccgttacccgatgatgcgcccgaaagtcaccccaaagtgcttgaactccgcgagctggtcaggtggtgtgacggaatggtctggagttctccggaaagacatggcgccatgagctcggtgatgaaggcccagattgactggatacccctgagtgaaggtgctgttcgtccttcccagggtaaaacgctggccgtcatgcaggtttgtggtggttcacagtcgtttaacacggtcaatcagatgcggatacttggccgctggatgcggatgttcaccatccccaatcagtcgtcagtgccaaaggcatggcaggaatttgatgatgaagggcgcatgaaaccctcaccctggtatgacaggattgtcgacgttaccgaagagttgttcaaaatgacgttactcctgaaagggcacacagcctacctgtccgaccgctacagcgaaaggaaagagagtcatcaggagctcgcggcacgggtcaatcaggccaaaatctga

SEQ ID NO: 23462 - DNA, 1404 bp, Escherichia coli
atgacggctctcgcagcggagtttttcactttggatgaagttaaccgactcaagatcattcaggacgtcatcgaccggcgtctgacaacacagatggcagctcagcggcttggtatctccgaccgtcagtgccgccgtctgcttgcgcgttatcgtgaagatggtccgcttggcatgaccagccgccgtcgtggtaaatccagcaacaatcagctgcctctgggactggccgcatacgcgctgaatattattcgcgagcgctacaacgatttcggtccgacactggcctgtgaaaagctgtctgaggttcacggtgttcatctttctaaagaaaccgtccgtaaactgatgactcaggccagtctttgggtcccacgtaagcaacgtgcgccaaaaattcagcagccgcgttaccgccgtgcctgtgccggtgaactcatacaaatcgacggctgcgaccaccactggtttgaaaaccggggacctaagtgtacggcgctggtttacgttgatgacgcaaccagtcgtttaatgcagcttcttttcgtgaaatctgagtctactttcacctattttgaagcgacccggggctatattgaaaaacatggcaagccgctggcactgtacagcgacaaagccagtgtattcaggatcaacaataaaaacgcaaccggcggcgacggcgatacccagtttggccgtgcgatgcatgaactgaacattcagaccatttgtgcagaaaccagtgctgccaaaggccgcgttgaacgggcgcacctgacgcttcaggaccgcctggtcaaggagctcaggctccagggtatcagttccatggaagctgcgaacgcatttgccgaagagttcatgaacgattacaaccgtcgtttcgcaaaagcgcctcgccaggcgtttgatgttcatcgggaactggatgtcgatgatgatcttgatatggtatttaactggcgtgaagctcgtaaagtgtcgaaatcactcacagtgcagtacgacaaagtcctttatctgattgaagacagcgaattcagtcgtcgggcgattggtaaatacatcgatgtctggcattacccggatggacataaagagctccggcttaatggcgtgtcacttccctactccacctatgacaagctttctgaaatcgatcagggggccattgtggacaacaaacgtctggggcgggccctggaaatggcgcagctggtccaggccgagcgggataataaccggtcgcagtccgttccatccggcgacggtccttcacgcaggcgtaaagcccccacgacgaagaaatctcagcgctcccttgatcaggacgatatgttcaatgccctggtgaaacttcagtcacgctctgaagagatatttggaaagaaaccgatttaa

SEQ ID NO: 23463 - DNA, 216 bp, Escherichia coli; identical to SEQ ID NO: 17121

SEQ ID NO: 23464 - DNA, 279 bp, Escherichia coli
atgaaacctgacgttcgtgaagctccgattagtatccgagccagaaaatcacagcgtgacctgatcgacatggccgcaagcctggtctcaaaatcactgactgattttatgcttgaggtcgcctgcagggaagcacagaacattctgcttgatcaacgcctgtttctcctcaatcacaaccagtttaaggcgtttatagaggagcttgacgccccaataacgccggagcgccaggcgcgaatcgataacctgatgaaccgcaaatcacaattggaatga

SEQ ID NO: 23465 - DNA, 213 bp, Escherichia coli
gtgaacatcgaagcgaagcagtttcttaacggcagcggcagaagagtactgacaaatgagggcagacagggtatggggggagttgctggtgtaggctcttcaaccgagaaaatgctgggctacgtcgctgaagctgtttttgaaaactgcggccaactggataaccaacagctcgatgacattatcagctggatacaactttataagtcctga

SEQ ID NO: 23466 - DNA, 204 bp, Escherichia coli
atgagccatggcaaatgtgagccgacaaacacgaatgccgccgattacaagctgtacgcgcgattcgatgctggtgaaacgcttgaaagcgttttagcctctcctccgaccacgaagcacaataaagtaacttctgaaggaaacatcaggacagaacacagaatgtggatggcgtggagaaagaagcatcccagaccactctga

SEQ ID NO: 23467 - DNA, 315 bp, Escherichia coli
atgcgaacgacaagtatcaccctgtgtctggttttggcgagttttggtgtatcagctaaaatccttgcagagccagaccttactaaccaggcaaataaaacgtgtgctaaacgagatgtactggaactgaaagtccctttagaagccaataatccctactctcccacatggggtttagacaagggcatggtgcaggccacaattgacgcactgaaagaaaatccagacatcgccccgactgactctgtagcctgccaacaggctgcaataaaacagtatcgggctgggcaaaaacactacagtaagctcaggtag

SEQ ID NO: 23468 - DNA, 483 bp, Escherichia coli
gtgagagctgaaacgaaagaagctatgcggatgtttttggggggacgttgctacacggctaaacaactcgagaaggactatctctctgaagtggcaggttacagcgacgaccgctgggaagcgccgcaaagaactgcccggctggcggcagcggtaaaacgctacaaaacctctgagatgctgcgttttatttttgccaccatcgcgtatgatcccgacccggatctgaccccgcttgccgtgaggcggctgtgtcaggccttgttcggcagaaccggtagccagtggcttatagtggaaattttcggggtgaagggacggcagcaccgcagcgatgacagcactccggaggccgttgaaaaaatggcaaccagatatcgtcacgccgcagggctgcactgggcggcaactctggcggaaattgagcgggtaaagcgcaactatcagacccaggttaaggcatccaggaagggagaagggtaa

SEQ ID NO: 23469 - DNA, 885 bp, Escherichia coli
atggccaatgataacaatcagttagcgctaattatcactgagcaagataaaagttctggtgaagttatacatttggttcctaactcaaaacagagtattcaacctaaatcgctactgcgattgggggtctttgttccgacagtcaaggatggcagcgaccctatggcacgaggtcatgtcatcgatgcaacgactgagttgtgtcgtctttcttctatcgctggagaggggtacgaaaagattagtatttttgggcccaggcttgatatggatacggatttcaaagtctggctagggatcgtggacacactcgccaacacgtttcttgagcctgatgggactgttagggtcaattttattgattttgctttcagttgtgggcttgctacaaaacgagttgattcaaggttaaggaaacgttttagcgactcactgacacggatccagcacacccatttccagttcatcaaaaactcaacagtagaagggaaaaaagtaaagatcgacatgagcctggtgtctacttcttactatgatgagggaaccgatgaggtcattatcaggccaaatccggatttgaatactctgtatcgtgtcgacgggaagacccgactttacttaaaaatattgaagaccctgtctcgaaaagaatcagcccaggcactgtatctttatctagttgaattacctgaccatttttatcgcattggattcgaccgcttaagagaacggttgcagctgacttcacacaaaggtgctcagaatgcgacgataaaaaaagcgttagagcaactggatgaagctggttttttaaaatacacgatagaaaaaaatcgtggggattatgtactggtcattcttagtcgaaacaaaaaagttacctga

SEQ ID NO: 23470 - DNA, 144 bp, Escherichia coli; identical to SEQ ID NO: 22365

SEQ ID NO: 23471 - DNA, 777 bp, Escherichia coli
atggggcaccccgaaatactgtatttctcagccatcagtgcagcactttctccgttctttgcctggtgtttgcggtatcctgatgaggagattaatgaaggtatatggggatataatgctgttctgtatggcatagcctgtggcatggttgtccccgtgtcagtctccggtattgctgtacttatcgtcggaagtcttggtattgttttgtttactcccctgttgtcgtcagtgctcagagggttacccgtattgaccgccccctttattatcgctacgtggttattacattccggaataatgcctcatgatatgtcagtaccttcgggcgaaggtgcaggttctgttttgatgaaaaactatccggtggcattttctggtagctttatggagatttttatgtttcctgatgctgtcggcggtattcttgttatgctgggactacttgcagggagccggaaactactgatgattacggttgtcgcttcgtttctgagtgtggtggtatcattctgtattcctgagctttctcctgataaaatctctgccgggctttatggatataatgccattttaacggtcgttgcagtatatgcattcgcaggagataaccagttcaataatatatttctgggttgcggagcaattatactggcgttcattatacctgttttgattggcccgcggatacccgttccccttcttacgtctccttttgttataagtatatggttatacatacttgctcagcggcgctgtatgtcatcccatatctga

SEQ ID NO: 23472 - DNA, 216 bp, Escherichia coli
atgaaaaaagtttttgctgtttcagcagttacagctgcctgtatgcttgcagcaaatgcgggtgctgaggaaggtaaaagcggattttatctgaccggtaaagcaggtacttcagcagtatctctttctgaccagagtttcctgtccgaaaataaagaggaaacatcaaagtataggggggggatggccataacacggtattcagtggaggtatag

SEQ ID NO: 23473 - DNA, 372 bp, Escherichia coli; identical to SEQ ID NO: 11077

SEQ ID NO: 23474 - DNA, 852 bp, Escherichia coli
atgaaaagaaccctgacagctgtactggcctgctctctccttgcaggatgcgcgacacaaccatcaagtccagaaaaccgtatgttcaccaagatgcacgaagtatactggcacgctgatcctcagaaatctgttgctgttaatgcgtattctcttgccggtgtacaagtcaacgtagaagaggctgagaatgcatctggaggcgtcgatgagggtatggcttcgaaaatgcttctgaacactgcgacaggtgctatcactggtggtctcaaggcagggattggaatgttcacagcttcattgtatagcgaaggtgatgcggaatatattcaggtcatgcaatatgtggtctttgtacctaacgaaaaaaacttaccgatcaacgatgattcattggtaaaagcgggtgctaaaactatcattgagtcattaaaagataaacctcaaatcggtggcgctacctatgaagctcaaatgaaagcattgagcgaatgtaagattagcaaagctattgttggtaagtgggatagttgcgagacagcaaaaaatatacctggttctggtagcaataaaacgcgctttttcgatttccaggttattagacctgctactggtgatgaattgaaagagatgaaactgaataaaggcaattattcagtgattcgttatattgactttttccctttagggcttgaatttgatacaaccaatttcccgggatttactttgatgccacaaacacctaaaactgcacctggttatgcaagtgtatcgataaatgggggcgagtattattttatcaaaggcaatatggggcataaagcattcccattgaaaaaagcagttaaataa

SEQ ID NO: 23475 - DNA, 2925 bp, Escherichia coli
  misc_feature (2077)..(2086): n is a, c, g, or t
atgatatttaaaagggctgtttccttagccgtagctgtgtcaatcgtaactaatacgctcagttgggcgtattatgtcacgcttatcaatattgtgatggcaccgaaagtctatgcggcaaacgaaatttatgaacaactggaaaacaattttgatctttctaatcctgcagcgaacagaacttcaacagtaactacagaggacattttagaaaaatataagaatagtgaaaatccttcttataccgacaaaataaatggttttgatagtactaacagttcgtcaatggacctgaagaaatatggtggaaaaacattcacaaatgatgatgttttgaattatgccaaaactgatggttcggacatcgctggtacggtaatgctacccaacatgaacgggaataatataaacataaaaggttcagaaaacggtggaaagttactttcacgtaatgaagatggtagtataacaataagtaacaaccccaatcctggaggcgcaatcactggcaccaatacagctgaaatgtatagttctgagcaaaataatgctgatgttcagtttaatgctggtgatagttatggtgacgagaaagggttcataaacgatataaaaactcgcaagagtcaattattcaccgcaaatagttatgatgggcaagcatatcgttcgctggtggctgcaacaaaatccaatccagctccaaatatttcgccaaatgatccaatgtttacaagtggcagaaatgaaatagcgaacgctgcagctggaacgggtcaatggctgcaaaactgttcaacacagacaactaccacaacaaaagaaaaacatattccagattataaggaatattactgcaatgcacctaaaaaagataattatggtagttgcactattactcgcgacttcagtgtaccagtttacatctctggtggtaatggtgacctaagcgtatgtggcgataattgcatacgtgtatggttcggaaagcgtggtaatgattactggtctgctggtgtttatgacaacagcatgacccttcatttccaccaggacgctatcttaaaatcagcaagcatagtaaatgctgagtgggatgaccacatgcaagtcaatcttgatggtaagcagatttttgctcatatcgatggtgaatatcgcgagcctggctatggccccccacgtaatggtatggaaagaaataaatcgaataaattaagtgaacctattgatataacgagccaagtttcagaatccgtgtacaaagaaagtgaccacgaagttgaaatgtcatcgactgtatgggtcgggggtaacggtgaagggtactttgaagtagaactaatttttgaaaatatcaagcttgaagataaacatatacaggacccaccaggctgctacgatgttgttaaacaaacaggttcattttgtaggtttgaccgttttgccgatcttgatgtaggcactaagcgtttaccacaatcgatattgcaatatgcatcacctttatatgaaggagaccaaggtaacttaacctggaaaactaatttagaaggatatttttgcgatcctttagggaaagaaaaattatgtcagtatgatgcatcaggaaatattctaaaagatgtgaatggcaatgaggcttgttacaactatgaccagataaagaatatgcctgatgcatgttcaaaatactcgacaaactctgcatgcactatgtccagccaaacatgcgctgagggatggttcgattctgctactaatcagtgttacatgtacgaacaaaagtggacctgtgatgaaggaatcacaaggactgtgacagtaacaaacgaagcaaacacctgcgttggtatgatcccatgttcaggaggtacttgtaataccggtgcgaatgaacaaaacagtgatttcggtaaggtcgcagcctatagcagcatggttcagaacatgcagggtgatgctatgtgtagtgaccctaacgaccccaacagttgcattgtgttctccggagagaagcaatggtgtggccgttctgtaggcttcgtaaacgggttggcaaaaacagattgctgcnnnnnnnnnncaattatcttagccgggacaatgctcagaaacacaaactgggaaaaaatttcagccaagctgacaacctggactggtggtgagtcaggtacgtgggcatcgatgacgaacgctgtcggacaatggacctccggtgtatcttcaagcgtgggccaaatgtggcaacgtgtgacagaaccactaacttctgcttatgaatcaatagcaggaaacgtctcgagacttattggctcctccacaattgaaggaggaggatctgcggccgctactgagcttacgaaagacggcttacagacaggaggccttgctgcaattaagcaacagctaatgaataaggcctacgatatgttgccagatgctgtaagagacttcgtttttgatcaaaccagaagtgcagctggtcaagctgtattctcatcgacagtgacaaactttatgctggcactgaacgtaatcggatggatatatacagcatatcaaataactaaaatgttattagagatgctattggcatgtgaccaaaaagaaatggaagcatcaattcacaaaaaccaaggtgcatgtttcgttattgatacagatcgttgtgttaaatatctcaacgttggtttcactaagaagtgcattaagaaagcaaccgacatgtgctgttataattctttattgtcaagagtaataatgcaacaggcatatccacagttaggaattaatccagtagaaagtggttgtgtgggattaactatctcacaggtgcagcaacttgactgggataaaatagatatgactgaatatattgaatcagcagttgtaacaagcctcattgccattcacatcttttag

SEQ ID NO: 23476 - DNA, 294 bp, Escherichia coli
atgttaaacgatcatattgagacagttatggatttgtttaacggatccagacatctaatcattgctggtattgttctaatttatctggtgttgatatgccgtatagtcagtcattatgagatttatgcggtaatgaagcgtagacagacatcatccaaggctgttaagtatgaagatgaggactcggatttagctaaccttctcataagcaagagtatggtttctctgtggataaacgtcattacattagtattgattacatttttcactgtaatgatgtatgtgtcagcctga

SEQ ID NO: 23477 - DNA, 399 bp, Escherichia coli
atgagcgagacattacaggttctcaataacatccgtacgcttcgcgctcaggcacgagagctaccattagaagtgcttgaagaagtattagaaaagttcactattgtcgtcgctgaacgcagtgaagaagaaaaggcggccgaagcggctaaccgtgagcgtttagaaaaactctctcattaccgggaaatgatgatcgctgatggtataaatccgagcgaactgatggacgcggccgtcaacattaaagtacgcaaaaaacgtgaacctcgtcctgcgaaatatgcttacatagacgatgccggtgagcaaaaaacctggacaggtcagggacgtactccggcaccaattaaagctcagctggatgcaggaaaaactctcgaagatttcctcatctaa

SEQ ID NO: 23478 - DNA, 495 bp, Escherichia coli
atgataaacatccggacaactagattagccatttttccactggctgttatccttttatattccccactaacttcaattgccaaaactttctcggcgaaagtggtgcgtgttattgatggtgatacagtccaggcttatgacggtacaacaaatacaagaatacggctctatgggattgatgcccctgaaagcaagcaagccttcgggcagaaggcaaagcaaacaatgattcagttagtagcaaatcaggttgttaatattcaggaccatgggcaggacgtctatggccgtatgcttggcacaatctatcttaacaacaacgatgttaacgccatcatggtcgcaaacggtatggcctgggcatatcgctatcaggggaggttgattgttcctgaatatggacctcttgaacaaaacgctcgaaatgaagggaaaggtctgtggtctgatccgcactctattgaaccacgtcaatggcgaaaagcgaataattaa

SEQ ID NO: 23479 - DNA, 1272 bp, Escherichia coli
atgtctactgttaatgatgtgattgtatcttatggaggtgacagtaaaaggtattcaagagacttccagacaaaagaagaatttaaaaagagctggtacgccgttttgtcacgggcgcatgcttcggtagaagcgaaggtaagctgtgcctgtaaaggaaaaggacaaaaatcacttgccgtaaaatatcactcaggcggtgatacttatttcctggcacggtacccgaacacaggtagtcaacattcacctgactgtattttctttacgcttgataaagacaattcaggtctaaaatgctatacacaaggtgtcgtcaaagaccttaaagatggaggctacggaattaggttagacgtggcattagcctcatctgactcggagtctacctcgatcgtaccggttgataacaggaataaatcaggtggtgtttctcagaatagcatgtcattgctgggtcttctccagttcctgtgggatgacagcggtctgaatcgttggtatccgaaaatggccgggaaacgtaatcctggcaaggtgttcaaccttataacccactctgcggaaaaaattaaagtcgcatcacatccactgtccatgcatttacttgcaggtgcatatccttcgacaccacaggagacaaaaaacataaaaatgacatcagaggcgctgatgaataaagagcgtctgatttgcctcaatgtactttctaaatataaccctgaaagacactcgaatgcatcaaaacgacttccgataaagtttttttcaggtgttccagttgtgctgatgaatactgataattgggcatcactggagaagagattcagctctgaaatagcaaactggcgttctggaggtaacgtaatctgtatggctataggggatttgggtaaatttaaggggaaagatacatactatcttaaaccacttcagatagcattgatgaatgttgatgaaaactggatcccggcagactcgagttatgagctgactatgctaaattatcttcataagcatgagcggtcatttatcaaacccctgagatatgatgcgtctaataatgatgttttcccagatttttgtctgacggatattggggggcatgaactgtttcctattgaggtatttggtatggatacagcttcatatttggcgcgtaaggcgatcaaagaaagttactacaatgaacgatatggaaaggatggttgggcatcatgggttgccccggctggccccctaccccatttgcccgataagggctgcagttaa

SEQ ID NO: 23480 - DNA, 129 bp, Escherichia coli
atgttaagcgtaaaagtattcgcacctaaatttttctacttttgtgtctggtccggcatcttgatgtacatcttttttttatcattaacaaatattatgttgagaagtggctacgactttcaaggatag

SEQ ID NO: 23481 - DNA, 561 bp, Escherichia coli
atgttggtgaaaacacctgaaggtgcacagaaacaactggcgaagtatatccagcaagttgacgaccaggtaaataaagaactggaaaaagacctgaaagacgacatcgcgctgcgtatgaaaaacttgaatgattctctgaagacccaggaagtggtggcacaagagcaaaaaacgctgcgtatccgtcagattcaggaagcgttgcagtatgcgaatcaggcgcaggtctcaaaacctcaaattcagcaggctcaagatgtgacgcaagatactctgttcttgctggggagcgaagcgctggagtcaatgattaagcacgaagcgacccgtccgcttgaattctcatcaaactactatcagacccgtcaaaatctgttggatattgaaggcttaaaagttgatgatcttgatattcatgcctaccgctatgttatgaaaccgacgttacctattcgtcgcgatagtccaaagaaagaaatcaccttgattctgactgtgctactgggtggtatagttggtgctgggattgtgctggggcgtaattacaacgcgaagtaa

SEQ ID NO: 23482 - DNA, 399 bp, Escherichia coli
  misc_feature (356)..(365): n is a, c, g, or t
atgacagatggcatgatttaccatggggtacgaaagcaggaacttctcaagattattgagcgctctggcttaaacttcgaagaagcaaccagtaattttgggtttgctgacaacacccgcaatccactttctttgatcctggatgggtattttattcagataattcctatggcccgagaggaacacaattgggaaatagctccagtagatactgttatcttatccattattatacccccttcgcttgatgaagacccagatgaaaacacgatgacaataatgtcggattgtggaatagctgagtttgagcttgaagatgcaggcatcagaattaacagaatgataacatttgtagnnnnnnnnnnacattactgcatgccagacccaagggggatttga

SEQ ID NO: 23483 - DNA, 405 bp, Escherichia coli
atgacgatgaagatagtgagtattaaaaaagttagtttcttcatagttccacttattaccctgctaggtatttattctctaactatgaataaaccacgcctgtcgagctttaagcaaaactcggttcatgccgtaagtctggcgggcgctgaaaccagtatgaattttaagatcgttgatgaaaaaacaataatgataaacaacattccttctattgttaaaaaggagtacattaaaagtcttagctctacagaggttccacctggtgctccatcgggagactatctaatgctagagaccagtgcttatatttttgcgatgaagcaatctggagggaatacctacattggtctggtgaaggatttaatcaacgaaggtgaaggacatatttggtggaaaatataa

SEQ ID NO: 23484 - DNA, 537 bp, Escherichia coli
gtggaaaatataaataatgatgttccacagcatcaaccttaccgaaatgaaaaggtatttaattccggcaagactgcacttgagctcaattattctgagacaaatggcagtgtgaatcttatccttgctgggcctttagcatctaagccgggcgcgtttgactggactgggcaaaaggccttttcaacaaagctgagtgatgatgaagtgatcgctttgtgtatggcgtttcttcgccttactcgtgaggctgttctgaaagataaaaaaacaaaacaccataataagcaagtctacaaaaacgtaaaagttacttttgatggtaaatccacagcaatgttggaggggggcgttgtagctatcaacaaagacgagcgagacattaactttatacataaaattagtattgatcctgccgcctgccttcgcttaggtcttttcctcttatccgtcatactggcccgaaatccaggggttccatctgacgcggttctaacgtgcatgcgtcttaatgcaaatgctcaactacaaaagtaa

SEQ ID NO: 23485 - DNA, 603 bp, Escherichia coli; identical to SEQ ID NO: 5048

SEQ ID NO: 23486 - DNA, 879 bp, Escherichia coli
gtgagtaaggttgaagtccaatggatttctactaaggctttgaactttaaaagcgctgttcatacaagattgagtaatctcaaacgtaaatactgcattcctttcagctccatgaatatactgccaacctctaagttggaagagtatttgattgaagtagaggccgtccgagaatatttcaaggaaggcattcagaatgctctagagcgttatgaagaatacattcagatggaaaaagacagaagtcctaaattggcagaattaattgaaaaattaagaatgactaaagatgacttcgaaaaatcgtttcttttccagattagccatccaatccctttcacaccaatgtcaattgatggagaggatttaggagaccgctattcagttggtttaatacaggatattgctctgactgctgaatctatctatgcttcctgcacaaaacctaaaattgaccagactttcgtagaaaaactgtcaaatttaaaagataaggttgtgagttttatgtttttggatgatcgtgcaactaaaattgctgactctatccaaagcgtactaaaccatcttccttctggtaatttggattccccccttcacatgagtttgtttcgcgaatggttattactgctaagtgatacgaatcgtttgaacagaattatggatggtgacgatcttgtaacaggttttattgccgaaattaaaaatcgttttaacgatttagatgataatttggctaataatactggttccattttcgttgatccttttactggaaatggtattcctgctaagacatctaattcttcgataactccggtctcaaataatgatgtagtccagaaaaaagtaactttctcgactccatttaatttttga

SEQ ID NO: 23487 - DNA, 1128 bp, Escherichia coli
  misc_feature (1112)..(1121): n is a, c, g, or t
atgggaaaaataaaatattggctaatagtaggatttattatactttttgcgattttttacattgctattagtgacagggattctacgctttctaggttgaaatcagcaggtgaaaacggagatgtagaagctcagtatgctttggggctcatgtatttgtatggagaaattctggatgttgattatcagcaggcaaagatttggtatgaaaaagccgctgaccaaaatgatccgcgtgcgcaggccaaactctgtgtgatgtatgcaaatggtctcggggtaaatcaggattatcagcaatcaaaattatggtatgaaaaggcggctgcgcaaaatgatgttgatgcgcaatttttgcttggggagatgtatgacgatggtctcggggtaagccaagactaccagcatgcaaagatgtggtatgaaaaagcggctgctcaaaatgatgagcgtgctcaggtcaatctcgctgttctatacgcaaagggtaatggtgttgaacaggattatcgacaggccaaaagctggtatgaaaaggctgcagctcaaaatagtcctgatgcgcagttcgctcttggaattctgtatgccaatgctaatggtgtagagcaggactatcagcaggcaaaagactggtatgagaaagcagcagaacaaaatttcgccaatgctcagtttaatcttggtatgctctattacaaaggtgagggtgttaaacaaaactttcggcaagccagagaatggtttgaaaaagccgcatctcaaaatcagccgaatgcccaatataatttaggtcagatttattactacggtcagggtgtgactcagagctatcgacaggcgaaagactggtttgaaaaagcggcagagaaaggtcatgtcgatgctcaatataatctcggtgtaatatacgaaaatggtgaaggtgtgagtcagaactatcaacaggcaaaggcttggtatgaaaaggcagcctcacaaaatgatgcgcaggcgcagttcgaacttggcgttatgaatgaactgggtcagggtgaaagcatagacctgaaacaagcaagacattactatgagcggtcatgtaataatgggcttaagaaaggttgtgaacnnnnnnnnnntatatga

SEQ ID NO: 23488 - DNA, 489 bp, Escherichia coli
atgttgatcacccctcgctcaaacacctcatccttattctggtgtagttgttcaaatgtgctcagaatgttcgcttcactgatttccggaaaattatcgtgctccagtgaccggtaccatgtatcacgggcctgtgcatccattaaggaaagcatccctgaacgttgcatcaggtcacgccagatttcgcgatcgagattgcgtgtgatggctttcattgccgtttcaggtttctccatcagccagcagccgcagcgaaaatcctgtttcatggcccagtccggggcggctttaccaccaatactttctgtcattgctgatatttcagccagttgccggataagtgtgtcgatttgcagcagtgtactctttcgtacagccagaatgtggcggatactggttgagcagataacgtccgtatgcccggtgaccacttccggacgggagattgtgatgtctgacattatcggtttcccttttggtttataa

SEQ ID NO: 23489 - DNA, 423 bp, Escherichia coli
atgaaactggccctgacgctggaagccgacagcgttaacgtgcaggcactgaacatggggcgcattgtcgttgacgtcgatggtattgagctcgctgaactgattaacaaaatcgctgaaaacggttattcactccgcgtggtggatgaacgtgatgctaccgaaacaccggcgacttctgccagccctcatcagttgccggaagacaatacagtgatacagagcgtgatgccattaaccactgaaacagcgctggatatcctcattgcgtggctgcaggacaatatcgactgcgaatcgggaattatctttgacaacgatgaggataaaacggattcggcagcactgttgccctgtatcgaacaggcccgggaggatgtccgtactcttcgtcatctgcagcttctgcaccagaaccggtaa

SEQ ID NO: 23490 - DNA, 564 bp, Escherichia coli
  misc_feature (250)..(259): n is a, c, g, or t
atgagagacgcagaatttagagcgatgcttcaggcatcgagacaacgtaacagatacaactcctacgcttacacagacaacccaaccagctacgaagtcccaacctttagcaaatccgaacgtaagaacattgaagcggtcattcgtagcattacgccacgagacaaatatatgtcagtacgcaaagaaaaagaaaatactttaaaaactttcttgatgagttttgacagctatgaacaattaccatcannnnnnnnnngaattgaagatattattatcggaacttgccgtaatgccggaagagataattatcaccgaaaagttttctatttactacgaaatattgacaagattagctcaagcacaataacaaattatcttcagcgtcaagcaacccgattaagccatgagctaccaagcgataaatattgcgctaacttagccactatttgcatgaaagttattgagacaattaatcatcatgcggaagtgggcaatgtcagccttactatcagtgaaccagatttcgagtttgccccgtatttagttacagaggaattttaa

SEQ ID NO: 23491 - DNA, 177 bp, Escherichia coli
atggtaaatctccctcctgaactggggtcacctgatgtatgggctggtggaggtgttgggctgattgcaggtctgctacttcgctacgtcctcgtcagagtgcttgttgtctttaaactgttcggtcgtacatggacgcttgaccttaaggataacgaccacacagaaccccgttaa

SEQ ID NO: 23492 - DNA, 1533 bp, Escherichia coli
atgcattcatacgaggaccggatccgggccgtcgaactctattaccggtacggaaagaaagcctccgttgtcgtcatggagctgggatatccttccacaaaacagctgggccgttgggttcggatttatgaagagaagggcgatttacccagggaattaaagccaagagaacgctattcacggacacagaaaattgctgctgttgagcattatcttactcacggtggttgcctgtcgtacactcgccgagccatcggctaccccagtaacgaaattctaaagcgctggattgaagagttttacccaaatgcgcgtcccctggtcattcgctcaggcacaaacaaatgcttcagcccggaagagaggtctcaggccgtccgggagctctgtaaccgacgtggaaccgcgcgtaaagttgcacaaagcataggcgtcagcgtcccggtcctgtacaaatggaagaaagaccttatcagtgacgaggcttatcaatccatgcgcaaacgaaaggcagcccctcaagataaaaatcaggatgctttactcggtgaaatccagcgactcaggcagcaggttcatcagctgcagctcgaacgtgacatactgacaaaggcgaatgaactgataaaaaaagatctgggcatcagctttctgacactgaaaaacagggagaaaaccctgatagttgatgcccttaagaaaaagtaccccgttgctgagttgctaagcgttctgcaacttgcccgcagctgttatttttaccacaaagccagcaaacgtctgtgcgataagtatgcggaaatacgcgtgatcatggccgatatctttgaggagaattaccgctgttacggctaccggcgccttcacgcgatgcttcgcggtaacaacagggttatttctgaaaaggttgtccgcagactgatggcagaagagcagctcgttgttaagcgcaccaggcgacgacgatacaactcttactgtggcgaaatcggcccggcaccggaaaatttactcgcccgggattttagttcctgcaggccaaatgagaagtggctgaccgatattacggagttccagcttccggctggaaaagtctatctgtcgccggttatcgactgctttgatggccaggttgtaagctggtcgataggaacacgcccggacgcgacgctggtgaatacgatgctcgatgaagcactcgatacgctcaacgaacatgataaaccggtaatacacagcgatcgtggtggccattaccggtggccgggctggctcgatcgtatcaacacatccggacttataaggtccatgtcgcgcaaaggatgctcgtcggataatgctgcgtgtgaaggcttcttcgggcgtatcaaaaacgaaatgttctatggcagaaactggactggtatcacgctggaaaaatttatctgcttcctggacaggtacatacgctggtataacgagaaacgtatcaagctatcattaggtgcaatgagtccggtgaagtaccggcagcatcttgggatcacaacataa

SEQ ID NO: 23493 - DNA, 531 bp, Escherichia coli
atgaaatcctctattccaccgattctgtatggaagaaatatatccgatatttcggagaagcattttgccccctggttctgtcatgacgatcaataccctgctttggtgctggcttcaacgaagatagttccggagtcaccttcccaggactggttccttggcgaagaacaatgcggaggccacagttgtaaccagttcccggcagcggtattaccattgcagatcatgcctcaaaaacatggggtgctggagagcattgcagatgaggcatttgagccacgctcgctcgattattttaactgcgcgggcgacgaggaacagaagcgggtacggctgaattatcagtcatacgttatttctctcggtttaacctgctcggatgaaaatgctctcctgttgacacaggcgctataccccctggatgcgactgacgccaatctcagggccttaaccacagaacagaccgatctcagaagccttaatgtcaccactgggctggtcctttttgtagtgggggtgaactgcgactag

SEQ ID NO: 23494 - DNA, 387 bp, Escherichia coli
  misc_feature (50)..(59): n is a, c, g, or t
atggtaagcctgtcgatggtggcaaaaattactggtcacagacgtttgannnnnnnnnntagttataaactggaaatggacgttgtcagtacgcagggtcagagaggggttgttgtggttgattttgacgtgataccgaacacgcctcctacatgtaacctgacatacactgaaacgcaactgagctgggcatttactgcaaaatgcagtgatcctgacggcaagatttccagttatgtttggaaggtgaatgatcaggttcgtggtgtgttcggaagtactgcaacactgtccaaagctcaaaataagggtaagctggtggtgtctataacggcttacgatgacagcggtgattcagcgacaagtttcattacattgaataactga

SEQ ID NO: 23495 - DNA, 1056 bp, Escherichia coli
  misc_feature (1044)..(1053): n is a, c, g, or t
gtggttgcttaccgagaacctaaacctgttatctcggttggaaaggttcttgaggggcacagcatcccggtgacactgactgataacaatgaagatgtacaaggtagtgcagttgaagtccagtggtcagaggatggagaggaatggactgaggggggggttaaatacatgattacgtcctcggaggtgcccaagtatatctttgcaaaagtacggtataccgaaaccgacgaaatggccgggaaatcggcatggaaagaaactcgtgctcgtgtcactgtcattaagcataagaaattgtcggttaaggttgaggggaactcgcaggtagaggtaggtaaaaaagttactttgcagggtacctacacgaaccctaatatcgagtactcatctgatgctaaagttgtccaggagtgggtgctccctgatggaagcgtaaaacagggggggctgcttgataccgtcctgaccgaagacatgttagatgaacgtgggtatgcaacgtttacgtatcaggcctacatgccggaggcaaaagacagaaccatagcaaaacggaaaatcagcgtaaaatcttgggtatacaaattcccggagccacgcctgaatacaaaactgaaatacaccatgataccttcggaactcaccgtatcagtctctggtgtggatgtttcttatcctggagttgtgttcacccaggactggcaatacgacaaaaatgtgatgacgctgtccagcgacaataacgggacgaaagtgttccaggtaacaaaatcgggtacacatacgttgacgtatgtcctgaaggataacaggaacaatgaagcccgggttgattacacttttatcgtgaacgaacagagtccgatggaaattagcgttactcccaaatactctaacaagttcatgagggccccgctggacctgtccttgaggtccagtgttaagctggcccactcggcagactcaattgacaatgtgacgtttaagctgaatggtaagcctgtcgatggtggcaaaaattactggtcacagacgtttgannnnnnnnnntag

SEQ ID NO: 23496 - DNA, 261 bp, Escherichia coli
ttgatcattaaatggtcaatagctgacagattgaaactctttaaaaagattttcgatgagcaaatgattatccttgaaaatctaagtgaaaatggtgcctggactttggatcagaataccgattcttatgttcttaaaaccgaagctgtggattatgttgagtggttatattccgatgcatgtaaggtaatatctcatgtatacggttttgattacggattacttttcagcacttcgaaagccattatcaaaaacctttaa

SEQ ID NO: 23497 - DNA, 1077 bp, Escherichia coli
atgccgcgtcgcgtcactctaaccgatcggcagaaagacgcgctgttgcgcttgccgacttcacagacggatttgctcaagcactatacgctgagtgatgaagactttgggcatatcaggctgcgtcggcgcgctcacaacaggttcggcttcgccctgcaattgtgtgtcctgcgctatcccggccgggtgctggctccaggcgaactgatccctgcagaggtcatcgaatttatcggagcgcagcttggcctgggtgccgacgatctcgtagactatgctgcccgcgaggaaacacggcacgagcatcttgccgagttacgggggctctacggcttccgcaccttctccggacgtggtgcgagcgagctgaaggaatggttgttccgagaagccgagatggcggtgtcgaacgaggatatcgcccgtcgcttcgtagccgagtgccgacgcacccgcactgtccttcccgcgacatccacgatcgagcggctttgtgccgcggctctcgtcgatgccgagcgacgcatcgagacgaggatcgccagtcggctgcctatgtcgatccgagaacagttgctggcattgctcgaggagacggctgatgatcgggtgacccgttttgtgtggctgcgccagttcgagcctggctcgaactcttcgtcggccaaccggctgctcgaccggctcgaatatctgcaacgcgtcgatctccccgaggatctgcttgccggcgttcctgcccatcgggtgactcgtctgcgcaggcagggtgaacggtattatgccgacggcatgcgcgatctcccggaggacaggcggcttgcgatcttggctgtttgcgtctcggaatggcaggcgatgttggccgacgcagtggtcgaaacccacgaccggatcgtcggccgtctctaccgtgcttcggagcgtatttgccatgcaaaggtcgcagacgaagcgggggtggtgcgtgacaccctgaaatccttcgccgagatcgggggcgccctggtcgatgcacaggatgatggccagccgctgggcgatgtcatcgcgagggcactgttgcaaagttag

SEQ ID NO: 23498 - DNA, 249 bp, Escherichia coli
atgataatccgtgacaagattaccgcagaattgaattaccaggcatctgtagaaggagagacgggtaatataaaaatgtgtcgcattattctgggggctgtgaacaacatggttgtttacaatacaatggtaaaggtaaagaaagcaccaggttctgactcaaaaaccgatgatgagcagtatttccactatgtaaagccctgggtggttccgttcattgaaaaaatgcatgcagtcaatgacaaatga

SEQ ID NO: 23499 - DNA, 315 bp, Escherichia coli
atggcattactgatatcagcagacgatcgcattacaaggctatgccctctggacatggaaggtagccgtgataatgacggtgcattctcgcttgcagatatgcaacaactggtcggtggttacattgaagctgtgaagctcaaccctgtaatcgttcatgaaaacattcgatattgctggattattaatgaagaaggaaagcttctatccttaccagtaaataaaaatgcaactcttctggttaaaagcgttatcagccctggcgactatatagtcggaaatgcgttgatgctcgaagaaaccgaatttcaatag

SEQ ID NO: 23500 - DNA, 930 bp, Escherichia coli
gtgtccgctcagcacatccagacgtccgccattttccagtacgacattatcagccttacccgccacaacggagaatgctcccaggcggtttgtgccggtgacggttgcagctgtactggtaaccagtgcaccgcccgtgttctgggtgacatcagacgcttctccgccggcatgaaccttcagctcgccgttctgatttatggtggtgttaccggcagtaccacctgccttaacaacctgccagcccccctcgttaattaccgtgttcagcgcaagtccgtatttgtgcacatactggtttcctccctccagccgggtattatgtgcctctccgtgtaccgtctggtcaccgcctgtgtaaatgagagtgtcccgggatacccccgaagaccagataacctgtcggccattgttgttgatggtggtggattcagcagtccccccgaccatctgaccagtggacacattttcagactccggaccaccttctgcaccggtgttgacgatggttccggttgccagtccgccatgttttatggtctggtaaccatcctggttaataattgtaccggtagctttcccttccccgtgtacccactgctcacctctgttatccagcgtggtgttcaccgccagtccgttaaggctctgccctccgccatcacgaataaccgtatcactggcagttcctcctgcctgcacaatctgacgaccatttgcggtgacagtggtgtttctgcctgtgccacccgcttttatccattgcccgccggtgttttcgtcactgtccggccccagctcaagcccggtactgacagtcacgccattagctgttccggatacaaactggttgtcatggtttaccagtgttccgccattcactgtttcacccgggtgcacaacgatgtcagcagacagcaccgggagtga

SEQ ID NO: 23501 - DNA, 237 bp, Escherichia coli
atgacaaacgatttatattttaacggtcgaaagattgatagcttcggtgactggtcgccacagactgaacatccagctatcactattcagcgtaaagaacacgatgaaagaattaagcttgagcaatcgctaaagatgtcaccaaaaacaaccatctttgtagctcctgagccccaagaaatgcctgatatctgcaaaaccaaagaattaaacttgatgacgcttacgacaatgtga

SEQ ID NO: 23502 - DNA, 429 bp, Escherichia coli
atgtacaggccggaacagacggaataccgcctccgttttctcccgaatgttctgtgcctgtgcgggagagggctgaatgccggccatatcccattcatggcagggctccgttttgtcggcctgcgtcaccacaaacagcacctgctgatgtccgcactgcaggatgtgtcgccagaaatactcatccacagacagggcgcggtcatcggctttaatcagccacagcaccaggtccagttcgggcagaatgtcacggtacagggcttcatactctgcatccctgtcccggctctcgcccaccccgggcaggtcagtgataaccatgctgtgaccgtggccactcagacggaagcgccgtacttcccgggtgccggcgtgaacatcactgaccggtgtgacctccccctgaaacagggcattacagagtga

SEQ ID NO: 23503 - DNA, 243 bp, Escherichia coli
atgcccatttttacgcggatcaaacgtgatgatggctggaagcatttagaggagttgcgcggccagttctatgggcagatgtacaaaatcaatcctgaaataattagccggttcctgattaagtccactcctacgatcatatcggttgaaggaacctacttcaaagtacagcagtttgctcaggcagatgtacgcgagtatacgcgtataaatcagcaatcagaaaaagaggccgctcaatga

SEQ ID NO: 23504 - DNA, 210 bp, Escherichia coli; identical to SEQ ID NO: 9340

SEQ ID NO: 23505 - DNA, 276 bp, Escherichia coli; identical to SEQ ID NO: 5786

SEQ ID NO: 23506 - DNA, 327 bp, Escherichia coli
atgactaaaaatacacgtttttcccccgaagtccgtcaacgggcagttcgtatggttctggaaagtcaggacgaatatgactcacaatgggcggcaatttgttccattgctccaaagactggctgtacgccagagactctgcgtgtctgggttcgccagcatgagcgggataccgggggcggtgatggtgggttcaccaccgctgaacgtcagcgtctgaaagagctggaacgtgaaaatcgtgaactgcgccgcagtaacgatatccttcgccaggcttccgcttattttgcgaaggcggagttcgaccgcctctggaaaaaataa

SEQ ID NO: 23507 - DNA, 276 bp, Escherichia coli
gtgaccggactgaacaggggctttagtttcgagactggcaatataaagttccaccgatttaaaccgcttaatgctctggatgaatggcaatgcgtcgtattttccattcacgcggttttcagcgttagttgttttaaaaatgccctggactgggaactggagatgatcctggaaacagaaaacaaaattaaaccgatccgtgaactactcgcggaataccatcaacgaaaactggccgacatcaaaagactggaaaaactgaagaggttaatataa

SEQ ID NO: 23508 - DNA, 375 bp, Escherichia coli
atgcgtttcgcttcatcacagtcccaagactctgcatttattaagcgttttttaatattgccgatgattcgacctgatgaacaagctatgtattgtgcagctgaggctcattttcctgatttgaaaccttcatgtttaagaatgtttgcaaaagttgcttttgaacttaacaatctgaaagatgacgaactggtgatggatattcgtgaattgatttcatggatttctacctccaaagtccttgatgaagaaatttctgttgggtttaaaattgcattcacgtctaagttatcttctgaagcatgtagtaaagctgaaattttgcttgagcaacttttcccggaagaagtatcacgttcaatttcacaattgtaa

SEQ ID NO: 23509 - DNA, 396 bp, Escherichia coli
atgtcatgttaccgttgggcaatgaaagatggatggcttaagatgctaaatattgcagctggcatgaccatgggtaacaagaaggaatcaagtgaaacagagcaaagcggcatatgtctctgcacgctccatggctccaaggggctagaatggaaaaaagtactaatcattaactgcaaccatgatcaaataccctcaccaaaagttatcggtgatgaaggtatagaagaggaacgacgtttattttttgttggtatgacaagagcagagcttgaactttacataacctggcatggaaaaccatcagcgttcatcacggagtcgttcccgaaagtagttgaattatcagaagaaaacccatgtattgatggatgtgaagatatgtgtttacaatga

SEQ ID NO: 23510 - DNA, 141 bp, Escherichia coli
atgtaccgggtaaaacggctgttcgggggttcactgacgctgcgtgactacgatggtcaggttgcggaggctatggccctggtacgagcgctgaacaaaatgacgaaagcaggtatgcctgaaagcgtgcgtattgcctga

SEQ ID NO: 23511 - DNA, 144 bp, Escherichia coli
atgaaacgtgcctggtacaagtgctattccgctggcgacagtgacgggaggggtattggtaaacgcatgggcaatgtgcattatcttcggtgccagccaactggcactaagcgcaatgaatacgcagagtgccgcgagcagtag

SEQ ID NO: 23512 - DNA, 519 bp, Escherichia coli
gtgcatgcaagagcgcccacctacatcaccacggaagccctgcagcgtatcggtgaactgtatgccatcgaggcagaggtccggggctgttcagcagaacagcgtctggcggcaagaaaagccagagccgcgccactgatgcagtcactgtatgactggatacagcaacagatgaaaacactgtcgcgtcactcagatacggcaaaagcgttcgcatacctgctgaaacagtgggatgcactgaacgtgtactgcagtaatggctgggtggaaatcgacaacaacatcgcagagaacgccttacggggagtggccgtaggccggaaaaactggatgttcgcgggttccgacagcggtggtgaacatgcggcggtgttgtactcgctgatcggcacatgccgtctgaacaatgtggagccagaaaagtggctgcgttacgtcattgaacatatccaggactggccggcaaaccgggtacgcgatctgttgccctggaaagttgatctgagctctcagtaa

SEQ ID NO: 23513 - DNA, 1206 bp, Escherichia coli; identical to SEQ ID NO: 10374

SEQ ID NO: 23514 - DNA, 600 bp, Escherichia coli; identical to SEQ ID NO: 6037

SEQ ID NO: 23515 - DNA, 510 bp, Escherichia coli; identical to SEQ ID NO: 6021

SEQ ID NO: 23516 - DNA, 552 bp, Escherichia coli
gtgattaaaaaatctgatgatattgatacaagtggatttatttttgaaaatgataaaatctactttataactttgggcagactttcagtcgaaaaagatcaacaaaagttgattaatgccttttgcagattacaaaaattatatcctaatattgagttattaattcttggagacggccccctcaagattgatttacaacgccagattataactttaggacttgaaaaatccgtacatcttctgggacgcatatcaaatccttttccactgctaaagagagctgactgttttgtcctctcttcaaatcatgaagggcaacctatggttcttttcgaagcaatgattctagataaacctataatatcaactgacattactggttctagaagtgctcttgaagggcgttctggtgtattagttgaaaatagtgtagacggtctcttcaacggaatgcgggactttatcttgggaaggttggagtttaaacattttgacattgaatcttatcaaaaaaatgctttgtcgatgttttatgaaaaatgccttcattaa

SEQ ID NO: 23517 - DNA, 552 bp, Escherichia coli; identical to SEQ ID NO: 23516

SEQ ID NO: 23518 - DNA, 309 bp, Escherichia coli; identical to SEQ ID NO: 20883

SEQ ID NO: 23519 - DNA, 246 bp, Escherichia coli; identical to SEQ ID NO: 12927

SEQ ID NO: 23520 - DNA, 141 bp, Escherichia coli; identical to SEQ ID NO: 14405

SEQ ID NO: 23521 - DNA, 261 bp, Escherichia coli; identical to SEQ ID NO: 5351

SEQ ID NO: 23522 - DNA, 489 bp, Escherichia coli
atgaaactggccctgacgctggaagctgacagcgttaacgtacaggcactgaacatggggcgaattgtcgttgacgtcgatggtgttgagcttgccgaactgattaacgtggtctgcgataatggctactcccttcgtgttgttgatgaatctgaccggacctcaacagacagcacccccccctctgctgccctgagcggtatacgctgtagtaccgcgcatatcacggaaacagacaacgcctggctgtactcgctgtcgcatcagacgaatgacaccggcgaatcagaatggattcattttacaggcagcggatatctgttacgtaccgatgcgtggtcatacccggttctgcggcttaaacgcctgggcctgtcaagaacgttccgtcgtctggtcgtcactctcacccggcgttatggcgtcagtctcattcatctggacgccggcgcagaatgtctgccgggtttacccactttcgactggtaa

SEQ ID NO: 23523 - DNA, 489 bp, Escherichia coli; identical to SEQ ID NO: 7638

SEQ ID NO: 23524 - DNA, 369 bp, Escherichia coli
gtgtcagacacgctccatgaaacaaattatcccgacgacaacaacgaccgcccctggtgggggctaccctgcaccgtgacgccctgtttcggggcacgtctggtgcaggagggcaatcagttgcattaccttgccgaccgcgccggtatcagagggcagttcagcgacgcggatgcataccatctggaccaggcttttccgctgctgatgaaacaaccggaactcatgctcaccagcggtgaactgaatccccgccatcagcataccgtcacactgtatgcgaaaggactgacctgcgaagccgataccctgggctcctgtgattacgtttatctggctgtttatccgacgcccgaaatgaaaaattaa

SEQ ID NO: 23525 - DNA, 249 bp, Escherichia coli; identical to SEQ ID NO: 8164

SEQ ID NO: 23526 - DNA, 486 bp, Escherichia coli
atgacgatcccctgcaatcagcccctgtttttttatctcgtcaaggaaacggcttgccgtaccgtggtagagaaactgtggcggtgttttttcggcaaaggaaatagcgacctgcgaagtcgaatgcccctgaaccgcgcggatgcacctaccatcactggaataactaaaacgcttttatcgctggttgcgaccacggtatccagcaatgcacgggttaatcgcttgcccgctttttgggcacaaagtatgagcttatcgatattcgcccatccttcacggtccagtacgataccaatcgcctccggtttgtgtcggaggacaaaacttaaaaacttgctcgtatccgccagctctttttcgttgtactttgccatcgcgttttcgtccctggattttctgtttttatttaccaatgtcattgtcactgggtttatgaattttctgcaactcaatcctgcgcagaaccttttccacacagcgtaa

SEQ ID NO: 23527 - DNA, 201 bp, Escherichia coli
atgacgattgcagagcgaattcataatgatggatggctgttgggaagggaagaaggggaacagcgcattcttcgattgttgttgcagaatggggcagatcctgaatggatacagaagattaccggactttcggcagagcaaatgcaggcattaaggcagcccttgcctgagcgtgagcgctattcatggctcaagagctaa

SEQ ID NO: 23528 - DNA, 414 bp, Escherichia coli
atggaaaactttactttctttgatgaacaaattgccaaactcggtgatgacttgatccccttatgtcgtgggttagcaaagttattaattgtcgatgtggcgcttaatcgtggtcaggataatccgcaactgatttttgaaagtatgaactccaccggtaaggcgttaagtcaggccgatctggtgcgcaattttattctgatgggcctcgaaccagagcatcaaacccggttgtatgaagatcactggcgtccaatggaagtcgcttgtggtcagcaaggttacagcgaatattttgacagttttatgcgtcattatctgacggtaaaaacggggagatccctcggacagatgaagtctatgaggcatttaaactccatgcccgcagccagagtgttgctgaaaaaggcgtag

SEQ ID NO: 23529 - DNA, 1755 bp, Escherichia coli
atgagtgtggaaaagctgatcgttgatcatatggaaacctggacctcggcgttgcaaacccgttccaccgccgggcgcggcagttccggaaaaattgatttatatggcattaagaaattacgtgagctgattctggaactggctgtgcgcggtaaactggtgccgcaggacccgaacgatgaaccggcgtcggagctgctgaagcgtattgcggcagaaaaagcagagctggtgaagcaaggtaaaattaaaaagcaaaaaccactgccggaaattagtgaggaagagaagccgtttgaattgccggagggatgggagtgggtgcgtattagtgaaattggacatgactggggacaaaaaactccagataaagattttacttacattgatgttggttcaataaataaagaatatggaattattgaagagctatctattctttcagcgaaagatgccccatcgcgagcgagaaaaattgttcagcaagggactatcatatactctactgttcgcccgtatttgttaaatatagctattattgaaaacgaaatactacctgaaccgatcgctagtactgccttcgctattattcatccatatacggcgatggatgctaatttcatttattattatctacgttctccggtatttgtttgttatgttgaaaattgtcagacaggggttgcctatccagcaatcaatgacaaacaatttttttctggaataactccagttcctccatccttggaacaagttcgcatcgcaaacaaaatcaaagaattaatgtccctctgcgaccaactggaacagcaatccctgaccagtctggacgcacatcaacaactggttgaaaccctgttgggaacgcttacagacagccaaaccgccgaggaactggctgaaaactgggcgcgtattagcgagtatttcgacactctatttaccaccgaagccagcgtggatgcgttaaaacagaccattctgcaactggccgtaatgggcaaacttgtgccgcaggatccgaatgatgaaccagcctctgaactgctcaaacgaattgcgcaggaaaaagctcaactggtgaaagaaggaaaaataaaaaaacaaaaaccgttgccgccaattagcgatgaggaaaaaccgtttgaacttccggaagggtgggagtggtgtttatttgaagatattattgatattcaaagtggtatcactaaaggaagaaatttatcaaatagaactttggtaaaagttccttatttacgtgttgcaaacgtccaacgcggatatcttgatcttacggaaattaaacagattgaaatccctattgaggaaaaagaaaaatatcaagtagtcaagggagatttattgataacagaaggcggcgactgggatacagtcgggagaactacagtatggtgtcatgactggtatatagcaaatcaaaaccatgtattcaaaggacgaaatatagggcaagatgttgatccatattggttagaaacatatatgaatagcccattctcaagacaatattttgctaacgcaagtaagcaaaccactaatttagcttctattaataaaacccagctcagaggttgtcctgttgctattcctcctagctcagaagcaaaaaaaataatgagtaaactacatattttttataaactatgtgaagaattaaagaatcatatccaatccgcccagcaaacccaactacaccttgcagatgcactcactgacgcggcggtaaactaa

SEQ ID NO: 23530 - DNA, 543 bp, Escherichia coli
atgttaaaccgtgacttcgatcatctctcaacgctattacatctcttttttgaacgtgaggatatttgccaaaagcttaatattattgaccaaaacaatatcaccggttgggaagtgtggttccaggtagagtttgctaatatgctctgctcaacagaccatgaatggtggcgtgaacaagcactttcctgtgatatgcgcaaaaaacctgagcgcccgacactacgcacagatttcttactacgtaaaaaaggctgggcacaagatagctatatcgcgcttgaaataaaacaaaacagagacgcgaccagttgtgttaaaaatatgatcgcagacttagaaaaaagcgcaaaaataaaacgttccgaactcgatttacgcagtttctggaccttgggtatcacccctatgatagacagggaaaggctggactctctcatcgattgctatttagatgagaaattttatcttactaaatctcgtaaaaaacacgttttacttaaagaaataaataacacaccatattgctatattgttatttaa

SEQ ID NO: 23531 - DNA, 753 bp, Escherichia coli
atgaaagtatcagttccaggcatgccggctacacttttaaatatgagcaataacgatatttataagatggtgagcggggacaagatggacatgaagatgaatatctttcaacgcttgtgggagacgttacgtcatctgttctggtcagataaacagactgaggcttataaacttctgttcaatttcgtgaataaaaaggctggcaacatcaacgcctcaaaatactttactggggctgtcaacgagaatgagaaagaaaagtttatccatagtctggaattattcaatgaactcaaaacatgcgcaaaaaatccggatgagatggtcgcaaagggcaatatgagctgggtcgcacagaccttcggtgatatcgagttaagtgtcactttttttattgaaaataaggagatatgtactcagacgttgcagctgcataaaggcccaggtaacttgggcgttgatcttagagaggcttaccttcccggcgttgacatgagggattgttaccttggtctcaaaacaatgaaaggtcacaataaagtcctttacttggaacctgggtggaatgctaacctggacggtgctaccctggacggtgctaccctggacggtgctaccgtggacggtgctacccacctatatgatgaggtaattattattaataaaatcacccccaaaaaaattgatactgaagaagttgctactaaacaaagtactgctgaacaaattactgacaacgcaattattgaatga

SEQ ID NO: 23532 - DNA, 1110 bp, Escherichia coli
atgcaaaggaaaggcaataaactgttgattcagttatgcagtgtgatactgctattttttaccacatcctggtatgcattggcgaatgaatgttatatagagagaaatgctgaaggggattatcacatgaagataagctctactcagcttagtctggcgtcacaaatggtcgaggttccgacagaaatagccgaagctacatgggatgtaaatattcaactaagaggcgatgccatagggtgtaaatctcttggggatagtaaggcagttcactttcttaatacagctgacccaagtttaatatccacgtacaccacaacgaatggcgcagcgttattaaaaacaactgttccaggcattgtgtattctgtcgagttattatgccttagttgtggtgccgcagatgaacttgatttatggctacctgcacaaagtggcgcagataacttcataccaagcacccagacgaaatgggcctatgagtacagtgatcaaagttggtatttacgttttcgcttattcataactcctgaatttaaacccaagaatggtgtttccagcggaacaacgatagcaggaaagattgcgtcatggtatataggtaccaatgaccagccgtggatcaacttttacattgacaatgactctttaaagtttttcgtcgatgaaccgacctgtgcaacagttgccctggcacaagatcagggcaacgtcagtggcaatcaggtaacgcttgggaacagctatgtttcggaagtgaaaaatgggcttacgcgggaaatccctttttctatccgtgctgaatactgttatgccagtaaaattacggttaagttgaaagcggcaaataaacccagcgatgccacactggtgggtaaaacgactggctcggcttcaggcgtggctgtaaaagtaaattcaacttatgacaatagcaaagtattgttaaaagcagatggtagcaacacggttgactacaacttcgccgcctggtcaaacaacctgctgtttttaccttttacggcgcagctggtaccggatggtagcggtaatgctgtcggtgttggaacattttcaggtaacgcgaccttctcctttacctacgaataa

SEQ ID NO: 23533 - DNA, 591 bp, Escherichia coli
atgctatgcaggcatcataaaatcgtacactttttagggctggcaacagcccttatcacgccttttgcctattccggccaggatgtggatctcaccgcaaagatcgtgcccagcacctgtcaggttgaagtcagtaataatggcgttgtcgatctcggcacagtgacgctggactattttgccgacaatgtaaccccgacaacggattatgcgggtggcaaaacgtttaatgtgaatgtggtctcttgcgataacattcaaacgacacagtcgcaaatgaaattagattttcagccgcaggcgggatcgcttgcacaggcgaataatcaaatttttagtaatgaatatgaacagcaggctaccggggcgaaaaacgtcggcattgtgattttttcggcccaaccgaatcagcagacatttaacgtgcgaggaacggatggttcctcaacagcaatttattcggtagcacctggcaatgctgttccctcaacctggaccttttattcccgtatgcagcgggtgaataatgcccttcctcctgaatcgggaatggtgagaagccaggttattgttaacgtatcttacgaataa

SEQ ID NO: 23534 - DNA, 606 bp, Escherichia coli
atgaaattaaaagtcatcgctacactgattgctactgttgccgtgggtgtaagctttaacagcaattttgcttctgcgagtacaacgtccgcttctttaaccgtaaacagtaacctgactatgggtacctgcagtgctcagataatggataatagtaataaagtgatcaatgaagtggtctttggcaatgtttatatttctgaactcggtgcaaaaagcaaagtgcaacagtttaaaattcgctttagcaattgctctggccttccccaaaacagcgcccaaatagtgctggcacctaatggtatatcctgtgctggttctcaatcgtcatcggcgggtttttctaacaagtttactgacgctagcgcagcaaccagaacggctgtggaagtatggactacagatacaccggaaagcaatggcagtacgcaattccattgtgctcaaaagataccagtgcctgtgacgcttcccgccgacaccacaactcagccttacgattacccgttaagtgcacggatgaccgttgcggaaggtagattggtaaccgatgtaagaccgggtaatttccgctctcccacgactttcacgatcacttatcagtaa

SEQ ID NO: 23535 - DNA, 549 bp, Escherichia coli
atgaaaaggatactactaacatccgcgttaataggcctgggtttaccggcggttggctctgcaacagatcttaatgtcgattttacggccaccgtattagccaccacctgcacgataactatagtggaagatggtggtccagcagtgaccggtagtaacgatgaatacagcctgacaattcctgatgttggtctggataaagtcgctaccgctgcgcccgaagctcaggccaactttaaattaaaggcctccgattgcagcaatggttactcaaagatttttaccacacttacaggaacaacggtttccggtaagttaattgttaatgaagcaacctctggcgctgctggggtggggatggggattaagcgtagagataccgcagactcgactttcttcacacccaataatactgacaaatttgaatggagcgccgatgagaaagccagcggtgtgcctctgaccgtagcactgcgcgaaacaacggcgggagcaggacgcaccggtgcgtttcaggcaaaagccacctttaacttcacctacgaataa

SEQ ID NO: 23536 - DNA, 2601 bp, Escherichia coli
ttgtaccagtttactcatcaaaaaagccgtatcccgaaaaaaacgctacttgcggcctgttgtgccctgttttatagcagcaacggtgctgcggcggacaccgtggaatatgacagttcctttttaatgggaactggcgcatcaacgattgatgttaaacgttatgctcaaggcaacccgacaccgccgggtctctataatgtccgcgtatttgtaaacggtcaggcgacttccagcttagaaattccgtttgtggatattggcgaaaacagtgcggcggcctgtcttacccataaaaacctggcgcaacttcacattaagcaacctgaacagcctgtcactttactcgccagagaaggtgaagaagaggattgtctggatctggcaaagtcatacgaaaaggcggatgtgtgctttgacggtagtgaccagtttctcgatctgacgatccctcaggcctatgttctgaaaagctatggcggctacgttgacccttctttatgggaatcgggaattaacgctgccacactggcatataccctgaacgcgtatcacacaagttcagataacgacaatagtgacagcgtctatggcgcgttcaactcaggtatcaatttaggagcctggcactttcgtgcgcgcggtaactataactggacaacagataacggcagcgatttcgatttccaggatcgttacttacagcgtgacattccggcaatccgttcccagataattatgggtgatgcctataccaccggtgaaacgtttgactctgtcaacgtccgtggtgttcgcctgtacagcgacagccgtatgctgccttcggcgctggccagttacgctccgaccatccgcggtgtagcaaactccaacgccaaagtcaccgtgacgcaaagcggatataaaatttatgaaaccaccgttccgcccggtgaatttgttatagacgacattagcccttccggctttggtagcgaactggtcgtgaccattgaagaagcggatggttccaaacgcacctttacgcaacccttctcgtcggttgtacaaatgcaacgtcctggtgtgggccgttgggatttcagcgcgggtaaagtcattgatgacagtctgcgatccgaacccaatatggggcaagcctcttattactatggtctgaataacctcttcacgggttataccggcattcagttcaccgataataactatcttgccgggctgttaggtgtgggtatcaacaccagcatcggcgcctttgcggtagacgttacccattcccgtgctgaaattccggatgataaaacctaccaggggcaaagttatcgcgtgacctggaacaaacttttccaggataccgggacatcatttaacctcgcggcgtaccgctattccacccaggattacctgggcctgcatgatgcgttagtcctcattgacgacgccaagcatttgtctgccgatgaagacaaaaacaccatgcagacgtactcacgtatgaaaaaccagtttaccgtcagcattaaccagccattgaatatcgcctatgaagattacggttcgctgtttatttccggtagctggacgtattactgggcggcgaacaatagccgcactgaatataatgttggttacagtaaaagcgtttcgtggggcagtttcagcgtcaacctacaacgtagctggaatgaagacggcgagaaagatgacgcgatgtacgtcagcgttagcgtacctattgagaatattttaggtggcaaacgtaagtcttctggtttccgcaatttaaatactcagctcaataccgatttcgatggttcacatcagttgaatgttaacagttccggtaacactgaaaacaatctggtgaactacagtgtcaacgcaggttatagcctcgataaaaacgccggcgatttagcctctgttggtggttatctcaactatgaatctgggttaggcggtatttccgcttcggcctcggccacttctgataacagccaacagtactccatctcaaccgatggcggctttgtattacacagtggtggtttaacgttcactaacaacagtttcagcagtaacgacacgctggtgttaatcaacgccctaggtgctaaaggcgcacgaatcaataacagtaataacgaaatcgatcgctggggatatgccgtgacgtcctctgtcagcccatatcgtgaaaaccgggtaggtctgaacattgaaacactggaaaacgatgttgaactgaaaagtaccagcgccaccaccgtaccacgtagcggctccgttgttttgacccgtttcgaaactgacgaggggcgttctgccgtgctgaatattactgccgccaatggcaaatccattccgtttgctgcggaggtttaccagggtgaggtgatgatcggcagcatgggccagggtggtcaggcatttgtacgcggtattaacgacagcggggaattaatcgtgcgctggtatgaaaacaaccaaaccattgactgtaagttgcactaccagttcccggcgcagccacaaacgcagggaagcaccaacaccttattacttaacaatcttacctgtcaggtagcaaatcactaa

SEQ ID NO: 23537 - DNA, 726 bp, Escherichia coli
atgtttcccttggttaaaaaaacggttagtgcattatttgtgagtactctgttagccagtgcaccagcattcgctgacattattatttccggaacacgtatcatttataacgctgataaaaaagatgttaacgttcgtctggaaaataaagggaatcgccccttactgattcagaactggttggatacgggcgatgacaatgccgatcccagccagatcaaagtgccgtttaccgcgaccccaccagtttcacgcgtggagccaaaacgcggtcaaaccgtaaaagtgatgtataccggtgcaacagccctgccgaaagaccgtgaaagcgtctactggtttaacgtgctggaagtgccgcctaagccgaaagatgctgaggctgacaaaaacttgttacagctggctttccgcacacgcatcaaactcttttatcgcccgagtgggttacagggagaaccggctgaagcaccggcgaaaatcacctggaaattaaacaacgctcagttacaggcaaataacccaacgccatattacgtgtcctttaatgaggtcaagctggaaagcggcggcaaaacctacaacgtcaattccagcatggtcacgccgttcagccaggcaagctttggcgtaaccagtctgccaggaagcgtgtcatccggaaaagtggtctttaaagcgatcaacgactttggcggcaacattgatggttccgcaacattctaa

SEQ ID NO: 23538 - DNA, 597 bp, Escherichia coli
atgaaaaaagcacttctcgcagccgctctggttatggcttctggttccgccctggctgtagatggtggtcatatcgactttaacggtatggtacagtccggtacctgtaaagtgggtgtggtagatactggtatgcatagcgttaccactgatggcgtggttaccctggatactgcgaatgttactgatacttttgctgaagttagcgcaactgctgtcggtttactgccgaaagagttcatgatttctgttgagtgtgatccaggtgctccgaagaatgctgagttaactatgggttctgcaagttacgcgaacaccagcggtaccctgaataacaatatgaacatcactgttaacggtattgcaccggctcagaacgtaaacattgcagttcataacatgaaaaacaaagctggcgctgctgaaattaagcaggtccatatgaacaactcttctgaagttcaggaactgacattagacgcagaaggtaaaggccagtacgtatttaacgcatcttacgttaaagcaccgaacagcccggctgtaactgctggtcatgtaaccactaacgcgctgtacaccgttgcttataagtaa

SEQ ID NO: 23539 - DNA, 357 bp, Escherichia coli
atgaataagaatctcatcctcgcatttgcattattttccttacctgtatttgcagaagaagatctggggccaggcaaatatgtttgtgacattaggatttccagcctggataccgctactcaaattctgtcaaaatccgcaacagttctcgataatggaaacaatttcatcgttcaaatgccaaatggagatcaattgtactctccagatctggaaaatgttgatgatggtataaaacaaaaagcaacaataggtggagtgacatttattcgtcgtccaacttttaacgatcgcttcatcgtggaagatggaaatacaggattcttctataagatgcgaaactgcgagaagaaataa

SEQ ID NO: 23540 - DNA, 1095 bp, Escherichia coli
atgaaaaacagtaaggcattttaccgcagcgcattagcgacagctattgttatggctctttctgcaccagcattcgctgctgataacgcggtatcaactgattcggttacgctgaataaagataagacgactctggatcaagatgttgttattagcaatacagcagacaaacagattacagccgtaacaattaatgcggcagatgaagaccttaatgttgcttttgctggtcatgatattactgctgaatcaacggcagacaaaaaattcgttgaaggtgtaaaagttagtggtaacaaaaatgttgtgattaatgctacagactccaccatcacagctcaaggtgaaggcacctatgtccggactgcaatggtcattgattcaactggcgatgttgttgttaatggcggtaatttcgttgcaaaaaatgaaaaaggtagtgcgacagggatatctctggaaggggccaagggaaataatgtcacgcttaatggcacaaccataaatgctcaaggtaataagagttccagcaacgcctccacggcaatttttgctcaaaagggtagcttattgaatagttttgaaggtgatgcaaccgacaacattacccttgctggctcaaatattattaatggtcggattgaaacaatagttactgccgggaataagacgggaattcatacagtcaacctgaatattaaggatggctcagtaattggggcggctaataataaacaaacaatttatgcctctgcttcggcacaaggcacaggttcagcaacgcaaaatttaaatttgtctgttgctgattcaaccatctactctgatgtcctggccctttctgaaagcgagaattcagccgctaccacaacaaatgtaaacatgaacgttgcccgctcttactgggaaggtaatgcttatactttcaatagcggcgataaagcgggtagtaatctggatataaatctttccgatagttcagtctggaaaggcaaagtttcaggggcaggaaatgccagtgtatctctgcaaaacgagtctgtctggaatgttacgggatcctcaactgttgatgctctggctccgtctgggtga

SEQ ID NO: 23541 - DNA, 135 bp, Escherichia coli
atgtgtgttacgtctaatgttttagtgatgtttagtagttttgagatatttgatgttatttcttataaggttgtttttattgtttatcttattgattttatatgcattttgtcgttcaatgaagttattgtgtag

SEQ ID NO: 23542 - DNA, 252 bp, Escherichia coli
atgctaaccgtgagcgggagtgaacaagtcaccatagccaggaacactagcggcgtaattcttaagctgagtggcatttcacctgcggtttatcagtgcattcatagtaccttcatcagcgagattgaacgagtcagcttagaatttgctggcgaggttgtcactatgaagcatgagagttacccctatgttttatataacgattctgtccccatacctggaacggtaactctcaatctgatcggttcctga

SEQ ID NO: 23543 - DNA, 261 bp, Escherichia coli
atggaaaccttcctttcccttcgtcatatcaacaaaacgtttcatgccacgcgagcgctgcgcgatgtttctctcgactttatgtcgggtgaagtgcactgccttgccgggcaaaacggctgtggtaaatcgacgttgattaaaattatgtccggtgtttatcgcccggatgagggagcggaaattacgcttggtgggaaaaactggtcaaagctgacacccgccgcttcggtggcgcaggggattcaggtgatttattag

SEQ ID NO: 23544 - DNA, 1254 bp, Escherichia coli
atgtactatttaaaaaacacaaacttttggatgttcggtttattctttttcttttacttttttatcatgggagcctacttcccgtttttcccgatttggctacatgacatcaaccatatcagcaaaagtgatacgggtattatttttgctgctatttctctgttctcgctattattccaaccgctgtttggtctgctttctgacaaactcgggctgcgcaaatacctgctgtggattattaccggcatgttagtgatgtttgcgccgttctttatttttatcttcgggccactgttacaatacaacattttagtaggatcgattgttggtggtatttatcttggcttttgttttaacgccggtgcgcccgcagtagaggcatttatcgagaaagtcagccgtcgcagtaatttcgaatttggtcgcgcgcggatgtttggctgtgttggctgggcgctgtgtgcctcgattgtcggcatcatgttcaccatcaataatcagttcgttttctggctgggttctggctgtgcactcatcctcgccattttactctttttcgccaaaacggatgcgccctcttccgccacggttgccaatgcggtaggtgccaaccattcggcatttagccttaaactggcgctggaactgttcagacagccaaaactgtggtttttgtcactgtatgttattggcgtttcctgcacctacgatgtttttgaccaacagtttgctaatttctttacttctttctttgccaccggtgaacagggtacgcgggtatttggctacgtaacgacaatgggcgaattacttaacgcctcaattatgttctttgcgccactgatcattaatcgcatcggtgggaaaaatgccctgctgctggctggcactattatgtctgtacgtattattggctcatcgttcgccacctcagcgctggaagtggttattctgaaaacgctgcatatgtttgaagtaccgttcctgctggtgggctgctttaaatatattaccagccagtttgaagtgcgtttttcagcgacgatttatctggtctgtttctgcttctttaagcaactggcgatgatttttatgtctgtactagcgggtaatatgtatgaaagcatcggtttccagggcgcttatctggtgctgggtctggtggcgctgggcttcaccttaatttccgtgttcacgcttagcggccccggcccgctttctctactgcgtcgtcaggtgaatgaagtcgcttaa

SEQ ID NO: 23545 - DNA, 1092 bp, Escherichia coli
gtggtgaatgtgaaaccagtaacgctatacgatgtcgcagagtatgccggtgtctcttatcagaccgtttcccgcgtggtgaatcaggccagccacgtttctgcgaaaacgcgggaaaaagtggaagcggcgatggcggagctgaattacattcccaaccgcgtggcacaacaactggcggggaaacagtcgttgctgattggcgttgccacctccagtctggccctgcacgcgccgtcgcaaattgtcgcggcgattaaatctcgcgccgatcaactgggtgccagcgtggtggtgtcgatggtagaacgaagcggcgtcgaagcctgtaaagcggcagtgcacaatcttctcgcgcaacgcgtcagtgggctgatcattaactatccgctggatgaccaggatgccattgctgtggaagctgcctgcgctaatgttccggcgttatttcttgatgtctctgaccagactcccatcaacagtattattttctcccatgaagacggtacgcgactgggcgtggagcatctggtcgcattgggtcaccagcaaatcgcgctgttagcgggcccattaagttctgtctcggcgcgtctgcgtctggcgggctggcataaatatctcactcgcaatcaaattcagccgatagcggaacgggagggcgactggagtgccatgtccggttttcaacaaaccatgcaaatgctaaatgagggcatcgttcccactgcgatgctggttgccaacgatcagatggcgctgggcgcaatgcgcgccattaccgagtccgggttgcgcgttggtgcggatatctcggtagtgggatacgacgataccgaagacagctcgtgttatatcccgccgttaaccaccatcaaacaggattttcgcctgctggggcaaaccagcgtggaccgcttgctgcaactctctcagggccaggcggtgaagggcaatcagctgttgcccgtctcactggtgaaaagaaaaaccaccctggcgcccaagacgcaaaccgcttctccccgcgcgttggccgattcattaatgcagctggcacgacaagtttcccgactggaaagcgggcagtga

SEQ ID NO: 23546 - DNA, 954 bp, Escherichia coli
atgcgcccgctaactgttgccattatcgccgttgccggttttagtccttttcacctttccgtaccgtttatcgtgtttagtgaaaagatggcggagaaaaaacgctttcacgtgattatttgcgctgaaaagccgggaaacgtggactctgccgatgggttttccgtaaccgccacccatgactataccgcagtcatccaggcagatattgtgataattccttactggggaaccattacacaaaaaccgccacaaaaactgctggaagccttaacgaccgcacgggataacggcgcacagattgtcgggctttgcctgggcacgtttgtgctcggctatgcaggtttactgaaaaataagcgtgccgccacgcactgggagttcgagcgtgaatttcaggcacgttttccacaaacacatctggatattaacgcgttgtacgtagacgatgacggcattattacctctgccggtactgccgcggcgctggattgctgtttgtatattgttcggcaacattttggcagcgactatgctaaccatattgcccgacggatggtcgtaccgccatatcgcaccggcggtcaggcgcagtttattgagcaaccggtgccgaaaaatacccatgatgaacgcataaacctcctgctggattacctgcggcaaaacattgcgcaacagcatgatctcgactcgctggcgcagcgagtaatgatgagtcgccgcacattaactcgccattttatgaaagcgaccggttcgagtatcgccgaatggctcattactgaacgcttacgccgtagccaggaactgttgggatccagtcagttgcccgttgagcggatagcggctgaggtgggttttctctcacctgtgacctggcgtcagcattttaaatctcacttcggcgtcagccccgccgaatggcgcaaaacctttcgcggtatggcatga

SEQ ID NO: 23547 - DNA, 777 bp, Escherichia coli
atgaaaattacgcaaattcgtaatgccacccaaattatccaatacgctggcaaaacatttcttatcgacccgttactcgcgcctaaaggaagttatccgggttttgccggaacggcacgcgcagaaatccgcaatccaacggtagaattaccgtgcgatttaacaacgttactcaacgttgacgccctaatcgtgacccatttgcatgaagatcactgggacgaaacagcctcccgcgtcgtccctaaagataaactgatttatgtgcaaaatgagcaagatgctgaatcactgaataaacaaggatttacgcatcttaccgtacttaccgacgagactaaatttggcgatattactctgcataaaacgacagggcagcacggctccgatcgcacctatgccgacccggcgatggcgaagcgtttaggcgcagcttgcggcgttgttttccagcacccgacagagaaaacgctctatctggctggcgataccctctggcgtgacgacgtcgaggctacaatgctaactttccaaccagaagtggttgtgttgaatgccggatttgcgcatgttctggggcatggcgcgataattatgggagcagaagatattctcaaaacacattttaccctcccagaagcgcaaattatcgcgacacatatggaggccgtaaaccactgtttgctgacgcgtgatgcgctcaaggaatacgccagagataatcaaattatcgaatttgtgaacgtaccagaagatggtgaaacgttgacattctaa

SEQ ID NO: 23548 - DNA, 1305 bp, Escherichia coli
atgcacgcgcgttcagcgagagaaattaatcaatgctaccggacattacgtccgcgattgctgatgtgcatgattattggctacgccgcattttatctgacgcgaaaaagcgtgaattacgtccttccggcgctacaaaccgacctcggactggataaaggcgacattggcctgctgggttcgctgttttatctcagctacggattgtcgaaatttaccgccggactgtggcatgacagccacggacaacgcggttttatgggcgtcggcttgttcgccaccgggttattgaacgtggtgtttgcctttggcgaatcacttacgcttctgcttgtggtctggacactgaacggtttttttcagggctggggatggccaccgtgtgcccgcttgctgacccactggtactcacgcaatgagcgcggtttctggtggggctgctggaatatgtcgatcaacattggcggagcgattattccgctgattagcgcctttgccgcccactggtggggctggcaggccgcgatgctgacaccggggataatcagcatggcattagggatctggttaacgctacaactcaaaggcacgccccaggaagagggattaccgacagttggtcactggcgtcacgatccgctggagttacgtcaggaacaacaaagtccgccgatggggctgtggcaaatgttgcgcaccaccatgctgcaaaatccgctgatctggctactgggcgtctcatatgtactggtttatgtgatccggattgcgcttaacgactggggcaatatctggctgacggaaagccacggtgtcaacctgctcagcgccaacgccacggtaatgctgtttgaagtgggcggcttactcggcgcgttatttgccggatggggatcggatttgctgtttagcgggcaacgagcgccaatgattttgctgttcacgttggggttgatggtgtcagtcgccgcactgtggctggcaccggttcatcactacgctctgctggcagtgtgcttttttaccgtgggctttttcgtctttggcccacaaatgctgattggacttgcggcggtggagtgtgggcacaaagctgcggcgggttcaatcaccggatttctcggcctgttcgcttaccttggcgcggcgctggcaggctggccgctgtcgctggtcatcgaacgctacggctggccgggaatgttcagtttactctcggtcgccgcagtacttatgggtttactgctgatgccgttactgatggcgggcatcaccaccactcacgctcgaaggataaaacaatga

SEQ ID NO: 23549 - DNA, 2280 bp, Escherichia coli
atgaatagaattaatatattggtcatctgtatggtcttattttttatgactggcaatgcatgtgccacagagtggatcagtagcgaggaccttatcacctctgactttcatcttatgacggcagatgagcgcaacgtggttaaagcggcaaccgacgatagtatggaagctgcttatatgctaaaagataatatccgctggtattatcataatggtgacctatcattacccgctaacttcagcaataaaaataaactggtggtgaacggtaatttaacgatttccggcgattatgatgattatctgtcaggtaatggtcatctgattgtattaggtaatgttattgtcgataactttattaatcatgatttcgcgtatgtcaaaggacagatgacagcgaaaggtttagtttatgctgattacaatgatcataactttgaagtgatgaagggaattagtgcgcgaggcattattgtttccgataaagcaacgcaatttgaagtcattaaagctgaattttatatcaatgaagatggaagtggtgaaggatataactgggatgagaatattcaaaaagcctattcactggtgactgccgatctttatgatcacactgaaatcgaaaccgataacatttccaatgcgtatcctgactatgatagcgtcgcagacaacatcgttcagggtttaccgctttttcgagataaagccgctcctgaaattaatgagaaattaaaatggattgaaacggggaaactcgataatttcccagcgaataaaataaagcatcaagatccactggtggcacgttttctgactcatacagagagtttatcacccgccgttatgctgcaactgttacagcaccccgatgaccagacgcgtgaatcgatggcgcagtcctggcccgctcaacagatgcattggcttaccgatgaattaattaaagatgaggctgttgccagagggctggttaaaaacagtaatatttccgccgatgtgaataaaaaattaatgtctgtacccgtcgagagcgtacagctggagcaggccagacaggataatctttctccagatattgttgcgtcgttaagtcatagcccctttctcagtgtacgcaagacattactcagccattacgattacgcctggctggttccgactgcagtggccgatgagttgataaataacgaagacccggagttacgtgaaagaattaccggagcagatttaaccgcacaacaagcagtgatgttgagtaaagataaatcactgaaagttcgtgaagcattagcccggacgcttactgaattaaaaattacccaactgtcagcaaccctgcgtacagaggatattgaacgtatcgcagaacaaatgtatctggataataaagaaaataaaaatatcgtaaaggtgttattgatagcgttgccggagatgcgtcaactgtctctggcaaaagaagatgtgcacaatttgcgcgaaggtgcgcgttatctgacatcgaaggacgtgattagttatctattgactcagcatgatgttcccaccgtctgggatgagctggcacgcgataaattattgccgctggaatataagaaacagttatggcaacgcacattaaatttaatgatgagcaaacggcaagaagatcaagagcaagcctacgaagtacagctggcgctgattgataatggtgttgttgacgaagagatgttaaataatgccattgatttactggttgatttacccgctgaataccgctatcgaatgcgtaaccaattatttgataataaagaattaccttccggaattatcaacaaactcgatcaacagtatcgcttcaactctgactgggcgctggctgttgtcagtatgaaaaatagcacccgtagacaaagtgaaagaggattacaccgctggaaccatgaggatagcgatatttttgcggaactggcgacgataaaagataaatcagatgatgaatggtggcgtgcattgctgcaaagtcgcaatgatcatttgcgccaaacggcattacgcaacgcacataccccggcgtcgttgttaacgacattgactgagtctcaggatcggtcgctggctattaataatccacagctggctgccgatgtgaaaacggtgtggctaaaagaggatccatcattacttttatttgtcgataaacccgatctttcgcagttacgggatttagtgaaaaccggggcaacgcggaaaattcgcaatgaagcgcgtcaccggcttgaggaaaaacaatga

SEQ ID NO: 23550 - DNA, 450 bp, Escherichia coli
atgacacaacgcccctggagcaagttacagcgggagatctatgacttactgacgccaacgatcaacctgcaaattcactgtacccgttatcccatgcgcagccaaaatggtggaagcaccgatttaccgcgttattggatcacgttggataaaaacgtgatctgggattacccgaaagactttattgcaggcaacggtggagtgcgtaattttcacggtgaaacttgctggtatccttacctgacggatatttgttcaatttctgatttattgcgtgaatatattgacaccccaaaagcggagttgttaacaaaacaatttaccagcgataaatgggggttagtgaatattctgcgtgctgctgacaggcgaatagggatgaggcgattagatcagttacggcgtaaaacgcataatattgctgcgctaaaaaattattgcccgccgtag

SEQ ID NO: 23551 - DNA, 909 bp, Escherichia coli
gtgcgtataggtatcgatttaggcggcaccaaaactgaagtgattgcactgggcgatgcaggggagcagttgtaccgccatcgtctgcccacgccgcgtgatgattaccggcagactattgaaacgatcgccacgttggttgatatggcggagcaggcgacggggcagcgcggaacggtaggtatgggcattcctggctcaatttcgccttacaccggtgtggtgaagaatgccaattcaacctggctcaacggtcagccattcgataaagacttaagcgcgaggttgcagcgggaagtgcggctggcaaatgacgccaactgtctggcggtttcagaagcagtagatggcgcggcagcgggagcgcagacggtatttgccgtgattatcggcacgggatgcggcgcgggcgtggcattcaatgggcgggcgcatatcggcggcaatggcacggcaggtgagtggggacacaatccgctaccgtggatggacgaagacgaactgcgttatcgcgaggaagtcccttgttattgcggtaaacaaggttgtattgaaacctttatttcgggcacgggattcgcgacggattatcgtcgtttgagcggacatgcgctgaaaggcagtgaaattatccgcctggttgaagaaagcgatccggtagcggaactggcattgcgtcgctacgagctgcggctggcaaaatcgctggcacatgtcgtgaatattctcgatccggatgtgattgtcctggggggcgggatgagcaatgtagaccgtttatatcaaacggttccgcagttgattaaacaatttgtcttcggcggcgaatgtgaaacgccggtgcgtaaggcgaagcacggtgattccagcggcgtacgcggcgctgcgtggttatggccacaagagtaa

SEQ ID NO: 23552 - DNA, 885 bp, Escherichia coli
atgaaaaaaacattactggcagccggtgcggtactggcgctctcttcgtcttttactgtcaacgcagctgaaaacgacaaaccgcagtatctttccgactggtggcaccagagcgttaacgttgtcggaagctatcacacccgtttcggaccgcagatccgcaacgatacctaccttgagtacgaagcattcgctaaaaaagactggttcgacttctatggttatgcggatgcgccggtattcttcggcggtaactccgatgcaaaaggtatctggaaccacggttctcctctgtttatggaaatcgaaccacgtttctccatcgacaagctgaccaatactgaccttagcttcggtccgttcaaagagtggtacttcgcgaacaactacatttacgacatgggtcgtaataaagatggtcgccagagcacctggtacatgggtctgggtaccgatatcgacactggcctgccgatgagcctgtccatgaacgtctatgcgaaataccagtggcagaactatggcgcagcgaacgaaaacgagtgggacggttaccgtttcaaaattaaatactttgtgccgattaccgatctgtggggcggtcagctgagctacatcggcttcaccaacttcgactggggttccgatttaggggatgacagcggtaacgcaatcaacggtattaagacccgtactaataactctatcgcttccagccatattctggctctgaactacgatcactggcactactctgtcgtagctcgttactggcacgacggtggtcagtggaacgacgatgcagaactgaacttcggcaacggcaacttcaacgttcgctctaccggctggggtggttacctggtagtaggttacaacttctga

SEQ ID NO: 23553 - DNA, 195 bp, Escherichia coli
atgttaagaatgatcttatttgtgattattacccgactaacatacctgtatgcgccgcctgaaggaagtctcaacgctgaatacagaatttctaatctggatgcagatttatcttcaccggacgcagacttgtctatgatgtcgcgtcatactatttttcaacacgttgaaatcaggtcagggagagaagtatga

SEQ ID NO: 23554 - DNA, 270 bp, Escherichia coli
atgaatattttgagaaagcttatgcagagtctgtgcggttgcggaaagcatgatgactgtgaaaacggacggtcacttacagcacaattgcgactgggaccggcagacattctggagtcagatgagaatggcattattccggagcaggacagggtaatcacacaggtggtgatactggatgcagataaaaagcagatacagtgtgtggtaagaccgctgcaaatcctgcgtgctgacgggacgtgggaaaatattggcgggatgaagtaa

SEQ ID NO: 23555 - DNA, 135 bp, Escherichia coli
atggagttggtaacaaattgtgtggttggcaattcttggcggatcacggaaatgggcaatgtcgctgaggactggcaaatggctatgatccgctttattatcgggtttggtgaccgccttgacggtcacttttaa

SEQ ID NO: 23556 - DNA, 699 bp, Escherichia coli
atgcgccctacgtccctcaacttggtattacatcagtcatcaaggtcgagctcaatgtcagatacagatatcgagtctcttgtaaaagcatcgagcgttcaatggataaaaaataatccgcaacttcgtttccaggggactgatcataatatatatcagcagattgaagcagcactcgataagattggctctacagagacagggcgtgtactcctgaatgctattgaatcaatatcccgacttaaatcagaaacagtggtaatacacctcaactcttccagactaggagttatggcacatagagatatagatgctgagaaccatcgggggactggttccgattttcactgtaatctgaatgcagttgaatatccctgtggggaggggattagcgtggtggactttcatgcgactattgtttttcatgagttgctccatgttttccacaatttaaatggggagcgtttgaaagttgagagttcccgagcagaatcacaaaaatactctccacttttactcgaagaagccaggactgttgggttgggggctttttcagaggaggtgctttcagaaaataaattccacgaagagattgggatgccccgtagaacctcctacccgcacgactcagctcttattcatgatgacaatacagtgagtctgggattccaacaggtaagactgcatccattgctttag

SEQ ID NO: 23557 - DNA, 138 bp, Escherichia coli
atgtggctgcgtacattcgccgggggttttgtaggtctgataagacgcgccagcgtcgcatcagacatcagcacggtgcctgtgccggatgcggcgtggacgccttatccggcctacatagtgcataaattcttataa

SEQ ID NO: 23558 - DNA, 1020 bp, Escherichia coli
atgggaagaccaagaaaaaataaaaaagataatgtactgccaccgcgggttagatcgaatggttacagttacgtgtggaaacccgaaggaagtacaagaagtatagggctaggaagagtgcggaaaaccagcgtagctaaagtctggcaaaattatgaactggaaaaagcaaaactccacaacataatgaccgtagctaaattgtggcacatgtttatggactcccctgcatttacagaactggccccccgaacccaaaaagattatcgacaacatcagaaggcgttgctgatggtattcggaaaagtgcttgctgataatgtcaaaactgagcaggtaagaattttcatggataaacgagggcttgagagcaagacccaggcaaatcatgaactggcaagcctgagtcgagtatacgggtggggatatgagcgtgggtatgtgaagaataacccatgcaaaggagtcagaaaattctctcttaaagcccgcactgtttacatcaccgatgaacagtatgcggcgatatatgcggaagcaattccacagttacgcattgcaatggagatttcctatctctgtgcggcaagactcggtgatgtgcttgagttgaaatggcaggatattatggataaagggatctacattgagcaaaacaaaaccggcaccaaacaaatcaaggaatggtcaccgcgattacgtacagcgatccagttagcccgaaatgtatcttcctgtacatgcgaatatgtgatcaatacaaccaaaggcgggaaagtcatagctaaaacgctgaataactggtggaatcaggctaaacgcgcagccgagcaaaaagttggcgttccgttcgggtgcaattttcacgacataaaagccaaggggatctcagattacgaaggcagcagtcgcgacaaacaaattttcagcgggcataaaacagaaaatcaggtgttgatttacgatcgtaaaacaaaaatcacaccaacactggatttgccgctcgtggttagcaagtag

SEQ ID NO: 23559 - DNA, 243 bp, Escherichia coli
atgtacgaattaactctatctccagcagagattaaagagatcacgaaatacgagcgatacacaaaacagcaacaccagttaagactgcacggcatcccatttgtaatcggccctaaaaacgaacccatagttctccgcagggatattccacacggtctgacaacgatgccaaaaacatctgaactggtttctgctgaacccgattttgaggcgctgaacaatgggaagaccaagaaaaaataa

SEQ ID NO: 23560 - DNA, 156 bp, Escherichia coli
gtgattgaaaactcacccagtgggctgatctttataaaatatgaacaggttgaaaaaaaaacagtaactttgctgttttttatacttaaccactatgcattaatgctgcgttatttcattctacctaagaaaaaccagcgttacgcaaatggttaa

SEQ ID NO: 23561 - DNA, 417 bp, Escherichia coli
atgaaagcaaaatacgtgattctctctgtacttaataaacaagaactcttctatttaaaatcaagatacaaagaaatgaagaaacttgctaataagcatgaagtctctctcgtagaacaaaatttcattgatgctattatttcaatggtgggttattgctctttggggtttgggttggtaagtatagttaatgggatattgcttgtattctcattttttcaggataatatgttgaaaagtttttttctgtcttcaatcgttagtattgccatgttcgctattcttatcatacacagaaaactggatactaaattctcttaccaattatgcctcaaaatgttttatcttaaaattaagttattctgttattgtattcctgcaccagttgtagttcctgatatattcattaataattga

SEQ ID NO: 23562 - DNA, 912 bp, Escherichia coli
atgggtacagcagctataagtcatttacgatatgatcttaacaaatatgccctttctttacgcaaaaccgcaacacttgcttcaacattttttattgagtccccattagttagattcgagtatctgcaagaaatagaaaatactattaatgatattactcacagattcaattcttcatatgacatcaatgaaaaagcacgacttatcaatgaattaaaaatggagtcagaaacagcaagaaaagaatatcaacttttcagacaaggaaattatgataaatatatcactactgatattttcgaagaacatggtttgataaaatatgtgaacttaagtttcgatattgttgcatctgtaggacaggtcgtaggcggggttggcgcgttgaaatttggtaaggtagtgcattcaaaccgaataaaaggtataggcgtcacattagttgctcatggggcgaataatttttatgaaagcttatcacctttattttttaacgagtatgattcaggtccaatacgtgaactctacagagtaatagcaaaaaaaatgggaggtgatattaattctgctgattatgcatacagcatcgtggacttttcgattactgcatatggtggatattcaggcatgaaaatcgtacctaagtataatagattgattcgtccttcattaggaaatagacctggtacaggacgattatttcattacacatcagttgattttaaaaataaattctcattaaaacctacccctttaaaaatcatacaaattagttctactgtaaaaaaattcaaggttacattttatgatgaaaatacaaatttgaggataaaacatggcctcaataatcatatgccacatcaattattaatgaatatatcaggaactacaactggtgcaggaatacaataa

SEQ ID NO: 23563 - DNA, 390 bp, Escherichia coli
gtgattcagcgtggaacgctggctcgcgaaagtttggcgcttgatgccttagtcttaggtgaacactcatcccgtctggcatggttagcaacggttatccctcagttttccaaatcgggaattgtttataccctgactactcgcgatgccgaacttgtcgccgagtggttaaggaaaaatggtatcagtgcatttgcttactacagcggcgtgacttgtgaaggcgcggaagattctaatactgccagggaatatctggagcaggcgttgctggcaaataaaattaaagtgctggttgcgacaacggcgctgggaatgggctttgacaaaccggatttggggtttgttattcattaccagatgccaggttcgatagttggttactactaa

SEQ ID NO: 23564 - DNA, 603 bp, Escherichia coli
atgatgaatataatcagactttatatttatccgttatttctcggctttgttattgtaccgttgttggtgtggccgacggtggttgcgctggctgcctgtgtaatcacgctgagttttctgggagaaatactgttctcaatcccgctcatgcacaggcgtatttcccttctgcaattacaactatggttatcggctgaatatgcgcttttcttctgtgcaatggtgggcgttggttggcaatttgcgcgcagaacgccacctgaattgaaaagcagactgcattgttggctggtatttgcaccagtttatttctggttgctcctgtggaatatcattttttatgtcgcgccagcgcaaattgctttgctggaaaatatgcgcagtttctttctgacagttgtctggctcccactgaatttttcgccattttggtctcaacagtggatcgactttgtcggtccgataagtgcacagcttggttttgcgttgggatattattgccagtggcgtagcaaaaatagaagccagatacggaagtggagtgagtggggaacgtgcttaagttttgttacgttgggtatgatggcgtgggctttgcggtaa

SEQ ID NO: 23565 - DNA, 486 bp, Escherichia coli
atgggaataacggctcctactcccctaacgtctgaacataatctggctgacttttgctgttccgatcacgggatgaatgaatggctaaaaaagaaagcgttaaaaaatcacagctccggtctgtctcgtgtttacgttatctgtattgccaatacccgccaggtaatcggctattactgcctttctacaggcagtattcaacgtaatttggcccctggagccatgcgacgtaatgctcccgaatcgttgcctgttgtcgtattaggcagactggcaattgatcaagcctgggcaggtaaagggttgggcgtcgcattgttgaaagatgcagtctatcgcacaatgtccatagctcaacaggtaggggttcgtgcgctcattgttcatgccttagacgattcagtacgcaatttctatctgaagtatgcctttgtaccttcaccattccagtcacttaccttactgtatcccattactctggagtaa

SEQ ID NO: 23566 - DNA, 279 bp, Escherichia coli
atgaaaccggaaagcaaagaagcgccaatcaatatcagagcgaaagcctcacagcgtgacctgattgatatggcagcgaatctggtcgcaaaatcgcgcactgattttatgctggatgccgcatgccgtgaagcgcaagacatcttattagatcaacgactattcatccttgatgacgagcaatacgatgcgtttctcgctgccctggacgcccccatcactgctgagcgtcaggccaaaattaacgcgttgatgaatcgtaaatcgccatgggaataa

SEQ ID NO: 23567 - DNA, 435 bp, Escherichia coli
gtgcacgcggcaatctggggacatgcggaagacgcattcccacagctgcacgctgcgggcaaacttaccgctttcgacgtctccgacaagtgggacagcccgctctggcagacactggtgccgcatctcgattttgcctttgcctccgcaccgcaagaagacgaagcgctgcgtctgaagatgaaagcgattgttgcccgtggcgcaggcgtggtgattgtcacgttgggtgaaaacggcagtattgcctgggatggcgtgcagttctggcgtcaggctcctgaacaggtgacggttatcgacaccatgggtgccggagattcgttcattgccggattcctttgcggctggtctgcggggatgacattaccgcaggcgatggcgcagggaacggcgtgcgcggcacaaactattcagtaccacggtgcctggtag

SEQ ID NO: 23568 - DNA, 126 bp, Escherichia coli
atgaatcgtcttattgaattaacaggttggatcgttcttgtcgtttcagtcattcttcttggcgtggcgagtcacattgacaactatcagccacctgaacagagtactacggtacaacacaagtaa

SEQ ID NO: 23569 - DNA, 2382 bp, Escherichia coli
atggatacgccagacgaaaaggaacgcattacatttccgcaagtatcacgacgtagttttttacaagcgacttccgcgcttatcactttgccttttatttcttctaccgcaaaggcgcaatccccagatgcgtcgccagaagttacagctccagtagctgataaagtcgtgcccacctgtagcacatttgactgcggtggtaagtgcgatattcgggcgcatatgcgcgacggcgtggtgacgcaaattaccacgcttcccgataacgaattggatccacaaatgccgattatgcgcgcctgtgttcgtggtcgcggctatcgtaaatttgtttatcatccagaccgtttgaaatatccgatgaagcgggtaggtaaacgaggcgagggtaaatttgagcgtatctcatgggatgaggcgacgaccttaattgccgataacctgaaaaggatcacgcaacaatatggcccagcttcacgttatgtccatgtcgggacggctgtttctggtggaacattttctggcgatgcgatggcgcgtcggctgttaaatttaaccggtggttatcttgaatattatcactcagttagtctgggtaatactgcggcggccacgccttacacgtatggcgtggccgcgagcggtaactcgatggatactcttctggataccaaactggtgattctctgggggcataacccaacggaaaccatattcggtcacaccaattactattttcaaaaaatgaagcaaaacggtacacgttttatcgtggtggatccgcgctattccgacaccgtatcttcacttgccgatcagtggatcccgctgttgccgaccacggacaatgcgttgatggacgcgatgatgtacgtcattatcagcgagaatctccacgataagacatttatcgacacatatactctcggttttgatgaaaactccatgccggaaggcgtaccagccaacgaatcgttggttgcctacctttttggcgcaaaagatgggatacacaaaacgccggaatgggcagaaaaaattacccacgttccagcacaatccattcgtcaactggcacgcgattacgccactacaaaacccgcagcgttgattcagggatgggggccacagcgacatatttgcggcgaacgcaccgcccgaggttcaactttactggcctcgattaccggtaacgtcggcatcaaaggtggctgggcggcaggttacggcggtagttctaatcgtaaattctgcgttggaccagatatgccagaaaatccggtacaagcgaaaatctcgattatgaactggatgcaggcggcggatgatgcttctaaagttacgccgcaagatgggcttaaaggtgtcgataaactcgacagtaatatccgcctgctgttctcactggcaggtaattatctggcgaaccagaacccggacgtccaccaggccgcgaagctccttgaagacgaatctaaaatagaattcatcgtactcagcgatctgttcatgactccgagcgcgaaatatgccgatgtgttgctgccggaaaccagctttatggaacgctggaatatcggcgaaacatggggaactgcgagctatcttattctgtcagaaaaaccgattgagccggattttgaacgtcgcaccgattatgactggttgcgtgacgtggcgaaaaaactgggtgtcgaagccgagttcagtcaaggacgtgatgagaagcaatggatcgagcatatctgggagcaaactcgtctggcgatgccggatgaaaatttgccggacttcgcaaccctgcaaaaaacacgtcgacatcttttcaaaagcgcgccgcacatcgctttcgaagcaaatattcgcgatccgcagaataatcctttcccgacgccttccggcaaaattgagatcttctctaagcgtctttttgatatgcaagatccagaaattcccgcgctttcgcactatgtccctgcctttgaagggccagaagataaactgacggcgaaatacccgttgcagctcatcacctggaaagggaaaaaccgtgctaattccacccagtatgctaacccgtggctgcaagaagttcagacgcaaaaactctggctgaatccgcaagatgcaaaacagcgcgggattagcgaaggagatagcgtaaaaatttataacgatcgtggtgtgagcattatcccggtggaaataaccccccgtatcatccctggcgtagttgctatgcaggcgggggcatggtggcaaccggatgcacaaggtatcgatcgcggaggctgtgccaatgtactgagttcgacccgcattacggcgctggcgaaagggaattcgcatcaaacaatgctggtggaggttgagaaagcatga

SEQ ID NO: 23570 - DNA, 630 bp, Escherichia coli
atgagccaatttaaagaatttgcatctgtcagcgacaaacaattagggttctttattgactcttcgcgttgttcgggctgtaaagcgtgtcaggtggcctgtaaagacaaaaacaaccttgaggttgggcgacgttttcgccgcgtgtatgaagtgaacggaggtggcttcatcgccactggagagggcggtgtgagtcataatgtctttgcttataccctttctgtttcctgtaaccattgcgcggatccgatctgtaccaaaaattgcccgacgatggcgatgcataagcgtcccggagacggtattgtgcgcgtgaatactgataagtgcgtcggttgcggttactgcgcctggtcctgtccttacggcgcaccacaaatgaatgagcagaccgggcagatgtcgaaatgcgatttctgtattgatctgcaagctaaaggagaacaacccatttgcgtggcaacgtgcccgttgggggcgattaagttcggccctattgatgagttgcgtgaaaagtatggcgatgtcagtgatgtgaaaggtttacctgattcgtcgattacgcagccaaatctggtgattaaaccgcatcagggcgcggaaaaggaggcgtcacatcatgcatga

SEQ ID NO: 23571 - DNA, 822 bp, Escherichia coli
atgcatgaattaccgttaatggcttttacgctgttgttacaggcatcggtcggtatgacgttgtggctggcgtttcttcatcgtcatattttaatcacctccagcgcccgcccggttatgcggccgccattactgttggcttttttggcaggtgccgtagggttactgatttctaccttacacctgggttatccacttaatgcgatgcatgcgctgagccacttttccagttcatggctgagtcgggaaattatctttggtgcgctgtatctggcgctattgggtttatccacattactggtcatgttacgcaaaggcggctggcaactcctgcttatgctagcggcagtggtcgggattgttgatgttttctgcatggcgcaagtttacatccatacgtcgattatcacctggcagcattacaacacgctgattatgttcttaggtacagtgggaattctcggttcagcgctggtagcagtgtttcgtattagcggaattttgccgcagattgatgccctgcgtaatggatgcgtgttggtgatcgctctcctggttctgctgcgtttgttggttcagccgttgtggataggggatttaacggcaaatgcgatgcagatagccacattgccacatgcgccattagcgatgctgggacagttaaaacccatactgacactaagctggggaatttccgtcattgggatgatgttctttgctgtcggtggttgtaaaaagaatatcccggcggcgttattcggtagcgtaatgctagtggggagtgaagttatgctgcgttttgtcttttttagtatcggctaa

SEQ ID NO: 23572 - DNA, 855 bp, Escherichia coli
atgttaagtcataacataacgattggcgcggaatgcgcgcgccaacgctttcgttttgcaacatgtcatgcctgtgtcgaggcttgcccggcacaggcgctaacgctgacagaagagggcatagcggtcgacgcggaacaatgtattgattgtgcggtttgccagtttatttgtccgcaagaggctattcgtggcgttaattcccctttacgttatttttgcaatcacaccctggtcgcacctttcaccactattgcgccgacgctggaagaacttttgctatggcataaagagcaggggatcacagcgatcgcgattgatctgagtcaggcgaaggcatgggagcgcgcattattgctgttaaacgaatgcttacggcaatatggcgaggaaggctggtctgtggtatctccacataccagtgaggtgaatgtttcccggcgtcgtttgttccatgtgcagcgtgcggatgttcagatgacacaaatacaaccaggattacgtcggttacattatttatggccccagattagtgatgctcgcccgatgatggatcctcaaaagtgtcagctttgcggtgcatgctggcgggcctgcgagcaacaggtcttttcgcttaacgaaggccatttacaaataaatgatgccttgtgtaacggatgccaaaattgtattgctgtttgttttcatcaggcaatgaccgttgaattgacgattctaccggcaaaaattgtgaatcttcatgctaatcgcaaagtctgtaaaacctgtcaaaaatcctttcttacttttcagcaaaatgcgcaaaattgtctttattgccaacgtcatcgttatgggatgagaacaccataa

SEQ ID NO: 23573 - DNA, 732 bp, Escherichia coli
atgaaagatttcatcaccgaagcatggctaagagcgaaccatacgctcagcgaaggcgcagagatccatctccctgcggacagtcgcctgacgccctctgcccgggagttgctggaaagccgccatctgcgcatcaagtttattgacgagcagggccgcctgtttgttgacgatgaacagcagcagccgcagcccgttcatgggctaaccagtagcgatgaacatccgcaggcgtgctgcgaactgtgccgccagccggtggcaaaaaagccggatacgctgactcacctgtcggcggaaaaaatggtcgccaaaagcgatccgcgtctgggttttcgcgcagttctcgacagcaccattgcgctggcagtgtggctgcaaattgaactggcggaaccgctgggctgccaggcgattgtcgggctttctgacgaagatctgcaccggctttctcatcagccgttgcgttatcttggtcacgatcatctggtgccggaagcaagccacgggcgcgatgcggcgttgctgaatctgctacgcaccaaagtgcgggaagccgaaaccgtagcggcgcaggtgtttatcacccgcagttttgaagtattacgcccggacatcttgcaggcgctgaaccgcctttccagcacggtctacgtgatgatgatcctgagcgtaacgaagcagccgctaacggtgaagcagatccaacaacgactgggggaaacgcaatga

SEQ ID NO: 23574 - DNA, 543 bp, Escherichia coli
atgatactttggtctatgaataaagaaaccgatatccgacggggaaggcattgtgttttcctgatgcatgttcatctgttctttgtcaccagataccgacgtcagatttttgactatgacgcgacagaaaaactacgcacttacttttcaaatgtatgtgctgattttgaagctgaactggttgaaatggatggcgaaccagatcacgtccatttgttaactaactatcctcccaaactggcgatatccagtctggtaaacagcctcaaaggcgtatcgggtaggttactgcgacgagatcgaccagatattgcagtcaggtattactacaaaggcgttttgtggagtcctggctattttgccagtagctgcggaggtgcgccaatatccgtcatccgccaatacattgaacaacagcaaacacctggtcaggtggaaaaccgcgccttatatccccgccctgaaggacggggttttacggcgcaccggataaataaaaaacggcaggggtatctctcctgccgtttatcttttatgcgctaa

SEQ ID NO: 23575 - DNA, 2271 bp, Escherichia coli
atggcgcaccccggacgtcacttttttgccagcgcgcgcgggcgattgctgcttttgaatttgctggtggtggcggtgacgttgatggtcagcggcgtggcggtaatgggctttcgtcatgccagccagatgcaggagctggtgcagcagcaaacggtggatgatatgaccggcagcctgaatctggcgcgcgacacggcaaacgtggcaacggcggcggtgcgattgtcgcaggtggtgggagcgctggaatataaaggcgaagccgagcggttgcaggagacacagcgggcattaaaaagctcgcttgcacaactggcgaacgcgcctttagcgcagcaggaagccgggctggtgacgcgaatcatcacgcgtagcaacgaactgcaaaccagcgtcggcggtatgctggagcgcgggcaaaggcggcatctggagcgcaacgcgctgttaagttcgctgtatcaaaacttaagttatctgcggcatctgcaaaaagtcactcacgcgcaagatgatattttgcttaacgagatgaaccgactgattgttgccgctattgccacccccgcgccgcaggcgattattcatcaactggtcggggtaatgtctgcgttgccgacccacagcgatacgccattggttaatacgttactcaatgatttcaatgatttcaatgatgaaatgcgtaaactcgcgccgctttctgccgctctggagcaaagcgatctggcaatcagctggtatatgtttcacatcaaagcgctggtggcgatcctcaatggcgacatcaaccgttacgccgaacaggtggcgacgctctccggtcagcgtgtggcgcaaagttaccaggatttgcgctccggcgagagggtgatcatgattttcgccctgttagcggtggtgatcaccgcgtttgccggctggtatatctatcgcaacctcggcactaacctgacggcgatttcccgcgccatgagccgcctggcgcacggcgaagcggacgtcacttttccggcgttacagcggcgtgatgagttgggtgaactggcgcgcgcctttaacgtttttgcccgcaataccgcgtcactcgaacgaacctcacggctgctaaaagagaagaccacgcagatggagattgcccaaactgagcggcaggggttggaagaggcgctattacacagccagaaactgaaagctgtcgggcaactgacgggcgggctggcccatgattttaataatctgctggcggtgattattggcagcctggagctggtgaatccggactcgccagacgcgccgcgaatacagcgggcgctgcaagctgccgaacgtggggcgctactgacacaacgactgctggcgttttcccgcaagcagtccttacatccgcaagccgttgaactgaaaacattgctggaagagttaagcgaattaatgcgccactccttaccggcaacgctggcgctggagattgaagcgcagtctccggcgtggcccgcgtggattgacatcagccaactggaaaatgccatcatcaacctggtgatgaacgcccgtgacgcgatggaagggcagacgggaatcatcaaaattcgtacctggaatcagcgcgttactcgcagcagtgggcagcgtcaggacatggtggcactggaggtcatcgatcatggctgcggtatgtcgcaggcggtgaaaagccaggtatttgagccattctttaccaccaaacagacgggcagcggcagcgggctgggtttgtcgatggtctatggttttgtgcgccagtccggtgggcgcgttgaaattgaaagcgcgccggggcaggggacaacggtcagattacagcttccccgcgcgctgacggcggcgaaaaacctatcgccagcggcagtagaacaggcttctgtcagcggcgataaactggtgttagtgctggaagatgaagccgcggtgcgccagaccatctgcgaacagttgcacctgctgggctatttgacgctggaagcaagcagcggcgaacaggcgctggatctgctggcggcatcagcagaaatcgatatttttatcagcgatttaatgctccccggcggcatgagcggcgcagaagtggtcaatgcggcccgcaaactttacccgcacctgacgctgctactcatcagcggtcaggatttacgccccagccataaccccgcgctgccagacgtggcgctgttgcgcaaaccctttacccgtgcgcagttggcgcaggcgctggggcaagagaattga

SEQ ID NO: 23576 - DNA, 1521 bp, Escherichia coli
atgaacagcacgccagttctggagatgcgcaatattgccaaagccttcggcaaattttatgcactcaaaggggtggatttgacggtctaccctggcgagatccatgccctgatgggggaaaacggcgcgggaaaaagcacgctgatgaaggtgctggcgggggcgtataccgccaccagcggcgagattctcatagacggcaagccctttcacattcgcacgccaaaagatgccttaagcgccggtattacgctgatttatcaggagatgcagctggcaccgaatctgtcggtggcagaaaatatttttctcggcagcgagctttcccacggcgggctggtgcagcgtaaagagatgctagtgcaggcgcaaaaagtgatcgaccgcctcggcgcgcagtttaacgccagcgataaggtcatgacgctgaccattgccgagcaacagcaggtcgaaatcgcccgcgcactacatcgcaacagccgcattctggtgatggacgaacccaccgctgccctctcctcccgcgaaactcaccgcctgtttgaactgattatgcggctgcgcgatgaagggatggcgattatctacattagccaccgcatggcggaagtgtatgagctttccgatcgcgtcagcgtgctacgcgacgggcaatacgttggcagcctgacccgcgataacctcaatgccggggagctggtgcggatgatggtcggcaggccactgagcgatctgttcaataaagagcgcgatatcccgctcggtaaagcccgcctgaatgttcaccacctgaccgacggcggcaaagtccagccgagtagcctgctggtgcgttccggcgaaattgttggcctcgccggactggtgggtgccggacgttccgaactggcgcagttgatcttcggcgtgcggaaagcgacaggcggaatgattgaagtcgatggtgaaccggtggtgatccactccccgcgcgaagccatcgatcttggcattggttttctcaccgaaaaccgcaaagaacaaggcttattccttgaaatggcagcagccgaaaacatcaccatggcaaccctggagcgcgatgcccgctggggaatgctcaatcgcaaaaaagcgcaaaccatttccgatgacgccattaagttgctcaacattcgcgtgcctcatgcccaggtacgcgcgggcgggctttccggcggcaatcagcaaaaactgttgatctcccgctgggtggcgattggcccgcgcattttactgctcgatgaacccgcccgcggcgtggacgttggcgccaaaagtgagatctaccggatcatgaacgagatggcgcgcaagggcgtggcgatcctgatgatctccagcgaactgccggagatagtgggaatgagcgatcgcgtctatgtgatgcgcgaaggcagcattgccggtgagttaaacggcaaaaacatcacccaggaaaacattatgaccttagcgactggcgtcaacgacgcccattcccaggcggtaacctcatga

SEQ ID NO: 23577 - DNA, 975 bp, Escherichia coli
atgacgacctctgcaaaaacctctgccaaaaaaatgctgatgagcgatctgatgcaaacggtcggcatcttgcccattttgattctgatcgtggcggtatttggctttatcacgccaaacttttttaccgaaagcaacctgctgaatattacccgccaggcatcgatcaacattgttctggcggcggggatgaccttcatcattttgaccggcgggatcgatctttccgtgggttcgatcctcggcaccacagcggtggcggcgatggtcgtctcccttagccctgagttcgccatgctgtcgatcccggcagcgctgatgctcggcctgctgctggggctgttcaacggcgcgctggtggcctttgccggattgccaccgtttatcgttacgcttggcacctatacggcgctgcgcggggcggcgtatctgctggcggacggcaccacggttatcaactccaacattaatttcgagtggataggcaacaactatctcgggccggtcccatggctggtggtgattgcgctggcggtgatcgtggtgtgctggtttattctgcgccgcaccacgcttggcgttcatatctacgccgtcggcggcaatatgcaggcggcgcgtcttaccggcattaaggtctggctggtgctgctgtttgtttatggcatgagcggcctgctttctgggcttggtgggattatgagcgcctcacggctgtacagcgccaacggcaacttaggcatgggttacgaactggatgccattgcagcggtgatcctcggcggcaccagttttgtcggcggcatcggcaccatcaccggcacgctggtcggcgcgctaattatcgccacgctcaacaatggcatgaccttaatgggcgtctcttacttctggcaactggtgatcaaaggggcgatgatcatcattgcggtgctgatcgacaaataccgtacccgacaccatcaaagtgcataa

SEQ ID NO: 23578 - DNA, 942 bp, Escherichia coli
atgagattgaagcccttagtgaccgcgctctgtgcaggcgcgctgctggccgcagcaccgttcgcccaggcgaaagaactgaaatcaataggcgtaacggtgggcgatctggcgaacccgttcttcgtgcagatcaccaaaggcgcggagctggaagcacgcaaactggcaggcgataacgtcaaagtgacgctggtttccagcggctacgatctgggtcagcaggtgtcgcagatagacaactttatcgccgctaacgtcgatatgattatcctcaacgctgccgattcaaaagggatcggcccggcggtgaaacgggcgaaagatgccgggatcgtggtcgtcgcggttgacgtagcggcagaaggtgccgatgccaccatcacttccgataacacccaggcaggcgaaatggcctgtaaatacatcaccgatcgcctgaaaggcaaaggcaacgtggtgatcatcaacggcccgccggtatccgccgtgcaaaaccgcgtcgaaggatgccagactgaatttaaacgccatcctgacatcaaagtgctctctgacaaccagaacgcgaaaggcagtcgtgaaggcgggctggaggtaatgacgggactgctggcggcaaatccgaagatcgacggcgtatttgcgattaacgatcccaccgcaatcggtgccgatctggcagcaaaacaggcacaacgtaacgagttctttattgtcggtgtggacggaagcccggacgccgaagaggcgctcaagcgtgagaactcgttgtttgtcgctactccggcgcaagatccccaggtgatggcagcgaaagcggtggaaattggctacgacattttgcagggcaaacctgcgccgaaagagccggtgctgatcccggtgacgatgatcgataaaaacaacgtcggcaattacaaaggctggacggtgaaataa

SEQ ID NO: 23579 - DNA, 684 bp, Escherichia coli
atgaaacgctccgctataaacgacattctcggccatacacggcaattcttttcgcaacatgacgtacatctgccgccctttgccagtttctcgcctgctcaatggcagcagctcgacaccgccgcgtgggaggaggtttttgatcttaaactcggctgggatgttaccgcttttggtcgcaacaactttgcagcacacgggctgacgctgtttaccctacgtaacggctcagcaaaaggaatgccgtatgtgaaatgttacgccgagaagatcatgcatgtgcgcgatgcgcaggtcacgccaatgcattttcactggcgtaagcgtgaggacattatcaatcgcggcggcggtaatttaattgttgaactgtggaatgccgatagtaacgagcaaacggctgatagtgacattacggtggtgatagacggctgccgccagaaacatactgcaggctctcagttgcgcctgtctcccggcgaaagtatctgcctgccgcccggcctgtatcacagcttttgggcagaagccggttttggcgatgtgctggttggcgaagtctcttctgttaatgacgacgaccacgataaccactttttacagccactggaccgctacaacctgattgacgaagacgaacctgcacagttggtattgtgtaacgaataccgccagttccgctga

SEQ ID NO: 23580 - DNA, 861 bp, Escherichia coli
atgccattgatttctctcgctgaagggctggcacatgcccgcgaacatcactattcgttaggtgcgtttaatgtgctggactcgcactttttacgcgccttgtttgctgctgccagacaagaacgttcgccctttattatcaacattgccgaagtacattttaaatatatctcgctggattccctggtcgagacagtgaaatttgaagcggcgcgtcatgacattccggtggtgttaaatctcgatcacggactacattttgaatcggtggtgcaagcgttgcggctgggattcagctcggtaatgtttgatggctccacgctggggtatgaagaaaatgtccgccagacgcgggaagtggtgaaaatgtgccatgccgttggcgtatcggtagaagctgaactgggcgcggtgggtggcgacgaaggcggtgcactctatggtcatgccgatgaatccctgtttaccgatccgcaactggcgcgtgattttgtcgaccgtaccggcattgacgcgctggccgtggcgattggcaatgcacacggcaaatatcgcggcgaaccgaaactcgatttcccgcgcctcgacgctatccgccagcaggctgctatcccgctggtattacacggcggctcagggattagcgatgccgatttccgccgcgccatcgaactgggtatccacaaaatcaatttctacactggcatgtcgcaagcggcgctggctgccgttgaggcccgaatggcgcaccgtcagccgatgtatgacgagtttgccgagttactgctggcagtggaagccgccatcagcgatacggttgcacaacagatgcgtatttttggcagtgcggggcaggcatga

SEQ ID NO: 23581 - DNA, 1002 bp, Escherichia coli
atgatggagcgtaaagggattatcgccgcaggcaatatgttggttgaccacgtccatcagattatccagtggccagagcgcggctggctggcggagatcacccacagcgaacgctccaccggcggtgcgccgcttaacgtcctgctgacgctggcgaaaatgcgcaccgggctgccgttacaggcggttgggctaatcggtcaggacagcgacggcgattacatcatggcgatgcttgagcaatatcacgtcaatcgtcagcatgtgcagcgcactacctttgccccgacgtcgatgtcgcaggtgatgacagacccaagcgggcagcggacgtttttccattcgccgggtgcaaacagacttttggatcttccggcgttcgatcagctcgataacaccatgaagattttccatctcggctatttactgttgctcgacagcctggatatgccggacgatgtttacggcacccgtagcgcacgcctgctggcgcaaatgcgtgatactggctttgaaacctcactcgacctggtctcccgtaagggcgatccgcgttatcagccgctggtgctgcccgcgttgcgccatctggattatctggtaattaacgaactggaggccggggagtttagcgggctggaaattcggttacccaacggcgaaccgcatatcgcgcatattgctgccgccgcgcgtgaactgttagatgcgggcgtgcgccagcgggtggtgatccactacccggaaggggcgtggggagagaccccagaacagggcggcgtgtggatcccttcgcaaaagttagaacaacgggaaattatcggcagcgtcggcgcgggcgatgcattttgtgccggatttttatatggctgccatgaacgctggacgcttaccgagagcatcaaactggcacacgcctgcgcgcgggcaagcctgttatgcgccaatgccatcgacggggcgaaaacgctggaagagctgcaaacagaaatgtcggattaa

SEQ ID NO: 23582 - DNA, 708 bp, Escherichia coli
atgaaacccgtcgtgctggtggtggatgatgacacggctatctgcgcactgttgcaggacgtgttaagtgaacatgtctttacggtttcagtctgccataccggacaggaggccatattgcgtattgagggcgatcctgacattgcgctggtggtgctggatatgatgctacccgataccaacggcctgagggtattgcagcaaatccagaaactgcgtccgacattgccggtggtgatgttgaccggcatgggcagtgagtctgatgtggtggtcgggctggaaatgggcgcggatgattacatctgcaaaccgttcaccccgcgggtggtggtcgcacgactgaaagcggtgttgcgacgggttggcgcgctggcggttaatgacgagaaaagcgccgggctgtcattcaatggctggtatctcgataccatgcgctgccagttgcacaatccgcttcagcaacatgtcgagttaactcagggcgaatatggcttgttactggctctggcgcaaaacgcgcgtcgggtattgagccgcgagcagttgctggcgttcacccacagcgacagcgtggaggtgtttgatcgcaccatcgacgtattaatcatgcgcttacgacgcaaaatcgaactcaacccgcatcagccgatgttgattaaaactctgcgcggtctggggtatgtcttcgctgccgacgtgcattaa

SEQ ID NO: 23583 - DNA, 360 bp, Escherichia coli
atgaatatatcatatgtgaatagcaacaaaacgacatctttacctattgagttagatgtacaaaataacaaagatttttcttatgccaaagatttctttttatatatagaaacacagttaaaaattgcaaaagatttttgtagacctgaagaagaagtatcaagttctattgcaagtacagtttttcacgcttttattgatttagttaacaaaatcatgggtaagaaagattgtatgtatatttgcacgctttgctgttttgccgaggaggttaaagatgattattctcattacaggaccttttcatttgatattagtaatcaatataaggttaaacttacacaaaggagttctctttaa

SEQ ID NO: 23584 - DNA, 354 bp, Escherichia coli
atgaaaagagcgcctcttataacaggacttttgttgatatccacatcctgcgcttatgcctcctcagaagggtgtggagctgacagcactagcggtgcgacaaattacagcagtgtggttgatgatgttacggtgaaccagacagataacgtgacaggacgggagtttacctctgcaacgctaagtagcactaactggcaatacgcctgttcctgctctgcgggtaaggcagttaaacttgtctatatggtcagccccgtacttaccaccactggacatcagacaggatattacaaactcaatgacagcctggatattaaaaccatgaaccgccccggaaatcctggagactaa

SEQ ID NO: 23585 - DNA, 1404 bp, Escherichia coli
atgctgttcggtacccgttctgaaaaactgcgtcgtgaagttgaacaggctgaggccctgctgaaacaacgcgaacaggacagcgatcgttacagtgggcgggaagacgatccacaggttccccgccagttgcgacagtcgcgccatcgtcgtccgttaccggcacaccttccccgtgaaatacagcgtctggaatctgaagaaagctgttgcccggagtgtggcggtgagctggattatctgggggaagtcagtgcagaacaactggaactggtgagcagcgccctgaaagtgatccgcacagaacgggtaaaaaaagcgtgtacaaaatgtgactgcatcgttgaagcaccggcgccgtcccgcccgatagagcgtggtatcgcgggccccggattacttgcccgcgtgttaacgggaaaatactgcgaacacctgccactgtatcgtcagagtgaaatctttgcccgacagggtgtcgaactgagccgtgcattactctccaactgggttgacgcgtgctgccagttaatgacgccgctgaatgatgccctgtaccgttatgtgatgaatacccgcaagcttcacactgacgacacaccggtaaaggtactggcaccgggcctgaaaaagacgaaaacagggcgcatctggacgtatgtccgggatgatcgcaatgcgggttcgtcatctcctccggcggtctggttcgcgtactcaccgaaccggcaggggaaacacccggagcaacacctccgccccttccggggtatcctgcaggcggatgcgttcacaggttatgacaggctgttcagtgcagaacgtgaaggtggtgcgctgacagaagttgcgtgccgggcccatgcccggagaaaaatccacgatgtatacatcagcagcaaaagtgcgacggcagaagaagccctgaagcgaatcagtgaactgtacgccatcgaggatgaaatacggggattaccagagtcagagcgtcttgcagtcagacagcagcgaagcaaagcgttactgacgtcgctgcatgaatggatgatggagaagaatggcacgctgtcgaaaaaatccagactgggcgaagcgttcagctatgtactgaatcagtgggacgccctctgttattacagtgatgacggactggcggagacggacaataacacagcggaaagagcgcttcgtgcagtctgtcttggaaagaaaaattacgtgttcttcggtagcgatcacggcggcgagcgtggtgcactgctatacgggctgatcggcacctgccgtctgaacggtatcgatccggaagcgtatctgcgccatattctgagcgtactgccggaatggccctccaaccgggttgatgaactcctgccatggaacgtagtactcaccaataaataa

SEQ ID NO: 23586 - DNA, 351 bp, Escherichia coli
atgatttcactcccatcaggtacccgtatctggctcgttgccggcgttaccgatatgtgtaaatccttcaacggactgggagaacaggtacaacatgtgctgaatgataatcccttctccggtcacctgtttatcttccgtggccgacggggggacaccgttaaaattctttgggctgatgctgatggtctgtgcctgttcaccaaacgcctggaggaaggccagtttatctggcctgcggtgcgtgacggtaaggtatccattacccgctcgcaactggcaatgctcctcgataagctggactggcgtcagccaaaaacatcccgccttaacgccctgacaatgttgtaa

SEQ ID NO: 23587 - DNA, 843 bp, Escherichia coli
atgaaaaaatggacgatatttttgacaagtctgatattacttgctctcagtttagaaacaccaaagtgctatgccggtgataaactcatgagtgcaagcttttccagtactaaaatttattatgcgatgaaaaacgttactgcttccggcagtttatatttctatgtcacggtagtgacgccgggagaagtaagctacggacaatacaactccaatgcaagaaaaggcgacaccctcaagttaatatcctggagcggatctggcccggcaccgacactggttttgactgattatagacgtacggacacctcaaattgccctggtatcaatactcgtgtctttgtctgtgcatatatgacttttaacgtcactgtagaatctgataattatggttgtccgtggattgcctcattttattcagtatctgaggcatttggatttggtacgtatacaagcccaacagttcatgattctatttgcccgacaattcccgtcgcttcgtttgatatatcctggagtgataattatgttagccataataaagcgctgcgattgcaatccgatggttcgacaatcacgactacgctttcgacctacctgatggaaagcggcaaactctgcgatggcagtatttttgattccagaggggcatattgtcgtgctgtttctgacttattaacctttacctcgtatggttgtgataatgcaaaggtgacagtcaccccctcacgtcaaccattgacggatagaaagctacacgacattgtggtacaggtgaataccagtagccgtgagccaattgattctacatgccgtttccagtatgtactgaatgaactgtag

SEQ ID NO: 23588 - DNA, 429 bp, Escherichia coli
atggcgctctcgaatgtctcttttcatggttatttagtgcagccacccaattgctctattagtaatgggcaaaatatagagttgacgtttcgggacgtgaatattgatgacattaacggtagcaattacgaacaggtcgtgccgtataccattacctgcgataccgctgtccgtgaccctcaaatggaaatgacgttgacctggagtggtacgcagagtgactttgacgattcggccgtagccacggatctcaatggattaggaatacacctcaaacaagccgggagcgattttaagctgcatacgcccttagtggtgaatgaaacatcccttccggtactaacggcagtacccgtaaaaaagagcggtgtcgacttacccgagtcagactttgaagcatgggctacgttacaggtggattaccaatga

SEQ ID NO: 23589 - DNA, 501 bp, Escherichia coli
atgaaaggagcttattcggcctgggcgtggttattgctgtgtagcattgtgagcacgcctgtaatggcggggagtaaatcggttgcgatggtcttgcgtgtgctcgttgatgccccgccgccctgtacggtaacgggtgcgagcgtggagtttggtaatgtcttcatttccaagatcgatggggtaagttacaaacgccccattgactactcgcttgtgtgcaacaatctggcaatggacgacctgcgcttaaatatgcaggcaaccacaaccgtaattaacggagaaacggtaatcgatacgggtattgccggttttggtatccgtattcagaaagtaagcgatcactccattttggatttaacgcctggcgcatggttaccgtttaacttttcatctggcgcactggctctggaagcggttcctgtcgtgcagagcggtgtatcgctaacggcggcggaatttagcgccagtgccacaattgtggtggattatcaatga

SEQ ID NO: 23590 - DNA, 759 bp, Escherichia coli
atgacgaatctattttgctctgccagaacggccgcaacgacgctggcgttactgataactgccgccagcctgtcagtacaggcctctgtcacgccggaccgtacacgcctgatttttaacgaaagtgataaatcaatcagcgtcacgctgcgcaataacgacccgaaaatgccgtatctggcacaaagctggatggaagatggacagggtaacaggattagctcgccactgacggtcctgccgccagtgcagcgcatcgattccatgatgaacggtcaggtgaaggtacagggcatgccggatatcaacaagctgcctgccgaccgcgagagcgtgttctatttcaacgtgcgtgagatcccgccgaaatcgaacaaacctaacacgctacagatagcgctgcagacgcgcattaagttgttctggcgaccaaaggcgctggaaaacgtcagcatgaaaaacccgtggcagcataaggtgaccttaaccctcagtggtcaggagtttaccgtcaataacccgacgccgtacttcgtggttatcagtaacgccagtgcgcagaaaaatggcaatccggcagcgggattttcccccatggtgatatcgccaaaaacctctgtgccgttaaaagtcaaaatggatagcgtcccggtgctgacctatgtgaatgattatggtgcgcgtttgccgctgttcttccgctgtacgggaaatacctgtcaggtggacgaagagcaaaacagcaaaggccagggatag

SEQ ID NO: 23591 - DNA, 564 bp, Escherichia coli
atgagtaagtttgtaaaaacagctattgctgcaacaatggtaatgggtgcgttcgcttctacttcaacaatcgccgctggcaacaatggtacagcacgtttctacggcaccattgaagattccccgtgctctatcgttcctgatgatcacaaactggaagttgatatgggtgacattggttcagggatcctgaaaaataacgggacttctacaccgaaagctttccagatccatctgcaagactgtgtgtttgacacccagacaacgatgaccactaccttcaccggtaacgcgtcttctaccaacagcggcaattactacaccatttacaataccgatactggtgcggcatttaacaatgtcagcctggccattggtgacgctcagggaacctcttataaaagcggcgcgggtatcgaacagaaaatcgtaaacgatacggcgaccaacaaaggcaaagcgaagcagacgctggactttaaagcctggctggtgggcgctgctgatgcgccagatttaggtaattttgaagccaacacgaccttccagattacttatctctaa

SEQ ID NO: 23592 - DNA, 648 bp, Escherichia coli
atggtgaacgaaagaagcattaatgggcaagctggcaaaattgtcagcaaatgggtaacactggcaaacaatgcaatcccatcaaatgttcctccccagtgggatctagatttgaaaggtcagcaatattcagagcctacaaagtgtataggtaaacagattgattacatggcaaagcccgaaactaagttaaatgactttaatagagaggcgagcaagagcctatatgattggtcagatgccaacgtttggggttattcgaatggctgggcgcggcatgagataaaaaaagaaacactttctatcactggctttcatgctgtaagacgcatactaaaagccgttcaggcatcaaggaaagacaactacaaagctaagcgacagatacagcgtacattgaaacgacaagacataaatcgatcaccaatcaccccgttccaagcaccgttaattagcaaacacgattgggatttatcagtgatagcggtcaccaaagaggcagagacagagcgcagggaattactatcctcacagataataaactcgaacaaagtacaaacccacccactgttaaggatgttaagaagagcacgagtgagagcatccagagccaaaagagaaagcggaggttatgaccattactactag

SEQ ID NO: 23593 - DNA, 1413 bp, Escherichia coli
atgtcttatgcgttgattgataatgcttcgttaacagcagtcgaaagaacactgggtgatattcttgttaagaatccagatactattaacggagatttagtcgcttttgaaaatcttattcaagcgatacttttttacgataccctgatctgtgtagataattataaaaaagaatatagagataaacgcattgctaaatttgactttattaaatttgtatctgaaagtgattttcaactcagtgaacttgatcagttagcacaagttgaatctcggcaaattacttccgaaattagaggtggggagtttgttgacgatgattttaggcaacttgtagagatgcttaagctgaatatgatttgcacatgggatcttcggtctagcgtgtattacttaacaatgaaaatgcttggtcagcccggtactcctgaatatgcgaaatatagtgaactaagtgcatcgatttttaatgaattatcagatgcttctgatacgaaagggtactggtcaaccgatgtgaagctagtgagttcatctggacatgaatatactgagcgtgaatttgaactagaaagggaaaaatctactcgcggtaaaggaggtatgactcgttcacttgaaatgtttatcgcatcgctaaattggttggcatataaatctatttattacagcgtcattgctaagcattttaaagcagactcatttattcatccaataaggcatgcatatcaattgcattggatgaaaaaaacaggtgcttttggtcatgattatactgcaaggttggtgcaatcgttgtctgataaaatcagtactgcaagatctgaaattgtagatcatggacgcacatctactatttcattagatttaccaatattttctgcatggctagcaaacgaaacaggaaatgtctctcaagttatcaattcagctttagagcttagaacacatgatcattttcgtacgtgtcgagatgtaatccgagagattcatgtgacctacgatgaatcggggataagtgcaggaaataaaaaagtaacaaaattactaagtgatttagataaaatatctggagatattaaacgaagctacggtgttccatcaaatcaaggtattcaaggcagttttttgataaaatgtataaattcattgacaggactcgtgggtattccaggtttgcctgataaagagtttgcactgagcactcctgaatttatgaagtctaaacaacataaagcattttctaccgttttcaaggatgttactaacgaactaacaagcattgaacgtttaggtgggcttcgggataaattagcgtcgaactttactattgatgattcttattataccgagccaaaaacagaggatccgagattccgttacgtaagtagtaattggaagcagccaatgtag

SEQ ID NO: 23594 - DNA, 177 bp, Escherichia coli
atggaaaaagacctgaaagagttgcgggaatacctattactttcccccgtctattctgaaattaacgattgtctggctagtctctcaatggaagacgtgaccaatgaagagttcgcggaacgtttgggaattgctcctgattggatggatgctatagatactagccaacttgcttaa

SEQ ID NO: 23595 - DNA, 627 bp, Escherichia coli
atgaacgttagaatttactgccgagcatcaactgaggggcaacacgctgatcgagcacttaccagcctacgtgaattttcaaaatcaaaaggctggcagattgcaggagagtatatagaaaatgctagcggggcgaagcttgagcgcgtagagcttatgcggctattgtctgaagcccagtccggcgatctgttgctagtggaagctatagatcgtctgagtcgcctagaacatagtgcatgggtcgaactgaaagatacgctcaaccgaaaagggttaatcatcgtatcaatggatttaccaacgagctggcagatggtcgagatggcaggcaatgatctaaccagcggcatcctgagagccgtaaatgccatgttgattgatatccttgccacaatggcacggcaggattacgaaacacgccgtaaacgccaacagcaaggcattgaacgagctaaaagcgaaggcatatacattgggagggcgaaaaatcaggaagcccgagagatcgttagagagatgttggagcaaggagtaaaacctgaactcatcatgaaggcagcaggaatcagccgagcgacttactaccggataaaaaacgagctattgatcgtaaaatcagaataa

SEQ ID NO: 23596 - DNA, 783 bp, Escherichia coli
gtgacgtttgccaatggtaaccacattacgtttgtcagccacggtgagacgaccttactgaccgaaaagggcaaactgaaattgcagtcgcatctcgatcgtgaagagtacgttgccagagttctggatcgcgaggcgaaaagtacgccacctgaggcagcgaaagccatgactgtggcgatacgcacttttttacagcaaaacgccaatcgggaaggcgattgcctgaccatccccgacagcagcgccacgcagcgtgtttctgcttcgccagctaccacgggggcgcgaacgatgaccgtctggacgcaggatctcatctatgcgggcgatccggttcattatcacggcagtcgcgctaccgaagggacgctttcctggcggcaagccatggcccaggcggggaagggagagcgttacgaccagatactcgcgtttgcttatcccgacaacagccttagccgctggggagcgccacgcacaacctgtcagttattacccaaagcgaaagcctggctggcgaaaaaaatgccgcagtggcggcgtatattacaaggcgagacggggtacaacgaaccagacgtgtttgcggtctgtcgtttagtctcaggtttcccctataccgatcggcagcagaaacggctgtttattcgtaacttctttacgcttcaggatcggctggatttaacccatgagtatctgcacctggcctttgatggttatcccaccgggcttgatgagaactatatcgaaacgctgacccgacaattattaatggactaa

SEQ ID NO: 23597 - DNA, 135 bp, Escherichia coli
atgcatacggcttttgagttctgggttcgcaagacattcggcaatcgctacgacctgacccgtgatgtcgacggcttctactgccgtgaagttgtgaaacgaatgtttgacgtgtggtgccactgccgtggatga

SEQ ID NO: 23598 - DNA, 243 bp, Escherichia coli
atgttcgctctgattcaacgtggtcagatatacacggacagagccggataccctgtggtgattactcgcagtactcagcactcagtgttctttcgacgcatggacgggcgctccggacgggtacgcattggtgagttcaacaacctgttcgaacatattgaccaacaggagtaccgcaaaattctggcgggcactgagcaggaaatgcgcctgaaaaaattacgcgcaatgcaacggaggtga

SEQ ID NO: 23599 - DNA, 801 bp, Escherichia coli
gtgattgcggaatgtcatgttaactgcctggttgaaacagatgttcaggcttatgcaaacgctgaattcatagcagaggctaacccggctaccgtgctggaacttctggatgaacgggaaagaaaccagcaatacatcaaacgccgcgaccaggagaacgaggagattgcgcttacggttgggaagctgcgtgttgagcttgaagcagcaaaatcaaaactcaacgagcagcgtgaatattacgagggagtaatcgcggatggaagtaagcgcatagcagaactggaaaaacaatgcgccgaatgggagcgaaaagcattaagcaactttgaagagtgtgctgcgatggctgaacgtatcgaagagatgcagacaaaatctgcaccagattcgtttggcatcatcggtgaaaatattcgaacacaggacaatcgaataacgtcagatcccatgttttgtgtgtatcaaaagcgcgaaatcgctgttgatgctgattatgaccatgaccggattgtctgggttgacgaagatggcaatgaagccaataaacgccatagtcgtcgtctcgagctacttcatgaaaactttcgagagccaccagaaaaatggcggcgcgttgctgtgaaagatattgatgaattcgttacctgctgtttcaccgaacagggttgtaaagactacctggcagtcaatggtcacaatcttcgcttgccatttatatatgtaaaaagcggtttcaggaacgctgaatatatcggcataagaaactggcttgctggcattcgcatcaaaggagagtga

SEQ ID NO: 23600 - DNA, 537 bp, Escherichia coli
atgagtattgtaaaagaggagcacaaagccacgctgcgcaaatggcatgaggaattgcaggagaaacgcggcgaacgtgccagtctgcggcgtagtacgacggttaatgatgtttgtctgacggatggatttcgcctgtttctgaagaacagacaaataaagtggcaggatgaacctgaatggcgtattaccgcactggcgctgatagccgcacttagcgctaatgttaaagccattgatgaacggctgccttttgctgcgcagctggcggcggtaatgtcaaaggggcgttttactcgcctgtcggcagtaaaaacaccggatgaattactgcgccagttacgccgcgtagtcagattattaaacggttccgttaatcttgactctctggcagagggtgtcttccgctggtgccaggagagcgacgatctgctcaatcatcaccgccgtcatcagcggccaaccgaatttatccgtatccgctgggcgctggaatattaccaggctggcgacgtcgataacgaacaaaatcaataa

SEQ ID NO: 23601 - DNA, 207 bp, Escherichia coli
atgacgcatattcggatcgaaaaaggaacggggggctggggcggcccgcttgagctggaaaccacgccgggcaaaaaaatcgtctatatcaccccgccggtacccggcctgcgattgtcgacaaactggcacagcttactggctggcaggctattgacggatttaaagaaggtgaacccgcggaggcggaaattggtgtcgcggtaa

SEQ ID NO: 23602 - DNA, 1734 bp, Escherichia coli
atggaagcgcgggaagcaaccgctacgggtgaatcatgcatgcgcgttgatgccattgctaaggtcaccgggcgggcacgatatactgacgattatgttatggcgggcatgtgttatgcgaaatatgtacgtagccctatcgcacatggttatgccgtaagtattaatgatgaacaagccagaagtttaccaggcgtactggcgatttttacctgggaagatgtgcctgatatcccattcgctacagctgggcatgcatggacacttgacgaaaacaagcgcgataccgccgatcgcgcactgctaactcgccatgttcgtcatcatggtgacgccgttgccatcgtcgtggcccgcgatgaactcacggcagaaaaagcggcgcaattggtcagcattgagtgggaagaattacccgttatcaccacgccagaagcggcgctggcagaggacgctgcaccaatccataacggcggcaatttactgaaacaaagcacgatgtcgacgggcaatgtccaacaaacaatcgatgccgccgactaccaggtacaggggcactatcagacccccgttattcaacattgtcacatggaaagcgtaacatcgctggcgtggatggaggatgactcgcgaattaccatcgtttccagcacccagatcccgcacattgttcgccgcgtggttggtcaggcgctggatattccctggtcatgcgtacgagtcatcaaaacatttgtcggtggcggttttggtaataaacaggatgtactggaagagccaatggcggcattcctgaccagcaagcttggcggcattccggtgaaagtttcccttagccgtgaagagtgtttcctcgcaacccgtacccgccacgcttttactattgacgggcaaatgggcgtgaaccgcgacggaacattgaaaggttatagtctggatgttctgtctaacaccggcgcttatgtatctcacgggcactccatcgcttctgcagggggaaataaagtcgcttacctttatcctcgttgtgcctacgcttacagttcaaagacctgctataccaacctcccctcggctggtgcgatgcgtggttatggcgcgccacaagtcgtatttgccgttgagtctatgcttgatgacgccgcgacagcgttaggtattgatcctgttgaaattcgtttacgcaacgcctcacgcgaaggagatgctaatccgctcacgggcaaacgtatttacagcgcagggttgccggagtgtcttgaaaaaggccggaaaatctttgaatgggaaaaacgccgtgcagagtgccagaaccagcaaggcaatttacgccgcggcgttggcgtcgcctgttttagctacacctctaacacctggcctgtcggcgtagaaatagcaggcgcgcgccttctgatgaatcaggatggaaccatcaacgtgcaaagcggcgcgacggaaatcggtcagggtgccgacaccgtcttctcgcaaatggtggcagaaaccgtgggggttccggtcagcgacgttcgcgttatttcaacacaagataccgacgttacgccgttcgatcccggcgcatttgcctcacgccagagctatgttgccgcgcctgcgctgcgcagtgcggcactgttattaaaagagaaaatcatcgctcacgccgcagtcatgctacatcagtcagcgatgaatctgaccctgataaaaggccatatcgtgctggttgaatga

SEQ ID NO: 23603 - DNA, 783 bp, Escherichia coli
atgaacaaagaaaccgtttcaataattatgcccgtttacaatggggccaaaactataatctcatcagtagaatcaattatacatcaatcttatcaagattttgttttgtatatcattgacgattgtagcaccgatgatacattttcattaatcaacagtcgatacaaaaacaatcagaaaataagaatattgcgtaacaagacaaatttaggtgttgcagaaagtcgaaattatggaatagaaatggccacggggaaatatatttctttttgtgatgcggatgatttgtggcacgagaaaaaattagagcgtcaaatcgaagtgttaaataatgaatgtgtagatgtggtatgttctaattattatgttatagataacaaaagaaatattgttggcgaagttaatgctcctcatgtgataaattatagaaaaatgctcatgaaaaactacatagggaatttgacaggaatctataatgccaacaaattgggtaagttttatcaaaaaaagattggtcacgaggattatttgatgtggctggaaataattaataaaacaaatggtgctatttgtattcaagataatctggcgtattacatgcgttcaaataattcactatcgggtaataaaattaaagctgcaaaatggacatggagtatatatagagaacatttacatttgtcctttccaaaaacattatattattttttattatatgcttcaaatggagtcatgaaaaaaataacacattcactattaaggagaaaggagactaaaaagtga

SEQ ID NO: 23604 - DNA, 1941 bp, Escherichia coli
atgaaacccactttatatactgctactggtgagtgcgttacgccaggccgtgaactgggcaaaggtggcgaaggcgcggtttatgatatcaatgagtttgtcgatagcgtcgccaagatttatcacacgccgccacccgccttaaaacaggacaaacttgcctttatggctgcgacagctgacgcgcagttgttgaattatgtcgcctggccgcaggcaacgcttcacggtggacgaggcggaaaagttatcggttttatgatgccaaaagtttctggtaaagaaccgattcatatgatctatagcccggcacatcgtcgccagagttatcctcattgtgcgtgggattttctactctatgttgcgcgcaatattgcttcatcttttgctacggttcacgagcacgggcacgtcgtgggggacgtaaaccagaacagctttatggtaggtcgcgacagcaaagtggtgttgatcgatagtgactcctttcagattaacgccaatggcacactgcatttatgcgaagtcggcgtgtcgcattttacgccgccagagctacaaaccttgccatcatttgtcggttttgaacgtaccgcgaatcacgataattttggccttgcgttgctgatttttcacgtcttgtttggtgggcggcatccttattctggtgtgccgcttatctctgatgcgggtaatgcgctggagacggatattgcccatttccgttatgcctacgcgtcagacaaccagcgacgtggtttaaaaccgccgccacgatcgattccgctgtcgatgttaccgggcgatgttgaagccatgtttcagcaggcattcacggaaagtggcgtggcaaccgcgcgtccgacggcaaaagcgtgggtagcggcactggatttactacgccaacagttaaagaaatgtaccgtttcggcaatgcatgtttaccccggtcatttgactgactgcccgtggtgtgcgctggataatcaaggcgttatctattttattgatctcggcgaagaggtcattaccaccagtggtgattttgtgctggcgaaagtctgggcgatggtgatggcgtcagtagcaccgccagcattgcaattgccattacccgatcatttccaaccgactggcaggccgcttcctttaggcctgttacggcgcgaatacatcattctgattgagatcgcactgtcagcgttatcgctgttgctttgcggccttcaggcagaaccgcgttatattattttggttcctgtgctggcggctatctggattattggcagtctgacaagcaaagtttataaagcagaaatccagcaacgccgtgaggcatttaatcgcgcgaaaatggactatgaccatttagtcagccagatccaacagttgggcgggctggaaggttttatcgccaaacgggcgatgctcgaaaaaatgaaggacgaaattctcgggttaccggaagaggagaaacgcgctctggcagcacttcatgacactgcaagggaacggcagaagcagaagtttctggagggattttttattgatgctgcctctattcccggcgttggccctgcgcgtaaagcggcgttacggtcttttggtattgaaacagccgcggatgttacccgtcgtggggttaagcaagttaaagggtttggtgatcatctgacccaggcggttatcgactggaaagcgagctgtgaacgccgttttgtgttcaggccgaacgaagcggtaacgcctgcagaaagacaagcggtaatggcgaaaatggccgccaaacgacatcggctggaatcggcgttgactgtcggcgcgacagagttgcagcgattccgccttcatgctccagcacggaccatgccgttgatggaaccgttacgtcaggcggcagaaaaactggctcaggcgcaggcagatttaagccgctgctga

SEQ ID NO: 23605 - DNA, 240 bp, Escherichia coli
atgacagaaacccagatctacgagaacattaagcaagccattagcagcgcaccacgaaatagccaaacgatggaaatgcacctccagatgatcaaatacgctgaccatctgaaaaacgtcacggcaaaagagttttgcgaaggtgtaggacttaaagccagctttgctacagagttcagcaaaatgagaaatcttaccgagcgactcaaagccgccggacttgataccacgaagttataa

SEQ ID NO: 23606 - DNA, 348 bp, Escherichia coli
atgaagagtaaaatttttgctgcacttctgctactacctctatctacttatgcaagctcctataaatgtgatgctcttcagcagggtcaaattggcagcaatgggaaaaccgttacggcacaatcctccatcgatattgacggcaaacagatgcattttagcttgaacggagtgagttgggatctctcatatattggtgaaaaacagattgcaaagatgtatagcaccgaaagcgggaacgtctctgtatctttcattgatgccaatcccatcatcttcgtgctacatctcgtaaacgatgatggtagaaaaggcacttacaacatcagtgaatgttctgaattataa

SEQ ID NO: 23607 - DNA, 315 bp, Escherichia coli
atgaaaaaactactcgttaccgtcatctttgtggcaatgatgccaaatgcattcgcactaagtcacggagacagcgcaacacttaaagaaggtacatttaactgtaaaaagttaactgacttttacgagatgatcagttacatccaggacaatgaccaacaggctatgctgagtctcattacatccaataaatgtcgcgtgttagatgaatcaatgacggtagaaatccagagcgtagatgacaaaggttttgtttcattcataactccaggtggtcatggtggctgggctgtgaagcaatttttcgaaaattaa

SEQ ID NO: 23608 - DNA, 543 bp, Escherichia coli
atgaaacattcaattattgctgtcgctgtcttatcttctgtatttatgagtgctggtattttcgctgctgaagtagataccggaactttaaccattaaaggtaatattgcagaatcaccatgtacatttgtcgctggcggtgattcagtcagtattaatatgccgactgtacccaccactgtatttgatggtaaagcgaaatattcaacttatgatggcgcggttggtgtaaccagcagtatgctgaaaattacttgtccgaagactattgatggcgtaaaactttcgttgatcaccaacgagaaaattcttggtaatgataaggcaatatccagtagtaatgacacagttggatactatctctatttgggagatagcagtgacgtactggatatttccgcaccatttaatattgaaagttataaaactgctgatggacaatatgcaataccgtttaaggcaaaatatctgaagttgactgacagtggtgttgcatctggtacagttaactcttcattggttatgcgtgttgcccaggattaa

SEQ ID NO: 23609 - DNA, 282 bp, Escherichia coli
atgaataagtattggttgtcaggagctgtttttcttgcttatggactagcatcacccgcgttctcttctgatactacaacattaaccatcaatggcagaattagttcccctacatgcagtatggatgttgttaataatcatcttcagcaacgttgtgggcagttgttacaacgagttgaaaccaactatcgtgcttcttctactgcaaaaggcgttacgacagaagtggtagctgtgggtaataacgacaaacgcaaaatcgtgttaaatcgctacgattaa

SEQ ID NO: 23610 - DNA, 1281 bp, Escherichia coli
atgaaaacctatatttatcaggacgaaaaatcacataaattctgggcggtggagcagcagggaaacgagctgcatattaactggggtaaagtcggtaccaacgggcaaagtcaggtaaaaagctttgcagatactgcggcggcggaaaaagcagcactgaagctgattgcggagaaggtgaagaaggggtatgtggagcaagtagacgctaacgctcactcacatgatgcctcagcaaagaaagtcctggtcacagaggaaaaagcctcaataaatcgccaggcagcaactaatggtttaccctggctggcagacaacgatcccattattcttcccccgaatattgcccgccatgccctcagccaccgcctttggccgggagagccagtaaaaaaaccaaccaaacccgagaaacaaaatttaatttcccgattggcaaatcgtacttatcattattataaaaatctgactttcgattacagctcatgctctgatgaatgggctgatgcgattagccaggcaatcagcttaattaaggcccaaaagactgagatacccgcgcgtactatggcggtacttacttttctggaaatatgtttttgtcagggctggaatgatgaaacctcatccgagttgctggatgaaattgtaagcaccttcggtatcgaatacgcaactgaaactgtcatcttctggtggcaaattgatttcgattttgactataaagatgaacatttgactttctttattaattatgcagatagcagcaaggacagttatagaaggaataacgacaaatttagtttacgtctgcgtaaacatttatcactagcagaagaagaagtatggcaaaattgcattgcaaaattactcgttgcgttaccagatatatcactctatcgccaaccgttaattgccattttaatgccagaaatacccgaagtggcccatgagatcgtacatcgtttacaccaggtcgcagatgttccacaacttgaaatgttgaaactggtagcgacagatccattcacgctcgaaatactggagaactatcaatacattgatgtatttaacacctatggtgccagttggtcagctacggtattacgggagcaaggtatagcggcactggctcgcctgactccctatgctgaagaagataattgcggtgacgtactgaaatgtattaatcatccgttggccattacgaataaaaagtgccgaaaattttccttctgcaacgatagtggcattagccgaagcattggtaaaaaaagatga

SEQ ID NO: 23611 - DNA, 249 bp, Escherichia coli
atgcgtgttgagatctgtatcgctaaagaaaaaatcactaaaatgccaaacggtgctgtggatgcgttaaaggaagaattaacccgacgcatcagtaaacgttatgacgatgtagaggtgatcgtaaaagccaccagcaacgatggcctttctgttacgcgcaccgccgataaagattcagctaaaacttttgttcaggagacgctgaaagatacctgggagtctgctgacgagtggtttgttcgctaa

SEQ ID NO: 23612 - DNA, 270 bp, Escherichia coli
atgaatatactaaaaaaacttatgcagcgtctgtgtggttgcggaaagcatgatggccgtgaacacgggcagtcgcttacagcacaactgcgactggggccggcagacatcctggagtccgatgagaatggtattattccggagcaggacagggtaatcacgcaggtggtgatactggatgcggataaaaagcagatacagtgcgtggtaagaccgctgcaaatcctgcgtgctgacgggacgtgggaaaatattggcgggatgaagtaa

SEQ ID NO: 23613 - DNA, 369 bp, Escherichia coli
atgaaacatattcaaatccgcaatagtgatatggcctggcatattgctgccaatattcagtttccaccaaattttgatgagtcaaaacagtatccggcgattatcagcgtccatccttttggcagttgtaaggagcagacgtctggcaatatctatggcaaggcattggctgaaaaaggctatgtcgttctcgcttatgacgccagtttccagggagaatctggtggggagcctcgttggatagaagatccgacacagcgcgtagaggatattagccgtgttatcgattatgcagtaactctgccatatgttgatgctgaacgcattggcgtgctgggtgtgtgtgggggggggtggctatgccattaa

SEQ ID NO: 23614 - DNA, 624 bp, Escherichia coli
atgttgatgctgaacgcattggcgtgctgggtgtgtgtgggggggggtggctatgccattaatgccgcgctgacagaaaaacgaattaaagctgtagtgagtattacgggtgttaatatcgggcgtctttttcgggaaggtttcagcaattacgatccgattggcgcattgaatgcaatggcgtcgcaacgaaccaaagaggctcgtggtggagaattacagatcaacgaattacttcccgccagcctggatgcagcaaaagcccatggactgaccgaacgcgatgtttatgaagcaactgactactataaaacaccacgcgggcaacaaccgggaggtgcgacaaaaatgttgttctcacatgcacagaaaacgctggcctgggatgccttcgcatttactgaagtgttactgactcagccggtgatggtagtagttggtgaaaaagtcggtgccttcggtgcttatcgtgatggactggaagtctatggccgggcgatggtttcgcaggatcgtcagttagtttcattacccgatttctcacattatgaactgtatgacaaaccggaagcagttcaggaggcgctggaaaaagttattccttttttcaacacccatctgtga

SEQ ID NO: 23615 - DNA, 510 bp, Escherichia coli
atggacgcttttattgtagatcctgttcaaggggaactatattcgggtttaagccatacagaactagccgatatcattagattggctgattctgttgaaaatcaattgaatggaggcaattcatttcttgatgtattcagtacatatatggggcaggttatttctgaatttatgcatagtaatgataacagaattgaattgttacagcggcgattacattcatgttcatttttagttaatattgaagaaatgtcttacatagatgaagcattacagtgcccgattacgctggcaattcctcaacgaggtgtttttttaagaaatgctgaaggttccagagtatgtagtttatatgatgaaatggctctttctcgtataattaatgatgggatgcatcacccactaagcagagagccaataacattatcaatgcttgtggccagagagcagtgtgagtttgattgcagtatcggtcactttacggtgaggagtgattgttattcagtgtag

SEQ ID NO: 23616 - DNA, 591 bp, Escherichia coli
atgccagtaaatgcgacaggtgtgtccttcagctcttttggtatcagttatcataaagataattctttccggggcaccatccgtgggaagaatgatgaggtcgtgaagtgttcaatgggagagcgctctatccgctttaatgttaacaaatttagcggctgtatactggagacggtaagcaggcagagtactaaagatattcatggatgggtaagtgatgaacggacagtatatccgtcaagggttatcaaccaagagattgataattgctgccttcaaaaaaatgcaaaaatttcttctgaagagaggaaaatggtcttttctcttgtaagtaaggagtttgaactaactcttgatgttaaagcggcacaaagttctattaatcatataataataggaaatgcttcttttggcaaaaaaatggatgctctttgcgatggtatgagccgagctgtaaaaaacagtacaacagattacatagcaaacgtgcttgcagacaagttttatcagaaacatatcgccccgggtgttgatattgtaaaactacgaaatgaaatcccaggttatatgagtcgtgttatacaggggtaa

SEQ ID NO: 23617 - DNA, 648 bp, Escherichia coli
atgcctgtcatattaaacttttcgagtgaaagagtattgtctgaaagtgaactggaggctttacgtcatgtcggaagagttagtcagagtgaacagcttgttgtgagaggccgcactatgagacttcatcatatttcatttatggacagttttagcgtggaaccggtttccggcggactgttggatcgccttagtgcaagagggcatcgccttctcgcagaaaatctggagatacagcttaacagaggccatacttttttgcaggcattccgtttatatatggaacagagccgtgcaaccccatgtacgcgccaaaacgtcagtagtgcaatacaaaacaaaattaactctcatgcatttactgttagtcatcaagacttttcctgtcatgaacaacacctgaattgcccgataacattatgcattcctgaaactggtgtttttgtcagaaatgcaaaaaactcagaaatatgttcattatatgaccacaatgcactcactgaacttatccgacgcaacgctccacaccctctcagccgtgaaccctttgttccggaaatgattgtcagcaaagatgaatgccattttaatctaatagaacaatatttttgcatattagccacacaaaatatatgcactagaatttga

SEQ ID NO: 23618 - DNA, 270 bp, Escherichia coli
atggctagtgtaccaactcttttctgggctaatagctatgatttgtttgtattatttgtctctgtctctattatttttgacatccatgcgacttctgatattgataacctcagttgtggagttctgtctgcgcttccgggaggacgcatatcaaaactacaggatcttctgttaaacactgtaaagccatctacattgcatgttgttgagtctaagatacaatttttagtagatgatttatctgctataggcctagatatttcaggttga

SEQ ID NO: 23619 - DNA, 687 bp, Escherichia coli
atgaaaagtaaatttgttgcgttggctctctctctgttcctttcacagtcagttctggcgggtggcgtcggacttagctctactcgcgtaatttatgatggcagtaagaaagaagcctcgctgaccgtacagaataaaagtaagacggaagagtttcttatccaatcctgggtggatgatgccgcgggcagcaaaaaaacaccgtttattattacgcccccactattcaagcttgatccagaaaagaacaatattttgcgtattgtgaatattacgcccggcctgcctcaggatcgcgaatcggtctactgggttaatgtgaaagccattccatctaaaagtgacgacagcgaaaacaaaaatgttttgcagattgccgttcgcacccgaatcaaacttttttatcgcccggcaggtttaaagggtgatgtaaaaaccgcgccaaatgaactgcgatttacgcgtaacggtaatcagctccgcgttgataatccgacagtttttaatattacctttaatcaattttttgcgaatgacaaagaaattgaaaaagcaggcatggtacccgctaaaggggcattaaatatcacattacccgccggggtaggtagcgtttctaaaattaaatataacaccatcaatgactttggatcgtcagcggaaatgatcactaaaaatgttgattga

SEQ ID NO: 23620 - DNA, 1104 bp, Escherichia coli
atgtcacggaagaccgtttcacgtactttttcttccttttctatctctgtggtggcggttgctgttgccagcacgttttctgcacatgccggaaagtttaaccccaaattcctggaggacgttcagggtgtgggccagcatgtcgatttaacgatgttcgaaaaaggccaggaacagcagttacccggcatctatcgtgtctctgtttacgtcaatgaacagagaatggaaacccgcacactggaatttaaagaggccacagaagcacagcgcaaagcgatgggggaatcccttgtgccttgccttagccggacgcaactggcagagatgggcgtgcgcgttgaaagctttccggccctcaatctggtgtctgccgaagcctgcgtaccgtttgacgaaatcattcccctggcctcaagccatttcgacttcagtgaacaaaagctggtattaagtttccctcaggcggcgatgcaccaggtggcgcgcggcacggtgccggaatctttatgggacgaaggtatccctgcgttgctgctggattacagttttagcgggagcaacagtgaatatgactcgacggggtcttccagcagttatgtcgatgataatggcactgttcatcatgatgatggtaaagatacgctaaagagcgacagctactacctcaacttacgcagcgggctgaaccttggcgcttggcggttacggaattacagtacctggagccattccggtggcaaagcgcagtgggataatatcggtacgtctttgagtagggccatcatccctttcaaagcgcaattaacaatgggggatacggcgaccgcgggggacatttttgacagcgttcagatgcgtggcgcgatgttagcctctgatgaagagatgctgcccgacagccagcgaggctttgcacccatcgttcgagggatcgccaaaagcaacgccgaagtcagtattgaacaaaacggctacgttatttatcgcacctatgtgcagcctggtgcctttgaaataaacgatctttaccccactgcaaacagcggtgatctcacggtcattattaaagaagcggatggcagtgaacaacgctttatttag

SEQ ID NO: 23621 - DNA, 1458 bp, Escherichia coli
gtgccaattttccagcgtgaaggccatctcaaatatagctttgccgcaggtgaatatcaggccgggaattatgacagcgcctcgccgcgtttcgggcagcttgatctgatctacggtttaccgtgggggatgacggcctacggcggcgtattaatctctaataattacaatgcatttacattagggatagggaaaaactttggttatatcggggcgatttccattgatgtgacgcaggctaaaagcgaactgaataacgatcgcgatagccagggacaatcttatcgtttcttatattccaagagcttcgaaagcggcaccgatttccgccttgcgggctatcggtactctaccagcggtttctataccttccaggaagccaccgatgtgcgcagtgacgctgacagcgactataaccgttatcacaagcgcagcgaaatacagggtaacctgacgcagcaattaggggcctatggctctgtttatttaaatttaacgcagcaggattactggaacgacgcaggtaaacagaacacggtatcggcgggttacaacggacgtattggcaaggtcagttacagtattgcatatagctggaataaaagccctgaatgggatgaaagcgatcgcttgtggtctttcaatatttccgttccactaggccgggcctggagtaactatcgcgtcacgaccgaccaggatggtcgtaccaatcaacaggttggggtcagcggaacgctgcttgaggatcgcaacctgagctacagtgtccaggaaggctacgccagcaacggtgtgggtaacagcggtaacgctaacgttggctatcagggtgggtccggtaatgtcaacgtaggctatagctacgggaaagattaccggcagctcaactacagcgttcgcggcggcgtgatagttcatagcgaaggcgtgacgctttcccaaccgctaggcgaaaccatgacgctcatctccgtacccggtgcgcgcaatgcccgcgtggtgaataacggcggcgttcaggttgactggatgggtaacgcgatcgtgccttatgccatgccgtatcgtgaaaacgaaatctcactgcgtagcgattcgttgggtgacgatgttgacgttgaaaatgcgttccagaaagtggtgccaacgcgtggagcgattgtcagagcgcgttttgatacccgcgttggttaccgcgtattaatgacgctgcttcgttccgcgggcagcccggtgccctttggagcaacggcaacgctaatcaccgataaacaaaacgaggtgagcagtatcgttggtgaagaaggacagctctatattagcggaatgccagaggaaggacgggtattgattaaatggggtaatgacgcgtcgcagcaatgcgtggcgccttataaattatccctggaattaaaacagggcggaattattcctgtttcggccaattgccagtaa

SEQ ID NO: 23622 - DNA, 1056 bp, Escherichia coli
atgaaagcggcaatagcattatccttattaggatgcgtattcggattttctggcaaggcatttgccggagatgcgtgggggccatgtacccccgcggatggcacgacttatcactataatgtcgatgtggatgttggtatacctgatgcggcaaaaaacgtcgcaggaacggttttaccggatgtccttaactggtctaatggacaaaacgtatcgctaatttgtgaatgtcctgattcttataagaatgaaaaagatactctagtgcagggggtgagtatgcttcccccttctggccgtacggttgacagtatgaaatattatactttgacggaggaactggaggttgcgacgaacattcgcatcagtaccagtgtgtatgggtttgttcctttcaaaaaccagcaggcgctgcaaacaaccggatgcaacaaagtcattactacgccctatatgggcggcgcaggtctactttcctttgctattactaaaccctttatcggcgattccgtcatccctctgacgttaattgccgaactgtatgcctcgaaaacaaataaagattacggaacaatacccatatcttccgtatctattcaggggcgtgtcaccgtaacccaggattgcgaaattaaacccggcacggtgctggatgtgccatttggtgaattcccctcctcggcgtttaaaaacaggcaagggcaaatgcctgaaggtgcgacagagcaagaaattaacctcagcttcgattgcaacaatatctctgatggtatcaaggttgcgttgcgccttgagggggcaaccaatgctgacgatccccgagcggtggatatgggcaaccccgatattggcgtactggtgaaagattccagcggcaaaattttggtaccgaatgattcaagcagcaccacgttattaaatttgagcagcctggattctaaaactcaccgcaatgccgcgattcgactgctggctttaccgattagcacgacgggtaaagcgcctaaaggcgggacgtttgaaggcgtaacgaccatatatcttgaaatggagtga

SEQ ID NO: 23623 - DNA, 531 bp, Escherichia coli
atgaagttcaaacgattgctgcatagcggcatcgccagtttgagtctggttgcctgcggggtgaatgcggcgacggatcttggcccggcaggggatattcatttctccatcactatcaccactaaagcttgcgagatggaaaaaagcgatctcgaagtcgatatgggaacaatgacgctgcaaaaacctgcggcagtcggtacggtgttgagcaagaaagatttcaccattgaactcaaagagtgcgatgggatatccaaagcgaccgttgagatggacagtcagtcggacagcgatgatgattccatgtttgcccttgaggctggtggcgcaacgggtgttgcgttgaagatagaggacgataaaggaacgcagcaagttcccaaaggctccagcggaacgccgattgaatgggcgattgatggcgaaaccacgtcgcttcactaccaggcgagttatgtggtcgtcaacactcaggccactggtggcacagcgaatgcccttgtaaatttttccatcacctatgagtaa

SEQ ID NO: 23624 - DNA, 300 bp, Escherichia coli
atgggaaatggtaacttttggcagttgttcttgggtaaagaaccttacagcaaaaaatctgattttgttaaggcatggttattgtggtgggctattaccatccttgttctatttattttaagcctgactacgacattaaatttaagaagtataggtatagggttaagttttgggttttgtcaaatccttggtagatatacgatgtctctaggatggagtaagtactggggagttttggggggatttcctgtaacaaatattgttctttttcttatcttaatttttttcaaaaaaagataa

SEQ ID NO: 23625 - DNA, 432 bp, Escherichia coli
atgaatgtgcgtaatgtcaaattcgacaacttgtctttttatgaagaaaaaatccgctggcgaatgcgtcggcaaatctcgaatgcagaggcaatattttacgagaatcaggaagaacacattcggcgctttttaggcagatatacctgtcgcaaaccggttcttgtttattgggaaagtgaacaaagatggacatctgtaaacggtctggaagtgatgagtatgtttggtgaacattgtcatcacatctaccttgatgatatcaagaaaaaaatacaaactgaattacctgaaaataaaactttagatttcaaacgtcaattgcaatttataatattaggggatgataagattagaatatgggtgcctgaggggaaattgtatttcgcattaatgaatgtattgcagatgtttcccatgaaaaatggttaa

SEQ ID NO: 23626 - DNA, 426 bp, Escherichia coli
atgagtagacatgatattttactgaggtcgcaatttgaacggataatagagggtgatcgcgttggtcaggctttaatatctttctatgaaaaacttccagaggaaaattaccgacgcgcgctgtatattttatcaataatttatccgattaaacttaacgtcggtgacgacgaatttaagtttattttttacatcatgtcacagaaaaaatttctacgccaacagaccattagcgattttgtacgctcaataaatgttattgaatttactgaaactcaaaaaagtgttttgcgtgaacttattaaaaagaataatgatatcataattacgcaatgcacatttgagctagattgtttgttaacgagagtatctgcgtcatcgaaccagtttagaaactctaatggttacttacctgagaatagttaa

SEQ ID NO: 23627 - DNA, 1758 bp, Escherichia coli
atggaaaattcacgcatccctggggaacatttttttaccaccagtgataatacagcgttgttttatcggcactggcccgctttacagccaggggcgaaaaaggtcatcgtcttatttcatcgcggtcatgaacattctggtcgtctacaacatatcgttgatgaactggcgatgccagatactgctttttatgcatgggatgcccgagggcatggacaaacttcggggccccgtggttatagcccatctcttgcgcgttcagtgcgggatgtcgatgagtttgtccgttttgctgccagcgacagccaggtcgggctggaagaggtggtagtgatcgcgcagagcgtcggcgcagtgctggttgccacatgggttcatgattatgcgcctgcaattcgcgggctggtgctggcttctccggcctttaaggttaaattgtatgtgccgctggcacgtcctgcgctggcgttatggcatcgtctgcgtggtctgttttttattaattcctatgtgaaaggacgctatttgacccacgatcggcaacgggtggcgagtttcaataatgatccgctgatcacacgggcgattgccgttaatatcttgctcgatctttataaaacgtctgaacgtattgttagcgatgcggcggcgattacgctccccacgcaacttctgatatcaggcgatgactatgtggtgcatcgccaaccgcagattgatttttatcatagattacgtagccctctgaaagagctgcatctgctgccaggcttttatcacgacacgttgggtgaagagaacagggcgcaggcatttgaaaaaatgcaaagctttattagtcgtttatatgctaacaagtcacaaaaatttgattatcagcatgaagaccgcactggaccatcagcggatcgctggcggctcctttcaggtggacccgtgccattatcgccggttgatttggcgtatcgctttatgcgtaaagcgatgaaattgttcgggacgcactctgcgggcctgcatctcggaatgagcaccggctttgattcaggcagttcgctggattatgtctatcaaaatcaaccgcaaggtagtaacgcattcgggcgcttaatcgacaaaatctacctgaacagtgttggctggcgcggtattcgccagcgcaaaacccatttacaaatactgattaaacaagccgttgccgatctccacgccaaaggtttagccgtccgcgtggttgacattgccgcagggcatgggcgctatgtactggatgcgctggcaaacgagcctgccgtaagcgatattttgttacgtgattacagcgagttaaatgttgcacaggggcaagagatgattgctcaacggggaatgtctgggcgggtgcgttttgaacagggcgatgcgtttaacccggaggaactcagcgcgttaactccgcggcctacgctggcgattgtctctggactgtatgagctttttcccggaaatgagcaggtaaaaaactcactcgcaggtcttgccaatgccatcgaaccgggcggcattctcctctacaccgggcagccgtggcacccacaactggagctgattgccggggtgttaaccagtcataaagatggtaaaccgtgggtaatgcgcgtgcgttcgcaaggggagatggattcactcgtgcgtgatgccggatttgataaatgcacacaacggattgatgagtggggcatttttacggtttcgatggcggtgcgtcgtgataactga

SEQ ID NO: 23628 - DNA, 2460 bp, Escherichia coli
gtgaatgaaggcggtgcgttaaccaatgaaggtgtattgaacacggtgactctggaaggaggaaccttcaataacaacggaacgcttaatgacgtcgtaaaaattgagaaaaacagcaacgcggtaattaataacaccggttccctgtcaactttacaacttcacgatggtacggtgaataacagcggtattgcgtcggcgcgcgttaacgctcagggcgatgcggtattcaataaccttgcaggcggcgaggcgcgtaaaggcgcgattctctataactctgcggtagtgaataacgcgggtacctggaaaatgggttatcaggatgaaaacaacaatgccgggacgctggatattgacgataagtcaacgttcaacaacagcggcaaactcatccttgataacagcaaaaacgccattcgcttccagggcagcaatgctaacgccacgttatataacaccggtgaaatgacgctggatgccgcattaggtgcgggcgctattcactacgacgatggcgccagcgagtttattaacaagggcgtggtggatgcgaaagtcaccgtggcggtaagtactgccggtgcgacagaaagcgatgccttcttgtggaaccaggatggcggggtaattaacttcgataaagacaacgccagcgcggttaaattcacccacaacaactatgttgctctcaacgatggtgtaatgaacatcagcggcaacaacgccgtggcgatggaaggcgataaaaacgcacagctggttaacaacggcgttatcaatctcggtaccgaaggcaccaccgataccggattgactggtatgcaactggatgccaatgccaccgccgatgcggtaattgagaacaacggcacgatcaatatttttgctaacgactcgtttgcgttcagcgtactgggcacagaaggtcatatcgttaacaacggtacggtggtgattgccgacggcgtgactggttcggggttgattaagcagggcgacagcgtgaatgtggaaggggtgaacggcaacagcggtaacaataccgaagtgcattacaccgactacacgttgccggacatgccaaacacttacaccacttcacctttcagtgaaacgactgatagcggtagtagcgatggcagcagtaacaacctcaacggctatatcgtcggtaccaacgttgacggcagcgccggtaaactgaaggtcaacaacgccagcatgaatggtgtcgggatcaacaccggtttcgccgccggtacggcagacaccacggtcagtttcgacaacgtggtggaaggcatcaacctgaccgacgccgatgccatcacctcaacgtccgtggtatggaccgccaaaggcagcaccgatgccagcggcaacgttgacgtcatcatgagcaaaaacgcctacaccgatgtggcgaccgatgcttcggtgaacgatgtggcgaaggcactggatgcgggttacaccaataacgagctgtataccagcctgaacgtgggcaccactgctgaactgaatagcgccctgaagcaggtgagcggtagccaggcgaccacggtattccgtgaagcgcgtgtgttaagcaaccgcttcagcatgctggcggatgccgcgccgaaggtgggcaatggcctggcctttaacgtggtggcgaaaggtgacccgcgtgcggaactcggaaataacaccgagtatgacatgctggcactgcgtaaaaccgttgacctgagcgaaagccagagcatgagcctggaatacggtatcgcgcgtctggatggcgacggtgcgcagaaagcgggcgacaatggcgtaaccggcggctacagccagttctttggcctgaagcaccagatgtccttcgacaatggtatgcgttggaacaacgcgctgcgttatgacgtgcataatctcgacagcagccgctcggtcgcttacggcgacgtcagcaaaacggcggatacggatgtgaaacagcagtacctggagttgcgtagcgaaggggcgaaaacctttgagccgcgcgaagggctgaaaatcaccccgtacgccggagtgaaactgcgtcactcgctggaaggcggctatcaggagcgcaatgccggagactttaacctgagcatgaacagcggcagcgaaacggcggtggacagcatcgtcgggctgaaactggactacgcagggaaaggcggctggagcgcgaatgcgacgctggaaggcgggccgaacctgagctacagcaagagccagcgcacggcaagccttgcaggggcaggcagccagcactttaacgtcgatgacggtcagaagggcggcggtatcaacagcctggcgagcgtcggcgtgaagtacagtagcaaagaaagttcgctgaatctggatgcgtatcactggaaagaggacggcatcagcgacaaaggcgtgatgctgaactttaagaaaacgttctaa

SEQ ID NO: 23629 - DNA, 2979 bp, Escherichia coli
atgcaaaggaaaaaattattgtctgtttgtgttgccatggcgttaagtagccagacatgggctgcggatacttcaatacccgactcaaccgaaaaaacacgtaagtccagtaagataacatgtccggcaaatattcattccctgagcaaagagcagctagaaaatttatccgcggagtgcagagaaaataaagatagtgcagttttaccatgggcagctgcaggtcttgctgcagtagctacgggaattgctatatataccttaagtgacgatgacaatcaccaccataataactccccagttccggatgatggcggtgatacgcctgttccgccagacgacggcggtgatacgccagttccgcctgatgatggcggtgatacgcctgttccgccagacgacggcggtgatacgccagttccgccagacgatggtggcgataccccggttaaacacaatcctgtcgtctataaaaatggcgtaacttgggatcaggatgcaaaaactgtcaaaattcgcgaaactacctttacctacagccaaaatgccgatgggagctacaccttaacggcgcctgagggcaaggagacgatagttaagtcctggacagtccatgacgacagcaacaccgttgtctttgatggcgtaaatacctcaggtggcatcacctggagttacgacgatgatggactcatccacatcactaaagaggccggcgtcgttgttgacggcacaaccgggaatgcgattgagtttggtaacgcgatcatcaccgatcagggcggcaacacggcgctgaatggcggtactgtcatgacggttgatggtgacaacatctccctcaacaacgacggcaaaacgacggccatcggagaaggctcggttgtcggtatactcactggcgacaatatcaccattaacaataatggcgagacggaagttgatggcggtaccgcggtaatcatcaatggcgataataccaagctaaacactgcgggcgactcgaccatcaccaatggtggtacgggtagccttatcaatggcgataatgcgcgggtcgataatcaaggtaccatgagcgttgacggagagaattccactggctcgaaaattgtcggtgacggtgccaccatcaaacaggaaggcgacttatacgtaagcggtggtgcgcacggtattgacgttgacggcaatgatacgttcgttagcaacaaaggtaatattacggtcatcgaagataactctattggcatgctgcttgatggtgatggcgtcagcgtgatcaacatgggcgacctcaatgttggtcaggccgcagcgggtgaaaatgccattggcattcagatcgacggtgataatgcgacatttgttaacgttggtgatatttccgcgaccaatgccggaaccggtgtcagcgttgctggggataaagctaatatttcactcgcgggtgggttagacgttggggatttctccaccggtcttgatgtctctggcaataataacaacatgacgctggcgacttatgagctgaatgtgacagggcaaaaagcgacgggtgttaatgtttcgggtgatggtaatactatcgaaatagcgggcagtattctggttgataaagatcagaaagccgataatgcgcagccttacttctttaatccctcaaccggggtaaatatcagcggtgacaacaacgacgtcacgctggatggtcagttaaccgttgttgctgatagtaaaaccacgtcgcgttcctatgcgagttacgacggtgctcaggaacacattgcaggtattgttattgctggcgatgacaatacctttacgcttaatggcggtgtccattttgtcggtgaaaaaaatgtcatggatgatggctcaaaaccatcagcttctcgacgtggtatcggagacacaccgcttattaacgttgatgggcattccccggtctacctgaatggtgagtcaaccatcagcggcgagttcccgctggggttcgaaaatctcattcagttgagccatggcgcggagctggagattggcgctgacgcaacgtttgatatgagtgatgtggattctttcacttattattatcgtgtagcgttatccaccattagtattgattctggtgcgaaggcgacaaacaacggtgaagtggaactgaaaaatatcggttttgcggctgcctggaataaagattcaacggtaatcaataacggatccattggcctggcgatgtacgattttggtaccgacccggcaccaaaagtctttgatgttgaatacggtgggattggcgttaacaatggtaccatgaccaccaaaatgatgaatcagcacagtgtgctgaattatccggcagagtggaacttgtctgatggtacctctttcaataacaaggcattagggctgacaggtatgcttgccagctactcgtcatccattctgaacggcgaaacgggtattattgatatgtatggccgtggcagtgtagggatgctagccatcgataaatcaaccgcggataacgaagggcaaatcaccctggatacgctgtgggttgatgaaaatgatgaaacatcgctgcgtaataatgttgcaaatagcacggcgaaagatttcggtgtgggaatggcttcaggtaccgatgcctataatggggcattaactaaagccacggcaaccaaccacgagaatggtgtgattactgtctacaacgccggtgcggggatggcggcgtatgggaatactaatacggtcattaaccagggaaccatcaacctggagaaaaatgaaaattacaacgattctctcggtgtgaataaactcgtcggcatggcggtttatcacgaaggcaccgccattaatgaccagacaggcgtaatcaacattaacgcggaaaatggtcaggcattctataacgatggcactgggcttattatcaactatggcacaatttgtacctttggcgtttgctag

SEQ ID NO: 23630 - DNA, 324 bp, Escherichia coli
atgaaaagaacattactcatagctgtatgggccattggcctgatgagcgacagtgcaatggctttaaccctgaacgaagccagaagtcaggggcgggtaggtgaaacgcttaacggttacctggtggcgctacaaacggatgccgaaacacaggcattagtaaaagatattaatgaagctcgtaaccatagttaccaacaactggcaaagcaaaataatgtatccactaaagagatagccaaactggctggacaaaagcttgttgctcgcgcgaagtcggggcaatatgttcagggagttaatggtaaatggttgcgcaaataa

SEQ ID NO: 23631 - DNA, 642 bp, Escherichia coli
atgcctgtagatttaacgccttatattttacctggggttagttttttgtctgacattcctcaagaaaccttgtctgagatacgtaatcagactattcgtggagaagctcaaataagactgggtgagttgatggtgtcaatacgacctatgcaggtaaatggatattttatgggaagtcttaaccaggatggtttatcgaatgataatatccagattggccttcaatatatagaacatattgaacgtacacttaatcatggtagtttgacaagccgtgaagttacagtactgcgtgaaattgagatgctcgaaaatatggatttgctttctaactaccagttagaggagttgttagataaaattgaagtatgtgcatttaatgtggagcatgcacaattgcaagtgccagagagcttacgaacatgccctgttacattatgtgaaccagaagatggggtatttatgaggaattcaatgaattcaaatgtttgtatgttgtatgataaaatggcattaatacatcttgttaaaacaagggcggctcatcctttgagcagggaatcaatcgcagtttcaatgattgtaggaagagataattgtgcttttgaccctgacagaggtaacttcgttttaaaaaattaa

SEQ ID NO: 23632 - DNA, 630 bp, Escherichia coli
atgcctgttaccaccttaagtatcccaagtatatctcaattatctcctgcaggagtacagtctttgcaggatgctgccagacttgaaagtggaataagaatatccattggtagtggccaatattctgttcactatgtccagctactggatggattttcagttgaaccggtgagaggaggcttactggataggctattggggcgtgagcatcgaatggagagaagggctgtggctctggaaaggcaattaaatggaggtgtcgattttttaagtagtgttaataactattttcagagtgtcatggcagaacacagagaaaataaaacaggtaataaaatattaatggaaaaaataaattcttgtttatttagacctgattctaatcacttttcttgcccggagtcatttttgacatgcccgataacgctggacacacctgagactggggtgttcatgagaaactcacgaggtgctgagatatgctctctatatgataaggacgcgttagtgcaacttgttgaaactggtggaactcatcctctgagtcgagaacctataacagaatcaatgattatgagaaaagatgaatgtcactttgatacaaaaagagaagctttttgttgtaagtga

SEQ ID NO: 23633 - DNA, 576 bp, Escherichia coli
atgccattaacctcagatattagatcacattcatttaatcttggggtggaggttgttcgtgcccgaattgtagccaatgggcgcggagatattacagtcggtggtgaaactgtcagtattgtgtatgattctactaatgggcgcttttcatccagtggcggtaatggcggattgctttctgagttattgcttttgggatttaatagtggtcctcgagcccttggtgagagaatgctaagtatgctttcggactcaggtgaagcacaatcgcaagagagtattcagaacaaaatatctcaatgtaagttttctgtttgtccagagagacttcagtgcccgcttgaggctattcaatgtccaattacactggagcagcctgaaaaaggtatttttgtgaagaattcagatggttcagatgtatgtactttatttgatgccgctgcattttctcgtttggttggtgaaggcttaccccacccactgacccgggaaccaataacggcatcaataattgtaaaacatgaagaatgcatttatgacgataccagaggaaacttcgttataaagggtaattga

SEQ ID NO: 23634 - DNA, 201 bp, Escherichia coli
atgtgcataaaattggcattgctcttttttcgccacgaaatgccccccattctacggtctatgcttttattttcttatatcagagaagattttaattttattttattttatcaatttgttaatcagtacacctctatttatatttttcgccactccgccattctccctgacaattttcttgtggaacaaagtgttatttaa

SEQ ID NO: 23635 - DNA, 396 bp, Escherichia coli
atgcgttatgtcactgaatttaccacagcgaagccagaagttgctgaggcgcattttctcgcgcgcttgagtgtcgaaacagattgcgccgatgttcatgactctctggcttatattggcgatgatttcgttttacttcatgtggttggacgtgaagaggacttcgcgcgtcggcatatcccaggcgctctccatttaccccataagcaaatgaccgcagaaagaatggccgaatggcccgacgatacgctatttgtggtgtattgcgcggggccacattgtaacggtgcagaccgtgcggcactcaaactggctcgactcggaaagccggttaaaatcatgctcggcgggataaccggctgggaagatgaaggctatgcctttgcctcagaataa

SEQ ID NO: 23636 - DNA, 993 bp, Escherichia coli
atgccagaaatgagcaaaatgatgacaacgttacaacgtccgctggtcattgcactggcatatgacgggctatgtacttttgaatttggcgttgccgttgaaatattcggcctgccacgaccggaactgggcgataactggtatcgttttgctgttgctgcggtagaaccaggtgcgctacaagccaccggggggatccacgtggttgctgatggtggactggagttattgcccaacgccgatatgattattattcctggctggcgcggaatagatgccaaagtgccggagatgctatgccagtcattgcgcgaggcacaccagcgcggtactcgcctggtatcaatatgctctggcgtgtttgtccttgctgctgcgggccttcttcatcagcgaaaagcaaccacccactggcgctacactgaacaactccagcaccgttacccttcaatcagcgtaagtgacaatgtgttatatcaggatgaaggacaagtgatgacctccgccggaagcgccgcggggatcgatctgtgtttacatatcgtgcgcaaagattttggtcatgagattgctaataatgtcgcccggcgactggtcattcagccacatcgccagggggatcaaccacaaaatctgacgcgcccaatggcctcaccgcgtgaaagccagacgttaggtgccttattcgactttttgcagcagaatctggcacaaacacatactgtgtcttccctcgccgaacgggtaaatatgagtccgcgcacttttttaagacgttttgaggcgttaactggcatgacgcccgcccgctggctgctcaatgagcgcttaatacgagtacaggattatctgcaaaattcggtttttaacatcgagaaaattgccgagctgacgggttttggcaattcagcgttattgcgtcatcactttcaccaacgttttttattatctccttcgcaatatcgcaaaaacagccgttccccatcacaataa

SEQ ID NO: 23637 - DNA, 315 bp, Escherichia coli
atggttgtattttttctaaaaatccctaatctcgattttgctgtttatttgaggcctttttatgtcccatatatgccccacagataccccgcagccaaaatcaacaaaatgccaaaaggttctgttcctgccctgcaacaagaaatgctgcgacgtgtcagtaaacgttatgacgatgtagaagtgatcatcaaatccaccagcaacgatggcctttcagttactcgcaccgccgataaagattctgcaaaaacttttgttcaggagacgctgaaagatacctgggagtctgctgacgagtggtttgttcgctaa

SEQ ID NO: 23638 - DNA, 777 bp, Escherichia coli
atggagcaggtagtcgaatggcaaaaccggccactggatgcggtctatcccattgtttatcttgactgtattgtcctgaaggttcggcaggacagtcgcgtaatcaataaatccgtattcctcgcactgggtatcaatatcgaaggccagaaagagttactgggtatgtggctggccgaaaacgagggagcgaagttctggctcaatgtgctgactgaactaaaaaaccgcggcctgaacgatattctcatagcctgtgtcgacgggctgaaaggcttcccggacgctatcaacacggtgtatccggaagcccgcatccagctgtgcatcgtgcatatggtgcgcaacagcctgcggttcgtttcctggaaggactacaaagccgtcacccgcgacctgaaagccatctaccaggcccccacagaagaagcaggccagcaggcgctggaagcgttcgccagcgcctgggacagtcgctacccgcagataagccggagctggcaggcaaactggaccaacctggcgatgttcttcgcttacccggcagatatccgcaaagtcatctacacaaccaacgccatcgagtcgctgaacagcgtaatccggcatgccatcaaaaaacgcaaggtgttcccgacggatgactcagtgaaaaaggtcgtgtggctggcaatccaggcggcttcacagaaatggacgatgccactgcgggactggcgtatggcaatgagccgctttattatcgagttcggtgaccgcctggacggtcacttctga

SEQ ID NO: 23639 - DNA, 315 bp, Escherichia coli
atggttagtgtgacgagttattcatatccaacggaaacagagaatgataatagccagtttcaaaatcagagtctaagggagagtatcgacaaaagtctcgaggataatatttataaatttaatatgatagaacaaagcggcctgctcgataattatagggcaaggtttaaagatgacacttttcgtgacatttttcgaagttttttattatatcttttagattcatttcatatctatcggcatgatattagtgataaattggttccttattttcatgttacgcctgaatcggagaatgcgaattataagacatag

SEQ ID NO: 23640 - DNA, 483 bp, Escherichia coli
atggttgaactggtttgctttaatgatgatgattgtgctcaggtaagggaattattaaaacaatcaaacggtaatattacggatgataagattgatgaaataaccgcttgcttatccaaccctcaggggattacatgtttttattattctcctttgcaaggctatcagagttttttaaaaaatacatctcaagatgttagcgagttactctcaaagagtttgaatggtaccatttcatcaacatcgggtttaaaaaagtcaggaaatgccttttttgggactgggaagtatcttaaagaaattgattttactataaatgggtttagtcagaagatgtatttgatggcggttaataatgttggaaatgaagtgaagcttcagtgctcttgttattttactaccggtagtgtcgacgaagaaaaatccaaaagcgataaaatcgattttacattttccggtgccgcaacaactgctgatttatga

SEQ ID NO: 23641 - DNA, 1989 bp, Escherichia coli
atggttgataacgtaactgttagcagagtatgtatacaatctccttctttcgtgcctgatttggatggagaaaaaaataaatctcaattattcgttgacgatatagttgcgtatcttaaaagtccttcagtttattcacttgaaaaagaggggccgttaaatcattttgttaatcattgttctgaagttgagttaggtttctatagcgatggtgcatattcaattcttgtctccagatctaagcaacaacctgaaggtatgattttaaccgtaagcgatgcagacgcaatcaatatagtacatatttccgtatctccagtgcttataaaattcctggatgatatttttacttgccttcatacgtaccctgatgatgagagttttacaaaagagcagataaaagctaatagcaaatatgatattgtagattataattgcctgttgcattttactggaaaaccaaaaagtttaatagaatgtagacattttgctctgcaatactgtatagattcaatgaatgagcatacagggaaagttccattaaaggcttactattcatctccggaagatatacaaaaacatattcctttcgagcttgagcagcaatttaacaatctacaaaaaaatccaccacccggtacatgcgtcgttgccagtgataagtttggggaggcattatctgtcttttttcacagaatggaaaaagagaagttaacgcatatgacggcaatcgttcaatctcaaacacacgctatggccgtccgcttgaggatcaaaaaaacgcctgctggtgaaacagaatatgttgtatccttttatgatcctaatgcaaccaatactgcagtacgctataaagcaaacaactgtgattcttttgggtcattgcaatcgtttataaatattcaacaggcaaaacaaaaatgggtaataacagatatttgctccgagtgtgtaggaataaccccttatctccctcgggaacaagcccatttattaagtggtattgaaaatgagttgcaacctccattatcaccaccagcattatttctattaatgagaatggggatatataaaaacattgttctttttttcgataaattaaaaaactctcaagaaatgacagcatcaaaggctcttgatattcttgctgcgaaatcacctgaaggaatatatgggttatgtgtattattgtatcacaatactattgataagtttaatgattacataacaaatttaaaagagttgaccagaaaatataattttagccaagaggacctggaaactctactccttgcgaaagataatctcggagtgagctggattcccagggctttgaaaaataatcaaaataaaattgtcaaagcatggttgttggcgatagatgactttgagaaagaatttggggtaaataaaaatgaaatacttcttcgtataggaaaggaaatagactcaattgatgatttaaatagcgctattagaaccaatgattataatgttgttaatatattgctagccaatataaaagccaaaatgtttaaaaatgaattaaataaagaagatatattgaaactgatggcagcaagagaaaaagtggcgggagcatcagacaaatggacgaaggcatcaggcttatattctgcgatagtgaaagggcatacgaagattgttgctgcctggatggagacagctgaagtgatagccagccattatgaaaatgataaagatgtagtgagagaactcctgtcgctgagcagaaataatgcagtttgctctttgtatgttgccagctataagacaatgagtaagcaggtcattgatgtatatctgaatgcggcgattcgcctggcgttgcaacacgggttcactttcgatgagattttggagcagtttacccgtgactttgatgggaagtcattctctcttgcggtagagaaagcggatgatatatatgggtctctggctgaaaatattcaaaattgtggttggtga

SEQ ID NO: 23642 - DNA, 567 bp, Escherichia coli
atgtttaaaggacaaaaaacactggccgccctggccatatctctactattcgcttcacctgtttttgctgcagatgaaggatctggtgaaatccactttaaaggtgaagttattgaagcaccatgtgaaattcaccctgatgaccttgatatgaacattgacctgggtgaagtaaccacatcccacataaatcgagaacatcatagcgagaaaaaacctgtcaatattcgcttaatcaactgtgatattgcaggctgggatgatggcaagggtggcgtggtctcaaaggtaggcgtgaccttcgacagcacggctaaaacgacaggtgcaaccccgctccttagtaacatcagtgctggcgaggctaccggcgttggcgtacgtctcatgaacaaagatgaatcatttgttacattgggaacagaagcgccaacaattgacttattggcaagttcaacagaacaaacgttaaacttctttgcctggatggaacagatggataacgcagtttcggttaccgcgggggccgttactgctaacgcaacttacgttctggattaccaataa

SEQ ID NO: 23643 - DNA, 2163 bp, Escherichia coli
gtgaatatttatcgactctctgttctttcctgtctggcaatggtaacccctcctgcgctgacagctgaatttaaccttaacgttctcgataagtcgattcgggatagcgttgatatttcgttgctcaatcaaaaaggcgtcgtagctcccggcgattactttgttagtgttacggttaataataataaaatcagtaatgggcaacaaattcgctggcaaaaatctggcgataaaattattccttgtatcaatgaatcgctgatcgaactcttcggacttaaatctgactttcgtaaaaaattaccggcaataaaagaatgtgtcgattttagtgtcttccctgaaatcatctttactttcgatcaggcaaatcaacagctcaatattacaatcccgcaggcatggctggcgtggcattcagaaaactggacgccaccctcaacgtggaataacggtattcctggcttcctgatggattacaacctgtttgccagcacttatcgcccacaaagcggcagcagcagcaacaacctgaacgcctatggcaccacgggcctcaacgccggggcatggcgtctgcgcagcgattatcagcttagccagtccgatagcggcgacaaccgtgaacaatctggggcgatttcacggacctacctgttccgcccgttaccgcaaataggttcccgattaaccctgggcgaaaccgattttagctctaacatttttgatggtttctcctataccggtgcggcgttagccagcgacgatcgaatgctcccctgggagttacgcggctacgcgccgcaaatcagcggcatcgcacagactaacgccacggtcacgataagccattctggtcgcgtgatttaccagaaaaaagttccaccaggcccatttattattgatgacctgaatcagtcagtgcaaggtacactggatgtcaaagtgagcgaagaagatggacgggtgaataacttccaggtttcagcggcctctaccccgttcctgacgcgtcagggccaggtgcgctataaactggctgccggtcgcccgcgttcctctatgtcgcaccacaccgaggatgaaaccttcattagccatgaagtctcctggggaatgctctccaacacttcactatatggcggcatgcttctcgcaggcgatgactatcgttccggcgcgctgggtattgggcaaaatatgctctggatgggggcgctgtcgtttgacgtgacctgggccgacagccattttgatacccaacaggatgagcagggttacagctaccgctttaactacagcaaacaggttgatgcgaccaacagcaccatctcattggcagcctatcgcttctccgatcgccattttcacagctacgctaactacattgatcacaaatacaatgacgccgacgcgcaggatgaaaagcaaacaatcagcctctccttcggtcagcctattactctgctgaatcttaatctctacgccaacatcctgcatcagagctggtggaatgcggatacctccaccacggccaacattaccgtcggttttaacgtcgacattggcgactggaaagatatttctgtctcgacctcgttcaacaccacccattatgaagataaagatcgcgacaaccagatttacttttcgatctccttaccgattggggaaagtggtcgactgggttatgacatgcagaacaacagtaatactaccacccaccgcatgtcgtggaacgataccctggatgaacgaaacagttggggaatgtcggctggaatacaatccgatcgcccggataacggtgcgcaggtcagcggcaattaccaacacctcagttcggcgggggaatgggatctgaccggaacctatgccgccaatgattacacttccgccagtgccagttggagcggctcgtttaccgcgactcaacatggcgcggcattccatcgccgcagttccaccaatgaaccacgcctgatggtcagcaccgacggcgtgggcgatattccgattcagggcaatattgactacaccaaccgctttggtattgccgtggtaccgtttgtttccagctaccagcctacgacggtggcggtcaatatgaacgacttgcctgacggcgttaccgtttccgaaaacgtggtgaaagaaacctag

SEQ ID NO: 23644 - DNA, 150 bp, Escherichia coli
atggttggcgaaaacggtcacgcatggctgagtggggtcgatgaaaatcaacaatttaccgtgcactggggcgaccagaaaacgtgtgccattcatctgccggaacatctggaagatgtgactaagcgcctgattttaccctgtcattaa

SEQ ID NO: 23645 - DNA, 732 bp, Escherichia coli
atgacatttgttaaaggattccctttgattcttctggttgccagtatgtgcagccacggcgcagtgcagcctgaccgcacgcgcatcatctttaatagcaaagataaagcaaccagcctgcgcgtggaaaaccgcagcgataaactcccctacctcgcctattcatggatagaaaatgaaaagggagagaaaagcgatgaatttctcgtcgccctgccgcctatccagcgactggagccaaaagcgacttcgcaggttcggatcatgaaacaagccgccaccgcgaaattacccaccgatcgcgaatctctcttttactataacctgcgtgaaattccgcctgtcccggaaggcagcgagggccatgcgatcctgcaagtcgccgtccaaagtcgcattaagctattctggcgacccgccgcattacgcaaaaaaatgggcgatcatgttgagcaacagctacaggttagccagcagaataaccagcttaccctgaaaaccccgaccggatactatctgactattgcctatcttgggcgggatgagaaaggcgtgctgcctggctttaaaagcacgatggtcgcaccgttcagttcggtcaccaccagcacgggcagctatagcggcaagcagttttatcttggctacatggacgactacggcgcattgcgtatgaacacgctctcctgccagcggcaatgccgcctgcagccggtggagaataaaaaatga

SEQ ID NO: 23646 - DNA, 540 bp, Escherichia coli
atgagtggactacagggaaaaattgccgatgcagtcaaagccagaggttatcagatcatgacttccccggataaagcttactactggatccaggctaacgttctcaaagcagacaaaatggatctgcgtgaatctcagggatggctgagtcgcggttatgaaggtgcagcagtcggagctgctcttggaggtggaatcacagcgtacaataccgggtcggcaggtaccactctcggtgttggactggctaccggtctgattggcatggccgcggatgcaatggtggaagatataaattacacaatgattacagatgttcagattgccgagcgaaccagaaccagcgtcagaacggataatgttgcagctttgcgtcagggaacatcaggctccaaaattcagacaagcacagaaaccggcaaccagcataaataccagacccgggttgtatccagtgccaaccaggttaatctgaagtttgaagaagctaaacctcatctggaagaccagctggcaaaatcaatcgccaatatactctga

SEQ ID NO: 23647 - DNA, 252 bp, Escherichia coli
atggaatcgtttgtacaggattcaccattttatagtggaagagatctttattggttacgtcctaaagttgaactgactctggaagagaaattgtactactgctcttgtataagaagaaacagacacaaatacagctacgggcgtcaggcaaaccgaacgctgaagaatttactggtaccgtcattagattctgttccggcatgggtatatggtgtgacagggaaaataatatctgaattgtctgaacgttga

SEQ ID NO: 23648 - DNA, 291 bp, Escherichia coli
atgaatttatctgccagtatgaatgatgccggggacggttttgaactcctgatgtcgggtaatatgcaggattttaatatttgttgtcgtcgggataatcattatcctgaacataaactgatacctttatcagagttatttgacgttaattatggactgaatcttgagctgaataaactggagaaagattcttcaggaattaattttgtttcaagaacgtccaaaaataatggcgtctccgccagggttaaattaaaagatggtattagtccatgccagcagctgtgttaa

SEQ ID NO: 23649 - DNA, 360 bp, Escherichia coli
atggctaatacgaccactggtgttaccagaattattaaagcagcgggttattcatggaaaggcttatgtgcggcatggcgctatgaagcagcctttcgtcaggagtgcattctggttctgtcagcactgataatatccttttggctggatgttgactctgttactcgagtattactcattggttcggcaatgatggtaattattgttgaaataattaacagtgcaattgaagcagttgttgacagaattggttcagaacatcacgaattatcaggcagagcaaaagatatgggttcagccgcagtgttgattacgattttagttgctatcattatatggggagttttattactttcataa

SEQ ID NO: 23650 - DNA, 1620 bp, Escherichia coli
atgattaaaaaaatcagtattaattttcttttcttgatgttaatgatagatgttgtttttgccacattgttcaatatccctgtctggatgcatctgtttaatattattaataaccttgatggtgtgaaacttggatttattatatctcttccagtctttctgatatctgcattaaattttgtttttacaccgttctcattcaggtatatatttaaaccttttttttgtattctgtttatctgtagttccattgttacatatgccaccatgaaatatggtgtgcagtttgataaaacaatgatgcagaatatttttgaaacaaatgcaggtgaaatgacatcatatttcaatatgtctgttgtactgtggtttttatttacgggtatacttccatgtggactattgttgttagtaaatatccgttatcctgagacatggataaagggtattacatatcgtttaatatcaatgtttgcatctctcttgattatatttgcgattgcgtttttcttttataaggattatgcatcagttggcagaaacaactcttcattaaataaagaaataatacctactaattatatctacagtgggtttaaatatgtaagggatttttttgtttctcctggcgagtttcgtcagactggaacggatgcatcccgcacaataaatgaaaaacaaaagccggtaattatgtttttagttgtcggggagacagcaagaagtcaaaactatgctctgaatggatattctcgtggtaccaatgattttacaaagaaatataatgaacttatatcctttcataatgtgcagtcgtgtggcacatccacagccatatctgttccatgcatgttttcagatatgaagcgaaaagagttcaattcccgcaaagcggtaaattcggaaaatgtactggatattctgtacagaacgggggtaaatttactctggattgaaaatgacgggggatgtaaaggtgtatgtaagcgaatccctacaattaatattgagccatcaaattcagataatacattatgcaagaaaaactcatgttatgatgaggttatgctaaaaaatattgatgagtatataaataataactcagaggataaacttatcgtatttcatttgatgggtagtcatggtcctacctactatctccgttatcctgagtcacataaatattttaaaccaacatgtgatcgtagtgatatcgaaaattgtacgcatgagcaattgattaatacctatgataatacaattcgctatactgattatataatatcaaaattaattgacaagcttatcgaatataaagatgagtatgatactgttttattatatgtctctgaccatggagaatctctgggagaaaatggattatacttacatggaacaccatataatgttgctccagctgagcaaacgcatgtgcctcttattacctggatgtctccggggttcgtttcctctaaaaaaattgatttgaattgtttgtcagaacatgctctaaacagaacagtaagtcatgataatatattttcatcgttactggggttatggaatgtaaatacttcagtttataataaagaagatgatattatatcctcctgcagatag

SEQ ID NO: 23651 - DNA, 276 bp, Escherichia coli
atgactgagcactggtcgggtcatgcagatgataatttccccttttcttggggaagcgacagtattttcatgcatgcctgtcttcagtcatacggggagagcatctgtgatacagtccatacatttgttgcggacgtcgctcctgagtcactgactggtctgcaaacagtttatctgtacacggcagggcttctgtgtgatatcgtttttcatatcgagggggggcctccagagatgaatggaataataatatttcctgatgatataataccttag

SEQ ID NO: 23652 - DNA, 699 bp, Escherichia coli
atgctggatctccgttttcagcgtctgcacgggaaaaccacgctcaccacccgtcatcatgtcggtctgctcactgttcagcgtcctttttatcccgaagaagaaacctgccacctctgtctgcttcatccacccggtggtatcgtcggcggtgacgaactcatcatcaacgcaataattgactctgattgccatacgctgatcaccatgcctggtgccagtaaattttaccgcagcagcggcgcgcaggcgcaccttcagcaaaacctgacgctgtgcaataacgcaacgctggagtggttgccacaggattcgattttttttcccggcgctcacgccacgttgcataccgtgtttcatctgtcgtcctccagtacactgctggcctgggatcttctgtgccttggacgtccggtcatcggagaaaccttcagccacggaacactcgctaaccgtctggagatatgggtcgacggttctccgctgttgattgagcgtctgcacgtggccaatggagaacttacctgcgttgcccggaaaccatgggtgggaacgatgctgttctacctggggaatgaaacgcaactggaagacatacgcgaaaaactcacaccactggaaaactacgccggagccacgctcaccgatggtctactgacagttcgctttttaagtgatgataatctgcgttgccagtag

SEQ ID NO: 23653 - DNA, 303 bp, Escherichia coli
atggaactgactccaagagaaaaagacaaactattactgtttaccgctgcactgctggcagagcgtcgtctggcccgcggcctgaaacttaactatcccgaatccgtggccctgattagcgcttttataatggagggcgctcgcgacggcaaaagcgtcgctgcgctgatggaagaaggacggcatgtcctgagtcgcgagcaggtcatggaaggcataccagaaatgatccccgatatccaggtcgaagccacctttccggacggctccaagctggttaccgtccataatccgataatctga

SEQ ID NO: 23654 - DNA, 321 bp, Escherichia coli
atgatccctggagaatataaggttaaacctggctatatagagcttaacatcggccgggctacctgcagtattatcgttgaaaatcacggagaccgaccaattcaggtcggttcccattatcacttcgcggaggttaacccggcactgaagttcgatcgccagaaggcaagaggctatcgtctcaatatcgccgccggaactgcagtgcgcttcgaaccaggccaaaagcgtgaggttgaactggtggcgctgagcggtgcccgtatcgtgcacggtttccgcggagatataatgggtgagctggaggcaaatgatgagtaa

SEQ ID NO: 23655 - DNA, 1704 bp, Escherichia coli
atgagtaatatttcacgccaggcctatgctgacatgttcggccctaccaccggtgataaaattcgtctggcagacactgagctgtggatcgaggtcgaagatgatttaactacctacggcgaagaggtcaaattcggcggcggtaaagtaatccgcgacggtatgggacaggggcaaatgctctccgccggctgcgctgatctggtgctgaccaatgccctgatcatcgattactgggggatcgttaaagccgatatcggcgtcaaagatggaaggatatttgctatcggcaaagccggtaatcctgatatacaacccaacgtcactatcccaatcggcgtatccacggaaattattgccgcagaaggcaggatcgttaccgcaggtggcgtcgatacgcatattcactggatctgcccacagcaggctgaagaagcgctgacatccggcattaccaccatgatcggtggcggtactggcccgacagcgggttctaacgccacaacctgtaccccaggaccatggtacatttatcaaatgctgcaggctgcagacagcctgccggtcaatatcgggttgctgggtaaaggcaattgctccaatccggatgcgcttcgtgagcaggtcgcggccggggttatcggcctcaaaattcacgaagactggggagctacacctgcggtaatcaactgcgcactgactgtagccgacgaaatggacgttcaggttgcgctacacagtgatacgcttaacgaatcaggattcgttgaggatactctgactgccatcggcgggcgcactatccataccttccatacagaaggtgcaggtggtggtcatgctccggatattatcaccgcctgcgcgcaccccaatattctgccttcctcaaccaatccgacgctaccctataccgtcaacactattgatgagcatctggacatgctgatggtttgccatcatcttgacccggatatcgccgaggacgtagcctttgccgaatcgcgcattcgccaggaaaccattgccgcggaagacgtcctgcacgaccttggcgcgttctccctcacctcgtccgattcgcaggccatgggacgcgtcggagaagtagtgttacgaacctggcaggtggcacaccggatgaaagttcagcgcggcccgttaccggaagaaagtggtgataacgacaacgtccgcgtgaagcgctatatcgctaaatacaccattaatccggcattaacccacggtattgctcatgaagtcggctcgattgaagtgggaaaactggcggatctggtgctctggtccccggcgttctttggcgtaaaaccggcgactatcgtcaaaggcggaatgatagccatggcgccgatgggtgatatcaacggctctatccccacaccgcagccggtgcactatcgcccaatgttcgctgcattgggcagtgcccgtcaccgctgtcgtgtgactttcctgtcgcaggcagcagcagcaaatggcgtcgctgaacagcttaacctgcacagcacaactgctgtggtaaaaggctgccgcacagtacaaaaagccgatatgcgccacaacagcctgttgcctgatataaccgtggattcacaaacctacgaagtgcgtatcaacggcgaactgataaccagtgaaccggcggacattctgccaatggcgcaacgttatttcctgttttaa

SEQ ID NO: 23656 - DNA, 465 bp, Escherichia coli
atgctttatttgacccggcgggtggagaccccggctcagacaactgccagcgttaccctccctgttgacatgcgggtaaaaagccgtattaaagtcacccttaacgatggacgtcaggctggactgttgctgccacgcggtctgctgctgcgcgatggtgatattctcagtaacgaaaacggtgatgaattcattaaggtgatcgccgctgatgaagccgtttctgtagtgcgctgcgcagatccttttatgctcgcgaaagcctgctggcatctcggcaatcgccacgttccgctgcaaataatgcccggagagctgcgctaccatcacgatcacgtcctcgatgatatgctgcgccagtttgggctggatgttgattttgcacatcttccgtttgagccggaagccggcgcttacgccagcaagtcgcacgcccataatcacgatcaggagcacagccactga

SEQ ID NO: 23657 - DNA, 675 bp, Escherichia coli
atgccgactccggaaaaacgtctgcggctgatgcagcttgccagtaacagcctccctgttggaggctacagctggtcccagggactggagtgggcagtggaagcaggctgggtagaagatagcgccgcctttgaacactggcagcagttgcagatggaacagagtttttttgccgtcgacctgccactgcttgcccggctataccgggcctgtgaagcgggcgatcctgacagtgccgggcgctggaccgcttatctgctggcctgcagggaaacccgtgagctacgcgatgaagaacgtaaccgcggtgcagccttcaccagacttctggtcgactggcagcccgactgcccggccgaatggcgcaaactatgccagcaaagccagttaaccggtatggcatggctcggcgtacgctggcaaatatccgtttcagacctggccctgagccttggctacagctggattgaaagcgcagtgatggcgggcgtcaggctggtaccctacggccagctggctgcccagcagttaattatgcgcctgtgtgcccgctatgcggcgaacatggacagtgcccttgcaaccccggatcacgcaattggttcagcaacgccacttgcatctatcgcttccgcgcgacatgaaacccagtattcccgattattccgttcttag

SEQ ID NO: 23658 - DNA, 618 bp, Escherichia coli
atgaacataatcaagcaaccgctgcgtgtcggcgtcggcggtccggtcggctcaggtaaaaccgcgcttctggaagccctctgcaaatccatgcgtgacacctggcaattagccgtagtcaccaacgacatctacaccagagaagatcaacgcattctcactgaggccggagcactggaagcggaacgcattgtcggtgtcgaaacggggggctgccctcatacagccattcgtgaagacgcatcaatgaatctggcagccgtggaagcactgagtgagaaatttggtaatctcgagctgatctttgtggaaagcggcggcgacaacctgagtgcgaccttcagccccgaactggcggaccttaccatatatgtcatagatgtggcagaaggagaaaagatcccgcgtaaaggcggtccggggatcaccaaatccgacttcctcgtgatcaataaaactgaccttgcaccatacgtgggcgcctccctcgaggtaatggagcgtgatactttacgtatgcgcggagaacgcccatgggggttcactaacctgaaaagtggtgaaggtctgcaaaacatcatcgcctttatcgaagagcagggcatgctgggtaagtaa

SEQ ID NO: 23659 - DNA, 342 bp, Escherichia coli
atgagcagaaaaacccaacgttactctaaagagttcaaagccgaagctgtcagaacggttcttgaaaatcaactttcgatcagtgaaggcgcttcccgattatctcttcctgaaggcactttaggacaatgggttaccgccgccagaaaagggctcggtactcctggttcccgcacggtggctgaactggaatctgaaattctgcaactgcgtaaggcgttaaatgaagctcgccttgagcgagatatattaaaaaaagcagctgtagattcaatctgtcaatgcaacacccctttcaattatctctttcactgcccgcgacggtatcggttatcagtttga

SEQ ID NO: 23660 - DNA, 129 bp, Escherichia coli
atgaaaaccaaaaaagttatgatgattgcactggtcagctctgcgctggctctttcaggatgtggagccatgggcacagcgatcaaaaaacgaaatctggaagtaaaaacccagatgagtgaaacctga

SEQ ID NO: 23661 - DNA, 264 bp, Escherichia coli
gtgaaaccgaatatccatccggaataccgtacagtagtatttcacgataccagtattgatgagtacttcaggatcggttcgacgatcaaaactgaccgggtaattgaactggatggtgtaacttacccatatgttacaattgacgtttcttctaagtcgcatccgttttatacaggtaaactgagaactgtcgcttcagaaggtaatgttgcacgctttacccagcgttttgggcgttttgttgatgcgaaaaaaggtggctga

SEQ ID NO: 23662 - DNA, 141 bp, Escherichia coli
atgccgcaaaaaacgatcattgtgggcatgttatgcctgaccatgttgctgaccgtctgggtgttacacgcatcaccgtgtgaattcagggtaagcttcatgtggtcggaaattgcggcgttcttgcagtgtaaaccgtaa

SEQ ID NO: 23663 - DNA, 672 bp, Escherichia coli
atggaattttccgttatttttttctgggttatcactggtcttattaccatcttattcttaaaatcaataataaccgatctaataaaaaacctaaacaaaacagacatagcgttatatatattggcatttttatcagccggatatacattccagtatatttacaatgacaatatattttcagaactatggggagttggcctgtttgttactctgatagtactgaatatagtatttaatctcttttttagactcttattcattctctcgaaaatgatattaatgtcacgacatataagaaagatgcaaaaaaaactaaaacagacgtctgtgcctgattttatttattattcaatagaaaaacacaacaaatatcccatatatgtattacacatgccatcaaacaatataattgaaataggctacaatataataaacaccgatctggtcattggcgaaaaaattcatttcaggacactaagcaatcgttctttatattttaacctcacccaccccccattaatcgccacaataaaagatgatgtgttttgcactcttcatgattactataaccacaataatgaaacgaaatccactattgacaattacatatcaaaaataaaggataatcataataccccatggttattaaacaacgaaaatgttcaggaataa

SEQ ID NO: 23664 - DNA, 858 bp, Escherichia coli
atggatatctcgcttctcagtaccaccagtgaccctgaacagcttcgcgctctggcaattgccatggtgcaaaaagtcatggctgagaatgcagaacttcagaaccgtatccgcatcctggaagagcagatgaagctcgcacgccagcagcgtttcggtaaaaaatgcgaatcgctggccgggatgcagcgttccctgttcgaagaggatgttgacgcggatatcgcagaaatctcggcgcatctggacaaactgcttcctcagaccggggacgaagaaaaaacaacaacacgtcctgttcgtaagcccttgccttcacctcttccccgtgctgaaaaggttatcccgccagctgaggaacgttgtcctgactgtgatgcccccctgcacttcattcgcgatgaagtcagcgagaagctggaatatattccggcacaggtcgtggtcaaccgctatatccgcccgcagtacagctgtccctgctgtgagaaagtgttcagcggaaaaatgccggcacatatccttccgaaaagtgctgttgagccatcggtcatcgcacaggttgtcatcagcaaatataccgaccatctgcccctgtatcgccagcagcacattttctcccgaatgggggtggagctccccgtcagtacaatggcggatatggtcggtgttgctggcgctgcactggccccgctggcaaaattgttacgccacgagcttctgacacgggatgttattcatgcagatgaaacgtccctgaggctccttgatacccggaaaggcggtaaatcctgctccggctggctgtgggcttacgtcagcggagaaagagtaagcgtcaacggagcaccgtattga

SEQ ID NO: 23665 - DNA, 330 bp, Escherichia coli
atgtcaaaaccccgatggacgcttgatcagaaaaaacatcacgttgccgcatggcgcgccagcggccttacccgtgaacagtactgtgaactttacgacattccgtttaaatccctgcgccagtggccgcaggatgtcgcaaaagccgaaaaacgagccagagcaccagaaattattcctgtttcagtatctggctcttccggaatgactgatggcagaccattgtcggatgagcctgtcactctcttcctgcccggtggtatccggatgtgctgccagccttctcagttaaccgatgttttccgggctcttcgccatgctgacgcctga

SEQ ID NO: 23666 - DNA, 468 bp, Escherichia coli
atgcaattaaataccagacaggcccggatttttaagcttgccaacttactgggcaccggcaagcccgtttccgctgccgacattataaccagtctggaatgctctgagccgacattaacccgggccctcaaagagctacgcgagtcatattctgcggagatcaaatacagcaaggcaggtcattcctatcatctcgttaatccgggccagttggataaaaagaccctccgccggatgaatgaagcgctcgcacagaatgctgaactgaaaaccggtgagtccacagggaaggtcgtactcgataaggataaaaaaacagccgtgtcattatcgctacgcatgcggattctaagaaaaattgaccgtctggctgcgctgagtgactcgacccgaagtgaagcggtagagaagctggctctgcactccgttgatgaactgataaaagaatacagcgctaaaaagtcctga

SEQ ID NO: 23667 - DNA, 1209 bp, Escherichia coli
atggggttcaggttcagaaagtcgatcaacattattcctggcgttcgcctcaacctgagtaacggtgcaccgagcctgagtgtcgggccgagaggtgcttccgtttcttttggtagccgggggacctatgccaatctgggcttgcccggtaccgggctgagttaccgtacccggcttgaccgggccgcgcgttccagaggtgaaaaccggacggcaaccgacccggggctcagacaggcgcttgagcagaaagccgctgaactcatgtcagcggtaaccgcaatccgtaatattcacgagctgacgccggatccaaaaacaggcatcagctgggcagagctggaagcagtatacctgcataacagaacgtcgccttttcaggttccggcaccggtgcgtccagaaaagccagactaccttgtattgccggaaaagcctgccgagagcgaaggcattagttttttgggtaaatggtttgaatcggaatcagctaaagctgagcgccacgccgaaaatcttcgccggtggcagcaggagctgattgatgtggagcgtgagaatacccttcgacagcaccggtaccagcaacaacggacggcctgggccgaacagtatgcaaactggaagtttgaagctgaagaacatgaaaaacggctcgccacggctcaggcagatgcccggcagcagttccggacagacgccgcgtttttcgaatcatacctggcgggtgtgctggcagaaactgaatggccgcgtgaaacgcttgttgcatttgaagtaaagccggagctatcagcagtcctgctggacgttgatttagctgagattgaagatttccctgataagatttacggcgttaatgcccggggaacggagctgacggaaaaagccatgacgcaaaaagccgtacgcgaaaactatgcccaccacgtccatggctgcttgttccgcctggtcggtatcgttttacatacgctacctttcgacaacgtgattgtgtcaggctttacgcaacgggtcagtaagcggaccggctatctggaggatgagtatatcctgtcctgcaaatgcactcgcagccagatgtcgtcagtaaattttgcaggcataaaacacattgatccggttgaagcgttaggcgatcaaccggttattcgaaagatgagcagtaccttcatttttcagcctattgaaccactaaccctttaa

SEQ ID NO: 23668 - DNA, 957 bp, Escherichia coli
atgaaaaatcgtctttctccctggaatctgggagccacgctatacatgcctgcaacacgggaagatattgctgatgccgtcctgcacgggaaaatcccgggcttgcgctctctggtgatttgcctggaggatgctgtcagtgaagcagacatccccgtcgccctcaaaaatctggagcacctgctgcacgagctcagtaacagcatgagtagcctgggtaaaaatgactggcctctggtgttcattcgcccccggcatgccgaaatgggcagatggttaaaagcgcattatgatctttccgctgtcgacgggtttgtgctgcctaaatttaccctcagttcgttagctgaatggtgggatatcatggtcgggactcacctgtgcatgatgccaacgctggaaacagaagatgtctttgacgtggttcagatgcgcgagctggctacccgtctggaggaacatccctgccacgaccgcattattgcgcttcgaatcggcggcaacgatcttatgaacgttgtgtcgcttcgccgtccccgggacctgacgctgtatgacagcccgatgggctacgtcatcaaaatgctcgtttcggtcttcggcccgcgtgattttgccctgaccgcgcctgtatgtgagcatattgacgatcatgccgttatggccagagagctggctcttgatatggcacacgggcttgttgggaaaacggccattcacccgggtcagatagaggtcattcaaaacgcgctgatggtcactcagggtgagcattctgacgctctgcggatcctgaactctacccaggccgtgtttaagtcgcagggagcaatgtgtgaacccgccacacatcgccgctgggcggctggcattctggacagggctcgtttttatgggttacagaacgagcaaagcgctgatggaatcagattacttaccgtgacccagcatcattaa

SEQ ID NO: 23669 - DNA, 1080 bp, Escherichia coli
atgcagccacatgaaacatttaccggctcataccagcccggtgacgtggaatttctgctaaagccggttgtcattgagatgacgccggttgagaaaaaagaagaactgattcagtccgggaagaaacattattcggacatgctcagccaggagccagcgcctacacaatggcatcttgatttgtttcaccgggcgctggatcggggcgcagagaggcttgcaaaagaagtcacacagctcgctattgctctggccgaacgcttcggtgatgagcccattgtactggccagtcttgtcagggctggcgttccgctcggcgttatgctgcaccaggccctgcgtgacatggggaaaacctcatggcattacggtatcagcattatccgggatcgtggaattgacggtgcagccctcgacgtcattgaagagcggcatggtaccagcggtattgtctttgttgacggatggacaggtaaaggcgcaattaccggagagcttgtacgcgcactgaaagatcgcccgggctatcctgagcagccgcgactggttgtcctggccgatccctgtggctgctcctggcttgcagccagtgatgatgactggctcattccttttggcatcatgggggcgccggtatcaggcctgatctcccggtcagtatggtcctctgaaggattacacgggtgcatggtttgcgagcatctcagtgaattcgaatgcagccggatgcttgccgataccgtcgctcatttccgtaagaagttaacaccgtcatccctcgctcccctgagctggaatacggaatcagcccgggtcttatggcagacaagtcgcgacgttatcgcgttcctggccgatgaatttaaagtggacagcgtcaatcgtattaaacccggtattgctgaagcaacccgggctgtattacgtcgggtaccggaccatgtatttgtgcgttctattgacgacccggacgttgccttgcttgtagggcttgctcgtgaaaagggaatagttgttacagaaatggggggaaccctcggccagtatcgggctgtaaccattatcaagaaggtactctga

SEQ ID NO: 23670 - DNA, 774 bp, Escherichia coli
atgaataaacccgttgttctgagcgaccttgacgacacgctctttcagacccgtcgtaaaatggtggacgagctggccctggagccattccgtaccggtgccgttgatcgcaccctgaatccacgaagctttatgacggaagaacagtccatgttggtggactggctcctggagcaggctgaactcatacccgttaccgcacggggaactgaagaaatcagccgcgtacggatccctttccactcctgggcaatcacaacgcacggggccgtcattctcacgcctgaaggcaaacccgacgaggagtggaaggcccatatgctcggccagctggctccctaccaggaaaagctgacatcgatgcagcgtctgatcactgaaatgatggacgcaaaaggaatcaatgcctgggcaaggctgaacttcgaatacggtgaaacggcggtttatatggtgatgaaacaccgcgacagcacccgccttgacgagctcaatgccattgcagatgagatagaaacggtgtttccgaccgagggcttctacatccaccgcaacagtaataacgtggcctggcttcccaccccggttgagaaagggctggcagtcagctggctgcttgaaaaacttcgggctgaacgaggagttttccccgtaattggtttgggcgacagcctgagcgatcatcgttttatgaaactgtgcagctggtttggcatcccgcgtcagagtcagtttgcagatgccatttcacagcgaatttttggagaaaattaa

SEQ ID NO: 23671 - DNA, 1143 bp, Escherichia coli
atgtctgatatcctcgaagatatgatttatcgccgtaccctctcatgcggtacgattcaggtaacccgtgaccagggtgaagtttcgctcgatgacctgtttgacatcgctgaaagacgtaacccgaaacgcgcctttctgtttgtcagcaaagtactcggcaggcacattcccgtgccaccctcagtcatgcggcaggcctacagacagcttgccagccagttcccctcgacactgacaggacccgtactgtttatcggtatggctgaaaccgccgttgggcttggggccggtgtatttgatgaagtgcgccaccagcatcgtgaatctgtctatctgacctctacccgtcacccggttgatggcacgttgctttgcgagttcaaggaagaacacagccacgccaccgatcatctgatctatctgccagatgatgaagagaaaagacgtcgtgttaccaacgcacgaacgctggttttgattgatgacgaggcaaccaccggtaatacctttattaacctgctttctgccctgcgtaataccggcaagcttcaacatattgaacaggttatcgccgtaacgctgaccgactggagtggcaatgccctgtcggagcgcacccccttgcccgtcacttcggtttcgcttgtaagcggtcagtggggatggaccccattacctgatgcacctgtcccggacatgccgaaagtcaacgtaacttcacgaggagaatgggacatccaggggaaacagtcatggggccgactggggatgctcgcacctgcggccgatctcggccatgaggtctccgtccacaagggggaacgtattctggttctcgggaccggggaattcgtctgggagccgttcctgcttgctgaacggctcgaagctgccggagcacaggcattttatggatcgaccacccgctcccctgtcgccgttggttatgccattgagtccgccatttcctttacggataactacgggctgggcatccccaattttgtctataacgtcgcccaccagcagtttgaccgcattcttgtgtgtactgagacacccgcagaaagtattgacacgcagcttcttaaagcgctggctgaggttgcgcccgtcgtggagattgttacctatgaataa

SEQ ID NO: 23672 - DNA, 1059 bp, Escherichia coli
atgaacaagaaaatttggtttatggaaggtttatcctcccagcgagatattattcagggggtaaaatcatttgcacaaaaaaataattttgccattaccgtttttgcctcccaccgtaacgaaagaaatgaaatcctttccgttgccgattattctttgactgaacctgaagatcctcaaaaacgtcttcagtttatccaggaaaccattcagacctacggcatccaccatattcatactggccgtaacagccagtggtttgaagaacaccgttcagccattgaaccgaccggtgccacccttactaccggtgcaacgggcgtcgactggttaactctggctgacgaaaaagttacttttgctcagtttatggagcaaaagggtctcccggtcgtaccatcctggcgggtgaatacgctggcagaattaaagacacacctcgcggccccgccgttcactgacagcccggtatgcgtgaagccggtgacgggtatctatggcatgggattctggcgctttgatgacagtgcttcgcctatggccgtctttaatcatcccgaacatcgtctggtcagtccgcaacagtatattgcagcagcatcagctgctgagtcgtttaaaccccttgttttgatgccgtacctgccaggcccggaattttccgtcgatatcctcgcggataagggcgaaatactcgcagccgtgggacgccgtaaggaaggggctatccagtatctggtaaacgaaggaagcgcctgggaactggcgtgtgactgcgcccgtgttatgaaggccgacgggctggtgaatgttcagacgcgaaacgatgtgaatggcaacccggtgctgcttgaaaccaacatgcgtccgtcagggggggtgggttatacccttcacagcggtgtgaaccttcctgggttatttgctgcctttaagctcggtctgatgtctgaagatatggtacgccagagcgctaaaaacaccttttctccggttgcggtgagatccattacggatgtaattgcatacccggaatcactctctaaccttctgaattaa

SEQ ID NO: 23673 - DNA, 582 bp, Escherichia coli
atggtttcattagttaagaaccagacggtatcactcagcaaagaatcatctgcattaagccagcttcatttcggtctcggttgggatccggttaagaaaaaaggtcttcttggaggattgtttggaggcaacgactcaatcgatctcgatgctggctgtgtattaatggacagcacaggtaaaacaattgacaccatctggttccgcaaactgaaatccacctgcggcgctgttgtgcacagtggcgataacctgaccggtgagggtgacggtgacgatgaagtgattaaggtcaacctctcccgcctgcctgcaaacgttgaatacctggcgtttacggtaaacagcttccgtggtcagtcgttcaatgacgtcgaaaacgctttctgccgcgttgtcgatcaaaccggcaaagagctggctcgctacaagctgactgagcagggctcacataccgggatcgttatttcttcgctgcgccgtaataacggcaactgggactttaccgcccttggccatgcctgtcgcggccgcacaattgacgatatgcactccgatatcgtttcagcggttattcgctaa

SEQ ID NO: 23674 - DNA, 1158 bp, Escherichia coli
atgaacctgacgccggggggcaatgcccccgttccagcccaggagttgcgggtccggatcacctcgggcggccaggtggatgcttcggcgtttcgcctgtatgccgacgggaaggtgcagggtgatgcggacatggtgttttatggtcagccacgtaacgatgatggtaccgtcagcctggtcagtgaaggccagtactcaacctttactgtcgcgctcaaccggctgaaacctgatgtccagaaaattgcgttcaccgtgacctgtgacggtgggcagacggtgtccggtcttcgtaatctttccatcgacgtggagcaaggggctaccggcctggttagcggcagtgtcgaactgagcggccgtcaggaagcagccttaattctgggggaattttaccgtcgtaataatgactggaaattccgcttcgttgcgcaggggttcaacggtggacttaaaccgctggcagagcatttcggcgtaaatattgccgacgaaccggctcccgcagccccaactcctccggttgtaacccctccgccagttgagacaaaaatcagcctgagcaaggtatcgctgacaaaagagaagcctgcaatcagcctgaccaaacgggataacttcggtgaaatccggatcaacctgaactggcaccggggcagtagcaaatcaggctttgcaggtatgttcggctccaaaggaatcgacctggatctgggggcctttgttgagcttcaggacgggtataaatcggtcattcaggcgctcggtaatgcattcggtgattatcgcgatgaaccgtatgttcagctcaagggcgatgaccggacgggtgatgtatcagacggcgagtggctgcatatcaatggacgtgaatggaagcatatccgcgaagtgctgatttacgcctttatttatgaaggtgttcccagctgggacaagactgatggtgtagtcaccattcatgtgccggatcaaccgcccattgagacccgcctgaccgaaggtgagaaccgtcgcacattgtgcgccattgccagactcgtaaacgaaaacggcgcaattaaagtcgagcgaattaaccagtacttcaaaggccaggacgaaatggaccgggcatttggctggggatttcgctggagcgccggttctaaataa

SEQ ID NO: 23675 - DNA, 309 bp, Escherichia coli
atgaatttacaatccggacaaaacataccccttcagcaatctacgatcaggctgaatcttcagtaccctgccaaatccggctttaaaggcgaacccgatacctgcctgttcatgcttaatgctcagggaaaggtcagtggcgattctgactttatcttttataataatttgtcttctcctgagggggcagtcaggctcgttaccggttcgcagcaggccagcattgagatagcactggatcgtgttccggcgaacgtcagtaaaattgcgatcaccgttgtcattgatggtgaagataccatcagttga

SEQ ID NO: 23676 - DNA, 1125 bp, Escherichia coli
atgcgaaaacgtattctttttattggcccaccgctgtacggtttgttatacccattgatttctctggctcaggcctttcgtgtaattggacatgatgtagtaattagtagcgctggcaaattcgcgaataaagcagcagaagctggactggttgtttttgatgcagttccaggtttagattcagaggctggatatcgccatcaggaagagttgaggaaaaaaagtaatattattggtcatttctctttttttagcgatgaaatggcagataacctcatcgattttgcaggaaaatggaggccagatttaatagtctatccccctcttgatccggcaggcccattggttgctgctaaatatagaattccttcagtgatgctggctgttggattcgcgcatacatctgcccatattcagatgttaaaccgttctttaagcaatgcttacaggcggcatggagtcagcggtccactatgtgatttagcatggattgatgttgctcccccaagtatgagcattcttaaaaatgctggagaaccggttatctcaatgagatatattccttataacggaggtgctgtaaaggaaacatggtgggacagggattctgatcggaaacgtttacttatcagccttggcactgtaaaaccaatggttgatggtctggagctgatttcatgggttatggattctgcaaatgaagttgatgctgatatcattttgcaacttgcaataaatgctcgtactggtttacgaaaactaccatcaaatgtacgtctggttgactggatacctatgggtgtattccttaatggagctgatggatttattcatcacggtggcgcaggtaataccctgacagcgctgtatagtggaataccacagattgtgtttggcgaaggtgcagatcgctctgttaatgcagaaattgttgcgaagcgtgggtgtgggattattccggacaagcatggactgaccagtgatttggtaaatcgccttctttatgatgattcactacgcttctgttcagatcaggtagccgctgaaatggctgaacaacccagtcctgcagagattgcagaggttttgatgagaaaattaaaaaacaacgggaaacaattgtag

SEQ ID NO: 23677 - DNA, 510 bp, Escherichia coli
gtgcaaataaccgaagccttaatttcagagccgggggaaatccggcgttttgttcagcaggcggtggaccactggccaaatctgttggcatttcacttcacgctctattcggcagaaggaatctatggtcaacagattcagacattttgtagttcctttcaccgacgggtacacgaacgtattacggagcataatcacacggtcagcccatcagcgccggtggtattacgctggttgcgggaacaacatgaaggagcacagatacgatgtctgttgctgctcagccagacgagtatttgccatccgcgagtcggcgtcatggctgatgaagaatgtgcgcaactggtggatttactgcaacagacctggtcggtgataagtgctggcggacaatgccgggtggaaagatgttttcgggtggcccggcctggttcatcagggcaatacgtggcgttaaaaacggctgttcagtcctttatgtcgcaggttattgcaacaatcatccggtga

SEQ ID NO: 23678 - DNA, 624 bp, Escherichia coli
atgcgtacacgaattgactatctggcggataaatactgttttacagaacggaacgaatccccccgtcttcgccggcagtggcaggatgttctggaggagtgccggcagacagaggccgggccagaagaacggttgcgtattgcactgctgaatgtggattacgtcaccagttttgaactgccttttcgcttgctgcttacccgtacaccgcaattgattgccgcgctgcgtgaagaatggggcatcagccagaaaaatgtggtgtttaacgataaacggtttggctgcgtgtacagcctgaaggccagcctttctggtgtgccggatacataccggtatcatctgtctcaccgtattcgtcgcgtggttgggaatgaaaacacatcattgccatatcagcaggttgcccgggaagtgaaagcgccccgtgaacggctgaagtatgcactggaggcgggtttactggtgactgcactggacggcctgttcaggtttggcagtcagcgtattgcggctgatgttctgaggctgagaaaggccggaatgccggtggtgaccacgaccgtggaggtgcacgataacctgacgggaacaacccgcaaagtaccggcataccatctctga

SEQ ID NO: 23679 - DNA, 234 bp, Escherichia coli
atggcaaggtccgattatgatattatcaatctgtctctggaacatgaactgaatgagtggctggcagagagaggttatgccggactggtggataaccggaatcgcctggcagaagttgttacccgcaaattgcaggacagcttttatataaacgtttccagggatgcgctgaacacggcatacagtgaacacccggagtggttttctgggcttgtctccggggatgagaattaa

SEQ ID NO: 23680 - DNA, 1782 bp, Escherichia coli
atggcaaaaatgagagccgttgacgcggcaatgtatgtgctggagaaagaaggtatcaccaccgccttcggcgttccgggagctgcaatcaatccgttctactcagcgatgcgtaagcacggcggtattcgtcacattctggcgcgtcatgtggaaggtgcttcgcacatggcggaaggttatacccgcgcaacggcagggaatatcggcgtatgtctggggacttccggtcctgcgggcacggacatgatcaccgcgctctattccgcttctgctgattccattcctattctgtgcattaccggccaggcaccgcgcgcccgtctgcataaagaagattttcaggccgtagatattgaagcaattgctaaaccggtcagcaaaatggcggttacagttcgtgaagcggcgctggtgcctcgcgtgctgcaacaggcatttcacctgatgcgttctggtcgtccgggtccggtactggtggatttaccgttcgacgttcaggttgcggaaatcgagtttgatcctgacatgtacgaaccgctgccggtctacaaacctgctgccagccgtatgcagatcgaaaaagctgtagaaatgttaatccaggccgaacgtccggtgattgttgccgggggcggggtaatcaatgctgacgcagctgcactgttacaacagtttgctgaactgaccagcgttccggtgatcccaacgctgatgggctggggctgtatcccggacgatcatgaactgatggccgggatggtcggtctgcaaaccgcgcatcgttacggtaacgcaacgttgctggcgtccgacatggtgtttggtatcggtaaccgttttgctaaccgtcataccggttcggtagagaaatacaccgaagggcgcaaaatcgttcatatcgatattgagccgacgcaaattggccgcgtgctgtgtccggatctcggcattgtctctgatgctaaagcggcgctgacactgctggttgaagtggcgcaggagatgcaaaaagcgggtcgtctgccgtgtcgtaaagaatgggtcgccgattgccagcagcgcaaacgcactttgctgcgcaaaacccatttcgacaacgtgccggtgaaaccgcagcgcgtgtatgaagagatgaacaaagcctttggtcgcgatgtttgttatgtcaccaccattggcctgtcacaaatcgctgcggcacaaatgctgcatgtctttaaagaccgccactggatcaactgtggtcaggctggtccgttaggctggacgattccggcggcgctgggggtttgtgccgctgatccgaaacgcaatgtggtggcgatttccggtgacttcgacttccagttcctgattgaagagttagccgttggcgcgcagttcaacattccgtacatccatgtgctggtgaataacgcctatctcggcctgattcgtcagtcacaacgcgcctttgacatggactactgcgtgcaactcgctttcgagaatatcaactccagcgaagtgaacggttacggcgtcgaccacgtaaaagtagcggaaggtttaggttgtaaagctattcgcgtcttcaaaccggaagatattgcaccggcctttgaacaggcgaaagccttaatggcgcaatatcgggtaccggtagtcgtggaagttattctcgagcgtgtgacaaatatttcgatgggcagcgaactggataacgtcatggaatttgaagatatcgccgataacgcagcggatgcaccgactgaaacctgcttcatgcactatgaataa

SEQ ID NO: 23681 - DNA, 603 bp, Escherichia coli
atgaaaccaaatatgattgtaggagcattagcgttaacttctgtgtttatggcaggtcacctacaggcggctgatggaacagtccatttccgtggtgaaattattgacagtacttgcgaagtcactcctgaaactaaagatcaggtcgttgatttaggcaaagtaaaccgtacagcctttagtggcgtcgatgatgtggctgccccgacggctttttctatcgatctgactcaatgcccggaaacctttaagtccgccgcaattcgtttcgatggtaatgaagatgctcatggtaatggcaacctggcaattggtaccccgctggataactctaacgatgctgccgctggtattagcccgagtgataacagtggggattatactggtgcgggtgccgttagtgcagcgaaaggcgtagctattcgtttatataaccgtgcagataacactcaggtcaagttatatgaaaattctgcatcaactccgatttctaatggtaatgcatccatgaagttcatggctcgttatattgctacggaaacgactattgaccctggtacagctaacgccgactcgcagtttacagttgaatatataaaataa

SEQ ID NO: 23682 - DNA, 384 bp, Escherichia coli
atgcctatgtatttacttagattgttttttgctgttactttgattacgcagatgtcgatggctacggctggtattgttgttgggggaactcgcgttattttttatggtgacaaacctgataccacaatctctatttttaataaagaaacgaaccttccttatctattgcagacatgggttgatccatttaataaagaggataaaagcaaaccgccattttctgtgatacctcccgtttctcgcattgaaccacagcaagagaaaatattacgcattttaaaaacggctggcgagttaccaaaagatcgggagtccgtattctggttgaacgtgaaaaacatccctccttcaattgataaaaaaataccaatgttcttgagatag

SEQ ID NO: 23683 - DNA, 504 bp, Escherichia coli
atggcctcttcgcatcttttcattacgcttgcatcgggcatatgtctgctctgttccatatctgcttttgcccgggatagcttgttcaaccccagattactggaactggatcatcctgcggataatattgatattcaccagttcaaccgttcgaataccttacctgcgggaacatacaaagttgatgtgatgatcaacggcatgctcttcgaacgccaggaagttaaattcgcccaggataaccctgatgctgaactccacccatgctacgtggcgataaaaaacgtgctggcgacctatggtataaaagttgatgcgataaaatctctggcgaatgttgatgacaaaacatgcgtaaatccagttccgctgatcgacggggctacctggttactggacgccagtaaacttgcattgaatattactattccgcaaatttatctcaacaatgcagttaatggttatatcagccttcccgttgggatcaggggatcaatgccatga

SEQ ID NO: 23684 - DNA, 2034 bp, Escherichia coli
atgatgatgaattatgatttttcggcatcgcataccatccggtcaaattatgacgacgacgatgacagttattatctgaatttgcgtaatggtattaatttaggcgcatggcgttttcgtaattacagcaccctgaattcttatgacggtaatgtggactaccattccgtcagtaattacattcagcgcgacatcatggcattacgtagccagattatgattggcgatacctggacggcaagcgatgtatttgatagtacacaggtgcgtggcgtgcggctgtataccgatgacgatatgttgccctccagccagaacggctttgcgccagtggtacatgggattgcgaaaactaacgccacggtgatcatcaaacaaaacggctacgttatttatcaatcagccgtaccacagggcgcatttgccctcaccgacttaaacacgaccagtagcggcggcgatctcgatgtcactatcaaagaagaagatggcagcgagcagcactttattcagccatttacttcactggccattctcaagcgtgaaggtcagaccgatgtagaccttagcattggagaagtgcgcgacgaaagcggctttacgcctgaggtcttgcagttacaagcaatgcacggtttccctttgggaataactttgtatggcggaacacaattggcaaatgattacgcttctgccgcgctgggtattggtaaagatatgggggcgctgggcgcgatttcttttgacgtgactcatgcccgctcgcagtttgactacgacgataatgagagtggtcaatcgtatcgttttctctattccaaacgttttgaagacaccaataccacctttcgtctggtgggttatcgctactctatggaggggttctacaccctcaatgaatgggtgtcgcgacaggataatgattctgatttctgggtaacgggcaaccgtcgcagccgcttcgaaggcacctggacgcaatctttcacgccaggctggggcaatatttatttaacattcagtcgacaggaatactggcagaccgatgaggtcgaacgtttattacagttcggctataacaacaactggcgaaacatctcctggaacgtttcctggaactatacggactcgatcaagcgctcattgggcaaccatcatgatgataacaatgatgatttcggcaaagaacagattttcatgttctcaatgtcgataccgctatcgtgctggatggaagacagctacgtcaactattcgttaacgcaaaacaaccaccatgaaagcacgatgcaggtcggtctgaacggaacgatgctggaagggcgtaacctgtcttataacgtacaggaatcgtggatgcactctcctgatgactcctacagcggcaatgccggaatgacctatgacgggacttatggctcggtcaatggtagctattcctggagccgtgactcccaacattttgattatggcgccagaggcggcgtgctggtgcatagtgacggagtgaccttctcgcaggaactgggcgaaacggtggcattggtcaaagcgccgggcgcagaaggcctgtccattgaaaacgccaccgggatttctaccgactggcgtggttataccgtaaaaacgcagcttagcccgtatgacgaaaaccgcgtggcattgaacagcgactatttctccaaagccaatattgaactggaaaacaccgtcatcaacctggtaccaacgcgcggtgcggtggtgaaagccgaatttgtcacccatgtcggttatcgcgtgctatttaacgtccgccaggtcaacggtaaaccaataatgtttggcgcgatggcaaccgcctctctcgaaacgggcacagtcaccgggattgtcggtgataacggcgaactgtatctctccgggatgcctgaaaaaggcgagtttttattgagttggggacaagctgcggatgaaaaatgtaaggcggcctatcacatcacccataaacctgatgataccagcctggttcaaatggatgcgatttgtcgctaa

SEQ ID NO: 23685 - DNA, 1071 bp, Escherichia coli
atgaaaaaaatattatcagggttgattctgctgctttgctgtccttatggtttcgccgctaatggtgatggcgcaacgcacatgtcaaatttatcatttggtccgctgacggtggcagcggcgaataaccactccggatacaatattttcgaggcactgagcaacacgactggaacatacccggtgcgctgtcactgtgatgacacgcatggcggaccgggccaacaaacagcattttttcctatcttctacacgggagatgccgcaccggggcttgtgcttgagcgcactcttaatgggttaaattactatgctctgaatgattatttatcggtcggcgtgacgatttttattattaataaccaatatgcggccattccttttgaacacttatccaaccaatccacctcaccgcaacatacctgtggagcaggtaataatgggagcactgtaaatctggattcagggcgctcggcaaaattatctttctatgttcggcattctattactggcacggtgacaatacccacaacggaagtcgcctggttgtacgcgggcatgtccgatcattttcccaaaacgacccccgtttctaaagtgacaattcgcggacaactaacggccccgcagaactgtgagttaacgccaaatcagagcatcgatgtcgattttcaaaaaattaatagcgctgagttctcctcaacggcgggttcaattattgcagaaagaaagattaaaaccgaagtcacagtatcctgtaccgggatggaagacgtaaggtccacggaggtggtgagtgcgtcgatgattgcggcaaacagaagtgccgatgccaccatgatcgtgacgagtaatccggatgtgggaattaagatttttgataagaacgaccgtccagtgaatgtggatgggggcaacttacccgctgatatgggtgctattagtcgattaggaaaaaccgatggtagcgtaacgttttattcagcgcccgccagtctgacgggcgcaaaaccagcgcctgataatggatttaccgctacagccacgctggttattgaatttactaactaa

SEQ ID NO: 23686 - DNA, 1083 bp, Escherichia coli
atgaaaaaatggcattatatattttgcataattctctttcatttagggttaccgtgcgggtatgcggcaaatgatggcacgtgtgcaacaagaggcggcacacatacattaagccttaattttcctctgacaacggtcagtgcagcaaacaatgtgcctggaaatacattaatagatattgctaatgcaacatcttctgaaaattatagcgttctgtgtaactgtgattcaaaacatagcaatggcgcttatcacgaaatatattataccgcagaccctgctcccggtatggtttatagcaccaccgcaagtggtcttgctttttactatcttaacgaatatgtcgatgtgggaacaaaaatatctgtgctaaatgcggggtatacggcagttccttttgaacatgtttccaaccaggcaactacaacagatcacacttgtcagggaaacaaaactacagcggttggcgtgagcctgaaaactggagcagatgcgaagatttcatttcgtattaaacgttcaataaatggaacggtagtaatacctatcaccgatattgcattgctgtatgccaacatatccagcaccacgacccgtggtgaggcgattgcaaaagttcgaatttcaggcagtttgaccgcaccacagtcttgtcagataaatgcaggacaggtgatttattttgattttgatactattcctgcgtccgaattttcatctaccgccgggcaagccattacttcacgaaaaatcactaaaacagtgagtattgagtgtacggggatggggtatgagcgtacgcagaaagtcgatgcttcttttacggggacgaaccgaagcagtgacgatacgatggtggcgacagacaatgctgatgtcgggatcaaaatttacaataaatcgaatgctgaagttagcgtcaacaacggcaagttacccgcagacatgggcaacacgaccatttttggtcgtaaaaatggttcggtaactttttcggcagcacctgccagctttaccggtgcccggcctcagcccggcgtttttaacgctaccgcgaccttaaccattgaatttgtaaactaa

SEQ ID NO: 23687 - DNA, 246 bp, Escherichia coli
atgattatctttcgagttaatatttattttaaatactctactaacaataatgtctttattctcatctactgtaaattctgtcgtcgtactaaagcgccatttttcttctggaatagcgagagatttaattctctcaaatctcttaactttgtcctcagttttcgttacaaattctacaattgtttctttagcctccttaatatgatacatgggaaagagatcgagtataaattcccaaagagttag

SEQ ID NO: 23688 - DNA, 600 bp, Escherichia coli
atgacatccctctccccggacaccgtccgccgcattgaagacgccgccgccgccctgatcgccgccggcaccccgaacccgaccaacgagcaggtccgtcagcacctcggcggcggctccctgtcccacatctccccggtgatgcgcgcgttccgcgcccgccagcgcgagcaggccacgcccctgccgccggagctggcgcagctgctgaccggccagctggggctgctgtggcaggcggccgtgaaacaggctgaagccggggccctggcggcgcgcgagcaggccgacgacgacattgcccgggccgacaaggagcgggatgaggcgctggcgaacgtggccgcgctggaaagcgagctggcggtgctgcgcgaggtggtggccgaacgtgaccgcctgctgcaggaggtacgcgagctacgcgcggaggcgctgccgctgcgcgagcaggtggcccgcctgaccgccaccggcgaacacctggcggcgcagctgcaggacacgaaggcggagctgaaggaagcccgggaggacggccgccagcttcagaccgaactgctggctctggcccgccaggacgggaaggtgaagaaatga

SEQ ID NO: 23689 - DNA, 621 bp, Escherichia coli
atgagacaggaaagagtattacgtataaaggcatttcgacgggcactggagcttggtggcggtgaacgggctgacgggtgtcgtcattttccccgctggaaaacggaactgaggaatttcccgcacagcagctgcgatttagccagcaatactctggcgtactacctcaaagaacgagagagatgccatccgtgcatcatttttatggaagggaacgctggctttcatgaagcggaaaactcaacagttcacgggcatgtcatcgtattgctggacggagagtacatcgatttgacgctggatcaattcgacgaatatccggactacattccttacgaacctgtcgaatctgacgggcagattggtaagctgttgcgtaatatcatgaagcatgaggacccggtaaaaacccgccagattgatctcgatggtggcgaagagctgtatgcctggttacgcgataccgccgacgaagtgctggcagcagatccggaatggcaggcccgggaacggtcgatagaagaagcaagggaagccgctattacggtgttcccgtttctgtctgacgtgcaaaaaactgagtgcgaacagggcccggacagtcaggaggctgccagatga

SEQ ID NO: 23690 - DNA, 1440 bp, Escherichia coli
atgcgcttttacatgaaaggtttatgggatttggtttgccgttataagacggttttttctgatgtctggaaaattcgtcacacacttgatgctcctgtgagagaaaaagatgagtatgcatttcttcctgctcaccttgaactcattgaaacaccagtatccagacgttctcattttgttgtatggagtattttattatttgtaattatatctcttctcttatctgttcttgggaaagttgaagtggtttcagtagcaaatggtaagtttactcatagtggaagaagcaaagaaataaaaccgatagagaatgcgattgtagaaaaaataatggtaaaagatggctcttttgtaaaaaaaaatgatccattagttgaattgacggtgcctggtgttgaatctgatattttaaaatcagaagcatctttgttgtatgaaaaaacagaacaatatcgctacgcaattctttctgaatcaatacaacggaatgagcttcctgaaataaggataacagattttcctggcggagaagataatgcgggaggtgaacattttcagagggttagctcattaataaaagagcaattcatgacatggcagaacagaaaaaatcaaaagcagctcacattaaataaaaaaatagttgaacgggatgcagcgcttgctcgtgttagcctgtatgagcatcaggtatcacaggaaggaagaaaactcaatgattttaagtatttgttgaataaaaaagctgtttctcaacattcagttatggagcaggaaaatagctatattcaggcaaaaaatgaacatgcagtctggcttgcacaggtttctcaacttgaaaaagaaatagaacttgtgcgggaagaactggcactggagacgaatatcttcagaagtgaaattatcgagaagcacagaaaatcaacagataacattgtgttgctggagcatgagcttgaaaaaaacaggcagagaaaagcatcatcttttattaaagctcctgtgagtggtactgttcaggagttaaatatacatacagaaggtggtgttgtcacaacagcagaaacgctgatgattattgtccctgataatgatattctcgaagtaacagcatctgtacttaacaaggatatcggttttatacaacctggacaggaggtcgttattaaagtagatgcatatccatatacacgtcatggttaccttacagggaaagtaaaaaatataactgcagattctgtttctgttccggatacagggcttgtatttaacgtgattatatctgttgatcggaatgatatacagggagaaagaaaaaaaatccctgttacagctggaatgactgttatggcagaaataaaaaccggggtgcgtagtgttatcagctatcttcttagtccattaaaggaaactattaatgaaagtttacgtgaacgttag

SEQ ID NO: 23691 - DNA, 2121 bp, Escherichia coli
atgatgagtaaatgtagttctcataatagtctgtatgcactgatattgcttgcacaatatcataatataactgtcaatgctgaaactataaggcatcagtataatacccacacacaagattttggggtgactgaatggttactggcagcgaaatctattggcttaaaagcaaaatatgtagaaaaacatttttccagattgtcaataatttctttacctgcgttgatatggcgggatgacggtaagcattatatattgtctcgtattactaaagattcatcacgctatcttgtttatgatccagaacaacatcagtcactaacttttagtcgggatgagtttgaaaaactgtatcagggaaaagtcattctggttacgtcaagagcaacagtagtcggagagttagctaaatttgatttttcttggtttatcccctctgttgtgaaatacaggaggattttacttgaggtgttaactgtttctgcttttattcagtttcttgcgttaataacacctcttttttttcaggttgtaatggataaggttttagttcaccgggggttttcaacgttaaatattatcacaatagcatttattatagtgatactttttgaagtgatattaaccggagccagaacttatattttctctcatactacaagtcgtattgacgtcgaactgggtgctaagttattcagacatttgcttgcattgcctgtttcatattttgaaaatcgcagggtcggagagaccgttgccagagtaagggaactggagcaaattcgtaattttttaaccggacaagcgttgacatcagttcttgatctatttttttctgtaatatttttttgtgtcatgtggtattacagccctcaattaacactggttatattattgtcactaccttgttatgttatatggtcattgtttatatcacccttattacgtcgacgtcttgatgataagtttctcaggaatgcagaaaatcaagcttttcttgtcgaaacggtaacagcaataaatacaatcaaatccatggcagtatcaccacagatgattgctacatgggataaacaactggccgggtatgttgcttccagtttcagggtaaatctggttgcaatgacagggcagcaggggatacagctgatacagaaaagtgtaatggtaattagtctatggatgggagcacatcttgtcatatcgggagagataagcatcgggcagttaatcgcgtttaatatgcttgcaggtcaggtcattgctcctgttatcagactggctcatctttggcaggattttcagcaggttggtatttctgttgagcgccttggtgatgtattaaatacaccggtagagaaaaagtcaggcagaaatatactgccggaaattcagggggatatcgaatttaaaaatgtcagatttcggtattcttctgacggtaatgttattttgaataatattaatttatacatatcaaagggggatgttatcggtatagttggccgttctggttcaggaaaaagtacattaacaaaactgcttcagcgcttttatataccagagaccggacagattttaattgatgggcatgatttatcacttgcagatccagaatggttacgacgccagattggtgttgtattgcaggaaaatatactattaaatcgtagtattatcgataatattacattagcttctccggctgtatctatggaacaggctattgaggcagccagacttgcaggtgcccatgattttattagagaactaaaagaagggtacaatactattgttggagaacagggcgttggtctttcaggagggcagcgccaacggatcgcaatagcccgggctcttgttacaaatcctcgaattcttatttttgatgaagcaaccagtgctcttgattatgagtcggaaaatataataatgaaaaatatgtcaagaatatgtaagaacagaaccgtaattattattgcacacaggttgtcaactgtaaaaaatgcaaacagaataattgttatggataatggctttatttctgaagatggcacacataaagagcttatctccaaaaaagacagtttatatgcatatttatatcagttgcaggcataa

SEQ ID NO: 23692 - DNA, 2997 bp, Escherichia coli
atgacagtaaataaaataaagaacattttcaataatgcgacattgactacaaaatcagcatttaatacagcatcatcaagcgtacgttccgctggaaaaaaactcatattattaatacctgataattatgaagctcagggcgtgggtattaatgagttggtcaaagctgctgatgagcttggaatagaaatacaccgtactgaacgagatgatacagcgattgcaaaccagttttttggtgcagcagaaaaagttgtaggattaactgaacgtggtgttgcaatattcgcaccacaacttgacaaacttctgcagaagtatcagaaagttgggagtaaaataggaggaaccgctgaaaatgtaggtaataatctgggaaaagccggaacagttctctcagcactacagaattttacggggattgctttatcaggcatggctcttgatgaattgctgagaaaacaacgggaaggagaggatataagtcagaatgatattgccaaaagtagtattgaacttattaatcagcttgtagatacagtatcaagtataaacagtaccgttgattcattttctgagcagcttaaccagcttggctcatttttatccagtaaacctcgattaagttctgttggtgggaaattacaaaatttaccagacctgggccccctgggggatgggctggatgttgtctccggaattctttctgctgtatcagcaagctttattctgggaaacagtgacgcacatacaggaacaaaagctgcagcgggtatcgaactgacaactcaggttcttggaaatgttggtaaagctgtttcgcaatatattctggctcagagaatggcacaggggttatcgacaacagctgcaagtgcgggtctgatcacatcggctgttatgctggctatcagtcctctttctttcctggctgctgcagataaatttgagcgagctaagcagcttgaatcatattctgaacgatttaaaaaattgaattatgaaggggatgctttactcgcagcctttcataaagaaaccggagctatagatgcagccctgacaacaataaatactgtcctgagttctgtatctgcgggagttagtgcagcctccagtgcatccctcataggggccccgataagcatgctggtgagtgcattaaccggtacgatatctggcattctggaagcatcaaaacaggctatgtttgagcacgttgcagagaaattcgctgctcggatcaatgaatgggaaaaggagcatggcaaaaattattttgagaatggatatgacgcaagacatgctgcgtttttagaagactctctgtctttgcttgctgatttttctcgtcagcatgcagtagaaagagcagtcgcaataacccagcaacattgggatgagaagatcggtgaacttgcaggcataacccgtaatgctgatcgcagtcagagtggtaaggcatatattaattatctggaaaatggagggcttttagaggctcaaccgaaggagtttacacaacaagtgtttgatcctcaaaaagggaccatagacctttcaacaggtaatgtatcaagtgttttgacatttataacaccaacatttaccccaggagaagaagttagagaaagaaaacagagtggtaaatatgaatatatgacatctcttattgtaaatggtaaggatacatggtctgtaaaaggcataaaaaatcataaaggtgtatatgattattcaaaattgattcagtttgttgaaaagaataacaaacactatcaggcgagaataatttctgagctcggagataaagacgatgtggtttattctggagcaggctcatcagaagtatttgctggtgaaggttatgataccgtatcttataataagacggatgttggtaaactaacaattgatgcaacaggagcatcaaaacctggtgagtatatagtttcaaaaaatatgtatggtgacgtgaaggtattgcaggaagtcgttaaggaacaggaggtgtcagtagggaagcgaacagagaaaatacaatatcgtgattttgaattcagaaccggtggaattccttatgatgtaatagataatcttcattctgttgaagagctcattggcggaaaacatgatgatgaattcaaaggcggtaagtttaatgatatattccatggcgcagatgggaacgattatatcgaaggtaattatggtaatgatcgactatacggcgatgatggggatgattatatatccggaggacagggagacgaccagttatttggtggtagtggaaacgataaattgagtggaggggatggtaataattatctgacaggaggaagcggtaatgatgagcttcaggcacacggagcttataatattctgtcaggtggtactggtgatgataaactttatggtggtggtggtattgatcttctggatggaggggaaggtaatgactatctgaatggtggttttggtaatgatatttatgtttatgggcaaaactatggtcatcatacaattgcagatgaaggaggtaaaggagatcgtttgcacttatctgatattagctttgatgatatcgcatttaagagagttggaaatgatcttatcatgaataaagccattaatggtgtactttcatttaatgagtcaaatgatgtcaatgggataacatttaaaaactggtttgcgaaagatgcctcaggagcagataatcatcttgttgaggttataacagataaagatggtcgagagataaaagttgataagatacctcataataataatgaacggtcaggttatataaaagccagtaatatagcatctgaaaaaaacatggttaatatcaccagtgttgccaatgatattaataagattatttcttcagtttcagggttcgattcaggtgatgaacgattagcatctttatataatttatccttacatcaaaacaacacacactcaacaactttaacgacaactgtctga

SEQ ID NO: 23693 - DNA, 516 bp, Escherichia coli
atgaaatctaatgcttttgacgtcatggggaaggttgcatggctatgggcctgttctcctctgcataaaaaatggccattatctgtttttgctattaatgtcatacctgctattcagacaaatcaatttgctctcttaataaaggatgagcttcctgtagctttttgtagctgggccagtttagatctggaatgtgaggtaaaatatataaatgatgtaacatctttgtatgcaaaagactggatgtcgggagaaagaaagtggtttattgactggatagctccatttggacacaacatggagttatataaatacatgaggaaaaagtatccttatgagttattcagagcaataaggttagatgagagcagtaaaacaggaaaaatagctgaatttcatggaggggggatagataaaaaactggcatcaaaaatattcaggcaataccatcatgaacttatgtctgaagtaaaaaacagacaagattttaattttaatattgagaaagaaaactaa

SEQ ID NO: 23694 - DNA, 402 bp, Escherichia coli
atgatgggtaatattttgaaaaaactgaattgtatcgcgtcattactagtcttagtgactatctctggttgtcatcagtcaccctccatccataagcaggccactgttcctccgagcgaacaactggaacaaatggcgtcgattgtctctgcgacacggtatctgaaaatgagatgtaaccgtagtgatttaccagatgaacagtcgatcctaaatgtcgctaaccggatcgctatcgggaaagggtggcagtcattaactcaggaggatatacgtaaacacagcgatgatatctatgtgcgtctgactagggacagtacgcctgagtatataaaatgcagagaattcaatcggcggctggtcccatttatcggtgaattattggcaaggggtcgtggataa

SEQ ID NO: 23695 - DNA, 834 bp, Escherichia coli
gtgagtagtttgccggaatttgcggttgattatcccttgttgtggctcatctgcaccggagggctggggggcgttaccggcagttttcttaacgtcgtgattcatcgtctgccgataatgttggagaggcggtggcggcgtgaagcgctgacgctattggcacattctgtgcctgagtccgggccggcctttaacctgatgataccgcagtctcattgtccctgctgttttcatccgctcggcatcagggataacattcccctgttaagctacctatttctgaaggggaaatcacgctgttgtggcgagcgtattcccgtttactacccgctagtcgaaataacgaactcagtgttattcattctggccgcgagcaggtttccaccagggctgacattagcggctgcctggctttttatttccatgctgttggttctggcggttattgactgccatacggcgctgctgccggatgtgctgacgttgccattgctctggcttggcctgttattcagtttacagagaggcgttgtcaccttagaggaggcggtagtgggggcggtatctgggtatctctgtctgtggggactgtactggctttttcgtttcgctaccgggagggaagggttaggttacggtgattttaagctagctgcggcattgggagcatggatgggttggcaggcattaccctcaatacttttgtttgcctcagtcagtgggttaatcgtaacagtactgttgcgtattgtaacagctacggactttacccgcccgctgccttttgggccgtggctcgctttgagcggagtgtgccattttttgttgatgtag

SEQ ID NO: 23696 - DNA, 513 bp, Escherichia coli
atgaacgagcttaaaaaacgtttgcagtatgttagcccccgtgagcgcaggctgcttatcggatgtgttgccttactggttgttgtttttgtctattacgtcctctggcagccctggctgatacgagaggataagtggcggactgtagttacccgtgaaaaaaacacagtggagtggatgaaacaacaggtacccaacataaagagacgggaggcaagtatgcctgaacagggggagccgttaggtttatctgcggccgtgacacgtacttcagccgcatacggtgtatcggtcacccggttgcagcctcaaggggagcgtctggccgtcaccttagccccggttgaatttaatgcgctgatgcagtggcttacgcaactggagcgtcggcaccgtattcgtaccatggtatttgatgtggccgcgcagggcaacccacccggacaggtaacggttaatcggctggttttgtcccaagatgacgtaaacaaggacgcttcgcttagtcgctga

SEQ ID NO: 23697 - DNA, 1098 bp, Escherichia coli
gtggcagtcggagaaacggatccgcagttagtcggtttgctgtcccgttatcccgcctgggtgctggttccgtcaggcagaattgccttccatcaggtcacgctgccacaccgcacgtggcgtcagcgtttgcaggtgctgccctttcttctggaagagcagttggcgacagacattgagcagctgcacttcgccattcttcatcagtcgggtgacaggtgtgatgtggcggtggtcgaaaaagcggttatgcatcgctggttagcgtactgtggacaacttggggttcgggaggtgaggttgctgcctgacgtactgatgctgccgttggcaactgaaggatggagtgccgtaaagcttgccgggcagtggctgtttcgccgggatcgttacgccgggatgacggtagagttatcgtggctgacacatttcttgtctcttactgcgccgccggtgattgagtcctactccgtgccgccagtaccgtgcccgggtccgaagaccactgagtggcgaaatcagcccggacgcgatctgctgcagttggtggccgaaggtgacgggtatgatggcgcagatctgcggcagggagaatttgcccgccagggaacatggtatgcacgatttcgcccatggaggtatgtcgcaggggctctgctggcctgtgtttttctggccgggagcaacgcggggctggcacattatcggctctggcagcaggctcaattctggcggtatgagagcgtacgtgtctatcagcagctgtttccgagtgaaaaggcggtgaaggatccccgccggcagatgctgagacatctgcaacagtcgacgggtaacaatataccggaactcgggagcgtgatgcgccagcttcagcaactgctgtcagaaacctcaacgatacgcttacaggcactcgcctgggacagcagcagccagacactgaaaattgatttgcaggcggcttcttttcaggcgctggaacactttcagcagatcgccggagaaaaatacctcatccagcctggtgagatacgacagcagccgcagggggtagaaagtcgtctgatcctgagagtgaacaatgaacgagcttaa

SEQ ID NO: 23698 - DNA, 978 bp, Escherichia coli
atgaaattgcgggaacagggcgtggcgcttctggtggtattgctgatcctgtcgttaatggtaacgatagcggcggtgattgcggagcgcaacggtcggacatttttgcgtacagtagcgcagttggatcagctgcaggcaaagtgggatggctatacggcagagacgatagcaaaacaaatcttacagaggagcaggcaggagtcgccccggaaaacgcatctggcacaaaattgggcgcagtcagaacgacagtttgagaccagagggggagatgtgcgggggcagatcgtggatgcgcaggcctgttttaatcttaatgctattaattatggagtggtggatctgaccagtataccttatgccgccagaatttttcagcagctattaatcaacttgcaggtagagcttttacaggcccggcaagtgacggcagccctacgtgactggatcgatcgtgatgataagccggtaaggggcggtgctgaagacgaggtgtatatggggatggaacctccctatctggcagccaaccagccgatgcaggacgtcagtgagttacgccttatccggggaatagatgccaggctttaccgcaaacttttgccgtatgtttgtgtactgcctacgtcagatctgtctgtgaatgtgaatactctgctggattcacaggcgccgctgctggcggcgctctttctgacgaaaccggacagtcttccggtgacggaattactgcagcggcgaccccgtactggttgggagagcgtggcggcgtttcttgacgcgccaccgcttaaggacattgacaccagtgcggccatgccggtattggccgtcagcagcaactattttctggttcggttacatgtgcgctccggggaacacctgttcagtcagcagactttaatgcagtggagggaggagcgtttccggatcattcagcgacagtatggattaacgatgagggaggttccctga

SEQ ID NO: 23699 - DNA, 600 bp, Escherichia coli
atgagtcagcaacgggtaaaaggttttacgctactggaaatgctgttggcactggctgtttttgcagcgttgagcatcagcgcatttcaggtgctgcagggtggaatacgggcgcacgagctgtcccgggataaagtacagcgtctggctgagctgcagagagggatcagccagatggagcgagatcttacgcagatgctcccaaggcacagccgggggaatgaaggcctgctgctcgctgcacctcatctgctaaaaagtgatgactgggggatttcttttacgcgaaacagctggctgaatcccgccgggatgctgccgcgcccggagttacagtgggtaggttatcggttgcgacagcaaaagttagaacgcctgagctactttcatgtcgatcacccttccggtgtttctccggatgtcagggtgatgctggacggcgttcacgcatttcgtctgcgtttttttgttaacggtgattggcaggcgcgctgggacagtaccggcatcctgccgcaggctgttgaagtgacgctggttatggatgattttgctgaactgccccgtctgtttcttgtgagcaaggagaccgctgaatga

SEQ ID NO: 23700 - DNA, 366 bp, Escherichia coli
gtgaaggggcaagaaggaatgacattactggaagtcatagtagctctggttgtgtttgcgctggcaggaatggcgctgatgcaggcctcgacccagcaggctgcggggatcggacggatggaagagaaggtgctggcaggctggttggccgataaccagatggtgcaattgcaactcgagaaaacttggccggaaaatggctggggcgagaagacgatcagcttcgctggcaccgaatggtatttacgctggggcgggccggacagcgacgtgccgcagccgcgctccttagaggtagaggtacggcgcactaaagaggagacgtccgccttggtttccttgcgtagcagtgtggttcgtgaatga

SEQ ID NO: 23701 - DNA, 555 bp, Escherichia coli
atgagtcagcgcggtttcacaatactggagatgatgctgatccttttgttgatgggcatcactgcagggctggtactaatgtcatttcctgactctgctcagaatcatctgcaacaacagcgggagcgtctgcaggcgcagctggattatgccttggatagaagccagcaggacggcttgctgatggggattcaggttcggtttgacggatggaaatttaaggttctgcagcgcggaacagcggaaagccccccgacattagctgagggaggggatatttggcaggggtatgtctggcaaacttggcaaccgcgacgtgcagccatggggggcaaacttccggatgatgtgcgtcttgagctgcagtatctcagaggtttgcagtggatgtctgagcatgatgacggggctgaacccgatattttgctgcttcccggaggtgaggtaacgccgttcagacttcttttcaggcaggtcggagaggaggccgttgtcgggctgcaggttgatgagaacggtttgatgactctttttgaaggtgaggtctcattgtga

SEQ ID NO: 23702 - DNA, 435 bp, Escherichia coli
atgcgaaaacagcatcagcgtggttttaccttgctggaaataatggtggtaattgtgatcttgggagttttggccagtctggtggtcccgaatctgatgggaaataaggataaggccgatcggcagaaagtgatgagcgacttggttgcgctggaaagcacgctcgatatgtaccggttagataataaccggtatccgacaacggagcagggactgcgggcactggtcagtaaacccaccgtgcaacctgaaccccgtaactaccggcaggatggttatatccgccgtttgccccaggatccttgggggggggattatcagctgttaaatcctggtcagtacagcgacattgatatcttttctcctggcccggatggtgtgccaaacactgaagatgatattggtaactggacgctcggtaacgcgcagccatga

SEQ ID NO: 23703 - DNA, 1224 bp, Escherichia coli
atggcgttgtttcattatcaggcatcagatattcacggtagaaaacgcagtggcattctggaggcggattcggcccgacatgcccgtcagttgctgcgtgagcaggcgcttattccagtcaggttggatgagaaacaggtccatcacaagcactcactgcggagtatcctgaggtttcgtccgcgcggggggagcagcgccgaactcgcgttactgacacggcagttagccacactagtggccgcatctctgccgcttgaagaggcgctggatgcgttgttgaggcagagtgaaaaaccgcgtcagcggaacttaatcgctgccgtgcgcaccaaggttctcgagggacattccttggccgcggcgatgggcatgtttccaggtacgtttgagcgtctttattgtgcgatggtggcggcgggggaaacatccggtcgtttggacgtggtgctcagtcgtctggctgactataccgagcagcgccagatcatgcgaaaccgtctactccaggcattgctctatccttgtgttctgacgttggtggcggttggggttattgccattctgcttactgcggttgtgccgaaagtggttgagcagtttattcatatgaaacagacccttcccttatctacccgcgtactgatgggggctgctgaggtgagccagacttggggcccgtggctgttactggccgcagcgctgggcgggatagcggggcgcatgatattacatcagccctcccagcgtctggcttttcatcatctgctgttgcggctgccggtcgtggggcgcatatcgcgcggtctgaataccgcacgttatgcccgcacgctgagcattcttaatgccagtgcggtaccgctgctccaggcgatgcacatcagtggtgacgtactgagtaatgactgggcccgtcatcagttagctaccgcggccgagttggttagggaaggggtcagcctgcatcaggcactggagcagacttcgctgtttccgcctatgatgcggcacatgattgccagcggtgaaaatagtggcgaactcgacagcatgttggaacgggccgccgacaatcaggatcgtgagttcagcacacagatgcaactggcgctgggattgtttgaaccgctgttggtggtgggtatggccggggtcgttttgtttattgttctggcaattctgcagccgctcctgcagctcaacaacatgatgaatatgtga

SEQ ID NO: 23704 - DNA, 1506 bp, Escherichia coli
atgagcagagtagtacagaatgtcagtgaatcacgtccccttctgcctttttccttttcccgtacgcagagaattttgttgctgcgtgaacaggaggggaatcgagtgttctgcatggaggacacacctgccagtgccctgttggaggtgcgcagggtggctgaaggtcctctgaatgtcacaacagtgtcggcggaagcgtttgaaaaacagctggtgagcagctatcaacgtgattctgatgaagcgcgacaaatgatggctgagattggtaatgaaatggatttttataccgtcgcaggggagttgcctgaccgtgaggacttactggatgcgaatgacgatgcgccaattatccgcctgattaacgcaatgctgacagaggcaattaaagagaaagcctcagatattcatattgaaacttacgaacgccatctgcaggttcgctttcgcattgatggcgttctgcgggagatcctccgtttacataggaatctggcttcgttactgatttcacgcattaaagtcatggcccggttggatattgccgaaaaacgcgttccccaagatggccgcatggtactgcgtatcggtggtcgggcggtggatgtgcgtgtttcaacgttgccttcaaatcatggtgaacgcatcgtgctgcgtttactagacaaaaatagcgttagtctcgatcttgctgcactcggcatgtcgcagcagaatcagcgacacattgatgcactgatccgccgtcctcacggcattattttggtgaccgggcctacagggtcgggtaaaagcacgacgctttatgccgcgttaagcctgctgaatccccgagaccgcaacattatgacggtcgaggatcctgttgaatatgaactggacggtatcagtcagacccaggtcaacccgaaggtggacatgacctttgcccggagtctgcgcgctattttacgtcaggatccggacgtggtgcttgtgggggagatccgtgacggtgaaacagcccagattgctgtgcaggcctcgctgacagggcatttggtgctgtcaacgttacatacgaatagtgcagcaggcgcgctgtcgcgtctgcaggatatgggcatccctccttttctgctttccacctcattactggctgttctggcccagcgactggttcgcacgttgtgtccgcgctgtcgtcagccctgtcaggtcagtactgagttagcgatggacatggacattccccctgaaaccacgatctggcagcctgccgggtgtcagcactgcagtttcacgggctatcacgggcgcaccgggatccacgagctgttgctgattgacgatcgcattcggacggcaatctatcagggggagggggagctgggtattacccgcttggcagggagtcgctatctgacgctgcgtggcgacgggcgacaaaaggtactagccggtgagaccagttgggaggaggtggttcgcgttactgaaagcagattgcaggaagaggaatga

SEQ ID NO: 23705 - DNA, 1968 bp, Escherichia coli
ttgttcaggaaatggttgaatgggcgtttgccggtacttgtgttcactacagtaattttgggggccattccagggtggggggctgaattttcggccaactttaaagatacggatattcaggagttcataaatactgtcagtaaaaatttacacaaaacggtaataattaatcctgacgtgcagggaaccatcactgtacgcagctacgatatgctgaacgaggaacaatattatcagttctttctcagtgtgctggacgtttatggttttgctgtggtcgatatgcacaacggtatactgaaagtagtgcgctcaaaagatgccaaaacgtcggcggtgccggtagctagtgatgtcagtcccgggactggtgatgaggttgttacccgggtggtccccgtaagtaacgtggcagccagagatctggcgcctttgctgcgtcagctcaatgataatgctggcgcaggaagcgtggtgcattatgaaccttctaatgttttgttgatgaccggacgtgctgcagtgatgaaacggttgatggagattgttgaacgtgtggataaggtgggtaatcgcagcgttgccacggtcccgctcacctacgcgtccgcaacagacgtagccagacttgttacggaactgactaaagaaacagataagacagctatacctgcttggatgacggcgaaactggttgcagacgagaggacaaactcagtgctcgtcagcggagagccaatctcccaacagcgtatcatctccataattaagcaactggatcgtcaggaggatgttcagggtaatactaaggtgatttacctgaaatatgcgaaggcgaaggatttagtggaagtcctgacaggtatcagcagcagtattgaaaacgactctaaaaagagtccgtcaacggaagccttgcgcaaaggagtgacgattaaatcccacgaacaaaccaatgccctgatcctgacgggggcccctgacgtcatccgcgaccttgaaaatgtgatttcgcagttggatattcgtcgtcctcaggtcctggtggaggccatcattgctgaaatacaggatgctgacgggctgaaccttgggatccagtgggtgaataaacatgccggtgtggcgcagttcaccagtaccggtttacctattaccacgatggttcagactcgtcagaacgaaatcttagacagcgatcagagcaatgccctgagcatgtttaacggaattgcagcggggttttatcagggaaactgggcgatgctgttgacggcgctctccacaagtagcaagaatgatatcttggcgacccccagtattgtcacgctggacaatatggaggccactttcaatgttggtcaggaggtcccggtactttcgggctcacagacaacctctggggacaatatttttaacacggtcgagcgcaaaacggtggggatcaaactcagggtaaaaccccagatcaacgagggtgattccgtgttactggagatagaacaggaggtgtccggtgtggcggacactgcagtagccaccactactgacttgggagcaaccttcaacacccgaacagtgaccaatgccatgctggtcgggaatggcgaaacggtggtggtcggaggattactggataagtcgatcagggggagtgagagtaaagtgccactgctgggggatatcccggtactggggcatctttttcgcgcaaaaagcgaacagacagctaagcgtaatctgatgctgttcattcggccaactattattcgtgagcgcgacggatttcgtcatgcttcggccgaaaaataccagtcgtttaatcaggaacaggtgcagtcgcgtggcaaagaaacaacggcgctgacgctgaatgaggaacagctcaggctgtcccccgatcaagacgatacggctttccggaaggtgaaagcggcgattgctgcgttttatgcgcaggagatgtaa

SEQ ID NO: 23706 - DNA, 876 bp, Escherichia coli
atgttgttctttctatcattccggggtgaccggggcttatttataaaagatatcgtacttaaaatgctgacgccaaaccggctattgtgcgtaattttacttattgccggatatcagctggtgtcggttatccatcatttctggctgactcaggcagcatcggtgcccggcttatcccgtgttagcgcgccggaaacagcggtaactggtgatcaaactgaagaacgttttgtttttacgttattcggcagggcatccccactatcatcggaggggagagcgcaggaaacaatgccttccctgtcagatgatctgctttcaggggaggatcttgacgtgagaggtatactttatagttcggttgcagagcattccgttgccatatttgcacataataacagacagttcagtctgagcgtcggcgaaaaagtacccagctacgatgctacgattagtgctatttttagcgatcatattgttattaactatcagggaaaaactgtatcactgcctctgcgatatgataataccgaaaaaaagaatgcatatgacaataataatttaacagttggagacgtgataacccaagataattttcgggtagaaagtgtttttgatattatgagcttttcagccgttacggttaataatacattaagcggttatcgcttgattccgggtaagcacagttcgttattttataatgctgggttgcatgataacgatctggccgtatcggttaatggttcagaattgcgtgataccagacaggcgcagcagataatgaagcaattgccagaacttaaagaaataaaaataaccgtcgagcgtgatggtcagttatatgatgcatttattgctgtaggagaaaactga

SEQ ID NO: 23707 - DNA, 2661 bp, Escherichia coli
atgaaattaaagtatctgtcatgtacgatccttgcccctctggcgattggggtattttctgcaacagctgctgataataattcagccatttatttcaatacctcccagcctataaatgatctgcagggttcgttggccgcagaggtgaaatttgcacaaagccagattttacccgcccatcctaaagaaggggatagtcaaccacatctgaccagcctgcggaaaagtctgctgcttgtccgtccggtgaaagctgatgataaaacacctgttcaggtggaagcccgcgatgataataataaaattctcggtacgttaaccctttatcctccttcatcactaccggatacaatctaccatctggatggtgttccggaaggtggtatcgatttcacacctcataatggaacgaaaaagatcattaatacggtggctgaagtaaacaaactcagtgatgccagcgggagttctattcatagccatctaacaaataatgcactggtggagatccatactgcaaatggtcgttgggtaagagacatttatctgccgcagggacccgaccttgaaggtaagatggttcgctttgtttcgtctgcaggctatagttcaacggttttttatggtgatcgaaaagtcacactctcggtgggtaacactcttctgttcaaatatgtaaatggtcagtggttccgctccggtgaactggagaataatcgaatcacttatgctcagcatatttggagtgctgaactgcctgcgcactggatcgtgcctggtttaaacttggtgattaaacagggcaatctgagcggtcgcctaaatgatatcaagattggagcaccgggtgagctgttgttgcatacaattgatatcgggatgttgaccactccccgggatcgctttgattttgccaaagacaaagaagcacatagggaatatttccagaccattcctgtaagtcgtatgattgttaataattatgcgcctctacacctaaaggaagttatgttaccaaccggagagttattgacagatatggatccaggaaatggtgggtggcatagtggtacaatgcgtcaaagaataggtaaagaattggtttcgcatggcattgataatgctaactatggtttaaatagtaccgcaggcttaggggagaatagtcatccatatgtagttgcgcaattagcggcacataatagccgcggtaattatgctaatggcatccaggttcatggtggctccggaggtgggggaattgttactttagattccacattggggaatgagttcagtcatgaagttggtcataattatggtcttggtcattatgtagatggtttcaagggttctgtacatcgtagtgcagaaaataacaactcaacttggggatgggatggtgataaaaaacggtttattcctaacttttatccgtctcaaacaaatgaaaagagttgtctgaataatcagtgtcaagaaccgtttgatggacacaaatttggttttgacgccatggcgggaggcagccctttctctgctgcaaaccgtttcacaatgtatactccgaattcatcggctatcatccagcgtttttttgaaaataaagctgtgttcgatagccgttcctccaccggcttcagcaagtggaatgcagatacgcaggaaatggaaccgtatgaacacaccattgaccgtgcggagcagattacggcttcagtcaatgagctaagtgaaagcaaaatggctgagctgatggcagagtacgctgtcgtcaaagtgcatatgtggaacggtaactggacaagaaacatctatatccctacagcctccgcagataatagaggcagtatcctgaccatcaaccatgaggccggttataatagttatctgtttataaatggtgacgaaaaggtcgtttcccaggggtataaaaagagctttgtttccgatggtcagttctggaaagaacgtgatgtggttgatactcgtgaagcgcgtaagccagagcagtttggtgttcctgtgacgaccctggtggggtattacgatccggaaggcacgctgtcaagctacatctatcctgcgatgtatggtgcctatggcttcacttattccgatgatagtcagaatctatccgataacgactgccagctgcaggtggatacgaaagaagggcagttgcgattcagactggctaatcaccgggctaacaacactgtaatgaataagttccatattaacgtgccaacagaaagtcagcccacacaggccacattggtttgcaataacaagatactggataccaaatcgctcacacctgcgccagaaggacttacctatactgtaaatgggcaggcacttccagcaaaagaaaacgagggatgcatcgtgtccgtgaattcaggtaaacgttactgtttgccggttggtcaacggtcaggatatagccttcctgactggattgttgggcaggaagtctatgtcgacagcggggctaaagcgaaagtgctgctttctgactgggataacctgtcctataacaggattggtgagtttgtaggtaatgtgaacccagctgatatgaaaaaagttaaagcctggaacggacagtatttggacttcagtaaacctaggtcaatgagggttgtatataaataa

SEQ ID NO: 23708 - DNA, 936 bp, Escherichia coli
atgaaaaatatcagaactgagtttattccccgctttaaccttacattatgcttcccccgttactggatgacgtggacaggtatcggtattatctgtgtgtttgcaatggtcccccccgcactgagagatccattgttgggaaaattgggcatgctggttgggcgtctggggaaaagcgcacgtcaacgggccttgattaatttatcgctttgttttccggagtacagtgataaagaaaaggagaatatcgttgatgccatgtttgcaacagcctccatggccgttgtgcttatggctgaattagcactgtccgggcctgataaaatttcgcatcgtatacgctggaatggtctggagattgtggagaagatggcacagaacaatgaaaaggtcatttttcttgtgccacatgcctggggagtggatattcccgcaatgctgatggctgcgtcgggcagaaaaatggcagcgatgtttcataaccagagaaatccggtggtggattatgtctggaacagtgttcgtcgtcgtttcggaggaaaactgcacgcacgtaatgacggtattgcctcctttgtccgctcagtccggcagggatactggggatattatcttcctgatcaggatcatggcccggaattcagtgagtttgcagatttttttgcgacgtataaagcaactttaccggttatcggacggctcagcaggatcagtggtgcacggataataccgcttttccctgtttatgacggaaagacccatcatctgactattcatgtcagcccgccacttgctatacgacagaagagtgatgctcatattgcgcgacagataaacgaagtggttgaaaatttcgttcgtccacatcctgagcagtatacgtggatcctcaagttgctgaaaacgcgtaaagaaggggaagaggatccttactga

SEQ ID NO: 23709 - DNA, 1722 bp, Escherichia coli
atgcatttaaataccggacagaacaggcctactttcagctggagcgcgctgggatgggcaattttttattttggctttttttccactctcctgcaggtcatcatcttcagcagtgggtacagcggaacgaatggaatacgggactcactgttattcagttgtctgtggttgatcccggtgtttctctatcctgatcggataaaaataattgcagctgttgtcggtttcattctctggggcacgtcgctggcagcactttgttattattttctctatggtcatgaattctctcaaagtgttcttttcgttatgtttgaaacgaatgccagagaggctggtgaatatttcagccagtatttcagccttaaactgttgcttatctcgctggtatatactgcggtgtccgtttttctgtggacacgtctgcgtcctgtatatattcctttgccatggcggagaattgtctctttcctgctgctttatgctctgcttctgcatccggttgttctgaaatcgttaatcagacaggagccgctgaatgatactctaggcaaactggcatcccgaatggagcctgctgccccctggcagtttgtatccagttattatcagtaccatcagcaactgaatgcactgacaaccttcctgaatgaaaatagcgcactgccaccactgggtaatctcagggatgaatcaggggagagaccacgcacactggtcctggtgattggtgagtcgacacagcgcgaacgcatgagcttatacgggtatctacgtgaaacgacgccggagctggatgcactgcgtaaaaccgatccgggtcttactgtgtttaataatgtggtggcatcgcgtccgtacaccattgaagcattgcaacaggcccttactttcgccaacgaaaagaatcctgatctgtatctgacgcagccgtcgctgatgaacatgatgaagcaggcaggctataaaacattctggattaccaaccagcagacaatcacagcccgtaacaccatgctcactgtattttcgcgccagacggacaggcagtactacatgaatcagcagcgaacacaaagtgcgcgtgaatatgacactaacgtgctgaagccgttccgggaagtgctgaatgaccctgcaccaaagaaactgatcatcgtgcatctgctgggtacgcacattaagtataaataccgttatccggaaggtcaggggcggtttgatggcattacagggcatattcccactggattaaatgcgaaagagctggaagtgtataacgattacgataatgccaatctgtttaacgatcatgtggtggccagtctgataaaggacttcagagcaactgcgccggacggctttctgctttatttttcagaccatggtgaagaagtatatgatactccgccatataaaacgcagggacggaatgaagataaccccacacgtcccatgtacactgttccgttcctgctgtggacctcggaaaagtggcatgctgcacatccgcgagatttttcgcagtatgttgaccgcaaatacagtctggctgaactgatccacacctggtcagatttggcgggactgacatacgatggttacgatccgacccgttctctggtgaatccgcaattcagggaaaccacccgctggattggaaatccgtataaaaagaatgggctcactgatttcgacactcttccgtatggtgagccatag

SEQ ID NO: 23710 - DNA, 1107 bp, Escherichia coli
atgatgaaaattttattcactgaatcttcgtcagatattgggggccaggagctgcaggcactggcccagatgactgctcttcaaaagcagggacattccgttttacttgcctgcagagaaaaaagtaaaattgctccggaagccagaaaaagagggcatgatgtcacttttattcctttcaggaacagccttcaccttccttccatcctcagacttcgacggattatcggggaatttaaacctgatctggtcatctgccatagtggccatgacagtaatatagcaggactgagccgtctgatatgctgtcaccgcttcagtattgtcagacaaaaaacctacatcacccgtaagaccagaacgttttccctgaattatctgtgtgatttcattgttgtgcctagctcagccatgatggcgcatctgatggcggaaggtgtcaggacaccggtaacggttattccaccgggtttcgactggcccgcattgcataatgaagccatgcgaccgttacccctgcatatccacgcctgggctgcatcagcagacaatgttccgcttatcgttcaggtggggatgctacgtcccgaaaaaggacatgaatttatgctgcgtgtattgtatcagctgaagatggaagggaaatcatttcgctggctcgtggtgggcgccgggcgtgaagaatacgaagcacgtctgcgtcagcagacagaacacctgggaatgagcggagatgtgttaatggcaggtgcccttttcccagcgttaccggtctaccggattgccagtgtggtggtcatgccttcggaaaatgaagcgtttggtatggtactggctgaagcgtcagtctccggcgtgcccgttatcgccagtgagacgggcgggatccctgatgtcattcagaagaatgtgacagggacgctgttacccgtgggggatgtgtctgcatggaccggcgcactgcgcgattttttatcccgaccggaacgcttccggatgatggcagccagcgccagagaagatattgagtaccggtttgatattaacagaacggcacagatcattgtgtctctggctagtcaggctaaggggaaatgcaacagataa

SEQ ID NO: 23711 - DNA, 822 bp, Escherichia coli
atgttgaatgcaaggcatcttcccgtactgatgtatcatcatgtcagtcgttgtccggggcttgtgacactctcacctgaaacattttgtgaacagatgaagtggctcgcagataataactggcggacggtaacatctgctgagcttgaatatttttatcaggggggaacgcttccacgaaagagtgtcatgctcacattcgatgatggttatcttgataactggctcagagcatggccggtcctgaaggaatataaccttcatgcacatatttttctcattacggggctgattggtaagggaaacgtacgtagcaggcaggagcaggaatattctcaccgcgactgtgaacggttgattgccgataaccgttcagatgaggtcatgcttcgctggtctgaagtccgggaaatgcgtgattccggactggttgaatttcatgtgcacacccattcacataaacgctgggacaggttgtctgtatcacgtgctgaacagtgccggctcatgaaagaagatattctggtgggaaaacaatgtctgacggaaaagctggggttctgtagttcccatctgtgctggcctgaaggatattataatcgggattatattaatctcgccggtaagcttggtttctcttatttatatacaaccgaaagaagaatgaactgtcctgaaaatggttcattacgcatagggcgtatcagcaccaaagagcgggaacattccggctggctgaaacgacgccttttttattatacaacgccacttttttcttcagtactggctcttcataaggggccaagattaccagataattaa

SEQ ID NO: 23712 - DNA, 273 bp, Escherichia coli
atggtcacagttaaccttcattgcccccgttgccagtccgttcaggtttaccgtcacgggaagaacccaaaaggacatgatcgatttcgctgccgtgactgtcatcgagtgtttcagctcacttaccgttacgaggcccgtaaaccgggagttcaagaccaaatcactgaaatgcctttcaacggtgccggagttcgcgatactgcccgtacgctgaaaatcggcattaatactgtcattcggactttaaaaaacgctcgccacgaagaataa

SEQ ID NO: 23713 - DNA, 3903 bp, Escherichia coli
atgaataaaatatactctcttaaatacagccatattacaggagggttaatcgctgtttctgaattatccggcagagtatcatcaagagcaactggtaagaaaaaacacaaacgcatacttgcattatgttttttaggcttattacaatcctcatattcttttgcgtcacagatggatatttcaaatttctacatccgtgactatatggattttgcacagaacaagggcatatttcaggctggcgcaacaaatattgaaatagtgaagaaagatggctccaccctgaaactaccggaagtaccatttcctgacttctcaccggttgcaaacaaagggtcaaccacatctattggtggtgcatacagtatcacagccacacacaatacgaaaaaccaccactcagttgcgacgcaaaactgggggaacagcacgtacaaacaaactgactggaatacttcacatcctgattttgcagtatcccgacttgacaagtttgttgttgagacccgaggtgcgactgaaggcgcagatatttcgttatcaaaacagcaggcacttgaacgttacggggttaattataaaggagaaaagaaacttatcgcattcagagccggctctggtgtggtatccgttaaaaaaaatggacgcataactccatttaatgaggtttcttataagccagaaatgttaaatggctctttcgttcacattgatgactggagtggatggctgatattaaccaacaaccagtttgatgagtttaataacattgcctctcagggtgacagcggttcagcactgttcgtctatgataaccaaaagaaaaagtgggttgtcgctggaactgtctgggggatttataattacgccaatggcaaaaaccacgcagcatacagtaaatggaaccagacaaccattgacaacctgaagaacaagtattcttacaacgtggatatgtcaggggctcaggttgcaaccattgaaaatggaaaactgacaggcactggctcagacaccaccgatataaaaaataaggacttaatatttactggcggtggagatatcctcctgaaatcctcttttgataatggtgctggcggtcttgtctttaatgataaaaagacctatcgagtaaacggggatgatttcacctttaaaggtgccggtgttgatacaagaaacggcagcaccgttgagtggaatatccggtatgataataaagacaaccttcacaaaattggtgatggcacattagatgtccgaaaaacccagaacaccaacctgaaaacaggtgagggtcttgtcattcttggagctgaaaaaacattcaataatatctacataaccagtggtgatggaactgtccgactgaatgcagaaaatgcactgtctggcggtgaatacaacggtattttctttgcgaaaaatggcggaactcttgacctgaacggatataatcagtctttcaataaaattgctgcaactgattcaggtgctgtaataaccaatacgtcaaccaaaaaatccattttatccctgaataatactgctgactatatctatcacggtaacataaacgggaatctggacgtacttcagcatcatgagacgaaaaaagagaaccgtcgtcttattcttgatgggggcgtggacacaacaaatgatataagcctgcgtaatacacaactgtccatgcagggacatgccactgaacatgccatttatcgggatggagctttctcttgttcactaccagctcctatgcgctttttgtgtggcagtgattatgttgcaggaatgcaaaatacagaagctgatgctgtaaaacaaaacggaaatgcctataaaaccaacaatgctgtctctgatttatcgcagccagactgggaaaccggaacattcagatttggaacgctacatcttgaaaattccgatttttctgttggtcgtaatgcaaatgtaatcggggacattcaggccagtaaatcaaacattactattggtgacactacagcatatattgatttgcatgctggtaaaaatattaccggtgatggttttggcttccgccagaatattgtgcgtggaaactcacaaggagaaacgctgtttacaggagggatcacagcagaagacagcactatcgttattaaagataaagcaaaagcattattttcaaattatgtatacctgctgaacacaaaagcaaccatagagaacggtgctgatgtgacaactcaaagtggtatgttctccacgagcgatatcagcatctctggtaatctgtccatgacaggcaatcccgacaaagacaataaattcgagccctcaatatatctgaatgatgcttcttatctactgactgacgactccgccagactcgttgccaaaaataaagcatctgtggtgggagatatacactccactaaaagtgcatccatcatgtttggtcatgatgaaagcgacctctcgcagttgtctgacagaacctcaaaagggcttgcacttggtcttttaggtggctttgatgtctcatatcgcggttcagtcaatgccccgtcagcatctgccactatgaacaacacctggtggcaactaaccggagattctgcgctgaaaacactgaaaagtacaaacagcatggtctatttcactgacagcgcaaacaataagaaattccatacgctgacggtcgatgagctggcaaccagcaacagcgcctatgcgatgcgtacaaacctttctgaatcagacaaactggaggtcaaaaaacacttgtctggtgagaacaatattttactcgttgatttccttcagaaaccaacgcctgaaaaacaactgaatattgaactggtaagcgcgccaaaagacaccaatgaaaatgtctttaaagccagtaaacaaaccattggtttcagtgatgtaacgccggtcattacaaccagggaaaccgatgacaaaataacatggtcactgacaggctataacacggtagcaaacaaggaagcaacccggaatgccgccgccctgttctctgttgactataaagcgtttctgaacgaggtcaacaacctgaacaaacgtatgggtgacctgcgtgatatcaacggcgaagccggtgcatgggcacgcatcatgagcggtaccggctctgccagtggtggtttcagtgacaactacacgcacgttcaggtcggggtcgacaaaaaacacgagctggacggactggatttgtttaccggtttcactgtcacacacactgacagcagtgcctccgccgatgttttcagtggtaaaacgaagtctgtgggggctggcctgtatgcttccgccatgtttgattccggtgcctatatcgacctgattggcaagtatgttcaccatgataatgagtacactgcaacctttgccggactcggaacccgtgattacagcacgcattcatggtatgccggtgcagaagcgggctaccgctatcatgtcactgaggatgcctggattgagccacaggctgagctggtttacggttctgtatccggtaaacagtttgcatggaaggaccagggaatgcatctgtccatgaaggacaaggactacaatccgctgattggccgaacgggtgtggatgtgggtaaatccttctctggtaaggactggaaagtgacagcccgtgccggtctgggctaccagttcgacctgctggctaacggcgaaaccgtattgcgggatgcatctggtgaaaaacgcatcaaaggtgaaaaggacagccgtatgctgatgtccgttggcctgaatgcagaaatcagggataacgtccgctttggactggagtttgagaaatccgcctttggtaagtacaacgttgataatgctgtcaacgctaatttccgttactcgttctga

SEQ ID NO: 23714 - DNA, 1725 bp, Escherichia coli
atgactgagcaggctacaacctgtaaaggtgcgtccttacttaacggtgactcctggcacagtatcaactggcgtcagtgctatcgggaagtgcggagactgcaagcgcgtatcgtaaaggcaacacgagaaggtaaacatggcaaggtcaaatccttgcaatggatactgactcactcgtttagtggcagagcagttgctgtcagacgagttacagagaatagcgggaaacgtactcctggggttgatggtcagacatggtcttccccggaggttaaatttcttgctattaacctgctgaaacggcgtggttacaaaccacagccacttaagcgggtttatatacctaagtcaaatgggaagtctcgtccccttgggatacccactatgaaggatcgggcgatgcaggcgttgtatttgctggctcttgagcccgttgctgaagtcactgctgaccagagatccttcggctttcggactggaaggtctactgcagatgcgatagcacagtgcttctgtgttcttgcgcagaaaacatccgctgaatgggtgcttgagggggatatacggggatgctttgacaatatatctcatcaatggctaatcgataacacctcaacagacagacaaatcctgacaaagtggcttaaagcgggttacagggaaaaggggcagttattccctgtaaattcaggaactcctcaggggggaataatttctcctgtactggctaacattgctctggatggactggaggcgcttcttgcttcggagtttaaaaagagaacagtcaagggacgattggttaacccgaaagttaactatgtgagatatgctgatgattttattatcactggagagtcaaaagaacttcttgagtctcaggtattacccgtcgtcaggcggtttatggctgaaagaggattaatgctttctccggaaaagacgaaaatcacacatatcgaggaaggatttgattttcttggacagaacattcgcaaatatggcggtaagatgctgatcaaaccctctaaagccaatgtcagttcctttttaaagaaaatacgcgctgtaatcaaaggcaacaaagctatggatcagcttacgttgatccgcatgctgaacccaatgatcaaagggtgggcggcttaccatcaacacattgtggccaaggtcgcatttaacaaagttgacaatgagatctggctggctttatggcgttgggctgttcggcgtcatcccaataagggaaagaagtggattcggaaaagatatttccatcaacaaggtgcccgaaactggtctttctccacggctaccggagaactccttgccaacggtaagcctcagtatgcaaatctgaggaaagcaatcgatacgcctatcaaccggtttaaaccgattaaaattgcagctaatccgttcgatcctcaatgggagatgtactttgaggagcgttgtgcagacaaaatgcggcacaaactgcaaggacggaaaaagctcattcaaatctggtttgagcagcggggccgatgccccatatgtgatgagaggattacatctgattcccagtggcaggttcatcacatcatacggcgagtcgatggagggagcaactgcctctccaatttgattatgctgcatccgatgtgtcacacacttgttcatgcgaaaggtatacatgtagtgaaaccggctcatgagagtgggcttagaaaggcttga

SEQ ID NO: 23715 - DNA, 360 bp, Escherichia coli
atggatgaactgcgtgcccagggttaccattttaaagtaaaaaccgtgacggaaagcctgcgccgtcacggactgagggcaaaagcttcctggaatttcagtccggtctgttaccgcgcacacagccagcctgtgtcagaaaatctgctggagcaggatttttacgccagtggcccgaaccagaagtgggcgggagacatcacatatttacgtacggatgaaggctggccgtatctggctgtggtcacgtgccattattggctgatcaatgtcgtcacgcatgacggcacaggagcccccggaacgttatgctaccgcatgtcatttgcaaaaatgacagatagatatacttcaatttga

SEQ ID NO: 23716 - DNA, 7851 bp, Escherichia coli
  misc_feature (7802)..(7838): n is a, c, g, or t
atgattcatcctggctcttctttagataaagcaattaacaatacaagagttaaaaatgttagtactgatgttaaacatggccaaattcaagagagaaaaaggaactttatctataaaaaaaatgatgatatctcatccagatttaaactttacagttcgctcgtaaagcagaaaaatgcgacagaagatgttgttttaataggcaaaatgattttagatgaagttagaagttacagaactatacataatgatcgaaatatcgtaagtaactcaggaaactggaaaacatcttttttatgtaatcttgctagactactatatagcatatttaatggtagtaactatttttgttcccgagagggtgaaaataattcatcccccagttctactctacttactatacatcagcctgaaaagcaggaactattacaacaaaagagtatcaaacatttaccaacaagtaataacatcgacggatacattaaaataagaaaaacaagaggcgctgaagatcaaacaacaactatcactcaaagtttgataattaatgagttgttaaatggagttgatagaaataccatcccttttcagaaaataagtgagctcaatgatatcatacattcatatgaaaatatgcaaattaaaaatagtcgaaaaggtatagaaatacttgttaagcagggagagctgttatcatcattaataaatgataataaaggaaataaacaattatcagacaatgcatctaaaataataaacttattgggtatagagtatcagtcacataaagtagacatagagccatttatacatgcagtatgggttgctggcgcacctcctgataatacattttcatatataacggcatttttaaatacatataaagattatacctacctgctctggattgatcctaatgcctttggtgcggccaagtttagtgggattttaaaaaatatagcgatgaattatgcaattatgcgtttgagaagaacgaatccacatttagcggaagaaatgaatgaagtgatattaaaaatacaaaacatacaaaatgaaactatagaatttaaggaaacaagagaaagattgaaggaacttgaaaatagatataaatcattaacgagtgaaactaaagaaaaattcaatgttttttttcttgagtcaatgataggtatgcaagacaactattttacatattgtatatcaaacggaatatcaaatactgatgatatatccagacttgactttttaactaacgttttaaaactttcaccagaagttcaaaatgactttaaatctacagtagagaaaaacaaaagagatatagacttattaaaaaatacaatatctcaaaaatttggggatagatttcaactgagagatattaacacattggagtcatttaaaaaaccacaagattattttttttatcaacaagagatgctattaagatggaactacgccgctgcatcagatcaggtaagaattaatatattgaaagagtatggagggatttataccgatacagatattcttcctgcatattcagataaagtatcacagataataaatgaaaaaagtgatgataagaggttttttgaagatttaaaactaagaaggattatatcagaatctattctgtctctgataaaaggggaaaagtactcaattaaacatgatggattagatgaaacaacactaaatcagttaaataacatattgagtgaaatagaaaaactgacgatagatgattattttaaacccgttgagacaaaagttgtcagagatacatttaaaatttttaaaagatatcaaaaatggacagaaaacacctggaatattagagggaataataatttcatgttaactcacaagggaagtaaatgtattgattttattctatcaggacagaaaaaacagtatttagaactccaacgcatcagagataatataagttataataatctattttatactacagaggatctaaagtctttaaataatgtggcaataggaggaatacctgcaaagaaatatttagaacacggtttgttttctgaatatagacaggacggtacaattccttatgtggttagcactttaaatatatctggcccagacatgattatgcgacaaatgaaaaaatactataaatctcttgggcgcataggtgaagtgcatattaaagataataaattgagtgatgttaattttttgggtgtatatgcaagttcaaataaagacaataaaagttttaactggctaaatccagtgagtgttggtattaatgatattacaccagatgatgaaagctcatgggctgtcagaaataatgatataaataaaattctattcgaaaaaataaactgccatgtacccgaaaaactacctacctccctatactatgaaatcgattcgcggtctttttttcaggggtgggataataaaagcataaagcatgttacagagattaataaagacctcatcaaagatattaatttattattaacatcgtctaatattgatgttaaacttttaataaaactggatcgtgaattatatgcgattagcagtaaaatagataatccgttggccttgcgctctataagaaccttacagctacaattagctaattacgtaacttcgaatacatttgaacctgaaaacacaattaattttatttatgatttttatagaaaaaaacaagatgacttactcagcgcaataaaattattttcgcgtaatgatgccgatacaaaaattattgtctggtacaattccgtaatggaaaaaaatgtgtttctccgagaggttatatcatgtgttctacgaagtaaaaaagtagatagttatataaatgaaaacaaaaaaaacttatctaaggaggatgccggagctttaagagattatgcaaaattaaaaatgaaagaactattttcgatgttagatgatgatggttataaaaaaatcataactacaaatgcatatattaaagagagggataaactatcaggcattatatacaacatcgaaaattcgattatatcgggtcatgaatcatttgatataatacgaagcaatcaacatgagtggggggatttatcaacggtagagcaatttaaaaaatttgagttttatgtgaaaagtgaattatcttcggctaagtcaattttcgatgatataaaaaacaaatatataacagatcctgaaacaaaacgaaacgtactctaccatcagttagatagtgatattaaagagcgaatagcatttctcgatatatcccactatgcatatccgggtagtttattagaaaaattacaattaagtggctacgttttttctgatatcaacataattgcagaatacttattggctagttacggagtttctggacattattctcacggcgtggtatatccagctccatctgataaattacttgagctattaagaagacatacaaagagcaattctgagtggatagaaaaaataaccccatatgtttatgatatattatccgataatgtatccaacgtcttgcgcccccctttatcagaagaacagaaaaaaatattgaatgatataaaattagaaattagtaaatctgtatcagaacagtatttcatgaagttgacagagcaaaaatcatcagttattggtattaaatattctgttgattttgacagatacaatgagaatttgtttttgtctttacctataaatcaaaatttaacgctgccttttatgtatcgctacttcgagatgctatatgacattcacattggaataatagaaaacaaggcaaacagggagtttatatatagtaagttttcatctttaaacctggattttttgattaatgacgagagagttttgaatcttgaaggtttaataaaaaaatataaatatttatcgctgagtgaaatacatagaactttaacaaatagtacttcatttgcagatatttctataccattattgcagaccatatgtcccagcataacaacaataataaaaaaaacagaatattatgggcatcagttaacaaatgctatgactgttgcttcagtggttaaaccatatgactttagcaatcttggtgccataaatagtatagataaatccgtttctgatgtgcctgcattgcatacaattgttgaacaagcaaaatataatttactttcatggaatgatttttataacactcatgcgtcaatatgggatacaatagcaagacagcataaaagtacaaatatcgaatttcacccacaaagtcttctttttgatagagattcgaaaggaaagtgccttggtttatctcttctgtatcttgatacaggggggtacggaggcggatatcaaaaactgaggcacaatattgacactgccagcacattatatcaaacaaaatacaatgacaatctaaaattatctaaccgtgatgatttctttttaagaaaaacacagcgtatcattacaatgtccaatgagttaggtaataacaggttaaaaaatgcacagttagaggttctggaattgaaagaccctatactaactgaaggcatattataccagcgtcgtatatcatctcttttaataacaacagaatatcattcacttgcattacaacaaatatcttctttttggagagtaactgatcctaattttggtcattgtgactttcattccttagcacaggctttaacgtttataaaaaatataacgagcaatcgtaacttttcatctttatatggaagtggcattgttaaaatttacttcagtgaatctcttaataattggaagtatattaagctcccccttgttcagactggttctttgttaagagacatatatttaacaaccccagaaaaattatccacaagcgggggttcattaaatattatggggcatctcgtgcctgtcagttttatttatgatatcggaggggttattaatggtaacagaataagtgaaagtacagatgtgaaaaataaaattaggagcttaaaaataaatggggatattttacaacattatataaatacgcattatttgtcagaggagcaaactcagaagataaaagatattgtggattttttaggtattcaggataacacaataaaagttaagcttgaaagtgatattaaacctataagtgaaatccaacagccccttcattccattctttcacggcagaaagaacacgtaaagaatttactatctggattgcttgatgagttttcaaataagttaagaaagcaaggtctttcacttaaaacaaatgttctttcagttaataacttcaaagaatcaaagataaatagtgatacagtggaggttacagtaacagatctgcaaggaagactttatcgtgttgatatagatacaagagttattggcttaacttttaaagaggggataaatagtttatccgaagcactcgaacacatgaatatcgatgcgattatgtctgttattggcttggttcaatatgcacgaatgataaaaatgaatgacaatattagtgcaatagatcatgcaggagcagtatcagatataaaaaatattgtagacaaatttttaggcggaattttgactcttactaataatcgcgtatataatcctggcggtgtatctggtgcctcgcttgaaggatttatatcttctgggttggaggtgtgtgcttcaagaatgggtggcaccgcagggcgttatcttagcaatgtggcaaaagtaattaaattacctttgctagatataggcataaatatttggtcattatatgattcttcattaaatcatgctaaagccaccacacaaattgaatatatatcaacagcaatagatgtatctttttcatctataaatacagctttgtcaataggcgcaatcgcatatcctcctttggcaatagctatagttccgataactattttttctcatgaagtaaaaaactatgctgtttatgtgaatcaaattaatgagcgccataagttatggctcgaagctgaaaagtatctggacaatggaagtgcaaaggttctaagcattaacaaagccacaggcataatcgatttatcaaataatcaggtgttaggtaatatttatttagatatgagagaaaatcctccaatattacacggtgagaaatcatataatagcggaaagaatattggtagtcatcctgatatgactgacagagagattatggagtctagagcatacaattttgcatgcacaaaactctcagatgcaggtgaacccgatattttcggttggggagataaggaaatatgtaattcaatggaattatcagaatcacaattagctaatgggtattctaaccgccaatggccttctcagattccagttattccagaaggaatttataatacagtatatcttggatatggagaaacattgcgagctaatactgaagttacattgagtagcactggttacttttacgagattgcaagggcatatactgatgatgaactatctgagccattattaacagtatgtaaccaacatagtcatgttattggtggaaaagaaccattaacaattattattcccgctattgaacatggtatgcttggctctaatctacatatgattgaacgttttaaaaactataatttctcgatatcaggagggaagggagggataaaattaatggttggtggtattggtgattacaacatagaatgtacccccggtgttagaaatattatatcgtttgaacaattatcacgtgacttcaatctggatttggatttatcagatgggaggaaacaaaattttaattttcatcatccctcaggtttttattcaggaaaagttatgagcataacgcaaaagggtataaatgcggttgttggtactaaactgggatatgataagattcgtggtaataatcttgataataccttttctcttgggagtggaggaggtgttatatattctggaggagggagcaatacctatttcgttcccgccacactacaggataatttacacatatatatatcagaaaaatcaaatggcaatcatattatattaggtgatatgcactctcgcctatctattgaatgccactttagtaataatgaaagagagtttataaagatgggctactataatggatgtgatgtgattttagaaagtgacactatacaaaaaataaaatcatttgcaaaaaatataacaatacagacagcggatggagttatggcaaattgggatgataaactaaatactctgtctgtttattcaatagatatgattgcatggagggataaaaataaaactgcaaaagaaccgttaccagttgatgtaatccagttaactaattggaggatgcataacacatgctctttattttatgataaatatcaagttgatattgaagccaataagttaacgtatacagtcttatttcctgatacggagttacccgttcagctcaattataccagtattatttatggtaatcatggggcaaaatacaccttcctcaattcaggaagtaaaactatagatattcacattcttgataaaaatagtgattatgatacttttgacttccgtaatattatttttgaacattacaccaatgagatatttataagttttgataatcaaggaggatttgttatatcaatattaaataatgctacgagtgaagcggcgaacattaatgtattccgaaaaaacatgacttctttagatagtagtggttcattgatatatttgcctagcggtgatatttatcatatttcagatatctataaaannnnnnnnnnnnnnnnnnnnnnnnnnnnnnnnnnnnntgtccagaggtag

SEQ ID NO: 23717 - DNA, 1641 bp, Escherichia coli
gtggctattttagaaacttcttatctacaaataaaaaaaatccccaataatgatgatagtgattatattttatgtttagacaaccctaacctctcatcttacacattgaactttaatgacttgtctggatacatatcaagtttatgggataatattaggggtagttttaccccttttcataaaaatactgtaaacatcgcccctaatgaaaaaaaatatatttccctaatcggacttgataagttgtcattcaatattgatgtttttagacaagcattagaggtaaaaaataagaatagttacaagataagtaaatttacatgggaaacgtatggtgatatcgttgtatcacctgaagatagaatttctcatctggagttagatgggtttaattatttttcacaacccgagttagatactccaatatctgactcattttcatatttatatgataattttcagatcgttgatagtgatgtgcatattaagcttcttcatctcaacagagaaacaaagcaaataacaccacatcgtattattcttaaaagatactttatagactcatttgctaaaacaagtatcactgacagagaaaagaatatatatcctgtgatttgtgattcacctgatcacttcacaagcgacatatataggcatccatttagaatagttctcgggaataagacattgtatccatcagaagaacttgtaaaattcataagcacctcaaaagaatatttaagcaatatggatgtgattaacaatgttattgttcctcaaaaaacaacaaagaaaaacaaattatccatagttagtttaaatagcaatatcaaaaatgatattgtattgtccggagtaatgaccggaacatcaaagatttttcatctaaataattcaggtgatttattgttaacaacctcaaaaactcatggtggtggggttgtggttatttttaaagattttataaataactggtggaaatataatcttactttaataacagttcctattgataataaattgtcagacaatagaataaatataaccccaatggggataaagatacaggaaacagtcagtggaaatgacaggttgtttttttaccctactccattaaaaaatggatgttttatcttgcataatccactttactctaactcattcccttctttatattcacatgaattatttgatttgattgaagcatatagaaatccaacgtattcgtatttacagaacaatattatcaatagatatatacatactgtttctgagtatgctggaaaagacggtattgccaatatgtcattatctatatacgcatactcgacatgtcgtttctggtcaaaagaaagtgtggctgtaggagatacaataaaattgtctaattatgagcatattgagtttagctttaattcatttagtaaggattactttcgtgaacaaaatagtgatatatataaaatattttttaaaattgcttcttcgagtaattcggttgttgtggataaaaatacgctcactcaaaaaaacttcctagaaaacaatacatttttcagtattacaggtatagatgagtctctctatgaaaagcatataatctttatcactcttaaggttattgtcccctcaaaaaagtag

SEQ ID NO: 23718 - DNA, 273 bp, Escherichia coli
atggatgaactgcgtgcccagggttaccattttaaagtaaaaaccgtgacggaaagcctgcgccgtcacggactgagggcaaaagcttcctggaatttcagtccggtctgttaccgcgcacacagccagcctgtgtcagaaaatctgctggagcaggatttttacgccagtggcccgaaccagaagtgggcgggagacatcacgtattgtgtgcccggagttcagggcgagcatggaggctcaaatgaaccacgagtctgtctggaatattga

SEQ ID NO: 23719 - DNA, 504 bp, Escherichia coli
atgactaaaaatactcgtttttcccccgaggtccgtcaacgggcagttcgtatggttctggaaagtcagggcgaatatgactcacaatgggcggcaatttgttccattgccccaaagattggctgtacaccagagactctgcgtgtgtgggttcgtcagcatgagcgggataccgggagtggtgatggtggactcaccaccgctgaacgtcagcgtctgaaagagctggaacgtgaaaatcgtgaactgcgcgttcagttcttccggctactgaaccgtcgatatgaaaaagcgagcatcatactgacgtcaaacaaagggttcgcagactggggagaaatgttcggagagcatgtgctggcaacagcgatcctggaccggctgctacatcactcaaccacgctgaatatcaaaggagagagttaccggttcaatattccagacagactcgtggttcatttgagcctccatgctcgccctgaactccgggcacacaatacgtga

SEQ ID NO: 23720 - DNA, 315 bp, Escherichia coli
atgttgaccactgacgaatggggtagttacgctagagagttaccaaaggagaagcatctgactggtaagatttttactcagcacattgagcgtaacaatctgaccctgagaacccgaatcaaacgtctggcccgcagaaccatctgtttctcgagttctgtagaacttcatgaaaaagtcatcggtgcttttatcgaaaatatatgttctactaattggagtcatcacccttctgatgagctttccttggatgattaccagactgaatacacagccaaagatttttacctcattctgctcttttttctcaaatga

SEQ ID NO: 23721 - DNA, 183 bp, Escherichia coli
atgagcggaacctcaggttcctcgtctgatgccgctcttgcaacacgttacgctgccgagtatttttgtaaaacatggactgctccaggcctgaaccaggcagaaggatacaaagccatctcagatctgtcgcatcactattttcgtgcagaaggctctagccctccccaatcttttttgtga

SEQ ID NO: 23722 - DNA, 249 bp, Escherichia coli
gtgaaaaatttcctcactgctctttcagatagcatttgctcattatttattgttaatagtaatgtggcatcaatctccttagggaatgaatccttttcaacagatgaagatcttgagtatggttatttaataaacactggcaatcattatgacgtttacctccctcctgaactttttgctcaggcttacgagttaaacaataaggaaaggaatgcgcaaattggttttttaactcgttatgcaatttaa

SEQ ID NO: 23723 - DNA, 1311 bp, Escherichia coli
atggcgaattcagcctatccagccggcgttgaaaatcacggaggaaaactccgaataacgtttaagtacaggggtaaacgagtgcgcgaaaatcttcgcgtgcccgatacaccgaaaaacagaaagatcgctggtgagttaagggcttcggtctgctttgcaatcagaacaggaacgtttgattatgccgatcgattccctgactcacctaacctgaagctatttggcctggtaaaaaaagatatcaccgtcggtgaactggcacagaaatggcttactctgaaagcaatggaaatcggtagtaacgccttaaatcgttatcaatcagtgatgaaaaatatgctaccgaggcttggtcctggcaggctggcgtcatcgattacaaaagaagatctgctgtttatcaggaaagatttactgaccggggaaaagggaagcaggaaaaccagcacgtcccgaaaaggaagaaccgtacccacagtgaactattacatgacaacaacagccggaatgttcagctttgccgccgaaaacgggtatctggagaaaaacccgtttaattcaataacaccgctgaggaaatcaaaaccagtgccggatccactgaccagagatgagtttagccgtctcattgatgcctgccatcatcaacagaccaaaaacctctggacagtggctgtttttacagggatgcgacacggtgaaattgccgcacttgcatgggaggatatcgacctgaaagctggcacgataacagtgcgacgaaattttacaaaaataggtgattttacgctaccaaagaccgacgcaggcactaaccgggttatacatcttctggcaccagcaattgaagcacttaaaaaccaggcgatgcttactcgtcttagcaggcagcatcagatcactgttcaattacgcgagtacggaagaacaattttgcacgagtgcacttttgttttctgtccgcaaatcgttcgcaagaatcacaaggcgggtattaactacgcggtaagctccatcggagcgacatgggattcagcaataaaaagagcgggtatccgatcccgtaaagcgtatcagtcacgccatacctatgcgtgctgggctttatcttccggagcaaacccgacatttattgcatcacagatggggcactccagcgccagcatggtctacaatgtttatggtgcatggatgcctgagtgcagcgtgactcaggttgccatgttgaataatgtccttaatgcccgtgccccagacgtgccccaaagtgaccaggaggatgaaataaaattatatttttcaaaatga

SEQ ID NO: 23724 - DNA, 285 bp, Escherichia coli
atgcgcgagttagtaaaccaacataaccatggcattcagccagtcatcacacctgttgtacagataaatgcgaatgaatgggtaacactggagcttttaatggctgtaacaggcctgagaaaaggaacaatattacgcgccagggacagtgcgtggatgaacggcagagaatataaacaaatcgcccccgacggaacgccaaagaaaaacagcgaatgtctctatcatcttcctaccatcaacacttggatcaaaaaccaacccttaccatctcaggatgtttaa

SEQ ID NO: 23725 - DNA, 504 bp, Escherichia coli
atgaccaatattaatacagcttgtgtaaaaaataatgccagttatcaatttaataacgcattacctaacaaagaaaccatctccagcaatttttgtgaacgactagaacaatggggtaataagtcgcttaataatggtgaagaaagagcaattgccgtggagcgaattaaagaagcttacaattcgaacatggcatctcttgatttgtcatatcttgatttgagtgagttaccgcctatcccctcgacagttaatacgttaaatctggaaaacaattgtctaacttgtcttgactttactgacaatgccagtctcgttaatatcaacctcagctttaataaaattaacacgataacctttccaaatgaatcaaatctggaaaacatttatattgatcataataatctggaaagtttagatttaaaaaatcagcattcattggttaatctggaagcgcaaaataataatctaaaaaaattaatatttctgatagttataaactga

SEQ ID NO: 23726 - DNA, 225 bp, Escherichia coli
atgccgatgaaatttgatgagatattaaaacagcgtgataaataccatgctgacaacatggagacgatgagcatcaatgattaccgcgcattcctggagacgggcgcactgattgaaaaggatcagcatggttttgtgagatgtgctctgtccggtgaaatgctggcggtaaatcctgaacagatagatgcattgatagaatttctgaaagggatcagggactga

SEQ ID NO: 23727 - DNA, 2133 bp, Escherichia coli
atgaaactggcaccgaacgtaaaaaaacagccacgcggaataaaacacaaagacacagaggtgattattttcgcgggtagtgatgcgtgggcacatgcaaaacagtggcaggagcaggacggccccgcatccggcgataatgtgcctcctgtgtggcttggggagcagcagttatcagaactggataagctgcaaattgtgccggaaggcagaaaatccgtgcgcatattcagggccggacatcttgcaccagtaatgatcaaggcgattggtcaaaagctggcggcggctggtgtacaggatgcaaatttttatcctgagggtatgcacggtcagaaggtggagaactggcgcgaatatctggcccgtgagcggcagaatctttctgatggtctggttattgagtttccggtaaagaaaaaagataccggaagccatagcgatgacgaattaaagccacgcgttgaaagtcgcgccgatggtgttttctgggtaacgcccaaagtggataagcagtcaggcgaaattatccggcctgagacgtggttatgttctccgcttgaactactgggaacggggacgatcggtaaagagcattaccgcgtgatgcgctggaaaaaaaccgcaaaccatgaagtcatcacaatggcgatcccgtgtggtggtatcggcgaccgtgacggctggcggttacttaaagatcacgggctgaacgtgacaaccaacggcaaatacagggcaatcctggcggactggatgcagttaagcggaagccatgaggaatggcagttaagcacaacaacgggctggcattttggcgcgtacatcatgccggacggttcgatcattggtgaatctgaaaaaccgatcctgtttaccggaaaaagcgccgcgattaacggttattccgtggcgggcacggcggatggctggcgcgacagcgtggcgcggctggctggcggtaatgcctcaatgatactgggtgtggcaacgtcactggcagcgcctttaattggccttgtgggtgctgacggcttcggggtgcatcttttcgaacagtcatcggcaggtaagaccaccacgcagaacatcgcatcaagtttatggggagagccggacgcgcagcggctgacctggtacggcacggcgttaggtattgccaatgaggccgaggcccataatgacgggcttttaccactggatgagataggccaggccggaaatgcgcgggaagtgtcaacgtctgcttatacgctgtttaacggttcagggaaattgcagggggcgaaggatggcggcaacagggagatcaaacactggcgaacggtggcaatcagcaccggagaaatggacgttgagacattcctcaaaagtgaggggataaaagttaaggcggggcagcttgtccgactgcttaacgttccgatggaaaaagccacgaaatttcacgaatacagcaacggtaaggaacatgctgacgcgttaaaggatgcctggacagcaaatcacggggcggcgggtcgtgagtgggttaaatggctggcaggccaccagcaggaggcaaaggacacggtaagggaatgccgcgaacggtggcgcaacctgataccggagagttacggcgagcaggtccaccgcgtgggtgaacgtttcgccatactggaggccgcgcttgtgctttccggtcatgtaactggctgggtcgtgcaggaatgccgcgacgcgatacagcataactttaatgcctgggtgaaggagttcggcacgggtaacagggaatttaaacagatggttgaacaggctgaggcgtttttgtcgtcgtttgggtttagccgctaccttccgcaccccaatacagatgagcgtgatttaccgattaaagagcttgccggatacagaaaagggagcattcgcaacgaagatgacgagatgcgctattacacgttcccgcacgtgtttgagagtgagatagcgaagggatttaatccggcgcattttgcgcgtgccctggatgctgccggaatgctggagaagggaagcgatcgccgatacaaaaaaaaggcgctgggcaagattgggggtaagcagcatgttttttacgtgctgatgttccagcctgatgatgaagattaa

SEQ ID NO: 23728 - DNA, 243 bp, Escherichia coli
atgaaaaataataaactggcgaccagtgaattaagaagccttgccaacagcgcaatatctttaaacaacgcagcaaacgaagtaatgaatatgtggcttcagtcgctggtgaataatgaacgcgatgaatcaactgcaagattaatattagccgtttctgaattactggatagttcaaccagcaaaatagagagcatatcagagaagattaacggcttatcaggtcacgctatcggggaataa

SEQ ID NO: 23729 - DNA, 192 bp, Escherichia coli
atgaaggaaattacattacacgaagccgctgaacgtgcgcaccagacagaaattatttgccgccttcttgaggtataccctgataaattaaatgatggtgatatatccgcattagctggccttctggcaaaactgtcaggaagtgttgcgctgtggttaattgatgagagagccgaacgctatgaaaaataa

SEQ ID NO: 23730 - DNA, 1362 bp, Escherichia coli
atgcttcctacatcgcaattacgaccgaccgggacattctgctcctattccgctgaaacatcagcagacatcaaaagcgaaatcacaccaattcagatagaagaagcgcgggccagtggtcgtttatatatcaaagattgtgatattgagtatctgccacagttaccaaacgaaataacatcagttacaatcgaaaactgcaacaacctgacaacccttacaggattgccggttaatacacaaaacctctccgtcattaactgtgaaaaattacaaatcacagacatgccatcaaccgtaaaaaatctacatattgaattaactgattcaccatttatacatttcatatctgaaggcatcgagtgcctgacggtttgccactgctatatatctggagtgccagagagtgtccgctaccttgaaataaaaggtagcgccacagacagcataaaaaatgttccaaacgggttatcatctctcagcatcaatagctataacccggagaatcaggccagaattgacaacctgatatcaccgtcactgaagacgctatcgctgactggatgtagcaatattatactgccggagaaacttccggagagtgtgacatcggtaaccattcatgcggagcagaaaaccacgtggaacatcggtgttgaagggatgcctgatgggctggatcttgatttacaaaatgtactactctctccagatgtagttaaagcaaaaaacatcacctttcagggcaacgctctggatgtggccttacactttcgcgagggagacattgtctatggactatcttcacccagagaaaaacttgtcaacagcattaaactagttaacgacttttccaaaaaagatattataactcagaatacgttaacaaacgcagtatgggaccccagaacacctcgcaaatataagcaagatccacttatcaaaagagcattaaatgaacacgaaagaggaataaaatttaaacaacacttaaagaatcacaataattataatgttaccatggccgacctttccgtatacaatcgcgacaaattatgggcaaaaacaagcaaggccggcctagagtttcagacattaacacgcaataaaacggttattttttgtgcggatgagcttgtcaactcactcaaactcatagctaacaagtcagagggctatggccagagtattaccgccagcgaattacgatggatttaccgtaataaagacaacaaccaaataatgaaaaacataaaattttatctacatggcaaagagataccagcagaaagaatattagatacaccagaatggaaagactatcgtccaaaatactctggttccacatataaatattcttaa

SEQ ID NO: 23731 - DNA, 234 bp, Escherichia coli
atggtaaaaccacctcctgtggaggtggttgcttgcagtcaggtgtttcgggtctgtggctttttgtgttctctggtaagtggttgctattcttttgtgttgtgtatctctgtttctatagttttagatagccatgtcatctcagtaactgagagttttagttttggggttctttctcctgcgccgggtgggcgcatgtcaaaactacaggcttttttttggtacactgtatag

SEQ ID NO: 23732 - DNA, 300 bp, Escherichia coli
atgactagtctaaaaactagtattaagactatcacttatttaagtgatactggttgtctggagattcagggggccagtctagtcatctacacaaccaacgccatcgagtcgctgaacagcgtaatccggcatgccatcaaaaaacgcaaggtgttcccgacggatgactcagtgaaaaaggtcgtgtggctggcaatccaggcggcttcacagaaatggacgatgccactgcgggactggcgtatggcaatgagccgctttattatcgagttcggtgaccgcctggacggtcacttctga

SEQ ID NO: 23733 - DNA, 450 bp, Escherichia coli
atgacgggcggaatagcccaaaaggtaaacgatccgcatggcagtccgtcggaaagctgctgcttcatacgaccgcttaaaccgtcagttagtgtcagtatcgctgaagatcagcttcttttgctgatttactctgtttttacctgccctgatgaaatactctttaatcataacattgattatatcgaaaatatattttttgctatcattaagaatatttatatgtggaaccggagtattttggacggtagtctttccactctggtgtatctaatattctttctgctggtatctctttgccatgcagataaaattttatgtttttcattatttggctgttgtctttattacgataaatccatctggatttgcccctatatttccagacatctgttatcacttaacccattacaagcccgctgccgcagatattcccgtggcgagcgataa

SEQ ID NO: 23734 - DNA, 3144 bp, Escherichia coli
  misc_feature (778)..(787): n is a, c, g, or t
atgttaaataatttatatgagaaaagcttaactttccgaagaataattaattattatgtgaaggaaataaacttaagtgattatggctttctaaaatgtaagattttaccagcatatgcttataactatgagatggaaaatgatgcccccccaaaaatactaattccaattgaccataatttaaattttattgatgcaaaatataatggagaaacttatcggggaaatgaagagtttgctattaatctttttctgcagcatatattacataatgacatacaagaacaaacatcgatagacttatacacgagcataataaataaagagttggatagcaatagaaaatcatacaataatgaaatttttaacaatttctcttttgataagtctgtaaagttgaattcatataactatattgcagatgatatagagcaagtaatcgataaaggaagcaaagttcaattggaggtatataatttattatccgaagaaaagatatttgaacataaaattatgaataattggacaaggagcataaaaaatatattgacgacatatttgtttatgtcatcaggagcggtgacagccagaaatgttcaaaccttttctccaacaataaataatgagtcaaggattcgattgccgagagcattgccagtaggccatccatatcctgaggaacataaggcttctggtttctccccttttatgatgggggggctgagtggtgatattcttccggaaattttaacggggaatggaccatctatattttttnnnnnnnnnnaacataataaccaacatgatggagcttttggaaaaataatagattttacccaaaatggaaataaaataagtgcaaaagataaagaaataataaaaagatatatttttgataagatcaatgttttgattaaagagtatttcattagaactggtaaaaattctcataccccatttgaagtttttataaaggagcgattatttaatcaatatgatatttttaaaacattggctagagatatattggcacacccattagtaatatatgatgcgggttacaaaaattatcatgagtcattaaatgctgctattgcaataaactctagaccattacaagaaatacattatggtgatgttttatatcattatcataaaaatgacatctctttgggagtagatactctttacgggagggaaagttttgatattgtactggatgcaatgaacgtatatagaaaaagcaaaaaaatgagagttatttccaataatgagatgaaaaaaagcattaaaatatctgaattagttatccataatattataaagaaaggattgactaattgtttgcttaaaaaggatgttcttaatgccagatatgatcttattagagatattcttcgatattctttaaatatacgacagggaattaaacatgatgatgttaatagaatagcggaaaatataataaaaaagtatggtataactgagggtatgaatcctaaacctaggaatgccagaatatctaaagaattgcttttattagctgttgatagacagattgagtgggcgaaaaaacattttataacaaaagatgtattggaaaatgttgtgtcaaaatgtgatttatcatctatctttaatgttaataaagtgcttcagaatactattcttgagtttgtccatgaaattaataatatatcatctgctcgctggatgtcaaaatcagaaaagaataataaacaaaaagaggcaatagaaaagttcaaaaaagaagtatcccatatgaatggcgggcagcagtttatttgggggtttgataaggttattcaagaaggcttaagtggattgattgagttaagtatcgatattaatgatagtacaaatcatcgtgataagtcttctctttctcctgatgggagagctgtgttacattttttaggtacaatttggaatatggcgatgggagctgtacctggttataatgcattgtctggtgtaagtagcattttacatagtgctatagtaaaagaatctagcaatatctgtgattatattcagggggctgtacgtattggaatggactttgttccaggcactcgctctgacttacatagccgttcgctgcagataaaatatgaggctttgaagcatatagaaaaaaacattaatgataatattatttatcatccgagtaataatgctaatttctattctgtaattgagtcaattgatggtaatgactttatatataacgaaaaacaatctaaaatattagaaatgaaacaggatcgtggggggaatagatatagtgcagtagatcttaactcttctaagtatgggtattatgagaaagttggcggtggtttttatagatatatagaatcctttaaccccatatcttcagagacaccaaataaaatagtctacaagggggaatcagtagatttaactaaggagccaaattcggaattatattcaggtaggtattctataaataacaaacaggttaatgtttatttctttcgtgacgctgatggtacattttataaatcagaaggtcttcatggtgggggagttattagatacatagataaaccgtattctcagttaagagaaggagatattgggtatgatgaggatttgttggatatatacgatgattctccggtgcttgaagacacgttgcctgctttatcttctgaaatagtaccaactccagaacatagtattaaacaaatttattcgaaaattaaggaggggcacatagaactgtccgattcagacatcatattgtgtcgcggcacaaccggtattcaagctgaaaatatcgttgaatataaaactgctggagggcttcctgattcaaatccaaatgtaaaagcaccagatgaatatatggcacaacagcaggtacgtattggaagaatattgcctgaatacacatcggatcttagcgttgctgatcggtttagtcgtgagcattatctaatagttgttaaagtaaaggcaaaatatatcacacgaggaagtgttacagagagtggttgggttatagataagaccgcacctgttgaaccacttgcgataattgatagaacttttggtatgaaggaaaatatctcaatggtaaatgcatcgaaatag

SEQ ID NO: 23735 - DNA, 1203 bp, Escherichia coli
atggcagtattgacggatacgaaagcaagacatatcaaacctgatgacaaaccattgccccatgggggaattaccggactgacccttcatccttcttcagtaaaggggcgggggaaatgggtttttcgttatgtaagtccggtgacacaaaaaagacgtaatgctggattgggaacttacccagaggtcagtattgctgaagctgcacgtactgcccggataatgcgagagcaacttgctgcaggtgatgatcctctggagattaaaaaggctgaatctgagaaagtcgctatcccaacatttgccgatgcagccaggcgtgtacatgcagaactgtctcctggatgggaaaatccaaagcatgtaaggcagtggttatcgacgcttgagaattacgcgtttcctcaactgggagcaaaaacgctggattcgattacggctgcggacgtggcagaaacactgcgtccagtctggttaaccttgtcagaaacggcaagccgggttaaacagcgcattcatgttgttatgcagtggggatgggcgcacggtttttgtgtagcaaatcctgttgatgtggttgaccatttgcttcctcagcagacaagaggacgtgatgaacaccaacccgcaatgccctggaggcagttaccgctttttgtggcgaccagtgtgtataccgatgaaccttataatgttacccgcgcactgttattaatggtgatacttacagcaactcgctcgggcgaagccaggggaatgcgctgggctgaaattgattttcataagcgggtatggactatacctgcagaaagaatgaaagccaggatacagcatcgtgttcctttatcccggcaggctatttacattctggaaaatatacgtggcctgcatgatgaactggtgttcccttcacccagaaagcagcagatcctttccgatatggtgttgacaagttttctgcgtaaaaagaaagccgtcagtgacattccggggcgagttgccacggcacatggttttcgctcaacattcagggactggtgtagcgaacaggggtattcgcgggatctggcggaaagggcgctcgctcatacgctgaaaaataaggttgaggcggcatatcatcgtactgatctactggagcagcgtgtaccgatgatgcaggcatgggcggattatgtgatgtctcaaattgtgaataaataa

SEQ ID NO: 23736 - DNA, 1389 bp, Escherichia coli
atgaaacgtacgctgaagatctcttcgttgctgtgtgttgcgctgccgttgacggtacaggcggattgcctgtcaggtgacgaggtggcacaaaatagcgatgtgacgctttacgagcaggtgtcttatgtcaataaacaggcttcggcctggcagattgcaggcaaaaatccctacacccgtcacaacggttatcaggaggcggggattggcatcaatagcggttgttcgataatcgacaatacgctggaccttaagctcaatctgtatggaataaacgaatatgcgcttaaacccgcagggaaattcgaaacggatgatagccgcacgcgtgcgttaattaaccgcctcagtctggtctatagcgcctcggacagcgttcaatttgaagcaggcaaatttgccgcgccgtcaggaatgttctttttgcgttcgccttctgatttgcaaacgcattattacaccggattccagtcgacgcgtttgcacgatcccaaaatgacatcggcgtatcaggcgtcatcgtggggcgcaaaaatgagcgtggatacacgcgattatgcgttttcggcgagtgtcataccgaagttagccaccatcgacaaacgctatgtgacgtctggcaactggtcggctaatcagcagggaaacagcgacgaagcctatctgctgagcttcagcgatcatcgctttggtgagcacacgccgacagtcaatgtgcggctcggaccatcgccgtcactcgcgctgtctgacagttatcactacaccccgcagcttacgctgaatgtcgacgcagcctaccaccgctcccagcaatggcggcatctttcccaccgtgagacggcgcaggtcgaggaatatcagtttccggattcgctctatgaaacgaaagatgaaagcggcgtagagctggcgctgggtgggcagtacaccagtgataatttcagcgtgtttggcgttgagtattactttcagagcgagggttattcgcgcgctgaacagcgtcagcagcgcgagttaattgacttcctcaataccacaaccggctatgcgccactggatcaggcatttgattcttacaaatacctgatggcttcagaaatcagcaataccgccaatcaggggatgctgcagggtaagcactatctgaacgcctgggccagtctgccgctggcgggagagtcgacgctgcagccttcgctggtggtgaatctcgttgatggcagcacgttgctgggcctgcattattccacgccgctcagcgctataagtaaccagcttgaagcctatgccggtggctatagcgcgctgggaagtcggtactccgaatttgcgctttttggcgacacgttaggcctttatttgggctttaaatactatctataa

SEQ ID NO: 23737 - DNA, 789 bp, Escherichia coli
atgaatatggctttttacggcaagtggtttgcttgcctgtggctcgctacgtcgtgcgttcaggcggcgagcacagataataaggcgctggagataattcgtcgcgctgacgaaattcgttcgccgaataaaccgtttcgttacacgctgacggtaacggaatataaagcgggcgcaacccagccagagaataaacaggtcctcgatatttccatgcgctttatgaaaccgcagggtaatgaaaaagcggatgcacgctcgctggtgcgttttatttatccgccgcgagataaaggaaaaatcatgctttccgactggtacgatttatggttttacacgccggaactgcgacgtcctatgcctatttcacggcaacaaagattaattgggcaaatctctaatggcgatgtcattgtcactaactttgaatatgcctatgactcgaccctgatgggggaagtcacgtgtgctgaaaagcagtgttacaagctggcgctggtgcgtaaatcggcggatatcacctggccgaaggttatctattacgttgaaaaagacggtgataatcgcccgtggaaggcggcctattattcgcaggatgaccagttaataaaagaagtgttgtatcaggatttccagccggtgttggggaaaacgcgacccatgaaaataaccgttaccgatgttcgtcacggcaataactattcagtgatggagtacagcgatgttcgtctggaatcgctgccggagtttcatttcaccaaagagtatattcagcgaggtgcgaaatga

SEQ ID NO: 23738 - DNA, 1311 bp, Escherichia coli
atgtccggggaaattttagctgttaattgcgttctgctgctgattctgttttttgtgttttatcagcttctgttttattcacgagatgtcaaatttgcatttttgaatctctttcgccacaagcgtcgctctttttctaccataaccgctattgtattgggtggcgtggcaatttttttatatggcggatttattgattactctttctggatcctgaaagagcagacgattcgtaccaatattggtcatgtacaaatttacaatcagcactattttgaaacgtcgaataaaaataagagcctgattgccgattatgcggcgttaaagaaagctattttgtcggacccgacgctggcggcggatatttccacgctctccgggcaactggagtttactggcgtaatttcacattacgagagcgaaacctccagctatttctccgcgctgggggtcgagccgttacccgctttaaagctgggttcgttcgataagattatcgcggggagcgatctttcccgggtaaaaggtgatgaaatcaccctgggcagcggtctggcgaaaacgttgaatgcgaaatatgacgactggctggatgtgatggtggtcaacacggcgggcgggcagggcgcattgtcgctaaaaatgcgtggcatttttgagtcaggcattaaagattatgacgatgtcgcgatgaagatcccgctggacaccgcgcagcgcatgatgggtacggatggcgtcagcaaagtgcttattctgcttaaagaggatgacaccgcggcgtttagcgcaaagctgcgtcaatttatcgaacgcaatcatttgccgctggtggtcaaagactggcgtgatgtttcactcttttatcaacaggttgaagggttgctatcggggatctatttcttcatcaagctgattgttgcgctgattgtcatcttcatgatcggcaactcgatggcaatgaacattgttgagcgcacccgtgaaattaccactctgcgtgccataggcctgaagccgcttcacgtcacgcgcttgtttctgacagaaggcatttttattggtgtgattggcgcagtcggcagcctgctggtggggggcgtgttagcctggattattaatctttatggtattgcgatgccgccatcgccgggacaaaccatcggctataccgcctttataaaaaccagtaacccggaattgatttgggtgacggtggtattacctattttgacagcaacaggtgcctctgtgttaccggctttacgtgcttcccggctgaatatttctgacgcatttaaattctcatag

SEQ ID NO: 23739 - DNA, 657 bp, Escherichia coli
atgactcagatgcataaaggatttttgctcatcggcgtctttttgtacgcggcgtttgtggctccgaagatttacgcggcaacacccgacgctgttaaccaggttctgcaacaggggctcccggcgcagcctgccgcgctggcgacgctgaccgaggcgttaaagaaagagtatgaagccaggcacaatgtggtggcgctggttttttacgcctatggcttactgcgtcaagcggacggttatgcggcaacaaacgattttatccatgcctcagaatacgccaaaagcggctttttctggctggatgaagcggtggatttgcaggagaaaaatcaacgcgtacggtatttacgcgcccgcgtagatgcctatttacccgcagactcagggcgttgcgtggtgacagtcaaagacaccgaacacatgctggctgacccggcgatatggacgacaacgatccgcgaccatattctggcgatgcgttatcgcgcattacgtcactgcaaggacaccacccgcgcgaatgcgttgttggcgcaaattaaagggcaaaacgccgcgcttgcgcagtcgctgacgcaggattttaatgttgtaccagaatgggatagtgaagagttaacccaggtactgctgccgctgatgaaaggtgagtaa

SEQ ID NO: 23740 - DNA, 708 bp, Escherichia coli
atgcaatctactattaaatcgttgcccgctatttcgcttagcaatatttataagtgttatggcgctggggcaggaaaggttgatgcgcttaaaagcattaatcttgatatcaataaaggcgaatttctcgcactgtgtgggccgtcaggcagtggtaaaagtactctgttgaatattctctcgggtattgataaaccgaccagcggaacggtgatatttttaaataaattactgaaccaactgccagaagagcagttggctgtgattcgtggaaaacatttgggttttatttttcagttttttaaccttatgccggtattaaatgttttcgataacgtttatttcccactggtgcttaatggtcagttcagtaaaaaagaagccactgaacggacgctgcattatctcgatagtgttggattaagcggttttggcgatcgtaaacctgggcaactatcgggcggtcaacaacagcgtgtcgccatcgccagggcactggcccacgaaccgatggtggtcattgccgatgaaccgacgggaaatttagacctggcaaccggcgaggctattttggacctgttgttgacgattaatcagcagaccggcaccacatttgttatttccacgcactccagcgaattaaaagcgcgggcacggcgagtggttgaaattcaggatggagtattgattcatgactcagatgcataa

SEQ ID NO: 23741 - DNA, 954 bp, Escherichia coli
atgacggaaaagagtatctacctgtcttcctgggcgcttacggaaccggacgacattttttatttttatcagccgacctggctcaacgcctgggaagcacatatgtacgaaaggggattatacggcacccgtgctaatggctggggactgaagcgctttggcgtggagaacgatatttatgcaccagaacggatccgtaatccacaatatatgccttaccttgaggcgatggagcaggtgaccgattctgcattacaacaaatgccgactaaagaacgcatgaagttaatgaaatcgcgcacggcatttatttatgccgattcctggggcgaatccggttcgtttgaaaaaatttccagtgcgctgcatatcgccactattgatacgcttcccaagaatttacttaagaagttttcgataacggaaccgacttgcaagattcgcggcgaaaaacaggcattcgttcaggcgctgcgtatggcgcaggattatctcgcctgggatgtattcgataacgtggtgatttgtgctgcctatcgggcaattccggtgctggtattctctgaagaagatgtgggtaaaccgcctaagcgtttatttccccgtcgtgctgatgaggtgaatttatctgttgaacgagtgggttgttttattctcagccagcgtgagagcgccatcaggctgcaatgcggggaatatcattccggcactgcgccacagcatgctacggatattgatgtcatggccttcagcgaacggcaacaaatgccgtcccggcctgctgctggcgttatcgacctggtggcccattacggtgaaagcggttgtctgacgcccgcgttgagtatggattatttaacccgtcatattcagcccggtggaaaaatgcgtacggtcattgccgataaacagtttggttatcactactttgaccttgaataccttgaaggataa

SEQ ID NO: 23742 - DNA, 1224 bp, Escherichia coli
gtggacaatgccgctattatttcgggttacagcgtgtggatgccgtatgccgaagactgttcgcagttaattgacaatctgaaacaggggaaacgcgttgcgcgtacaccctggtttacctccaacgaggaagccattaaatgcgggtttaagggtaatccgtcagtggcgacgttgaaacaggtggacgatagcgcattggacctgctgtctcagttgatcgacgaagccctggaacaggcaatgctggataagcattgcctggccgggcgcaacgttcgcgtttatctgaccggtattgggccgcgtatcgacgggctggattacaaatctttctataattacaacgatgtagaagatatcaacttaacgcaatccatcacaaatctgcatgcctcaaagatgtcgcaggacacgatttcaagccatcttgcgcgcaaatatcgcttgcagtatttgccgcctaacatgaactgcaccagtaactcgtcactgactgcggtgcatctggcgacgcagggcattgagcagggcgggattgatctcgcgattgtgctgaactgttcgaaaattaaaacccaggacatctggttcctggaaacgcaatcgatgctggacagcgaacaagtgcagccgtttggtgaaaacagtaaaggtgtggcgttcgcagaaggttttagcgcgctcctactggaaagcgctcatcaccgccgggcgcgtcaacaaagtgagggcgtaagggtgcaaacgacttacacccaaatcagcgcgggccgcagcaacgatgcctcctggcttagcactaacgtgcacaaggtcatgcaggccgcgatgaagcaggctgaaattgcgctggatgatcttgcagccattcttccacacggcaacggttcggcagtgagcgataacgcggaggccaaagccatcgccatgttcgcaggggagcgacagatccccgttctcgcctataaagggcagatcggctataccgcaaccggatctggtgttgtcgatctgatcattggccaccattcgttgacgcatcatcaactgatcgcacctgttggcaacgacgtcattatcgacagcatggcttcgctggtacttacggacggcagcgtgacaaaccatagcaaacgccatttgctgaaggttggtgtgggtgtcgatggttcagttattggcgttgtcatgacaaatatgcaagcggggcgcgcgaaatga

SEQ ID NO: 23743 - DNA, 2559 bp, Escherichia coli
atgaaaacgaacaggaaaagagttgttattaccgggctggggattttgtcctcactggcggaaaatattcaggatttccgggaagcattattaaataaaaaaaatggcgttaaggatagcgaacgctttgcaaaatggtttgaaaatgcgcgtgcggcagaagtgttgcatgacattgaatactccgatctgaacgaagatgttatcgattcactggataacgcagcgctctgggcctacaaagtgggtaaagatgcgctgagtcaggccggcctgatggatagccgtgacaccctcaaagaaacaggcatgatcgtcggtgtttcgtccgcgggaacagaggcatttttgccgctgttcgaacagcgcatggaagatttctcgctgcgtaaagcactcttttccggcgcattctcatcctgttgttccagcgtttcaacgctgctgggcttacagggtggggttgaactggtggcgaccgcgtgtaccgccagcccgaacgccgtggggatggcctttgactacatccagaatggtaaaagcaaaaccatgctggcagtgggcactgagcccatctatctgccgacctttgccggattctacgcactgaatgtcatgcatccagacacttgtacgccgttctcgggtcagtccggtatgtcgattggtgaaggcgctggcgctatcgtgctggaagagtatgagcacgccgtagcacgcggggcgaccatttatggtgagatcctctcttacgccacttcctgcgatgctttccatgaaaccgggccagatccgcgtgccagcggagcggtgcaggtcatgaacaaggcaatggcaaatgcgggcgtaaccccggagcaaatcgattacgtcaacgcgcacggtacgggtaccgaagccaatgaccgtattgaaacgctggcaatgaaaaaggtcttcgctaaccacgataaactgctggtgagctccaccaaatcttactttggccacaacattggcgcagcggggattgtggaactgattgcctgtctggcaacgcttccggataaccgcgtactgccgacgctgaatttcagccatgcacgcccgaattgcgatctggactatgtgccgaatgagtttcgcgatcgcaaagtgaacatcttcatgaagaataactatgccttcggcggcaacaactgctgcatgatcctgagcatggagcccgcgtccattccggtcagtacctatgattcgaagcgtgtggctatctcgggcgtcggtgcagtatccgcaataggccacacgctcaaccaggttctggaaaacatctgggcgcaggaccaccacgttgaactgggtagcgtaaccttcccggacgatacactggaagaagccaaagagctgctggccgtgctggatgaatcaaaccagtttgccgagctgtttgatgaagagtacagcttcagcgaagctacgcttccggaaacggaaagcaactttaaaacgttccaggtttccgggctggagccgcgtaaacacctgcgtcgtttcgatcagcgtaaagcgacccgtggcggcacgtttgccctgatcgcactcaccgaagcgctggaacaggcgaagcgtaaaatcaaacgcgacggcgatgagttgggcatgatcatggggatgtcccgcggcccgcaggaaaccacctacaaatatctgcaaagtctgaaacccgatccacgcaaagtacgtacatcggaatttcctggctcgctgatgaatgcgatcccaacgttctgcgggatctctgaagggatcaaagggtataccactacgcttgcgacaggggaaaactcggcgctgggcgcgctgacctacggttatgaaatcgtccggcagaacctgcaaccgcaggtattggttggcggcgcggatgagtacttcccgtcgatgtcgctgtatatggatgcggtgacacaaaagatccacatgacggctgaggcgagcgactatcagatttacggtaaagatccgcaaggttatgttccgggcgaaggggcttgcatgctgctgctggaagatccgcagttggctgtggcgcgtggcgctgaggttctcgcggaagtggtgggctacggcaagtcatgcagcaatacctacttcgacgcctcattgttggaagaaaaatccgcgtcgatggcgctggccattgaacgcgcccttacgcatgcgggcatctctgctggcgatattgatttggtatgtggtaccagcaacggtagcgatgaccattctcgtatcgaaattgacgcgatttacaacaccttcgccgcgcaaaacccggcggtgccggtagtgaactataacgcttgctttggttttgtcgcctctgccgctggtttgcttaacctcgccgtgattactgactgcattaagaagcaggcagtacctgcgattccaaatacggtggaattctttgatgagcgtgtgaattttgtacgccagtcgatgaaacttgcgctgaaccatgtcctgcttgttggcgcaacggaaggcggcaactactacgcgttcgtcattaagggataa

SEQ ID NO: 23744 - DNA, 1161 bp, Escherichia coli
atgaaatctcttgctgaatttcacttgaaaaataatgcggtaatgggggtatataacaaccgtaccctaccttcttcttatcacgatgctatgaccgaatataaagccgttcgtgaaaacgcgctgctggtggactattctcacctctctattgttagcgtcatgggcgatgatgcctgggcgctgatcaaccagctggtttccgcagatgtctccatcattcgtgatgagcaggcaatctactcactggtgttgaatgaagagggcaccattcgcggagacgtctatgtgctgtgcagcattgacggttattacctgctttcagaagatatttcggctgccgaattgatcgccagcatgaataccattctcgaaaaagcggaagaactggatattcaatcgatgcctgaaattcaggatatgcgggaaaacaactggggggcaatcctgctcgaaggcccatactcctgggagatcatgtctgaaattcatggctttgacgtgattggcctgccttactacgaatacatgaataccgaggaggatctgctgctcttccgctgtggtaaacacggtgagtatgcgtacatgaccatcggtgagcaggcgaaactggcggagcagtgggaaaaactgttaaccgttggcgagaaatacctgatgcagaccggcggcctggattatcaaaaaatcgtacgcctcgaaaatccgtgctgggatgccagcctctgggaaggtcaggcggtgaatccggttcagttgcagatgcagtgggcggtgcagtacgacaaagatgattttattggcaaggacgcggtgacagagctatcccaggagtataccggtaataaactcatcggcatgatcgcacaggaagaatgcgaaggcattgaggctggcgatcgcgtgctggtggaaggtcaagacgtgggctatgtcgtgaaggcactcttttccccagcgttgcagcgtttcattgccctgaccctgctggaaaaggattacgcctggtctgacatcagcggctacgaaattcaaactgctcacggaattattccggcgcaatcaaaatgtatgccgtttatttataacctgagcatgttggttagcccaactgagcacagttatatcgacgcgtcaaaaaataaaagcgcagcgtaa

SEQ ID NO: 23745 - DNA, 282 bp, Escherichia coli
atgtctaccatgaatgacgctattgaacagcgtaaagaagttctgatgaccattaaaactgagatcatccagcgactgaatattcaacgcgatgaagcgcaaattgatgatgatactgcgctgtttggtaatggttttaaactggactccgtcgatgcaacggaaattgtcgttctgctggataaagtatttgatatcaagatcagcgaaagtgacgacccgtcctatatgcgcagtatcaatagtctggccaccttcgttattcaaaagaaaaacgattaa

SEQ ID NO: 23746 - DNA, 549 bp, Escherichia coli
atgtctaaatacacgattccttcgaaaatcttcctcgaaatgggcggctggcgtcagccgctgctgatggtcgataaaattgcagattataaatacggtgaaaatggctttgtcagtgtcgtgaaacacgtcacctataacgaaccgtatctactggggcatttcccggaagatccgattatgcccggggtgattatttcggaaatcttcggccaggccagcgagtatctctctttcctgaccgacatttgcgatatctggcgcgaacgttttgaggaagagctgaagtcgttacgtgatattcacgcacgcattcaccgccctgaaatgctggagattatccgtacctggcgcagccaggtacgcggcgtgctggcggctcagaacctgaaatttaaagatatcgcctatccgggtgattctattgatgttgtcagcaaattggctttttcggatgccagtggctttaaacactattccgtgaccgcgtacgtcggtaaaaagctgattagtcagggcaccattatcaatttccgtgaaaccaagtaa

SEQ ID NO: 23747 - DNA, 762 bp, Escherichia coli
atgaatatgtacaaatataatgatttaaatgaaaaaaccgtactggtgacaggagccagtggtgatattggactgggtatttgcgaaaaatatctggagcagaactgcgatgtttatgcgctctataaatccaacgacgtgcaattaacggcgctgaaagcaagccatcctgcaggcgataaactgcatattgtgcagtgcgatcttgcctgcccccagagcgtgagcgcattgtgcgaacagatagagcgccaagctggcaagattgatgtgctggtaaataacgcgggcatcgttaaagacagcctgtttgcctcgatgagttatgaggatttcacccaggttatcgaaaccaacatgttcagcattttccgtctgacgaaagacgcgctgatgctgcttcgtgcggcagaaaatcccgccattattaacgttgcctctattgcagcgctgatcccaagcgtcggtcaggcgaattacagcgcgtcaaaaggggcgatcctaggcttcacccgcacgctggcagcagaaatggcaccctggggcgtgcgcgtcaacgcggtcgcaccgggaatgattgaatcgaaaatggtgaaaaaagtatcccgcgcagtggtccgtgcggtaaccagtaccatcccgttacgccgtctgggtaaatgtgaagaagtggcgaacaccatcgtcttcttaagttcctctgcctccagctacattgtcggccagaccatcgttatcgatggcggcctggtcatgcggtga

SEQ ID NO: 23748 - DNA, 369 bp, Escherichia coli
atgagaatagggacagatattgttgaaattgccagaataaccaaagccattattaatggagagatggctttttatgagcgtgtttatacttctcatgagcgcttactcattaaccctgcagaacctgattatgaacgggcctctggattctgggcggcgaaagaagcgttagttaaagcgattggttgtggttttcgtgatggcgtacgtttccaggatattgaaataaagcatgatgcagccaaagcaccttatttcgttatttccggaagactacaagaaatttttatcgggcaggggttgcaaaataactccctgagtatttcgcattgccgtacccacgccattgcgactgtcatcgtttattaa

SEQ ID NO: 23749 - DNA, 1620 bp, Escherichia coli
atgcaattacgatttaattttggtttgctgctcattctttgttgttttcaggttgcagcgaaagacagtcttgataatttgatcaagcagcaaaaaaatgcagatgaaagcacgttgcgcgcgcataaattagaaaaaaaagatgtttactcaaatgcacaacgtaatgcgtttactctgggtgatctgccgcaggaaaagaattgctttatcattaatcggattgaactggaagataactttctgggtggtcagttgatttctgaagtgcaaaaagcgattgccggacgttgtgtcggtagtgctggtgtgcaaaaaattgcagctgccttgcaggattattatattaatgcgggatatatcacaacgcgaattagtatcccttcgcaggatatttctaaaggcaagctacgtttccaggttaatgccgggaagatagaaaaaacgattgtcgaaggtaatgatatcagtgaatggatgttaccttttcagcgtaacgatattctcaatattcgtgatattgaacaggggctggaaaatcttcagcgagtacctgacgttgatgtgaaaattaatattgaaccgggaacacgggatggttacagcatcgttcatattgatacacaccgggggaaaaactggagcgttcgggcaagttacaacaattggggcgatgaagaaacgggccgttaccagacaacctcggtgggttatctgtttaatccagcgaaaatgggggatctgttttatctcgccggtacgcgtagtactaccggacagtatgaaaacgtcagtagttattattccattccggtggggtactgggagtacggctttttctatagcaaaagtaaatcgcagcaggtgattccgctttcgtacatctcgctggattatgttggcatcagcgaatacttgagcgcaaaagcgacgcataccgtttatcgcgataaaacaaaaaagttcgccggtagtgcagaactcattcgacgaaagtcgaattacacgcttaatggtgaggagctgacattacaggcgcgggatatgggaaatatcaagctggggctaaattataagcaacagttacccggcgcgttctgggattcaaccctctcgtggcaacgctttttaacctggttcggtggtgaaaaaacgccggatatgcaatatggcgacgttagcccggtaagcaatatctttaattttgagggtaactatacccgacaaatagagaatggatattacaataccgctttttttgcccagtacgcaccgcgtgaactgactttgcaagataaaattacagttggcgatcgttggagtattcgcgggtttgaaaatagcgtaggtttgtcagggaatgatggtttttatataaaaaatacgctggcatttcctttgcctggaatgaaagctaattattatgccggtcttgattttgggcaagtgtatcaggacgcttcttatggcgatgaatcactggtgggctcggcagttggtattgatggaaacattaaaagtcttgagtataacttttccgtttctaccccattaaagtatccggcgacattagatattgatcgggtgaatgtaaattttaatttttcgtaccaaatgtaa

SEQ ID NO: 23750 - DNA, 3813 bp, Escherichia coli
gtggcgatgataaatttaagtaaggaagcaacggtggggaaagcattaacccctattgctatacttatgatgttgtcttttcctgtagcttctcaagcggcgggattagtcataaaaaatggaacggtatataacgccaatggtgtgccagtcgttgacatcaacaaacctaacggtagcggtttatctcataatatctgggataacctaaacgttgataaaaatggtgtcgttttcaataatagcgctaatgaatccagtacttcacttgccggaaatattcagggaaacagtaatctgacctccgggtcggcgaaggtgatcctgaatgaggttacttccaaaaatccttcaaccattaatgggatgatggaagttgcaggggataaagcggatctgattattgccaacccgaatggtattactgtaaacggtggcggttcaatcaatacaggtaaacttaccttaaccaccgggacgccggatatccaggatgacaagctggccggttactccgtgaacggcggtaccattacgctcggtaaactggataacgccagcccgacagaaattctgtcccgtaacgtggtagttaacggcaaagtgtctgccgatgagctgaacgttgttgctggcaataactatgttaatgccgcaggccaggtgaccggtagcgtatccgccacggggtcccgtaacggttacagcgtagatgttgccaaactgggcggaatgtatgcgaacaaaatcagtctggtcagcaccgagaaaggtgtgggggttcgcaacctcggcgttattgctgggggtgttaatggtgtcagcatcgattccaaaggtaacctgttaaacagtaacgcccagattcagtctgcaagcacgatcaacctgacaacaaatggtactctggataacaccaccggtacggtgacatctgtaggcactatctcgcttaataccaacaagaatactatcgtgaatacccgtgcgggtaacatctctacgatgggcgatatctacgttaacagcggtacgattgacaatactaacggcaagcttgcggctgcaggaatgctggcggttgataccaataacgccacgctgattaactctggtaaagggagttctgtcgggattgaagcggggctcgtggcgctgaaaaccggaacgctcaacaacagcaatggtcagattcgcggtggctatgtgggtcttgaatccgctgcgctgaataacaacaacggtgatatccagaccaccggcgatatcgccattatcagtaacggtaatgtggataacaacaaaggtctgatccgttcgtccaccgggcatatcgttattggcgcggcaggtagcgtaaataatggttcaaccaaaaccgccgataccggcagttctgactctctgggcattattgcagataccggcgtagaaattggtgcgaacaacatcaataacaacggcggacagattgcgtctaatggcaacgtctccctgtcaagttacagcacgatcgacgactatgcgggcaaaattctgtccaacagcaaagtgattatcaagggaagctctctgcgtaacgataccggggggatcagcggtaagcagggtattgaagtcgccgttggcggcagcctgaccaataatattggcgtgatcagctctgaagagggtgatatctccctgttagccaactccgtggataaccacggcggcttcatgatggggcagaacatcacgatggagtcgatgtctggcgtcaataacaacacagcgctgatcgtggccagcaaaaaactgaagataaatgcgcgcggcagtatcgaaaaccgcgatggcaataacttcggtaatgcttatggtctgtacttcggcatgcctcagcaaacgggtggaatggtcggcaaggaaggcatcgagctttccgggcagaacatctataacaacaacagccgtcttatcgctgaggatggtcctctgactctgcaggcgcagaacacgttcgacaacacgcgtgctctggtcaccagcggggcggatgcatctattcaggttggcggaacgtattacaacaactacgctaccacctggagtgcgggcaacctggatatcgacgcgaccacgctgcaaaacagcagcagcggtacgatgatcgataacaatgcgaccgggttcatagcatctgataaaaacctgtcactggaagtggtgaatagccttaccaactacggctggatcagcggtaaaggcgatgttgatgtcacggtgaataacggcaacctgtataaccgcaataccattgcggctgaaaaggggctggatattgccgcgttgaacggtattgaaaactggaaggatatttctgctggcggcgacctgacgatgaacaccaatcgccatgtgaccaacaactccaacagcaatatggtggggcagaatattgttattaacgcggttaacgatatcaacaaccgtggcaacattgtcagtgacgctgacctgaacgtgacgaccaaaggcaacctgtataactatctctatatggtagggtatggggatatcgcattgtcggcaaatagcgtggcgaacaataacgcgaccatcgaagcgacaggcgatctgattatcgattcgaagggtaacgtgggtaacaaccgcggtaatctgcatgcgttgaacggcgtgttgtctgttaaaggcaacaatctgaacaacgataacggtgaaattcgtggttatggcgatgtcacgctggcactgacgggcaactacgacagctataagggttcgctgacctctgaaacgggcgacgtgactctgacggcgaacattgtagacaacgcctatggtttgattgccggtgagaatgtttctgtcgatgctaaatcgacgatttacaacaacactgcgctgatcgcggcgaataaaaagctggttattaacgctggcggcaacctcgaaaaccgcgacgggaataacttcctgcgtaataacggcgcgctgtttggaattaccgacaacgttggcggcatcgtaggtaaagaaggtgtcacgctttctgctcagaacgtctacaacaataacagcagcatcatcgctgaaaatggtccgcttaatctgctgtccaggggaacgctggataatacccgcgcgcttcttagcagtggggctgatgccatcatccgtgcggcagggacgttctacaacaactatgccaccacgtacagcgccggtaatctcgacgtttatgcggcgtcgttgaacaacgccagcgatggtcgcctggaagacaataccgccacgggcgtgattgcgtctgacaaaaacctggatctgagcgttgataacagtgtcactaactatggttggatcagcggtaaaggagatgtgcatttcaatgttctgaaaggcacgctgtataaccgtaatgccatcgcggcggacaacgcgctgaccattaatgccctgaacggtgttgagaactttaaagacattgtggcgggtactgcgctgactattgatacgcagaagtatgttaccaacaacagcaacagtaatatgttgggacaaaccatcgcgatcaatgccgtgaatgacattaataaccgtggaaatattgtgggtgattattctctgggtgttaaaaccaccggtaatatttataactacctcaatatgctgagttatggtgtcgctggcgtatcggcaaataaggttacgaatagcggtaaagacgctgttctcggtggcttctacggtttagcgttagaagcaaacgaaactgataacaccggtactattgtcggcatgtaa

SEQ ID NO: 23751 - DNA, 624 bp, Escherichia coli
atgaacaagaacttactaacaagggtaattatcatttcggatgatctatattaccttcagggattaagtgcaaaactaggtcaccattatcgtttttttattgagtgttttttttgttctcaaaatgcatgcaataatgacctaagtacacttagatttgacaaccgctttacaaaaaacgtacttcttgtcgcagtggatgacgtaagtatacttgcaaaactgccagatttggccaggtttttaatgattgtttcactaagaaagatgaaaaacagaaatatcttcttttcactttcagagcaaacattcattagccgatatataaaattgaataaactcattactttgattaaaagtactgataaagaccagcaagtcaggcaggtgactctgacaaggtatgagtgggatatctattacttatattttaagatagataacaaaagaatattgcacaccctgctaaaaaaggatgtcaagtatattagtcactataaaatatcagtttttaacaagtttgaaattgcttgtgatagtgatggcttttacattttcaaggcacttatacagttaaggagatttaccggttttaaaaacgtcagattgtatcaattgcattaa

SEQ ID NO: 23752 - DNA, 561 bp, Escherichia coli
atgttttctactttcaaaaaagcagctctgctggcagctattgcattacctttttcaactatggctgcgcctacagtcacttttcagggtgaagtaaccgatcagacctgttccgtaaatatcaacggtcaaaccaattcagtagtattgatgccgaccgtagccatggctgacttcggtgcaactttagctgatggtcagagcgcaggccagacgccgtttacggtttctgtgtctaactgccaggctccaactggtgcagatcaggcaatcaacaccaccttcctgggctacgacgttgacgctagcacgggtgttatgggaaaccgtgataccagcagcgatgcggcgaaaggctttggcattcagttaatggattccagcacttctggtaacccagtaactctggctggcgcgactaacgtaccgggtctgaccctgaaagttggcgataccgaagccagctacgacttcggtgcgcgttacttcgttatcgatagcgctgctgccactgccggtaaaattaccgctgtcgcagaatacaccctgagctacctctaa

SEQ ID NO: 23753 - DNA, 702 bp, Escherichia coli
atgaacatttttgcatatttactggtacttgtattttccatgagcatgagcagcagcgcgtttgccagcgtggtaatgaccggaacccgtattattttccctggtgacgcaaaggaaaaaaccatccagttgcgaaataccagcgatcagccctatatcattaatatccatgttgaggatgaacgtggttctgacaagaatgtaccgtttatgccaaccccgcagacatttcgcatggaagctgccgcaggtcaggcgttacgcctgctctacactggtaataatttaccgcaggatcgcgagtctgttttctggtttagtttcagtcaactaccttatctgaataagaatgataaaagtcagaaccagctcatcctggccctgactaatcgagtcaaaattttctatcgtcccagctcgattgtcggtaaatccagtgacgcacccaaaaacctgacttaccaggtaaaacagaaccgcattgaagtgacgaatcccacgggctattacgtcacaattcgcgccgctgaactgcttaataatggtaaaaaagtccccctcgcgaattcggtaatgattgctcctcaaagcacaactgaatggacactaccctctggcatcagtgtcgctcccggtgcgcagatccatttagtgaccgtcaacgactatggcgtaaatgttacgtctgagcatgccttataa

SEQ ID NO: 23754 - DNA, 2523 bp, Escherichia coli
atgaataaatccgttgtgtcaatttctgcggcaatgttggttttactttgccaaccggtcatggggagcgaaatctcacccgcaacaccgtcagatgaagacaactacacctttgacccgcaactcttccgcggcagcagatttagtcagtcgtcattagcaaaactgacaacacgtgagtctgttgcaccgggcaattataaaatggatatctacaccaacaataagttgtcaggcagttggaatgtcacgtttaaagaagccgctgatggtcgcgttctgccctgcctgacgcctgaagtcgcggacgcgataggcctcaaaacaggggaagataagggggaaaaagatcctgtctgtacgtttgctaaggaactcgctcccggcatcaccagccagacacagttgtcacaattgcgcctggacttatcggtgccacagagtcaattgattagtcgccctcgcggctatgttccccccagcgagctggataccggagcatcgctggcgttcatgaattatattgccaactattacaacgttgcctattcagggcagaatgctcatagccagcgttcgctatgggcatcatttaatggtggcatcaaccttggtgcctggcaatatcgtcagttatccaacatgacctgggataatgacaaagggaatcagtggaacaatattcgtagctatttgcaacgcccgctgcccgccataaatagccagttaatgatggggcagcttatcaccagcggaagatttttctctggactcagttatcacggcgttagtctcgcgaccgatgaacgtatgctgccggactccatgcgcggctatgcgccgactattcgcggcgtggccgcaacaaacgccagagtctcggtaatgcaaaacggtcatgaaatatatcagaccaccgtggctcctggccctttcgagataaacgacctataccccaccagctacagcggcgatctggatgtcaccgttacggaagctaacggcgcagtcagtcgtttcagtgtccccttttcagccgtaccagaatcgatgcgtccaggaacttcccgttataacgtggaagtaggtaaaacgcaggatagtggtgatgactcgatgtttggtgaccttacctggcagcacgggatgactaatacgctgacatttaacagtggttcgcgtatcgctgatggctaccaggcgctgatgctgggcggagtctatggcagttcgctgggggcatttggggcaaacctcacttggtcccatgcgcgtgttcccgaaagcgaagcgcagagtggttggatgtcgcaattaacctggagtaaaactttccagcctacttcaaccaccgtctccctggcaggttatcgatactctaccagcggctatcgtgatctggctgatgtgctgggagagcgtcatgctgccagcaataaacagtcatgggactccagccagtggcgtcaacagtcgcgcttcgatcttacgttaagtcagagccttgcgaattacggcaacctgtttgtgtcaggttcaacacagaactaccgtggcggcaagagccgtgatacacagcttcagttaggttacagcaatagctttagccatggcatcagtatgaacctttccgtcggacgccaaagaatgggcggctataaagacaattctgatgatatgcagacggtaacatccctttcattctcattcccacttggcggcaatggacctcgtgtaccaagtcttagcaacagctggacccattcaactgacggtagctcgcaattacaaagctcgctaaccggaatgcttgatgaagcacagaccaccaactacagcctgaacgtcatgcgcgatcaacaatataagcagacgacgcttagcggaaacatgcaaaaacgtttttcacaaactaccgtcggattgaacgcatcgaagggccaggattactggcaggcttcaggtaacgtacaaggcgcgatggctgtgcatggtggcggcattactttcggaccttatctgggtgaaacgttcgccctggtcgaagctaaaggcgcagaaggtgcaaaagtctataactccagtcagctggaaattaatgacagtggctatgcgcttgttccggcagtaacgccctatcgctacaaccgtatatctctcgatccacaaggaatggatggcgatgccgagttggtcgacagtgaaagacaggtagcaccggttgcgggtgcggcggtgaaagtaattttccgtacccgtcctggtaaagcgttgctgattaaatcccgcatggcagatggttcggaactgccaatgggagccgatgtgctggatgagaataatacagtcgtcggtatagccggtcagggggggcaaatttacctccgcacagaacagacaaaaggccacttgtcagttcgctggggtgaaggtgctaacgatagctgccaattgccctttgatatcagcgggaaggacagcaatagccctatcatccgcctgaatgaaacctgtcagtcttga

SEQ ID NO: 23755 - DNA, 1335 bp, Escherichia coli
atgtctaaatcgacttttttacacattctgattagctccatcatattggtggcactaatacaatcatccgcttgggctaactgtacaaacacacagataggtcaaactgaagatggtcggacagcgcttattgagttcggaaaaattaatatgaccgacacctattttgcgccagcaggttcactcctcgcgacaacggtcgtacctcccactaactacacatcaggtggcgcgacaggaagctccgtattgtgggaatgtgatgcaacagatttgccaaacatctattttctggtcgctaccaatggcgacgaccgcgtggggggcttttacgatgcaggcgggcctgatggtctgagtgatgtctatgccacctggttcgcttttgtcggtctcaagcagaccatggcgggcgtgacgcttggtcgttactggaagaaagtgcccatcaccagttatgccactcagggaactaaaatccagattcgcttacaggatatccctcctcttcatgctgagctttatcgcatcagtacgctacctgatacatcagcaacaacaagttggtgcggtaataataatacagatagtagtggagtcggattcgcaaaaccttccggtacaatctataactgtgttcagcccaatgcctatattcagctttccggtaccagcggcattttatttggtcatgatgagcccggcgaagatagttctgttcattgggatttctggggtgctgataatggttttggttacggaatgcgttcggccaatcgactctacaacaatgccacctgcgttgcccgcagcgccacgccgttagtattgctgccgacaattgcagaagcacaactgaatgcgggcatggaaagtaccggtaattttaatgtccgcgtcgagtgtagtaactcggttcaatcagggattagcgatactcagacagcattaggaatccaggtgtctgaaggtgcatatacagcggcgcaaaaactggggattatcaatagcaacggcggcgtcagcgccctggtctctgataattatgacgcagcagagatggcaaagggcgttgggatctacatttctaacagtgctcaccccgatacggcgatgacgctggttggtcaaccgggcatcgcgaagttaacccccggaggaaatgcagcggggtggtatcctgtatttgaaggggcaacattagaaggtgcgactcaccccggatactccagctatagttactcttttatcgcccggttgaagaaactgccaaatcagacagtcagtgcgggaaaagtgcgggcaacggcttatatattggtgaaaatgcaatga

SEQ ID NO: 23756 - DNA, 690 bp, Escherichia coli
atgaaatccgttttgctgctcttaaccatcttgttcgtacagtcagtggaagccggcatcatgccggcttcttcacggattatttatcgcgatggcgatcgggaaaagacactgatgctggtcaataccaatgactatccggtactggtgcaaagttgggtagataatggtgaaggttccccagaagctgcttctcccccctttgtggtgctgccaccggttttccgcctggctgcgagacgaacccaggggttgcggattatctataatcatgacccacttccccaggatcgcgaatctgcattctggttaaatctttatgaaatgccgccagaaactccccatcaagatcccacacatttaacgctggcaatgaatacgcaacttaaaatcttttacaggccaaaatctgtaactatgacgccccaagaagctatgcgtaaaataagttggcatctgggtaacgacggcagcagtagctatattgagcttaataacccaacaccactgaatatctctttcacctccatcagcattggggctacaaaggtgcagcaagaaagcgatatgatgataaaacccttcagtcaacgacggtactggttagcaagtaataacgttagtggtgtggttgcggcgacatatctcgatgataatggtgcacagataaaacaacaattagcgcaataa

SEQ ID NO: 23757 - DNA, 783 bp, Escherichia coli
atgagcttttctattgaagatttttcattggattttttttcattacataacaaggtggccatcgtaactggggccgcgggtgagctggggagaggcttatgctcggctctggccaaagcaggggctaatctattgttggttgacatcaaagagcctgataatagatatttgaagcatttaactcatgaaggcgttgaagttgagtttatgacaatagacataacaaaacctgatgcatcatgcaccattattaataggtgtctggagcgtttcggtcagttagatattctggtcaataacgcgggcgtgtgtaacattaatcgtcctatcgatttcaatcgaaacgactgggatccgatgattaatctcaacctgaatgctgcattcgatatgagccaggccgcattgaatatatttgtcccgcaaagaaaagggaaaattattaatatgtgttccgtattgtcatttcatgggggacgttggtcgccagggtatgcggcgactaaacatgctttagcggggctgaccaaagcgtatgccgatgattttgcggaatataatattcagattaatggtatcgccccaggatattatgtgagtgaaatgaccgctattatttataataaccctaaaataaaagagttaataaaagggcgtataccggctcaacgctggggaagggcacaggatcttatgggcgcaatggtgttcctcgccagtgccgcttcagattatgtcaatggacaactattagtcattgatggtggatattcaattcgttaa

SEQ ID NO: 23758 - DNA, 813 bp, Escherichia coli
atgatctacattataaatgatgaagtaagattcaactcatcatctaataagttaacatcactccttacatcagaggaagtgatactcacttatcctgcgggaaaatgcttaaagttacttttagataacgcttatagtgtcgtgtcacacaatcaattctttgaaaaagtctggagcgatagcagtgccgatgtcgcaaccaacactttatatcaaaatatatcgatgataagacgttcttttcgtgaaatcagctcagcgacgatatttaatgatgttatcagaacggtgccccgtaaaggcttcaaaatcaatgaagaaatcagcataactgttctcgacaataatcacaatgagaatgaaagtgttgagagtgaagagaatggtacccacactgaaaatataaataaaaatcacattgcaaaaggtatatttaccacaaagaatacattacttatagtttgtttttttgcggcatgggggatagtgtatatatcttcttattttttcgatatggcttttcaaagcaaatcccacactataaaaaaaatagatgctttctcaaattatgctcaacaccctactcaggaaggatgcagttatttctatgataataaatactttaattccgtagacatgttatcaccgattattgaaaaattgcagaagatggaaattaactgcaaaatacatccttacatttacattgcaacaaatgatagcatgagcggattttatgctttcacctgtagtcagatgttaaactctgaatcaccaaataattgcaactctctctattataaagcggagtaa

SEQ ID NO: 23759 - DNA, 621 bp, Escherichia coli
atggcaatggacttacgcgatccgaatgtctggatatcgcacctgctggaaaacctgccggaagaaaaactggcatcggcgctgaaagatgacaacccggactgggagtatatcgacggcgaaatcgtcaagctggggtctctggcccacgctcagcttgatattcccgaactacaacgcagggggctacagcttctggcttctgaaagcaaagacttcaggctactggcacacctgctcagaaccctgcaacatgccggtgatccactgctggcactgcacctgctaacgctatacgtggaacattactggactgtggccgcgccgcagaatatggcgcataaaaaacgctttgccagccagatcattaaacgttttgaaacggtattgaaggcttttcacaaaacgctgccacaacgcagcgcgatactctgctgggtgagctggcgaaactggcgcagtgctggcagtcacataacgtcccggaactggcacaggctaccgatgatctttttgccctgtaccagcgtacgtttaatcgtgcggctcctgctccggtccccactccggcggcctccggtagttcaccacaaaccaccgtcacgtctgaaagcggcgtga

SEQ ID NO: 23760 - DNA, 3435 bp, Escherichia coli
ttgctgatactggcgtggatttttctgctggtatggatctggtggaaaggcccgacgtggacgctgtatgaagaacagtggctcaaaccactggcgaaccgctggctggcaacggcggcgtgggggattattgccctggtgtggcttaccgtccgggtaatgaagcgcctgcaactgcttgaaaaacagcaaaaacagcagcgcgaagaggccattgatccgctcagtgtggagctgaacgcccagcagcgttaccttgaccgctggctgctgcgcctgcaacgccatctcgacaaccgccgtttcctgtggcagttaccgtggtatatggtcatcggcccggcgggcagtggcaaaacgacactgctgcgcgaggggtttccgtcagacattatttatgccccggagggcgcgcgcggcacagaacaacgcctgtaccttacgccccatgtcggtaaacaggcggtgatctttgatatcgacggcacactctgcgctcccgctgatgcggatatcctgcatcgccgtctgtgggaacatgccctcggctggctgaaagaaaagcgcgcgcgccagccgctgaacgggattattctgacactcgatttacccgatctgctgaccgcagacaaacgccaccgcgagcatctgttacagacgctgcgcagccgcttacaggatatacgccagcatcttcactgccagttaccggtttacgtggtactgacccggcttgatttattacagggttttgccgccctgttccagtccctgaacagacaggatcgcgatgcgattctgggcgtcacgttcacccgccgtgcccatgaaaatgatgactggcgaacagagttgaatgctttctggcagacatgggtggatcgaatgaatctggcgttgccggatctgatggtcacccagactcacacccgcgcgtctttattcagtttttcccgccagatgcagggaagccgtgaaccgctggtgtcactgcttgagggtctgcttgacggtgaaaatatgaacgtgatgctgcgtggtgtctatctcacctcttcgcttcagcgcgggcagatggatgatatattcacccagtctgccgcccgccagtaccgactgggcaataacccactggcgtcctggcctctggtggacaccgcgccttatttcacccgcagcttgttcccgcaggcattactcgcagagcctaatctggcaacggagagccgcgcctggctgatgcgttcccgtcgccgcctgacggttttctctgccaccggcggcgtggcggcactgctgctcatcaccggctggcatcactattacaacggtaactatcagtccggcatcaccgtgcttaagcaggccaaagcctttatggatgtgccgcctccacagggggaagatgactacggcaacctgcaactgccgctgctgaacccggtacgcgatgccacactggcctatggcgactggggcgaccgcagccgtctggccgatatgggactgtaccagggacgacgtatcggaccttatgtggaacagacctatctgcaactgctggagcaacgttacctgccctcgctgtttaacgggctggttaaagcgatgaatgccgcgccgccggagagtgaagaaaaactcgcggtgctgcgcgtgatgcgaatgctggaggacaaaagcggacgtaacaatgaggtggtgaagcagtatatggcaaaacgctggagcgaaaagttccacggccagcgcgatatccaggcacaactgatgtcccatcttgactacgcgctggctcatactgactggcacgcagagcgtcaggcgggcgacggtgacgccatcagccgctggacgccatatgacaagcccgtggtatcagcacagaaagaactgagcaaactgcctgtctaccagcgggtttaccagagcctgaaaacgcgggcgctgggcgttcttcctgccgacctcaatctgcgtgaccaggtagggccaacctttgaccaggtgtttacatctgccgatgacaacaaactggttgttccacagtttcttacccgttacggcctgcaaagctattttgtaaaacagcgcgatgaactggttgaactgacggcgatggattcctgggtacttaaccttacccgcagcgtgaaatacagtgacgccgaccgcgcggaaatccagcgccagctcaccgagcagtatatcagcgactacaccgccacctggcgggccgggatggacaatctgaatatccgcaattttgagtccatcggacaactgaccggggcgctggagcaggttatcagcggcgaccagcctttgcagcgggcgctgaccgtgctgcgtgacaacacacagccaggcgtcttttctgaaaaactctctgccaaagaacgggatgaggccctggcagagccggactaccagttactcacccgtctcgggcatgagttcgccccggaaaacattaccctggcagtacagaaagacaaagaaagcacgatgcaggccgtgtatcagcaactcaccgagttgcaccgctacctgctggcaatccagaacgcgcctgtaccagggaaatcggcgctgaaagccgtgcagttacggcttgatcagaacagcagcgatccgatattcgccacccgccagatggcaaaaacgctgcctgctccgctcaaccgctgggttggcagactgactgaccaggcctggcatgtggtgatggtggaggctgtacattatatggaagtggactggcgcgacagcgtggtgaaaccgtttaacgagcaactggcaaataactatccgtttaatccgcgttctgcacaggatgcctcactggatgccttcgaacgcttctttaaaccggatggcatactggataccttctaccagcagaacctgaagctgtttatcgataatgacctgagtctggaggatggcgataacaacgtcattattcgcgaagatattattgcgcaactggaaactgcgcagaaaatccgtgacatcttcttcagcaaacagaacggtctgggaacatcctttgccgtggaaacggtatcgctttcaggcaataaacgccgcagtgtactgaaccttgacggtcagttagtcgattacagccagggccgtaactataccgcccatctggtctggcctaacaacatgcgcgaaggcaacgaaagtaagctgacgctcatcggcaccagcggcaacgcgccgcgcagtatcagcttcagcgggccgtgggcgcagttccgcctgttcggggccggacaactgaccggagtacaggatggcaactttaccgtgcgctttagcgtggacggtggcgcgatgacctaccgtgtgcataccgacacggaagataacccgttcagcggtgggttgttcagccagtttggtctgtcagacacactgtactga

SEQ ID NO: 23761 - DNA, 222 bp, Escherichia coli
atggctaacaatattttacactcttcaacatcagacagtgaaagcaaaaatacaagcactgacagtacgttatttaatgaaaaattcccatttcaactaagacaagatttcgcatcaagaataacagaagatgaaagtgatttttttaaatggaaaaaaataagagagttggcatttgtgagcaatcataaagaatggaataaatatgacttattaatttaa

SEQ ID NO: 23762 - DNA, 297 bp, Escherichia coli
atgattattataaatttaagattaacattactatttatactggccacatttacatattcagtacaatcagacgaattcgatgatcaaaccacttacacgcaataccgttatttttccactgctataccggaagatatacgtagatttatgttctacgtagattattgctttgtagatttagcattcgatatcgaaactgactcaatgacagctaagaatgatattattaatgaatgtactccattaaaagaaagaaacaagacattaaaagaaaaatataaaaaaatgaagagataa

SEQ ID NO: 23763 - DNA, 531 bp, Escherichia coli
atgaaccgattctcaaaaactcaaatttatttacattggataacgctgcttttcgttgcaataacctatgccgcgatggaactccgtggctggtttcctaaaggtagtagtacttatctgctgatgcgagaaacacattacaatgcgggtatattcgtttgggtgttaatgttttcacgcctgattataaaacaccgttatagtgatccttctattgtgccaccgccacctgcctggcaaatgaaagcggcttcgctaatgcacatcatgctttatataaccttccttgcgcttcctctgctggggattgctttgatggcttacagtggaaaatcgtggagtttccttggtttcaatgtgtctccctttgttaccccaaacagcgaaattaaagcactgataaaaaatattcacgaaacctgggcaaatataggctactttttaatcgtagctcacgctggcgcagcactctttcatcactacattcagaaagataatactctgttacgaatgatgcctcgccgcaaataa

SEQ ID NO: 23764 - DNA, 672 bp, Escherichia coli
atgactctggaggaaactgttttggcgattcgtcttcacaaactggctgttgctttaggtgtctttattgttagcgctcctgccttttcgcatggtcatcactcacacggcaaacccttaacagaggtcgaacaaaaagctgctaatggtgtttttgatgatgccaatgtacaaaaccgaacgctcagtgactgggatggagtctggcaatccgtttatcctttactgcaaagtggcaaacttgcccccgtctttcagaagaaagcggatgcagataaaactaaaacatttgctgaaattaaagattattatcacaaaggctatgcaacagatatcgagatgattggcattgaggacggcattgttgaattccatagaaataatgaaacaacatcctgtaaatatgattacgatggatacaaaatactcacctataaatcaggcaagaaaggcgttcgttacttattcgaatgtaaagatcctgaaagcaaagcccctaaatatatacaatttagcgatcatataattgcaccacgaaaatcatctcattttcacatttttatgggtaatgattcacagcaatctttattaaatgaaatggaaaactggccaacgtattatccatatcagttgagtagcgaagaagtggtcgaggaaatgatgtctcattga

SEQ ID NO: 23765 - DNA, 636 bp, Escherichia coli
atgcgtctgacagcaaaacaggtgacatggctgaaagtttgcctgcatcttgccggattgttgccgtttctctggctggtctgggcgatcaatcacggtggactgggtgccgatccggtgaaagatattcagcattttaccggtcgcactgcactgaaatttttgctggcgaccttgttaatcacacctctggcacgctacgcaaaacagccgttattgatacgcacacgccgcctgttaggcttatggtgctttgcctgggcgacactgcatttaaccagttacgcattgctggagctgggcgtgaataatctggcgttattaggcaaggagttaattacccggccttatttaacgttaggaattatcagctggattattttgcttgctttagcgtttacttcaacccaggcgatgcagcgaaaactcggcaagcactggcaacagttgcataatttcgtctatcttgtcgcgatcctggccccaatacattatctgtggtcagtgaagattatttcaccgcagccgctcatctacgctgggctggctgtactgcttttagccttacggtataagaagtcgcgttccctttttaaccggttacgcaagcaggttcacaacaaattatctgtataa

SEQ ID NO: 23766 - DNA, 1005 bp, Escherichia coli
atgaaaaagaatcaatttttaaaagaatcagatgttacggccgagtcggtattctttatgaagcgtcggcaggtgttaaaagcactgggcatcagcgcagctgcactttctttgcctcacgctgcgcatgccgatctgcttagctggtttaaagggaacgatcgcccacccgcccccgccggaaaagcgctggagttcagcaagcctgccgcctggcaaaataacctgccactgacgccagcagataaagtctccggttataacaacttctatgaattcgggctggataaagccgatcccgccgctaatgctggtagcctgaaaaccgatccatggacactgaaaatcagcggcgaagtggcaaaaccattgaccctcgatcacgatgatttaacccgtcgcttcccgctggaagagcgtatttatcgtatgcgctgcgtggaagcgtggtcgatggtggtgccgtggattggttttccgctgcacaaattgctggcgcttgccgaacccaccagcaatgcgaagtatgtcgctttcgaaacaatttatgcaccggaacagatgccaggccagcaggaccgctttatcggcggcgggctgaaatatccttatgtcgaaggattgcgtctcgacgaagcaatgcatccgctcacactgatgaccgtaggtgtttatggcaaggcgttaccgccacaaaatggcgcgccggtgcgactgattgtgccgtggaaatatggctttaaagggattaaatcgatcgtcagtattaagctgacccgcgagcgtccgccaaccacctggaatctggcagcgcctgacgaatacggtttttacgccaacgttaatccgcatgttgatcacccacgctggtcacaggctaccgaacgatttattggttcaggcggcatcctcgatgtacagcgccagccaacgctactgtttaatggttacgccgaccaggtggcatcgctgtatcgtggcctggatttgcgggagaatttctga

SEQ ID NO: 23767 - DNA, 414 bp, Escherichia coli
atgttaaagcgttatttagtactctccgtagtaacggctgcattttcattaccttctttggtctatgctgcacaacaaaacattcttagcgtgcacattttgaaccagcaaacaggaaaacccgctgccgacgtgacagtcactcttgaaaagaaagcggacaacggctggttacaacttaataccgccaaaacagataaggatggacgaattaaggcactgtggcccgagcaaactgcaactacgggcgattaccgtgtcgtatttaaaaccggggactatttcaagaaacaaaatcttgaaagtttcttccctgagatccccgttgaatttcatattaataaagtgaacgagcattatcatgtgcctttattacttagccaatatgggtattcaacctatcgtggcagttaa

SEQ ID NO: 23768 - DNA, 783 bp, Escherichia coli
atgagttttgaggatagcgaaaaagcgtccagggtaaccttacagcagcattacaattttgtaatgaaccaggctgtttctatgacatatgatttatggcatattattttcatgaagattttacttattgaagataatcaaaggacccaggagtgggtaacgcaggggctttccgaagcgggttatgtcattgatgccgtttctgatggcagagatgggctttatcttgcgctgaaggatgattatgcattgatcattctggatattatgcttccgggtatggatggctggcagatcttacaaacgttaagaacggcaaagcaaacccctgttatttgccttactgcaagggattctgtcgatgacagagtcagagggctggacagtggagcaaatgattatctggtaaaacctttttcattttctgagttgctggcaagggttcgggcacaattaaggcaacatcacgctttgaattcaacattagaaatcagcggcttaagaatggactctgttagtcaaagtgtgagcagggacaatatcagtattacactgacgcgcaaggagtttcagttactttggctactggcctccagagctggcgaaattatacccagaacggttattgcgagtgaaatttggggaatcaactttgatagtgataccaatacggtggatgtcgccattcgcaggctccgcgcaaaagttgatgatccttttcctgaaaagctaattgccacaatccgtgggatgggatattcgttcgtagcggtaaaaaaataa

SEQ ID NO: 23769 - DNA, 1359 bp, Escherichia coli
atgaaaagattatctataaccgtccgtttaaccttgctttttatattgctgctgtctgttgctggcgccggaattgtctggactctctataatggcctcgcaagtgagttgaaatggcgcgatgatacaacactcattaaccggacagcgcagatcaagcagttattaattgatggggtaaatccagatacgttacctgtatactttaaccggatgatggatgttagtcaggatatcttgatcattcatggtgatggcatcaataaaattgttaaccggacaaatgtcagtgatgacatgttaaataacatacctgctagtgagacaatcagcgcagctggcatttacagaagcattattaatgatacagagatagatgctttacgaattaatattgatgaagtttcgccatcattaacggttactgtggctaaattggcttcagccagacataacatgcttgaacagtataaaatcaatagcattataatttgcattgtcgccattatactgtgctcagtattaagtccgctgttaatccgaacggggttacgagagatcaaaaagttgagtggtgtaacggaagcgctgaattataacgatagccgggagcctgttgaggttagcgcattaccgagagaactaaaacctcttgggcaggcgttgaataaaatgcatcatgctttagtcaaagattttgagcgtctaagtcagtttgctgacgatctcgctcatgaacttagaacgccaattaatgcattactgggtcagaatcaggttacgctcagtcaaaccagaagtatcgctgaatatcaaaaaacaattgccggtaacattgaagagctggaaaatatttcgcggttaacagagaacatactgtttcttgccagggcagataaaaacaatgttttggtgaaactggactcgctttctctcaataaggaagtcgaaaatttgttggactatcttgaatatctttcagacgagaaagagatttgctttaaggtcgagtgcaatcagcaaatctttgcggataaaattttactgcaacgaatgttatcgaatcttattgttaacgctattcgatattcgccagaaaaatcgcgtattcatataaccagttttcttgataccaacagctatcttaatattgatatcgccagccctggagcgaaaattaatgagcctgaaaaactcttccgtagattttggcggggagataattcgcgtcattccgtaggtcagggacttggtctttctttagtcaaagcgattgccgaattgcatgggggaagtgctacgtatcactatctcaataagcataatgtgttccggattacgttgccgcaaagaaattaa

SEQ ID NO: 23770 - DNA, 852 bp, Escherichia coli
atgactgttcaaaccagtaaaaatccgcaggtcgatattgctgaagataatgcattcttcccttcagaatattcgcttagccaatataccagtcctgtctctgatcttgatggcgtggactatccaaaaccttatcgcggtaaacataaaattctggtgatcgccgcggacgaacgttatttgccgaccgataacggaaaactgttctcgaccggtaaccatccgattgaaacgttgctgccgttgtatcatctccatgctgcaggtttcgaattcgaagtggcgaccatttccggtctgatgaccaagtttgaatactgggctatgccgcagaaagatgaaaaagtaatgccattctttgagcagcataaatcgttgttccgcaatccgaagaaactcgcggatgttgtcgccagcctcaacgctgatagcgaatatgcagcaatctttgttcctggtggtcatggcgcacttattggtttacctgaaagccaggacgtagctgccgctttacagtgggcaatcaaaaatgaccgttttgttatctccctttgccacggcccggcggcttttctggcgcttcgccacggcgataatccactgaatggttattccatttgcgcattcccagacgccgcagacaaacaaacgccagagattggctatatgccgggtcatctcacctggtacttcggcgaagaactgaagaaaatgggcatgaacatcattaatgacgacatcaccgggcgagtacataaggaccgtaaacttctcaccggcgacagtccttttgcagcgaatgcgttgggtaaactggcggcgcaggaaatgctggcagcttacgcgggttaa

SEQ ID NO: 23771 - DNA, 576 bp, Escherichia coli
atgtccacttcctatgactttgactttggtttaagtctgggcgctgcttactctaactctgaccgtaccgacaatcaggttcacaaaggtactcataacactcgttatggagatcgcttcgatgcaactgctggcggtgaaacagcagaagcatggaccgttggtgctaaatacgacgctaataacgtttacttagcagctatgtatgctgaaccccgtaacatgactggttacggtgatgctgatgccatcgctaacaaaacccaaaactttgaagttgttgctcagtatcagttcgacttcggtctgcgcccgtccatcgcttatctgcaatctaaaggtaaggatttaggcggtgtaaatagtgataacttcgacagccagggtaatcatcattacaccaacaaagatctggttaaatatgttgatattggtatgacctactacttcaacaaaaacatgtccacttatgttgattacaaaatcaacctgctggacaacgacgacgacttctacaaagaaaacggcatcgctaccgatgatatcgtggctgtgggcttagtctaccagttctaa

SEQ ID NO: 23772 - DNA, 645 bp, Escherichia coli
atgaaaagaaaagttctggcaatgctggtcccggcgttattagttgctggcgcagcaaatgcggctgaaatttataataaagatggcaataaactggatttgtacggaaaagtagcgggcctgcactacttctctgatgatgctagcagcgatggcgacatgtcatatgcccgtatcggtttcaaaggtgaaactcagatcgctgaccaattcactggttatggtcagtgggaatttaacattggcgcaaacggtcctgaaagcgacaagggtaataccgcaacgcgtctggcatttgcaggtttcggctttggtcagaatggtactttcgactatggtcgtaactacggtgtcgtatatgacgtagaagcatggaccgatatgctgccagaatttggtggagatacctatgctggcgctgacaacttcatgaacggtcgtgctaacagcgtagcaacctatcgtaacaatggtttctttggtcaagttgatggtctgaactttgcactccagtatcagggtaacaacgagaaaagcggattatttgatcaagaaggttcaggtaacggtaatggacgtaaacttgctaaagagaacggcgacggttcagtatgtccacttcctatgactttgactttggtttaa

SEQ ID NO: 23773 - DNA, 696 bp, Escherichia coli
atggacttacaacactggcaggcacagttcgaaaactggttgaaaaaccatcatcagcaccaggacgcggcccatgacgtgtgtcattttcgccgcgtctgggctacggcacagaagctggcggcagatgatgacgtcgatatgctggtgattttaaccgcctgttatttccacgatattgtgagcctggcgaaaaatcatccgcaacggcagagttcttcaatcctggcggcagaagagacgcgtcgcctgctccgtgaagagttcgtgcaatttccggcggagaaaatcgaggccgtttgtcatgccattgccgctcacagtttcagcgcgcaaatcgcccccttaacaacggaagctaaaatcgtccaggatgcggatcggctggaagccctgggggcgattggcctggcgcgcgtgtttgccgtttcaggggcattgggcgtggcgctgtttgatgccgaagatccgctcgcacagcatcgcccgcttgatgataaacgctacgcgctggatcatttccagactaagttgttgaagctaccgcaaatcatgcaaaccgtaagaggcaagcagctggcgcagcacaacgcgcattttttagtcgagtttatggcgaagctcagtgccgaactggcgggggagaatgaaggtgtcgatcacaaggtgatagatgcgttttcacccgcgggctga

SEQ ID NO: 23774 - DNA, 1419 bp, Escherichia coli
atgcaggaaaatatatcagtaaccgattcatacagcaccgggaatgccgcacaggcaatgctggagaaactgctgcaaatttatgatgttaaaacgctggtggctcagcttaatggtgtgggtgagaatcactggagcgcggcaattttaaaacgtgcgctggcgaatgactcggcatggcaccgtttaagtgagaaagagttcgcccatctgcaaacgttgttacccaaaccaccggcacatcatccgcattatgcgtttcgctttatcgatctatttgccggaattggcggcatccgtcgcggttttgaatcgattggcggacagtgcgtgtttaccagcgaatggaacaaacatgcggtacgcacttataaagccaatcattattgcgacccggcgacgcatcattttaatgaagatatccgcgacatcaccctcagccataaagaaggcgtgagtgatgaggctgcggcggaacatattcgtcaacacattcctgaacacgatgttttactggccggtttcccttgtcagccattttcgctggctggcgtatcgaaaaagaactcgctcgggcgggcgcacggttttgcctgcgatactcagggcacgctgttctttgatgtggtgcgcattatcgacgcgcgtcgtccggcgatgtttgtgctcgaaaacgtcaaaaacctgaaaagccacgaccagggtaaaacgttccgcatcatcatgcagacgctggacgaactgggctatgacgtggctgatgcagaagataacgggccggacgatccgaaaatcatcgatggcaaacattttctgccgcagcaccgtgaacgcatcgtgctggtgggttttcgtcgcgatcttaatctgaaagccgattttactctgcgtgatatcagcgaatgtttccctgcacagcgagtgacgctggcgcagctgttggacccgatggtcgaggcgaaatatatcctgacgccggtgctgtggaagtacctctatcgatatgcgaaaaaacatcaggcgcgcggaaacggcttcggttatggaatggtttatccgaacaatccgcaaagcgtcacccgtacgctgtctgcgcgttattacaaagatggcgcggaaattttaatcgatcgcggctgggatatggccacgggtgagaaagactttgacgatccgctgaatcagcaacatcgtccacgtcggttaacgcctcgggaatgcgcgcgcttaatgggttttgaagcgccgggagaagcgaaattccgcattccggtttcggacactcaggcctatcgccagttcggtaactcggtggtcgtgccggtctttgccgcggtggcaaaactgcttgagccaaaaatcaaacaggcggtggcgttgcgtcagcaagaggcacaacatggccgacgttcacgataa

SEQ ID NO: 23775 - DNA, 471 bp, Escherichia coli
atggccgacgttcacgataaggccactcgcagcaaaaatatgcgcgcgattgccacgcgtgatacggcgattgagaagcgcctcgccagtctgttaaccgggcagggcctggcgtttcgcgttcaggacgccagtctgcccggacgcccggattttgtcgttgatgaatatcgctgcgtgatatttacccatggctgcttctggcatcatcatcactgctatctgtttaaagtgcctgcgactcgaaccgagttctggctggagaagataggtaaaaatgttgagcgcgatcgccgcgatatcagtcgcttgcaggaactcggctggcgcgtattgattgtctgggagtgcgcgttacgtgggcgcgagaagctgaaggatgaagcgcttaccgagcgtctggaagagtggatctgcggcgaaggagccagcgcgcagatcgacacgcaggggatacatttactcgcttga

SEQ ID NO: 23776 - DNA, 921 bp, Escherichia coli
atgcgtttccgccagttgttaccgctttttggcgcgctgtttgcgttgtatatcatttggggctcaacctattttgtcattcggattggcgtggaaagctggcctccgttaatgatggcgggtgttcgattcctggcagccggtattttattgctggcatttttactactgcgcggacacaaactccccccgctacgtccgctgctcaatgccgcgctgattggcctgttattgctggctgtcggtaatggcatggtgacggttgccgaacatcaaaatgttccttccggcatcgccgccgtagtggttgcaaccgtgcccctctttaccctgtgcttcagccgcctgtttggcattaaaacgcgcaaactggaatgggtgggtattgccattgggcttgccggaatcatcatgctcaatagcggtggaaatttaagcggcaatccgtggggcgcgattctgattttaatcggctcgattagctgggcgtttggctcagtttatggctcgcgcattaccttacctgtagggatgatggcgggtgcgattgagatgctggcggcaggcgtggtgttaatgatcgcgtcgatgattgcgggtgaaaaactgacggcgctcccttccctttcaggcttccttgcggtcggctatctggcgctgtttggttcgattatcgccatcaacgcttatatgtatttaatccgtaatgtcagtccggctctcgccaccagctacgcttacgttaacccggtggtcgcggtcttgctgggtacgggactgggtggagaaacactgtcgaagattgaatggctggcgctcggcgtaattgtcttcgcggtggtactggtcacgttgggaaaatatctctttccggcaaaacccgtagttgctccagttattcaggacgcatcaagcgagtaa

SEQ ID NO: 23777 - DNA, 918 bp, Escherichia coli
atgcttttggccgggagtagtttactgacgttgctcgatgatatcgccacactgctggacgatatctccgtgatgggcaaactggcggcgaagaaaaccgccggtgtattaggggatgacttatcgctcaatgcgcaacaagtttcaggcgtgcgggccaaccgggaacttcccgtggtctggggcgtggcgaaaggatcgctgattaataaagtgattctggtgccactggcgctgatcatcagtgcgtttatcccgtgggcgattacgccattgttgatgatcggtggcgcgtttctctgctttgaaggggtagagaaagtgctgcatatgctggaggcgcgtaaacataaagaagatccggcgcagagccagcagcgtctggagaagctggcggcgcaggatccgctgaagtttgaaaaggacaaaataaaaggggcgattcgtaccgattttatattgtctgcggaaatcgtcgccatcacgctggggattgtggccgaagcgccgttgcttaatcaggtgctggtgctttcaggcatcgcgctggtagtgaccgtgggcgtctacggtctggtcggggttatcgttaagattgatgacctggggtattggctggcggaaaaatccagcgcgctgatgcaggcattaggtaaaggattattgattatcgcgccctggctgatgaaagcgttatcgattgtcggcacgctggcgatgttcctcgtcggcggcgggattgtggtacatggtattgcgccgctgcatcacgccattgaacatttcgccgggcagcaaagtgcagtggtggcgatgatattaccgactgttttaaatctgattcttggatttatcatcggcggcatcgtggtgctgggagtgaaagccgtagcgaaaatgcgcggtcaggtacattaa

SEQ ID NO: 23778 - DNA, 183 bp, Escherichia coli
atgagctttatggttagtgaggaagttacggttaaagagggcggcccgcggatgattgtcactggatactccagcggtatggttgagtgtcgttggtatgacggttacggggtcaagcgggaagcttttcatgaaaccgagcttgttccaggggaggggagtcgttctgcggaagaagtttga

SEQ ID NO: 23779 - DNA, 1695 bp, Escherichia coli
gtgcagcacgagacaaaaatggaaaaccagagctggttgaaaaaactcgcacgccgcctagggcctggtcatatcgttaatctctgctttatcgtggtattgcttttttccaccttgctgacctggcgtgaagtagtggtgctggaagatgcctatatctccagccagcgtaatcatctggaaaacgtagccaacgcgctcgataagcatttgcagtataacgtcgacaaactgatctttttgcgtaatggcatgcgcgaagctctcgtagcgccactggatttcacctctctgcgtgatgctgtaaccgagttcgaacagcatcgcgacgagcacgcctggcaaatcgaactcaaccgacgacgcaccctgtcagtcaatggcgtatcggatgcattagtcagcgaggggaatctcctgtctcgcgaaaatgaaagcctcgacaatgaaattaccgctgcactggaagttggttacttgctgcgactggcacacaactcctcgtcgatggtagaacaggcgatgtatgtctcgcgtgccggattttacgtttcgacgcagccgaccttgtttacgcgcaatgtcccgacgcgttattacggctatgtcacccaaccctggtttatcggccattcacaacgagaaaatcgtcaccgcgcggtacgctggttcacttcgcaaccggaacacgccagcaatactgaaccgcaggttaccgtcagtgttccggtagacagtaataactactggtatggcgtgctggggatgagtattcccgtgcgtactatgcagcaatttttaagaaacgccatcgataaaaacctcgatggtgagtatcagctctatgacagtaagctgagatttttgacctcttccaatcctgaccatccaacagggaatatttttgatcctcgtgaactggccttgctggcgcaggcaatggaacatgacacgcggggcggcattcgtatggacagtcgctatgttagctgggaacgtctggaccatttcgacggtgtgctggtgcgcgtccatacgttaagcgaaggcgtgcgcggcgatttcggcagtatcagcattgcattaaccctgctgtgggcgctctttaccaccatgttactcatctcctggtatgtgattcgccggatggtcagcaacatgtatgttctgcaaagctcgttgcagtggcaggcgtggcacgacaccttaacgcgtttatataaccgtggcgcactgttcgaaaaagcccgtccgctcgcgaaattgtgtcagacgcaccaacatcctttttctgtcattcaggtcgatcttgaccattttaaagcgattaatgaccgctttggtcatcaggcgggcgaccgtgttctttctcatgctgccggattaattagcagttccttgcgtgcgcaggacgttgccgggcgggtcggtggtgaggagttttgtgtgattctgccaggcgcgagtctgacggaggctgcggaagtcgcagaacgtattcgcctgaagttaaatgaaaaagagatgttgattgctaagagtacgacgatacgcatcagtgcctcgttgggggtaagtagcagcgaggaaaccggtgattatgattttgaacaactccagtcactggccgaccgtcggctttatctcgctaaacaggctgggcgcaatcgggtattcgcgagcgataacgcttaa

SEQ ID NO: 23780 - DNA, 816 bp, Escherichia coli
atgttttcaattcaacaaccactactggtttttagcgatcttgatggcaccctgctggacagtcatagttatgactggcaaccggcagccccctggctcagccgtttacgcgaagcaaatgttcccgtcattctctgtagcagtaaaacatcagcggaaatgctgtacttgcaaaaaatgttggggctacaaggtttaccgctgattgcagagaatggcgcagtgatccagcttgctgaacaatggcaggagatagacggttttccacgcatcatctcaggtattagccatggcgaaatcagccaggttttaaatacgctacgcgagaaagaacattttaaattcacgacttttgatgatgtcgacgatgcaaccatcgccgaatggacgggattaagccgtagccaggcggcgctgacgcagcttcatgaggcgtcggtaacgctaatctggcgcgacagtgacgagcgtatggcacaatttaccgctcgtctgaacgaactgggcttacagtttatgcaaggtgcgcgcttctggcacgtcctggatgcctctgccggaaaagatcaggctgccaactggattatcgcgacctatcaacaattgtcaggcaaacgcccaaccacacttggcctgggcgatgggccaaacgatgcgcccttactggaggtaatggattacgcggtgattgtgaaagggctaaaccgtgaaggggtgcatctgcatgatgaggatccggcccgcgtctggcgaacgcagcgtgaaggaccggaaggatggcgtgaagggctggaccattttttctccgcccgttaa

SEQ ID NO: 23781 - DNA, 228 bp, Escherichia coli; identical to SEQ ID NO: 1612

SEQ ID NO: 23782 - DNA, 189 bp, Escherichia coli
atgaaggtgaatgatcgggtaacagtcaaaacggatggcggtccgcgtcgtcctggcgtggtactggcagttgaggagtttagtgaaggcacaatgtacctggtttcgctggaagactacccgctcggcatctggttctttaatgaagcagggcatcaggacggtatctttgtggagaaagcagagtaa

SEQ ID NO: 23783 - DNA, 624 bp, Escherichia coli
atgtcaacgattattatggatttatgtagttacacccgactaggtttaaccgggtatctgttgagtagaggggttaaaaaaagagaaatcaacgacattgaaaccgttgatgaccttgccatagcttgtgattcacagcgcccttcagtggtgtttattaatgaggactgtttcatccacgatgcttctaacagtcagcgtatcaagctcatcattaatcaacatcccaatacgttatttatcgtttttatggcaattgccaatgttcattttgatgaatatctattggtcagaaaaaatttattgatcagttctaaatcgattaaaccggaatctctcgacgatatccttggcgatattctgaaaaaagagacaacgataacctcgtttttaaatatgccgacgttatcattgagccgaaccgaatcgagtatgttgcgaatgtggatggcaggtcagggaaccattcaaatctccgaccaaatgaatatcaaagccaagaccgtttcatcgcataaaggtaatattaaacgtaagatcaaaacgcataataaacaggttatctaccatgtcgtccgactgacggataatgtgactaatggtatttttgtcaacatgcgctaa

SEQ ID NO: 23784 - DNA, 786 bp, Escherichia coli
atgttgcaggtgacaagcgaacaatggctatcctggttaagcctgtacttctggccgttactgcgcgtgctggcgctgatctccaccgcgccgattctgagcgaacgcagcgtaccgaaacgggtaaaactgggtctggcaatgatgatcacgttcgccattgccccatcattacctgccaacgatgttcctgttttttcgttctttgctctgtggctggccgtgcagcagatcctgatcggcattgcgcttggttttaccatgcaatttgcctttgccgctgtgcgaaccgctggcgaaattatcggtctgcaaatggggctgtcatttgcgacgtttgtcgatccggccagccatcttaatatgcccgttttagcgcgtatcatggatatgctggcgttactgctgttcctgacatttaacggtcatttatggttgatttcactgctggtcgatacctttcacaccctgccgattggtggcgaaccgttgaacagcaatgcgtttctggcactcaccaaagcagggagtttgattttccttaacgggctgatgctggcgttaccgctcattactctgctgctgacactgaatctggcattaggtttacttaatcgtatggccccgcaattatccatttttgttattggatttccattaactctgactgtcggcatctctttaatggcggcattaatgccgttaattgcgcctttttgcgaacatttattcagtgaaatttttaatttgctggctgatattattagtgaattgccattaatataa

SEQ ID NO: 23785 - DNA, 270 bp, Escherichia coli
atgacacctgaatcggtcatgatgatggggactgaagcgatgaaagtcgcgctggcactggctgccccgctattgttggtagcgttggtcacgggccttatcatcagtattttgcaggccgccacgcagattaacgaaatgacgctgtcgtttattccgaaaatcatcgccgtatttatcgccattattattgccggaccgtggatgctcaatctgttgctggattacgtccgcaccttgttcactaacctgccgtatatcatcgggtag

SEQ ID NO: 23786 - DNA, 738 bp, Escherichia coli
atgcgtcgtttattgtctgtcgcacctgtccttctctggctgattacgcccctcgccttcgcgcaactgccgggtatcaccagccagccgctgcctggcggtggacaaagctggtcgctcccggtgcagacgctggtgttcatcacctcgttgacgtttattccggcaattttactgatgatgaccagtttcacccgcatcatcattgtttttggtttattgcgtaacgcgctgggaacaccctccgcgccacctaaccaggtattgctggggctggcactgtttttgaccttttttattatgtcaccggtgatcgacaaaatttatgtcgatgcgtaccagccattcagcgaagagaaaatatcaatgcaggaggcgctggaaaaaggggcgcagccgctgcgtgagtttatgctgcgtcagacccgtgaggcagatttagggttgtttgccagactggcgaataccggcccgttgcagggacctgaagccgtgccgatgcgcattttgctcccggcctacgtgaccagcgagttgaaaaccgcatttcagataggcttcacgattttcatcccttttttgattatcgacctggtgatagccagcgtgttgatggcattggggatgatgatggttccccccgccaccattgctctgccctttaaactgatgctgtttgtactggtggatggctggcaattgctggtcggttcgctggcgcagagcttttacagctag

SEQ ID NO: 23787 - DNA, 366 bp, Escherichia coli
atgaataaccacgctactgtgcaatcttccgcgccggtttctgctgcgccactgctgcaggtgagcggcgcactcatcgccattattgccctgatcctcgctgctgcctggctggtaaaacggttgggatttgccccgaaacgcactggcgttaacggtctgaaaattagcgccagtgcttcgctgggcgcgcgtgaacgggttgtggtggtcgatgtggaagatgcacggctggtgctcggcgttaccgcagggcaaatcaatctgctgcataaacttcccccttcagcaccaacagaagagataccgcagaccgattttcagtcggtcatgaaaaatttgcttaagcgtagcgggagatcctga

SEQ ID NO: 23788 - DNA, 414 bp, Escherichia coli
atgagtgacatgaataatccggccgatgacaacaacggcgcaatggacgatctgtgggctgaagcgttgagcgaacaaaaatcaaccagcagcaaaagcgctgccgacgcggtgttccagcaatttggcggtggtgatgtcagcggaacgttgcaggatatcgacctgattatggatattccggtcaagctgaccgtcgagctgggccgcacacgaatgaccatcaaagagctgttgcgtctgacgcaagggtccgtcgtggcgctggacggtctggcgggcgaaccactggatattctgatcaacggttatttaatcgcccagggcgaagtggtggtcgttgccgataaatatggcgtgcggatcaccgatatcattactccgtctgagcgaatgcgccgcctgagccgttag

SEQ ID NO: 23789 - DNA, 1005 bp, Escherichia coli
atgggcgatagtattctttctcaagctgaaattgatgcgctgttgaatggtgacagcgaagtcaaagacgaaccgacagccagtgttagcggcgaaagtgacattcgtccgtacgatccgaatacccaacgacgggttgtgcgcgaacgtttgcaggcgctggaaatcattaatgagcgctttgcccgccattttcgtatggggctgttcaacctgctgcgtcgtagcccggatataaccgtcggggccatccgcattcagccgtaccatgaatttgcccgcaacctgccggtgccgaccaacctgaaccttatccatctaaaaccgctgcgcggcactgggctggtggtgttctcaccgagtctggtgtttatcgccgtggataacctgtttggcggcgatggacgcttcccgaccaaagtggaaggtcgcgagtttacccataccgaacagcgcgtcatcaaccgcatgttgaaactggcgcttgaaggctatagcgacgcatggaaggcgattaatccgctggaagttgagtacgtgcgttcggaaatgcaggtgaaatttaccaatatcaccacctcgccgaacgacattgtggttaacacgccgttccatgtggagattggcaacctgaccggcgaatttaatatctgcctgccattcagcatgatcgagccgctacgggaattgttggttaacccgccgctggaaaactcgcgtaatgaagatcagaactggcgcgataacctggtgcgccaggtgcagcattcacagctggagctggtcgccaactttgccgatatctcgctacgcctgtcgcagattttaaaactgaaacccggtgacgtcctgccgatagaaaaacccgaccgcatcatcgcccatgttgacggcgtcccggtgctgaccagtcagtacggcactctcaacggtcagtatgcgttacggatagaacatttgattaacccgattttaaattctctgaacgaggaacagcccaaatga

SEQ ID NO: 23790 - DNA, 465 bp, Escherichia coli
atgactgattacgcgataagcaagaaaagcaagcgatcgctttggatcccgattctggtattcattaccctcgcggcctgtgccagcgcaggttacagctactggcattcgcatcaggttgctgctgacgacaaagcgcagcaacgcgtcgtgccctccccggtcttctatgcgctggatacctttacggtcaatctgggcgatgcggatcgcgtgctttatatcggcataaccctgcgcctgaaagatgaagctacccgctcgcggctgagtgagtatttgccggaagtccgtagccgtttgctgttactgttttcgcgtcaggatgctgccgtactggcgacagaagaaggcaagaaaaacctgattgccgagattaaaaccacactttccaccccgcttgttgccgggcaaccgaaacaggatgtcaccgacgtgctgtataccgcttttattctgcgataa

SEQ ID NO: 23791 - DNA, 1128 bp, Escherichia coli
atgattcgcttagcgcccttgattaccgccgacgttgacaccaccacattgcctggcggcaaagccagcgatgctgcacaagattttctcgcgttgttgagcgaagcattagcaggcgagacaactaccgacaaagcggccccccagttgctggtggcaacagataagcccacgacaaaaggcgagccgctgatcagcgatattgtttccgacgcgcaacaagctaatttactgatccctgtggatgaaacaccgcctgtcatcaacgacgaacaatccacatcaacaccgttaaccaccgctcagacgatggcgttggctgcggtggctgacaaaaatacgacaaaagacgaaaaagcggatgatctgaatgaagacgtcaccgcaagcctgagcgccctttttgcgatgttgccgggttttgacaatacgcccaaagtgactgatgtgccgtcaaccgtgttaccggcagagaaaccaacgctcttcacaaaactgacttctgcgcaactcacaacagcacagcctgatgatgcccccggcacaccagctcagccattaacaccgcaggtagcagaagcccagagtaaagcggaagtcatcagcacgccttcgccggtgactgctgccgccagcccgctaatcactccacaccagacacagccactgcccaccgtcgccgcgcctgttttgagtgcaccgctgggttctcacgaatggcaacaatcattaagccagcatatttcgctgttcacccgccaggggcaacaaagtgcagagttgcgtctgcacccgcaggatttaggtgaagtgcaaatctccctcaaagtggatgataaccaggcgcaaatccagatggtttcatcgcatcagcatgtacgcgccgccctggaagcagcgctgccggtactgcgtacgcagctggccgaaagtggcattcagttagggcaaagcaacatcagtggcgaaagctttagtggtcagcagcaggccgcttcccaacaacagcaaagccaacgcacagtaaaccatgaacctctggcgggggaagacgacgatacgcttccggttcccgtctctttacaagggcgcgtaacaggcaacagcggcgttgatattttcgcctaa

SEQ ID NO: 23792 - DNA, 444 bp, Escherichia coli
atggcagaacatggcgcgctggcgaccctgaaagatctggcagaaaaagaggtagaggatgccgcgcgcctgctgggtgaaatgcgtcgcgggtgtcagcaggcggaagaacagctcaaaatgctgatcgattatcagaatgaatatcgcaataacctcaacagcgatatgagtgccgggatgaccagcaaccgctggatcaactatcagcagtttatccagacgctggaaaaagccattactcagcatcgccagcaacttaatcagtggacgcagaaagttgacattgccctgaacagctggcgagaaaagaaacaacgtttgcaggcctggcagacactgcaggaacggcaatccacggcggcactgcttgcagaaaaccgcctcgatcagaaaaagatggatgagttcgcccagcgcgccgccatgaggaaacctgaatga

SEQ ID NO: 23793 - DNA, 1374 bp, Escherichia coli
atgaccacgcgcctgactcgctggctaaccacgctggataactttgaagccaaaatggcgcagttgcctgcggtacgtcgctacgggcgattaacccgcgctaccgggctggtgctggaagccaccggattacaattgccgctcggcgcaacctgtgtcattgaacgccagaacggcagcgaaacgcacgaagtagaaagcgaagtcgttggctttaacggtcaacggctgtttttaatgccgctggaggaagtggaaggtgtcctgcccggcgcgcgggtttatgccaaaaacatttcggctgaaggactgcaaagcggcaagcagttgccgctcggtccggcgttattaggtcgcgttctggacggcagcggtaaaccgctcgatggcctgccctcccccgatacgacggaaaccggtgcgctgattaccccgccatttaacccgttgcaacgtacaccgattgaacatgtgctggacaccggcgtgcgcccaatcaatgccctgcttaccgttgggcgtgggcagcgtatggggctgtttgccgggtccggcgttggtaaaagtgtgctgctggggatgatggcacgttacacccgcgccgatgtcattgtcgtgggtttgattggtgaacgtgggcgcgaagtaaaagattttattgagaatatcctcggtgccgaagggcgtgcacgatcagtggtgattgccgctccggcggatgtgtctccgctcctgcgaatgcaaggtgccgcctatgccacgcgcattgccgaagattttcgcgatcgtggtcagcatgtgttgctgattatggactccctcacccgctacgcgatggcccagcgtgaaattgcgctggcgattggcgaaccacccgccaccaaaggttatccaccgtcggtgtttgccaaattaccggcactggtcgagcgtgccggaaatggcattagcggcggcggctcgattaccgcgttttataccgtgcttactgaaggcgatgaccagcaggaccccattgcagactccgcgcgggcgatcctcgacggtcacattgtgctgtctcgccgactggcggaagccgggcactatccggctatcgatattgaagcgtcgatcagccgcgcaatgacggcgttgatcagtgagcaacattacgcgcgagtgcgcaccttcaaacagctgttgtcgagttttcagcgtaaccgcgatctggttagcgtcggcgcgtatgccaaaggcagcgatccgatgctcgacaaagccatcgccctgtggccgcagctggagggctatttgcaacaaggcatttttgaacgcgcggactgggaagcgtctctccaggggctggagcgtattttcccgacagtgtcataa

SEQ ID NO: 23794 - DNA, 687 bp, Escherichia coli
atgtctgataatctgccctggaaaacctggacgccggacgatctcgcgccaccacaggcagagtttgtgcccatggtcgagtcggaagaaaccatcattgaagaggctgaacccagccttgagcagcaactggcgcaactgcaaatgcaggcccatgagcaaggttatcaggcgggtattgccgaaggtcgccagcaaggtcataagcagggctatcaggaaggactggcccaggggctggagcaaggtctggcagaggcgaagtctcaacaagcgccaattcatgcccggatgcagcaactggtcagcgaatttcaaactacccttgatgcacttgatagtgtgatagcgtcgcgcctgatgcagatggcgctggaggcggcacgtcaggtcatcggtcagacgccaacggtggataactcggcactgatcaaacagatccaacagttgttgcagcaagaaccgttattcagcggtaaaccacagctgcgcgtgcacccggatgatctgcaacgtgtggatgatatgctcggcgctaccttaagtttgcatggctggcgcttgcggggcgatcccaccctccatcctggcggctgtaaagtctccgccgatgaaggcgatctcgacgccagtgtcgccactcgctggcaagaactctgccgtctggcagcaccaggagtggtgtaa

SEQ ID NO: 23795 - DNA, 996 bp, Escherichia coli
atgagtaacctgacaggcaccgataaaagcgtcatcctgctgatgaccattggcgaagaccgggcggcagaagtgttcaagcacctctcccagcgcgaggtgcaaaccctgagcgctgcaatggcgaacgtcacgcagatctccaacaagcagctaaccgatgtgctggcggagtttgagcaagaagctgaacagtttgccgcactgaatatcaacgccaacgattatctgcgttcggtattggtcaaagctctgggtgaggaacgtgccgccagcctgctggaagatattctcgaaactcgcgataccgccagcggtattgaaacgctcaactttatggagccgcagagcgccgccgatctgattcgtgatgagcatccgcaaattatcgccaccattctggtgcatctgaagcgcgcccaggccgccgatattctggcgttgttcgatgaacgtctgcgccacgacgtgatgttgcgtatcgccacctttggcggcgtgcagccagccgcgctggcggaactgaccgaagtactgaatggcttgctcgacggtcagaatctcaagcgcagcaaaatgggcggcgtgagaacggcagccgaaattatcaacctgatgaaaactcagcaggaagaagccgttattaccgccgtgcgtgaattcgacggcgagctggcgcagaaaatcatcgacgagatgttcctgttcgaaaatctggtggatgtcgacgatcgcagcattcagcgtctgttgcaggaagtggattccgaatcgctgttgatcgcgctgaaaggggccgagcagccactgcgcgagaaattcctgcgcaatatgtcgcagcgtgccgccgatattctgcgcgacgatctcgccaaccgtggtccggtgcgtctgtcgcaggtggaaaacgaacagaaagcgattctgctgattgtgcgccgccttgccgaaactggcgagatggtaattggcagcggcgaggatacctatgtctga

SEQ ID NO: 23796 - DNA, 1659 bp, Escherichia coli
atgaatgcgactgcagcccagacaaaatctcttgagtggcttaatcgcctgcgtgcgaatccgaaaattccattgattgttgccggttccgcggcagtggcggtcatggtcgcactgatcctgtgggcgaaagcccccgactaccgcacattattcagcaatctttccgatcaggatggtggcgcaattgtcagccaactgacgcaaatgaatattccttaccgcttcagcgaagccagcggcgctattgaagttccggcagataaagttcacgagctgcgcctgcgcctggcgcaacaaggtttgcccaaaggcggcgcggtcggtttcgaactactcgatcaggaaaagtttggtatcagccagttcagcgaacaggtgaattatcagcgggcgctggaaggcgagctttctcgtaccatcgaaactatcggcccggtaaaaggggcgcgcgtacatctggcaatgccgaaaccgtctttattcgtccgtgaacaaaaatccccttctgcatcggtgacggtaaatctgttacccggccgcgcactcgatgaagggcaaattagcgccattgtgcatctggtttccagcgccgttgctggtctgccgccgggaaacgtcacgctggtggatcagggcggacatctgttaacccagtccaataccagctggcgcgatcttaatgacgctcaattgaaatatgccagcgatgtcgaaggccgtattcagcggcgtattgaagcaatcctgtcgcctattgttggtaacggtaatattcacgcccaggtcacggcgcaactggacttcgccagtaaagaacaaacggaagaacagtatcgccctaatggtgatgaatctcaggcggcgcttcgttcacgccagcttaatgagagcgagcaaagcggttccggttatccgggcggcgtaccgggggcgttgtcgaatcaaccggctcctgcgaataacgcgccaatcagcacgcctccggcaaatcaaaataaccgccagcagcaggcgagcaccaccagcaatagtgggccgcgtagcacacagcggaatgaaaccagtaactacgaagtcgatcgcactattcgtcataccaaaatgaacgtgggcgatgtgcaacgtctgtcagtcgcggtagtggtgaattacaaaaccttgccagacggtaaaccattgcctctcagcaacgaacagatgaaacaaattgaagatctgacccgcgaggcgatgggcttttctgaaaaacgcggtgactcgctcaatgtcgttaactcgccgttcaatagtagtgacgaaagcggcggagaactgccgttctggcaacagcaagcgtttatcgatcagttactggctgccggtcgctggttgctggtactgctggtggcgtggctgctgtggcgtaaagcggtacgcccgcagctaacacgtcgcgctgaggcgatgaaagctgtacagcaacaggcgcaggcccgcgaggaagtggaagatgcggtggaagtccgcctgagcaaagacgaacaactccaacaacggcgcgctaaccaacgtctgggggcagaagtcatgagccagcgtatccgtgaaatgtctgataacgatccgcgcgtggtggcgctggtcattcgccagtggataaataacgatcatgagtaa

SEQ ID NO: 23797 - DNA, 315 bp, Escherichia coli
atgtcagcgatacaggggattgaaggggttatcagccagttacaggctacggcgatgagtgcgcgtgcgcaggaatcactgccgcaaccgaccattagttttgccgggcagctgcacgccgcgctcgatcgcataagcgatacacaaacagccgcccgcacgcaggcagaaaaattcactctcggtgaacccggcgtggcgttaaacgatgtgatgaccgatatgcaaaaagcctcagtttctatgcaaatggggattcaggtgcgtaataagctggtggcggcatatcaggaagtaatgagcatgcaggtatag

SEQ ID NO: 23798 - DNA, 666 bp, Escherichia coli
atgaatttgtatggtatttttggtgctggaagttatggtagagaaacaatacccattctaaatcaacaaataaagcaagaatgtggttctgactatgctctggtttttgtggatgatgttttggcaggaaagaaagttaatggttttgaagtgctttcaaccaactgctttctaaaagccccttatttaaaaaagtattttaatgttgctattgctaatgataagatacgacagagagtgtctgagtcaatattattacacggggttgaaccaataactataaaacatccaaatagcgttgtttatgatcatactatgataggtagtggcgctattatttctccctttgttacaatatctactaatactcatatagggaggttttttcatgcaaacatatactcatacgttgcacatgattgtcaaataggagactatgttacatttgctcctggggctaaatgtaatggatatgttgttattgaagacaatgcatatataggctcgggtgcagtaattaagcagggtgttcctaatcgcccacttattattggcgcgggagccattataggtatgggggctgttgtcactaaaagtgttcctgccggtataactgtgtgcggaaatccagcaagagaaatgaaaagatcgccaacatctatttaa

SEQ ID NO: 23799 - DNA, 1449 bp, Escherichia coli
atgtctgatgcgccaataattgctgtagttatggccggtggtacaggcagtcgtctttggccactttctcgtgaactatatccaaagcagtttttacaactctctggtgataacaccttgttacaaacgactttgctacgactttcaggcctatcatgtcaaaaaccattagtgataacaaatgaacagcatcgctttgttgtggctgaacagttaagggaaataaataaattaaatggtaatattattctagaaccatgcgggcgaaatactgcaccagcaatagcgatatctgcgtttcatgcgttaaaacgtaatcctcaggaagatccattgcttctagttcttgcggcagaccacgttatagctaaagaaagtgttttctgtgatgctattaaaaatgcaactcccatcgctaatcaaggtaaaattgtaacgtttggaattataccagaatatgctgaaactggttatgggtatattgagagaggtgaactatctgtaccgcttcaagggcatgaaaatactggtttttattatgtaaataagtttgtcgaaaagcctaatcgtgaaaccgcagaattgtatatgacttctggtaatcactattggaatagtggaatattcatgtttaaggcatctgtttatcttgaggaattgagaaaatttagacctgacatttacaatgtttgtgaacaggttgcctcatcctcatacattgatctagattttattcgattatcaaaagaacaatttcaagattgtcctgctgaatctattgattttgctgtaatggaaaaaacagaaaaatgtgttgtatgccctgttgatattggttggagtgacgttggatcttggcaatcgttatgggacattagtctaaaatcgaaaacaggagatgtatgtaaaggtgatatattaacctatgatactaagaataattatatctactctgagtcagcgttggtagccgccattggaattgaagatatggttatcgtgcaaactaaagatgccgttcttgtgtctaaaaagagtgatgtacagcatgtaaaaaaaatagtcgaaatgcttaaattgcagcaacgtacagagtatattagtcatcgtgaagttttccgaccatggggaaaatttgattcgattgaccaaggtgagcgatacaaagtcaagaaaattattgtgaaacctggtgaggggctttctttaaggatgcatcaccatcgttctgaacattggatcgtgctttctggtacagcaaaagtaacccttggcgataaaactaaactagtcaccgcaaatgaatcgatatacattccccttggcgcagcgtatagtcttgagaatccgggcataatccctcttaatcttattgaagtcagttcaggggattatttgggagaggatgatattataagacagaaagaacgttacaaacatgaagattaa

SEQ ID NO: 23800 - DNA, 510 bp, Escherichia coli
atgtttttacattcccaagactttgccacaattgtaaggtctactcctcttatttctatagatttgattgtggaaaacgagtttggcgaaattttgctaggaaaacgaatcaaccgcccggcacagggctattggttcgttcctggtggtagggtgttgaaagatgaaaaattgcagacagcctttgaacgattgacagaaattgaactaggaattcgtttgcctctctctgtgggtaagttttatggtatctggcagcacttctacgaagacaatagtatggggggagacttttcaacgcattatatagttatagcattccttcttaaattacaaccaaacattttgaaattaccgaagtcacaacataatgcttattgctggctatcgcgagcaaagctgataaatgatgacgatgtgcattataattgtcgcgcatattttaacaataaaacaaatgatgcgattggcttagataataaggatataatatgtctgatgcgccaataa

SEQ ID NO: 23801 - DNA, 966 bp, Escherichia coli
atgaataagcaacgtatttttattgctggtcaccaaggaatggttggatcagctattacccgacgcctcaaacaacgtgatgatgttgagttggttttacgtactcgggatgaattgaacttgttggatagtagcgctgttttggattttttttcttcacagaaaatcgaccaggtttatttggcagcagcaaaagtcggaggtattttagctaacagttcttatcctgccgattttatatatgagaatataatgatagaggcgaatgtcattcatgctgcccacaaaaataatgtaaataaactgcttttcctcggttcgtcgtgtatttatcctaagttagcacaccaaccgattatggaagacgaattattacaagggaaacttgagccaacaaatgaaccttatgctatcgcaaaaattgcaggtattaaattatgtgaatcttataaccgtcagtttgggcgtgattaccgttcagtaatgccaaccaatctttatggtccaaatgacaattttcatccaagtaattctcatgtgattccggcgcttttgcgccgctttcatgatgctgtggaaaacaattctccgaatgttgttgtttggggaagtggtactccaaagcgtgaattcttacatgtagatgatatggcttctgcaagcatttatgtcatggagatgccatacgatatatggcaaaaaaatactaaagtaatgttgtctcatatcaatattggaacaggtattgactgcacgatttgtgagcttgcggaaacaatagcaaaagttgtaggttataaagggcatattacgttcgatacaacaaagcccgatggagcccctcgaaaactacttgatgtaacgcttcttcatcaactaggttggaatcataaaattacccttcacaagggtcttgaaaatacatacaactggtttcttgaaaaccaacttcaatatcgggggtaa

SEQ ID NO: 23802 - DNA, 402 bp, Escherichia coli
atgttacaacaggagcaacccgaagattttgtgattgcaacaggagtccaatactcagtccgtcagtttgtcgaaatggcagcagcacaacttggtattaagatgagctttgttggtaaaggaatcgaagaaaaaggcattgtagattcggttgaaggacaggatgctccaggtgtgaaaccaggtgatgtcattgttgctgttgatcctcgttatttccgaccagctgaagttgatactttgcttggagatccgagcaaagctaatctcaaacttggttggagaccagaaattactcttgctgaaatgatttctgaaatggttgccaaagatcttgaagccgctaaaaaacattctcttttaaaatcgcatggtttttctgtaagcttagctctggaatga

SEQ ID NO: 23803 - DNA, 297 bp, Escherichia coli
  misc_feature (284)..(293): n is a, c, g, or t
atgactaaagtcgctcttattacaggtgtaactggacaagatggatcttatctagctgagtttttgcttgataaagggtatgaagttcatggtatcaaacgccgagcctcatcttttaatacagaacgcatagaccatatttatcaagatccacatggttctaacccaaattttcacttgcactatggagatctgactgattcatctaacctcactagaattctaaaggaggtacagccagatgaagtatataatttagctgctatgagtcacgtagcagtttnnnnnnnnnnctga

SEQ ID NO: 23804 - DNA, 399 bp, Escherichia coli
atggttttggcaaaaaagctcggaattgaatcgaaaattaagatattagggcatatacctaaacttgaacaaattgaattaatcaaaaattgcattgctgtaatacaaccaaccttatttgaaggcgggcctggagggggggtaacatttgacgctattgcattagggaaaaaagttatactatctgacatagatgtcaataaagaagttaattgcggtgatgtatatttctttcaggcaaaaaaccattattcattaaatgacgcgatggtaaaagctgatgaatctaaaattttttatgaacctacaactctgatagaattgggtctcaaaagacgcaatgcgtgtgcagattttcttttagatgttgtgaaacaagaaattgaatcccgatcttaa

SEQ ID NO: 23805 - DNA, 567 bp, Escherichia coli
atggatcacacaaaacatagcattctatcttcattacaagataaagaagatgatgttgacgaacttaaatactccgccgaggactttgactccttaacagtagctgatttgtatgatatagaaatagcgatgcaagactttttgaatgatataaattttgaaaattctaaagataacaaagtgcgatttgacgaagatacatatgactttaatatcaatgggaaacgccgaggaatgtttggtaaaggtacccgtgcagtaatgcatgctatatttaccatttgctttgcggaatttttatcaagaaaagggaatccattcattggatttgttgtgcttgatagtccattagtgacgcactttgataaagatagagggggttctctatcggatgttaatagcgtcagtctcagtgattcattttatcacgcattaatcaaaagggactataatttccagattgtaattcttgagaataaaggtccgacgttccaaataaaaattaatgatgcaaataaaatccataacttaaataagaatggaagctctggtttttatcctgtttaa

SEQ ID NO: 23806 - DNA, 552 bp, Escherichia coli
atgatggcccgagtcactccagaccaagcgcttatcagttttagaaatgcccgtattctgtgggctggacatagtgagagccgaaaagccgttgaacaacagatagaatcactcctcactgccatggaaaaaccagcagattatgctcgacagctcgaattacagcgggaacatctggatgtgctgaaatggcaaattaactgtgctgcgcgcgaatgcatttactcgcagcatcaactgatggaggcctgcacagaagacgctctcagcaattttatgcaggcgaatggagcagccctgacatctgcactggctccgttcctgaaggggcgcggaggggttgacgttgcgtcccgtatattacgcaatgctctggttcgccagctggcaataacaccgcctgaaattgccggggattatcgtatgattctggatgaatccggtgtgatgcctgaccccatgatggttcgtgattgccagagctcttacacccctgcacaacaactgcgctttcagcaacgtctggattacattaacggcatgcaggagtaa

SEQ ID NO: 23807 - DNA, 261 bp, Escherichia coli
atgcgtaatatttctgtgtctgcgccagctcctgctgcgccattatttcctgtatcgaaccatcatgagcgatttttacgcctgcctgaggtgatgcacttatgcgggttgtcccgttcgaccgtttacgacctgatcagccgcgatgcgtttccgaagcagatcccgcttggcggtaaaaatgtcgcctgggcacagtctgaggtcagcgcatggatggcggaccgcatcagcgcccgtgggcggggatgtgatgcatga

SEQ ID NO: 23808 - DNA, 558 bp, Escherichia coli
atgatgatacctgcatacattaaatacctttattctggcttgcttactgtcgtcatttccaggtatagtttttccgctgtcgcaaaatcggcagccggaattggcgttccgtataacttattggcgacaattgacgccccttgcgtctttttttacgtcgtagctcaggcacaaccattttcagggctgtggtgtttatgcttacaccatggttctatcgagataatggtagtccgggcggggcagccttcgggctggccggtttccaataaggccggttacgccaaccccgttcgggctgccaccagtgaaattggcgtttccggtggtagcaataaccgctacttattggaggctgccatcatggctacaatcctcaccccgtcacacccgcaatatgtctttgtgtttgccgcaatccgccgtgctgacactcacccccgcatctgtatgcttcgcactgtctcctgcgatgagcgttccgcgcgccgtttgctagtccgagattatgtactctccctttctgcacggctgcctgccggggaggtgacgctatga

SEQ ID NO: 23809 - DNA, 222 bp, Escherichia coli
atgaaccagtttgagatttcctacgacgatgttgtaaggctgaaacatttacgcaatgtgggtgagtatgtaactggcatggcagccctgcaggactgttatgaaaagccagcaggtgcccaatgcgaacaactggtttccctcatttatctgatgacagagcaactggatggagtggtgcaacgctgccatgacgacctgatgaatgcggaggtggcctga

SEQ ID NO: 23810 - DNA, 324 bp, Escherichia coli
atgatatgctgtgaatctcttctggcacttcgtgccgctctgtatcgccgtgccgttgcctgtgcctggctggctctaagcaatcatcaggaacgttattccggcctgacgctcgctgaacttgaagatgccatagcccgcgagctggaagggttctatctgcgccagcatgggcagcaaagagggctggaaattgcctgcgcgttgctttcggatctgatggagtcggggccgcttaaagcctgtccggttctctcactgctcggaatgacggtcatggatgaactttgttcccgtcacctcaacaaaccagcgctgcactaa

SEQ ID NO: 23811 - DNA, 2334 bp, Escherichia coli
atgtcaggaatgaaagttagccaggctgagaaagcagctcggggtcactggtcaagaattttacctgcgctgggcgtaaatgtactgaaaaatcggcaccagccctgcccggtctgtgccgggaaagaccgctttcgatttgatgaccaggaagggcggggaacgtggttctgtaaccagtgcggggcaggtgatggcctggcgcttgtaagtaaagtactggatgtaggcattagtgaagcggcagacagaataaacggcattatcggaaacctgctgccagtatctcagggaatgcttgaatctggttctcctgaaaaagaggacgggagaaaagctgcagcagtgctggctgcccgtttgtttgataagtcccgccagaccactggcaatgcctatctgacgagtaaagggtttcctgcactgccttgccgggaattaaccgctatgcataaagtcggtggtgtggcatttcgcgcgggagatcttgtcgttccattgtatgcagatggagagctggtaaatctgcagttaatcaacgctaatgggggcaaatgcttccttaaaggcggtcaggttaagaatgccttttacctggttgaaggtactgccaaagcagccaaacggctctggatagcggaaggatatgccaccgcacttactatcaactatctgactggcgatgctgtcatggtggccttttcgtccgtcaatttcctttccctggcgagcattgcctgcagtgagtacccaacgcaccagataattattgctgctgaccgcgatctcaacggtgcggggcaaacaaggggcgcagctgttaccggggcctgcaattgcacaatggcgctcccgcctgtgtttggtgactggaacgatgcattcacgcaaaacggcgaagaagccacccggcatgcaattcatgaagtaataaaaccagctgttgccagccccttcgacacaatgagcgaagctgaatttaccgcgctgagcgtcagcgaaaaagcgcagagggtagtggatcactataaaaattcactggcagtagacccgaacgggcagctcctttcacgctatgaggcgggggcctggaaagttatctattacgccgattttgcccgtgatgtcgctgcgctgtttcagcgcctcgacgcacctttttcatccgcgaaaattgcgtctctcgtggaaaccctcaaactgatcgttccgcaacagcagaatccggcgcggcaacttatcggatttcgcaacggtgtgctcgatacccggacaggattgttcagcccgcacgataagaagcactggttacgtacgctgtgcgaggtggattacacgcagcccgttgacggtgagtcactggaaacccatgccccggcattctggcgctggctggatcgtgccgcaggttttaatcctgaaaaacgggacattattctggctgcattgtttatggtgctggctaaccgttatgactggcagctgtttctggaggtcactggccctggcggaagtggaaagagtattcttgctgaaatagcaaccatgctggcgggtgaagataacgcgacctcggcaaccattgaaatgcttgagtcgccaagagaacgagctgcgttaataggtttttcactgattcgacttcccgaccaggaaaagtggagcggtgacggggccggactaaaagccatcactggcggcgatgcggtatccgttgatcccaaatatcagaacgcctattcaacccacatcccggcggtcatcctggctgtgaacaataatccgatgcgcttcactgatcgtagtggtggagtttcacgccgaagggtgatcctgcatttccccgaccagatagccccggaggaacgcgatacccagctcaaagagaaaattgccagtgagctagcggtgattgttcgccagcttatgcagcgtttcagcgacccaatgagtgccaggacattgcttcagtcacagcagaactccgatgaagcgctcaccatcaaacgtgatgctgattcagcttttgatttttgcggctaccttgaggtcctacctgacaccacgggcatgtttatggggaacgctaatattgttccacgtcagcctcgaacttacctctaccatgcctatctggtctacatggaggctaacggctataaaaatacgctcagtctgaccatgtttggcaaggggctaccgttaatgctcaaggaatatgggctgcagtatgagaaacgacggaccaatcaaggaatgcagactaatctggccctaagagaggaaagcaatgctgactggttgccaaaatgcgatgagtttgcagcgaaataa

SEQ ID NO: 23812 - DNA, 957 bp, Escherichia coli
gtgactagttattcaaacttttccaatcaaataaaagaaaccatcaataataaattcgatcatgaaattcatgattgggacattataaaaaactcaatcacaactttaataaataaaaatatccatggtgcaggtagaaatatcgttgattttatagatttaggtaactgggattttatttcaaacttttcctttgatgactctacaagaagacttgaattagagtggcaccccaatgataaattccatatatatattgagtccgttgtgtttgtcgagtttaatgacactatatatgctttcttaaagggatactatcacaatcagttatctctaaatagaatatataatacaaaatgctcttcatgttcatttgaaaactcaggttcttatatggtagacgtttatagaacggttaaaagagtaaatgagacaatccagaccccaaatataaattgctatactacatgtattttaacaaggcccgcaaatggtcatgttacatctacaggcttctcacgaaacctcatggatgcgataaatatttcattagcagagcacaaaatagcctctttacataatgaagtcatgagtattgaggaatatgatcgtgattctttacaagagaaaggaaatactgccaggagatatttagaatatattctcatgcttgttaatattcgtataatgcatttaaacaacgttcaataccaagagcaaatgctaggtagtttagtttctgttattgaggctctggactatgaaccattaatgaaaaatgatgttgaaattacaaaggacatccttaatgcttgcagccaccacgggggggttagaattgaaaagaaagatgtaattttttctttggaagttattgaaaacttaattaaagccataaagaaaaccgacataaataaattacaactcgatgggatgtttaaatcaattcaaaaataa

SEQ ID NO: 23813 - DNA, 279 bp, Escherichia coli
atgtctttatatataaaactcatcctctcaattgtcagggaaattagcgtgaatactatctgttctttaattgttgtggttgcactgtctttattatcattcagtagcgtcgccaaaacgattactgccgtcggttcaaccattaacagcactgaaaaagaaatttctttacaggcagaaaaacaagggaaatcatataaaattctgggcgcgttttttaagaacagagtttatatgatagcaaagttaacaccagtcagtaaaaatgatgcttcataa

SEQ ID NO: 23814 - DNA, 2199 bp, Escherichia coli
atgaaatttgataaacccgcaggggaaaacccgatcgatcagctgaaggttgtcggtcgtccccatgaccgcatcgacggaccgctgaaaactaccggcacggcacgctacgcctacgaatggcatgaagaatcccccaacgccgcctatggctatatcgtcggttccgccattgccaaaggacgcctcaccgcccttgatacggacgccgcgcaaaaagcgccgggcgtactgcctgtcattaccgccagtaacgccggggcactcagtaaaggcgacaaaaacaccgccaggctgttaggcggccccactattgagcactatcatcaggccattgctctggtagtggccgagaccttcgaacaggcgcgagcggcggcctcgctggtgcaggcgcactatcgccgtaataaaggagcttactccctggcggacgaaaaacaggccgtcagtcagccgccggaagacacgcccgacaagaacgtcggtgactttgacggggctttctcctccgctgcggtgaagattgatgctacctacacgaccccggaccagagccatatggcgatggagccgcatgcctcgatggccgtctgggatggaaataagcttactctctggacctcaaatcagatgattgactggtgccgcaccgatctggcaaaaacgctgaaagtgcccgtggagaatgtgcgtattatctccccgtatatcggcggagggtttggcggcaagctgttcctgagaagcgatgcgctgctggcggccctcgccgcccgagcggtgaaacgtccggttaaagtgatgctcccccgcccctctattcccaataacaccacgcaccgccccgccacccttcagcacttgcgtatcggtgccgaccagagcgggaaaatcaccgctatctcacatgaaagctggtctggaaacctgcccggcggcacgccggaaacggcggtacagcaaagcgaattactctacgccggggcaaaccgtcataccggcctgcggctcgccacgcttgatttgccggaagggaacgccatgcgtgcgcccggcgaagcccccggtctgatggcgctcgaaatcgcgatcgacgaactggcggaaaaagcgggcatcgatcccgtcgagtttcgcatcctgaatgacactcagattgaccccgccgacccgacgcgccgcttctctcgccgtcagcttatcgagtgcttgcgcaccggagcggataaatttggttggaagcagcgcaacgccacacccggacaggtgcgcgacggggagtggctagtcggccacggcgtcgcggcgggctttcgcaataatctgctggaaaaatcgggggctcgggttcacctcgaaccaaacggcaccgttaccgtggaaacggacatgaccgacattggcaccggcagctacaccattctggcccagacggcagcggaaatgcttggcgtaccgctggagcaggttgcggttcacctcggcgattccagtttcccggtttctgcgggttctggtggacaatggggcgcgaatacctccacctccggcgtttacgccgcctgtgtgaagcttcgcgaaatgattgcctcggcagtcgggtttgatcctgagcagtcgcagtttgccgacggcaagattaccaacggtacccgaagcgccatactacatgaggccaccgcaggcggcagactgacagcggaagagagcattgaattcggaacactgagcaaggagtaccagcagtcgacctttgccgggcattttgtggaggtcggcgtgcatagcgcgacgggagaagttcgggtccggcgtatgctcgctgtgtgtgctgcaggacgcatcctgaatccgaaaactgcacgcagccaagtcattggcgcaatgactatgggcatgggcgcggcactgatggaggagctggcggtggatgaccgtttgggctacttcgttaatcacgatatggcggggtatgaggtgccggtccatgcggatatcccaaaacaggaagtgattttcctggatgataccgaccccatatcctccccgatgaaggccaaaggtgtcggtgagctgggcctgtgcggcgtgagcgcggctatcgccaacgcggtgtataacgccaccggtattcgggtacgcgattatcccatcactctggataagctgctcgataagctgccggatgtggtttaa

SEQ ID NO: 23815 - DNA, 192 bp, Escherichia coli
atgcaggctgcgtcgcaaagggaggaaactgagtggcgtgttcagtctaaaagagggttgatgccagcatacaggggcgaagctggtcaacaagtcaacattaatataatggaatattcggagagaaacgtcaggcagttgaccttaaatgaacaggaagatacatccccaggaaaattaatgctggtgtaa

SEQ ID NO: 23816 - DNA, 171 bp, Escherichia coli
atgcttcaaattattagaggcaaacttgtcatttttttaattaccctttgtttatttgttgtttaccttgggtttgataacaattcaaattctgacatcgtattttatggacataaaacaccaaagagcgttgagatatatctttctgaaaaaatattatttataaaataa

SEQ ID NO: 23817 - DNA, 555 bp, Escherichia coli
atgatttacccaacgaacacaggaaaaagcggagagcaccttcgtctcaccacgctggaaagtgtctggattcaggggaaactacgtatgtgggggcgctggtcgtatattggcggcggtaagacgggaaatatgttcaaccagttgctgacctctaaaaagctgacaaaaacggcaattaacgaggcgctccggaggatgaaaaaagcaggtctggacaaacctaaacttgaggcttttttgcgggatatgatcaacggcaagcaaaaaagctggctggtgcattgtaccgattcagaggcgttaataatcgacagggttattggtgaagtactggcaggttatcccgggctgctcaatgttctgagtcagcgttatgtggggcgggggatgactaagcgcaaaatggctgaactgctgaatgatgcacatccggaatggagtttaagaacctgtgaaagacgcattgagcattggctaaaggtggcagaatttattttgtacaaaccaatggttatggcttttggtatagagaaaaaagttattgctttttga

SEQ ID NO: 23818 - DNA, 1392 bp, Escherichia coli
atgactgagaacacgactccaacagcagactttagtcctagtaaaagattttttgtaagtatgctaactcgagatatcgacttaaacgatgccatacttgatctgcttgataactgcgtcgatggggctttacgtacaataaaagacacaaaaaaaacttcaaaaccatatgaaggattttatgcgaaacttacgattaataaagatgtctttattatagaagacaattgcggaggtatccctaaaagcttccgagaatatgcttttaaaatgggacgaccccatcaaaaagaagaagaaaatgaaggcaccgttggcgtctatggtattggtatgaaaagagccatttttaaaatgggtagagattgctcaatacaatcgaataatcccgatggcgcattcactgtagatataacacctgattggatcgatggtgatggttggaaaataccgatgcacgagagtgactatgataacaaaaatccaacaggcacaactatagagataaaaaaactccattctaatgtggcacaaaaatttaatgagagcacatatcttactgatctctttttacagataaaacactcattgtcatttattattcaaaaaggatttaaaatagaattaaatggagttgttgttgaacataatccgattaacatcataactgatcattctaaaatagaaccatacatatataaagctaaaatagacgatgttgatatcgatttagttgttggcttctataaaaatttagaagatgacaatgatgatgttttagaaaaaaggagttctgatgatgctggatggactgtcatttgcaatgaccgcgttgttctatattgtgataagacacatctcacaggttggggctttgctaatgtaccaaggtttcatacccaatttatagcaatttctggggttgttcgctttaccagtaaaaacccagaaaaattaccaataacaacaacgaaacgaggtgtcgatcttagttctacattgtacaatgatgtacgaaataaaatgattgaagggatgatgcattttattcgattcaccaatcagtggaaaggtgagcatcttgaagaagggaaaaaattacttaagtcagctcagtcacatgaagctcaatctttatttgaaattaccccacaatcaactccagaagataaaaaaaataactggtccaaccctaatagaaacaaaaatgagtggcgatatacacctaagctgcctaccccagtaaaaaaaagctctactgtacgaataatcttcaccagagagaaagaagatgttaaaattttatctaaatatttctttggacatgaagatgctagcgcttctgatgtggggatgcaatgctttgatacggtgattgaagaggtgaagtga

SEQ ID NO: 23819 - DNA, 990 bp, Escherichia coli
atgtctggacaatacattccctatcacttaaggcataataagtctattgatagagagatttttctcgaaagcctaaacctcttaagcaaaagactaaatattcaagaatatacatatataggttttggtggtccgatgcttgaagattttagaatcatgcataatcgtatcgctctttctgatatgatttctctcgaagaacaagagtctactcacatcagacaaaaatataatttgccttataattgtattgattgtaagctaatatcagctcatgactttattcttgattatagtttttctaaaccatcaataacatggttagactatgcctccccgaaaaaaatacaaacggatctagatgatatacacttactaagtactaaagtaagctcttttgatattttgaaggtcaccttccccataaatcctagttcttattaccaacgtagagttggagaaagtttagatatttttaaagaagcttttattaattcattaaaatcattgcttgggaaaaagtatcttgattttaatcttcagatatcaaatgcagatctttcagatcgtaagattaaagctcttttaatacgaattattacaaacgcttttagatcagcaatagaacgtggtctttcaggacgtaaggataagattcagtattacccattatccttaaatcaatataatgatggcagtcataccatgttgacaatatcaggttttttctcctcagaacaagaatatatagagttatctaaggcatgcgacctttctaactggcaattttattcaacaaattgggaagacgtgcaagaaatagcaataccaacactaacaattaaagaaaagataaatttagatagtaaactgcctgataaagaagcatatcaggcagccgctgaagagttctctttaaacgaaaatgaacgggataactattataaatactataggttataccctaacttccaaagaattatggtttaa

SEQ ID NO: 23820 - DNA, 1152 bp, Escherichia coli
atgaatgtaatagatttgttttctggcgttggaggtctaagtcttggtgctgcacgtgctggatttgatgttaaaatggcagttgaaattgatcaacatgctattaatactcacgcaattaattttccaagaagtttgcacgtccaagaagatgtttctttactaaatgcagaaataattaagggtttttttaaaaacgatatgcccatagatggtattattggcggtcctccgtgccaaggatttagttcaataggcaaggggaatcctgatgatagcaggaatcagctttacatgcatttctaccgtttagtatcagaattacagccattattctttttggcagaaaatgttccaggtattatgcaagagaaatattctggcattagaaataaagcatttaatttggttagcggtgattatgatattcttgatcccatcaaggtaaaagcatctgattatggtgctccaactattcgaactagatatttttttatcggtgtaaaaaaatcattgaagcttgatatttcagatgaagtatttatgcctaaaatgattgatccggttactgtaaaagatgctttgtatggattaccagatattatcgatgccaattggcaatcagactctgagagttggcgaacaattaaaaaagatcgaaaagggggattttatgaaaaattatgggggcagatccctcggaatgttggtgatacagaatcgatcgctaagttaaaaaataatatcatatctggatgtaccggaacattacatagcaaaatcgtccaagagcgttatgcttccttatcttttggggaaactgataaaatttcaagatctacaagattagatccaaatggtttttgcccgactttaagggcgggaaccgctagagataaaggaagctttcaagccgtcaggccgatccacccttatcatccaagagtgattacaccaagagaagctgctagattacaaggcttccctgattggtttcgctttcatgtaactaaatggcatagtttcagacaaataggaaatagcgtgtcaccaatagttgctgaatatatattaaaggggctgtacaatttattaaataaaagagtacagcccgaatatttaaaccataattctttggaagttagggtataa

SEQ ID NO: 23821 - DNA, 162 bp, Escherichia coli
atgaccactattaccaaagaacgtattgaattgttcattaaaaatccggttgaaaacgggcttacccgtggtgaacaaatggaactggcacggattgcgctggcatcgctggaagcagagccagttggtgatttttatgaatacaaaccggatgactggtag

SEQ ID NO: 23822 - DNA, 264 bp, Escherichia coli; identical to SEQ ID NO: 23123

SEQ ID NO: 23823 - DNA, 285 bp, Escherichia coli
gtgaacatcaacaccacgataacgatcgatacagccctgaacaccggcctagcgctccttggttatttctacatcatgttctgcagcggacgatggctgtcactgttgttcatgaaaaaatggaataaacgccgtaagcaggagcaacgccaaaaggcaatagatgcatttttcgaagccttcggtattgacggcatggaaccaggggatccagctcgcgcaattagcagagggggcgtagtaatccttgtataccggagtgaagagaaaaatgagcaagattga

SEQ ID NO: 23824 - DNA, 222 bp, Escherichia coli
atggcagatatcatcgacaacgccgctgaaatcgaagaattgcagcgcaatctctccctgcaaaaatacaaatccgatagtaatgccccatctgctactcattgttgcgagtgtggcgatccgatagatgagcggcgacgcctggctgttcgtggatgcagagcttgcgccagttgccagcaggatattgaacttatcaacaaacagagaggtgtgaagtga

SEQ ID NO: 23825 - DNA, 630 bp, Escherichia coli
atgaccagtcaactcatccccgtattcaacggcactatcgccaacgaaaccactcttctcgttaatgcccgtgatttacatacttttcttggagtaggtaaacgctttgcatcgtggattacagaacgtattgaagagtacggattcgttgaaaatcaggactatatagctatttcccagaaacgggaaataggttatgggcgagggaaaaaagactaccaccttaccctcgatacagccaaagaaacggcgatggtagagcgtaacgaaaaaggccgacagatacgcagatacttcatcgagtgcgaaaagaaacttcgcaacatgcagtcggcacaagcagaaccacagcaacaattcacagacgaggaaatcatcctcctctgctacatgcaactctggatggaaaaagcccaggacctcagcaaacacctgtatccgatcatgaaagagctgaactcctcatacacgaacaagctgtatgacattgcgtttgagaccatctacatggtgacgaagaacagagatgtgctactgagagaggcggcacggcttgaccagtcgagtttcgtagttcagcgggccagaccaatgctgaaaagcctgcgggcaaggcaattcgaattctaa

SEQ ID NO: 23826 - DNA, 270 bp, Escherichia coli; identical to SEQ ID NO: 23612

SEQ ID NO: 23827 - DNA, 396 bp, Escherichia coli
atggaaaatgaaggcgataatatcatcacactggtgcagccaaagcgcgatgaagagaagctgctgaacattacagtaactggcagaaaaaactacacacaacagagctgtaagcatcgggccattgaggttcatgaacaggatcacgttatcctgtgcttgcagtgcggatgtgttgtggacccttttcagtatgttctgcggtgtgcgaacgatggtgaggctgtggtgagagagattagacagcttcataacagacacgatcagctccgagaatctgttgccagcctcgagcgtgaagaaaagaacaccaaagcacggttgcgggcagcaagaactgcaatactgtatgcggaaaatgaccttaaaaatattgagcagaaggtgaatcaatga

SEQ ID NO: 23828 - DNA, 174 bp, Escherichia coli
atgcttcacaaacgtaggttagcctcttacgtgccgaaaggcaaggagaagcaggctatgaagcagcaaaaggcgatgttaatcgccctgatcgtcatctgtttaaccgtcattgtgacggcactgataacgaagaaagacctctgcaagggaggaatccctcgccacctctga

SEQ ID NO: 23829 - DNA, 279 bp, Escherichia coli
ttggaatacggttttgccatttataacagaaataacgttaatgttacgggcgtgcttactcccatatttttcctggacaggtttacggcggagtcgggatcaaaaacgtatacgaataaaccagaagggaaaacattgcaggcagtctgttcattatttccgtggaataatgtatttaaggaccggaaagtaccgaagataaccattaatggcaatacggtgacgtggtcaaatcttgagcaggggatggggtcatatatttatacattctgggggtga

SEQ ID NO: 23830 - DNA, 189 bp, Escherichia coli
atgccggaaaatcgcaggattattctggatagtaaagaatcctggttaataatctgtgatagtcagttgggccatttaatgcgcagtatgtatcagggacgccgttttattcagctgaatctggaaaaattgaaaggggtacatgatgtcgccttgccagtgaaatgggaattcacacgaagacagtga

SEQ ID NO: 23831 - DNA, 270 bp, Escherichia coli
atgaatattttgagaaagcttatgcagagtctgtgcggttgcggaaagcatgatgactgtgaaaacgggcagtcgcttacagcacaactgcgactgggaccggcagacattctggagtcagatgagaatggcattattccggagcaggacagggtaatcacacaggtggtgatactggatgcagataaaaagcagatacagtgtgtggtaagaccgctgcaaatcctacgtgctgacgggaggtgggaaaatattggcgggatgaaatag

SEQ ID NO: 23832 - DNA, 516 bp, Escherichia coli
atggtcacgatttgtgttgacggtgaaaataagactcataaaattaccgactggacgctgtgggctggaaatgacgacagagaggttatgctgacctgtcattttcgcagcgggagaaaatatactcgtccgctttctgtatgtcagataacgccaactgtaaatttgcgaaatgttttcctcgaaaggaaagggaacgctgtaacatcccgggctgaactggttattatatatggtgataaatatgctgctgtttattaccgcgagggtgaacgaccctacatcatgaaaacgaccggccttgactttcaacagtgttcagcatttacagagcatgccgtgtttaattacttgtgtagggtggctaatgaacgtattttttatgcccgtggtaataacagaaatatcgatgagaatatccttaggcagataaagaaaatagttcctcatccggataccgccttgcatgcatactgttcaggacagagtaaaaacgtgattcgccatggggtttga

SEQ ID NO: 23833 - DNA, 2169 bp, Escherichia coli
ttgatttttccgtttggtcttaatgaaagtcagttgctggctgtcgaacgggcattttcctcacagatttcagttattgaaggaccacctggaacaggtaaaacacagactatactcaatattgttgctaatatattaattcagaataaaacagtggcaattttgtccaataataactcagctgtcagtaatgtttatgaaaagatggacaaacagcaactgggatatgtgatggcacgactggggagtacggagaacaggcaacagtttttttcaacgtcgatttcgcgttctgaggaagtcttacctgactcaccgtctgcaaatgcgattgatgatgtacttcaacaagtgaaaaaacacctgaatgccattaaccaggtcgcttcgttaaaagcagaaattaatgagctgaatattgagtataaatacctgcagcaatggcagagtcagaatcttcgaccggaggagcttttttctcacaaataccgattttcctcacaaaaaacaaccgacctgatggcttatattcattacctttctgacaggcggattggattcagaaacagaattgatttgttgttaaacttcatgatactgaaagtcaaaccattgatgattccggagagaaggctggcgctatttacttctcttcagctttcttattatgaaaaaaatatccgggaaaaacaaatttctctgaatgaatatgaggaagcatttaaaaaatctgattttaaaattttactggggcgcctgacatcatggtctatgctttatttaaagcaacatctgcgaagaaatgtttcaacaagaagttcattctcggcagagacatacagggatgaatttgaccgttttataaagcgttttccgattattggtagcagtacgcattcgattattaactctatcggcaagggggcccttcttgattatgttattattgatgaagcctcgcagcaggatattgttccgggcattctgggactgggatgtgcccgtaatgtaatcgttgtaggggatcgtaagcaacttccacatgttcctgtattactcccgaacagcccatctccaccggcagaatactataattgtgagaaatatagtctacttgattcggtttgtatgttgttcaggaacatggtgccagtaacccttcttaaagagcattatcgttgtcatcctaaaatcattcaattttgtaataagcagttttatgataatgctctgataccgttaacggttgattccggtgaagcctcattatctctggtcatcacggcaaaaggaaaccatacccgtaatttttcaaatctcagggagcttgaatctctggaaggtcattactgggatgaagaaagtagcaggggatacattgccccatataatgcacaggttaatctggctgaaaaagtgctgcctgctgattttgtgaaatcgacggtgcataaatttcagggacgggagtgcgatgaaattgtgttttccactgtgctggataagaagcgcagcagccagcacagtcggaacatcgcgtttgttgataatcctgaactggtgaatgtcgctgtttcaagggcccgaaataaatttacgctggtgactggtaatgatgtatttgaacgccacgctggacatattgcggcgctgattcgttacatcaaatactacgctgatgacggagagattttcgagagcccggtcatatcagcatttgatttgctgtacagtgagtatgacaaatcactggaacgactgaatagtagattgaattcaaatgattcacactttaagtcagaacagattgtggcctgcctgttgcgggatatcctgtcgcaggatagttatcggagtatgatgtttcattcacaaatagcgctgaatcagttggtgttgctggagcggggggattttacacaccgtgaacagttattcatgcgtaaccgggccagttgtgactttgttgtttactataaggtcgggaagactccattaggggttattgaagtggatggaggttatcatctgaccagtgttcaggctgaacgtgatgaacttaaaaacagtatactgaagaaatgcggcctgccattgctaagattacgtactatagacagtgatatagaagggaagttgggagcgtttctgtcaggcctgacaggctaa

SEQ ID NO: 23834 - DNA, 1233 bp, Escherichia coli
atgagtgatacgcttttaaccgaaaaaatccttaccggagaaaatgttttgcgtgctgcaatcgcccgcattgagtggatttttgaaacatttccgtcggtatgtctgtctttttcaggtggaaaggattccaccgtgcttttccatcttgtggcagaggtggcccgcaggagaaaacgtcatttctctgttctgttcattgactgggaggcccagtatcggtgcaccattgaacatattcagaagatgcgggaaatgtaccatgatgtgacggaaaccttttactgggtggcacttcccctgaccacggtaaacggcgtctcgcagtttcagccggagtggatatgctgggagccaggagtgacctgggttcgccagccaccggaagaggccattacggatatgacatattttccctttttccggtatgccatgacgtttgaagaatttgttccggcattttcttcctggtttgccggtaaccggtgtggagtggcagtgctgaccggtgttcgtgcggatgaatccctcaatcgctttatggggctggtgtctcagcgcaaactgagatatgccgatgataagccctggaccacggcatcgcctgaagggttttattacaccatgtatccgttgtatgactggaaagcccgcgatatctggatatataacgccagagcttgtgccatttacaatcctctgtatgacctgatgtaccgtgccgacgtgccgttacgcaacatgcgtgtctgtgaaccttttggtcctgaacaacgtaaggggctgtggctttaccatgttctggagccggaaacctgggccaggatgtgtgagcgggtgtcaggcgctgccagcggggcgctttatgccaatgaaagcggtgcctattttgccctgcgtaaacgtatatcaaaaccagcccatcatacctggcgcagctatgcgatgttcctgctggatgtgatgccggaaagaacggcagaacattaccgtaataaaattgctgtctacctgcgctggtatcagacgcggggcttcccggatgacatcccggatgaacaggagaatgacctggggagccgggatattccgtcctggcggcgtatctgtaagacacttataaagaatgatttctggtgccggcccctctccttcagtccgaacaaaccccggcactatgaacgttatctgcagcgtatgaaagaaaggaggaaggaatgggggattctgtga

SEQ ID NO: 23835 - DNA, 639 bp, Escherichia coli
atgggggattctgtgacaccggagataattggcaacatgattcgtcagtacttcagccaggaacgaccagaagaagagaccatacaggcccttaatcacctgcgcagagtgcttcatgaagtcagtccttttgcacatgagccagtggactgtgtgctgtgggtaaaagcagatgaggtggtggccaatgattacaatcctaatgtcatggcgccgggtgagaagaaactgctgaagcagtcactggagaaagatggtttcacacaaccggtggtggtgtctgaggaaaagaaccattacctggtggtggatggttttcatcgccaggtgctgggcagggaagcaggtacgggaaaacgtctgaagggctggctgccggtggtctgtattaatccggagagaaagggacaggcctcacgtattgctgcgaccatccgacataaccgggccaggggcaaacatcagataacctcaatgtctgatattgtcagggacctgtcgcgcctgggctggacgaatgaacgcattggtacggagctgggtatggaccaggatgaagttctcagattgaaacagattagcgggctgacggagctgtttcaggaagaggatttcagcccggcatggacggttcgctga

SEQ ID NO: 23836 - DNA, 645 bp, Escherichia coli
atgatgaagcaaggaatggcaaacagtatatcaatgacatggcaacttttatgcgatgaacatggttttacccgggagcactacaatcagctgaagaagttcagcccggagacattacgtgaaattattgctgaaatagccagctgtcatccatcaaccagtgtattgctcaggaataagtggctgacaccgccggaggatattctggagcagattacccgtgaatacgaacgaagaatacaaaactgtccaccgttcaggagcgagaaggaagcggaatcctggttaaatgaactatcttttgctgtgattgctccgctataccgtgttgcccccgaacaaacagaacaggttgagtcctttgttctgcagcttattgccgagcaggagcgggtttgggagcttattttaaccaatgatggttattcatggcattgcgcactttatgatatattatttcatctggttttacgaaatatggaagaccagcctgaacatcagaaacagcgaataacaaaaatattttatgagcccgatgcaagactggttgcagaagagattaaattccggattcaatctctgtatgatgatgaacaaaagagagctttaagtgaactggtaaatgattttacttcaaaagaataa

SEQ ID NO: 23837 - DNA, 249 bp, Escherichia coli
atggctacatacggcggtcagtttacgcttactgacaacgcgatggcggagagcatcaatggtctttacaaagcggaggtaatacaccgtaagagctggaaaaaccgtgcagaagtggaactggccacactcacgtgggtggactggtataacaatcgacgattgctggaaaggctgggccatactcctccggcagaagcagaaaaagcttattatgcttccatcggaaacgatgatctggcagcctga

SEQ ID NO: 23838 - DNA, 348 bp, Escherichia coli
atgataacgctgccaaccggtaccagaatctggatcatcgctggcatcacagatatgcgttgtggcttcaacggcctggcttcgaaggtgcagaacacgctgaaagatgccccgttctccgggcatatcttcgtcttccggggccgcagtggcaaaatggtgaaaatactgtgggccgatcgtgacgggttatgcctgttcgccaaacgcctggaacggggccgcttcgtctggccggtaacccgggaagggaaagtgcacctgacgccagctcagttatccatgctactggaggggatcgcatggcaacatcccaaacggacagaacggcctggcatccggatataa

SEQ ID NO: 23839 - DNA, 1449 bp, Escherichia coli
atgaacaacacactccccgacaacatcgagcaactgaaggccctgctgatcgcacagcaggctgttatcgtccgtctgtctggtgaaataaccggctatgcccgcgagatcagctcactcagagcgctggtcgctaaactgcagagaatgttgttcggtcgcagcagcgagaaaagccgcgagaagatagaaaagaagatcgcacgggcagaaacgcgtataaccgagctccagaacaggcttggtgaggcgcagttgcaactcacctcaatggccggagagacagcgccgaaaacatcagactctcccgtccgcaaagcacttccggcaacacttccccgtgacaggcaggttatctccccggcagaaaccgaatgccccgtctgcagcggtaaactgaaaccgctgggagaaagcatctctgaacaactggatatcatcaacaccgcgttcagggtaatcgaaacggttcgcccaaaacgggcctgcagccggtgcgactgtatagttcaggctccgcagccaccaaaacccatcgagcgcagttacgccagtccggctctgctggcccgcataatcatggctaagttcgccgagcatctgccgctgtaccgtcagtcggaaatctatgcccgccagggcgtggagctgcaccgcaatacgatggggcgctgggttgacatcatgggagagcagcttcgcccgctgtatgatgaactgaagcactatgtgctgatgccgggtaaagtgcatgccgatgacacgccggtaaatgtactggagccgggtcagggtaaaacccgtaccggacggctgtgggtctatgttcgtgacgatcgcaacgccggttcgaccatgccggcagcggtgtggttctcatactctcccgaccgcaaaggcatccacccacagcaacatctggcggactacagaggtatcctgcaggccgatgcatatgcgggttacaatgctctttacgaaagcggtcaggcaaccgaagcggcttgtatggcacatgcccgacgcaagatccacgatgtacatgtccgccatccaacgacagtaacgggagaagcgctccgtcgtatcggggaactgtacgctatcgaggctgagatccgcggcagtccggcagaagagcgactggcggtcagaaaagccagaacggtaccgctaatgcagtcgttgtatgagtggctccaggggcagatgaacacgctgtcgcgccactcggatacagcgaaagcgttcacctatctgctgaagcaatgggacgctctgaacgaatactgccgcaatggctgggtggagatcgacaataacctgtgtgaaaacgccctccgggtagttgcactggggcggcgtaactaccggacgtggtttctgccaggtaaaggcaacggaacaaaagaatcatggtttttccggaaccggccacaccatgaatga

SEQ ID NO: 23840 - DNA, 534 bp, Escherichia coli
atgagtggttcaagactggctgataatcatacgctatcggctggttatgctcagagtaaggtacaggactttaagaatattaaaggagtgaatctgcaatatcgatatgagtgggattctccggtcagtgtcgtcgggagtttttcgtatatgaaaggtgattgggcggacagtcatcgcgatgaagctgacgatttttacagacatcaggctgatattaaatattattcatttctcgcaggcccagcttatcgtctgaatgactatatcagtttttatggtttggtggggatatctcatactaaagcgaagggagattatgagtggagaaacagtgtgggtgctgatgagtctgatggatatttaagtgagtctgtatcaaaaaaatccactgattttgcttatgcagctggtgttattattaatccgtggggcaatatgtctgtaaatgttgggtatgagggaactaaagcagatatatatggaaaacattcggtcaatggatttactgttggagttggttatcgtttttaa

SEQ ID NO: 23841 - DNA, 1650 bp, Escherichia coli
atgccaataataaacaaatcggcatcaaattatgttgaatatatttcaaaaaacaatcccccttatttatcaaaaaagagagatgccagtataaatctaaatggaaaggttagtgattgcaatggggaaatcatatggtgtcgacatatagcatcatattggagtgagtttttttgtagtaattcaggaaagatagactacgaaacattttcatcccctcaattattaagcaaagctattgtaattcaggaaaacaaggggacaaataatattaagggtgatgtgtattttgttgaaaatgaatcttggggaagcgttatatataacctttttcttcaacttgagaaagagaataaatctcacacatcattagaagttcattctcccggacatgcaatggctctgggcattaaaataaaaaacgacaaggaaaataagtttgttattaatttctatgatcccaatcagaccgcgacgcataaacgagtatttttttgcactaataacatttgtgatataataaacctgacagcatatgattttcttagtgagcaatgtctgaaatgttatgggctaaaagaagacacactgtcactttttgtggataaaacaaaatcgaatgacaacaataatgtgtttataaaaaaattacctgataatattctccaaggtgttgttattaattttgctatgggagcaggactaagagagataataaaaaaggtatataacgatactcgatttacagatcttacaaaatctcagatgaaaatcttgtgtgaatcaaaaaatgttaataatgttcctgggttgcttttagctctacaaaatggacatgataatgtaattgatgaatatggtactttaattaaaaagtcaaatcttaataaagaagaattaatacatatattatctgcaagaactttggatggaaccatacctggtttatatcaggcccttcaaaatggacatgctcaagctattaagagttatggtaacttagttctggatactattaataaaaatatagatttagagtatttgctttcagcatttaaatatgaggcacatagctctaataaatatactcctggattattttctgcatttcaaaatggtcatgcagacgcaataaaggcatattgtggcgtacttggcaatagtaatttgaaaagaggtgagataatcaggatgcttgaggcgagaaattatgatggtgcaccaggattacttcttgcgtatcaaaatggagatattaatacgattcagtctttttttgactcactaataatgttagatatatcaaaggattttatcgaagagttattgactgcaaaacattatgattttacggggttatcattagcgatcagtcatagacatgatcatgttgtcaaattatacggaaagttatttaaaaaacttgataccagtccatataaaatgtcaattatcctagcattagcaattgattgcgagagaaataatgcaaacataattattgatagtgagtacaagtcaaataaggcagtaaaggaatatgtagaaattttaaaagaattcaatatatgcccagaaaaggtagcagaatacctaagcgagttcagcggaaaacatttcctcgatgtatataattattattccaattga

SEQ ID NO: 23842 - DNA, 990 bp, Escherichia coli
atgttatcttcattaaatgtccttcaatccagcttcagaggaaagacagctttatcaaatagtacacttctccagaaagtttcttttgctggaaaagaatatcctctggaacctattgatgaaaaaacccctattctttttcagtggtttgaagcaaggccagagcgatacgaaaaaggagaagtaccaatattgaataccaaagaacatccgtatttgagcaatattataaatgctgcaaaaatagaaaatgagcgtataatcggtgtgctggtagatggaaattttacttatgaacaaaaaaaggaatttctcagtcttgaaaatgaatatcaaaatataaaaataatctaccgagcagatgtggatttcagcatgtatgataaaaaactatctgatatttaccttgaaaatatccataaacaagaatcataccctgccagtgagagggataattatctgttaggcttattaagagaagagttaaaaaatatcccagaaggtaaggactctttgattgagtcatatgcagaaaaaagagaacatacttggtttgattttttcaggaatttggccatgttgaaggctggaagtttgtttacagagacgggaaaaactggatgccataacatatcgccctgtagcggatgtatatatcttgatgccgacatgattattaccgataaattaggagtcctgtatgctcctgatggtatcgctgtgcatgtagattgtaatgatgagataaaaagtcttgaaaatggtgcgatagttgtcaatcgtagtaatcatccagcattacttgcaggcctcgatattatgaagagtaaagttgacgctcatccatattatgatggtctaggaaagggtatcaagcggcattttaactattcatcgttacacgattataatgctttttgtgattttattgaatttaagcatgaaaatattataccgaataccagtatgtatacctgcagttcatggtaa

SEQ ID NO: 23843 - DNA, 675 bp, Escherichia coli
atgattaatcctgttactaatactcagggcgtgtcccctataaatactaaatatgctgaacatgtggtgaaaaatatttacccggaaattaaacatgattactttaatgaatcacccaatatatatgataagaagtatatatccggtataaccagaggagtagctgaactaaaacaggaagaatttgttaacgagaaagccagacggttttcttatatgaagactatgtattctgtatgtccagaagcgtttgaacctatttccagaaatgaagccagtacaccggaaggaagctggctaacagttatatccggaaaacgcccaatggggcagttttctgtagatagtttatacaatcctgatttacatgcattatgtgagcttccggacatttgttgtaagatcttccctaaagaaaataatgattttttatacatagttgttgtgtacagaaatgacagccctctaggagaacaacgggcaaatagatttatagaattatataatataaaaagagatatcatgcaggaattaaattatgagttaccagagttaaaggcagtaaaatctgaaatgattatcgcacgtgaaatgggagaaatctttagctacatgcctggggaaatagacagttatatgaaatacataaataataaactttctaaaattgagtag

SEQ ID NO: 23844 - DNA, 789 bp, Escherichia coli
atgctgatgctgcaccggagcgctcgcgtcagtgacgttgccagaacgctctgctgcgcccgttcctccgtcaggcgctggattaactggttcacgctgtcgagtgttgaaggtctgaaatcattacccgcaggacgttcccgccgctggccgtttgagcatatctgcacattgtttcgtgaactgataaaacactctcccggatattttggctatcagcgttcacgctggagtacagaactgctggcaataaaaatcaacgagataaccgagtgccagttacatgccggaaccgttcgccgctggttgccattagtcgggcttgtgtggcgcagggctgcgccaaccctgcgtacccgtaacccgcataaagcagcaattcacaaagcactggacgaatgtagtgcggagcatccggtcttttatgaagatgaagtgtatatctatcttaatcccaaaaccggtgcggactggcaacttcgcagacagcaaaaacatgtggtaacaccggggcagaatgaaaaatactatctggctggtgctttacatagtggaacgggcaaagtcagctatgtgggtggcaacagcaaaagctcagccttatttatcagtctgttgaaacatctgaaattgacataccgacgggataaacctatcacgctcatagtggacaactacatcatccataaaagtcgggaaacacagcgctggctgaaagaaaatccgaagttcagagtgatttatcagccagtttactcgccgtgggtgaatcatgttgagcggttatag

SEQ ID NO: 23845 - DNA, 1302 bp, Escherichia coli
atgagactgccagagaaagttctttttcctcctgtcactagtggcctgtcagggcaggaaaaacaaaaaaaaccgaagagcattaccggatttcaggaaaattatcaacgcaatatcaggccaatcaaaacagcatcagaagcccgactacgcttctttgataaaatggtttcgaaagaaaactctctggaagatgttgtttctttaggtgaaatgattcagaaggaaatttatgggcatgaacaaagaacattttcaccagttcatcatacaggtaactggaaatcatcattgttacacaacgcgctccttggtctggcaaatgtttataatggcttacgggaaacagaataccctaacactttcaacagagatggtataaaaagtactaactcttttagagataacttattgacaaaaacaagaactcccagagataattttgaggaaggaataaaacatcctgaacatgcaacaataccatatgacaacgacaatgaaagtaataaattgctaaaagcaggaaagatagctggtaacaataacgagctgttgatggaaataaaaaaggaatcccaaagcgaccatcaaatccccctgtcagataagttcctgaaaaggaaaaaacgatctcctgtagctgaagataaagttcaaaactcgttaacaccagaaaattttgttcagaaaatttcacttagtgatgagcttaaaacaaaatatgcaaatgaaattctagagataaaaagaataatgggagaatacaatcttttaccggataaaaacagtcgtaatggtctaaaacttctacagaagcaagctgatttactaaaaataatcatggaggatacctctgttacagaaaatacctttaaaaacatagagatggctatagcagatataaaaagggagtactattcgcatacagttgatattgagaaaaatattcatgccatatgggttgcgggttccccacctgaaagcatctcggactatattaagacttttctcaaaacctacaaagagtttacttactatctttgggttgatgaaaaagcatttggagccgcgaaatttaccagtgtcttaaaacaaattgcatttgatttagcatgcagaactatacagcagaatactccacaaaaaaatattgattttattaatctatataatgaaataaggaagaaatacaacaacaacccatcgggacaacaagagtacttaaacaaactcagagagctttatgctacttatcaaaaaatatccccccctctgaaacacatgtttaattcatttttttag

SEQ ID NO: 23846 - DNA, 216 bp, Escherichia coli
atgtaccagatggaaaaaataacaacaggtgtgtcatacaccacgtcagcggtggggacgggatactggctactgcagttgctggacaaagtctccccatcccagtgggtggcaataggcgtattgggtagcttggtgtttggcttgctgacgtatctgacaaacctttatttcaagattaaagaagataagcgtaaggctgcgagaggtgaataa

SEQ ID NO: 23847 - DNA, 1053 bp, Escherichia coli
atggcaattcttgatgatgtgattggcgttttttcaccaggatggaaagcggcaaggctgcgttcccgtgcggtgatccaggcttatgaggccgtaaaaacgacgcggacacacaaagcccggcgggaaaaccgaactgccgaccagttaagccagtacggggccgtgtcgttacgtgagcaggcccgttaccttgataacaaccacgatctggttattggtgtatttgacaagctggaagaacgggtggtggggaaaaacgggattattgtcgagccacatccggtattacgcaatggggccattgcccgtgatctggcagcggagatacgcacccgatggagtgaatggtctgtcagtccggaagtcaccgggcagtttacccgtccgatgctggaacgtctgatgctgcgtacctggctgcgcgatggtgaggtgtttgcccagatggtttccgggcgcataaacagcctgacgccttctgccggtgttcatttctggctggaggcgctcgagccagactttattcccatgaccagtgatgagagcaacaggctgaatcagggcgtgtttgttgatgactgggggcgtcccgaaaaatatctggtgtataaaagccgtcccgtatccggacggcagatggaaaccaaagaagtggatgcagagcgaatgctgcatcttaaatttgttcgccgtctgcaccagatgcgcgggacgtctttgttgtccggtgtgctgatccgcctcagtgccctgaaagagtatgaggattctgagctgactgcagcaaggatcgccgctgctctggggatgtacatccggaaaggcgatgggcagagctatgaaccggatggtaatggcagcaaggataaggaacgcgagcttaccattcagccaggcattatttacgacgatctgaaacccggcgaagaaatcggaatggtgaagtcggatcgccccaatcctaaccttgaaacttttcgtaatggtcagttgcgtgccgtggcggcgggcagtcgtctgaattttttccagtacagcgcgcaactataa

SEQ ID NO: 23848 - DNA, 1104 bp, Escherichia coli
atgaaattatctatcgacatttcagaacttattcaattagggaagaaaatgttaccagaaggagtcgatttttttctggatgaatcccctattgactttgatcctatagatattgagttatccacgggtaaagaagttagtatcgaagatcttgaccctggtagcgggcttatctcttatcatggccgccaggttcttttatatattcgggaccattcagggcgttatgatgcggctatcgtagatggcgaaaaaggaaaacgttttcatattgcctggtgcagaactcttgatgaaatgcgccataaaaatcgatttgaaaggtatcatgcaactaaccgcatagatggtttattcgaaattgatgatggttcaggtcggagccaggatgttgatttacgggtatgtatgaattgcctcgaacgacttaattataaaggaagtattgataaacaacgaaaaagagagatttttaaatcattctcattaaatgagtttttttcagattatagtacttgttttcgtcatatgcctaagggtatctatgacaaaacaaatagtgggtatgtcgaaaactggaaggaaatatctaaagaaatacgagaaaaggcaaattatgtttgtaatgattgtggcgtgaatttatcaaccgccaaaaacttgtgccatgtccatcataaaaatggcatcaaatatgataatcaccatgaaaaccttcttgttctgtgcaaggattgccatcgaaaacagcccctccacgaaggtatattcgttacccaagcagagatggctatcattcaacgtttacgttcccaacaagggttattaaaagcagaatcctggaatgaaatatatgacctgactgatccatcagtgcatggtgatattaatatgatgcaacataaaggctttcaacctcctgttcctgggttagatcttccaaactcagaacatgaaattattgcaaccgtagaagctgcatggccaggccttaaaattgcagttaaccttactcccgccgaagtcgaaggatggagaatatataccgtgggtgagctggttaaagaaatacaaacaggagcctttacgccagcaaaattgtaa

SEQ ID NO: 23849 - DNA, 774 bp, Escherichia coli
atgtcaaaaacacggcttagtaagcccggtttttcagccaagtctgtgctgaccattatgttaatcgctgcgtcatctgcatcttatgcagcagaaagcatcgatcaactggcgacgcgcatcggtatggatcacttccgggaagcgatcaaaaagggtgaacgcagcgccttcaaaacgctgccggcaaaaggctataaaaacggtcttaccgggctgttaatcaaaactaacacttacgttaaccccgaatacagctttgctgattgcgatacggacaccgttattatctcggtgcaagaacacaaaacgcttcccggttgccgtatatctttaaagctagcgacaaaagacgcagatggcagttatcacgacaatggaattcgcgttgaatacggtattgccatcggctccaaaaagtttatcgctaacaattcagcgtgggcgcaacatgccatcagcggtgataaagtgttggaaggcgctctccacccggataaaacgaataacaataaagatcaaatgaataacaataaagatcaaatgtgcatgggtatggctcaatttaccgcaaacgtaaccgaaggccgtaacagtgggatgacgaaaagagaatattatcagcgacttgataacatgaacggtaaggccgacgtcacccagcagatgataacgctctataagacttttgttgactacgtatatgaacatccaaagcaagacgcaaagatttcagggacgtatatttatactaactgtatgaacaacttctag

SEQ ID NO: 23850 - DNA, 1317 bp, Escherichia coli
atgaatgacggtgttatgctagattctgacgttattgctggtcttgagtggttagcatcaactcaagagaacaaacaacacttttaccagcgcttagcaaaagcacagcaattttacatagctacaacccaaaaagctgccaatttcgggaaacagtttgacccagaatggtatggttccgacgtggttgctggttatttcgcacaagcaaaatcgcttatcgataatagaaggtcttacgaagttactaatgcttcaaatataataccatgggttaaacaattaggagtgtgtgctaaatcgctcgatagaattactggcgctagagatcgcgcaatcagaatgcttaagaatacaacagtattaccagacacagccttattagagttggttcttgctggaaactatgcatcagaaggttatgaagttgagttcattccagaacaaaaagggatagcaaaaaccccggagtttcgttgccgccttggagatggcgattatttctttgtcgaatgcaaaaggcttcagaaaggtccttacgtaaagcaggaaatattacagcatcatatacgctcacatcttgccgaacttcatatcaaatccaaaaagatgaacgtatggactgatgtcacatatttatgtgaagttaaagacgcgcctgaaaactatatcattagccacttaaaaaactttaaaggtgtattttatgaatggaatgatgattatggaaaaggaacgattagaccggccaacttaaatcttatcagggaagatatcactgaaaacggctcattactagtcaacactaaacttgctcgtcttatcaaaggctcccctctggaagatgaaaattaccaagttgttgctatgggacgaccagatgagcgcgactcacgtttcataaccaaagttaaacttgcttctttgataacatggcgttgtatcaatgaaaaatctttcgatgcacgttcgcgacatgtaacaaaaacattagcagagatagataaccagcttttggattatggtctaggcgtagggcatatagctttggatgtagatattcaaaaggatgttgccgataaacgaagggaaaaaaactatgctgccatagtaaattttgagcaaaaatctaaaatagtccgcctgaatgttcattatctcgtgccacgcatagatgagaactctgcgtggatggtagatgaaactgcggatgacttttttacccatgatctggtcaaatatgttatcccattgactaaaatattccccgaggctgaggtatttgagaatgaccaacctggctggcatcaaaattaa

SEQ ID NO: 23851 - DNA, 570 bp, Escherichia coli
atggctatttttggctacgggcgtgtttcgacatcccagcaggatactgagaaccagcgcatggaacttgaacaagctgggtggacgttcgacttttggttttctgatgtagtcagcggaaaggttcctgcggtgcaacgcaaagcgttttttgaaatgctcagcaaaatccgcgatggggaaacgttggtagttgcaaagctggaccgcctcgggcgtgatgcaattgacgttctgcaaactgtcaggacgttggctgaccgaaacatcaaggttattgtccatcagcttggcaccactgatctcacctctgctgccggtaagctcctgttgtcgatgctagcagcggttgcggagatggagcgtgacctgctgattgaacggactaatgcggggctgttacgggcaaaagctgaaggcaggaaattgggcaggcctgctaaaatcgcaccggaagctcgtggagcgattttagacaaaagggccgctggggttagtgttagcgcattggcgcgtgaatacggtgtttcaagagcgacgcttgctgcattactgaataagggttactga

SEQ ID NO: 23852 - DNA, 468 bp, Escherichia coli
atgattaaagacgcgattttttcaccgtgcggtaagtatcgctactcgttatcacgagtctgggacgaatcaaaaccgtatacccttttcatagggctaaacccttcatacgccgatgccgagaaggatgatcgcaccttgagccgctgcatatcgtttgccaaaagctggggctacggtggcgtatacatggccaacctgttcgcattcgttcacacccagcgacatgaaatgatgaaagcgtctgatcccattggcaaagataacgatagccacttgatacgtcttgttagcggtgccggactggttgtcgccgcatggggaaatgaaggaagacacctcaaacgctcaacgaccgtccgacagctattgccagagagcacaatgtgcttcgtcttaaacgctacaggtgagccgaagcaccctttgtatatgaaaaacgacagtgttctcatacctttaggttaa

SEQ ID NO: 23853 - DNA, 378 bp, Escherichia coli
atgaatttagatgaagaattttacgaattacaaaaactctttgctcagaaggatctactgactgagaaaagacgctctagtggcggcggattcatggaaattctcttggtgaagagacagaacatgaagataaaaatatatcaagaaaaaggacatcaacttccccatattcatattgactatggaaaacaagcgcatgctgccagttatgccatacaatcaggagaccgcatagagggagatttacctaagaaatatgatagtgatgtttcgagttggttggggagaaatcgtgataaaattttagaaatctggaatgcactacaagctggcgcaccttatgaaccactaatcgcagaattgactggcggagtgtga

SEQ ID NO: 23854 - DNA, 390 bp, Escherichia coli
atggcaaagactatccttgccccgtcactgagtgaacgggtctatacgggtacgcacggtaatgagtcggtggcagaaggcgtatttacggtgaatgctgcggaagcggacagtgttattcatcttctctcactgccagtgggcatccgtatcaactcactccaactggtttcaacgggtggtctgggtactgcaaccgtcagcattaagtccggtgagcatgctctcatcgataacagcgaagctgtttctgcaaaatttgccagatatgtgccagtggagccgtacaccacacagcgtgacggggagctggttactgtcaccattaagactgccgctgcaaccggcaccctgaatgttctgctgcgttataccgtggtgggatactga

SEQ ID NO: 23855 - DNA, 564 bp, Escherichia coli
atggcggaactgagtgattttttaccgtatgtccgtcgtcatatcagcggtccactgaacattatgatgacggatgctctgtcaatggctgccgtggcattcagccgccagtcgttggtgtgccgtcgggaggttactgttgtaccggtggcaggaaaagaaatcgtgcttccgtatgacaaagatgatgaggagtgcgttcatatcatccgtatctctgacgataatcatgagctttttgtcggtcgggatgtggatatcagctccggacgctccctgcgatttgcctgttctcccggtgaggtgagcgtgctttatgccgtcgctccgaaagccggacgcagccagataccggatgaactcctcacatggcctgaagaagtggctgcgggggcacttgagcggttgttcatgcagactggtgtttcatggtcggacccgtcacgcgcacagtatttttctgtgcagttttctgaggggctccgtcgggcatatcgtcatacactggcgacaagcccgtactcttcataccgcaaccctgtacgcaggcagaggttttactga

SEQ ID NO: 23856 - DNA, 651 bp, Escherichia coli
atgacgacgattacagaaatcatcggacgtgtgaatacacaactggttgacccgatgatggttcgctggcccctgcaggaattgtgcgattattacaatgatgctgtgagggcagtgattctggcgagaccggatgctggcgcaagcctggaaacaatccgttgtgttccaggtgcacgtcaggttttgcctgatggtgtaatacagcttcttgacgtgatatgcctcagtgacggtagcgcggtcagaccattatcccgggaggtgctggatgcgcagtatcccgagtggcccacaatgaagggcattcctgaatgttttatcagcaacgacctgtccccgcgcgtattctggctgtttcctgcccctgacaaagagataagtattgatgcagtggtaagccggataccggaggcagtgtatgttctgacgcaggacgatgatacgccagttccactggaagaggcttatgttaacccactggtggactggatgttgtttcgtgctttcagtaaggatgctgccggtggcgcagaatcggggctggctgcgcagcattatcagagttttgttgagcaacttgggagcaaacagggggcagacagtgcattgtctgcccgtaaaaaagtgtttaacggaggtggagtgtga

SEQ ID NO: 23857 - DNA, 1677 bp, Escherichia coli
atgcctattggtaatcttggtcataatcccaatgtgaataattcaattcctcctgcacctccattaccttcacaaaccgacggtgcaggggggcgtggtcagctcattaactctacggggccgttgggatctcgtgcgctatttacgcctgtaaggaattctatggctgattctggcgacaatcgtgccagtgatgttcctggacttcctgtaaatccgatgcgcctggcggcgtctgagataacactgaatgatggatttgaagttcttcatgatcatggtccgctcgatactcttaacaggcagattggctcttcggtatttcgagttgaaactcaggaagatggtaaacatattgctgtcggtcagaggaatggtgttgagacctctgttgttttaagtgatcaagagtacgctcgcttgcagtccattgatcctgaaggtaaagacaaatttgtatttactggaggccgtggtggtgctgggcatgctatggtcaccgttgcttcagatatcacggaagcccgccaaaggatactggagctgttagagcccaaagggaccggggagtccaaaggtgctggggagtcaaaaggcgttggggagttgagggagtcaaatagcggtgcggaaaacaccacagaaactcagacctcaacctcaacttccagccttcgttcagatcctaaactttggttggcgttggggactgttgctacaggtctgatagggttggcggcgacgggtattgtacaggcgcttgcattgacgccggagccggatagcccaaccacgaccgaccctgatgcagctgcaagtgcaactgaaactgcgacaagagatcagttaacgaaagaagcgttccagaacccagataatcaaaaagttaatatcgatgagctcggaaatgcgattccgtcaggggtattgaaagatgatgttgttgcgaatatagaagagcaggctaaagcagcaggcgaagaggccaaacagcaagccattgaaaataatgctcaggcgcaaaaaaaatatgatgaacaacaagctaaacgccaggaggagctgaaagtttcatcgggggctggctacggtcttagtggcgcattgattcttggtgggggaattggtgttgccgtcaccgctgcgcttcatcgaaaaaatcagccggtagaacaaacaacaacaacaactactacaactacaactacaagcgcacgtacggtagagaataagcctgcaaataatacacctgcacagggcaatgtagatacccctgggtcagaagataccatggagagcagacgtagctcgatggctagcacctcgtcgactttctttgacacttccagcatagggaccgtgcagaatccgtatgctgatgttaaaacatcgctgcatgattcgcaggtgccgacttctaattctaatacgtctgttcagaatatggggaatacagattctgttgtatatagcaccattcaacatcctccccgggatactactgataacggcgcacggttattaggaaatccaagtgcggggattcaaagcacttatgcgcgtctggcgctaagtggtggattacgccatgacatgggaggattaacgggggggagtaatagcgctgtgaatacttcgaataacccaccagcgccgggatcccatcgtttcgtctaa

SEQ ID NO: 23858 - DNA, 612 bp, Escherichia coli
atgtttagtccaatgacaatggcaggcagatcgttagttcaggcgactgcacagacgcttaaacctgcggttaccagagctgcaatgcaagcgggtacgggagccacgggtatgaggttcatgcccgtgcagtcgaactttgtgattaatcatggcaaactgactaaccaactcctgcaggctgtagccaaacaaactcgtaatggcgatacccaacaatggttccagcaggagcagacgacttatatatccagaacagtaaatagaactctggatgactattgcaggagtaataattcggtcattagtaaggagactaaaggtcacatttttagagctgttgaaaatgcgttacagcaacctcttgatatgaacggggcacaatcatcaattggtcacttcttgcagtccaataaatactttaatcagaaagttgatgagcagtgcggcaaaagagtggatccaataacacgttttaacacccagacgaagatgatagaacaagtctcacaagaaatatttgaacgcaactttagcggcttcaaagtcagtgagataaaagcgattactcagaatgcgattttagagcatgtacaggatacccgattgtag

SEQ ID NO: 23859 - DNA, 384 bp, Escherichia coli
atgaatgagaaatttcgcacagaccttgcacatacgtttgggatagctcttgaagagcaaactgacgtgctctctttccacgataacgatggccatgaatggatactggagtgtgcatctcaatctgaaattctgtttttttattgttatttattgaatagcgaatcaatacagattaattcaatacttgaaatgaatagcaatcgagaactgctcggtatgtttttcctgtcattaaaagatgacaacattcttttaaatattgcatttcctgcagataaaattgatattacagagtttgctaatttaatggaaaatggttatctattaaagaatgagataattagatccttgtcttccagacctacagattttttaccttga

SEQ ID NO: 23860 - DNA, 507 bp, Escherichia coli
atgtcgttatcaggagcggtattcaagacatttctgacaagtgaacatgcgtcatggaacaggttcaacagaaggcttcatatacccaatgaagatatcgtagatgaaattcagcttaaagcccgaatgcaacaacgccatcatcgggtatatccagaaataggggattccaccattgtctcttttagaggcaaagactatgctgttcactttattaaagatggcccaaaagatgattatgtgtacaaagtacaaagaataacaccggaaaatggatgtttctcaacgctatttagcgtgttttctggcggtgtgactaaggctttggaaagaaaattaaatgagagacatataactccactttcttcaacctggtttcctcgtactcccctggaggggatcttagctgaaagaggattatcttctttgttacgtcgtgtacagtctaccgaacgtcttgataatagggctatagcaacaagagcttcctcttatagcgtattatga

SEQ ID NO: 23861 - DNA, 474 bp, Escherichia coli
  misc_feature (367)..(373): n is a, c, g, or t
ttgactagagtttctctaaaaagaaatttgatagagcctgtttcttttcggccatcagatgattggccgcaaggagaagaaagttttaatgatattttttatcatataaaaaaaagatcgcctgatacgttgttcatacgaatggcttctttatggaagagattgttttactcctcgggccgaagacgacgctactttgaagaaggggagcactcgtttagtattctttgtggaagattacgaggaattgttttaacaattaaatgtagtaacggaatcatttatctgtctattaaagtaagcccaaataatagaaatcatgtttttttatatcataaaaaagactatgttttcgataagttaaaannnnnnnacactgcatatcgtcggcagcgtcagatgtgtataagagacaggttaaaagaaatctttcctgatgaagccattgagttcacaattgaatatgaaaattaa

SEQ ID NO: 23862 - DNA, 165 bp, Escherichia coli
atgaaaaagcgcgaggaagtaagcaagctgcctcgcagacgtgatgcagcattagcggttccctacaaaaaagatgagttcataagcccttctgatgacaaaaaattttcaaaggcgaaaagttttacatctacatctctaaaagataaatactttaaaatctag

SEQ ID NO: 23863 - DNA, 1047 bp, Escherichia coli
atgctaactccatacaaaagagctgatgtagaattcgaatggattagtgatctagaagaacagggttgtttttcaaaagtatatctggctcatgacagacacctagctcatgacttggtgattaaagaaatagaaaaaaaagaaaacactaaccacgacgactactttaatgaagcaaggcttctctataaacatgcacatccaaatattgtgcaagttcagtatgctgctcaatgtgagagcaatatctatatagccatgccattttatcataatggttcgctaaaccaattaatgaaaaaaaataatcttacaagcagggagataatacggtattccattcaatttttaagtggactttatcatatacactcaaaaggtcttatgcattttgatataaaacctaataacattatgatatcaaacagaaatgaggccatgctatctgactttggattatctcagttagtcaatgaggaatcgagagctgcgcctgagtttggatatcattttcatgtgccaccggaatatttttctttatcaacaaatgattataatttcacatatgacatatatcaggcaggattaaccatatatagaatgtgtgttggacatgataattttgaaagagaaagatctgcatttagcacgattgaacaactcagagagtcgataattaatggctgctatccattaaaagagtatcctccccatatacataaaaaattaataacaatagtgaacaaatgcattcatgtagatccaaatgaaagatatcaatccgtactagatgtactaaacgatctctcagctataagtgatggcgttcttgactggcgtctacagatgacgaaaccaactaacggcacatgcgaatggcaaaaaaagtctggggacgctatactgtctatagtttttgacgcagaaaattcgtctactactggttttcgtttatacgatgatgggcggaaaaggcgtgctacgaacttaacaatatcctcaggatgtacccctacaaaactgtataggttattaaaggataactga

SEQ ID NO: 23864 - DNA, 462 bp, Escherichia coli
atgagaatactaggtgttagagcggcgcccaaagttacatcttttgttgtatattgcactaatgagtctgcactcaaatgtgttgatgttattaaaataccttcgaccttagacacaccagaaaaattaaaatatgtgagaaataacatcctcgacattcttaatttatataatgttgaattagctgccatacgcgttactgaatcaaactctgataatcttagcattgaccgcctttatatagaagctgttattcaagaagcattttcaagcagtgatgtaagaaaatattacactattagaaaatctggcatgaaatcatcattgaacctaacagagatcgagtataaagaaatattgaagtcacaccgcaatataaatggaatcgataattctggttttacaactgaaacaaatgaagctgttttggctgcactatctgcggaggtaaggggatgctaa

SEQ ID NO: 23865 - DNA, 342 bp, Escherichia coli
atggcgttcaatgaccttgaatatcaagcagtaaaaaaagaagttcaccaattcattgaaagcataaggccgcctgaacatatccgcaatgaactggatattgtttatagcatcaatgaccaaacgatagatatcggcgaacagcgccccgtgtggcagggcaatccaggtgaaacaaacatcctgccatcagcaagaatcaagtacatacgttctctggatagatggaaaatctattggatgcggaaggatatgaaatggcatcagtacagtactgaactttcgctgactgatgcgcttgagcttgtgcgtgctgacccggattgctgcttcttcggatga

SEQ ID NO: 23866 - DNA, 495 bp, Escherichia coli
atgccatttgctcgttatttctgcattttcataaacgttggtttgggagaaggtgctccagctattggcgttccgttcttctggccgtccgctgcaatgccaaatactgtaatcgacagctggtcctgtatggtgtttttgaagttcaacggcgcgaaattctctgccactgattatcctgtgctggcgaaagtgtttccttcgctggtattacctgaagcccgcggtgatttcattcgtatctgggatgacgggcgaggtgcagacggtggtcgcgaattattaagctggcaggcagctacaaacttttctcagtttgccgggaatataggcgaaggtgcgggacacgcaattaactttcatgatggcatcgccggaaatcagccaggattttcacgatttaatttcaccagtaactctgtgggtgatggtgtgaattttgttgcagtcagaccgcgaaatattgcatttaactttctggtgagggctaaataa

SEQ ID NO: 23867 - DNA, 522 bp, Escherichia coli
atgggaaatgattggattggtgtacttcgagagcgctggagagatcagccgcaggattgtactccgccctacccgttgcaattgcgtagcgaaacacttcggagcaacgctgccgcactttgcgcattttctccaacgcaccacgtttctcaattttacgcagaacgttcagcagctctagcggtagatttactcaatgaactcaagatcatgacagggaactatcgttatgtttttccagggcggaacgatccgaataggccaatgagcgaagcgagtataaatcaagccattaagcgtattgggtatggaggaaaagtcactggacatggttttcgtcataccctttctacaatcctgcatgagcaaggttttgagagtgcttggattgaaatccagttggctcatgtagataaaaattctattagggggacttataaccatgctcaatattttagtggaaggaagtctatgatggactggtacagtaatttgatatttgaaagactaaaaaggagttaa

SEQ ID NO: 23868 - DNA, 417 bp, Escherichia coli
gtgtctcaaccactttcggaaatattgacatgggatgatgaacaatgggaggtatttgtccatgattggcttattgtctgtaaatcagatgattacccgtggagcgaacgtttgggaggagctggagataaaggtagagacgttgttggatataaatcggatcctaacgtagaaggttattcttgggataattatcaatgcaaactgtacaaaaaaagtttagggttctctgatgttgtagttgagtttggaaaacttatctattttactctgaatggtgattatcccatccctcagaagtacttttttgtggcaccctatgatttatctactacattttctaatttattgaaaaataaaaacgagcttaaaaaagcagtccttaattcatgggattcagcaatttcaaaaaaataa

SEQ ID NO: 23869 - DNA, 573 bp, Escherichia coli
atgggattcagcaatttcaaaaaaataactaaaaagattgattttagtattttttactctctacccttatcattgattttaaatgatattgcaaatacacacctttattttaagtactttaacgagctgtatgtcgtgagaatccctccaaatgaaattccaacatacaattcaaaaaaagagtctgtatatgttaatgcactgcttcaagcctattcagagcatggaaataaaacttatagttctttcttagagcttgatgatccatacagacgacactttaataatagtagaaatgatttttattttgcatcttcgcttgaggtttttgtccgcgaagtatttaaagatgatgtattcaaagcattgaaatgttacatttcatcttcaattgaacccgtcttttatgaagaccataattatgcatttattaggtgtaatgcagtcttgaagcaggctgttctgacaccaattgcacattcagtactatcaaaaatatgtgaagcaaatgataaaaaaggaatatgccatcatttggttaatgatggtgaagtaatttggacggtgagataa

SEQ ID NO: 23870 - DNA, 459 bp, Escherichia coli
atggttagaatttataattcaagtttagaagtggcatgtcgaatggcgaaagtgctcgtcgctatttatccttcttcattaagccttgaacggcttatttgttttgattttattttagtaaatcttaaggattttttacctgaagagattagtcttcatcctccaataccccgtagagatgctcagttagccctaaaacgagagattgttttagaatcattggctttgttgcaaggctatgaactagcctcaaaaatttatacacatcgtggttttgtatataaagcttctgaaaaaacatatgcatttacaaattctctacataatgaatatgttgcgcagatggagcataatataaatttggtggttaagttatatagtgatattcctgatgagcagttgcaatcaattataaaaaataaaattggcaaatatgatatggaatttaattatgaatga

SEQ ID NO: 23871 - DNA, 543 bp, Escherichia coli
atgacaatttttttacctgactctggaaaaacatacatatattatttgattcgatatttattagggagtgaaaaactaaaaaataaagatatcgatcatgctcaaggttatgatttagcctatctggaatttaattttcaaggtagggtaatgacaattgagaggtctcttcaggatagcgcccattacagattatatgattcgagcattgaaaatgttagtgaagctaatctgttgatggttttttccaaaagtgcttcgtctaaaaagagtttttcatcatacttttatggtaggttgaatttcaaagaggctaaagtaagaacaaacttaagtaatactcttcataaatttaatcttaataatgtttttgaatttttttgtattgatgaattaagagtgttaactgagaagtcgttaattctttctgatattcctagcgaggagacaaaaagaaagtctgaatttaaattccttttaactcagagagatgatactaactccttagcagaaaaaccaaataaaaaagcaagatatttttaa

SEQ ID NO: 23872 - DNA, 186 bp, Escherichia coli
atgccaaacaaaccatgccctgcctgtaacgctctttctggctttttagagaagggcggttattacatttttaactgtccagaacatgttgaatttcatatatcaaaacttgacagtatcattacaaagccaaatcagtatcagtctgatttactgaataaagagttaaacgccgcccgagattaa

SEQ ID NO: 23873 - DNA, 390 bp, Escherichia coli
atggaatttaaagatttactaaaagaaatccaggaaattgcagcacatgcacttcaccaacgtctgaacgaagttgaattagaatctgcaacgaagaaatacattgataatatggctcgtaatgtgcgcgatgcgtttaccggattgtactctgtttcggtaacaaacaaccagaatactgaagaaactgcaaagcggattgcctcggtgatgggttttcatgtcgaggaaaagtattcaaaaaaagaattctggaaaactacaaaaaaattgcagagcgagaactgtcatctcctgcggcaatcgcttctttctatgaggaaagttattcagatgacacaggattaccggaactgctctcattacttgaaaaattcggaattatcatga

SEQ ID NO: 23874 - DNA, 456 bp, Escherichia coli
atgtattttttgaaaagcctttatcaggctcatgtattaaatgttgcagcaacaaaccgctggtgtaacagccccgaaatgctcccggattacagagcctggctgcgcgccgaaacataccttcgtctcgacatattgattagcgaacttcaaaaagagactgcatccattcataaccttcagggtatcgacgctgttcgcattctggtatcgcgccatagtgctctctcaataattgaagtgcgtcatctctctttttctgaactgattttcttgcttcaaccagctctggaatcagcgaatatcccgccggaagtgatccaatacccacctcatgttgacgagcagttacaagatgtgccatacaaccagcgtgctggattgactccctgctcagaggctgaatgggatcactctctgctgaagaaataccaagatttgtataatcctcaataa

SEQ ID NO: 23875 - DNA, 774 bp, Escherichia coli
atgactaaacatatggacattcattgtcaaacacgcatatttaactcaattaaccatgacaccaaatataaaatatgtatttttactccaaaaaacattaaaaaaaataatgcaactctttatatacttgatgggaatagtgccaacaattacatttctgatattctgcctgttattgatgcactacccaatccaccagtgttagttacacttggttatgaatcttggaataaccttagcattcatcgccgtgcttacgattatactcctgatggtgaaaatgctattgttgataactctaaaccagcatggatctactttactggtggaggaagccagtctttccgagaattattactaactcagatcatgccatgggttagtactattgctccgaacagttccagaatcggtatatggggacactcgctaggtgctatttttgtgcttgattgcttaaaaaataattcatgctttaactattattatatatctgcaccatcacttctatggcagaatgaaagaatcatcaagataattaaagatgatatatcagaatcaaagcacactaaaagtatatgcttgcttaacggaaatcttagccttgattactccgcatctttatatcctgaagccatcaaagcggaatctgttttgagaaatattttgacagaaaaatacagtaatttttctattgtacaatttccagagctcaatcatcaggagactttctctgctgcactctggaatagcattattcatttcagcatataa

SEQ ID NO: 23876 - DNA, 573 bp, Escherichia coli
gtgctatcttacttaatggcaattcactttgttttatttggaaactctactaatttaaaaaacttctggaaacatgaagtaattcggcggaaacgtatggatatctggaggcttttaagagagaaaaagcagcgtaaccggaatttccttttctggtggcggttggctaacgaaatgtatattaatggtaataaattacataagaaagcagccaaaaagttaaacagtaaaataattaacaagtttggttgtgaaataggattgggcgcaaatattggaaaagggttgacaattccccatcatgctggaattgttgttcattttgctgttgatgcgggtgaaaatctggtattacgacagaatactaccattggacagatagatggtgatatgcctagttcaagagtaaaaattggtagtaacgttgatatcggagctaattgttgcatcattggattatcacgtaaaattggggataatgtaaaaataggtgcaatgtcttttataaataaagatataccatcaaactgcacatatataactaaaaagagtggtgttgtattgtataaatag

SEQ ID NO: 23877 - DNA, 591 bp, Escherichia coli
atgccgatgaatactacaggtatgtctttcagctcttttggtataagttgccatagagagaactccttcaggaactctttccgagggaagaatgatgaggtcgtaaaatgttcaattggagaacggactattagcttttctgttcgcaaatttagcggcaatatactggaaacggtgagaaggcagagtactaaagatattgatgagtggataaaagatgaacggatagtatatccctcaagggtgatcaaccaggagattgataattactgttttcaaaaaaatgcaaaaatttccactgaagagaggcaaagagtcttttttcttgtgagccaggagaatcaactaacccttgatgttaaggcagcacaaagttctattaatcatgtaataatggggagtgcttcttttggcaagaaaatggatgctctttgtgatggtatgagccgggatgtaaaaaatcgtacatcagataccatagcaaacttgcttgcggacaagttttaccagaaacatatcgattcggatattgatattgtaaaactacgaaatgatatcccagattatttgatgcgtgctatacagggatga

SEQ ID NO: 23878 - DNA, 651 bp, Escherichia coli
atgccagtcatattaaatttttctaatggaagtgtattgccggaaaatgagctggaggctttacgacatatagcaagaagcaaccagaatgacactattactataggaggccgtaatatgaggcttcattatatccagtttatggatggttttagtgttgagcctattcttggtggactttgggaccatcttggggcaagagaggctcatcatctcgcagaccgcctgacaagacaacttaacggaggtaacacttttctgcaggcatacagcttatatctggagcagaggcaagctgccccgcttgtgcaggagagcgtcataaaaacactactagatcgaataaattcgaatgcatttcccgttagtttacaagacttttcctgtactgaggaacatcttaattgtccgataacgctacatattcctgagacaggtgtttttgtcagaaatgctcgaaattcagaaatatgtgcattatatgatcaggaagcattgactgaacttatcctgcgtaacgctctccaccccctcagccgtgacccctttgctccagaaatgattataagcaaagacaagtgtcattttaatataacaaaacaatgtttttacgcattacccatatacccacttcaacaaaacagtatttaa

SEQ ID NO: 23879 - DNA, 1059 bp, Escherichia coli
atgcccaaaatatcatcagttgtatcatcatgttaccatctgttcagtgaacatcaacaactttcaaatgaaacaacaatgacgaaccccgtctccagaagaattgttcataaagaatatggtatatctttaaaatccgttcctgtatggttggctacagctaaaactccccttgctctactcaatggcagacatacaagaagtcactcatttattattgcagggaccccaggaatgggaagcaggagcggagcccaatactatgccataaacagtgatgataaacgctcccgaatagacattgactctttatttttaaaaaagttaaataatgtgcgaaatcaaaataaatttccaatcgatgtaaaagaaacggttataaaactacaagggcaaaaattcacatgcattgaagatttttataaaaggtataatgaaaccaggttaaaggccaataccaatatccaacaagaacaaattgcagatgaagtaaaatcacttacatatttgattccttcagaaaaaaaagagatgtggatatataaaaacaatggaaaagataatgcaaaaccaaacttaggagagcgagacgtaagaatgttcgaaaatattagttctgatgatacagataagataacaggaaggaaattttcagagttaggtgagtatctttattcagggaatgtaataaaactcagtcagttatcaattcgttacttacccaatatcagctcaatctcattaatagagacaaaacagagtttgttgctacatcgattgtattcagatgaagtacttcagagaaatggaacgcttatcccgacaccactacatgaagaaaaatcaattccagctgacaatataaaaacaatgctcaacaacataccgacttacaaaatgttaccgccattcacagaaacacaaggtaattgttcttctggcgcagccacgtttttacgcaaatcaggcgccgaagaaaaagatattcttgcatgtagcccccgaaattatgggctgcatcataacataaaaacatgggaccccttggttagaaattaa

SEQ ID NO: 23880 - DNA, 408 bp, Escherichia coli
gtggctctggaaaggcaattaaatggaggtgtcgattttttaaggagtgttaataactattttcagagtgtcatggcagaacacagagaaaataaaacaagtaataaaatattaatggaaaaaataaattcctgtgtatttggaacggattctaatcacttttcttgcccggagtcatttttgacatgcccgataacgctggacacacctgcgaatggagtgttcatgagaaactcacaaggtgctgagatatgctctctatatgataaggacacgttagtgcaacttgttgaaactggtggagctcatcctctgagtcgagaacctataacagaatcaatgattatgagaaaagacgaatgtcactttgattcaaaaaaagaatcctttgttgcaagtgatgcttaa

SEQ ID NO: 23881 - DNA, 270 bp, Escherichia coli
atgaatatactaaaaaaacttatgcagcgtctgtgcggttgcggaaagcatgatgaccgtgaacacggggagttacttacagcacagctgcgactggggccggcagacatcctggagtcagatgagaatggcattatcccggagcaggccagggtaatcacgcaggtggtgatactggatgcggataaaaagcagatacagtgcgtggtaagaccgctgcaaatcctgcgtgctgacgggacgtgggaaaatattggcgggatgaagtaa

SEQ ID NO: 23882 - DNA, 582 bp, Escherichia coli
gtggctgataacaacgttcagcaggaacagccagcgccagaagaaaccaccacggcaacagaagcgaaaatctcagagtgcgatttaaccgcgacgattgaacaacgcggaccacaaacggcggatgaactggctacgctgttcggtacaacatcccgcaaagttgcttcaacgctggcaatggcaatcagcaaaggtcgtctgattcgcgtaaaccagaacggtaaaattcgttactgcataccaggtgataatttaccagcagagccgaaagttgaatcggtagcggaaaccgatggtaaagcctttcctcagccagccggtgttgcgttaccggtacagaaagatgcaacacaggaagatattaaaacagaaactgtggcggacattgtgcagtcgctgccatcgtttactgcaacgcgagaagatgatttgattttgccatcgctgcatatggcaaatcgcgaactgcgtagggcgaagaatcatgtccagaagtgggagcgagtctgcgccgcgctgcgggagctgaacaagcaccgggatatggttgccgggatttgtcggaagtccgggcaatga

SEQ ID NO: 23883 - DNA, 546 bp, Escherichia coli
atggataactcaaaacattctgatgaggcggaaaaattattggcggagctttctgctagaaaaggtgaaggtgaaggtgaaggtgaaggtgaaggtgaaggtgaaggtgaaggtgaaccaaaatcaacagtaagcgtcttttatttgcagccagaagaagtaaatactttatcacaccaggcaaaacgaggcgatggcgaggcgggttttaggttgttcttgtactacaagttgtccaattatgatgaagaaaaaagtagtcagtggttaaaaatagcggctaataatggtcatgcgacagctcagtatcggttatatgtagagttacaagaacaaggtgaaaccaaggaagctaatgaatggttacaaaaaattaaattggctgccagtaataatgacagttcagcaatatggttcttggtgaattgttataaaaaccagggaaataaaaaagaagcattgcaatgggcatataaactcaaagcgagtaaacagccgcttgatgcagatcgactaattgaagaattaacgaaagaacaaaagtag

SEQ ID NO: 23884 - DNA, 267 bp, Escherichia coli
atgggattgtttacgacccgccagttactcggttataccgaacaaaaagtgaaatttcgtgcgctgtttctggagctgtttttccgccgtacggtgaatttccataccgaagaggtgatgctggacaaaattaccggaaaaacgccggtggcggcctatgtctccccggttgttgaaggaaaagtgctgcgtcatcgcggtggtgaaacccgcgtgttacgtccgggctacgtcaagccgaaacacgaattcccctggagccggtaa

SEQ ID NO: 23885 - DNA, 348 bp, Escherichia coli
atgttcctagcactgggcatcaatatcgcaggtcagaaagagctcctggggatgcggctggccgaaaatgaaggggcgaatttctggttcaatgtgctgactgaactgaaaaaccgcggtctgaacgatatcctcatcgcctgtgtgtatggcctgaaagaattcccggaggcccgcatccagttatgcatcgtgcatatggtgcgcaacagcatgcgcttcgtgtcatggaaggaatacaaagccgtcactcgcgacctgaaagcgattagcctcccacagaagaggcaggccagcaggcactggaagcgtttgctgcggcctgggactgccgctatccgcagataa

SEQ ID NO: 23886 - DNA, 258 bp, Escherichia coli
ttggcgacgtttttcgcttatccggcagatatccgcaaagtgatctacacaacgaacgccatcgagtcgctgaacagtgtgatccggcatgccatcaggaaacgcaaggtgttcccgacggacgagtcagtaaaaaaagtggtgtggctggcaatccaggccgcgtcacagaaatggacaatgccgttaagggactggcgaatggcaatgagccgctttattatcgagtttggtgaccgtcttgacggtcacttttaa

SEQ ID NO: 23887 - DNA, 570 bp, Escherichia coli
atgttaccaacaagtggttcttcagcaaatctttattcatggatgtatgtatcaggaagaggtaacccttcgactccggaatcagtaagtgagcttaatcataatcactttctttctcctgaattacaagataaacttgatgttatggtctctatatattcatgtgccagaaataataatgagcttgaggaaatttttcaagagctaagtgcttttgtaagtgggctgatggataagagaaatagtgtatttgaggtgagaaatgaaaatactgatgaggttgtcggagcgctgagggcgggaatgacgatagaggacagggatagttatatcagggatcttttttttctgcattcattgaaagtaaaaattgaggaaagtagacaaggcaaagaagattcgaaatgtaaagtttataatctgctatgtccgcatcactcttcagagctatatggtgatctacgagcaatgaaatgcctcgtggaaggatgcagtgatgattttaatccttttgatattattagggtaccagatcttacttacaacaaaggatctttacaatgtggatga

SEQ ID NO: 23888 - DNA, 912 bp, Escherichia coli
atgttatcgccctcttctataaatttgggatgttcatggaattctttaaccagaaacctgacttcgcctgataatcgtgttttatcctctgtaagggatgctgctgttcactctgatagcgggacgcaagtaacggttggcaacagaacatatcgtgttgtggtcactgataataagttttgcgttacaagagaaagtcatagtggttgttttactaatctgttgcacaggttgggatggcctaagggagagattagcagaaaaattgaggctatgctgaatacatcgccagtgagcacgactatagaaagaggctctgttcattcgaacagacctgatttacctccagtggattatgcgcagccggagttacctccagcggattatactcaatcagagttgccgagggttagcaacaataaatcacccgtgccaggtaatgttattggtaaaggtggtaatgctgtcgtgtatgaagatatggaagatacaacaaaagtgttgaagatgtttactatatctcaaagccatgaagaggtgacaagcgaagttcgttgtttcaatcagtattatggttccgggagtgcagagaaaatatataatgataatggaaatgttattggtattagaatgaataaaataaatggggaatctcttttggatattccatcattaccagcacaagctgaacaggctatttacgatatgtttgacagactggagaaaaaaggaattctttttgttgatacaacagaaacaaatgttttatatgatcgtatgagaaatgaatttaatccaatagatatatcatcttataatgtttctgatatttcatggagtgaacatcaagtcatgcaatcttatcacggaggaaagctggatcttattagtgtagtattaagtaagatataa

SEQ ID NO: 23889 - DNA, 693 bp, Escherichia coli
atgctaaacacctacgtcgcagaaggtaaagcggtttccgcaagagtaatcaggtcaacccttgttgacgtttttcgaggggcaatagccgaggggcatgtggcaacgaatccagtaacaacaacccgtgcagcaaagtcagaagtaaggcgctcaaggctgacagctaatgagtatgtcgctatttaccatgctgctgagcacctccccatctggctgaggctgtcaatggatttagctgtcgttacagggcagagagtgggcgatttgtgcagaatgaagtggtcagacataaacgatggtcatcttcacattggacagagtaaaacaggagccaaaattgccattccgctggctctaaccattgacgcactcgacatctcactggttgatacactacagaaatgcagggaggccagcagcagtgaaacaataatcgcatcaacctatcacgaaccactttctccagccacagtatcacggtatttaacaaaggcgcgaaatgcatccgggatctcgtttgatggagacccaccgacatttcatgaactacgtagtctgtccgcgaggctatatcggaaccagattggctacaagtttgcacaacgtcttcttggacataaatctgattcaatggcggcgcattatagggacagtcgcgggcgggagtgggacaaaattgaaatcggataa

SEQ ID NO: 23890 - DNA, 1326 bp, Escherichia coli
atgaacattcaaccgaccatacaatctggaatcacctcacaaaacaatcaacatcatcaaacagaacaaataccctctacacaaataccgcaatccgaattacctctaggatgccaagctggatttgttgttaatattccagatgatatacagcaacatgcaccggaatgcggtgaaacaacagctctactgagcttgataaaagataaaggtctgctctcagggctagacgaatatatagctcctcaccttgaagaaggatccataggaaaaaaaacattggatatgtttggtttattcaatgttacccaaatggcattagagatacctagttccgtttcaggcatctctggtaaatatggtgtccagctaaacattgtaaaaccagatattcatcctacatcaggtaattattttttacagatattccctctgcatgatgaaataggttttaattttaaagaccttcctggcccgttaaaaaatgcattaagcaacagtaatatatcaaccactgcagtgtcgactattgcatcgactggaacatcagccactacttcgacggtaaccaccgagccaaaagacccaataccatggtttggattaacagctcaagtggttcgtaatcatggtgtagaacttcctatagtcaaaactgaaaatggatggaagcttgttggagaaacaccacttactcctgatgggccgaaagcaaattacacggaggagtgggttatcagaccgggagaagcagattttaaatatggtgcatctccattacaggcaactctagggctggagtttggcgcacatttcaagtgggatttagataaccctaatactaaatatgccgttcttaccaatgctgccgcaaatgcgcttggtgctttagggggatttgcagtatccagatttgctagtacagatccaatgttaagtcctcatatcggtgcaatggttgggcaagcagcagggcatgccatacagtataatacccctggattaaagccagacactattttatggtgggctggtgcgacactgggggctgccgatttaaacaaggccgagtttgaagtagctagattcactgactatcctcgtatatggtggcacgcaagagaaggagctattttccccaataaagcagatattgaacatgccacaggtgctgatatacgcgcaatggaagaaggtatccctgttggacagcggcatccaaatccagaggatgtggtaatcgatatcgaaagcaatggcttaccacatcataatccatcaaatcatgttgatatctttgatataatccaagaaacaagagtctaa

SEQ ID NO: 23891 - DNA, 204 bp, Escherichia coli
atgagcagcatatttttaaccgaaaatgaattgcaaacgttaacgggctgcaaatatgcaagccaccagcgcaactggttaataaaaaatgggcttccgttctataccaatcgtagtggaaaaccgatcgtcagtcgggaactgtttacctgtataaaaactttaccaccacgtgaggctgaacctgatttcggtgcgatctaa

SEQ ID NO: 23892 - DNA, 960 bp, Escherichia coli
gtgccggaactgaacgacagtatcagcgcgacaccgaaagccagcatgaagaataaatcctggttcaggatgcaagctggggggccgggtgacgcggatatttatatttatgacgagattggtttctggggagttaccgcgaagcagtttgtcagcgaactgaatgcactgggtgatatcacccacattaatctccatatcaattcaccgggtggcgatgtctttgaaggcatcgccatttttaatgccctgaaaaatcagggggcgaccattaccgtgtatgtggatggcgttgccgcctcgatggcatctgtgattgcgatggccggtgatacggtcattatgccggaaaatgccttcatgatgatccataagccatggggattcagtggcggggatgctgaggatatgcgcagttatgccgatttgctggataaagtcgaatcggtactgttgccagcctatgcgcagaaaaccggaaaaaccaccgatgaaattgccgccatgctggcggatgaaacctggatgtccggtgccgaatgtctggcacacggatttgctgaccaggtgacacccgctgttgaggcaatggcatgtattcagtcaaaacgtacagaggaatttaaaaagatgccggaatccatccgaaacatgattactccgccacgcaacagtgccccgcgtgataccacagtgacaatccctgcaccggcggtaacagaaccatcaccggtaccggcagtgtctgatgaggcgaccattcgcgcccgcgttatggctgagcagaaagcccgcatgtcaggcattaacgatctgtttgccatgttcggcggtcgctatcagacgcttcaggcacagtgcgtggctgatcctgactgttcgctggaaatggcccgtgaacgtctgctgaatgaaatgggtgaaccgccccgggtttcctggagagtgttttatctgtga

SEQ ID NO: 23893 - DNA, 939 bp, Escherichia coli
atgaatactattgataatactcaagtaacgatggttaattccgcttcggagagtacgaccggcgcttccagtgcagttgccgcatctgctttatcaattgattcatctctgcttactgatggtaaggttgatatttgtaagctgatgctggaaattcaaaaactcctcggcaagatggtgactctattgcaggattaccaacaaaaacaattggcgcaaagctatcagattcagcaggccgtttttgagagccagaataaagctattgaggaaaaaaaagccgcggcaaccgctgctttggttggcgggattatttcatcagcattggggatcttaggttcttttgcagcaatgaacaacgcggctaaaggggctggtgagattgctgaaaaagcaagctctgcatcttcaaaggctgctggtgcggcttctgaggttgcaaataaagctctggtcaaggctacggaaagtgttgctgatgtcgcagaggaggcatccagtgcgatgcagaaagcgatggccacaacaacgaaagcagccagccgtgcatctggcgttgcagatgatgttgcgaaagcctctgactttgctgaagatcttgcagacgccgccgagaagacaagcagaatcaataagttgttgaattccgtagataaactgaccaataccacagcatttgttgccgtgaccagtcttgctgaaggtacgaaaacgttgccaacaacaatatctgagtccgtcaaatcgactcatgaggttaatgaacaacgtgcgaagtcgctggaaaacttccagcaggggaatctggagctgtataaacaagacgttcgcagaacgcaggatgatatcacgactcgtctgcgtgatataacgtccgctgtccgcgatctccttgaggtccagaatcgtatggggcaatcgggtcgcttagctgggtaa

SEQ ID NO: 23894 - DNA, 1125 bp, Escherichia coli
atgcttaacgtaaataacgataccctgtctgtaacgtctggggttaataccgcctcgggtacttctggtattactcaatctgaaacgggtttatcgctggatttacaactggttaaatccatgaactcgtcagcaggctggacagaaagtagccctttaccgacgccgccggcaggtcactcattagtgacgccctctgctgctgaggatgtccttagtaaattgtttggtggtattagtggtgaggttacaagtcgcactgaggaggcagagccacagcgcacaagctatccctatctctctcaggtgaataccgttgaccctcagcaaatgatgatgatggtcactctgttatccctggatacttccgcgcagaaagtctcgagtctgaaaaactctaacgagatttatatggatgggcaaactaaagcgctggagaataaaacgcaggagtataaaaaacagctcgaagaacaacagaaagccgaagagaaatcacaaaaaagtaaaattgttggccaggtctttggttggttgggcgtcgcattaacagccgttgccgctgtttttaacccagcactctgggctgttgttgccattggtgcaacagcaatggcactgcaaacggcagtcgatgtaatgggggaaaatgcccctcagggattaaagactgcagcacaggtctttggcggaatatctatggccgcaagcattctgacagccggcgttggcggggtgtcttcactgttatctaaatttggtaatgttgctaacaaaattggctcaagcgttgtaaaagtcgttgagaaggcggcagaagcgctggttaaaaacgtttttgcaaaaatttcgacagtggctgagggcgttacgaacggtattcgttctgccgggacaactgcgttgaataatgaggctgcgcaactccaaatgttgtctcagttagctgctttcgcggtgcaaaacttaactcgacagagtgaaagcttaggtgagagtgcgaagctcgagctggataaagcggcaagcgagttacaaaatcaggcgagctatttacaaagtgtttctcaactgatgtccgattcagcacgggtaaatagtcgtattgttagtggccgaatttaa

SEQ ID NO: 23895 - DNA, 579 bp, Escherichia coli
atggatacatcaaatgcaacatccgttgttaatgtgagtgcgagttcttcgacatcgacgatctatgacttaggtaatatgtcgaaggatgaggtggttaagctatttgaggaactcggtgtttttcaggctgcgattctcatgttttcttatatgtatcaggcacaaagtaatctgtcgattgcaaagtttgctgatatgaatgaggcatctaaagcgtcaaccacggcacaaaagatggctaatcttgtggatgccaaaattgctgatgttcagagtagcactgataagaatgcgaaagccaaacttcctcaagacgtgattgactatataaacgatccacgtaatgacataagtgtaactggtattcgtgatcttagtggtgatttaagcgctggtgatctgcaaacagtgaaggcggctatttcagctaaagcgaataacctgacaacggtagtgaataatagccagctcgaaattcagcaaatgtcgaatacattaaatctcttaacgagtgcacgttctgatgtgcaatctctacaatatagaactatttcagcaatatcccttggtaaataa

SEQ ID NO: 23896 - DNA, 156 bp, Escherichia coli
atgttaactggggcttttctctgtctgccttacggtggcatgcccgaggcagacagcctcaagcacccgcagcaattctacttaactctcgctttaccgcaaaccgtttttacccgatatgggaattcccatatcgtaatgaattcagttccctag

SEQ ID NO: 23897 - DNA, 585 bp, Escherichia coli
atgaccacttttacaaaagagcagttaatcagtcatgttagtgaaaatgtaaaggcgatgaaatttgcagtaaaacagacagcattcaaaaattctctcgaggcaattgagttggatttagcactggcccttgttgctcaggcttcgctggaagcagagcccgtgctttatatgaatcgatttaccggaaagacattctcactggaagagcaacccggtgctgataaggaaccggaaatatacgtgccgctatatgctgccccgccagacagcgccgccatgcttcaggctggaaactttcgggaaaaaaagggttcgtcaaccaataattttcgggaaatctcggaaacgtcaaccaactatccggtaactctggatgattggataagctgtagtgagcgaatgccggatgatggtcagcacgtaattattttatgtgatggcgcattcgttctttatgcgcaatatcgagacggtgagttttttgatgtagtccgtaatggtgatgaatttttcgaaacacagagccgcaatgtaaccgactggatgccgctaccagaaccgccgcaggaggtgcgccaatga

SEQ ID NO: 23898 - DNA, 396 bp, Escherichia coli
atggcgaaaccttttacacacgaacagcgtgaagaactgaaggcccgaattatcgggctggtacgcaaaaatgaacgcatgacgatatcacaactggagagagcgacgggagcaggctggcattcagtcagacgttgccttgtggatgtactggcttgtggcgatttatacatgcccggtaaatacggtgtttttacatcagaacaggtgtatcgcgtatggcgtaaggcagcggagaaagcaaccgaccagacattgattcgaaagttaccagacggagaaatacgccgctacgacagacaacagaacataatctgtggcgagtgccggaagagtgaagttatgctgcgtgtactggcgttctatcagggcaattttcaggaggcggtactgtga

SEQ ID NO: 23899 - DNA, 1173 bp, Escherichia coli
atgacgattgcgaaggatagttcgactgatgaaatcattcatggaaatgatctccgtggaatggatgatttttacattaagacaacgagttttgaatgcccatacgagccttgtaaaattaaagccacaccttgtagttttactatgaaacatgttaatcaatcatatttcagatatggcgataaacataaggatggatgtggtattcatgatccaagatataaaaacaatcatacttcaaatgacgaaagaaaacataattcgccacctgctccggttatatcacttttaaaaattgatgtgaaaccaagaggtggtgttaaaaatgccagaaatattaaaaatgaaaatcacaaggatgaaaaaaaaggtaatgaacatcctgtatcttcatcaagtattaagccagtcgttgactattacataaataatagcaatcataatgaacagctatcaatccctccatatggcacgcgatcttataaagatacatttcaacttattttttacaaaaacaacatacgttattacaaacctgctatttattatggtgtagcccagtctaatattcgtctgcatgaagattcagataaacattgtattactttcctcgcaagggataagaaaacccaaaaaccatttacgcttgaaattgatgtttctgactggaataaaagtcagaaggatgtgttttggaaggaatatgaaaagcaaaggaaggaagctgataggtattataaggggcttaaagataaaaggaatgctaaaaaatacttgacggttttcttttttgggatgccggatgaaaatgataagtttctatttaagacaaaccactttaaattagtatatgtggctttcttgggtaaatttgaaagctcatataatgatagtaattattacattgaaaatgatctgtctgtatcatcattgaatgaacaacccatttcattatctgatatagaccataaaaatcatgaatataatattgaaacttcattagattttagttctcctttgccagagccagagccagagccagagccagagccagagccagagccagagccagagccaataagatcctctttaaaggaaaatactgagactgtagaaatgaacagtaaagtttgggggaggctgaaaaagataatcactttctttaaaaagtga

SEQ ID NO: 23900 - DNA, 303 bp, Escherichia coli
ttgaaaaatgagacgcaggaaagtgtgaaaaccaaaattgttaaaggcaaaactacaaaacaggacgtgttagcatcgttcggtgaacctgacagccgttctttgatcgatggtgaagaacaatggtcatacactatgtataacagccagtccaaagcaacctctttcatccccgttgtgggactgcttgcaggtggcgcagactcacaaactaaatctctgacagtttctttcaaaggcgaaaaagtcagcacatacatctttaatgctggaacaagcaacgtgaagactggcattttttag

SEQ ID NO: 23901 - DNA, 639 bp, Escherichia coli
atgttaagggatactggcggcataaaaccccatgagcgtaagcgggctgtagctcacctgacactgtctgagcgcgaggagatacgagctggtttgtcagccaaaatgagcattcgtgcgatagctactgcgctgaatcgcagtccttcgacgatctcacgtgaagttcagcgtaatcggggcagacgctattacaaagctgttgatgctaataaccgagccaacagaatggcgaaaaggccaaaaccgtgcttactggatcaaaatttaccattgcgaaagcttgttctggaaaagctggagatgaaatggtctccagagcaaatatcaggatggttaaggcgaacaaaaccacgtcaaaaaacgctgcgaatatcacctgagacaatttataaaacgctgtactttcgtagccgtgaagcgctacaccacctgaatatacagcatctgcgacggtcgcatagccttcgccatggcaggcgtcatacccgcaaaggcgaaagaggtacgattaacatagtgaacggaacaccaattcacgaacgttcccgaaatatcgataacagacgctctctagggcattgggagggcgatttagtctcaggtacaaaaaactctcatatagattcgtttttctga

SEQ ID NO: 23902 - DNA, 1050 bp, Escherichia coli
gtgcgggtattacttcgacctgttctggtaccggaactcgggctggtgatcgttaagccgggccgtgaatccatgccggtattccacaatacccgggtactggtggagccggaaccgaaaagcatgcgtaatctgccgtccggggtcgttcctgccgttcgccagccgctggcggaggataaatcattactgccatttttcagcgacgaacgagtgattcgtgctgctggtggcgctggcgcactgtctgactggttactgcgccatgttaaatcctgccagtggccacacggcgattatcaccacagtgaaaccgtcattcaccgttatggtaccggcgcaatggtgttgtgctggcactgcgacaaccagttgcgtgaccagacatccgaatcactcgagcaacttgctcatcaaaacctgtcagcatggatgattgacgtcattcgtcacgcaatgaatggcacacaggagcgtgaattatcgctggctgaattatcctggtgggcggcctgcaatcaggtggtggatgcactacctgaggcagtagcgcgtcgttcgctgggattaccagcggaaaaaatccgctccgtataccgtgagagtgacatcgtaccgggagaacagacagccatcagcatactgaagcagcgcacaaaaaatattgcgctgccacttcacgtccaccagcaacaaaatccaccacagaaaaaaacggttgtcagtatcgccgttgatccggagtctcctgaatcgttcatgaggcggcctaaacgttgccgctgggttaatgagaaatacacgcgctgggtaaagacacagccgtgtgcgtgttgtggtaagcctgctgacgatccgcatcacctgattggtcatggtcaggggggaatggggacaaaggcccacgatattttcacgctaccgttgtgccgggagcaccacaacgaacttcatgcagacccgctggagtttgagaaaaagtacggctctcagattgagttaatttttcgttttcttgatcacgcctttgcgactggcgtgctcgggtaa

SEQ ID NO: 23903 - DNA, 312 bp, Escherichia coli
atgagcgtaattaaagaaatgccagtggaacgtaatgaatatggctgctggacgcatcctgaatatgaaaaattctgtgatggtcgggaatatatttcaacggaagagtttaacgcctggatggagaaaaataatcttcagtgggctatccgtagtatggatgaagatgattttaatctggacgcagatggccctgatatttcagcatgggaacctgagcgaccagaaggtgagggatggtttatcggttcgatacatgacaccgaagatggtcctgtttgtgtatggctgagaaataaggccgaagcataa

SEQ ID NO: 23904 - DNA, 153 bp, Escherichia coli
atggcgaaaaaacatcattattttgctgaaggtgaaataacaagtatttgcggtgggtggatgtattttggcaatgagcgtgagccggatacattcgaaagtccagatgattgtaaaaagtgtcgtagaaaattaaataaggggggtaaatga

SEQ ID NO: 23905 - DNA, 357 bp, Escherichia coli
atgagcgagattaactatcaggagctgcgtgttgagctgggagcagcaaaaaaacgcatagaagagctggaggctaatcgtgtggtgcttgaggtggaaaatgagaggttgaaacacgcaatggccgtagcccttgagcatatatccgtcacagatgcaggacaggcaggtgtcgctgcaatgattatctatgatgccatgtaccacagtgaaaaaactgacccctacgcttttctggcagaattgcgggcgcagggtgtggagatggtgcgcgaacatccagcaatcaaactttgctctttgacgcacatatgtgacgagttagtcgcagagcttcgcaaaggaggcaacaagtga

SEQ ID NO: 23906 - DNA, 225 bp, Escherichia coli
atgaaaatcagatatcatgatttcggccccgtgtcacatatgcttatttcaagtacggtgctggaaacaagaaaacataatcacatactggatatgctgcgtcttgctgacccgtatctggtaataaacaccagtggaattttctttctgagaagcactgtgtcaggaaaaacatcgcatgtgcttcgggcatataaaacagcagtgcgggaggaaggagaatga

SEQ ID NO: 23907 - DNA, 699 bp, Escherichia coli
atggaaaccgtttttgacgcactgaaagcactgaaaaaagcctcgtcgcacgagattgcagcccgtcttgaaatcagccgtgacgatgctgttaccgaactctggaagctgaagcgtcgtggcgaagctgataacaaggggtcgatgtggtggctgacgagtgaggcaactgaagcggccccaaaaaccactgcagagatgctgattaacgcgattgaacagcatggtcctcagtcggctgacgaactggcgttaatgttcgggattacctcccgccgggcgaattcatcactggcgatggctgtcagcaaaggtcgtctgattcgcgtaaatcaggacggtaaatatcgttactgcataccgggcgataatttaccggcagagccgaaagctgcatcggtaacggaaaccgatggtaaagcctttcctcagccggcaggtgttgcgttaccagtccgggaagcggaaacacaggaagaaattaaaactgaaagtgtggcggtcacagtgcagtcacagtcgtcgttcatcagaaagcatccggatggtctgattttaccatcgctgcatgtggctaaccgcgagctgcgccgggcaaaaggtcaggttcagaagtgggagcgcttatgcgccgcgctgcgggaaattaataagcatcgtgatgtcatacagaaaataacgacaggagataacgggtaa

SEQ ID NO: 23908 - DNA, 1938 bp, Escherichia coli
gtgactcttaaacgggcctgttccctgctgacggtgaaatccttcagtgaggatgaacgggtgatcaccgggattgcgtcaacgccttctccggatcgggatggtgacatcctggagccggagggcgcggagtttggcagtgcgatcccgtttctctggcagcatgaccattcccgcccggtggggcagtgtacggtgcgccgggtcagcgaagggctggaaatcacggcaacactggtgaagcccgtaccggatatgccgtcgcaactggctgcccggctggatgaggtctgggcggccattaagaccgggctggtcagggggctgtccgtgggcttccgtccccatgaatacacctttctggacggaggcggactgcattttctgcgctgggaactgatggaggtgtctgccgtcaccgtgcccgcgaatgcggaatgcaccatccggaccattaaatcttacgaccgcccgttttctgccgcgtccggcaaccggaaaccggtggtgaaaatcgcatcttctgccggcgctgcggcacagtcaacaaccgtttttcataaggaaaagaccataatgaatattggcgaacagattaaaagttttgaaaacaagcgtgcagcgctggcagcctcccttgaggaggtcatgaccaaagccgcagaggaagggcgcacgctggatgtggaggaggaagagcattacgacaacaccgcagcggaaatccgtcaggtggatgcgcacctgaagcgcctgcgtgaactggaagccggtaaggccgccacggcgcagccggtgaaacaggccggtaacgggaatgtggccgcggtggcttctgcgccggtgatccgtgtggagcagaaactggataaggggattggcttcgcccgctttgccaaatcgctggctgcggctaaaggcgtccgatctgaagccctggaagtggcccgtcgtcagtatccggatgacagtcgtctgcatcatgtcctgaaatcggcagtgggcgcggggaccaccacggatccgcagtgggcaggcagcctgtctgaatatcaggaatacgcacaggactttattgattacctgcgtccgcagaccattatcgggcgatttggtcagggcgggatccctgcacttcgtcaggtgccattcaatatccgtgtgcacgcccaggtgtccggcggtgctgccggctgggtgggtgagggtaaggcaaaacccctgacgaagtttgattttgaatccatcaccttcagtcatgcgaaggtgtcggccattgcggtactgacggaagaattgatccgtttttccagtccggctgctgatgcactggtccgtaatgcgctggcggaagcggtggtggcgcgtctggatacagactttgtggacccgaaaaaagccgcagtggcagatgtctccccggcgtccatcacccatgatgtgaagggcacggcatcaaccggtaacccggatgcggatgccgaggctgcgtttggacagtttgtggcagcaaacctgcagcccaccggtgcggtctggctgatgtccagcaccaatgccctggcactgtccatgcgtaaaaatgcgctgggtcagaaggaatacccggacatgaccctgctgggtggctccttccaggggctgccggtgattgtctcccagtacgtgggtgaccagctggtgctggtgaatgccccggatatttatctggcggatgacggcggcgtggcagtggatatgtcccgcgaggcatcactggaaatgcagtctgagccgggcggcgacagtaccacgccgtccccggtggagctggtttccatgttccagacaggcagcgtggccatccgtgcggagcgctggatcaactggcgtcgtcgccgtactgcggcggtggcggtgatcaccggagtgaactacggcagtgcgtccggcggctga

SEQ ID NO: 23909 - DNA, 552 bp, Escherichia coli
atgaatgcagctcaatcatctttggatgagggaaagctagtaattgcttactctgataagaatggctctacagtagggctggaattttcttctgtagcatcaagccaagcaacgctcttgatgaaagcttgttctgttgctgcttcagataaagaaaaacggattgtcacatcggttgtgatggatgatactgagatcattcaaacaacaagtgatgatggaggcgacgacatggataagcgattagcagttcttgaagctgaagttgcgcacatcaagagcagcatggcaggaattaaagaggatacccggaaaatatcttctgattctactgacgccaaaagagacaccgctgtacttttacagaagagcctggattttgatgcttcattatctaagaaaccatcggttgactactttgaagctaaattttccgctttggaaaccaagatagcagatgtaaaagtatggatgctcggggttctcttggcctcgcttgctatgccaactatatttttcctaataaacttgtaccttaagaaaggtcagtaa

SEQ ID NO: 23910 - DNA, 282 bp, Escherichia coli
atgagcgataaacaagaagtttccttagcacatatcaatgatgtgctggagtccaaaaattatattgaaactaatgctgatggggttgtaaccatcggaacggataacaatggctacgaagtttttaacttcgtttttctcaatagcacccctgtcatcggccatatgaatggcgaaatcgcagtggcaggaatgcagcgcactaaggttgcgtccgtgactttaagtaaacagaaggccttcgatttctatcagtccttgaaaagcatgttcgaggaataa

SEQ ID NO: 23911 - DNA, 219 bp, Escherichia coli
atgaacaaaattgcccagcagcgaaaaaaaatcggagtttcgcaagctgtactagcttcggcaattggttgggggcaatcccgcatcgccaactatgagctgaatatccgtactcctggccttaacgattgccgaatgatcgtagaaggcctcaggaagttagggtgccaatgttctttggatgatgttttccctccatccagtaacaaagccgcctaa

SEQ ID NO: 23912 - DNA, 270 bp, Escherichia coli
atgtcagaaataaaatctctggtcactgctgaagcagtgaaggacgtcctgcgctctgaagaagtcagaagcgcactgaaacagcaactccgccagaatcttgaggcgcgtcttgatgctgaagtggatgccattctggatgagctgctggggggaccggctgctcctgagcctgaagacggcgcgggtgacagtgctgtttcagatggcgttgtgtctcagcctgacggtagcagtgagcctcagcctggcggcgaaatgatgatgtaa

SEQ ID NO: 23913 - DNA, 183 bp, Escherichia coli
atgagatttgtacagcttattttattgtatttctgcacggtggtgtgcacgttatatctggtaagtggcgggtataaggttatccggaactatatacgcaaaaagattgatgccgcggcggcggaaaaaatcagcgccagccagtcagccggaacaaaacccgaagagcctctcatttcgtag

SEQ ID NO: 23914 - DNA, 1938 bp, Escherichia coli
atgtcgattaaacattatgatgttgtcagggcggcgtcgccgtcagatcttgcggaaaagctgacacacaaactgaaagagggctggcagccgtttggtagtcctgtggccataaccccttataccctgatgcaggcgattgccgcggagggggatgtgaccacgccagtggttgtgcccggcacgggggatggtggctatccgggagtggtcaccacggagccagattattactacgttattccactggccgggcagtcgaacggcatggcttacggtgaggggcttcctctgccgcagacatatgaccgtcctgacccgcgtataaagcaactggctcgtcgcagcacagtgacgccggatggcgctccctgtaaatataacgacattattccggcagaccactgtctgcatgatgtacaggacatgagccgtcttaaccatccgaaagctgacctgtcgaaaggtcagtacggaaccgtggggcaggggctgcatattgccaaaaagctgctgccgtttataccggcgaatgcgggtattcttctggttccgtgctgccgtggtggttcagctttcaccaccggggcagatggaacatacagtgacgtgaccggtgcctcagagagttctacccgctggggtgtgggcaggccgctgtataaggatctcatcggtcgtacaaaagccgcgctggcaaagaacccgaaaaatgtgctgcttgccgtggtgtggatgcagggggaatttgactttgacggaacgccagcaaatcacacagcccgttttacagaagtagtggaacaatatcgtacggaccttgcagatatggtgggacagtgcgctggtggttctgctgacggtgttccctggatatgtggagacacaacttatttctggaagcagaagagcgaatccacttaccagacggtgtacggcagttacaaaaacaaaacggaaaagaatattcactttgtgccgttcatgaccgatgagaacggagcaaatgtcccgacgaacaaaccggaagaagacccggatattccggcatcaggatattacggtgcggcctcccggacgtcggcaaactggacgtcagcagaccgtgcgagccatttcagctcatgggcacgcagggggattatttctgaccgtcttgcctcagcgattcttctccatgcaggacggacggctgaactggtgggtggggaacaggttgtgatgccgccggatgagaagccgtcaccggacacaccatcaacaccgtcaacggacgggaaatcagtgacaacgctgctttattaccgtgcaacagagtcaggtggtttactgaatccgcagggatggggagctgaaggagggcgtgcattggtagttgatgatgcaggtgctgcaggaggtaaggcgctgaggtggaccaaacagacaggaagttcctcgtggtttatgcagcatgatgccggtaatggcgcagacctgctggagaagggcgggcttatcagttgtcgttttaaagttgatggcacactgacagctaatcagtacgcactggcgctgtactggccggtttcttcactgcctcagggcgtcacactggaaggtaatgccggtcataacctgctggcgtcgttttacgtacagagcgatgccacagaccttaatgtgatgtaccacaagggaaatgctggtcagaacacgaagctggggtcattcggcgcatttgataacgaatggcatacgctgggcttccgttttgccggtaacaacagtattgaggtgacgccggtcattgatggtaaggacgggacgccgttcatgctgtcacagtcaccggtcggcacgtttacggcagacaaattgcgcgtgaccgatatcactagcggtgcgacatatccggtgctgattgaaagtataacagtggaagtgaataacccgtaa

SEQ ID NO: 23915 - DNA, 168 bp, Escherichia coli
gtgacggtaaaactgcgtctggctgtggctgcactcctgctgtttctggtggtgatggtggatttcaccagcagaatcatgtcggtgctggcggatggggggctggtctgcggcattgtggtattgctgtggccggtgataaaaagaaacagcctgcataatgcttga

SEQ ID NO: 23916 - DNA, 147 bp, Escherichia coli
gtgaaacacgatacgcgtgaagcggaagatgtgctggatgtggcggtggccattgcggaggcagacggcgaaattgagccggaagagcgcaaggtgctggaagagattgccggtgttctgggtcttcgtctggagaattacctgtga

SEQ ID NO: 23917 - DNA, 558 bp, Escherichia coli
atgagcactattaccagagaacgcgcggagattaaatcatacatcacaggcttcctgagcgactcggcgcacgataacaagtcttcagacagcctgctggctaatgtgtttcgtatcgcgctggcatcactggaagcagagccgatagcaatggtagtgcctgatgaaatggatttgcttacctgccatctcgacggtgtaactaaaacatatgctgatggctggaacgcctgccgcgtcgccatgcttcaggccggaaactttcgggaaaataagaattcgtcaaccaacaattttcgggaaatctcggaaacgtcaaccagatctccgataactctggatggctggataagctgtactgagcgaatgcctgaaaagagccagaacgtgcttatttcgatgaatatcgatagcgaggctgggccattaatatattccgcacgctatctcggaggcacgttccggcgcggaggtatagcagttagtccgggtaatgatcttaggcaagcaacccactggatgtcgctaccagaaccgccgcaggaggtgaatcaatga

SEQ ID NO: 23918 - DNA, 228 bp, Escherichia coli
gtgaaaatcctgtatcaggattacggcccggtggggcaggtggttatcagcagtactgtaatggagtttcggaagcataaccgtgtggtggatgctgtgctgttaacctgtccggggatatcggcgagtcgtgcaggtgtgtttattatgaagacgaaattatatggcagtaaggcgtggataaagaaggcgtatcgtgtagcgttgcaggaggttaacagtgagtga

SEQ ID NO: 23919 - DNA, 282 bp, Escherichia coli
atgatactccggcagtgtgcgggaacgatgaaggtaaaaagcgttggcgcacttatcggacgaactgaagcggcagtgagaacgaaggcacgggagctgggcatcagcatgatgttacgtggtgattttcacccgtcggcaaaatattctcagcgtgatattgagctggcgcggcaactgcatcagagaggcatgcaaagaagggaaattgccagaaaattaggcatgccgctgcgcatagtgaataactacgtttatttcgacaggagggtgtctgcgtga

SEQ ID NO: 23920 - DNA, 717 bp, Escherichia coli
atggaaaccgtatttgacgcactgaaagcactgaaaaaagcctcttcacaggtagtggcatcgcgccttggaatcagccgcgaagatgctgtcaacgaactgtggaaactgaagcgccgtggtgaagcggataacaaggggtcgatgtggtggctgactcagactggtgaaagtgaaccagtgtcaccggtaccgaaagtgacagcgcaaatgctgactgaggcgattgaacatcatggcccacaaacggcggatgagctggcactgatgttcgggattacctcccgccgggcgaattcatcactggccatggcaatcagcaaagggcgtctgattcgcgtgaatcagggcggtaaatttcggtactgcataccgggcgctgatttaccggcagagccgaaagccgcatccataacggaaacggatggtaaagcctttcctcagccagcaggtgttgcgttaccagtcggggaagcggaaacacaggaagaaataaaaacggaaagtgtggcggtcacagtgcagtcacagccgtcgttcaccagaaagcatccggatggtctgattttaccatcgctgcatgtggctaaccgcgagctgcgccgggcaaaaggtcaggttcagaagtgggagcgagtctgcgccgcgctgcgggagctgaacaagtgccgggatattctccgggatattaccgccaccagagaacagcagcggtga

SEQ ID NO: 23921 - DNA, 795 bp, Escherichia coli
atgcaggggcgggttctggatggtgaccttatttccggatgggaaaaacgtcaggtgctgaaagaggacaatggtaacgtttcgcaaacggcaaaatccccggcagagcgcaagagagcgcagcgggagcgggaaaagctgcggaaacataatgctgattgtcacgatgagtcacgacgtgtcacgcatctgtcacgacaagtcacgacagataaagatacagataaagatacagatacagaattaaaccccacacataacgcgcgcgagagtattccgaccagtgagtcgaatggtgcgccgttgcagacagccgaacctgaatacctggacggcctgagcgaaccgatcgggaaattttcgatgactactgtctggcagccgtcgccggattttcgacaacgggcagcagtgtggggtatggctctgcctgagccggaatttacacctgctgagcttgccgcattccgggattactggatggcggaggggaaggttttcacgcaggttcagtgggagcagaaatttgcccgccacgtgcagcacgtcagggcacaggtaaaaccagtcagcaaggggggaagccatgcagcatcaggtggcacggcatcacgggcagttcaggaaatccgggctgcacgcgaacagtgggaacgtgacaacggatttatcagcaacggaaacggcctggaagctgtgggagctcatgggggaggtgtattcgaaccgctggactcagaagaacggggccgcaccttcgaagctctggattgcccagattggtgcgatgactga

SEQ ID NO: 23922 - DNA, 192 bp, Escherichia coli
atgaacggacaaatatcaattgttcgaccaggagcatgtgacgatcgcgaaatacgaatgattattcgtctggcgatggggaaaacaataactgctctcattactccagaaaatctcgcattagcattaacaggaaagtcagacatgccagtagagctaaagctgcgaaatgttgagattaaggtgaaatag

SEQ ID NO: 23923 - DNA, 318 bp, Escherichia coli
gtgaatattgacccggcgataacgattgatatggccctgaacgccggcctggcacttcttggttatttctacattatgttctgcagcggacgatggctgtcactgttgttcatgaaaaaatggaataaacgccgtaagcaggagcaacgccagaaggcaatggatgcatttttcgaagccttcggaattgacggcatggaaccaggggatccagctcgcgcaatcagcagagggggtgtagtaatccttgtatatcggagtgaagagaaaaatgacgatcacaaaacaacgtgtagaagaaatcatatcccgcattga

SEQ ID NO: 23924 - DNA, 390 bp, Escherichia coli
atgcagaaaagcaataaagttataatcagctgtggtatggcattatattttttgtgtggggggattacagtggcagaagaacttgatgaaagcatgcaagttcttgcaaggaatatgagtgtacttcagtcatcaatggataaaaaggagcttcttgaagctcttgacagaatggatgatgctgtagatgagtcaatgaagcgtcttcctgagagcatttcaccggctgatgaagaagggaagaatgactatataaaagaacttcaaaagcttgaaaaagagattatgctggcgaaacaaaaagtcttatcgggacagttatcagatatacccgattcggtaaacaagatgaataaaatcagagttgaggggcatgataaattcagataa

SEQ ID NO: 23925 - DNA, 2211 bp, Escherichia coli
atgataaaaaaaactcttcctgttctgattcttctggcgctatcggggagcttttctaccgctgtagccgctgataaaaaagagactcaaaatttctactatccagaaacactggatttaactcctctgagattacacagccctgaatcaaatccctggggggctgattttgattatgccaccagatttcaacagctggatatggaggctctgaaaaaagatatcaaagatttgctgacaacttcccaggattggtggcctgcggattatggtcattatggtcctttctttattcgtatggcttggcacggtgccggaacatacaggacatatgatggccggggaggcgccagtggtggtcagcaacgttttgaaccgctgaacagctggccggataacgttaatctggataaagcccgtcgattgctgtggccagtcaagaaaaaatacggctccagtatttcctggggagacctgatggtcctgactggtaatgttgcccttgaatccatgggatttaaaacgctgggatttgctggcggaagagaagatgactgggagtcggacctggtatactgggggcctgacaacaagcctcttgcagataaccgggataaaaacgggaaacttcagaaacctcttgccgccacgcagatgggacttatttatgtcaatcctgaaggccccggtggaaaaccagatcctctggcttccgcgaaagatatcagggaagctttttcacgtatggccatggatgatgaggagactgtggccctgatcgcgggagggcatacatttggtaaagcacatggtgcagcgtctcctgaaaaatgtattggcgcagggcctgatggtgcacctgtggaggagcagggactgggatggaaaaataaatgtggtacaggaaacggcaaatataccatcaccagtggcctggaaggagcctggtcgacatcgccaacccagttcacaatgcagtatctgaagaatttatataaatatgaatgggagctgcacaagagtcctgccggtgcttatcagtggaagcctaaaaaagcggcaaatatagttcaggacgcgcatgatccgtctgtcctgcatccgttgatgatgtttacgacggatattgctcttaaagttgatcctgaatataagaaaataaccacccgtttcctgaatgatccaaaagcttttgagcaggcattcgcaagagcatggtttaaactgacccaccgggatatgggaccggcagcccgatatcttggtaatgaagttcctgcagaatcatttatctggcaggatcctcttcctgcggcggattatacaatgattgatggtaaagacattaagtcgctgaaagagcaggttatggatttgggtatccctgcatctgagctgataaagacagcctgggcttcagcttccacatttcgtgtgactgattatcgtgggggaaataatggtgcccgcatcaggttacagcccgaaattaactgggaagttaatgagcctgaaaaactgaagaaagtactggcatccctgacctcattacagcgtgaatttaacaaaaaacagtctgacggaaagaaagtgtcgttggctgatttaattgttctttcgggtaatgctgcaatcgaagatgcggccagaaaagccggggtggaacttgagattccctttactccgggaagaactgacgcctctcaggagcagacggatgttgcctcattcagtgtactggagccgacagcagatggattcagaaattattactcaaaaagcagaagtcatatatcgccggttgaaagcctcattgataaagccagtcagctggatctcaccgttcctgaaatgacggcattactgggtggtctgcgggtaatggatattaatacaaataattcttcgttgggagtgtttaccgatacccctggtgttctggataacaagttttttgttaatctgctggatatgtcaacacgatggagtaaagcagataaagaagatacatacaatggattcgatcgtaaaacgggagcattaaaatggaaagcatcctctgttgatttaatcttcagttcaaatcctgaattacgtgcggtggcagaagtatatgcctcggatgatgcgagaaataagtttattcatgattttgttaaatcgtggaataaagttatgaatagcgatcggtttgatttaaacaataaatga

SEQ ID NO: 23926 - DNA, 2349 bp, Escherichia coli
atgctgcccactacaaatatctctgtaaattctggagtaatatcttttgaaagtcctgtagattcaccatctaacgaggatgttgaagttgccctcgaaaagtggtgtgctgagggagaatttagcgaaaatcgtcatgaggttgcatcaaaaatacttgatgttataagtactaatggagagactttatcaatcagtgagccaataacaacattaccagacttgcttccaggttctctgaaagaactggttttgaatggatgtacagagcttaaatcaataaactgcttaccccccaacttatcttcattaagtatggttggatgctcatcattagaggttataaattgcagcatacctgaaaatgtcattaatttatctttatgccattgtagttctttgaaacatatagaaggttcctttcctgaggcactcagaaattccgtatatttaaatggctgtaattcattaaatgaatcgcaatgtcaattccttgcatatgatgtcagtcaaggccgtgcctgcctgagcaaagctgagcttactgctgacttaatttggttgtcagctaaccgaacgggtgaagagtctgctgaagaattgaattactctggatgtgacttgtcaggtctaagtcttgtagggctgaatttatcatcagtaaatttttctggagcagtgcttgatgatacagatctcaggatgagtgatttgtctcaggctgtattggaaaactgttcttttaaaaactcgattttgaatgaatgtaatttttgttatgctaatttatctaattgtattattagggctttgtttgaaaactctaatttcagcaattccaatcttaaaaatgcatcatttaaaggatcttcatatatacaatatcctccaattttgaacgaggctgatttaacaggagctattataattcctggaatggttttaagtggtgctatcttaggtgatgtaaaggagctctttagtgaaaaaagtaataccattaatctaggagggtgttacatagatctatctgacatacaggaaaatatattatctgtgttggataactatacaaaatcaaataaatcaattttattgactatgaatacatctgatgataagtataaccatgataaagtaagggccgctgaagaacttatcaaaaaaatatctcttgacgaattagcggcgttccggccctatgttaagatgtctttggctgattcatttagtattcatccttatttgaacaacgcaaatatacagcaatggctcgagcctatatgtgatgacttttttgatactataatgtcttggtttaataattcaataatgatgtatatggagaatggtagtttattgcaggcagggatgtattttgagcgacatccaggtgcgatggtatcttataatagttcctttatacaaattgtaatgaatggttcacggcgtgatggaatgcaggaacgatttagggaactctatgaagtatatttaaaaaatgaaaaagtttatcctgtcacacagcagagtgattttggattgtgcgatggctctgggaagcctgactgggatgatgattccgatttggcttataactgggttttgttatcatcacaggatgatggtatggcaatgatgtgttctttgagtcatatggttgatatgttatctcctaatacatcaactaattggatgtccttttttttatataaggatggagaagttcaaaatacatttgggtattcattgagcaatcttttttctgaatcatttccaattttcagtattccttatcataaagctttttcccagaatttcgtttctggtattctggatatactcatttctgataatgaactcaaagagagatttattgaggcacttaattccaataaatcagattataaaatgattgctgatgatcagcaaaggaaacttgcctgtgtctggaatccctttcttgatggttgggaactgaacgctcagcatgtagatatgattatggggagccatgtattgaaagatatgccactaagaaaacaggctgaaatattattttgtttagggggggttttctgtaaatactcatcgagtgatatgtttggtacagagtatgattctcctgagattctacggagatatgcaaatggattgattgaacaagcttataaaacagatcctcaggtatttggctcagtttattattacaatgatattttagacaggctacaaggaagaaataatgtttttacttgtaccgctgtgctgactgatatgctaacggagcatgcaaaagaatcttttcctgaaatattttcattgtattatcctgttgcgtggcgttga

SEQ ID NO: 23927 - DNA, 531 bp, Escherichia coli
atgatatatccggaaattacaggcaaaagcggcgaacatttacgcctgaacacgctggaagcagtctggatccaggggaaattacggatgtgggggcggtggtcgtatatcggtgggggtaaatccggaaatatgtttaaccggttactggtttcgaaaaagctgacgaaaacagcagttaatgaggttttacgcagcatgaagaaatccgggctggaaaaaccggaacttgaggcattttttcgggatatgaccagagggaagcagaagagctggttgtcacattgtacagacacagaggcgttgattattgatcgcgttatcagtgaggtgcttggggaatatcccgggctaatcaatattctccggcaaaggtacgaaggacggggaatgagtaagagaaaaatggcagaatgtttaaatcgtactcacccggaatggtgtttcagcacatgtgagaaacgtattgcaggttggttagccgtggctgaacacatgctttatgtacctatgcacgattcatttcgataa

SEQ ID NO: 23928 - DNA, 207 bp, Escherichia coli
atgaatcagcacaacacccgccttattcgtttaccagaggttctgcatcgaactggatacggtaaagcttggatctatcacctcatcaaccaaaatcgttttccttcccccgttaaaatcggtgcgcgctctgttgctttcattgaaagtgaagtagacgaatggattcaattaactatcgaaaattcaagaaagcatgttgcctga

SEQ ID NO: 23929 - DNA, 852 bp, Escherichia coli
atgaaaaactggtcagttgaacatacgagagaggtgaagaagtggctggatatagatacatatcgcggattcgaagagcttccgcttatacacctctaccatgaattgctggcaaggacattgttcttcaaaccatatcatgaagaatttgaagcagaagccgtaaggctctacatcgacaggatcttcactggaaagccctttctcatcacagaaaagcatctcggctatctcacaagagaggatactctttaccagcccccgcacttctttttgacgacaaccgaaagactggctcaactcagcatagttggattacggaactcactgtttttttgggatggaagcgatgagtattctgttaacagagaattcctcgatagccctgtatcggaagttttgccaaaattgttcagggatactgtcatggtcgaaatcgacctagcaaacgggacagatgaagagatcgctgaatccctaaaggctgcacttcctcaatggcgtaaagtgcgtggcatagaaccagatgtaacggaagctattcgctttggttatggaacgattaagaaaatcattaattacagactccttcccatgatcgacattctggtatggtcaaaattatataaagtacgtatatcagaagaccgcctttctcgcctgttgtatacagatgacgatgatgagatcaacactcgcctgaaccaccaaatcagggatacagacaaacctcttgctttgaaggcggcgagtataccttttattcgccagtttaatctgttcatcaacaagaacagccatttgaaaaagatcagagtttcagacgtgatgaaaatcgctgattctgactaa

SEQ ID NO: 23930 - DNA, 264 bp, Escherichia coli
gtggcgcttattgttcgccagcagcggctgaaattaagcctgtccggacggctggcaataaaaattattgcagaaccaccggataagcgccgccgtgacctggacaacattctgaaagcaccgctggatgcgctgacgcatgcggaagtgctcattgatgacgagcagtttgatgaaatcaatattgtgcgcggtcagcctgtgccaggtggacggctgggcgtgaagatttacgaaatcagaggtggtaacgatggcgcgtga

SEQ ID NO: 23931 - DNA, 372 bp, Escherichia coli
atggcgcgtgatatccagatggttcttgagcgatggggggcatgggcagcaaataatcatgaagatgtaacatggccctcgatagctgctggttttaaaggattaatcccgactaaagtgaaatcacgtcctaagtgttctgatgatgacgccatgataatttgtggttgtatggcacgattaaacaagaataatcagtatttgcacgatttgttggtggattattacgtaggtggaatgacatttatggctcttgcacgtaagcatagatgttctgatgggcttattggtaaaaggctttataaagcggaaggtattattgaaggaatgcttatggctctgaatgtccggttagatatggatatgcggtag

SEQ ID NO: 23932 - DNA, 819 bp, Escherichia coli
atgtggattgtgttagtactgtcactgtcaactctcagttggcataaggtagtggctttttcattgttgacggtgtctgttgtcctggctgtgcttaatgatattattgattggtcggtgttattttttgttgctacaatcgttttttttattattttgaagttcaactggaaatataacgcctgggctaaatctatatatgaagttggcatagttttatcagccatagcattatttttccatctatggccagggtttcacaatcctgtagtgctaaattctgttactgttggccctcaaagtactccctatacaatgtattttaattttgataaagcgctggtgccatttttgttagtcctgtgtacatcttctttgtttaaaaaagaagtaaaatcagaagtgtctttgtggaagtggggggctctgtcgctctctgttcctcttatcctgtttttggctgttttttttggtggattaaagccagagattcattttcctgagtggttgccagagtttatattggctaatttgttttttgtgtctctggcagaggaatcattatttagagggtatattcaatcacggctatcagaagtaacgtctccattggttgcattaattgtggcggctttgttgtttggtttttatcactattcaggtggtgctttacttgtattatttgccacgttatctggtgttgtgtatggattgtcatggatgtggagtgggcgtttgtgggttgccacccttttccattttggtttgaatctgtgtcacttgttattctttacctatccatttttaaaacataattga

SEQ ID NO: 23933 - DNA, 240 bp, Escherichia coli
atgctgaaacagcaggatatgacagaaaccgccagagttgtgtttgatgaattaagcgtcaccgaaccggcgacggtcggggagattgcgcagaatacgtacctttcacgcgagcgctgccagttaatactgacccagctggttatgcgggtctggcagactatcagttcggttgttacagacgccttcagtcctgaaggcttttttatttgtggtaaatgggcggctggtgggtgttag

SEQ ID NO: 23934 - DNA, 588 bp, Escherichia coli
atgcattatggcaaagttaaaattttcgatataaaccattccatagtaagtcaatatctggaaattcagcataagctgacaagaactcatctgactgacgttccgctttatctgtcactggaacccaacaaccctgcgttggctgaggctttaattaccagccagagattttccggagataccacggatatgtttcttatgatggcatgcctgtcgctgtttgaatcagatgaacggatattattatttttaagtggatgtttatccagtataagtgccaaagtcagggcgataattcagacagatatatcagcaagctggacgcttggtgcgattgcgttacgcctgcatatgagtgagagtttgttaaagataaaactgaaaaatgaagggcacatgttcagtcgcttgttgctggaagagcggatgcgtgttgctgtcaatatgttatgttcccggcatggatatggacaggctgtagcagaaaaatgcggttattcaagctggtcctactttatttctgtatttcaccgctattatggcttcccgccagacagatatgtatccaggcaagggcttgattattga

SEQ ID NO: 23935 - DNA, 399 bp, Escherichia coli
atgaaacaccgtgaaatacgggcggcagttctgtctgccctgaaagaaaatatttctgagagggtgagctggtttgacggtcgcccggtttttattgatgaacaggaactgcctgctgttgctgtttacctgacagatgcgtctgctgctgacgagttcgttgatgagggaacctgggaggcgacactgcatattgaggtttttctcagggcaaaagaaccggactcggcactggatatgtggatggaagaaaaaattcttcctgcgctggaggcagttcccgggctcagtgcattactgctgaagatgaatcttcaggggtatgactaccgccgggatgatgagtttatgatgtggggatcggcagatctcctgtggaaaattacctacgagatgtga

SEQ ID NO: 23936 - DNA, 624 bp, Escherichia coli
atggcaataaaaggtctggcgcaggccatgaaaaatctggatgcaattgatcgccgtgccgttccccgggcctctgccacgacactgaaccgagtggcgggggccattattgcgaaaacggcctcttcagttgccagggagctggccgttccccgtcgtcttatccgtgcccgcatccggttaagtccggcacgaccggataaggtttacgcaaaggtttacatcaataccggcaacctgcccgccatcaaactgggggaggcccgcgttcgactttcccgcagaaaacggagaaagaaaggacagcgtgcggccctgaaagggggcggcagtgtgctgattgtggggaaaagacggatcccggacgcctttatcacccggctggctaacggacgctggcatgtgatgcagcgtatgccgtgggcatcatcatccaccggcgcggacagcaaagggaggccgaaacgccaccgtctgccgatcgaagtggtgaagattacgactgccggaccgctggcagaaacctttgaacgtgaacgggaccggatgtaccgggaaaaattaccggcgcagatgatgaaagccatgacgcatcagttacgcctggtgctgaaaagaaaatga

SEQ ID NO: 23937 - DNA, 327 bp, Escherichia coli
atgaaaagaaatcttccgttaattattttgttgtcttctctggttatgggctgtacgcaacataaaacagatatgccccgacagttggttaaggcattaccacaatatccggcctatgcagcggcaaattatataaagggacgggttgatgtgaagtttgatattggtgctgatggtactgtcacccgaattgagtttatccgttcagagccgcaccatctgtttgatgagcaggttgtaaaggcgatggcaaaatggcgatttgagaaggacaggccgcgtaaaggcgtgaagaaaacgtttatctttagtccttctgcaccctga

SEQ ID NO: 23938 - DNA, 696 bp, Escherichia coli
atgaaagagatgatttctgtcgatcatgaaatatccatgagtagtctggattttctgaataacattattaatccagcccgggcagaagccggagaagtccctcatgaaccgcgtaagtttcttgcaaaaattgaggatgagctagagcttgatggaaccggaaaaaaattccggttaaacaataaccagacaagaacggcatactatgatctggattttgaccagatgatgctcgttggcatgagggagtcaaaggccgttcgtcgttctgtgctggcaagactcaaagcgatgcatggtattcagatcccccggactttacctgaggcgttgcgatttgcggcaaaactggctgaacagaaagcagtgctggaaaatcaactggcaatagcagcgccgaaggctgaatttgttgataactatgttgaagcatctggtctgatgggattccgggaagttgctaagttactcggtatcaaagaaaccgatttccggctgtttttgttggagaacggaataatgtatcgcctcgctggaaaaatgacgccttactcgcatcacctggatgcggggcggtttagcgtgaaaacgggcgaggcgggcaatggtcatgcttttacgcaggttaaattcaccccaaaaggtgttcagtggattgctggtctgcttgctgcatggagagctaccgcagcatga

SEQ ID NO: 23939 - DNA, 879 bp, Escherichia coli
atgaaaagtatagcaaaggcacaaaacgatttcactatcttcaaattcggcgacagtgaaatccgcgtcatcaacaagtgcggtgagccgtggtttgtagctaaagatgtttgtgatgctttagctttgactaactcacgcaaggcgcttactgcacttgatgacgatgaaaagggagtaactttaagttacacccttggtggtgagcagaatctaagcattgtgagcgaatcaggtatgtatacattggttctgcgctgccgcgatgcagtcaataaaggttcagtcccgcacaaattccgcaagtgggtaacagcagaagttctgccttcaattcgcaaacatggcgagtatgtaaaaggaaagaaaaccactgttgaggaaagaacaccgctacgcgatgcagtaaacatgctggtaggaaagaaaggacttcgcaatgacgatgcatacaatatggttcatcagcgttttggtattgacagcattgatgagctttcaattgaacaaatcccgcttgccgtagagtacatccacagggtagtgcttgaaggtgaattcattggcaaacaagagaagagcaccaacgagctttccgcaaaagaagcaaacagccttgtatggctatgggattatgccaaccgctcacaggcattattccgcgaactgtatccggcgctaaaacaaattcaatcgaactattccggcagatgctacgactacggtcatgagttctcgtatgttattggaatggcgagagacgttttaattaatcacacacgagatgttgatatcaatgagccagacggaccaacgaatctttccgcatggatgagacttaagaataaagaattacctccttcaccgcatcactactaa

SEQ ID NO: 23940 - DNA, 567 bp, Escherichia coli
atgattggccaccgatgcgccaaagcagcacagcaggatatcgcccgcctgtgcagaggacaggggcacccggtaaaagccggtgaccgccatattgtccaggtaaaggttctgaccgttgcgccaccagtcatcctcacgctcaaaatccggcatatcaattcccgccagatggtaggcatcccggaacagcgtgtaacagtccgtcaccccgtgctcaaagcgccgtcctgtcagatgtggcacacagcggaatttatgaatttccccccggcagaccagccaccaggacagtgcactttttatctgcagccgccggtcggcctcgctcagccagggcagaccaccggggtggctgtggaccagtgccacaatctccccctgcatttctgcccgcagccagtcctccggcgacatccggaaataatcttccggctcaccggagatattcacgcagggaaaatatctttccccttccggcgttctcaccacgaagccgcacgactccgctggtgcacatcgccgggcgtgcgccaatatattgctatagagcatgagaactcctga

SEQ ID NO: 23941 - DNA, 234 bp, Escherichia coli
atgacggcagggttcaactttaataactatgcagcaggtttttgttccgctaccccggcgttaaggggaaatgaggtcaacatggatacgctcaatcttggcaacaacgaatctctggtatgtggcgtgttccccaaccaggacggtacgttcaccgcgatgacgtataccaaaagcaaaacgtttaaaactgaagctggcgcgcgtcgctggttagccagaaacactgactga

SEQ ID NO: 23942 - DNA, 639 bp, Escherichia coli
atggaatttaaagatttacctccttcaatccaggagattgcagcacacacacttcgtcatcgtctgaacgaacttgaattggaatcggtaacgaaaaaagacactgataatatggctcgtaatgtgcgcgatgcgtttaccggattgtatttctgtgcgtctataaataaacacgactcagagagtgtggcaaataaaattgcagaaacgacagcgcaaaacatcaatacgaaaccaacggaagaagaaattgatcagtttgctcatgatgctggtttaaaaaacaagaaagaaaaatcgccatatgcggggaacatgtttgtttatgacaatctcatcagaattcgtggcgaaattccggcggaatacctggcaagagtccatcaggcattgcttaaaaatttggaaacagaattatttgatggcaacactaacggtttcttcatggtatcaggccttgagaaagactgggatgcagaaaaacgctggaatgttgctacatggttattcagtaacagagccgctgcactggaagcttcggcatgtatttgcggcctgttcttaacagaccacaaatataatctggatgtgtacagttatatttacgctgaacacggtccactctggattgactggtaa

SEQ ID NO: 23943 - DNA, 210 bp, Escherichia coli
atgccaaacaaaaaaagaaatccgcttattgaaaaacagattgaatgcctggtaaatcaactcaggcaatcagggttattaaaaactcattcagagttgaggctcacagaatcagcattcgacgataaattaaataatgtcctttataatggcattattgattttaatcgttctgttggtcgccgcggccctgctggtgtttccttataa

SEQ ID NO: 23944 - DNA, 195 bp, Escherichia coli
atgacgttcacagtaaaaaccattcctgacatgctcgttgaggcatatgaaaatcagaccgaggtagccagaatactgaactgtagtcgcaacacggtcagaaaatacactggcgataaagaagggaaaagacacgctatcgtcaacggtgttcttatggttcaccgcggatggggtaaagatactgatgcgtga

SEQ ID NO: 23945 - DNA, 606 bp, Escherichia coli
atggctaaaccagcgcgaaggaaatgcaaaatctgtaaggaatggtttcacccggcattctcaaatcagtggtggtgctgcccggaacacggaactcaattagcactcgaacgacgaagtaaagaacgcgaaaaagcggaaaaagcagcagagaagaaacgacgacgagaggagcagaaacagaaagataaactgaagattcgaaaactcgccttaaagccccgcagttactggattaaacaagcccaacaagccgtaaacgccttcatcagagaaagagaccgcgacttaccatgtatctcgtgcggaacgctcacgtctgctcagtgggatgccggacattaccggacaactgctgcgacacctcaactccgatttgatgaacgcaatattcacaagcaatgcgtggtgtgcaaccagcacaaaagcggaaatctcgttccgtatcgcgtcgaactgattaaccgcatcgggcaggaagcagtagacgaaatcgaatcgaaccataaccgccatcgctggactgtcgaagaatgcagggcgatcaaggcgaagtatcagcagaaacttaaagacctgcgaaacagcagaagtgaggccgcatga

SEQ ID NO: 23946 - DNA, 723 bp, Escherichia coli
atgaatgagctgataaatagcaatgccatcaaaatgacaagcattgaaatcgctgagttggtgggaagccaacacggtaatgtcagaatatcaatagaacgtctggcaaagcgtggggtgattcaacttccttcaatgcaaaaagttgaaaataaacaaacaattagccctaacaaattcacaagcgtgtatatattcgaaggcgaacaaggtaagcgagacagcattattgtcgtcgctcagttgtcgccggaattcaccgctcgccttgttgaccgctggcgagaactcgaaggggcaaccgcgaaaataccacaaaccttttctgaggcattgcgccttgcggccgaccttgaagaccagaaggctgaactggagaaacagcttgctctcgcagcacctaaagttgagtttgccgatcgcgttggcgaggccagcggaattttgattggaaactttgcaaaggttgttggtattggtccaaacaaactgtttgcgtggatgcgcgatcacaaaatccttattgcttcaggttcccggcgaaatgtgccaatgcaggaatatatggagcgcggctatttcacagtgaaagaaacagcggtcaatacaaatcacggaatacagatatcgttcaccacaaaaatcaccgggcgtggtcaacagtggctgacaagaaagctgctagataacggaatgcttaaagtaacaggggaggctgcttaa

SEQ ID NO: 23947 - DNA, 423 bp, Escherichia coli
atggacgaaaaacagttgcaggctctggctaacgaactggccaaaaatctcaaaacccctgaagatctcagccagttcgatcgcctgctgaagaaaatcagcgttgaggcagctctcaacgctgaaatgtcccaccatctgggctacgataaaaaccagcctaaaccgggtgccaactcccgcaatggctattccacaaagaccgttatcaccggtgatggccacctggaactacgcactccgcgcgatcgtgatggctcttttgaaccgcaacttgtgaagaaaaaccagacccggatcaccgggatggataaccagatcctgtcgttgtacgccaaaggcctgacaacccgcgaaatagcggctgcgtttaaagagctgtatgacgctgatgtcgtaagcgtacagcgagggccgtattga

SEQ ID NO: 23948 - DNA, 651 bp, Escherichia coli
atgcctatatttttaaacttcacagcaggaagtatcttacctgagaatgagctagcatctttacgttatattgtgcagcaaaatcaaaatgatactgtaatcataaaagaacgttataaaatggatatccgttatatcgaatcagtcaatggttttacagtaaatcctgtatgcagtaatcatttctccatatttatggcgagacaaaacactattgctcgcaacctggaacagcagatcaacaacggacgaagttttgcacaaatatctcaggattttatgcttcaattatcttcaaatataggatggaaaaaaggggccgaaaacgcccttaaaaataaaatccattctcattcatttgttgtaaatcctgatgaattctcttgcgacacacaatttcttaagtgcccaataacattatgcgttccagaaaaaggggtttttgtcaagaatgcactgaactccaacatatgcactctttatgataagtctgcgttcatgaatctcacaagagaacatctaccccaccctctcagcagggaaaagatagtaaaagaaatgattattgaaaggaatatgtgttattttgacaccataagtcagcatttcataattatggatgcagaccaacagaaacagcattgtaaataa

SEQ ID NO: 23949 - DNA, 147 bp, Escherichia coli
atgcctggattagtatcatatatatcatcgacttcattcgcgaatgagatggcggagatgcgtcagcaggtaatggaagggcagattggtggatttctcctgggaggggagagagttagagtttcttatttatttcaattgcattaa

SEQ ID NO: 23950 - DNA, 510 bp, Escherichia coli
atggccgccagtggcggtggagaaattacagtaggcgggcagacggtccgtatcacatatagtgaaacggatggtcgctttctggcgagtgggggcaataacagtttgctttctggattattacttacagggcttaatggtggtcctgaagcgctcagggatataatgttaagaatggtttcaggttcaggtaacacacaatcacatggtgatattgaggggaaaatatcacaatgtaagttttctgttaatacggagagccttcagtgtccatccgaggcggttcgatgcccaattatactggataaaccagaagaaggtgtgtttgttaaaaattcagaaggttctttggtttgtaccttatttgattcggtttctttttctcatttggttcgcgacggtgggaagcacccgctaacacgagaaccaataacgtcatcaatgattgtaagtcaagaacaatgtatttatgaccaaaccaaaggaaactttgtcataaaggataagtga

SEQ ID NO: 23951 - DNA, 270 bp, Escherichia coli
atgaagaagatgtttatggcggttttatttgcattagcttctgttaatgcaatggcggcggattgtgctaaaggtaaaattgagttttccaagtataatgaggatgacacatttacagtgaaggttgacgggaaagaatactggaccagtcgctggaatctgcaaccgttactgcaaagtgctcagttgacaggaatgactgtcacaatcaaatccagtacctgtgaatcaggctccggatttgctgaagtgcagtttaataatgactga

SEQ ID NO: 23952 - DNA, 960 bp, Escherichia coli
atgaagtgtatattatttaaatgggtactgtgcctgttactgggtttttcttcggtatcctattcccgggagtttacgatagacttttcgacccaacaaagttatgtctcttcgttaaatagtatacggacagagatatcgacccctcttgaacatatatctcaggggaccacatcggtgtctgttattaaccacaccccaccgggcagttattttgctgtggatatacgagggcttgatgtctatcaggcgcgttttgaccatcttcgtctgattattgagcaaaataatttatatgtggccgggttcgttaatacggcaacaaatactttctaccgtttttcagattttacacatatatcagtgcccggtgtgacaacggtttccatgacaacggacagcagttataccactctgcaacgtgtcgcagcgctggaacgttccggaatgcaaatcagtcgtcactcactggtttcatcatatctggcgttaatggagttcagtggtaatacaatgaccagagatgcatccagagcagttctgcgttttgtcactgtcacagcagaagccttacgcttcaggcagatacagagagaatttcgtcaggcactgtctgaaactgctcctgtgtatacgatgacgccgggagacgtggacctcactctgaactgggggcgaatcagcaatgtgcttccggagtatcggggagaggatggtgtcagagtggggagaatatcctttaataatatatcagcgatactggggactgtggccgttatactgaattgccatcatcagggggcgcgttctgttcgcgccgtgaatgaagagagtcaaccagaatgtcagataactggcgacaggcctgttataaaaataaacaatacattatgggaaagtaatacagctgcagcgtttctgaacagaaagtcacagtttttatatacaacgggtaaataa

SEQ ID NO: 23953 - DNA, 465 bp, Escherichia coli
atgatccgtagctgcccggcggtatatttcccgctttctgccagacgggccagattttctgccgcctgtctgataccaccaccggcttcatcgctgatcaccccggccattttccacaattctgccgttgtggtggcagcagcccctccggtcagggtcagtgaacgcaataaggcccggtcagcctgctctgcctgccaggcggcggcagcaagcgcggccagtacggcaaccccgccacctgccgccacacgggccaccgacataaatcgtcccagctcaccggcattccgggcattttcagccagtgcatttgccgtatctgacagcgactcctctgatgattcagaggcatccctgatcccgagaagttcctccttcagcagggtaagcaggctgagcggtccaccgaatgaatcgctgatctgccccccctgctgcagcatgataaggaagggattctga

SEQ ID NO: 23954 - DNA, 309 bp, Escherichia coli
atggggagagccgactggcgcgccatgcttgccgggatgacatccaccgaatatgccgactggcgacgtttttactgcacgcattattttcaggatacccagctggatatgcatttttccgggctgatgtacgccgtactcagcctgtttttttgcgatccggatatgcatccggcggatttcagcctgttcgctccggaggcagaggaaggacaggcggagacgccggacgaaaatgatgtactgatgcagaaggcggcgggcctcgccggtggagtccgtttcggggaggagggaaggaggttgtga

SEQ ID NO: 23955 - DNA, 423 bp, Escherichia coli
atgtttctgaaaacagaacaatttgaatataacggtgtgtccgtcacgctttccgaattgtctgcgctgcagcggtttgattatataaagtttgtttcagacgcagaacaacaggagacaacgaagcatgatgtcgtgcacattaaccagcgatatctggaaacggcatccctgcttgtggcgatgtcgctatggcattcccattccctcaaaggcactctggcctctccggagacagagatgcagcagatccgccgtgaagtgatgctgggatggcctgctgatgcactgaatcaggcaacgaaccgggtgctttatctttcaggtatgctggataaccggcacgatgccgatcctgaaccaaccgggaaaacagaagcgactgagccggtaacatcaaaaaagcattcgaaggcgagctga

SEQ ID NO: 23956 - DNA, 948 bp, Escherichia coli
atgaaaataattatttttagagtgctaacttttttctttgttatcttttcagttaatgtggttgcgaaggaatttaccttagacttctcgactgcaaagacgtatgtagattcgctgaatgtcattcgctctgcaataggtactccattacagactatttcatcaggaggtacgtctttactgatgattgatagtggcacaggggataatttgtttgcagttgatgtcagagggatagatccagaggaagggcggtttaataatctacggcttattgttgaacgaaataatttatatgtgacaggatttgttaacaggacaaataatgttttttatcgctttgctgatttttcacatgttacctttccaggtacaacagcggttacattgtctggtgacagtagctataccacgttacagcgtgttgcagggatcagtcgtacggggatgcagataaatcgccattcgttgactacttcttatctggatttaatgtcgcatagtggaacctcactgacgcagtctgtggcaagagcgatgttacggtttgttactgtgacagctgaagctttacgttttcggcaaatacagaggggatttcgtacaacactggatgatctcagtgggcgttcttatgtaatgactgctgaagatgttgatcttacattgaactggggaaggttgagtagtgtcctgcctgattatcatggacaagactctgttcgtgtaggaagaatttcttttggaagcattaatgcaattctgggaagcgtggcattaatactgaattgtcatcatcatgcatcgcgagttgccagaatggcatctgatgagtttccttctatgtgtccggcagatggaagagtccgtgggattacgcacaataaaatattgtgggattcatccactctgggggcaattctgatgcgcagaactattagcagttga

SEQ ID NO: 23957 - DNA, 270 bp, Escherichia coli
atgaaaaaaacattattaatagctgcatcgctttcatttttttcagcaagtgcgctggcgacgcctgattgtgtaactggaaaggtggagtatacaaaatataatgatgacgatacctttacagttaaagtgggtgataaagaattatttaccaacagatggaatcttcagtctcttcttctcagtgcgcaaattacggggatgactgtaaccattaaaactaatgcctgtcataatggagggggattcagcgaagttatttttcgttga

SEQ ID NO: 23958 - DNA, 189 bp, Escherichia coli
atggaaacgttattaccaaacgttaatacgtctgaaggttgttttgatattggtgttctgctcagtaaccgggagtttactgaagatgccattaacatgaggaaatatgagccttatctgctcaatgataattccatactttcccgaattgctcttcttgaacttggtattttcggagaacgtcaatga

SEQ ID NO: 23959 - DNA, 189 bp, Escherichia coli; identical to SEQ ID NO: 6132

SEQ ID NO: 23960 - DNA, 1245 bp, Escherichia coli
atgagcactgataaagaagaatttgcgctatattgcgaagcaaaaaatgacaaagtcagaaaacgtctgggaattaaaggtggtttttactggactacagcaaaaaaattatctgttgccatctcccgctgcattaccgcaatggatgacaacgattatgatgaagacgactttaaaaaacccgttcgcgtccatttacccgttgtgaatgaccttccacctgaaggcgtgtttgataccgaattctgcaaccgatacgaaaaaggcggggaagatggcattacaatggtatttatcgcgccctctccctccgtgcaggagaaaccagccagtactgacaataccaacgtcaacggcgaagacatgacggagattgaggagaatatgctcctgccggtttctggtcaggagctgcccattcgctggcttgcgcaacacggcagcgaaaaaccagtaacgcacgttgcacgggaagaacttcaggcattacatatagcacgggcggaagaactgccggctgttactgccttggccatttctcacaaaacaaagctgctcgacccgctggagattcgcgaccttcacaaactggtacgcgacactgacaaagttttccctaatcccggtaattcagacctgggactgataactgcttttttcgaggcatacctggacgctgactacactgatcggggtctgctgacaaaagagtggatgaaaggaaatcgtgtttcgcgtatcacccgtacggcttccggtgcaaatgccggtggcgggaacaaaaccgatcgcaatccgaatttagtacacaccttcgatacgctggatgtggagattgcagcagccacacttccgatggattttaatatttatgaaattccgggcagcgtttatcgtcgcgcaaaagaaatcgtcctgaaaagagaaagtccgttcaaagaatggtccgcagcacttcgcgcaaccccgggtattctggactattcccgcgccgctatttttgcacttatccggagcgctcaccctgagttttatcactacccgggacgccttcaggggtatatcaacgcctacttaacggagactgatcacgagaaccccagcaaggaaactctcactgctgcacgacatacaccggaaaaagatatcctggaagaagttaaccgcgaactgtctgctaagcaggaaacagaagaagaaaatgatgaagaaaaaccgcaaccatcttgcgcaatggcagaatga

SEQ ID NO: 23961 - DNA, 537 bp, Escherichia coli
atgataatcagaagaaatctggcaaaagaccgttttacagtaccaaaaacacaggcgggaaccaatcgtgtgattcaccttattaagcccgcaatcgacgctctccggagtcagatggcactaacgagactgagcaaagagcatatcatcgatgttcacctcagagaattcggcagaacagagaaacaaaaatgtacctttgtttttcaacctgaagtgtcagcgaaagtaaaaaattatggcgaccattttaccgttgactcaataaggcagatgtgggacgcagcggtaaagcgtgccggaatccgccatcgcaaatcgtatcagtcgagacacacttatgcctgctggtcgttaacagcaggagctaacccggcattcattgcaaaccagatgggccatgcagatgcgcaaatggtgtttcaggtgtacgggaaatggatgtcagaaaataataatgcgcaggtaacgctgttaaatacacagttaagcgagtttgccccaaccatgccccataacgaagcgatgaaaagttaa

SEQ ID NO: 23962 - DNA, 219 bp, Escherichia coli
atggttagcatcaaacaacctcagaatattccaagcaaacaggttaaaaataaaactgcacccgaacaattgataacgacagaaaacgccttttccgagccaccaaaattacttcgcatcctatttattgctcacgttaacgccttgtataactcgagctctccacggtatttaacctctcttctgtttaactataattccaataaatctcgtcactga

SEQ ID NO: 23963 - DNA, 606 bp, Escherichia coli
atgtcaattataaaaaactgcctgaccaaaatggagcaggcagggaagttgttaaatagaaaaataactccagaaaatactcctccaatgttgttatcatacagaaatgcagatttaacgcaagaaaaaaacattacagaaagagttttatccatatttaaaataaaacgagattttgttgctgtaagaatccaaaacaatcagtttactgatttgaaaaacaaaaaaattcaaggccatcaaaacacagttgccagtgtcatggattggtataatccccaaaaaaatgctttgggtataactatgggtacaccaagaaaatcggccgatatagcaaaagaagagcacagaaatgcactaaatttcatgataatggaaaaaaacacatttcatgaaaaaatcttaaacagcaatgacaatttgcaaaaatcatacagcaaaacagaagacagtagttgggtcgcagcttctgtcggctctcttctagataaaggagcaaaagtatatcccgatacatcatgctctctgagactgggagaaccattcatctttacgctgccagaatcagttagagtcgatgttgacatatatcctctcaaaaaataa

SEQ ID NO: 23964 - DNA, 591 bp, Escherichia coli
atgattaacaatgtttcttcactttttccaaccgtcaaccgcaatattacagctgtatataaaaaaagcagcttctctgtatcaccacagaaaatcacattaaatcctgtaaaaatcagctcacctttttcaccaagcagtagctccatcagcgcaacaactctctttcgagccccaaacgcccattcggcatcatttcatcgacagtctactgctgaaagttcgttacatcaacaacttcctaatgtgaggcagcgcctgatacaacatcttgcagagcatggcattcaaccagcccggagtatggctgaacatattcctccggcacctaactggcctgcgccaccaccgccagtacaaaatgaacaatcaagacctctgcctgatgtggctcagcgtctgatgcagcatcttgcagagcatggcattcaaccagcccggaatatggctgaacatattcctccggcacctaactggcctgcgccaacgccgccagtacaaaatgaacaatcaagacctttgcctgatgtggctcagcgtctgatgcagcatcttgcagagcatggcattaatacatctaagcgctcgtga

SEQ ID NO: 23965 - DNA, 555 bp, Escherichia coli
atgatatacccggaaattacaggcaaaagcggtgagcatttacgcctgaaaacgctggaaagtgtctggatccaggggaaactgcgtatgtgggggcgttggtcgtatattggcgacggtaagacgggaaatatgttcaaccaattactgacctctaaaaagctgacaaaaacggcaattaacgaggcgctccggaggatgaaaaaagcgggtctggacaaacctgaacttgaggcttttttgcgggatatgatcaacggcaatcaaaaaagctggctggcacattgtaccgattcagaggcgttaataatcgatagggttattggtgaagtactggcaggttatcccgggctgctcaatgttctgagtcagcgttatgtggggcgggggatgactaagcgcaaaatggctgaattgctgaatgatgcacatccggaatggagtttaagaacctgtgaaagacgcattgagcattggctaaaggtggcagaatttattttgtacaaaccaatggttatggcttttggtatagagaaaaaagttattgctttttga

SEQ ID NO: 23966 - DNA, 588 bp, Escherichia coli
atgcattatggcaaagttaaaattgtcgatataagcgaatccgtcgtaagtcaatatctggaaagtcagcataagctgacgaggactcgtctgactgacattccgctttacctgttgctggaacccaacaatcctgcgttggctgcggctttaattaccagccagggattttccggagaggtcacggatatgtttcttatgatggcctgcctgtctctgtttgaaacagatgaacggatgtcattgtttttaagtggatgtttatccagcataagtgccaaagtcagggcgataattcagacagatatatcagcaagctggacgcttggtgcgattgctctacagttgcatatgagtgagagtttgttaaagacaaaactgaaaaatgaagggggcatgttcagtcgcttgttgctggaagagcggatgcgtgttgctgtaaatatgttatgttcccggtatggatatggacaggctgtagcagaaaaatgtggttattcaagccggtcctactttatttctgtatttcaccgctattatggcttcccgccagacagatatgtatccaggcaagggcttgattattga

SEQ ID NO: 23967 - DNA, 309 bp, Escherichia coli
gtgctggcgcacttccgccaggaatttaaagcccttaccggacggaaacagcaccttaaacgcatacaacgcgtcattgtcataggcatcacgcagggcgttctgggcctgattcagataaaaattacccgacatggaaatctcggacgacgcccccagaccgttgatgttctcctgctctgtggagcagagcgtggtcacatcaatatcctgtttctgcccggcggtgaactgcacttccttgatggtgcagtccaggcgcagatattccgccttctccatggtttcagcagtcgccggggcagatga

SEQ ID NO: 23968 - DNA, 1587 bp, Escherichia coli
gtgacaccgggcggtgcagtatgcaaatataacgacatcattccggcggaccattgtctgcatgatgtgcaggacatgagccgccttaaccatccgaaagcggacctgtcaaaggggcagtacggaaccgtggggcaggggctgcatatcgccaaaaaattgctgccgtttataccggcgaatgcgggcattctgctggttccgtgctgtcgtggtggttcagcgttcaccaccggagctgatggcacatacagtgacgcgagtggtgcctcggagaattcaacccgctggggtgtggacaagccgctgtataaggaccttatcggtcgaacaaaagcagcactgaagaagaatccgaaaaatgtgctgtttgccgtggtgtggatgcagggggaatttgattttggcggtacgccggcaaatcacgcagcacagtttggtgcgctggttgataaattccgtgcagacctggcggatatggcaggtcagtgcgtcggtggctctgctggcggtgttccctggatatgtggagatacgacgtatttctggaagcagaagaacgaatccacgtaccagacggtgtacggcagctataaaaacaaaacggaaaagaatatccatttcgtaccgttcatgaccgatgagaacggggtgaatgtgccgacgaacaaaccggaagaagacccggacattccgggtatcggatattacggttcgaaatggcgtgacagctcagccacctggacgtcacaggacagggcgagccatttcagcgcctgggcacgccgtgggattatttccgaccgtctggcaacggcgattttgcgccatgcgggaagagtggcgctaaacgcgggggcatcatcgacagtatcagaggtgcgcccgtcatcgccttccggtgcagaagccacaggcgtcacaacactgctctcttaccttgccagcgagtcagagggaagcctgaaagtacagggatggtcagccagtggcggcagggcagaagtggtcagcgatgcggagggaaccggaggtaaggcagtgaagctgaccaaggaagccggtaaaagcagctgggtgctggagtacgccgcgggcaacggtgcggctctgttacagaaaggggggcagattcgctgccgctttaaggtttcgggagcgctggctgcgaaccagtatgttatggcgttttactggccggtatcttcactgccacagggcgttgccctgaccggagacggggggaataacctgctggcagcgttctacatccagacagatgcaaaagacctgaatgtgatgtaccacaatgcgaaagtggcgacaaacaacctgaaactgggaacctttggcgcatttgataacgaatggcatacgctggctttccgctttgccgggaataacagccttcaggtgacgccggttattgatggtcaggatggcacaccgttcacgctgacgcagtcaccggtcagtgcatttgcggcggataaactgcatgtgacagacattaccaggaatgcgacttacccggtgctgattgacagcattgcggtggaagtgaacagcacagacactgcggcatga

SEQ ID NO: 23969 - DNA, 180 bp, Escherichia coli
atgacatttctgaaccagttaatgctgtacttctgtacggtggtctgtgtgctgtatctcctttcgggtgggtacagggccatgcgtgacttctggcgcagacagattgacaaaagggccgctgagaaaatcagcgccagtcagtcagccggaagcaaacccgaagagccgctcatttag

SEQ ID NO: 23970 - DNA, 1293 bp, Escherichia coli
atgaaaaaattaaaattattaaataaatacagctacttacatagcataaacggctctctgattgaagcagaacttgacgacgtttctgtgggtgaagtatgcgaaatttatgcgagcaggcaagcaaatgaacgtatagccagggctcaggtcgttggctttcgcaatgggaagacattattaaaccttataggcagctctgtggggcttacacgtactgcagttttgaaaccaacgggagagcagttaaccatacagatcagtgatgcctttcttggttcggttttgaatgcctctggtcaaattatggaaaggtttgtcccggacactccaggcgataggggaaatttacgcctgattgatgaactgccaccgtcgtatcaggaacgtcgagttattaatacaccacttgagacacggataagagtcattgatggcgtactgacatgtggcattggtcaacgtgttgggattttcgcctcggctggctgtggcaaaacggttttaatgcatatgctcgtaaacaatactgaagctgatgtgtttgttattggcttgattggcgaacgtggtagggaagttacggaatgcgcggaatcgctcaaaaaatcagtaaatgcagcgaaatgcgtattggtctatgccacctctgatttttcgtcagtagaccggtgtaatgccgccctgatggcgacaaccgtggcagagtattttcgagatcgaggaaagagagttgtactttttatcgactcaatgacgcggtatgcacgagcactacgtgatatgaaactggcagcgggtgaaccacctgccagacgtggttatcctgcttctgtttttgacagtttgcctcgcttactggagaggccgggaccaacactaaaaggaagtattaccgagttttataccgtgttactggaaggggaagatgaatcagacccactgggtgacgaaattcgctcaatccttgatggccatatctatctaagtcgcaaactcgcgggtcaaggtcactatccggcaatagatgttctaaaaagtgtgagtcgagtatttggtcaggtcactgatgaaaaacacagagataatgctgcacgggtaaggaagaacctcacaactttggaagatctacaggtgtttattgacttaggggaatatcgcgcagggcaaaatgctgaaaatgattttgctatgaatgcccggcctaaactcacaaattggttgaaacagtcagttaatgaaaaaatgccaatgagtgaaacgctaaaagagcttgaacgaattgttaagtaa

SEQ ID NO: 23971 - DNA, 273 bp, Escherichia coli
atgacagaaaacgttaaatcagagttacttcttctgatggcagataataacgaagcaacaagcagcattcttgcagacccttacggtaagatctcacataaaacgctggatattattaccacaacattaacaccgctgatgcttcaacggctgaaacataatatcaacgcatgggttaatgaagaattaagtcctccctgcttatgggattctcgttacgcatgtcagcaaaaaatgcgaattttcaacttactatcaccaaagctcaggtag

SEQ ID NO: 23972 - DNA, 444 bp, Escherichia coli
ttgggtttgtataatttatatcaattattatatgatgtttggcatgatgattcatatggaacatcatcaattgatattactggcagtggagatctaatatcattaggtggtcatgcaggacttggcgttgcgtttgctaaaaagaaaggtgaaatgttatctgatatttgtatttatgctacagcatgcggacatgcaggaattggtggtgggataaatgcggctatcacatattctgagaccaagtctttacctacatcgggagtcagcaattcagtaggtgtaacggttggcggcggagttggggggcattttgcgtatacttatgtagtggatgttgataatccagaatcatcgacagaatctgttggtatcggtgcaggtgttgacgcttcagttatgactctggcttgtagaacgtggcaagaatgctgggtcaattaa

SEQ ID NO: 23973 - DNA, 186 bp, Escherichia coli
atgaaaaaatatatatttttagttttatttttattgtatggttgttctccagtggacatagagccagctagacaagaagttaatatctttcgtggtttatatcagacagggaaatacagtgatatatataaaatcacttcaagtgattttcagactgccacatctgaaaaaaatttatcgacataa

SEQ ID NO: 23974 - DNA, 210 bp, Escherichia coli
atgaacgaagcaaaagaaaaagatcttgggacttataaaaaatcaacccttaaaactgaaaaaatcactcgcggattattttcaaacgatgaaattacattgatatatttctcagaatattcaaaaagaattgtccaagaggtttttgtgtttaatgttgaagacaaaaaagtaaaattaaaaggttataggtatgattcgattaattaa

SEQ ID NO: 23975 - DNA, 180 bp, Escherichia coli
atggaacttaaaaaattgatggaacatatttctattatccccgattacagacaagcctggaaagtggaacataaattatcggatattctactgttgactatttgtgccgttatttctggtgcagaaggctgggaagatatagaggattttggggaaacacatcccgatgttttgaagtga

SEQ ID NO: 23976 - DNA, 345 bp, Escherichia coli
atgaaaaaggtattgattgcagcacttatttccggtgtgtcttttggcgcttttgcacagcagggtggtttccaggggccagaagcagagcgttcaacagtagcgcaggcaaaagaactgaaggatgatgcatgggttatccttgaagggagcatcgttaaaaaagtgggtgatgaacgttatgagtttcgtgacaatagcgggacaattgtcacggatattgatgacagcgtatgggccgggcagaatgtttctccgaaagacaaagtaagaattgagggtgaaattgataaagacctgagcagtgttgaagttgatgtaaaggcactgaaattattaaagtaa

SEQ ID NO: 23977 - DNA, 273 bp, Escherichia coli
atgacacaacacataaaatcccacaattctgaagccgacccggaaattaagcaggggaggcgttttcgtgcgcctcagtatggctggtttcactatctgttctgtacgatcgatgaggcagatatgcttcaagaggcgtatctgcgtcgcggtgtccgtgtggagcggagtctgaacgctgatcgtctgacctggaccgtttctgtatatcttcctgttcgtgcacatctgccacggacacatgcctgctaccgtcagcgcgtctggaggtaa

SEQ ID NO: 23978 - DNA, 567 bp, Escherichia coli
atggctaaaccagcgcgaagacgatgtaaccgtaaaagagaagatttaactgttaaaaggatatttgagttactaagtttcgataaatctaccggggtatttagatggaaagttcccactcagggaaggatagcattaaatagtgttgctggagcttttgattccaacggttattcaatgatcatgatagatgggcgtagatataaaactcacgtcttagttttttacataactcataatcgttggcctgctggtcaaattgaccacgttaatggaattaggaccgacaataggccagaaaatttaagagaatgcctgccaatagaaaattcaagaaatataaggatccgaaagaatagcaaatcaggttgcagaggggttacttggcacaaacgacagaaaaaatggaatgttaggctaggattccatggcaagagtaaacacttcggatgctttgatgatctggagttagcggtactagttgctgaagaagcccgagataagtattacggtgatttttccggcaacgaaaggagcacttatgcgaatctatcgaaggaaatgtaa

SEQ ID NO: 23979 - DNA, 579 bp, Escherichia coli
gtgaacacggcagcggaagccatccgtgccctgtcgctgcagatgccgggattccgccgtcagatgaacgaaggctggtaccagatacgtattcgcggtgaggacacggcaccggaggcggtgtacgcccgtcttcacgaacctctgggtgagggggcggtcatccatattgtgccgcgactggccggagccggaaagggtggactgcagattgtgctgggggcggcagccatcgtgggctctttcttcacggccggggcatcaatggcgttatggggttcagccctggcagccggtggtttttctgccaccacgatgctgttttcactgggggccagcatgatactgggcggtgtggcccagatgctggccccgaaggcaaaaacaccggattaccgcgcaacggataacggtaaacagaacacgtatttttcgtcactggataacatgattgcccaggggaacccgatgccggtgccttatggtgaaatgctggttggttcacgacggatatcccaggacatcagcacccgtgatgagggcggagacgggaaagtggtggttatcgggcggggatga

SEQ ID NO: 23980 - DNA, 744 bp, Escherichia coli
atgacacagactgaatcagcgattctggtgcatgcccggcggtgtgcgcctgcggagtcgtgcggcttcgtgataggcaccccggagggcgaacggtaccagccctgcgtgaatatctccgcagagccggaggcgtattttcgtattgcgccggaagactggctgcaggcagagatgcagggggagattgtggcgctggttcacagccaccctggtggtctgccctggctgagcgaggccgaccggcggctgcagataaagagtgccctgccctggtggctggtctgccggggggaaattcataaattccgctgtgtgccgcacctgaccgggcgtcgttttgagcacggggtgacggactgttacaccctgttccgggatgcataccatctggcggggataacgctgccggattttgagcgtgaggatgactggtggcgcaacggtcagaacctttacctggacaatatggcggcgactggtttttaccgggtgcccctgtcctctgcacaggcgggcgatatcctgctgtgctgctttggcgcatcggtggccaatcatgccgccatatactgcggcaacggtgaactgcttcaccatctgcctgaacaactgagtaaacgggagaggtattctgaaaaatggcaacgacgaacgcattctgtctggcgtcaccgccactggcacgcatctgccttcacggggatttgcaacgatttggccgccgcctcagcctgtacgtga

SEQ ID NO: 23981 - DNA, 1581 bp, Escherichia coli
atgacggctgaaattgtctgttcggtgttccgtgtcccggcctacaagattggcgttggccacccgccttccagtgacaacgtggaggcgctggagcagcagtattattcccagtgcctgcagacgctgattgagtccattgagctgttactggatgaggcgctggaaacgggggaaaacgagagcacggagtttgacgtcaccacgctgctgagaatggacagcgaacggcgcatgaaaacactgggtgaatcggtgaaaaatacgcttctcacgcccaatgaggcccgtaaacgtgagaacctgccgccccttgccggcggtgatgcactgtatcttcagcagcagaactacagtctggaggcgctgtcccgtcgtgatgcccgtgaggacccgttcgcgtcggccgggaaaacagtttcagcacaactgcctgacggcgcatctgacggtaataaggcaatcagtgaaacagagcatgatgcagtgaaagcgatgttcaggggggatactgagaaaatgacggaacgggaactgtccattattcgtgcactgggcgaagaattctccacggtgctggcggatttacagcgcacatttgaggggaagatggccgcgcaggcacaagcgtttgaagagaaactggcttccctgtcggcggtattacagaagcatgtgacggtggatgaggtacatccggttctgcaggcgatggtggatgacgctgtggggaccattccggtaccgcgtgatggtcgtgattatgatccggatgtactgcagcaggcggtgaatgatgcggttgcgaatattccggtaccggcggacggcaaaagtatcaccccggatgatgtgcgtccgatgcttgagcagatggtgaaagaggctgtaagccatatccctgctccgcgtgacggtcgtgattatgatccggaagtactgaagcaggcggtgaatgatgcggttgcgaatattccggtaccggcggacggcaaaagtattacccccgatgatgtgcgtccgatgcttgaacagatggtgaaggaggcggtaagccatattcctgttccgcgtgatggtcgtgactatgatcccgatgttctgcagaaggcggttctggatgcggtgagagccctgccggctccgcaggacgggcgtgatgccacggcactggaaataatccccgccattgacgatcaaaaatcctttccccggggcacgtatgccacacaccagggcggactctggcgggcgtatgaaaaaacgcacgggatgcggggatgggaatgcctggttgacggggtggccgatattgacgtcagcatgacgggtgaacggtcgttctctgtggtggtccggcagagcagtggccagcgtacggaaaaaacattttccctgccggtgatgctctaccgcggtgtgttcagagccggtgaaacctaccaccccggtgatacggtgacgtgggggggctcgctgtggcactgcaacagtatgaccggtgataaacccggagaagctcattcatcaggctggaccctggctgccaaacgtggacgggatgcaggaggcggaaaatga

SEQ ID NO: 23982 - DNA, 318 bp, Escherichia coli
atgacgttcccggaactgtacgacgacagccatccggaagccctggctcgtaatacccagaaaattttccgttggctggataaagacacccctgatgctgttgaaaaaattcaggctctgttaccggcgatcgaaaaggcaatgccgcctctgctggtggcccgtatgcgcagtcacagctctgaatattaccgtgagatcgtcgaacggagggatcggctggtgaaagatgtggatgattttgtcgcagcggcgatcgcctggggcaccctgactaacagtggtggtcagcctggtaatgctgttgtcgtgcattga

SEQ ID NO: 23983 - DNA, 153 bp, Escherichia coli
atggatatgctcaatcttggcaacaatgaatctctggtgtgcggagtattccccaaccacgacggcacgtttaccgcgatgacgtataccagaagtaaaacgtttaaaaccgaagctggcgcgcatcgctggttagcaagaaacgctaactga

SEQ ID NO: 23984 - DNA, 1038 bp, Escherichia coli
atgtcggaggatgacgtccggccggaggcactgcgtcgttttgaactgatggtggaagaagcggcgcgtcacgctgaggaggcgaagaagaatgccggagaggcggagacgtccgcgaggaatgccggcatatcagccagtcaggcagaagagagcgcggcaaatgctgacacttcagcaggggatgcatcggagtcagcccggcaggcggcagaaagtgcagccgctgcaaagcagtcagaggaggcgtcctcgtcctcggcctctgcggccgctcaaaaagccagtgagtcatcacaaagtgcagcagatgctgagttgtcaaaaaagacggcagaaagtgcagccggtaatgcagccagggatgcaacgaccgcaacagaaaaagcccgggagtcagcagaaagcgcacagtcagcggaacaaagcaggatagcggcggaagaggccgtaaaccgaatccccaccgtggtgggacctcccgggccaaagggggaaccggggcccgcgggtcctcaggggccgaagggtgataagggagagcgcggtgacaccggccctgtcggggcaaccggcgaacggggaccggcaggtgatgctggtccggcaggcccgcaggggccgaaaggtgacaggggagagcggggagagaccggtctgacgggaaatgcaggtccacagggtccaaagggagacaccggggcagcaggcccggcaggcccacagggaccgaaaggagaaacaggtgcggctggcccggtgggggcaaccggacctcagggaccgaagggcgacccgggggagacacaaatccgttttcgtctggggccggcgagcattattgagacaaacagccatggctggttcccgggtacagatggtgcgctcatcaccggactgacctttcttgcccccaaagataccacacgggttcagggtttttttcagcatttgcaggtcaggtttggtgacgggccgtggcaggatgttaaggggctggatgaagtgggcagtgatacaggcagaacaggagaatga

SEQ ID NO: 23985 - DNA, 270 bp, Escherichia coli
atgaacatactaaaaaaacttatgcagcgtctgtgtggttgcggaaagcatgatgaccgtgaacacggggagttacttacagcacagctgcgactggggccggcagacatcctggagtcagatgagaatggtattatcccggagcaggacagggtaatcacgcaggtggtgatactggatgcggataaaaagcagatacagtgtgtggtaagaccgctgcaaatcctgcgtgctgacgggacgtgggaaaatattggcgggatgaagtaa

SEQ ID NO: 23986 - DNA, 1620 bp, Escherichia coli
gtgcagcacctgacggtggaggtgagtgcagctgacagccagtatctggcgcaggcgaaatgggacacgccgcgggtggtgaagggcgtgcgcttcagtctgcgcctgaccagtggaagcggtcaggacagccgtctggtgaccaccgccatcactgcggatacagagcatcgtttcagtggtctgccgctcggggaatacaccctgacagtcagggcaattaacagttatggccagcagggggaaccggccatcaccaccttccggattaacgcgccagcaaaacccgccaccattgaactgacgccggggtattttcagataacggcggtaccggtgctggcggtgtatgacccgacggtgcagtttgagttctggttttcggaaaaacgcatcacgaacacggcacaggtggaaaaatctgcccgttatctggggagcggcagtcagtggactgtccagggaagccggattaagccggggacggatttctggttttacgtgcgcagcgtcaacctggtggggaaatctgcgtttgtggaagtcagcgggcagcccagcaatgatggtgaagggtatctggaatttttccgggaaaaaataggaaaactgcatctggctcaggggctatgggagctgatagacaacagccagcttgcggatgagatggcggagatgaagaccaccatcacggaaacccgcaatgaaatcacacagacggtcagtaaaacgctggagaaccagagcgccactatacagcagatacagcgcgtgcagaaggacacaaatgatgacctggctgcgctgtacatgctgaaggttcaaaaaacgaaagacggcattccctatgtggccgggattggtgcagggattgaggatactgatggccagccactgagcaacatactgctgctggctgaccgtatcgcgatgataaatccggagagcggcaacagcacgccgttatttgtggcgcaggggaatcagctgttcatgaacgacgtgttcctgaagcgactgtttgcggtgagtatcacctcgtccggcaatcccccgacgttttccctgacgccggacgggcgactgacggcgaaaaatgcggatatcagtggcagtgtgaatgcgaactcagggacgctcaacaacgtcacgattaatgagaactgtcagattaaggggaaactgtcagccaaccagattgaaggcgatattgtcaaaacggtcagcaagtctttcccccgcacgagcacttatgccagtggcaccatcacggtaagaatcagtgatgatcagaagtttgaccggcaggtcatgataccgccagtgttattccgcggtggtaagcatgagaatttcaacagtaataaccaacagtcatactggtattcaacctgccggttaagagtgacccgcaatggtcaggagatttttaatcagtccacgacggatgctcagggcgtattttcctcagttatagatatgcctgccggacaggggacgctgacactgacattcaccgtatcttcatcaggagcgaataactggacaccaacaaccagtatcagcgatctgctggttgtggtgatgaaaaaatccacagcaggtatcagtatcagctga

SEQ ID NO: 23987 - DNA, 237 bp, Escherichia coli
atgagcgacctatcattaacccagccaaagctaaaagaatgtccgttttgcggcggtaatgctcgtctgtgggttgaggccggaataaatattgatgtgtggggctatgcagaatgtgacctctgtgaagccaggggggcatgggcaccatcagttgctgcggcggctgaaaaatggaaccggagagcaggagatgaagcaaacctttctgcttcgcaacgaagcaatcagaaataa

SEQ ID NO: 23988 - DNA, 144 bp, Escherichia coli
atgaatgcattcaaacaactgcaccagagtaaggatgaagtgtttgagcgtggggtgatcaacgtcttcagagggccgaacggaattacaaaaccaattccccctgtaaattcggcagtaaaattatcgtcaacaacttggtga

SEQ ID NO: 23989 - DNA, 537 bp, Escherichia coli
ttgtcagatggtgtatttaagatcaccaggcagagcaataaaacctggtccctgacgcatccggtggatgacgcaattaccctgctgacacagggcggcagactgacctgtaagttccgcctgtcaggcgcactgaccaacaatcagttcgggctggggatttatctgtatacggatgctcccgttcctgatggtgtggcgatgacgggtaccggtaatccgttcctgatgtcgtacttcactcagaccactgacggcagagtgaatctgatgcatcacaggaaagccggaaacacgaagctgggggagttcggcgattacggtaacgactggcagacgctggagctggtgttcaccgccggcagtgccacggttactccgaaactgaatggagtggctggcccggcattccaggttataaaagacagtctgacactgggactgaatgcgctgacgctgacggatgttacaaaaaatgcagcgtatggcgttgagatagaaagtctggtgctggagataaatgcaccggcagcataa

SEQ ID NO: 23990 - DNA, 456 bp, Escherichia coli
atgctggaggcgacccaggtcagaggggatttcgttaaagctgtatcaaaagccttcccgaaaaaagtcggtacgtggggtaacacggaaacaccaaacggtacggttacagtcaccatcagcgatgatcataactttgaccgccagattattattccgcccattatttttaacggtatagcgtatgacgatccggggagcggaaataacccaggaggcacgcgatacacggggtatggttttgaagttcgcaaaaacggcgtattaatcgcatccagagaaactaaaggggccattcccggtagttacagtgcagttattgatatgcctagtggtggtggtagcgtcactctggagtttaagattttccagaaaggcaatcagggggcaggcaatatcaccgactgtacggtgattgtgaccaaaaaagctgcttccggcatcagtattcgttga

SEQ ID NO: 23991 - DNA, 408 bp, Escherichia coli
atgaaagagattgatttattatatgaaaatatttatcagcttttaattaaaccttacctactcgatctttctagccagtctggaaaaaaaatagaattaaattacacatgcaaaataaaagatgctgctgatgaaataaagggtagtatgatttttaatgatgtagatggtaaacaaaaagcaacttgcactatcagggtgttaatactaaaaacatttcacgatggtcgttatagatttgtaattgaatctgtgatttatgatttaattaataattacagtggatttattttaacggggagattgttttggcaaggggaaggttttggccatgaattattccccgtgacaaacaaatataatgcttggagatggaaaaataaaaaaataatagatatttcttggtaa

SEQ ID NO: 23992 - DNA, 210 bp, Escherichia coli
atgcttacaagcgactttttaatggtgaaagccatgcttagcccatcccaatcccttcaataccagaaagaaagcgtcgagcgggctttaacgtgcgctaactgcggtcagaagctgcatgtgctggaagttcacgtgtgtgagcactgctgtgcagaactgatgagcgatccgaatagctcaatgtacgaggaagaagacgatggctaa

SEQ ID NO: 23993 - DNA, 432 bp, Escherichia coli
atgtttggaatcttcaaaaagaaaacccgcagagcggcaacggaaattaaaaagtttgaaaaacgcgatctggcacaggtggtgattaacgccgcatacctggtggcctgtgcagatggtgaatgtgaggcatccgagaaagcgaagatcgaacaggtactgcgtaatcagcctgcgctgtccgcgtttacgtcagaaattaatgcgattagcgcaaccattatcggtcagctggatacgaactttaaaactggtcgtcgtgcggcgttacgtgagattgaggatgtgaaacacgatacgcgtgaagcggaagatgtgctggatgtggcggtggccattgcggaggcagacggcgaaattgagccggaagagcgcaaggtgctggaagagattgccggtgttctgggtcttcgtctggagaatcacctgtga

SEQ ID NO: 23994 - DNA, 519 bp, Escherichia coli
atgtttgcatgcacattctttttcttgcatggtgccgggtgcctcccggtgaattcagtatcagcacctgaatccgcgattatcacatatacctggttgctgattgcccctccgcacagggggattcaccatgcagaagtgtttttaataaacagcaaacaaaaaaatcaagcattatgcaggctgtttctttttatcaccggccacagcaataccacaatgccgcagaccagcaccccatccgccagcaccgacatgattctgctggtgaaatccaccatcaccaccagaaacagcaggagtgcagccacagccaggcgcagttttaccgtcacaggtgattctccagacgaagacccagaacaccggcaatctcttccagcaccttgcgctcttccggctcaatttcgccgtctgcctccgcaatggccaccgccacatccagcacatcttccgcttcacgcgtatcgtgtttcacatcctcaatctcacgtaacgccgcacgacgaccagttttaa

SEQ ID NO: 23995 - DNA, 1038 bp, Escherichia coli
atgtcggaggatgacgtccggccggaggcactgcgtcgttttgaactgatggtggaagaagcggcgcgtcacgctgaggaggcgaagaagaatgccggagaggcggagacgtccgcgaggaatgccggcatatcagccagtcaggcagaagagagcgcggcaaatgctgacacttcagcaggggatgcatcggagtcagcccggcaggcggcagaaagtgcagccgctgcaaagcagtcagaggaggcgtcctcgtcctcggcttctgcggccgctcaaaaagccagtgagtcatcacaaagtgcagcagaagctgaattgtcaagaaagacggcagaaagtgcagccggtaatgcagccagggatgcaacgaccgcaacagaaaaagcccgggagtcagcagaaagcgcacagtcagcggaacaaagcaggatagcggcggaagaagccgtaaaccgaatccccaccgtggtgggacctcccgggccaaagggggaaccgggtcccgcgggtcctcaggggccgaagggagataaaggagagcgtggcgacaccggcccggcaggggcaaccggcgaacggggaccggcaggtgatgctggtccggcaggcccgcaggggccgaaaggtgacaggggagagcggggagagaccggtctgacgggaaatgcaggtccacagggtccaaagggagacaccggggcagcaggcccggcaggcccacagggaccgaaaggagaaacaggtgcggctggcccggtgggggcaaccggacctcagggaccgaagggcgacccgggggagacacaaatccgttttcgtctggggccggcgagcattattgagacaaacagccatggctggttcccgggtacagatggtgcgctcatcaccggactgacctttcttgcccccaaagataccacacgggttcagggtttttttcagcatttgcaggtcaggtttggtgacgggccgtggcaggatgttaaggggcttgatgaagtgggcagtgatacaggcagaacaggagaatga

SEQ ID NO: 23996 - DNA, 228 bp, Escherichia coli
atgtcatcgaaaaaccggccccgcagaacaacaacccgcaacatccgatttccaaaccagatgattgaacaaattaacatcgctcttgaccagaaaggttcagaaaatttttctgcgtgggtcattgaatcttgccgccgggagctggcagcagacataaaatatgcccgtcagttgactataaaaaagaatgatacacagtatgctctgcgatggctgttcatataa

SEQ ID NO: 23997 - DNA, 366 bp, Escherichia coli
atggctgtgcttcgtacgttaccgggcagaatcaaaactctgaacacccggcggataaatgtcctgaggggggaacagcgtcgtgtcagtggcagtgcccgggtttccctcaaacgtcgtatctggcggagggatgccggacactgttgtctctgtagacgcgtggttgacctttgtgacagtgaactcgatcaccgcattgcacttcagttcggtggtggtaatgaggagacgaacctctggaccctctgtactgaatgccatcgccagaagtcagcgagtgaagcggcgagtggtatgcctgatccgacgttgcctgagcttcctgatggcacgctcagggccgacggaatcactggcctgtga

SEQ ID NO: 23998 - DNA, 183 bp, Escherichia coli
atgacgcatcctcacgataatatccgggtaggcgcgatcactttcgtctactccgttacgaagcgaggctgggtatttcccggcctttctgttatccgaaatccgctgaaagcccagcggctggctgaggagataaataataaacgggaggcgatatgcacaaagcatctcctgttgagttaa

SEQ ID NO: 23999 - DNA, 681 bp, Escherichia coli
atgacaccggacattatcctgcagcgtaccgggatcgacgtgagagctgtcgaacagggggatgatgcatggcacaaattacggctcggcgtcatcaccgcttcagaagttcacaacgtgatagcaaagccccgctcaggaaagaagtggcctgacatgaaaatgtcctacttccacaccctgctggctgaggtttgcaccggtgtggctccggaagttaatgctaaggcgctggcctggggaaaacagtacgagaacgacgccagaaccctgtttgaattcacttccggcgtgaatattactgaatccccgatcatctatcgcgacgaaagtatgcgcaccgcctgctctcccgatggtttatgcagtgacggcaacggccttgaactgaaatgcccgtttacctcccgggatttcatgaaattcaggctcggtggtttcgaggcaataaagtcggcttacatggcccaggtgcagtacagcatgtgggtgacgcgaaaagatgcctggtactttgccaactatgacccgcgtatgaagcgtgaaggcctgcattatgtcgtggttgagcgggatgaaaagtacatggcgggttttgacgagatggtgccggagttcatcgaaaaaatggacgaggcactggctgaaattggttttgtatttggggagcaatggcgatga

SEQ ID NO: 24000 - DNA, 192 bp, Escherichia coli; identical to SEQ ID NO: 8188

SEQ ID NO: 24001 - DNA, 189 bp, Escherichia coli
atggaaacgttattaccaaacgttaatacgtctgaaggttgttttgaaattggtgtcactatcagtaaccctgtatttactgaagatgccattaacaagagaaaacacgaacgggagctattaaataaaatatgcattctttcaatgctggcccgtttacgtccgatacaaaaaggatgctggcaatga

SEQ ID NO: 24002 - DNA, 603 bp, Escherichia coli
ttggtaggggttgtatgctcgttgttttatctaagtttaggacaagacggagaacaaaatgactcatataataatatgttaaggataattaataggttaacaatagagcaagttgaaagtgttccatatgttgtttctgaatctattaagaacgatttctttccgacaccagagttagaaaaggaattaaaagcaataataaatagaatacagggaataaagcatcaagacttattttatggagaacggttacataaacaagtatttggagacatgggagcaaattttttatcagttactacgtatggagcagaactgttagttttttttggttttctctgtgtattcattatccctttagggatatatatacctttttatcttttaaagagaatgaaaaaaacccatagctcgataaattgcgcattctattcatatatcattatgattttattgcaatacttagtggctgggaatgcatcggccttcttttttggtccttttctctccgtattgataatgtgtactcctctgatcttattgcatgatacgttaaagagattatcacgaaatgaaaatatcagttataactgtgacttataa

SEQ ID NO: 24003 - DNA, 1149 bp, Escherichia coli
atgaggcgcttcgcaggcgcatgtcgtttcgttttcaatcgtgctctggcgcttcagaatgagaatcatgaggccggtaataaatacatcccttacgggaaaatggcttcctggctggttgagtggaaaaacgccactgaaacgcaatggcttaaagatgccccgtcacagccattgcaacagtcactgaaagagcttgagcgggcttacaaaaacttcttccggaagcgggctgcttttccccgattcaaaaagcggggacagaatgatgcattccgctacccgcagggcgttaagctcgatcaggaaaacagccgtatttttctgccgaaacttggctggatgcgctacctgaacagccgtcaggtcacgggtgttgtgaaaaatgtcactgtcagccagtcctgcggtaagtggtacatcagtattcagacagaaagtgaagtatcaactccggttcacccttcagcatcaatggtcggactggatgctggcgtggctaaactcgccacgctgtcagatggcacagtctttgagcctgtaaacagttttcagaaaaaccagaagaagttggcgagacttcagcgacagttaagccgcaaggtcaaattcagcaataactggcagaagcagaaacgcaaaatacagcgactgcattcctgtaccgcaaatatccgcagggactaccttcacaaagtcacaacgaccgtcagcaaaaaccacgcaatgatagtcattgaggatttgaaggtcagcaacatgtcaaagtcagcagcgggtacggtcagccagccggggcgcaatgtccgggcaaaatcaggtttaaaccgttcgatactggatcagggctggtatgaaatgcgccgccagcttgagtacaagcagctctggcgtggcggtcaggtactggctgttccgccagcgtacacaagccagcgttgcgcgtgctgtggtcatacagcgaaagaaaaccgcctgtcacaaagtaaattcagatgccaggtatgtggatatacagcgaacgccgatgtaaacggcgctcgtaacattttagcggcggggcacgccgttcttgcctgtggggagatggtgcagtcaggccgctcgttgaagcaggaacccaccgaaatgattcaggcgacagcctga

SEQ ID NO: 24004 - DNA, 744 bp, Escherichia coli
atgacacagacagaatcagcgattctggcgcacgcccggcgatgtgcgccagcggagtcgtgcggcttcgtggtaagcacgccggagggggaaagatatttcccctgcgtgaatatctccggtgagccggaggcgtatttccgtatgtcgccggaagactggctgcaggcagaaatgcagggtgagattgtggcgctggtccacagccaccccggtggtctgccctggctgagtgaggccgaccggcggctgcaggtgcagagtgatttgccgtggtggctggtctgccgggggacgattcataagttccgctgtgtgccgcatctcaccgggcggcgctttgagcacggggtgacggactgttacacgctgttccgggatgcttatcatctggcggggattgagatgccggattttcatcgcgaggatgactggtggcgtcacggtcagaatctctatctggataatctggaggccacagggctgtatcaggtgccgttgtcatcagcacaaccgggcgatgtgctgctgtgctgttttggttcatcggtgccgaatcatgccgccatttactgtggtgatggcgagctgctgcaccatattcctgaacaactgagcaaacgagagaggtataccgacaaatggcagcgacgcacacactccctctggcgtcaccgggcatggcgcgcatctgcctttacggggatttgcaacgatttggccgccgcatcgaccttcgtgtga

SEQ ID NO: 24005 - DNA, 948 bp, Escherichia coli
atgtcggaggatgacgtccggccggaggcactgcgtcgttttgaactgatggtggaagaagcggcgcgtcacgctgaggaggcgaagaagaatgccggagaggcggagacgtccgcgaggaatgccggcatatcagccagtcaggcagaagagagcgcggcaaatgctgacacttcagcaggggatgcatcggagtcagcccggcaggcggcagaaagtgcagccgctgcaaagcagtcagaggaggcgtcctcgtcctcggcctctgcggccgctcaaaaagccagtgagtcatcacaaagtgcagcagatgctgagttgtcaaaaaagacggcagaaagtgcagccggtaatgcagccagggatgcaacgaccgcaacagaaaaagcccgggagtcagcagaaagcgcacagtcagcggaacaaagcaggatagcggcggaagaggccgtaaaccgaatccccacggtggtggggcctcccgggccaaagggggaaccgggtcccgcgggtcctcaggggccgaagggagataaaggagagcgtggagacaccggtccggcaggggcaaccggtgaaagggggccggcaggtgatgctggtccggcaggcccggcaggcccggcaggcccacagggaccgaaaggagaaacaggtgcggctggcccggtgggggcaaccggacctcaggggccgaagggcgacccgggggagacgcaaatacggttccgtctggggccgggaaacattattgagacaaacagccatggctggttcccggatacagatggcgcactcatcaccggactgacctttcttgaccccaaagatgccacacgggttcagggtttttttcagcatttgcaggtcaggtttggtgacgggccgtggcaggatgttaaggggctggatgaagtgggcagtgatacaggcagaacaggagaatga

SEQ ID NO: 24006 - DNA, 132 bp, Escherichia coli
atgtcagacaagctcataacgctggcgaagatcctctgtgtaatcgtcggcatttcattttcactaatgctggttgctatttgcttttccactgcctggcgcgtcttaactttgtcatggctggtggggtga

SEQ ID NO: 24007 - DNA, 237 bp, Escherichia coli
atgcttaatttaaatgataatgatgaaaaagtcaaaatcgaaaatgatataaagaaaatagataaaaaaattgaagaaatagataatgcaatccgggatctttcctctgaaacagagaggttcaagataaagtatcaacaagagaatacacttaatgatgtagttcaaaatatcaggacttggctaaaagaaaatcaaaatatggtgaaagctattaagaaaattgatactgaataa

SEQ ID NO: 24008 - DNA, 873 bp, Escherichia coli
  misc_feature (830)..(864): n is a, c, g, or t
atgcctccttttcctggggctgaagaagatgatgacctacaagtagagaaaataatatcgacagcaggagcgccagagactgacgatatacaaattattgcatatcctgataccaacagtttacttgttaaaggaacagtatctcaggttgattttatcgagaagttagtagctacgcttgatattccaaagcgacacattgaattatctttatggataatagatattgataagactgatctagaacagctaggtgctgactggtcgggcacgataaaaattggatccagcttaagtgcatcatttaataattcaggttcaattagtacccttgatgggacacagtttattgcaacaatacaggcacttgcacaaaaaagaagagccgccgttgttgctcgtcccgtcgttttaacacaagagaatattcctgctatatttgataataaccgcactttctatactaaattagtcggcgagcgtactgcggaattggatgaagtaacctatggtacgatgattagcgtgctaccacgatttgctgcgcgaaatcaaattgaattactcttgaatattgaagatggaaatgaaatcaattccgacaagaccaatgttgatgatctgcctcaggttggtagaacacttataagtactattgcacgcgtgccccaagggaaaagtcttttgattgggggatatacacgcgatacgaatacctatgaaagtcgcaagatcccaatattaggcagcattccatttattggtaaattatttggttatgaaggaacaaatgcgaataacatcgttcgtgtctttcttatagagccaannnnnnnnnnnnnnnnnnnnnnnnnnnnnnnnnnngatcgatga

SEQ ID NO: 24009 - DNA, 639 bp, Escherichia coli
gtggtactctgggaaatcgacctgacggtgcagggtggtgagcggtattttttctgtaatgagctgaatgaaaaaggggaggcggtcacctggcaggggcggcaatatcaggcatacccgattgacggcagcggttttgagatgaacgggaagggcagcagtgcccgcccgtcactgacggtgtccaatctgtttggccttgtcaccgggatggcggaggacctgcagagtctggtgggggccacggtggtccgccgccgggtgtatgcccgttttctggatgcggtgaatttcgttgcgggcaatccggaggcggacccggagcaggagctgagtgaccgctgggtggtggagcagatgtcgcagctgacagccatgacggcctcgtttgtgctggctacaccgaccgagacggatggggcgctgtttcccggtcgcatcatgctggcgaatacctgtatgtggacctaccgctctgatgagtgtggttacacgggcggggctgtggcggatgagttcgacaaccccaccacggatatccgtaaggacagatgcagcaagtgcatgcgcgggtgtgagatgcgcggcatggcggttaattttggcggtttcctttccatcaataaactttcgcagtaa

SEQ ID NO: 24010 - DNA, 315 bp, Escherichia coli
atgctacatgatcacgtggcagaatgtctggagaaaaaaggactgtaccggagagcagctgaacgatgggcaaaagtgatggtacagctaagtgatgaccagaaaagaaaagtggcggcacagaaacgagcagagtgtttgcgtaaggcgcgccggactccggtttcaccggtgaacctgaccgaaataaaacaagcggtcaacagactacattctgagttgggaatgggatttgaagagcggcgggtattccgacgatataaagggacaggagaacagaatacgtccggaaacgcgcggtcaaaaaaatgctaa

SEQ ID NO: 24011 - DNA, 315 bp, Escherichia coli
atgctacatgatcacctggcagaatgtctggagaaaaaaggactgtaccggagagcagctgaacgatgggcaaaagtgatggtacagctaagtgatgaccagaaaagaaaagtggcggcacagaaacgagcagagtgtttgcgtaaggcgcgccggactccggtttcaccgatgaacctgacagaaataaaacaagcggtcaacagactacattctgagttgggaatgggatttgaagagcggcgggtattccgacgatataaagggacaggagaacagaatacgtccggaaacgcgcggtcaaaaaaatgctaa

SEQ ID NO: 24012 - DNA, 270 bp, Escherichia coli
atgaacatattaaaaaaaattatgcagcgtctgtgcggttgcggaaagcatgatgactgtgaacacgggcagtcgcttacagtacaactgcgactggggccggcagacatcctggagtcagatgagaatggcattattccggagcaggacggggtaatcacgcaggtggtgatactggatgcagataaaaagcagatacagtgtgtggtaagaccgctgcaaattctgcgtgctgacgggaggtgggaaaatattggcggaatgaaatag

SEQ ID NO: 24013 - DNA, 279 bp, Escherichia coli
gtgggggcaaccggacctcagggaccgaagggcgacccgggggagacacaaatccgttttcgtctggggccgggaaacattattgagacaaacagccatggctggttcccgggtacagatggtgcgctcatcaccggactgacctttcttgcccccaaagatgccacacgggttcaggttttttttcagcatttgcaggtcaggtttggtgacgggccgtggcaggatgttaaggggctggatgaagtgggcagtgatacaggcagaacaggagaatga

SEQ ID NO: 24014 - DNA, 498 bp, Escherichia coli
atgaacgggaagggcagcagtgcccgcccgtcgctgacggtgtcgaatctgttcggtctggtcaccggaatggcggaggacctgcagagcctggtgggggccacggtggtccgccgccgggtgtatgcccgttttctggatgcggtgaatttcgttgcgggcaatccggaggcggacccggagcaggagctgagtgaccgctgggtggtggagcagatgtcgcagctgacagccatgacggcctcgtttgtgctggctacaccgaccgagacggatggggcgctgtttcccggtcgcatcatgctggcgaatacctgtatgtggacctaccgctctgatgagtgtggttacacgggcggggcagtggcggatgagttcgacaaccccaccacggatatccgtaaggacagatgcagcaagtgcatgcgcgggtgtgagatgcgcggcatggtggctaattttggcggtttcctttccatcaataaactttcgcagtaa

SEQ ID NO: 24015 - DNA, 555 bp, Escherichia coli
gtgaaacagtgctacccgaacacggccattgtggggctgcaggtggatgcggagcagtttggcggtcagcagatgacggtgaactaccatatccgcggtcgcatcatccaggtgccgtcaaactatgacccggaaaaacgcacgtacagcggcatctgggacggcagcctgaaaccggcatacagcaacaacccggcctggtgcctgtgggacatgctgactcacccgcgctacggcatgggaaaacgcctgggggcggcggatgtggacaagtgggcgctgtatgccattgcgcagtactgcgaccagatggtccctgatggtttcgggggcacagagccgcggatgacctttaatgcgtacctgtcacaacagcgtaaggcgtgggacgttctcagtgatttctgctcggcgatgcgctgtatgccggtatggaacggccagacgctgacgtttgtgcaggaccgtccgtcagatgtggtgtggcctacaccagcagtgatgtggtggtggatgataacggcgtggggtttcgctacagcttcagcgccctga

SEQ ID NO: 24016 - DNA, 315 bp, Escherichia coli
atgctacatgatcacctggcagaatgtctggagaaaaaaggactgtaccggagagcagctgaacgatgggcaaaagtgatggtacagctaagtgatgaccagaaaagaaaagtggcggcacagaaacgagcagagtgtttgcgtaaggcgcgccggactccggtttcaccggtgaacctgaccgaaataaaacaagcggtcaacagactacattctgagttgggaatgggatttgaagagcggcgggtattccgacgatataaagggacaggagaacagaatacgtccggaaacgcgcggtcaaaaaaatgctaa

SEQ ID NO: 24017 - DNA, 528 bp, Escherichia coli
atgaaatgtaaaatcattgctgccattgccatgctgacagcagcatcatgcggatacgcagcagaacaggaagtcccaatgaaccttgtcagtgctgacggaaaagaagtcagcattggaaaaataaccattcaggagaccccctacggtctgctgttcacaccagcccttcactctctgtctgaaggcattcatggttttcatgtgcacgaaaaaggaaattgcgccccggcactgaaagacggaaaaccggtcgcagcattatcggctggcggtcactttgacccgaaaaacaccggcaaacatcttggcccctggtctccggatggacacctgggcgacctccctgcgctgttcgtgacgcatgacggaaaagcgaactacccggtcctggccccgagactgaactcattaaaagagattaaagggcgttctctcatgcttcatgctggcggtgataaccatcatgaccatccggagcccctgggcggtggtggtgcgagaatggcctgcggcatcattcaataa

SEQ ID NO: 24018 - DNA, 600 bp, Escherichia coli
atgcgtaaattatgtgctgttattttgtccgcagtagtctggcaggtcgccgctgctacgccagcgagtgcagcagaacatcagtccacgctgagcgcggggtatctccatgcctcgacgaacgttcccggtagtgatgatctgaacgggattaacgtgaaataccgttatgagtttatggacgcgctggggctgattacgtccttcagttatgccaatgctgaggatgagcaaaaaacgcgctacagcgatacccgctggcatgaagattccgtgcgtaaccgctggttcagcgtgatggcggggccgtctgtacgcgtgaatgaatggttcagcgcgtatgcgatggcgggtgtggcttacagccgtgtgtcgactttctacggggattatctccgcgtaactgacaacaaggggaaaacgcacgatgtgctgaccggaagtgatgacggtcgccacagcaacacgtctctggcgtggggggctggcgtgcagtttaacccgaccgaatccgtgaccattgaccttgcttatgaaggttccggtagtggcgactggcgatcggatgcatttattgttggtatcggataccgtttctga

SEQ ID NO: 24019 - DNA, 408 bp, Escherichia coli
atggaatttaaagatttaccaacgccattacaggaaatggcatcgaatatagttcgttcacaactggctactcttgaccttagtaccgcagaaaaagaaaccatcgataatatggttcgtaatgtgcgcaatgctttttctgggctatatggttctgataatcaaaagcaggaaagcgatgttaataaacgggtaatttctgtttgcgtgaatggccatgttctttcatcaatcaaaacagaaacggcgacagtcttcgattgcctttgcattgtacagagccttgttgatgccctgtttcgttcagtgaatttagaaaatgatgcaaatctgcgagggcgcataatagcacatccatatgcacatactttaggctctgtggatatcaaagatcccacaaatctttaa

SEQ ID NO: 24020 - DNA, 285 bp, Escherichia coli
gtggtgctgcgggagccttcggcagaggcctggtatctgtggcaggaagtgctcaatggtgatggagaggatgacgataccctgtcggtggtggcgaaaacccgccgtaacctggaagcggatgtgacgctgttctgcgatgtcctgtgtgatactgacctgcaacgggtgttcactccggacgaccgtgagcaggtgctggccgtctatggtccggtacatgcccggttgctgcgtcaggcactggaactgatcgctgatgcagagtcggccagaaaaaagtag

SEQ ID NO: 24021 - DNA, 282 bp, Escherichia coli
atgcgacttgcgctccgtctggggcgcaccttatccgaactgcgccacagcctgagtgcgagcgaggcgatgatgtggatggagttcgacagggtatccccgctgggtgatgagcgcggggatatccgtaatgcacagatcgtgaaagcggttttcggggcacaggggatgaatgttgcactgaaggacgccatgctctgctggggcgaggatgaggataagccggaggtggatccgtttgcggcgctggaagacgcgctgagccttgcagcaatgtcataa

SEQ ID NO: 24022 - DNA, 189 bp, Escherichia coli; identical to SEQ ID NO: 17045

SEQ ID NO: 24023 - DNA, 189 bp, Escherichia coli
atgacttcagcatttgcactggtgatgacggtttttcttataacgggtgaatcacagaatgttattaccggaatttatgccagtaaagaatcctgcctccaggcaagagacgagcaaaaaatttctggtgaatgcctaccggtaaaaaaagtatcgctgtacctgaataacgaaacaccggctggataa

SEQ ID NO: 24024 - DNA, 576 bp, Escherichia coli
ttgtccgcagccatttgtctggccgtatccggtgcgcctgcatgggcatctgaacatcagtccacgctgagcgcggggtatcttcatgcccggaccaacgttcccggcagtgatgatctgaacgggattaacgtgaaataccgttatgagtttacggatacgctggggctggtgacgtcattcagctatgcaggagacaagaatcgccagcttacccgttacagcgatacccgctggcatgaagattccgttcgtaaccgctggttcagcgtaatggcggggccgtctgtgcgcgtgaatgaatggttcagcgcgtatgcgatggcgggtgtggcttacagccgtgtgtcgactttctccggggattatcttcgcgtaactgacaacaaggggaaaacgcacgatgtgctgaccggaagtgatgacggtcgccacagcaacacgtctctggcgtggggggctggcgtgcagtttaacccgaccgaatccgtggccattgatattgcttatgaaggctccggcagtggcgactggcgcactgacggtttcatcgtgggtgtcggttataagttctga

SEQ ID NO: 24025 - DNA, 270 bp, Escherichia coli
  misc_feature (225)..(234): n is a, c, g, or t
atgtcccagttattaagtaattcttttgtcattgttgtgacatgtgtcctcgcgctaagtattgggttgcttccaggttttccccttctagtgtttttatgtttggcagtaatcttaggaatttacttttactttaaattcaaaaagaaagggactgaagaaacggttgttgagggagatattaccgttgggttggaaccctataatcaagatgatgatatctcnnnnnnnnnntaccgaaacggtacccttggtcttgattatgaatag

SEQ ID NO: 24026 - DNA, 366 bp, Escherichia coli
gtggccaatgcaaaaggcggcgtgtatacctcggcaaacctgagtgcgtacagcaacagtattgtggatacgcccacgtactttgcctttgcaaaaggggccgggctgatgggggaggccggacctgaagccattatgcccctgacccgggcggcggatggctcgctgggtgtgcgcgcggtgggcagtatgaacggcagtgcgggtctggtgtattccccggtctaccatatcgccattcagaatgacgggactaatggccagatagggccggaggcggcaggcagtcttgtgcagctgattgaccagcgggtgcaggcggtgatgctgtccatgcgacgtgacggaggaatgctgagtggctga

SEQ ID NO: 24027 - DNA, 342 bp, Escherichia coli
gtggctgagataaaaacgctgcatctggtcccgcgtgaagggatgcaggtgagtgagaagccgtcggtggtgagggtgcggtttggtgacggttatgaacagcgccgccccacagggctgaatcctcaactgaagacgtttcaggcggtgttccgggtgacggatgagtcaacccggcgctggctggaagagtttttatcgtggcatggtggttaccgtgcctttttgtggcgaccgccgaaacataaccggacggtgagggtggtgtgccgggagtggagcgtcacggataacgcccggtacagtgatttcagttgtacgattgagcaggtggtgaactga

SEQ ID NO: 24028 - DNA, 342 bp, Escherichia coli
gtggctgagataaaaacgctgcatctggtcccgcgtgaagggatgcaggtgagtgagaagccgtcggtggtgagggtgcggtttggtgacggttatgaacagcgccgccccacagggctgaatcctcaactgaagacgtttcaggcggtgttccgggtgacggatgagtcaacccggcgctggctggatgaatttttatcctggcatggtggttaccgtgcctttttgtggcgaccgccgaaacataaccggacggtgaggggtgtgtgccgggagtggagcgtcacggataacgcccggtacagtgatttcagctgcacgatagagcaggtggtgaactga

SEQ ID NO: 24029 - DNA, 366 bp, Escherichia coli
gtggccaatgcaaaaggcggcgtgtatacctcggcaaacctgagcgcgtacagcaacagcattgtggacacgcccacgtactttgcgtttgcaaaaggggccgggctgatgggggaagccggacctgaagctattatgcccctgacccgggcggcggatggctcgctgggcgtacgcgccgtgggcagtatgaacggcagtgctggtctggtgtattccccggtctaccacatcgccattcagaatgacggggctaacggacagatagggccggaggcggcaggcagtcttgtgcagctgattgaccagcgggtgcaggcggtgatgctgtccatgcgacgtgacggaggaatgctgagtggctga

SEQ ID NO: 24030 - DNA, 432 bp, Escherichia coli
atgtttggaatcttcaaaaagaaaacccgcagagcggcagcggaaattaaaaagtttgagaaacgcgatctggcacaggcggtgattaacgctgcatacctggtggcctatgcagatggtgaatgcgaggcatccgagaaagcgaagatcgaacaggtcttacgtaatcagcctgcgttgtctgcgtttacctcggaaattaatgcgattagcgcaactattatcggtcagctggataccaattttaaaattggtcgtcgtgccgcgttacgcgagattgaggatgtgaaacacgatacgcgtgaagcggaagatgtgctggatgtggcggtggccattgcggaggcagacggcgaaattgagccggaagagcgcaaggtgctggaagagattgccggtgttctgggtcttcgtctggagaatcacctgtga

SEQ ID NO: 24031 - DNA, 432 bp, Escherichia coli
atgtttggaatcttcaaaaagaaaacccgcagagcggcaacggaaattaaaaagtttgaaaaacgcgatctggcacaggtggtgattaacgccgcatacctggtggcctgtgcagatggtgaatgtgaggcatccgagaaagcgaagatcgaacaggtactgcgtaatcagcctgcgctgtccgcgtttacgtcagaaattaatgcgattagcgcaaccattatcggtcagctggatacgaactttaaaactggtcgtcgtgcggcgttacgtgagatcgaggatgtgaaacacgatacgcgtgaagcggaagatgtgctggatgtggcggtggccattgcggaggcagacggcgaaattgagccggaagagcgcaaggtgctggaagagattgccggtgttctgggtcttcgtctggagaatcacctgtga

SEQ ID NO: 24032 - DNA, 276 bp, Escherichia coli
gtggctacgcagactgaagttgccaggcatttaagtctgaccgatcgccagcttcgcagattgcagaaattgccgggtgccccgatatcgaataagcgagggcaactggatctggatgcctggcgcgatttttacatatcgtatctgaggagaagtaaaaacgatgtgcctgatggcgatagcgaagacgactatgaggagaaattgcttattgccagatgggaactgacagcagaacaggctgttacacagcagttaaaaaagcgtacagcctga

SEQ ID NO: 24033 - DNA, 396 bp, Escherichia coli
atgaaacatactgatatccgtgcggcagtgctggatgcactggagctgcatgaacacggggcgacgctgtttgatggtcgccccgttgtttttgacgaagaggattttccggccgtcgcggtttatctgacggatgcagagtataccggtgaagagctggatgcagatacctggcgggccacactgcatattgaggtgtttttaccggcacaggtaccggattcggagcttgatcagtggatggaaagccggatttatccggcggtgactgcgatcccggcactggcagacctgattacgacgatggttacgcagggctatgagtatcgtcgtgatgacgatatggcgttatggagttctgcggatctgacttattccattacatacgagatgtga

SEQ ID NO: 24034 - DNA, 192 bp, Escherichia coli
atggcgctggcacggaaacatgggtgctctgacacctgtataggtaaacgccttcacaaagcggaggggattgttgaaggcatgctgatgatgctgggagtgaggcttgagatggatcggtatgttgagcgtgaattgccgggagggagaacctctgtattttatcagcgaaaaaatagtttacgatcgtaa

SEQ ID NO: 24035 - DNA, 345 bp, Escherichia coli
atgccggagaggcggagacgtccgcgaggaatgccggcatatcagccagtcaggcagaagagagcgcggcaaatgctgacacttcagcaggggatgcatcggagtcagcccggcaggcggcagaaagtgcagccgctgcaaagcagtcagaggaggcgtcctcgtcctcggcctctgcggccgctcaaaaagccagtgagtcatcacaaagtgcagcagatgctgagttgtcaagaaagacggcagaaagtgcagccggtaatgcagccagggatgcaacgaccgcaacagaaaaagcccgggagtcagcagaaagcgcacagtcagcggaacaaagcaggatag

SEQ ID NO: 24036 - DNA, 345 bp, Escherichia coli
atgccggagaggcggagacgtccgcgaggaatgccggcatatcagccagtcaggcagaagagagcgctgcaaatgctgacacttcagcaggggatgcattggagtcagcccggcaggcggcagaaagtgcagccgctgcaaagcagtcagaggaggcgtcctcgtcctcggcctctgcggccgctcaaaaagccagtgagtcattacaaagtgcaacagaagctgaattgtcaagaaagacggcagaaagtgcagccggtaatgcagccagggatgcaacgaccgcaacagaaaaagcccgggagtcagcagaaagcgcacagtcagcggaacaaagcaggatag

SEQ ID NO: 24037 - DNA, 504 bp, Escherichia coli
gtgaatgcgaactccgggacgctcaacaacgtcacgattaatgagaactgtcagattaaggggaaactgtcagccaatcagattgaaggcgatattgtcaaaacggtcagcaagtctttcccccgcacgagcacttatgccagtggcaccatcacggtaagaatcagtgatgatcagaaatttgaccggcaggtcatgataccgccagtgttattccgcggtggtaagcatgagaatttcaacagtaataaccaacagtcatactggtattcaacctgccggttaagagtgacccgcaatggccaggagatttttaatcagtccacgacggatgctcagggcgtattttcctcagttatagatatgcctgccggacaggggacgctgacactgacattcaccgtatcttcatcaggagcgaataactggacaccaacaaccagtatcagcgatctgctggttgtggtgatgaaaaaatccacagcaggtatcagtatcagctga

SEQ ID NO: 24038 - DNA, 186 bp, Escherichia coli
atgcgagagctgaaaatgaaactctgcgtgctgatgttgccgctggtcgtaagcgcctgcgcatcaacgccaactgctccggtaccgtgcgtgaagccaccggcacctccggcgtggataatgcaaccggtccccgactggcagaagccgctgaacgggattatttcatcctcagagaacggctga

SEQ ID NO: 24039 - DNA, 546 bp, Escherichia coli
atgattggccaccgatgcgccaaagcagcacagcagaatatcgccaggctgtgcggaaggcagggaaatcctgtaaaaaccagtcgcctccatattgtccaggtacaggttctgaccgttgcgccaccagtcatcctcacgctcaaaatccggcagcgttatccccgccagatggtatgcatcccggaacagggtgtaacagtccgtcaccccgtgctcaaagcgccgtcctgtcagatgtggcacacagcggaatttatgaatttccccccggcagaccagccaccagggcagggcactctttatctgcagccgccggtcagcctcgctcagccagggcagaccaccagggtggctgtgaaccagcgccacaatctccccctgcatctctgcctgcagccagtcttccggcgcaatacgaaaatacgcctccggctctgcggagatattcacgcagggctggtaccgttcgccctccggggtgcctatcacgaagccgcacgactccgcaggcgcacaccgccgggcatgcaccagaatcgctga

SEQ ID NO: 24040 - DNA, 366 bp, Escherichia coli
atggctgagcttcgtacactccagagcagaatcaaaacactgaatacccgacgggtgaatattctgaagggtgaacagcgtcgtgtcagtggcagtgcacgtgtttccctcaagcgtcatatctggctcagggatgccgggcagtgctgtctctgtggtcgtgtggttgacctctgtgacagtgaactcgatcaccgaattgcacttcagttcggtggtggtaatgaggagacgaatctctggacgctctgtaccgaatgccatcgacaaaagtctgctcgtgaagcggcgggtggtatgccggacccgacgctgccggaggtgtccggaggtagtggcagagcggacgacatcatcggactgtaa

SEQ ID NO: 24041 - DNA, 192 bp, Escherichia coli
atgaatacaacatttgcactcgttctgacagtttatcttgtttccggcgaatctcttgagctggtgactggcttatacggttcaatgaaagaatgcatggctgcagcagcagaacaaaaaattcccggtaactgttatccggtagataaaactactcacactaataataacgaaataccggcaggactttaa

SEQ ID NO: 24042 - DNA, 189 bp, Escherichia coli
atggaaaagttatcatgtaatgccagcacgtctgaacttcgtttcgaaattggcgttatcactggagacaaaacatttattgaagacgccattaagcagagaaaactcgagcaggacctgttaaatgaagtatgcattccttcaatgctggctcgtctggacctgctgcaaaaaggatataaacaatga

SEQ ID NO: 24043 - DNA, 432 bp, Escherichia coli
atgtttctgaaaacagaacaatttgaatataacggtgtgtctgtcacgctttccgaattgtctgcgctgcagcgtatcgagcatcttgccctcctgaaacggcgtgcagaacaggcagaatccagcggcaacctgcaggtaagcgtggaagatctcgtcagaaccggcgcgtttctggtggcgatgtccctgtggcataaccatccacagaaaacgcagtcaccgtcaatgaatgaggccgtgatgaagatagagcaggaagtgctcaccacctggcctgccgatgccattgcccgggcggaagacgtggtgttgtgcctgtccgggatgagcggggctgttcgtccggatactgatattactgaagtggcgaaaaataacacgctgactgatgatgatttttctgcgggaaagtcttcgacggcgagctga

SEQ ID NO: 24044 - DNA, 288 bp, Escherichia coli
atgtacgccgtactcagcctgttttttggcgatccggatatgcatccggcggatttcagtctgcttgctccagcgtgtgaggaagagcagacggagatgccggacgaggaagaaatgctgatgcagaaagcgacaggagttgccggaggcgtccggttcggaggggacggagggcgcgatatttcaccttctgcggatgtggtggatgtcagcgaggatgatgttgcattaatgatggcttcagcggggatttccggaggtgtgagatatgtcccagccagcgggtga

SEQ ID NO: 24045 - DNA, 330 bp, Escherichia coli
atgaaaacctttcgctggaaagtgaagccggatatggaggtgaactcgcagccatcggtgcgtgaagtgcgttttggtgacgggtactcacagcgtatggcggcagggctgaatgctgacctgaaaacataccgtgtgacgctttccgtgacccgggaggaggcccggcatctggaagcgttcctggcagagcacggaggctggaaggcatttttgtggaagccaccctatgcataccggcagataaaggtgacctgtgccgggtggtctgcgcgggtcgggatgttgcgcgttgagttcagcgcggagtttaagcaggtggtgaactga

SEQ ID NO: 24046 - DNA, 213 bp, Escherichia coli
atgctggcaccgaaagccagaactccccgtacacagacaacggataacggcaaacaaaacacctatttctcctcactggataacatggttgcccagggcaatgttctgccggttctgtacggtgaaatgcgcgtggggtcacgcgtggtttctcaagagatcagcacggcagacgaaggggacggtggtcaggttgtggtgattggtcgctga

SEQ ID NO: 24047 - DNA, 507 bp, Escherichia coli
gtgaaaaagccgtttcaccttgggataaatattgccgctgaacatcttgcacatcctgattttgttgctgatgttttacatataaaaaatgcaatatctgataaatttaacattgtccttgagattaccgaacgcaatctggttgaagatactgatcatgcattacagaaaataaatgaattaaggagccatggctgtgaatttgcagttgatgattttggcacgggatattgttcccttggcctactgcaaaagttgtctgttgattatcttaaaatagataaaagctttatagacacgctcactacagcggaagacgaaacgcctgttttagatattattattaagctgagtaatcgactcaatttgataacgattgcagaaggtgtcagtacctctcaccaggcggaatatcttattcataataacgtgacattagttcagggatacttatatgcaaaaccaatgaaagcgacagagttttatcaatggtatgtaaacagataa

SEQ ID NO: 24048 - DNA, 279 bp, Escherichia coli
gtgggggcaaccggacctcagggaccgaagggcgacccgggggagacacaaatccgttttcgtctggggccggcgagcattattgagacaaacagccatggctggttcccggatacagatggcgcactcatcaccggactgacctttcttgaccccaaagatgccacacaggttcagggtttttttcagcatttgcaggtcaggtttggtgacgggccgtggcaggatgttaaggggctggatgaagtgggcagtgatacaggcagaacaggagaatga

SEQ ID NO: 24049 - DNA, 312 bp, Escherichia coli
atgacgcagtttggcgttcagccacagttcaaaaaactggatgcggttctgctgggcgttgggacgacgacagaggcgggcaatatccccccggcgcgtttccctgcgtatcccatgcgcatccgtctgcataagacgcagccgcattttggcgatatcctgggatatcagcgaaatacatgcaaacaccgcatgaaaggagaggacggcttcaggatcggctttcacgccctgctgccaggcgccggaaaagggctcagccaccgcctgaaacaggctggtccagcccgcctctcttacgtcacgtcctga

SEQ ID NO: 24050 - DNA, 210 bp, Escherichia coli
atgcaggctctgttaccggcgatcgaaaaggcaatgccgcctctgctggtggcccgtatgcgcagtcacagctctgaatattaccgtgagatcgtcgaacggagggatcggctggtgaaagatgtggatgattttgtcgcagcggcgatcgcctggggcaccctgactaacagtgggggtcagcctggtaatgctgttgtcgtgcattga

SEQ ID NO: 24051 - DNA, 309 bp, Escherichia coli
atgataccgccagtgttattccgcggtggtaagcatgagaatttcaacagtaataaccaacagtcatactggtattcaacctgccggttaagagtgacccgcaatggtcaggagatttttaatcagtccacgacggatgctcagggcgtattttcctcagttatagatatgcctgccggacaggggacgctgacactgacattcaccgtatcttcatcaggagcgaataactggacaccaacaaccagtatcagcgatctgctggttgtggtgatgaaaaaatccacagcaggtatcagtatcagctga

SEQ ID NO: 24052 - DNA, 345 bp, Escherichia coli
atgaagaaaaaatacgaactggttgttaaagggataaataattacccggataagattactgttactgtggcactggaaattggtgggtatccgtcactgttgttgccagatgtggcgattagtcttgaccgtactgaaggtgccacgctggagttttacgaagctgaggcgaaaaagcaggcgaagcagtttttcatggatgttgctgccgggttatgtgaaggggatggtccgttgccggaaaagcgccccgtaattttagaggcgcaggatgtgttgataacctacagaggaaaactaccgggaataattacgggttctctgaagactccaccgctggcctga

SEQ ID NO: 24053 - DNA, 375 bp, Escherichia coli
gtggtgaaaccggatgctgcaattcagagcggcagcaagtgggggacagcagaagacctgaccgccgcagagtggatgtttgacatggtgaagaccatcgcgccatcagccagaaaaccgaattttgcagggtgggctaacgatatccgcctgatgcgtgaacgtgacggacgtaaccaccgcgacatgtgcgtgctgttccgctgggcatgccaggacaacttctggtccggtaacgtgctaagcccggccaaactccgcgataagtggacccaactcgaaatcaaccgtaacaagcaacaggcaggcatgatagccagcaaaccaaaactcgacctgacaaacacagactggatttacggggtggatctatga

SEQ ID NO: 24054 - DNA, 378 bp, Escherichia coli
gtgtatgcccgttttctggatgcggtgaattttgtggcgggcaatcctgaggcagaccctgagcaggagctgacggaccggtgggtggtggagcagatgtcatcgctgacggccatgacggcctcgtttgtgctggcgacaccgacggagacggacggagcgctgtttcccggtcgcattatgctggcgaatacctgtatgtggacctaccgctctgatgagtgtggttacacgggcggggcagtggcgggtgagttcgacaaccccaccacggatatccgtaaggacagatgcagcaagtgcatgcgcgggtgtgagatgcgcggcatggtggctaattttggcggtttcctttccatcaataaactttcgcagtaa

SEQ ID NO: 24055 - DNA, 171 bp, Escherichia coli
atgaaacgggataaaaacattgccagtgtgtttgctaccgggctgaatgagtggaaacaggttaaagccgcgcatgtatcaaaaatccgtacgctggtaaatgaagcgaatatgctgattgattttgtcctggctgatacaggcaaagggaaaataacaaaggcggattga

SEQ ID NO: 24056 - DNA, 675 bp, Escherichia coli
atgctaagtcctttgctcaaacgctatacctggaacagcgcctggctgtattacgcgcgtatttttattgcgctttgtggaaccacagcgtttccgtggtggctgggtgatgtaaaactgacgattccgctgacgcttgggatggtggcagcggcgctgaccgatctcgatgaccgactggcgggacgtttgcgtaacctcatcattacgctgttctgcttttttatcgcctcggcctcagtagaattgctgtttccctggccctggctatttgcgattggcttaacgctctctaccagcggcttcattttgctcggcggtctgggtcaacgctatgcaacaattgccttcggtgcattgctgatcgccatttacactatgttgggaacatcactgtatgagcactggtatcagcagccgatgtatcttctggccggtgccgtctggtacaacgtcctgacacttattggtcatctgctgttcccggtccgcccgctgcaggacaacctggcgcgttgctatgaacaactggcgcgttatcttgagctcaagtcgcgcatgtttgatcctgatattgaagatgaaagccaggcaccgctgtacgatttggctctcgccaacggtcagctgatggcgacattgaatcagacgaaactctcgctgctgacccgctga

SEQ ID NO: 24057 - DNA, 2055 bp, Escherichia coli
atggaactgaaagcgacaacgcttggaaaacgtctggcacagcacccttacgatcgggcggtgatcctcaatgccgggattaaagtctccggcgatcgccacgaataccttattcctttcaatcaattactggcgattcactgtaagcgcggtctggtatggggcgaactggagtttgtactgccggacgaaaaagtggtgcgtctgcacggtaccgaatggggcgagacgcagcgtttttaccatcatcttgatgctcactggcggcggtggagtggcgagatgagcgaaattgcgtctggcgttttacgtcagcaactggatttgattgccacgcgcaccggagaaaataaatggctgacgcgtgagcaaacctctggtatgcggcaacaaatccgccaggctttgtcggcgttaccattgccggttaaccgactggaagaattcgataactgccgtgaggcgtggcgtaaatgtcaggcctggttgaaagacattgaaggcgctcggttgcagcataatcaggcgtataccgaagccatgcttatcgagtatgcggattttttccgccaggtcgagtcttcaccgctgaatccggcgcaggcccgggcagtcgttaatggcgagcattctttgttagtgctggctggtgcaggaagcggaaaaacgtcggtgctggtggcccgtgcaggctggttgctggcgcgtggtgaagcgtcccctgagcaaattttattgctggcgtttggtcgcaaagccgctgaagagatggacgagcgtattcgagaacgactacataccgaagacattaccgcacgcacgtttcatgcgctggcgctgcatattattcagcagggcagcaaaaaagttccgatagtcagcaaactggaaaatgataccgctgcccgtcatgaactttttattgctgagtggcgcaagcaatgcagcgaaaagaaagcgcaggcgaagggctggcggcaatggctgacggaagaaatgcagtggtcagtgccagaaggtaatttctgggatgatgaaaaattacagcgtcgtcttgcctctcgcctcgatcgctgggtaagtctgatgcggatgcacggtggtgcacaggcagaaatgattgccagtgcacccgaagagattcgcgatctgttcagtaaacgtatcaagttgatggccccgttattaaaagcctggaaaggtgcgctgaaggcagaaaacgctgtcgatttttcgggccttattcaccaggcgattgtgattctggagaaaggtcgctttatcagcccgtggaagcatattctggttgatgaatttcaggatatctcgccgcagcgcgcagcgttgttagcggcattacgcaagcaaaacagtcagacgacgttgttcgccgttggtgatgactggcaggcgatttatcgcttcagcggtgcgcaaatgtcgctcaccaccgctttccatgaaaactttggtgaaggtgatcgctgcgatttagacacgacttaccgttttaacagtcgtatcggtgaggtggcaaaccggtttattcagcagaacccaggccagctgaaaaagccgctaaacagcttaaccaatggagacaaaaaagccgtcacgttattggatgagagccatcttgacgctttgctggataagctctctggttatgccaaaccggaagagcgcattctgatcctggcgcgttaccatcacatgaggcctgccagcctggaaaaagcggcaacacgctggccgaagttgcaaatcgactttatgaccattcatgccagcaaagggcaacaggcggattacgtcatcatcgttggcttgcaggaggggagtgatggttttccggctgcggcgcgggagtcgattatggaagaggcgctactgccaccggttgaggatttcccggacgctgaagaacggcggttaatgtacgtggcgctgacccgggcacgccatcgggtatgggcactgtttaacaaagagaatccctctccatttgtcgaaatactgaaaaatctggatgtgccggtggcgagaaaaccgtaa

SEQ ID NO: 24058 - DNA, 564 bp, Escherichia coli
atgagtcgaccacttctgcaactggccctcgaccactcatcacttgaagccgcgcagcgcgacgtgacgcggttaaaagacagcgtcgatattgtcgaagcaggcaccattctctgtttaaacgaagggcttggcgcaggcgctaactggatgaccatcatctgcgccgcgccgctcgccacggtggaaaaaggccacgcgatggcgcaacgctgcggcggtgaaatccagatcgagctgttcggcaactggacgctggacgatgcccgtgactggcatcgtattggcgtgcggcaggccatttatcatcgtggtcgtgacgcgcaggccagcgggcaacagtggggcgaggccgatctggcacgcatgaaagcgctttccgatatcggccttgagctttccattaccggcgggattacccctgctgacctgccgctgtttaaagagatccgcgtgaaagcgtttattgccggacgggcgctggcaggcgcagcaaatccggcgcaagtggctggcgatttccatgcgcaaatcgactccatctggggaggcaagcgtgcgtaa

SEQ ID NO: 24059 - DNA, 627 bp, Escherichia coli
atgaaaaagatttggctggcgctggctggtttagttttagcgtttagcgcatcggcggcgcagtatgaagatggtaaacagtacactaccctggaaaaaccagttgctggcgcgccgcaagtgctggagtttttctctttcttctgcccgcactgctatcagtttgaagaagttctgcatatttctgataacgtgaagaaaaaactgccggaaggcgtgaagatgactaaataccacgtcaacttcatggggggtgacctgggcaaagagctgactcaggcatgggctgtggcgatggcgctgggcgtggaagacaaagtcacagttccgctgtttgaaggcgtacaaaaaacccagaccattcgttcagcatctgatatccgcgatgtatttatcaacgcaggtattaaaggtgaagagtacgacgcggcgtggaacagcttcgtggtgaaatctctggtcgctcagcaggaaaaagctgcagctgacgtgcaattgcgtggtgttccggcgatgtttgttaacggtaaatatcagctgaatccgcagggtatggataccagcaatatggatgtttttgttcagcagtatgctgatactgtgaaatatctgtccgagaaaaaataa

SEQ ID NO: 24060 - DNA, 2112 bp, Escherichia coli
atgaccgggaaacgcttaaaagcgtcagtcattattgaccttaatggcaatctttcccggcgttcccgccagtattcgaaccagataaacgctctgtcccgtagtgggcaaagttccctgcgtgccctgcgtatggaagtggtgcgcgtgtctggtgccatcgacagaatgggttctctctcaacccgtacattccgaatgctgtcagccggggcgctgggtgttgccggggtgggttacaccgccaataaactgtttatcagcgcagcagctcaacgtgaacagcagattatcgccatgaactcgctgtatcacggcgataaggccagagcgcaggcaatgatggcctgggcgaagcagaacgcgaaggacaccacgtgggggctgagtggtgttcttgatgagatccgttcgtcgaaaggcttcggcatgacggatgaacagacgaaacagttcatcaccatgttgcaggatcagggggccatgcacggctgggatttacccactgcacagggtgcctcactgcaactgaaacagatgtttgcccgccagcaaatcacagcggcggatgccaacctgctgaccggttacggtatcaacgtttatcaggcgctggcggatgcaacgggaacggacgttaaaaaaatccgtgatctggggacaaagggcaagctgggcatgaaatccattctgacggtattcagaacgctgtcagaacagtcaaaaggtgcacaggccagtgcgatgaactcctgggacgggatgttcgcccagatggaagccaacctgcttgaatttcgcataaaggtggcaaacagcggcccttttgaagaaatcaagaatgagatgcgccgggtgcttaactggcacgatgcggcggataaatccggggagcttgataaacgggctgatgaaattggtcagaaattcctgaccacattcagaaccctgaaatctgcggcacaggagttatggcgctggctgaaaccgggtaaagatgcgctggcatgggttgaccagaatattgtcagcctgaaaaaactggctgctgttctggtgtctgtctggcttgccaataaagcactgagggcgggctgggccgtggcgaagccatcatggcaggttgccagctatccgttcaaaaccgggcgtcgaatgtggcgctggatgcgaaaacgcaaacatggacagacaggcattccggcaccggatgcgctacctgctacagaactactgcgggaactgacagttcagcgcgtttttgtgactaactggcccaacgggttcggtggatatggcggattttcccgatacggaggtaaaacaccggcagcattgccccgccagccgttattgctgtccgggccacaaccgctggcacttccggccccacgcactgttcccgcattaccagcaccgaaaccactggcattacctgcaccatccccggtactggcattgccatctcccggtgtgccgggggccacacggcgcacatcgttacctttacccggcaaatccggtctgttgagcaggcttgcaggcagtgctgccggacaactggttacgggaacaatcggaaagctggctggtgccggtcgtaccgttggcgggttgttttccggtatcggaaacaaacttgcagacagtgccattggtcgggttgtgacaaaaggggccggggcgctgggctggatggggaaaggcgcgggtcgtgcactgtcacgtcttggcggtccggtgatgggggcactccagcttgctcccgttctgatggatgaacaggcatcaactcatgaaaaagccggagcaattggcagcactgccggcgcctggctcggcggtgccgttggcagccttgccggaccgctgggcacggttgccggtgccacgctgggcagtgtcgccggggaatatctgggcggttttgtgactgacctgtatcagaaatggacggccccggaaagggaaccgcaggaacaaaaagtgaatgcggaagcatcgctgcgtgtcgagcttggcgaaggattacgtctgaccagttcccgcgtcaccgaggatggtatggggctgaatatttacgcgggcgataactacattacaggctggtaa

SEQ ID NO: 24061 - DNA, 549 bp, Escherichia coli
atgattgccaccacagaagctgctttgctcgatgctgttcgtgggttgttcggacggacgctgcgggatgtaaaaacgcatcccggcacctggtctgatgccgcaattaaaaaaatcctgattgcgccgccgtctgtttatctggcgtggctgggctgcggtgaaggccgcacccgccgtgaagtggaaagccgctgggtgttttacgtggtggcaaaaatgctgaacggtcgggaaaccgaccgtccggggatttaccagattgttgagcgcctgattgccggaatgaacggacatacatttggccccacaaccggcctgcgtctgaccagcgtccgcaacctgtataccgatgcccagagtaattcaggagtcgcattgtacggtatctatttcagtggcatcacgccgttaccgtccggtgtggatctggactcgctggatgattacgagcgccactggcagacctggaaattcccggacgaaaccccggaatttgccgcacatatcaatgtgaatcaggaaaaggatcatgatgctgaaaattaa

SEQ ID NO: 24062 - DNA, 423 bp, Escherichia coli
atgagctatgcctctcttgacgacatggtaaagcgttaccagcgcagcaatctggacaaactgaccgctgataaatcggacaactttgaaccagatgatgcactgattacgcaggcgttacaggatgccagcgcgcttatcgacggttatatcagtccccgttaccagctgccattgtcagtggttcctgtaacgctggttcgtgtttgttgcgatattgctttttattacctgtgtgatgaacaggcaacagagcaatgcacacaacgttacaaagacgccatcaggtggctgggggtggttctcgacggaaaattaccgcttggcgcagatgtgcatggtgttgaaccggtcagcgaaaatctggttgaggtgcagtctgacgcagccattttctcccgcaaccagaaggggtttatctga

SEQ ID NO: 24063 - DNA, 471 bp, Escherichia coli
gtgagtcttgatatgaacgttgccgtggatgtgcgacgtatccggcttgctcttgatgatctggcaacggtaacgcatgacggatatgtgccacgtgtgatggctgcggcattgctgtcgtcttctgaacaggcttttgaacggcaggcagacccggacacgggccagagctgggagtcatggagtgacccgtggctggcatggcgtcaggagcatggttttgttccgggtagcattcttaccctgcatggcgatctggcccgcagcatcacttccgcttacggcccggattatgccctgattggctcaccaaaagtttacgctgctattcatcagtggggcggtaagcctgatatgccccccggtccggcaggtgttcctgcacgtccttatatggggctggataagagcggtgagcaggaaatttatgatgccatcagaaaacgcgtaagcgccgctctgacgcagtaa

SEQ ID NO: 24064 - DNA, 186 bp, Escherichia coli
atgaaagaaaagctgaccattgaccaaaaaattgagattgcaaaaatagcaagtgactttgttatcgctggcatgaatacgaataaacagccagcgtgtcttgccggttctgatcaaaatgtgaagtcagaacgggagttgttaaaacatatttatcagttgctggaggcaatgattactgattaa

SEQ ID NO: 24065 - DNA, 195 bp, Escherichia coli
atggctgttaaatcagaagagaaaacatctgcggatattgccctgaaactcaaacccatcgtcgaagcggcgctggctgaggagggcaacattcatatcgtcacgaaagccgaatcactgtatctgttaatgcagattgtggttggcccgcttatcgcgggccagatcatcagagagtcacaaattaatcagtaa

SEQ ID NO: 24066 - DNA, 300 bp, Escherichia coli
gtggatatttattcagtgctgacctactcgataggcagtggcagcaccattggtggcattttgtggtgggcggtgaggcgtacatttgccagcacggaacgtgtggagcaaatcgaaagccgtttaaccgcgcttgaaacgaagtgcgaaaacatgcccagtgcacaggatttacatgctgtccggttacagaccgcagaaaccaatggtgaagtgaaagcgatgaaccggcacatacaggtgctgacccatcaactggagcttttgctcgaaaaggcgctcggagagaacaacaaatga

SEQ ID NO: 24067 - DNA, 429 bp, Escherichia coli
atgaacgattttaaaaaacgtctcccccgcatcatcagaacacttgccatcgtggtactggcggcatgtggtggctggcagttgtccggcgatggtgattcatcgctggtttctgttcagtaccttccatacacagaccagcacggcgaactgacagtttgccttaaccatcacggtcctgatattcagcaacgcccttacagctatggtgaatgcatcatgctgttgaaagcagatttgaagcctgtttatgacacgttaaatacccatctgaacaggccactgacagaggaacaaaaaaatgcactggcggtgtttatgttcagcgccagttctggtgctgtgcccgctccccgtaataatcagctgctgaatgatgatgtgttaccggtgccgggattaatgccgggtatgtcgtcagggctgtaa

SEQ ID NO: 24068 - DNA, 411 bp, Escherichia coli
atgacaaatcagcaggatttatttgaacatgatccggctgtaagccagttaatggatcatatcgacaatataccggctcctgagcaggaggcccgctggccccgcgcgctggttgagctggttgacgttctggaaacagaactgaaacgtcagggcgtggatgatgcacggagcatagcccgtaaacaggtgatgtccttatcatggttcctggggggacggcagtattacatcccccggggtgatgcacttctggcagcgttgcgggatgatctgatttactgccagtttaacggtcggaacatagaggagctgcggcgtgaacatcgtctgtcacaaccgcagatttacaagattattgcccgccagagaaaacttcattcacggcgacatcagcccgatttattctga

SEQ ID NO: 24069 - DNA, 123 bp, Escherichia coli
atgtacagaagattcagtaatgaatgttccggcatggctacgttgctgatggtgatgaagggtatcacagttattgcactgcttgccgtagtcacggggatctgtctgttagtttttcgctga

SEQ ID NO: 24070 - DNA, 381 bp, Escherichia coli
atgtttaagcgtttctgttatttgttaccaaattgtctgccggtcatgttgctggcgctgattctgattattagcgtgttttatggtttgcgggcggtgctgttctggaatgctgccgttttcagtgtggcgctgtgctttaccggcactatttttgatgatctgtcccggacaggaaaaatccgacgttatgcttctattaatgccattgattttcttggtggcctcgtcgggttaagtctttcggctattgcaaccgggcttttagaagaagcgcatcagttcacgatttatgctttatctggcttctgtagcatatggttttgctttcgcctccatatctgtctgcgacgttcagtaccgtctggcgcggaggcatga

SEQ ID NO: 24071 - DNA, 417 bp, Escherichia coli
atgaaaattgattatgacgagatagccagaatatttgatgtattcctggaggccgacactgcattcattcgactggaagatgtcggctgggatcgttctcagcggcacagcgacagccatcagaagctggttttccatcttctgttgctggttgaaaatggttttatcagcaacagatatctgaaaacaggcaccgcaaaaagcattggtctcaccccgacaagcctcggatattcatattcaggcaccagtgtcagactcacacaagatggtcatgattttgcgaaagcactacatcaaaaacccattcttgagcgtataaaacaggagcttgccgacgccccgatgacgctcgtaacagacgtcggcaaacagtggttaacctcgtttcttaaaaagaaactcgggattgaatag

SEQ ID NO: 24072 - DNA, 312 bp, Escherichia coli
atgaataatggcgtatttacaaaatcagaagaacttacagccctgctgattgccggtggtttaccggaaaacgaggtcaacgactttgtggcctttgtatatgccccgtcttacgaacaggctattgatgaggtcatggcgtaccgactgggcattgttgctgagtcactgagtcctcactggattattgaaaatctccgcactattgctgatggcaacgataaagtggcggctgtcgccgcccttgatgtgctgcaacgtatgaaccgggaactattcaatcccgagtttctttttaagaaacgaggttaa

SEQ ID NO: 24073 - DNA, 228 bp, Escherichia coli
atgacgaggaataagcaacaagcaccggaaataacagcggagatgttgattaaagacagcgccgaatgcctggcatcagtacctgcattgattcaacaggcgaatgcaaaaaatctccgtcgtgcagcttcgtttattcgtgcaggcattgcccgccagatgatgattgcgcagatgtgtatgcgcgaagcacagcgtctggaacatatggaggcaaatagtgattaa

SEQ ID NO: 24074 - DNA, 309 bp, Escherichia coli
atggcgcgatgcgtcagggaattgctcgcgcctgaatctgaaatggtgatatttatgacgaatcaggaaatgaaagaatgcattgtctctttatgtgcatggcataaagcacgcgtggatgaatgtcgtttttttatcgataaaaaagatgcggatattaccttcgacaatgacggtgagaaatgtgttatccctgcacattcaaaggaagcaaaccttctgagacttggggcaaggcttgcccttttcatattcgaaaaatttcctgtaacgctgaatgtaaaggatgacgaagatgacgaggaataa

SEQ ID NO: 24075 - DNA, 228 bp, Escherichia coli
atggcaaaagtaatctttgaatttaacaatacagaaaatattgagtttcaggaaaatggaggttttgccgtaaatatgaatgtgcgactggaagaatcctcacctgaggaccagaccgggccacatgatgtaatggcaggcatcatcaagagcatggctcctgaaatcattaaaaaaagcgaccgaggagttgttgaaatcagccagggagcttgggctggaagctga

SEQ ID NO: 24076 - DNA, 213 bp, Escherichia coli
atgatggtgataaatattcacgatagtctgggaattggtcggttaattaaccttgataatgtcaatgtgatggaatcaactgttaacggtgatgttatttttgaatttgttgatggtcgaagactggctgttcatgtcggcaaccatcatcacgcagaaaatgtgttttgtgaacttaacgaaatcacaaatgcaacgcccgttaatcaataa

SEQ ID NO: 24077 - DNA, 1989 bp, Escherichia coli
atgaaagaatggtatacagcaaaagagttgctcggtttggcaggtttaccaaagcaagccactaacattacacgtaaggcacaaagagaaggttgggagttcaggcaggttgcaggaactaaaggtgtatcatttgaattcaatatcaaatcattccctgtcgcattacgtgctgaaattctgttgcaacaagggagaattgaaacaagccaggggtattttgaaatcgcccgccctacgctggaagctcatgattatgatcgtgaggtgctgtggagcaaatgggataacgccagcgattcccagcgcagacttgctgaaaaatggttgcctgcggttcaggctgcagacgaaatgctgaaccaggggatttcaacaaaaacggcttttgcgaccgttgcagggcattaccaggtcagcgcctccactttgcgggacaagtattatcaggtacagaagtttgcgaagcctgactgggcggctgcacttgttgatggacgtggtgcatcccgtcgcaatgttcacaaaagtgaatttgacgaggatgcctggcagtttctgattgcagattatctgcgaccagaaaaacccgccttccgcaaatgttatgagcgtctggagctggcagcccgcgagcatggctggagtattccctcccgtgccacggcctttcgccggattcagcaactggatgaggcaatggttgttgcctgccgtgaaggtgaacatgcactgatgcatctgataccggcacagcaacgaactgtggaacacctggatgccatgcagtggatcaacggcgacggttatctgcataacgtctttgtacgctggtttaacggcgatgtgatccgcccgaaaacatggttctggcaggatgtgaaaacccgaaaaattctgggctggcgctgcgatgtaagcgagaacatcgattcaattcgcctctcattcatggatgtggtgacacgctacggcatcccggaggattttcacatcaccattgataacacccgtggtgcagcgaataaatggctgacggggggcgcgcccaatcgctaccgctttaaggtgaaagaggatgatccaaagggactgtttttactgatgggcgcgaaaatgcactggacaagcgttgttgccggtaaaggctggggccaggcaaaacctgttgaacgtgctttcggtgttggtgggcttgaggaatacgttgataagcatccggcactggctggcgcatatacggggccaaatccgcaggcaaaacctgataactatggcgaccgtgctgttgatgcagagctgtttctgaaaacccttgccgaaggtgtggcgatgttcaatgccagaacaggtcgtgaaacagaaatgtgcgggggtaaactctcgtttgatgatgttttcgagcgtgaatacgccagaacggttgtgcgtaaaccaaccgaagaacaaaaacggatgctgttactgcctgctgaggcggtgaacgtttcacgcaaaggcgagtttacgcttaaagttggcggctcccttaaaggcgcgaaaaacgtttattacaacatggcattaatgaatgccggagtgaaaaaagttgtggtcaggtttgatccacagcagctacacagcacggtttattgctacaccctggacggtcggtttatctgtgaagcggaatgtctggcaccagttgcatttaatgatgctgcggcaggccgtgagtatcgtcgacgccagaaacaactgaaatctgcaactaaagcagccattaaggcgcagaaacaaatggacgcgctggaagttgctgaactgctgccgcagatagccgaaccagcagcaccagaatcaagggttgttggtattttccggccttccggtaacacggtgcaggtgaaataccaggaaaccgatgatgaatatgaaactgatcgtgatgaatatctgaatcactcgctggatattctggaacagaacagacgtaaaaaagccatttaa

SEQ ID NO: 24078 - DNA, 294 bp, Escherichia coli
atgcagaaaccaaagcgtagactcggttttatgattggtaagagcaatgcaacattgcctgatgaagcaactgatgcagctattgacaacgaagtcaccaacctgttttttgagtctctgcttgagtcggcaaaagaagctgtcgaaattcatcaaggtaaacgccctgcagctcgtagaacgctgcataaggtaaacaggaccactaaagacacgatagaacgctcagaagccggtacagacgttttcacagctactgatggccctgacctcttcaaaaaactgaagatgtag

SEQ ID NO: 24079 - DNA, 834 bp, Escherichia coli
atgttcaatatagaaaataacagagagatattaaaaagtcaaatacctttaaagccatatgctactaatgatcttgattttggattgactattcaaaataagaataaagctttagatatgctttatttacaagtaaatcatcccttataccttcatacaatggtatttgatttagacaaagaaaactgcttttacgagtttgaaaatgctcatttgcccatcccgtcttttataacaaaatcaccagactctggtagatgtcattacggttatatgcttaatgctccgatctcatcaacagagaaaagcagacagaagcctgtcaagtttgccagagcattatattacaatatggctactcgtcttggtgctgatcttggctatgcgggactgattactaaaaacccactgcatagccattggtcgccgttctggtctggtgctgatttatacgaacttaatgatttagctgattgttttgatgatttagaagacccaaagaaaagagaaaatacagagtttgcttttggtcgtaatgttgaaatgttcgacactataagacaatgggcttataaaaatgtgctaaaatataagaatgaaagttcatttaatgattttcaaaatgagttattgttaaagtgtcaaatgcataatgcatatttaaatgctaatgatttactgccatacaatgaaataaaagcaacatcaaaaagcattgctaaatggtgttggtctaaatttgaaaatgaggagtttagtaagatacaatcaaatagagcaaaaaagggaaaaccaaaaggcaaaactcgtaagtttttggaggcgataaaatga

SEQ ID NO: 24080 - DNA, 270 bp, Escherichia coli
atgaaagttaaaaatagaaaaagagaacttacagcaaaagagtatgctgaacaatatgatattagtgttagaacagtaaaaagatatttttctcaagatcgtgaagactatgagaaagaagcaaaacaaagaagattaaaagcatttgtattacgtgaaagcgggatgaaatgggcagatgttggtattgctcttggaactacaaaacacggggctatagctctttataaacgttatcaacaaatagacgcaccaataaaagaggcttaa

SEQ ID NO: 24081 - DNA, 1506 bp, Escherichia coli
atgaaaggaaatgtagcaaaacccggaagatcatttaaaaatagagttgattacattcttaaagatgaccacgattttatatgtagcaatatggcaagtgattataataatgttagtgatttaactgatgagtttaaaactgtaagcagctttagacaagatataaaaaaaccagtatttcacgcttttttatctcttccaaaaaatgaacatttaacagatgaacaatggcaagagatagcaaaagactatttgaaagaaatgaatattgatatagacaaacatcaatatatttgtgttcgtcataacgatacagataaagaacatatccatattgtagctaatcgtgttggccttgatggttctgtatggctcggtcagcactcagcatttaacacaatagcagcttgtgaacgtttagaagtaaaacacggcttaaccattacacaggggcttaaaggtcaaaaatcagacgtatcagcaccaaccaaagctgagatcgagcaagccctccgcactggtgaaaaaccagctcgtatcgtgctacagaacgcattgcaggctgctatggtaggaaaaccagaccttgagacgttcgtagaacgtctgcaggccgtaggcattgaaccgaggttcaatgttgccagcactggcaacgtggcgggggtttcattcagtgttggagatgtggcattcaagggatctcagttgggtaaaaaatacagttggaacactataaaaaacaaggtgatatatgacaaaaatagagatgatgaactcgttagaagattcgcagcaagaaaaacagatgacgaaaatagtattagacgatcacttgttgaaccaaatatcaatgacgatagaaccattatcagaaacgatgatgatattatcggagtcagtcagcacagcattaaatcagacgcaacagacactaacaagagtgaacaactcattagaggcaacaacaaccgctttaaactcagcgaaaaatataatagaccaacaggcccaaaagttagaagaacaacacaaaaagctgcacaggtactcaacagagttaaaaaacaatacaataaaaaatcaatcaaaacttataataaaagtggcctcaatagttggcgtgataaatctgatagcggttctatcagtaggatacttgatcatgcagaaacagccaacgcagccacctattcatttagactcaaaggccgtggcaacatcaatagtagagcaactaagatcgaagagataagagaaaggttaggtataaaaaaaccagttattcagccagagaataaagaaaaaatagttaaagaagaaataaagaaaaaaccgttttatatggttgagcatgaaaatagatttaaatctaaactacataaaaccaaaaacactatcaatgaaaaaatcattaatcaaaatcagctaacagatgaaaatgatgacggcggtgataatgatggaggcggtgataatgatggaggcggtaggtttaggatgtaa

SEQ ID NO: 24082 - DNA, 372 bp, Escherichia coli
atgaagacagatagaaaaagaggacgtatagagttaaatcacgaagtacgtagagatatatctatacagtttagagtaaacaaagcagagtttgaatatttaaaagaacttgttgaggcgtctggccttgaaagaggtcattacattagaagagagattttaaactctgaacctattgttaaaagaaaaatgccggattttgagcaatcattgtataaagaaatacaacatcaaggtaataatataaatcagattgctaaaaagctaaatacgaatgaagactttaaacaatctgtagccgcagaagctaactttgctataaagcaacttatgaaaagaatattaaaggcttgtgaggtttataccatatga

SEQ ID NO: 24083 - DNA, 276 bp, Escherichia coli
atgattatagaaatgaaatatgaaatgaaacttaatgtattagcacgttttttctattacatagaacaagataaagatataccttttgattactcaagctatgacgaacaaggattatgttattttgtagctaatagatacattaacgaaaataaagctgatgatcttatacaggcattgatagatactaatgacgatgattatataaaagctataagagattatgttcagtatacaactttaaatgaagtgagaaagaaatatgaagacagatag

SEQ ID NO: 24084 - DNA, 267 bp, Escherichia coli
atgatagatgaaatgacacaatacagaataagacgctttacacaaagtcaaaaaagcttgctactaaagatgataaaagaaagccagcgaagcgatttagaagataatataaaagatattttaaaagatattgatgttagttattcaactggcataacaaagaaagcatcaagaaaagaagaaatgatcgcttgtcgtgaagtccattacatctttagtatattaacaaaaagaggcattaacaatgattatagaaatgaaatatga

SEQ ID NO: 24085 - DNA, 267 bp, Escherichia coli
atgaatatagttttatcagtatcaaaatgtttatacataaacgatttagatcgcttacttccgtgtgatcgtttttttgttcatttagattatagagatattagcaaaaaagagtcatttgagatgaatagacacgacaaagaaacatacaaacttatctttgataagcttataggtaatgacgtaatgcttgctattgatgaagacatctacagcgaagttgtcgaaaacttactttattattcaaataagacttatggagattaa

SEQ ID NO: 24086 - DNA, 249 bp, Escherichia coli
atgggtgatggttcgacacttcgagccatcaccttggaagacgtattttacattctacttctgaaagaaatcctgtcagaaaaagccaacttgctaataataaacccaacaatcgcaatgacaaataaactaatattaccagccattattcctgaactcataccgatcaaaactgataatgttaaggtgctgaatactattaaaaatacacaccaacccggcggagcaccgtataataccgttgcttga

SEQ ID NO: 24087 - DNA, 288 bp, Escherichia coli
atgcggaaatttatgttagtggcaggtcttgccgtcctgctagcagggtgtggcgatgatggcatctatggcaactatgttaatcaacagttcggcgtcaggcttgatattcagaaagatgtgatcaagtttcgcgatggtgtttttacagttaaaagctgggatgaaagcaagaaacccatctatatcgccaaaacgcaaaacaaaaatctcggatcttggacttttaaaatcgaaaaagtcaaagatggagttgtttaccaaggtgcggtttttaagaaagattag

SEQ ID NO: 24088 - DNA, 276 bp, Escherichia coli
atgaaaaaagaaaataaatgtaatagtcagaactcagcagaacttacagcattgttagaatactctcgctttaccaagaaagtgcttgcgaagcctgctaatgaagtattcgatctatttactgataaatattatatggaaaccgtttacgatgatattattgaaaaaacgaagaggagtattgatcaaagtcagcatagatacatagattttgaagaggttagaataaatataatgtgtatgcatacagaggccattatgatttgttatatgtga

SEQ ID NO: 24089 - DNA, 201 bp, Escherichia coli
atgacaacaaaaaaacttattcgcatgccggaagtgatcaataaaacaggatttagcaaagcatggatctatagacttattagtaagggggatttccctaagccgattaagattggaataagagccagtgcctttgttgaaagtgagattgatgaatggattgaacaactgatctattcatcacgtaatacagctgcataa

SEQ ID NO: 24090 - DNA, 1215 bp, Escherichia coli
atgaagctcaatgccagacaggtcgagactgccaagcccaaagataaaccctacaagatggctgatggtggtggcctctacttattggttaaaactaacgggtcacgctactggcgtttaaagtatcgtatcgatggaaaggaaaagttattggcgctgggggtatatcccgatgtgtctttggctgatgccagagcaaagcgtgatgaagctcgaaaaggtatcgctgggggtatcgatcctttagagcttaagaaagaacataaagctgagcgtgaagcgcaggtcaaaaacacctttcagcaaattgcgctcgaatggcacagcatgaaagtgaaaaaatggtcagttgggtatgcctctgacattctcgaagctttcaataaagatatttttccttttcttggtcaacggcctgttgcggacattaagccattagagcttcttaatgtgcttaaaaaaatcgaagccagaggtgcaacagagaaagcaaagaaagtgcgccaacgatgtggtgaagtgtttcgctatgccatcgtgacaggcagagccgagtataatcccgctcctgatctcaccagtgccatgcaggggcatgaatctacacattacccgttcctgaccaccgaagagcttcctgccttttttaaagcccttgctggctactctggtagtgaattgatggtgttggcagcaagattattgatccttactggcctaagaacgggtgaattgcgtggtgccttatggtcggaaatcgattccgagaaagcgctatgggaaatttctgctgaacgcatgaaaatgcgtcgtcctcatatcatcccgctatctacacaagcgttagccattatcgaaaagatcagagcaatgacgggacaattccctttgctgtttccgggccgcaatgatccaagtaagaccatgagcgaagccagtatcaatcaggtatttaagcgaatcggctatacaggacgggttacgggtcacggcttccgtcataccatgagcaccgttcttcatgaacagggctacaacaccgcatggattgaaacccaactagcccatgttgataagaatgctatccgtggcacctacaaccatgcgcaatatctcgatggcagacgcgagatgctgcaatggtatgccgactacatggtaagccttgagaaaggcggtaatgtcgtacagggaacgtttaatcggtgtgggtaa

SEQ ID NO: 24091 - DNA, 9651 bp, Escherichia coli
atgcatcagcctcccgttcgcttcacttaccgcctgctgagttacctggtcagtgcgattatcgccgggcagccgttgttaccggctgtgggggccgtcatcaccccacaaaacggggccggaatggataaagcggcaaatggtgtgccggtcgtgaacattgccacgccgaacggggccgggatttcgcataaccggtttacggattacaacgtcgggaaggaagggctgattctcaataatgccaccggtaagcttaatccgacgcagcttggtggactgatacagaataacccgaacctgaaagcgggcggggaagcgaagggtatcatcaacgaagtgaccggcggtaagcgttcactgctgcagggctatacggaagtggccggcaaagcggcgaatgtgatggttgccaacccgtatggtatcacctgtgacggctgtggctttatcaacacgccgcacgcgacgctcaccacgggcaaacctgtgatgaatgccgacggcagcctgcaggcgctggaggtgactgaaggcagtatcaccatcaatggcgcgggcctggacggcacccggagcgatgccgtatccattattgcccgtgcaacggaagtgaatgccgcgcttcatgcgaaggatttaactgtcactgcaggcgctaaccgtgtaactgcagatggtcgtgtcagagccctgaagggcgaaggtgatgtgccgaaagttgccgttgataccggcgctctcggtggaatgtacgccaggcgtattcatctgacctccactgaaagtggtgtcggggttaatcttggtaacctttatgcccgcgatggcgatatcaccctggatgccagcggcagactgactgtcaacaacagtctcgccacgggggccgtcactgcaaaaggtcagggcgtcaccttaaccggcgaccataaagcgggaggtaacctgagcgtcagcagccggagagatatcgttctcagcaatggaacgcttaacagcgacaaggacctcagcctgaccgccggcggcagaatcactcaacagaatgaaaaactgactgccggccgggatgtaacgcttgccgcgaaaaacatcacacaggataccgccagccagattaacgcggcccgcgatatcgtgactgtcgccagtgacacgctgacaacacagggacagataaccgccgggcagaatctcacggccagcgccaccacgctgacgcaggacggaatattgctggcgaaaagtcatgcgggactcaatgccggtacgctgaataacagtggcgccgttcagggagctaccctgacgctcggcagtacaacgctcagcaacagtggctccctgctcagtggcggtcccctgaccatgaatacccgcgactttacccagagcggccgcactggcgcgaagggcaaagtggatatcatggccagtgggaaactgaccagtacaggtttgctggtgagcgatgatgcactggtgctgaaggcgcaggatgtgacacagaacggtgtgctgtccggcggcaaagggctgacggtcagtgcgcagacgctgagctccggtaaaaaatcggtcacccacagcgatgctgcgatgacgctgaatgtgacaacagtggcgctggacggggaaaccagtgccggtgacaccctccgggttcaggcagacaaactgagtaccgcagcgggcgcacaacttcagagcggcaaaaatctcagcatcaacgccagagatgcacgtcttgcaggtacgcaggcagcacaacagaccatggtggtgaacgccagtgaaaagctcacccacagcgggaaaagcagtgccccgtcgctcagcctcagtgcgccggaactgaccagcagcggcgtacttgttggttccgccctgaatacacagtcacagaccctgaccaacagcggtctgttgcagggggaggcctcactcaccgttaacacacagaggcttgataatcagcagaacggcacgctgtacagtgctgcagacctgacgctggatataccggacatccgcaacagcgggcttatcaccggtgataatggtttaatgttaaatgctgtctccctcagcaatccgggaaaaatcatcgctgacacgctgagcgtcagggcgaccacgctggatggtgacggcctgttgcagggcgccggtgcactggcgcttgctggcgacaccctctcacagggtagtcacggacgctggctgacggcggacgacctctccctccggggcaaaacactgaataccgcagggaccacgcagggacagaatatcaccgtgcaggcggacagatgggcgaacagtggttccgtgctggcaaccggtaaccttactgcttcggcaaccggtcagttgaccagtaccggcgatatcatgagccagggtgacaccacgctgaaagcagccaccacggacaaccggggcagtctgctttcggccggcacgctctcccttgatggaaattcactggataaccgcggcactgtccagggtaaccatgtcacgattcgccagaacagtgtcaccaacagtggcacgctcaccgggatcgccgcactgacgcttgccgcccgtatggcatcccctcaacctgcgctgatgaataacggaggttcattgctgaccagcggcgatctgacaatcaccgcaggcagtattaccagttccggacactggcagggcaaacgggtgctgatcaccgcagacagtctggcaaacagcggggcgatccaggcggctgacagcctgactgcacgtctgacgggtgagctcgtcagcacagcgggcagcaaagtcacctcgaacggtgaaatggcgctcagtgcactgaatttaagcaacagcggacaatggattgcaaaaaatctgaccctgaaggcgaactcactgaccagtgcgggtgacatcaccggtgtggatactctcacgctcacggtgaatcagacgctgaacaatcaggcgaacggaaaactgctcagtgcaggtgtgctgacgctgaaggcagacagtgtcacaaacgacgggcaattacagggaaatgtcaccaccatcacggcaggacaactcacaaacggcgggcatctgcagggcgaaacgctgacgctgacagcctccggtggcgtgaacaaccgttccggtggtgttctgatgagccggaatgcactgaatgtcagtactgcgaccctgagtaaccagagcacgatacagggtggaggcggggtttccctgaacgccacagaccgtctgcagaacgacggcaaaatcctctccggcagtaacctcacgctgacggcgcaggtgctggcgaacaccggcagcggactggtacaggctgccaccctgctgctggatgtggtgaatactgtcaacggcggacgcgtacttgccaccggcagtgccgacgttaaaggaaccacgctgaataataccggtacgcttcagggtgcggacctgctggtgaattaccacacattcagcaacagcggtaccctgctgggaacctccgggcttggcgtcaagggcagttcactgctgcaaaatggtacagggcggctgtacagtgcaggcaacctgctgcttgacgctcaggacttcagtggtcaggggcaggtggtggccaccggtgatgtcacactgaaactgattgctgccctcacgaatcatggtaccctggccgcagggaaaaccctttccgtcacgtcgcaaaatgccatcaccaacggcggtgtcatgcagggtgatgccatggtgctcggtgccggagaggcattcaccaacaatggaacgctgactgccggtaaaggcaacagtgttttcagcgcacagcgtcttttccttaacgcaccgggttcacttcagggcggtggcgatgtgagtctgaacagccggagtgatatcaccatcagtggttttaccggcacggcaggcagtctgacaatgaatgtggccggtaccctgctgaacagtgcgctgatttatgcggggaataacctgaagctgtttacagaccgtctgcataaccagcatggtgatatcctggccggcaacagtctgtgggtacagaaggatgcttccggcggtgcaaacacagagattatcaataattccgggaatattgagacgcatcagggcgatattgttgtaagaaccgggcatcttctgaaccagcgggagggattttctgccacaacaacaacccggactaacccctcatccattcagggaatgggaaatgctctggttgatattcccctttcccttcttcctgacggcagctatggctatttcacccgtgaagttgaaaatcagcacggtacgccctgcaacgggcacggggcatgcaatatcacaatggatacgctttattattacgcgccgtttgctgacagtgccacacagcgctttctcagcagccagaacatcacaacagtaaccggtgctgataatccggcaggccgcattgcgtcagggcgtaatctttctgctgaggctgaacgactggaaaaccgggcgtcatttatcctggcgaatggggatatcgcactctcgggcagagagttaagcaatcagagctggcagacggggacagagaatgaatatctggtataccgctacgacccgaaaacgttttacggtagctatgcaacaggctctctggataaactgcccctgctgtcaccggaatttgaaaacaataccatcagattttcactggatggccgggaaaaagattacacgcccggtaagacgtattattccgttattcaggcgggcggggatgttaagacccgttttaccagcagtatcaataacggaacaaccactgcacatgcaggtagtgtcagtccggtggtctctgcacctgtactgaatacgttaagtcagcagaccggcggagacagtctgacacagacagcgctgcagcagtatgagccggtggtggttggctctccgcaatggcacgatgaactggcaggtgccctgaaaaatattgccggaggttcgccactgaccggtcagaccggtatcagtgatgactggccactgccttccggcaacaatggatacctggttccgtccacggacccggacagtccgtatctgattacggtgaacccgaaactggatggtctcggacaggtggacagccatttgtttgccggactgtatgagcttcttggagcgaagccgggtcaggcgccacgtgaaacggctccgtcgtataccgatgaaaaacagtttctgggctcatcgtattttcttgaccgcctcgggctgaaaccggaaaaagattatcgtttcctgggggatgcggtctttgatacccggtatgtcagtaacgcggtgctgagccggacgggttcacgttatctcaacggactgggttcagacacggaacagatgcggtatctgatggataacgcggccagacaacagaaaggactgggattagagtttggtgtggcgctgacagctgaacagattgctcagcttgacggcagcatactgtggtgggagtcagtcaccatcaacggacaaacagtcatggtcccgaaactgtatctgtcgccggaagatatcaccctgcataacggcagcgttatcagcgggaacaacgtgcaacttgcgggcggcaatatcaccaacagcggcggcagcatcaacgcacagaacgacctctcgctcgacagttccggctatatcgacaacctgaatgcggggctgataagcgcgggcggtagcctggacctgagcgccatcggggatatcagcaatatcagctcagtcatcagcggtaaaaccgtacaactggaaagcgtgagtggcaacatcagcaatatcacccggcgtcagcaatggaatgcgggcagtgacagccaatatggtggtgtgcatctcagcggtacggacaccggtccggttgcgaccattaaaggcactgattcactttcgctggatgcagggaaaaacattgatattaccggggcaacggtctcgtccggtggagaccttggaatgtctgcgggtaatgatatcaacattgccgcaaacctgataagtgggagcaaaagtcagtccggtttctggcacactgatgacaacagttcatcatccaccacctcacagggcagcagcatcagcgccggcggtaacctggcgatggctgcaggccataatctggatgtcacggcatcctctgtttctgccgggcacagcgccctgctttctgcaggtaacgacctgagtctgaatgcagtcagggaaagcaaaaacagtcgcaacggcaggtcagaaagtcatgaaagccacgcagctgtgtccacggtgacagcgggcgataacttcctccttgttgccggtcgtgatattgccagtcaggctgccggtatggctgcggaaaataacgtggtcatccggggcggacgtgatgtgaacctggtggcagagtctgccggcgcaggcgacagctatacgtcgaagaaaaagaaagagattaacgagacagtccgtcagcagggaacggaaatcgccagcggtggtgacaccaccgtcaacgcaggacgggatatcaccgctgttgcgtcatccgttaccgcaaccggcaatatcagcgtgaatgccggtcgtgatgttgccctgaccacggcgacagaaagtgactatcactatctggaaacgaagaaaaaaagcggaggttttctcagtaagaaaaccacccgcaccatcagtgaggacagtgccacccgtgaagcaggctccctgctgtcggggaaccgcgtgaccgttaacgccggtgataacctgacggtagagggttcggatgtggtggctgaccgggatgtgtcactggcggcgggtaaccatgttgatgttcttgctgccaccagtacagatacgtcctggcgctttaaggaaacgaagaaatccggtctgatgggtaccggcggtattggtttcaccattggcagcagtaagacaacgcacgaccggcgcgaggccgggacaacgcagagtcagagtgccagcaccatcggctccactgccggtaatgtcagtattaccgcgggcaaacaggctcatatcagcggttcggatgtgattgcgaaccgggatatcagcattaccggtgacagtgtggtggttgacccggggcatgaccgtcgtactgtggacgaaaaatttgagcagaagaaaagcgggctgacggttgccctttccggcacggtgggcagtgccatcaataatgcggttaccagtgcacaggagacgaaggagagcagtgacagccgtctgaaagccctgcaggccacaaagacagcgctgtctggtgtgcaggccggacaggctgcgacaatggcctccgcaaccggtgacccgaatgcgatgggagtcagcctgtcgctcaccacccagaaatcgaaatcacaacaacattctgaaagtgacacagtatccggcagtacgctgaatgccgggaataatctgtctgttgtcgcaaccggtaaaaacaggggcgataaccgcggagatattgtgattgccggaagccagcttaaggccggtggtaacacaagcctggatgccgcgaatgatattctgttgagtggcgccgcaaacacacaaaaaacaacgggcaggaacagcagcagtggcggtggcgtgggtgtcagtatcggtgccggtggtaacggtgccggtatcagcgtctttgccggcgttaatgcggcaaaaggcagcgagaaaggtaacggtactgagtggactgaaaccacaacagacagcggtaaaaccgtcaccatcaacagtggtcgggatacggtactgaacggtgctcaggtcaacggcaacaggattatcgccgatgtgggccacgacctgctgataagcagccagcaggacaccagtaagtacgacagtaaacagaccagcgtggctgccggcggcagttttacctttggctccatgaccggctcaggttacatcgctgcctcccgggataagatgaagagccgctttgactccgttgctgaacaaaccggaatgtttgccggtgatggtggcttcgacattacagtgggcagacatacccaactggatggtgcggtgattgcctccactgccacaccggataaaaaccacctggataccggaacgctggggttcagtgaccttcacaacgaagcggattataaagtcagtcacagtggaatcagtctgagcggtggtggcagcttcggggataaatttcagggtaacatgccgggtggcatgatatccgccggaggtcacagcggacatgcggaaggaacgactcaggccgcagtggcagaaggcactatcaccatccgggacagggacaatcagaagcagaatctggcgaacctgagccgtgaccctgcgcacgctaatgacagtatcagcccgatatttgacaaggagaaagagcagaggcgtctgcagacagtggggcttatcagtgacataggcagtcaggtggcggatattgcgcgtacacagggagaactgaatgcgttgaaggccgcgaaggaagcaaccggcgaaacacttcctgctaatgcaacagagaaacaacgtcaggaatatcttgcgaaactgcgtgacacgcaggcttacaggaatgaaatggcgaagtatggtaccggcagtgaaattcagcggggtatccaggccgcgacagcggcgcttcaggggctggcggggggtaatttagcaggtgctctggccggagcttcagcaccggaactggcacatctgctgaaatcaacagaaaaagacccggcagtaaacgccattgctcacgccattctgggcggcgcagtggcggcaatgcagggtaataatgtcgctgccggtgcagcaggcgcagcaacgggagagctggcagccagagcgattaccggaatgctgtatcctggcgtgaagcagtcagacctcagtgaagagcagaagcagacgataagtacgctggcaactgtgtcagcagggctggcctgcggtcttaccggaaacagcaccgcatcagcagcagtgggagcacaaagcgggaagaatgctgttgagaataactcactcagtgatggctggaacaatatcctgccatcaggaacacaggattacggacaggccgtagcctcgtggaatcagtatgctcaggacaataatctgacaccggagcaggttcaagaagggatgaatcgtatagctattggtgaagggccttcttgggggacaacatataaagtacacccggtagttcaggctggcggtgatgttagctttatccggggttatactttaagcggaactatagatgacaatcatatttcagttaatcaaggggatatttatagtataggtgctcatggcggagcctcgatcggattatcctttggcccgtatttcccgggattaataaattcaaatgataacgattattcgataaatggtggttttggcgttggtgcagtggggctttctacgggtaaagatggtgttagtttcacttttggttttggcccaagttggggttggagtgcaactgaaattaaaggcgttgacgttaatggcacttcaacaagtgaggtttatcgatatgattttaaataa

SEQ ID NO: 24092 - DNA, 951 bp, Escherichia coli
atgagcataaagataaaagaaatatttgatatttatttcaataatacaatggattttgttgatttttttagtttaaataagatggaccatttggagacaaaaactttcagaggacgagaaatagtagcatataaagaaggatttaataagctccgattgctacatcgcttcctcaatgaagctatctttaacagggttgagatcatagatgatgtagtcttttcttatagaaaaaaggttaatgtattcgattgtgtttatccacatagattgaacccatttattttcaaaacagatataaaaagcttcttcccctctttcacccgaaactttattcaaagtaagttagaaaatatttttaaagagtttattatatctgatattaatgaatatttacccaaaatcgttgaccttgtaagctataatgattgcttaccagtagggttttccacatccccttcactaagtaatattcttttcagtgatgctgataaaaaattaaaaaaatttagcgcatctaatgaatacatatacacccgatattctgatgatttaataatctcgtccgagaaggaaatacataaaaatgaaatattttcctcagttcaacaaataataaattcagaatgtgaaacatttgttttaaatttcgacaagaccaaactcttaaagaaaggtggtgtccgtaaaataatgggcgtcagcattttgcctgatggacacatctctgttgacaaaaccataaaaaacaatattgaaaccaagcttcactatatatcaaaattaaataacgttaactctcaagatcctgagctaatggaagtaaaaagatacttatccggtatgattaattacataagtacgattgatgaagcttacataaataaattaaaaagaaagtatggttcaacaatagttgaaatgtttcttaggaagagtctcgtaaaatga

SEQ ID NO: 24093 - DNA, 513 bp, Escherichia coli
ttgccactgattgccctgccccgtaatttttccgcctgcggccagcaaagacggcgcttcccattgcacatttttcagaccgtgagttgctttgctgaccacaagccccagggaaaccgtctggccgcccttgccttcaatacgctcaggcagagcaatacggatcacttcagatttgcgatactcaagaacgatattgttattacgctcaaccaggtcatagcggctgcctgccagcattcgacgctcgcgaatgctgtctgtatcgagttgtttttccagaggttcgccaatccgataattaacttccaggccaaagcgagtgtcattctcaccactcttgccctgcttatgcccggcactcagggtcagaagaggcactggcgtgtaattcacttcagcggtaatcgcatgtggatctttctggcgtttatctttaccaaacagcccgacttcatcgccataatactgttcatacatcaggcttgcgccaagctgcggccaggcaggtaa

SEQ ID NO: 24094 - DNA, 873 bp, Escherichia coli; identical to SEQ ID NO: 8321

SEQ ID NO: 24095 - DNA, 3123 bp, Escherichia coli
atgaaacgacatctgaatacctgctacaggctggtatggaatcacattacgggcgctttcgtggttgcctccgaactggcccgcgcacggggtaaacgtggcggtgtggcggttgcactgtctcttgccgcggtcacgccactcccggtgctgtctgctgacatcgttgtgcacccgggtgaaacagtgaatggcggaacactggtaaaccatgacaaccagtttgtatccggaacagctaatggcgtgactgtcagtaccgggcttgagctggggccggacagtgacgaaaacaccggcgggcaatggataaaagcgggtggcacaggcagaaacaccactgtcaccgcaaatggtcgtcagattgtgcaggcaggaggaactgccagtgatacggttattcgtgatggcggagggcagagccttaacggactggcggtgaacaccacgctggataacagaggtgagcagtgggtacacgggggagggaaagctgccggtacaattattaaccaggatggttaccagaccataaaacatggcggactggcaaccggaaccatcgtcaacaccggtgcagaaggtggtccggagtctgaaaatgtgtccagcggtcagatggtcggagggacggctgaatccaccaccatcaataaaaatggccggcaggttatctggtcttcggggatggcacgggacaccctcatttacgccggtggtgaccagacggtacacggagaggcacataacacccgactggaggggggtaaccagtatgtacacaacggtggcacggcaacagagacgctgataaaccgtgatggctggcaggtgattaaggaaggaggaactgccgcgcataccaccatcaaccagaaaggaaagctgcaggtgaatgccggcggtaaagcgtctgatgtcacccagaacacgggcggtgcactggttaccagtacagctgcaaccgtcaccggcacaaaccgcctgggagcattctccgttgtggcgggtaaggctgataatgtcgtactggaaaatggcggacgtctggatgtgctgagcggacacacagccactaatacccgtgtggatgatggcggaacgctggatatccgcaacggtggtgccgccaccaccgtatccatggggaatggcggtgtactgctggccgattccggtgccgctgtcagtggtacccggagcgacggaaaggcattcagtatcggaggcggtcaggcggatgccctgatgctggaaaaaggcagttcattcacgctgaacgccggtgatacggccacggataccacggtaaatggcggactgttcaccgccaggggcggcacactggcgggcaccaccacgctgaataacggcgccatacttaccctttccgggaagacggtgaacaacgataccctgaccatccgtgaaggcgatgcactcctgcagggaggctctctcaccggtaacggcagcgtggaaaaatcaggaagtggcacactcactgtcagcaacaccacactcacccagaaagccgtcaacctgaatgaaggcacgctgacgctgaacgacagtaccgtcaccacggatgtcattgctcagcgcggtacagccctgaagctgaccggcagcactgtgctgaacggtgccattgaccccacgaatgtcactctcgcctccgatgccacctggaatatccccgataacgccacggtgcagtcggtggtggatgacctcagccatgccggacagattcatttcacctcctcacgcacagggacatttgtgccggcgactctgaaagtgaaaaacctgaacgggcagaatggcaccatcagcctgcgtgtacgcccggatatggcacagaacaatgctgacagactggtcattgacggcggcagggcaaccggaaaaaccatcctgaacctggtgaacgccggcaacagtgcgtcggggctggcgaccagcggtaagggtattcaggtggtggaagccattaacggtgccaccacggaggaaggggcctttgtccaggggaacaggctgcaggccggggcctttaactactccctcaaccgggacagtgatgagagctggtatctgcgcagtgaaaatgcttatcgtgcagaagtccccctgtatgcctccatgctgacacaggcaatggactatgaccggattctggcaggctcacgcagccatcagaccggtgtaaacggtgaaaataacagcgtccgtctcagcattcagggcggccatctcggtcacgataacaacggcggtattgcccgtggggccacgccggaaagcagcggcagctatggcttcgtccgcctggagggtgacctgctgagaacagatgttgccggtatgtctgtgaccgcagggatatatggtgctgcaggccattcttccgttgatgttaaggatgatgacggctcccgtgccggcacggtccgggatgatgccggcagcctgggcggatatatgaacctgacacacacctcctccggcctgtgggctgacatagtggcacagggaacccgccacagtatgaaagcgtcatcgggcaataacgacttccgcgcacggggccggggctggctgggctcactggaaaccggtctgcccttcagtatcactgacaacctgatgctggagccacggctgcagtacacctggcaggggctttcgctggatgacggtaaggacaacgccggttatgtgaagttcgggcatggcagtgcacaacatgtgcgtgccggtttccgtctgggcagccacaacgatatgacctttggtgaaggcacctcatcccgtgcccccctgcgtgacagtgcaaaacacagtgtgcgtgaactgccggtgaactggtgggtacagccttccgttatccgcaccttcagctcccggggtgatatgcgtgtggggacctccactgcaggcagcgggatgacgttctctccctcacagaatggcacatcactggacctgcaggccggactggaagcccgtgtccgggaaaatatcaccctgggcgttcaggccggttatgcccacagcgtcagcggcagcagcgctgaagggtataacggtcaggccacactgaatgtgaccttctga

SEQ ID NO: 24096 - DNA, 261 bp, Escherichia coli
atgatcattaatggtaagaaaataaaagcaaaagagattatggaaatgacaggccgtagtgaaaggactgttaggaaatacttttctcaatctcgtgaagtctatgaagatgaagcggctgaacgtagaagaaaagcgtatgagctgagagagaaaggcttgaagtggaaagatgtaggaaaagagttagatacttctctacatggtgctgtagctctttataagcgttatttgaagctagatttaaaccaacaacaatag

SEQ ID NO: 24097 - DNA, 1356 bp, Escherichia coli
atggctatatatagttttcaatgtaagattgtagcaagaacaaaacgtttaaataatgctgttgctcatgcagcatatattaaccgtattgatcttgataatagccgcgatggttcaaagtggcgttataatcataggcatgatgatgtatataaatctgctgttttgcttccagataatgccaacaaaaagttttctgacccagcttatttatggaacgaagtagagaagaaagaaaatagatctaatagccgtttggctcgtagttttattattgctttaccaaacgaactaacaccggaacaaaacaagaacttgattgaagattacattaaaaatcatatgacatctaaaggtatgattgtaaactatgccattcatatagatgatacaaacaactttcacgctcatttgatgagcactacaagggagttagatcctaatggtttagagttcgcaaaaaagaatgttatcggcagaacttggaatgatgatgattttcttgaagggttaaggaaaggctgggcagataccgctaatactcatttagcaaggcttgatcatcaggtcaggattgaccatagaacgctgtcagctcaacgtgatgaagctcttgagcagttcgatatggctaccactgcagaggctaaagctgaggctctggctaaggctgtaagccttgatagacctgctattggtaggatttggcgtagtaagctgaacacggaagagggtagagctttacgtgaagcacagcaagacagaagagatgtgcagctcgttgttgctgaagagactaaaaagagtgttttgtctttaccacaagagatagttttaaataacttcacacctaaaaaaataaaatcaaaatcaaaatcaaaaactactattgaaaaaacacgccccgcccaagaagcagttttaaaaactgctgatacagggggagagataaaagatctcaaatatagttcttttaataagtttttattagatattaagataagatataacaagcatcaaaaaaataacgccactaaaaagctaaataagaaaatagacaagataataaagactatagatagagaagagaaaaaatctaacatcatgcctaatcattataatagtgattatttcattgatgataaaagtacgattattaaagatgaatacaaagatgatgaatataagaagctacagaagttttttgatgatgtgaataaaagaggtattgagctaaacaataaaaaagaagccatgcttaaactcgaacaagaaaataaaaaagcactatcacaacaacctaagcataaaccaaaagataacaacgaaaatgataggcatattaaatacaaataa

SEQ ID NO: 24098 - DNA, 192 bp, Escherichia coli
atgttaactgtagtttattgtatttggtctgttatcgggcttggcattattatattggcattatgggctgcaatatcaaaatcaacagaagcaaagataaacaaagatgatgatattagatccatgaaaaaaagactgttcaaaatagaagagagattaaagttagatagtgatgatgattatgattattga

SEQ ID NO: 24099 - DNA, 318 bp, Escherichia coli
atgactaaaaagatggaaaaaatagaagatagggtttcataccaccaaaaacagcttgctcaactaaaagcaaagaaaaaagaggagttgagtaaagaaaaaaaagcagagaaagcaaaaagagcaagtaaaaatattttgcttggtgcttctatctgtaaagtgttaggtattgatcacactgaaatagatgaatatttacctaaaatagtaggtctgttttctagtacggttcaatatataaatgatccaaaggtattggctaaaggaactgatcttttagagagctggaaaaatggcggcgacagaaacgagtaa

SEQ ID NO: 24100 - DNA, 1092 bp, Escherichia coli
gtgatccatcagtctgagcttgaccagagcaacgggcggtggatctgtgaaaacacggggatgtggacccgtgacggtctgacgtttttcagcgccgcggataatgaaattccgccgccgcgctccatcacgttccatatctggacggcgtacagtccgttcaccacctgggtacagatagtctatgactggctggatgcactgaaagatcccaacggcctgaaaacctttgtgaacaccacgctgggcgagacctgggaagaggccgtgggcgaaaaactcgatcaccaggtactgatggataaggtcgtgcattacacggcggcggtgccagcccgggtggtttatctgacggcgggcattgactcgcagcgaaaccgttttgagatgtatgtctggggatgggctccgggagaggaagcctttctggtggataaaatcatcattatggggcgtcccgatgaggaagagacgctgttacgtgtggatgcggcgatcaacaaaaaatactgccatgcagacggaaccgaaatgaccatttcccgtgtctgctgggacaccggggggatcgatggtgaaattgtctatcagaggtcaaaaaaacacggtgttttccgggtgctgccggtaaaaggcgcatctgtctatggcaagccggtgatcaccatgccgaaaacccgcaatcagcggggcgtgtatctgtgtgaagtggggacggacaccgcaaaagaaattctctatgcccgtatgaaagccgatcccactcctgcggatgaagccacgtcgtatgccatccgttttcctgatgatccggagattttttcgcagacagaggcgcagcaactggtcgcggaagagcttgtggagaagtgggaaaaaggaaagatgcgtctgctgtgggataacaaaaagcggcgtaacgaagcgctggactgcctggtgtatgcctacgcggcattacgtgtgtccgtgcaacgctggcagcttgatctggctgtactggcaaaatcccgggaagaagagacgacccggccaacccttaaagaactggcagcgaagctgtccggaggagtgaatggttacagtcgctga

SEQ ID NO: 24101 - DNA, 207 bp, Escherichia coli
atggttacagtcgctgaactgcaggcgctgcgtcaggcgcgccttgatttattaaccggtaaacgggtggtgtctgtccagaaagatggtcgcagaattgaatatacggaggcttctctggatgagcttaaccgggcgatcaatgatgcggagtcggtactggggacaacccggtgtcgccgtcgtccgctgggagtgaggttatga

SEQ ID NO: 24102 - DNA, 453 bp, Escherichia coli
  misc_feature (60)..(69): n is a, c, g, or t
atgccaatagctgtcatgatctcgataatgaaaaaatatgtcgattgccacaccattaannnnnnnnnnccattaacatgttttattctcaacgtatacggtgagcgcataggtgcaatatcaaacaagccagagcaagcaattttcgttgataatacggatagatttgtttcgctccatactcctatatcaatatctttgtcatgttttagtaattttttatcacgaatacaaccaagtaatgttccgctaactaaaaaaaactgtattttattagcatccaatattttttttagacctaataatgcaattttagcagcattaacagaaaagtttttattgctagtttttggtaagataaaagcctcagaatttatacttcccaacaatactttaacccgatttaatgcttcttcatatagtttagcccttaacgcagcaattataaggtaa

SEQ ID NO: 24103 - DNA, 267 bp, Escherichia coli
atgttgggatgcgttcattacatttcctctgtgctgcatgaacgggcagaaatcattaaatgcgccgaaatgctgatgcaggaagatgatttcgaaatatgcgaaagtattttaagacagcaggagaagttgcgtgaaagaattgatgagacgctttctgagaaaattgtacagaaatgcagaaatatgaatggtgaatatgtctggccctggatattgccgttttcagcggcaggcatgaaacatactggcatacagtatcagtag

SEQ ID NO: 24104 - DNA, 882 bp, Escherichia coli
atggtaggaaaaccagaccttgagacgttcgtagaacgtctgcaggccgtaggcattgaaccgaggttcaatgttgccagcactggcaacgtggcgggggtttcattcagtgttggagatgtggcattcaagggatctcagttgggtaaaaaatacagttggaacacaattaaaaacaaggtgaaatatgacaaaaatagagatgatgaactcgttagaagattctcagcaagaaaaacagatgacgaaaataatattggacgatcacctattgaaccaaatatcaatgacgatagaaccattatcagaaacgatgatgatattatccgaatcagtcagcatggcattaaatcagacacagcagacactaacaagagtgaacaactcattagaagcaacaaccacatctttaaactcagcgaaaaatataatagaccaacaggcccgaaagttagaagaacaacacaaaaagctgcacaggtactcaacagagttaaaaaacaatacaataaagaatcaatcaaggcttataataaaagtggcttcaatagtgggcatgataaatttagtggcggttctatcggtaggatacttgatcatgcagaaacagccaacgcagccacgaataactttagactcaaaggccgtagcagtttcaatagtagagcaactaagatcgaagaaataagagaaaagttaggtataaaaaaacctgttattgatccaaggaacaaagagaaaatagttaaagaagaaataaagaaaaaaccttattatatagttgagcatgaaaatagatttaaatctaggttgtgcgagtattttaaaatcaacatacacaaacaaaaatatttcggcaggaaactaaatgtgaaaatatga

SEQ ID NO: 24105 - DNA, 489 bp, Escherichia coli
atgaaactggccctgacgctggaagctgacagcgttaacgtacaggcactgaacatggggcgaattgtcgttgacgtcgatggtgttgagcttgccgaactgattaacgtggtctgcgataatggctactcccttcgtgttgttgatgaatctgaccggacctcaacagacagcacccccccctctgctgccctgagcggtatacgctgtagtaccgcgcatatcacggaaacagacaacgcctggctgtactcgctgtcgcatcagacgaatgacaccggcgaatcagaatggattcattttacaggtagcggatatctgttacgtaccgatgcgtggtcatacccggttctgcggcttaaacgcctggggctgtcaaaaacgttccgccgtctggttgtcacacttacccgacgttatggcgtcagtctcattcatctggatgccagcgctgaatgcctgccggatttacccactttcgactggtaa

SEQ ID NO: 24106 - DNA, 369 bp, Escherichia coli
atggatggggctattcagtctgatagtaataaagaccttgccaaagcacatatagattttctcggatcatggttagataaagttaataagttaacaaataaaggtgttcatgccgagttagatcggattgaagctgtaaagtcagtatttcacacgtatttagtagtggcggatttgcttgagtatatgtcaaataccaaaacctctgtatctaagcctgatatcttgttaaatataaatagaacaatcgctaaagaaattgttaaagcacgagttcgtgaaggcaagcttgatctggatattttaaaaaacataaaaggtataggtgctaagacgcttagtaatatacaagaagtgtttgttatgtaa

SEQ ID NO: 24107 - DNA, 186 bp, Escherichia coli
atgccatacagaaccatcaaggccgacacgattcgctactatatgaatatggtctttatcagtatctttatgacgcacacaaatatattgatttttgtctatatcgatatttatttctttcaaatagtcttttgctatctcttgccattgttcctctgtgagcttctcatcttttggaagagataa

SEQ ID NO: 24108 - DNA, 1200 bp, Escherichia coli
atggcttttacaaaaatcagaatcgataatcttttttgctttgaaaatagcatccttgacttaagcttctccagacccccggtcaacagctcactggaaggtgagtacattgatggatttgaaaaattctacttcaaaaaggtttgcatcgtttctggtgctaatgcatctggtaaaacatctcttggtcgcgtgatgctttctgtgttgcgttttctcagtagtggtgtttttaatccagaaccgttaaaaattactgacaaaagaaaacctgcatatatagaggttgactttttccagagtcatttaaaatgtttgtttagggcaggtttctggcttagggctatggatgagtctgttgctgtagaaaaaattgcaatggcatctgttgatttaagaagctcggaatcatgcgcaaagacgaccaaaagattggatgctgtgtgggatgcgcaaaagtttgaattaaatggtcaaaatagatttttttcaactgaaaacgctaactcaaaagaattttcccaatatttagaggatttggactttgttcttggttggcatttcattctatctgaaaaccaagagaacacggataaaatatcccgaattaagaagaatgtgcttaatagcatattaaaaacttttgacaatactgttaaatctgtctcaggactcactcttaaagatgatgagggaaaggaggatttgcaggggtattcagtagtcttcaataatggagatagagttattattgatatggaaggtgatataacaaataaagatagactgtctcgtggtacttatgaggcagtaaaaatatcccatctcctgtcaggagtgcttgaagataaaatagaagagcgtgagttcaatttcccttgcagtggggtgtactttttggatgagaaaatggccttcactcatactgaattagaaaaaatgatggtcacactgattatatctaagctttgcaggtatggtcaatttatatacaccacacataattatgatatcttgagcttagatctgcctacgcattcatatacttttactaaaaaagtagatggtttaaccacttttgttgaagctaccacacatcataaaaagaatgatcgcaatcttttaaataaagtaaaaaatgactgttttgcaacaatacctgacgtttcattaatcgaagagatgctatttgaggattga

SEQ ID NO: 24109 - DNA, 519 bp, Escherichia coli
atggcagttaagaaatttgctatcattctcgttgagggagatacggaaaaagcattgtttcaggatttcaaaacattgctaggctatcctattaagaaaatagtaattgctaatttatggaatgttaatataaataaatacatgccagcattaaccgaaaatagcgaaattatagtggtttttgatacggataggattgagaatcttggtagatttaagaataacctaaatctattaaaggcgaaaaaacacacaatccacctatttcaacaaacaagcaattttgaggatgagcttgccaatgcttgtggcgtaagtaacagaaaattgtattcttgtttttgcccaaaaatcatctctgcagataacttcaagaatgagttcattgcgctgcgcaacaggatgatgaaattagatggacttggactaaataaaacgttgctttggagtagggggattattccccaattgagtgattataatttgcatgtttcctctcatgatgattatttttcataa

SEQ ID NO: 24110 - DNA, 231 bp, Escherichia coli
atggcaaatcgcaaacagcaccgcgctatcgcggagcgtcgtcacatccagactgaaatcgaccgcagactcacccgcgctgcacacatcgcctttatcatgcaatccaacacattgcacagactcaacagcactatttcagccgactactgcgccgctgtattcagctatctggcggaagacctcctgtctcttcaggatctcatccagcagcaaaacaaactccattaa

SEQ ID NO: 24111 - DNA, 435 bp, Escherichia coli
  misc_feature (414)..(423): n is a, c, g, or t
atggttctggggggcgctattgcaattaattgcaataacgcaatggcagatgtcatattgtcaccagactggcgtccgggtacgaataactcgggtgttggggctgcaacagtaagtggtaaaaccgaatacatcactggtccaaatgtcgtccagtctggtgggtcaggtcttatctggatgactgtagaacaggcaattttaaatggctacaccactggagataatttatccggattgatttacgtcaataccggagaaaaaacaaaaaccattacagtgaaggatgaggttactggcgcttctcaaacacttcaagtgtttgatactgactctttctcacaacgcgatgcggggactgggggaaatgaaaccattcctggttttagtggcactgcggattttttcaatgcnnnnnnnnnncacgttttgtaa

SEQ ID NO: 24112 - DNA, 168 bp, Escherichia coli
atgcaaaaagcaaaagagatgtgtcaacgacgagttcgttttccggacgatgtgaagttagctattgaaagaaatggcgaaaaagaatgccgaaagttcaatacagagattatctatcagctgaggaaagtgtatggactcactggtgagaagaatagcgtggcataa

SEQ ID NO: 24113 - DNA, 432 bp, Escherichia coli
atgagcagagaagatccacaactaaggatcagacttcccgttgaagtaaaagaaaaaatagaaatttctgcaaaagccaataagcgatcaatgaacgctgaaatagtacaacgtcttgacaccagctttctgaaagatattcatgaagatgacgtaatttctgcttatgaagcaaaaattattgcaaacaatgcacggcatgaaatatcaaatattattttcaaaagaacctttaatgaaattaataagaaaataacacttggacatacaagtttttatataaaccttaatgaccttgaactggaatcacttgcagataatgattaccagatcatctttgaaaaaacatttaataagctcaatgaactaggttacatcatctgtgaaaactcatgggatgcagatggttttggaattgaaatacctgaatag

SEQ ID NO: 24114 - DNA, 564 bp, Escherichia coli
ttgaaaaccatatctatattaaaggttgcattaggcgtcgctattattttgactctctcaatattgttttatttttaccacaaaaaaaatgctattgctcttgatggtcacgcggcaaactcatttttctcagagtacatagtgccgctatcaggaagcggtataacaaataaatatactgactatgacatcaaatatggaattgatgatggggagactattgtattacatgtaatcattaaaaacctaatgacagtaaataaaaatacagacttcaacgataaaaatacaatacatcacaacaacagcaaaacattaatttcttatagtagcaacatctatacggataaatacctaaaatacatctcagaagatacaataaaagcaaccagcgaaaagttaaaaaacatatattgtgcatccggcagttttcacaaattatcgccgcaggagcgtttattctacgaagcaagaaaacaacgtaagtcaataatattacattattatgctgattcaggggagtcactcatatttaatattggggtttcccctgaatcatgctaa

SEQ ID NO: 24115 - DNA, 1026 bp, Escherichia coli
atgaaaatattcattactgagcaacaaaaagctgaacttgaacgccttcatgattccagtcgtgacgggcgagtcagagatcgtattaaagccattcttctggcttccgaaggctggagttctgccatgattgctcaggctttacgcctgcatcagacaacgattgatcaccatatcagcgaattcctgaataaaggaaaactgaagcccgaaaacggcggctcagacagcaaactcagtgctgaacaaacggcctttttaatcagccagttatccgataatttatttcaccatacccgcgatgttattgcgtttgtcacccggacatggaacatcattttcagcattccggggatgaataagtggctgcatcgtaatggtgtcacctacaaaaaaccgtcaggcgtcccccataaattcagtgaagagaaacaaaggcaattcattgaatactataaggaactgaaaacaactgtgggtgatgagccgattctttttattgatggagtccatccgactcaggccactaaaatcagctatggctggatacgcaaaggccagaaaaaagcagtaaaaacaacaggcagccgcacacgcctgaatatcatgggggcgctgaatctgaaagcactgacgtcaccgctaatctgcgaatataaaaccattaatgaatataatgtatcccgttttttcaatgagatacgaaaggtttatcctgattataaccaaaaaatccacgttattctggatggagcaggttaccaccgttcacagttagtgaaagactgggcggaagtggtaaatatcaggctgcattaccttcccccttacagtccaaacctgaatccgatagaaagaatgtggaaattaatgaacgaacatgcccggaataatcgctacttcagcagtacgcgagagttcagggaagcaatatctgtcttttttaaccagacactgccggatatagcggactcactgacatcccgaattaacgatcactttcaggtgctcacacccgcatcttga

SEQ ID NO: 24116 - DNA, 1023 bp, Escherichia coli
atgaaagataacagacaaaaagtcgttcattataaaaaagcagtaatcccacacagcaaatcatcattacaaaacatactacttagtattataggtgagggcggcgttgcagaaaaagtacttagtagacaagaaaaaataacaccttcagatgaaaattcggggtgtcgtttcttaaataaaagcgacacatacaaaactatactttttgggcaactggttttatttgaaaaagacaaaagccagtctctattagagcttagtgataatgttaaattttatgacattaactccatcacgtctaatgatataattattgatggagataaacgtagtgacaaaaaaagagagtttgtagattcaattttatattttggtgtactaaacaaccatgtcatgatcgttcaatccacatcgcttcgagcaagggagcttgaggcgcatttgaattggctaattaatacattcacagatgaaaaagaatctgtgttaatgcttcaagataagccatccgaagaaacgatgaaaaaaatggagaaagcaccagccaagagcataaaaattggtggattacccattacttcagaagttaaaaattcagagaaccaaacaccctccttttcaaatggttcggtgaagacaataaaataccgcccaatagggaaaggaggtgcgctactaaaagcattttttggcgataactgggcaaatgatataaacattaaagattcattagatgaggccaatttacaagtaagcctcgagattacatacttcagaaaaacaaatgatagcggtcaagctgttatagacagtattgctacctcactacgacatctagatgaggatgatattagcatcaaacttcaaggcggtggggaaataacgggaaaagagataaaattatccggaaaaattagcgttgaatataacaatggcattattgatgaaaatgatttattcttaaaaatgcataagtggctgttctcaaaacttgatgccggagaattggttgcaaaataa

SEQ ID NO: 24117 - DNA, 384 bp, Escherichia coli
atgaatataagggcagaacggccatcacaactgatgctgagttacagacaatatagccaactggaacgaaaggcacgggataattatcttgatacattatctgtatttatcgaagaaaatgcagaaaaagaagggtgggatgattcatcaaaagctgaatcatcccgaattctggcagaagattatttctctttttgccagtcattaaatatagcagatgatcgttccgtcagaacaatgacgcttatcttactgaaaaaaaacataatcgatctccgatatattccggatgactggtatgaactactcagcaatcagtcatatccgggacatattcgggtacatgaacttgcacaacaggaactgggatttatcccgcaataa

SEQ ID NO: 24118 - DNA, 600 bp, Escherichia coli; identical to SEQ ID NO: 19015

SEQ ID NO: 24119 - DNA, 723 bp, Escherichia coli
gtgaagctggaagatttagttcagaatcaaaatgaaacaattgatttactctataatgaatatgattctattatggaagatattaaatcttccggccttgataatgaaaaaattaataagctgcatgatgctgggttaaagctattcaatttcatggatggatgctatgcggcattagatgctgcggaagaaagtttaaccaatgaaaaaacgacacaactagctgatttggctggacttttctgtgatgcacttgaagagacgatcccgaatcattattcaataatgtgtgagtattatggtgataattataagccaagtaaacatgcttttgctgggatgcaacaactaatagttcaagtaaagaataaaaaggaaattaaggaattaaaagaaaaatgtatagacaatggcctacctgtgaaagggtttgataaaaaaagaagattcagaatgacaaaaacacatgaacgtatctattctgccatacttggaattttaagtattaccgttatggtaacacttctgtttttcctagagatcgatgactcatcaaagagcaaatacattatattaagtgttgtggtttctcttttaggtggaattggtgctcgattactatcaggcgctttaaactttaaaataaaagatactacagcaactgctggttatgctgcatttgttattatatttttgatattgcagggagtcagggttttttaa

SEQ ID NO: 24120 - DNA, 270 bp, Escherichia coli
atgtctaaattagtagaagagttgaaaacagcacttgcttttgatcacaataagatcatcacaggagagctaacagaagagcaagctctaaaaattgctaatgacctgcatcaattaggaagaaagccaacagatcaagaagtttatgatgtaattaaaaaatactataatggagaattattaagctccgctaatgaaagtcgagatcaagcaagaactaacactttgcagcaaacaattttaaaaatgattcaaagtcagaagaaataa

SEQ ID NO: 24121 - DNA, 363 bp, Escherichia coli; identical to SEQ ID NO: 22309

SEQ ID NO: 24122 - DNA, 222 bp, Escherichia coli
atgcagaatgaaataatgggttttctgagcagacataatggagggaaaaccgcagaaattgcggaggcgctggcggtaacggattaccaggcacgctattacctgttattactggaaaaagaaggtatggttcagcgctctccgttaagacgaggcatggcaacatactggtttctgaaaggagagatgcaggcgggacagagctgttcttccacaacttaa

SEQ ID NO: 24123 - DNA, 588 bp, Escherichia coli
atggcggtccttcagggcgctgaagctgtagcggaacggcgcgccatcatccggcatcaccacattactgcagttataggtccacaccttatccgacggtcggtcctgcacgaacgtcagcgtctgcccgttccataccggcatacagcgcatcgccgagcagaaatcactgagaacatcccacgccttgcgctgtgtggtcagccaggcattacaggtgatgcgcggctccgtgccaccaaagccatccggcaccgactggtcgcaattctggccgatgacatacagcgcccatttgtccacatccgccgcaccgagacgcttccccatgccgtagcgcggatgggtcagcatatcccacagacaccaggccatgttgttgctgtatgctggcttaaacgttccgtcccagataccgctgtattgccgcgtctgcgggttatagttcgacggcacctgcagaatgcgcccgcgaagatgataattacggctcacctgctggctgccgaactgttccgagtccacctgcacgccgaccagtgccgtgttcgggtagcactgtttcacatcgatgatttcggtgtatga

SEQ ID NO: 24124 - DNA, 360 bp, Escherichia coli
atgccaacaataaccactgcacaaattaaaagcacactacagtctgcaaagcaatccgctgcaaataaattgcactcagcaggacaaagcacgaaagatgcattaaaaaaagcagcagagcaaacccgcaatgcgggaaacagactcattttacttatccctaaagattataaaggacagggttcaagccttaatgaccttgtcaggacggcagatgaactgggaattgaagtccagtatgatgaaaagaatggcacggcgattactaaacaggtattcggcacagcagagaaactcattggcctcaccgaacggggagtgacctgtctcttatacacatctgacgctgccgacgaatag

SEQ ID NO: 24125 - DNA, 768 bp, Escherichia coli
atgaccagtgatgagacgctgcgaattgtggatgagtactgtcatacccacaaactttcgcgctctaaggtaatcgacgcattactcagcgccacagcacctgtccttaacgatattaactgttattatcaacttgcaggcaaactgcagtcacgcttattaaatggagtgtatcaacgggatcttcctcacaaacgcaatgtcgtcagtgcagagaagtattgtctggagatctgggaaaacaaacttttcaccaaaagaatcctggagtttgacagttcaaatggtgttctgtacgcgctgaaacataaaagacactatcgccgggataagatgattggacgggttgaaagccggcgtatcaaagacatttgcgaataccagatgcaactgtccggggagaaggcaaaatatgcctgttttatttatattgaaagaacaatatacaatcacgataatccatccggtgggacacctgtaaaagcggctgttggtaatgcagtcatcctgctggcaaaagacgtgatatatgacgagtacttttttgatctgcggcagtcatttttcgtgagcgttaaagatctgatggcctctggcgcaaaaggtattccggagacacagaaatatccggacgtttattgctggatcccgcttttctccataaattccggcgtggtcattaccccggtctataaaattgatccccggaaacccgtaacggtaaaaaaaccggatcagatcactgttgtttgtaattacagagaataa

SEQ ID NO: 24126 - DNA, 351 bp, Escherichia coli
atgtggttgcgggaacagatgcaacagacaagccagtgctggacactgaaagagctggcaaaaaatatctgggatcgcccctggagcacagaacgcaggaatgactggttgcagtggatatcgcgggcgtctgaatgtgatgtgccgatgatgaaaaacgcagcgaaaaccattaaaaaacggttatacggaatactgaatgcaatgcgtcatcgcgtctcgaatggaaatgcggaggcgctgaacagcaagatcagactgctgaggataaaggccaggggataccgaaaccgggaacgctttaaactgggagttatgttccactatgggaaactgaatatggcgtactga

SEQ ID NO: 24127 - DNA, 330 bp, Escherichia coli; identical to SEQ ID NO: 8916

SEQ ID NO: 24128 - DNA, 513 bp, Escherichia coli
atggcatttataaagattcttgaattaatttccctaagtgagattaataatgttgtcaaatataaccctatttctggtgagttcacatggctaaaatcttatggagcaagaaagataggtggaactgccggaacaataacaacaagcggctacttaaggattttcattaacggaagacactatgctgcacatagacttgcatggattatcactttcggtgttgagcctgaaggtattatcgaccatataaatggcataaagacagataacagaatttgcaatctgaggcttgcaacttactcacagaattcaatgaatagtaaaataaataccctcaacaaatcaggttgcaaaggagtcacatggaagaaggaaagtagaaagtgggctgcctatgggaaattaaacgggaagaaaaaacatctagggtactttaatgaattagaagatgccaaaaaagcttactgcgactttgccagaaagcatcacggcgaattctacaggagcaaataa

SEQ ID NO: 24129 - DNA, 135 bp, Escherichia coli
atgaatgaatatattttagcgggtagcggcgtcatgtccgctttctacccgctcgaatctgaattatcacgccgagttaaacaattaatcagagcagcaaagaaacaactggaggcgttatgcgcaatgaaataa

SEQ ID NO: 24130 - DNA, 315 bp, Escherichia coli
atgaaacgcatcgctattttgttaatattgttcttctctacaatagtttgcgccaaacaaaaatcagataatggcgatcttaaaggcctgcaagaactcatgataacttcgaaatttgctggcatgtgcggcacaatcaaacaaatggcaacatttcaagaatcaacaaaaatgcctggcggagatgagttcttacagcgttttctgaccacagagcaagcaagacttggaatgaatccacaggagtttcttgaagcatgccagaagtcaatttcagcttataccaattattacaatctaacttctgataaataa

SEQ ID NO: 24131 - DNA, 147 bp, Escherichia coli
atgaaagttaagacattaaggatgccagaatggctggaaaaggctttggagcagtccgcgaaaaaggatgatcggtcgttcagtaatgaggtattgaggagactaaaggagtcagtagctaaggatggaattgtttgtccagaatga

SEQ ID NO: 24132 - DNA, 690 bp, Escherichia coli
gtgcgtaaagtctggcgtcagttgttacgggaaggtatcagagtggccagatgcactgtggcacgtctcatggcggttatgggacttgccggtgttctccggggtaaaaaggtccgtacgaccatcagccggaaagccgttgccgcaggcgaccgcgtaaaccgtcagttcgtggcagaacgacctgaccagctgtgggtggctgattttacttacgtcagcacatggcggggcttcgtctatgtggcgttcatcattgatgtgtttgccggatacatcgtggggtggcgggtctcatcgtccatggaaacgacattcgtgctggatgcactggagcaggcgttatgggcccgtcgaccgtccggcacggtccatcacagtgataaaggttctcagtatgtatcgctggcctacacacagcggcttaaggaagccggattactggcatcaacaggaagtacaggcgactcgtatgacaacgcgatggcggagagcatcaatggtctttacaaagcggaggtaatacaccgtaagagctggaaaaaccgtgcagaagtggaactggccacactcacgtgggtggactggtataacaatcgacgattgctggaaaggctgggccatactcctccggcagaagcagaaaaagcttattatgcttccatcggaaacgatgatctggcagcctga

SEQ ID NO: 24133 - DNA, 456 bp, Escherichia coli; identical to SEQ ID NO: 13970

SEQ ID NO: 24134 - DNA, 147 bp, Escherichia coli
atgcacgaaagcgacccgcgatcggttttgtgtgttctgaataccgaacgggtcaaaatgacacgttttctctccctcaatggagcgttctatacagagatttttgttcccctatccattattctgattaccgggtttccaagctga

SEQ ID NO: 24135 - DNA, 621 bp, Escherichia coli; identical to SEQ ID NO: 10407

SEQ ID NO: 24136 - DNA, 1221 bp, Escherichia coli
gtggaaggaaaacgcacgttcacggaatttatccgtgaaggtgtgggcgttcatgcgtttaacggcgaaatctttgtgcagccggtctgggatacggaaaccacgcagttattccgtacgcgttttaaagccgtgagtccgaaacgggtggacacgcctggacacggtatggggaaccgttttctgcgggccggtgtggaggtcgatcgatatggccgtgccgtcgcgtaccatatctgtgaggatgattttccgttctctggtagtggacgatgggaacggatcccgcgtgaacttcccaccgggcgtccggccatgctgcatattttcgagccggtggaggacgggcagacccgtggggctaatcagttttacagcgtcatggaacggctgaagatgctcgattccctgcaggcaacacagcttcagtcggccatagtgaaggcgatgtatgcagcgacgattgaaagtgaacttgataccgaaaaggcctttgaatatatcgccggcgcgccacaggagcagaaggataatccgcttattaatattctggagaagttttccagctggtatgacacgaataacgtgacactgggcggtgtcaaaattccgcaccttttccctggtgatgatctgaaactacagactgcgcaggattcagacaatggattttctgcgcttgaacaggcgctgctgcggtatatcgccgccggtcttggcgtttcctacgaacagttgtcccgtgattactcgaaggtcagttactcaagtgcccgcgcctccgccaatgagtcgtggcgctattttatggggcggcgaaaatttattgcggcccggctggccacgcagatgttttcctgctggctggaagaggcacttcttcgggggattattcgtccgccacgggcacgttttgatttttatcaggcgcgatcagcctggtcacgggcagagtggattggtgccggaagaatggccattgacgggctcaaggaagtccaggaatcagtgatgcgcattgaggccggactgagcacgtatgagaaagagctggcgctgatgggcgaggattatcaggacattttccgccagcaggtcagggaatctgctgagcggcaaaaagccggactctcacgtccggtgtggatagagcaggcgtatcagcagcagatagcggagagtcgcaggccggaagaggagacaacaccacgtgagacgtaa

SEQ ID NO: 24137 - DNA, 1071 bp, Escherichia coli
atggctaacgcctggctcagattatggcatgacatgccaaatgaccctaagtggcgaacaattgccagggtgtcagggcagccaattgcaacagtgatggcagtgtatatccacctcctggtgagcgcgtcacgaaatgtcacgcgaggtcacattgatgtcacgacagaagatttggcaagtgcgctcgacgtgacagaagaggtaattgattcaattttgcagacgatgcaggggcgggtacttgatggtgatttaatcactggatgggaaaaacgccaggtgctgaaagaggacaacggcaatatttcgcaaaccgcaaaatctccggcagagcgcaagagggcgcagcgagagagggaaagaaagcgggaacaaaatggcgattgtcacggcgagtcacgaaatgtcacgcacatgtcacgacgagtcacgacagataaagatacagataaagatacagatcaagaagatcaaaacactatggtccatggcgtaaaaaacgccacgaaccaggcaggggatgttcagaccgtcactcctggccagcccgcaggcacgacaccggaagccgattcagcgtatgcgctgaaagccgattcgggcgctgtgcagcaggtgatgaccgcaaggcaggagcaatcacaccaacttcagcagcctgaagccgattccgccattcagcgggaagccgatcgggtagtcccggaaaacaccgggcagcctgtgggacgagtggattatcctgatgtgttcgaacaggtctggcgggaatacccgttgcgtgccggggcaaacccgaagaaatccgctttcagtgcctggaaagccagattacgcgagggggtgccaccagaggccatgctggatggcgtgaggcgttacgcaagataccttgcggctaccgggaaaacgggaacggaatttgttcagcgagcgacgacgttttttggaccggaccggaattttgaaaacccctggctgctcccggtaagcggcacgaacaaccagcgttgtgtgaatcatatttctgaaccggataacgaaattccgccgggcttcagggggtaa

SEQ ID NO: 24138 - DNA, 384 bp, Escherichia coli; identical to SEQ ID NO: 22304

SEQ ID NO: 24139 - DNA, 207 bp, Escherichia coli
atggttacagtcgctgaactgcaggcgctgcgtcaggcgcgccttgatttattaaccggtaaacgggtggtgtctgtccagaaagatggacgaagaattgaatatacggcggcctctctggatgagcttaaccgtgcgatcaatgatgctgagtcggtactggggacaacccgccgtcgccgtcgtccgctgggagtgagcttatga

SEQ ID NO: 24140 - DNA, 354 bp, Escherichia coli
atgcgtgattttcagaatgcctttgatgctgccctcgccggggtggacagtacgatcgttgaagtgatggggctctgtgcgcagttcacctccggagcacaacgtggcggcgaagttcagggggtttttgacgatccggagtcgctgggttttgccggtggcggggtccgtattgaaggaagcagcccgtcattatttgtgcggacggatacggtgcgtgccgtgcggcgtggtgacacgctgaccattaacggcgagatgttctgggtggatcgtgtttctccggatgacgggggcagctgttatctctggctcaaccgtggtcaaccacccgcagttaaccggcgacgataa

SEQ ID NO: 24141 - DNA, 354 bp, Escherichia coli
atgcgtgattttcagaatgcctttgatgctgcccttgccggggtggacagcacgattgttgaagtgatggggctctgtgcgcagttcacctcgggagcacagcgtggaagcgaagttcagggggtttttgacgatccggagtcgctgggttttgccggtggcggggtccgtattgaaggaagcagcccgtcattatttgtgcggacggatacggtgcgtgccgtgcggcgtggtgacacgctgaccattaacggcgagatgttctgggtggatcgtgtttctccggatgacgggggcagctgttatctctggctcaaccgtgggcaaccacccgctgttaaccggcgacgataa

SEQ ID NO: 24142 - DNA, 258 bp, Escherichia coli; identical to SEQ ID NO: 19029

SEQ ID NO: 24143 - DNA, 807 bp, Escherichia coli
gtgcgcccggaagacgtgcggcgcccatgcgtcccctttggggtcgaagtacaccaccgcgtccccgaaatcgcgtacgcagcgaatgagcgcgttggtggccatcacgctcttgccgctcccgggcaggccgaggatctgaatgttggtcttgcgccaggtatcacgcggaaccagcaccggcttgccctgctcatccttacccagaaacaccgcctgctcctgccgggcctgctccgaggaaaaatcggccagcgcattaaccggtaccggctccccgaaatgcaggtggcgcacgtcggtcatctctcctgtccgctggctgctgcgccggctctcctgattcagtttcgcgttcaccgcctcgtcagcagccgcaaaatgaccgtcaagcagcaggaacgccagcagccgcgccaacacaatcccgacagccagcccgcccgcgcaccaggcaatcccgaacaggttagccggctgcagcaggtaataatctgcgtttgcgtagaggtccggacgcaggacggtttctccccagctctcgataaacacggcgacaaccagcccccccagaagggccagaccggccgcgccggtcagccagtacgcgtagttccagacatgtcgacgtgccctgaccatccgcccgggcgaatccagcgaggccagcaccgaaaatggcgctggccgtttattatcgcgcttatagcgatcggcatactcccgtcgctccttatgactcagccccacaaaacgcatccgtccggcccaaagttcagccagaccgaaaaacaggccgataactag

SEQ ID NO: 24144 - DNA, 330 bp, Escherichia coli; identical to SEQ ID NO: 8147

SEQ ID NO: 24145 - DNA, 621 bp, Escherichia coli
atgtcgcaggtaaaaagtgctgccacgcagacctttgacggtattgcacagaatatggcagcgatgctgaccggcagcgaacagaactggcgtggtttcacccgttctgtgctgtccatgctgacagagatttttctgaagcaggcgatggtggggatagtcgggagtatcggcagcgccattggcggtgctttcggtggtggtgcgtctgcctccacggggacggccattcaggctgcggcggcgaacttccatttcgcgaccgggggatttacggggacggggggtaaatatgaacctgcggggattgttcatcgcggggagtttgtcttcacgaaggaggcgaccagccggattggtgtcggcaatctgtaccgcctgatgcggggctatgcggaaggtggttatgtcggcggtgccggaagtccggcgcagatgcggcgggcggaaggcattaattttaatcagaacaatcacgtggtgattcagaacgacggccccaacgggcgggcagggccgcagctgatgaaagcggtgtatgagatggcccgcaagggggcacaggatgaactccggctgcagttgcgtgatggcggtatgttatcagggagcggtggatga

SEQ ID NO: 24146 - DNA, 654 bp, Escherichia coli
atgagtaataaatattgccaggcgctggtggaactgcggaacaaaccagcccatgaactgaaggaagtgggcgatcagtggcgcacgccggacaacattttctggggaattaacaccctgtttggcccgtttgttctggatctgttcaccgacggtggtaacgccaaatgtgctgcgtattacacggcggaagacaatgcgctggcgcatgactggtcagaacgtcttgcggagcttaaaggggctgcctttggtaatcccccatacagccgcgccagtcagcatgaggggcaatacatcaccggcatgcgttacatcatgaagcatgccagtgccatgcgtgataagggggggcgctatgttttcctgatcaaagctgccaccagcgaagtgtggtggccggaagatgcggatcatattgcttttattcgagggcgtattggttttgaactgcctgcctggtttatcccgaaagacgagaagcaggtaccgacaggagctttcttcgctggtgctattgctgtttttgacaagacctggaagggaccggcaatcagctacatcgggcgcgatgaacttgaggcatgtggtgaggcgtttctggcgcaggttcgccagcaggcagaaaaactgctcagggagatggcggcatga

SEQ ID NO: 24147 - DNA, 327 bp, Escherichia coli
atgacgacgttaactcaatgccagcagcaggtgctggatatgctgatttcttatcagaaagaacgtggcttcccgccaaccaatcaggaggtggcaaccatgctgggataccgttcagtgaatgcagcggtggagcatcttcgagcactggagaaaaaaggcgtcatcacgataaagcgtggtgtggcccggggtatcactcttcataccgcagtgaaggacgacgacagcgaagcggtcgggattatccgctcactgcttgccggtaaggaaaacgccaggctgcgtgcagctcactggttacatgagaggggcctgaaagtatga

SEQ ID NO: 24148 - DNA, 870 bp, Escherichia coli
gtgattttgttgagtgtgaaggaccaccagcatattgattctgcaattccgggacgttacactgctcaggcaccttataaagcgggtgccgggattggcgtcctgaaattgtcaacggcgatgtatgacgcgccagcgtcttttttatcgtccgcatttgctcacatccagattatggtgggctgggcgggggcaccgaaaggtgcgccggtctccgttgacgccggttacgccaaccccgtccagttcaccaccagtgaaattggcgtttccggtggtggaagtttttcactgtcaacggaggctgccatcatggctacgatcccagccctcactcaacctgaaatcaccattgacaacggccaggccgttaccacttctttggctgttgccaacttcttctccaagcgtcacgacgatgtgctgaaaaagatccgcactctggattgttccccagagttttgtgcccgcaattttgcggagacatcgatttcggtaaatcaaccgaacggtggtacacgcaagctcccttgctatcaaatcacacgagacggttttgcgtttcttgctatgggtttcacgggtaaacgtgctgcccggttcaaagaggcatacataaatgcctttaaccagatggaaaaactgctttcaaagccatccacgctgagcgatgccgcagataacgccagcgtgctttactcccacctgtcggtaatccacaaggtctggctgcagcagctttatcccatgttggcaaaagccgaatccccgctggctgtaagtctgtatgaccgcatcaacgacgcggcgctactggccagtctcataaatttgtcgctgaacccttcagaggtaagggggcgcaaatga

SEQ ID NO: 24149 - DNA, 279 bp, Escherichia coli; identical to SEQ ID NO: 4986

SEQ ID NO: 24150 - DNA, 642 bp, Escherichia coli
ttgaccaacacccagaatttgggtgttgacccggtgagtgtgattcatgggggaaatgaacggggaacgtatgtctgtaaggaactggtgtatgcctatgcaatgtggatcagcccgtcattccatctgaaggtgatccgtactttcgatatggtaaccagcgcaccggaaaaattatccgggcaggctgctgacaagatgcaggctggtgtgattctgctggactttatgcgtcgggagttaaacctgtctaactcatctgtgcttggtgcctgtcagaaactccaggaggctgttggcttaccgaatctggcaccgcgctatgccattgatgctcctgctgacgcgcctgatggctcaagtcgccccacgctgtcgctgagtgcactgctgaagcaatatggtatccgcctgacggctaatcaggcatatcaccagatggcgaagctggggatcgttgaacaacgcgaacgatacagccgtaccgcgattaacaacatcaaaaaattctggtcgctgacggcgaaaggctgcatgttcggcaagaacatcaccagtcctgcaaatccgcgcgagacgcagccgcatttcttcgaatcccgattccctgagctgttaaagctgctcgataccgttcactga

SEQ ID NO: 24151 - DNA, 513 bp, Escherichia coli
gtgaaagctgtcagaaaaactatcgcggcgttgccggggggttacgctgaagctgctgagtggctggatgtaacagagaacgctttattcaaccgccttcgtgcagatggcgatcagattttcccgctgggatgggcaatgattttacagcgcgcggctggcactcactacattgcggatgctgtcgcacagtctgctggtggggtgtttgtatcgcttcctgaaattgaggaagtagagaatgccgatataaaccagcgcctgctggaagtcatcgaacagatcgggagttactcaaagcagattcgttcggcaatcgaagatggggtagtggagccacacgagcagacagcaattaatgatgagttgtatctgtcaatttcgaagctccaggagcatgcagcactggtctacaaaatcttttgcgctccagaaaagagtgacgcccgcgagtgtgcagctccgggcgtcgtggcgtcgattgcttctggttgtggagaaactaacgcatga

SEQ ID NO: 24152 - DNA, 318 bp, Escherichia coli; identical to SEQ ID NO: 9188

SEQ ID NO: 24153 - DNA, 234 bp, Escherichia coli
atgacagagctggaaacacatttgctgaacgccttagagcagctgcaacaggattatatgcagcggctgaacgaatgggagagcgccttcgtggaattgcagaaaatgttttcgcttacgcaacgggacaacgcgatgctgaacgagcgggtcatgcagttgagtcagcaggtgcagcacttgagcgagcagacagaacgcttgagccagttatacagcgagaacaggagataa

SEQ ID NO: 24154 - DNA, 1488 bp, Escherichia coli
atgattgcaaataaaaacaaaacacctttccattggttcttgatatctgtttttatatatttcacccccatcatcatggcaaatattcattatgtagatgatcagggaagagctatatgggggtatactggatgggctagggatggtagacctttggctgaaatgttgatgattgcattgaatttcaacatgcacataacggacttattcccatttcctgcaatattatcagtatttttgatatctgtttgcctgtatttttttagcaggatgtttatatcgacagataataaatttattggactgttggttcctcttggtattttatcaagcccatttttaattgaaaatgcaatgtatcgctttgatgttttaccgatgttcataagtattgcattgtcattctcagttgtaatatttaatttcaaaaagacaattttaaatatttcttttgccgccctgttaacattatttatattgtctatataccaagcatcattaaatttcatgctggttattattctgtgtaaatatgtttacatgtactttaactcagatagtaacagacatctattaacttacctcatagaaaagacggtatcattagttataggtgttgcattatattttttggtggttattcctttatttttaactgttgttggggacccggatcacccatcaattaaaactgaaggcattttttcagttatatatgaaaacttaaaattttatcttcattcaatatctagtggtatttttggggaatcaggacgagttgcgtttatagtaatatttttatttttcattgcaatgacgacattcatcgcgctaaagaaatcaatacctaataaaagtattactggtattattaattttttaattacaataacatcaccagtaacagctttgatattgtcttttgctactctattaccacttcagcatcacatcgacgccccaagagtgatgatcggtttttctgctacgatgttgttcttattcatgattgtttatcttttctcgcgagaaacaaaaaattcaataacatatatacttgtaattcctctgatttatgtttttggttttttatgttcatacacaaatgcaatgacagaagaaaaaaacataaccacagttctgtttcatcagattaaaaatgatgctttcgagttaagcggaaaaacaaatcagatacttatttttaatggtaaaaagaaagacaatgatgtttttgtaaacgcacgaaataattacccgttaatatctagatttttcccagagtatttctataattgggattggccattcccttatatgaatagagttggagtttactttaaacaccctgggaatacaaacattgcaagtgtgttaaatgaaaaaaccttttgctcaaccgcaaagattaaaagagcatatgaatataacttatactcatatgatgatattattgtagttgattttgacaaaaacatttgtcagtga

SEQ ID NO: 24155 - DNA, 375 bp, Escherichia coli
atggcaattgccaatgttcattttgatgaatatctattggtcagaaaaaatttattgatcagttctaaatcgattaaaccggaatctctcgacgatatcctgggcgatattctgaaaaaagagacaacgataacctcgtttttaaatatgccgacgttatcattgagccgaaccgaatcgagtatgttgcgaatgtggatggcaggtcagggaaccattcaaatctccgaccaaatgaatatcaaagccaagaccgtttcatcgcataaaggtaatattaaacgtaagatcaaaacgcataataaacaggttatctaccatgtcgtccgactgacggataatgtgactaatggtatttttgtcaacatgcgctaa

SEQ ID NO: 24156 - DNA, 297 bp, Escherichia coli
atgatcaaagaaattttctccgatggcattttttcgctatttaataaaatatgttacttcggttttaaaacacttgcaataattctgattactcgttccttaggagaagatgtaggcggagagttcatttttttagttggttttctcgaagtccttcgggtggttactgattttggtgtggatctgtttgttataaataaaactattaaatgtaacgtttgcacaaaaaattctttctggagtaattgttttactactgttttgtttgtattcttttgttcagggttatcaatataa

SEQ ID NO: 24157 - DNA, 498 bp, Escherichia coli
atggagtatattcataaagattttaacttagctcatgtattaaaatatggtatagcatttcaccatggttcactacctctatttataagaaaaagaatagaggacttatattccaaaaagaaaataaattttatcttttgcacatcaactttacttgaaggggtaaacttacccacaaagaatgtttttatttatccattccctaaaaagactgttaacgatgaaaaaaaatgccgattagatttttggaatctggcggggcgagctggaagatacagaagtgaattgactggtaacatagtatgcctgaataccgctgataataactggagcaatgcagatgctaaaattagcctaggtaataatgttattatagaggatgaaataaactcaacattactacgccatcaaaaaatattaaattattttgatggtaaagttaaatctccaactaatgacattattcaactcagctcacttattctatcagaaatataa

SEQ ID NO: 24158 - DNA, 504 bp, Escherichia coli
ttgataatcagcgaaatgcaacgcaagcttgccacatgggcagccaccgatccgtccctacggattcaacggctgctgcgtctgataacacaaccagaatggctggctgaagcggcgcggatcacgctttcatcaaagggggcccatacccccggcgttgatggcgtgaacaaaacaatgctacaggccagactggctgttgagctgcaaatcctcagggatgaattactctcaggccactaccagcccttgcccgccagacgggtttacatccctaaaagcaacggcaaactgcgaccactgggtatccccgcgttgcgggatcgtataagcatccgtgccaaggtggagcacccgtttcgcatcatcaagcggcagttcggcttcgtgaaagccagatacaaggggctgctgaaaaacgataaccaactggcgatgttattcaccctggccaacctgtttcgggtggaccaaatgatacgtcagtgggagagatctcagtaa

SEQ ID NO: 24159 - DNA, 1569 bp, Escherichia coli; identical to SEQ ID NO: 15146

SEQ ID NO: 24160 - DNA, 1146 bp, Escherichia coli
atggcgagaaaaaaagcagaacataccccaaaaactaaagaagaaaaggagcttttagatcaaagcatagttgaaatgcaaaaaatcactgaccatgaaatacgtgagttcccgataagtgttattgtggacaaatttcagaatggtcttgaagaagatgaggcagagctttttatacctgactaccaaagggagtttatctggaacaacaagcaaaaatcccgtttcattgaatctctgcttttaaatcttcctataccttacatattcgttgccgatattggttcaggtgaaaatgaaggtagacttgaaattgttgacggtagccaacgaataagaaccctacaccaatttaccaataacaaactaactcttgaaggcctgcagaaattagtcacagccaatggttttaaatattctgatttcagtactccccgtcgcctacgttttgatagaaaaactattcgaatgattgaacttacagaacattgtgacgaagagacaagaagggaaatttttgaccgtctgaatactggcggaaaaaaactaacaacaatggaacaacggcaaggtagccatgatgggccattccttgcatttatcaatgaaatttccgaagatcctctatttcatagcatctgtcctttgggagatgcaagaaaacgtcgctctgaatatccagaattggcactacgctactttgcctacactgaagaatatcttgatttcagaaaaagcgttgatgaatttcttacaacctatttaaaacgtaaaaatgccgaatatacagatgaaaacgcagctatgctggcggaaaaatttcataaaatgtgccaattcattaatacacatttcccaaatggtttcagaaaggtgaaaaacgccaccactgttcctaggattcgtttcgaagctcttgccgtcggtgcaacattagcactagaggaagaacccaatttagttcctaaaaatattgatgactggatcaactcgaaagagtttatcacgcacacacgttcagatgccagcaactctaaacccaaagttaaagcacgcattgaatatgtaaaaaacaagttgcttgggaaagacattccagaaaatattgtcgacgaagatgaaaatgaagatgaaaatatggagtga

SEQ ID NO: 24161 - DNA, 759 bp, Escherichia coli
atggaggagatgacaagtaaaattcttttccaagaaagaatggaggagatgacaagtaaaattcttttccaagaaagaatgcaagatattaatgaatacttctcattcattcagttactaataaacaaaaaaccatctctagtctataaagagaatacaagcgatgcgcctatacaacaacccattgatattgatatgactcatattttaaaggctaatgcatttattatattgtacaatctcattgaagcaaccatttccaatgcaatagaagacattcataatgttttaatgtctaatgaatcattatgtgcagacactgtaaatgaaaaccttacaagagtagcatttcatagtttacaatcaccaaatgggaaaatagatttctcacaagggaacattgcaaaagttatatttaaagagtggctaaacgctcacaaaaaacttatccaatcaaataaaaatccgttattttctggaaatgttgatgctagaaaaattagagaagtcgctgaaaaatatggcttctcagcagatacagattcagaaataacgcgaaatggttgcaatttacttccaataaaaaaggccagaaacgaccttgctcatggttctgaatcatttagaaacaaaggcagagatacatctattgatacactaacagaaatgaaggatgaagtttttcattatctcaactgcatccttgaaaatatacaaacttatcttgatactcaggcttatttaagagcggcggggtga

SEQ ID NO: 24162 - DNA, 1047 bp, Escherichia coli
atggcggtaaaagttgttgatcttttttgcggtgctggcggtttaacgcacggcttacatttggccggattggacgttgtcgcaggcattgatttagaaggtgagtgtcgtgttgcatacgaaagcaataatgatgcactttttattgaaaaagatatatctctggtgacaaaagatgaaatcgaaaatctttttgaaggggcaagtgttaaagtattggccggatgtgcaccttgtcagccattttctaaatatactcagggaaaagataaaaaaaatgataaaaagtggccgttattatatgagtttgaacgtttaataaaagacacgaaaccagaaatagttacaatggaaaacgttcctgatgtgacaaaacattctgtctatgatgatttttataataccttaatagcattgggttattatgtttgggcaaataagattgaatgtgtagattttgaggttccgcaaaacagagtgaggcatgtattactcgcatctaaatttgcgccgatttctctgatgaaaccacaaacatcggtaaagctgacagttagggattgcattggtaatttaccttcgattgaagcgggacaagcagatccaaaagaccctctccataaggcgagtagattgagtgaaattaatctcaaacgtattctacattcaaaaccgggggggacatggagggattggcctgctgaattaatcgcttcatgtcatgccaagaaaagtgggcagggatatgccagtgtttatggtcgtatgtcttgggataaaccgagtccaacgataactacactttgttatggttttggtaatggacgttttggtcatcccgagcagcatcgtgcaatctcacttagggaagcagcattacttcaaacgtttcctgttacatattcatttacccaaccgggcgagccgatcaaaatgaaaaatgtcgggcgtatgataggtaatgctgttcctgtaaacttaggtaaagcgattggtctttcaatagtacatcatttgaaagagtttcaccccgccgctcttaaataa

SEQ ID NO: 24163 - DNA, 1146 bp, Escherichia coli
  misc_feature (387)..(396): n is a, c, g, or t
atgcccgaatttagcgccaaatggctaccgatagcagaagagagcggcagctggtctggatgggtgttacttcgagagttatttcccttaatttctgccgagctcgctgggatggctttaatgccagaaacggaaaggttaataggggaatggctcagtttatctagtaccccgttaaatctaaagtatcctgaactaaaatataatcgtttgtgtgtcggtaaagtatttgatggagtattgagtccagctcaaccactgataagaatatggacaggggaattaaatatttggttagataaagtcacagtctgccaatacgaaaacgccccaacgctgaaactgatatgtcaattcattttcgggtacattggcactattaacagnnnnnnnnnntttgttattggcttgattggcgaacgtggaagggaagttacggaatgcgcggaatcgctgaaaaaatcagtaaatgcagcaaaatgtgttttggtttatgccacctctgatttttcgtcagtagatcggtgtaatgccgccctgatggcgacaaccgtggcagagtattttagagatcgtggaaagagagttgtactttttatcgactcaatgacgcggtatgcacgagcactacgcgatatgaagctggcagcgggtgaaccacctgccaggcgtggttatcctgcttctgtttttgacagtttacctcgcttactggagaggccgggaccaacattaaaaggaagtattactgcgttttataccgtattactggagggggaggatgaatcagacccactgggtgatgaaattcgctcaatccttgatggccatatctatctaagtcgcaaactcgctgggcaaggtcattatccggcaatagatgtactaaaaagtgtgagtcgagtatttggtcaggtcactgatgaaaaacacagagataatgcagcacgggtaaggaagatcctcacaactttggaagatctacaggtgtttattgatttaggggaatatcgcgctgggcaaaatgctgaaaatgattttgctatgaatgcccggcctaaactcacaaattggttaaaacagtcagttaatgaaaaaatgccaatgagtgaaacgctaaaagagcttgaacgaattgttaagtaa

SEQ ID NO: 24164 - DNA, 414 bp, Escherichia coli
atgaaaaaattaaaactattaaataaatacagctacttacatagcataaacggctcgctgattgaagcagagcttgacgacgtttcagtgggcgaagtatgcgaaatttatgcgagctggcaagcaaatgaacgtatagccagggctcaggtcgttggctttcgcaatggaaagacattattaaaccttataggcagctctgtggggcttacacgtactgcagttttgaaaccaacgggagagcagttaaccatacagatcagtgatgcctttcttggttcagttttgaatgcttctggtcaaattatggaaaggtttgtcccggacactccaggcgaaaggggaaatttacgcctgattgatgaactgccaccgtcgtatcaggaacgtcgagttattaatgcccgaatttag

SEQ ID NO: 24165 - DNA, 1098 bp, Escherichia coli
atgctggttcttgctgctgaccatgctattcaggatattgaagccttccatgcagctgttttagctgcagaacaagagtccgttgacaataagttagtgacttttggcatcgtcccgaccaaacctgaaactgggtatggctatattaaaaagggcgaacaagttaaaaactctgtatttaaagtaaattctttcgtcgaaaaacctgatttagaaacggctaaaaattatctcgaacaaaaatgctatttgtggaatagtggtatgttcatgttcaaggcgagcgtatatttagatgaattgaaaaaatttcgccctgatattttagcagcgtgtaaagagtcgctttccagtgctagtactgatctagattttatcagattaaattctgatgtctttgcagaatgtcccgatgagtcaattgattatgcggtaatggaaaaaactcaggattgtgtagttattccacttgatgctgactggagtgacatcggttcatggacatcactttgggaaatatcagagaaagatgaacatgaaaacgtatcgcatggcgatgtaattaactataacagcaggaacaactacatttactctgaaggttcactgatcagcactgtaggagttaataaccttattatagttcaaactaaagatgcgctcctggtagcacagcaagacaacgtacaagacataaagaagattgtcgaaattcttaaaaagcaaaaacgtagcgaacatatatcccatcgcgaagtctatcgtccttggggacgttatgattctgtagaacgtggcgaccgttatcaggtaaagcgtattaccgttaagcctggtgaatgtctctcaacacaaatgcatcatcatcgagctgagcattgggtggttgtcgctggtactgcaaaggtgacttgcggcgaacgcacttttttcgtcactgaaaatgagtcaactttcataccaattggcacagttcataccttggaaaatccaggaaagataccattagaagtaattgagattcagtcgggtgtatatctaggtgatgatgatattgtgcgcctaagtgataaatatggtcgtgttgaggataaataa

SEQ ID NO: 24166 - DNA, 465 bp, Escherichia coli; identical to SEQ ID NO: 15777

SEQ ID NO: 24167 - DNA, 1059 bp, Escherichia coli
ttgtggaaggcagaaagtcagttcgcggtactggaggaggcggcacaacgtcgccagctgtccgcacaggagaaatccctgctggcgcataaagacgagacgctggagtacaaacgccagctggctgtacttggcgacaaggtcacctatcaggagcacctgaacgcgctggcgcagcaggcggataagttcgcacagcaacaacgggcaaaacgggccgccattgatgcaaaaaaacgggggctgactgaccggcaggcagcgcgggaagccacggaacagcgcctgaaggaacagtatggcgataatccgctggcgctgaataacgtcatgtcagagcagaaaaagacctgggcggctgaagaccagcttcgcgggagctggatggcaggcctgaagtccggctggagtgagtgggaagagagcgccacggacagtatgtcgcaggttaaaagtgctgccacgcagacctttgatggtattgcacagaatatggcggcgatgctgaccggcagtgagcagaactggcgcagcttcacccgttccgtgctgtccatgatgacagaaattctgcttaagcaggcaatggtggggattgtcgggagtatcggcagcgccattggcggggctgttggtggcggcgcgtccgcgtcaggcggtacagccattcaggccgctgcggcgaaattccattttgcaaccggaggatttacgggaaccggcggcaaatatgagccagcggggattgttcaccgcggtgaatttgtcttcacgaaggaggcaaccagccggattggcgtggggaatctttaccggctgatgcgcggctatgccaccggcggttatgtcggtacaccgggcagcatggcggacagccggtcgcaggcgtccgggaagtttgagcagaataaccatgtggtgattaacaacgacggcacgaacggtcagatagggccacaggcgctgaaggcggtttatgacgtagcccgtaaggcggcaatggatgttgtgaccgggcagatgcgtgatggtggtctgttctccggaggtggacgatga

SEQ ID NO: 24168 - DNA, 672 bp, Escherichia coli
atggcagcgacgcacacactccctctggcgtcaccgggcatggcgcgcatctgcctttacggggatttacaacgatttggtcgccgcatcgaccttcgtgtgaaaacgggggctgaagccatccgggcactggccacacagctcccggcgtttcgtcagaaactgagcgacggctggtatcaggtacggattgccgggcgggacgtcagcacgtccgggttaacggcgcagttacatgagactctgcctgatggcgctgtgattcatattgttcccagagtcgccggggccaagtcaggtggcgtattccagattgtcctgggggctgccgccattgccggatcattctttaccgccggagccacccttgcagcatggggggcagccattggggccggtggtatgaccggcatcctgttttctctcggtgccagtatggtgctcggtggtgtggcgcagatgctggcaccgaaagccagaactccccgtacacagacaacggataacggtaagcagaacacctatttctcctcactggataacatggttgcccagggcaatgttctgccggttctgtacggtgaaatgcgcgtggggtcgcgggtggtctctcaggagatcagcacggcagacgaaggggatggtggtcaggttgtggtgattggtcgctga

SEQ ID NO: 24169 - DNA, 348 bp, Escherichia coli
atgacagcgcgttatctcggaatgaatcgcagtgatggccagactgtcactgaccttgagcatatcagccagagtatcggcgatatcctgcgcacgccggtcggctcacgggtgatgcgtcgtgattacggctcgttgctggcatcaatgattgaccagccgcagaccccggcgcttgagttgcagattaaggtcgcctgttacatggcagtgctgaaatgggaaccccgcgtcaccctgtcatccgtcaccactgagcgcagttttgacgggcgaatgacggtcacgttaaccggccagcacaacgacaccggccagccactttcattaaccatccctgtgagttga

SEQ ID NO: 24170 - DNA, 384 bp, Escherichia coli; identical to SEQ ID NO: 15198

SEQ ID NO: 24171 - DNA, 129 bp, Escherichia coli; identical to SEQ ID NO: 19916

SEQ ID NO: 24172 - DNA, 141 bp, Escherichia coli; identical to SEQ ID NO: 6191

SEQ ID NO: 24173 - DNA, 348 bp, Escherichia coli
atgggactgataactggtctgtctggacaagcaaaagtatctcatatcttatttgaacaggctaagatacacacaactgatatagcctctctctactactatagagcacttgtcaattttcataatgaaagaattgaagaggcaaggatttgtatagacaaatcactacaactcgaacccagaagacgaaaagcagttgtgataaaagagtgtgtagatatgtatgtgcctaacccgctcaaaagcaacatgaaactctactataaagaaacttcgagtgaaagccatcgagttataattgacaacattttgaaactaaagcaactgacgagaatttgtatgcgataa

SEQ ID NO: 24174 - DNA, 720 bp, Escherichia coli
atgacaattaactatcaggcactgcgtgaggcggcagagcgtgcaattcaggcaatggaacgcctgttaatgttgccagttgatgatgatctgataagcgagcaggaacttaaagatagcggtgttgatattgatgcgctcaacgccttcaaaattctggccggaccagaaaccgtgctggcgctactggatgaacgggaaagaaaccagcaatacatcaaatctcgcgaccaggagaacgaggatattgcgctaacggtagggaagctgttaatcgaaaacggtcagcttgttgccgatacgctacgccacttagctgataacgaaatcgactctgattattttgctatcacctcaactaatgagaacggtactgaaattgatcatgagatgtctattaccgattacgcactgcaagctgccggaactgtagacgaattggttgcggcgctggaagccgcaaaatcaaaactcaacgagcagcgtgaatattacgagggagtaatcgcggatggaagtaagcgcatagcagagttagaaagtggttctcaggcacaaaagttagttgaagcaatcattgttgcgatagaaaacgaacaggaacgtctttttgatgaagattacctaatggattcgaaagaatgcattgacgtaattcgtgaagaagtaaagcgatggaatgattcccgcgccgctggcattcgcatcaaaggagagtga

SEQ ID NO: 24175 - DNA, 126 bp, Escherichia coli
atggaatacgaattaatgagagtaattgattttatcagcgcgaaatgggctgaattcgaagcattttgtgaagacaacggagacaacccggacgacatcattgatgttcttgaaaagaatcaatag

SEQ ID NO: 24176 - DNA, 300 bp, Escherichia coli
atgacagtagtcattacatatctggctgacgataacgccagaaatcgccgcagagcacgcagacagactcaacgtgaacaggcaatgcaagagcagcgactggcgcgaaaaattgcgctaaagctctctggttgcgtcagagcagataaagcagcatcactcggaagccttcgctgcaagaaggcagaagaagtcgagcgtaaacagaaccgtatttactaccgcaagccgcgcagtgaaatgggtgtgacttgtgttggtcgccagaaaatgaaattaggcagcaaaccacttatttga

SEQ ID NO: 24177 - DNA, 285 bp, Escherichia coli
atggacgaatcaagaaagcagtttgaagaaagttggttgcgacgtggaggcgaatcatcagaccttatccgttaccctgaaaatcaccatgaaattggcagtggtgatattggtggtcaatacgtgatggacgatgttcaaggccactggcaagcgtggcaggcatcgcgagcagctattgaaattgagttgcctgtatggtttgtcagtgatgctattgctgtgtacgaccgtgacgatatcgatgaatccatccgcgccgctggaatcaaagtgaaggagtga

SEQ ID NO: 24178 - DNA, 372 bp, Escherichia coli
atgaacgacaagcaaattgaaaaagaaatcgcagccaagggtaagacggcggctcgcgttactcctgaacacattgccagcataatcgccagcgaacattactttacggccgctgatggtgctcgctttgctcatgtgcagagaagcgaaacatacagcgtaaaaatcccagaccagcctgacgagctggagctgctgacattctgcgttctggtgctgaggaatggctttacggtcaccggggaaagcgcctgcgccagcccagagaacttcgatgaagaaatcgggcgcaagattgctcgccagaatgctgtaaacaaaatctggatgcttgaaggttacttgctgaagcagaagctaagcgaacagtag

SEQ ID NO: 24179 - DNA, 567 bp, Escherichia coli
gtgcgcaatttagttttatcaattcgcatatcctatcgtgacaaagtaactagaaaaactaaagaggttggtgtgtctgattctatgagttacgctgtgctagttgccgcaactctatttatggggatagggttgcagattgcgtggttctttttttctagttttattaaacgcaaaagaattgaatcaaggatatctgagatttctattgctatagggaaaaatgctgaaaatccagagaatgaggcctgcgcactgaattaccttaaagaaaagttttcccctgaaaaatttgaaaatagaattactgatgctcttggattggtaatatcagtaattcatatgccactaagtttgctgataacagtgtggtacttcgccatgatcgccggaagaatatttggtttcatgaatatagagcctgtagttctttgggttccaatgatactgcaactgttgttaagcgttgctatctttattttttctgtttttataaaaattgtctttggaagatatcccggagaagctaagggatttaataaagaattcataaaaactataaaataa

SEQ ID NO: 24180 - DNA, 582 bp, Escherichia coli
atgatcgattacaacccagcaaaaaaagaaatcatcgcagctaaaaagtgcctagagcagatgaaatcatctacaaaccatgatgattttgaaatgcactggcgagaatgtcttgggcatatagaaaagtctttcagtaagttgctctgtgcaacaaagccggttagtggaaaatttagcagccacttcaaccaaaagttcatgcttagaaaaacagacaaaacacttgcttaccttcaccaagcaagaaatgctgatcatcattccactatggaaatctcaaaacttgaacctccttatactactcttggggcatttccgggagcaagaagccattatattaaagagttaatcattgattcaacagggaaaatagcaaaatacgaaggcgaccctatgatagttgagtttcatccagcaacaactatgcctataaccgtaagaaaccaaggcaaagattatccacctccaacagaacatcttggcgaaaagcttgttgatatacatccatctgttcttgcctatctcggtatacaattttatgaaaaatggatagatgagtcgtgtgcaacgtttagatag

SEQ ID NO: 24181 - DNA, 255 bp, Escherichia coli
atggctagagatgatccgcactttaacttccgcatgcctttggaagtaagagaaaaattaaaatacagagcagagtcaaatggtagatcaatgaactcagaattgttgcaaatcgtccaagatgctctatcgagaccatctcctgtaaaaggttatcgcaatgaagctgaacgattagccgagatgcaggctgaacagttcaagtctgtggtatttgagacacttaaaaacatgtatggcaaggatgcaaaatga

SEQ ID NO: 24182 - DNA, 240 bp, Escherichia coli
atgccccgagactacgacattccatatgctttcacgctagccatcacaccaaacgccagaggtgtgcaggtcgtcgccacatcagtattccgccgtgaactacacaagcttaatcacgactggactctgcagcgctgcaatgagtggataattagcaggcagacgttcttcgcggacatcaccgaaggtgattcagttgatggtacttacgcgctacgcaacatggggagggttctctaa

SEQ ID NO: 24183 - DNA, 210 bp, Escherichia coli
atgggatttccttcaccggcaactgattatgttgaagaacgcattaacctcaaccgcatattcatacccaatccagcgaacaccttcatgattgagacatcgaccggctgcattctggttgacagggtggctaaggtttcgcctggcgatttggttgcgttccagatggaggcaatcccatgcttggaaaatggtacccgaagcacctga

SEQ ID NO: 24184 - DNA, 141 bp, Escherichia coli
atgcttggaaaatggtacccgaagcacctgatgacggatgacggtttgatagagggtgagcaactggaagaggtaatagtgctgggtgcggtgacggtggaagtgctgacgctggatgagaagtggaggccgactatatag

SEQ ID NO: 24185 - DNA, 1236 bp, Escherichia coli
atgtttacaattaaaactgtatttgtgttgaggatattcggcgctatacttgcgctgtcaacgagtgtgatgatatcaagaacgctcaatatgagtgaggctggtggggttttcttcctattatcagtaactggaataatatcgtccctatcctctttaggacaaaataatttaattttgaaaaaatgtgcctcagttaaatatgcattaaaagcacgaggcgttttttttcttagatgcataaaacggagtgttatatccagtattatcttatctatcattttaatacctataattcattatttttcgccacaattattattacgaaatacatggtgtttggcgattctgttgataatatcatcgtcagtaaatatattgttatattcctttttacagtctcaaggtcttgtcacttttagtgttgttctgcagtatatatttcaacccttattgtttattttttttgtattacttattgttctgattaaaaatgaaagtgttttactggtgtctttatcatacttcttctcaattattcttattggaggaggggggggggtatactcgtattataaatttagggacgatttcaatcagttagaaacagagtcaataccgtttagactgaaagaattatcagagtatttcattggtaactcattaggaatgctgattgttcaatcttatgttgtactttccggtttgttgctcccagctgctgatgtcgctattattgctgtgtctgatagaatatccttggttataaatttatttgcaatgtcaattagcacaattctggcacctaaggtcgccagtttatacagccaaagtaaaatgaatgaaataaaagagctaactaaaaaagctatgttcttcataatgataccatgtgttttaatggctcttctgtttccctttttttcagggctgatattatctatatttggtgttcaatacagtaatgctagcgaagtgttaattattttagttatgacgcagattattaatgcaatattttgccctgtatatgtttttttaaatatgagtgatcggcaaggttttataagtaaattgcatatatatatgcttataccgtctcttgttataacattttatctgactaacatatttggtgttgttggaatagctgtgtctaagttaattgtcgtgtcattgattaatataatcccattgatttactgtattttattgtttaatcgagtgataaagtga

SEQ ID NO: 24186 - DNA, 792 bp, Escherichia coli
atgagtttatattctattttaaaaaagttaattttatcttttcattactatctttttactatttcctttttatctgcgaaaaacgataagaagtactccaatcggttagattttgatgattatgttgcagctaagctaagaaaacagaatgaatataagaggaaaataccaagtgtctctgttatatatagagtcaaaaacggatctgaatatatagaggcatctatattgtctatttcggggttagcatcacaaataattgttgtagataataattctacagataatacaagagatattgtagaaagattatcgaatcaattagctgatgtttgctctatacaactttactcttatgataaaaatctcgctattgctggagaagggtataaagatcaggtgacaaagggagatggttcactggccgaattttataattttagtttttctttaggtgattgtgattatttaatgaaagtcgatgcccattatattttttcggcatacggtgttgatattttgcaaaagcagatagcaaaaaattatgatggtgtcgtttttcgagggttagagttttttgggaagtggatgagcaatgagctgtttttatataaacgttcactgggtctgaaatattgtgatggcgaattatatgaacagttaatgtgggataaatcaaccgtcagggtaaaaactatcattaaacccctttacttgcatgttaaacggttatcctatgttaaaaacctttataacacaaagaaagccatatacgtaaaatacaataaatag

SEQ ID NO: 24187 - DNA, 810 bp, Escherichia coli
atgaataataaaagaatatcaataataataccaacttataattcgagcataatattagaggaaaatattaaaataatcagtagctataagcagtgtaagatttttgtaattgatgatggttcagtttctgatgaagcgcgcaaaaataaaattatttgtaataattacgggtgtaattacacctatactcttaatcaaggcccttctcacgcaagatatgtaggcttattggattcagatacagaattttgtttttttcttgatactgatgattatattgctgaatttgctcttgattggggtgttaattatttattagaaaataatgaggttgatgccatcgtctttagaagtgattatgtggaagagtttaattgtaaaaacgagacaggtaatatcttcacaataaaaaaatataacagaggattaatacaagaatgtatagagtgtttagggtatccaaagcaatttactcttggttggaatcaatctaatacgttgtatcgtagaaataaaatcattgatgcttataaaataagatatttgacttggggggaagatataccattaaaactaaaactaatttctgttatgtcgctaatttctgtgagaactctgggagggtctcaaattaaaatatcctatggacggggatataaatatacaccaaaacaaatagttgagcttgctctggaggtttacagaacgtccctaaataatgcattttgtcttgcattcataacagttataagatatatgctttcatatttttataaaagattaaaacaactgtccagtaaaaggaagtga

SEQ ID NO: 24188 - DNA, 681 bp, Escherichia coli
atgaaaagaaaacttgttgacttttgtataatatcattacctcaacataatgaaaggagagataaattaaaaaatgaaatggcgaagtatgacatagaatgtcgtgtttctcatgctattgatggacggaaattattggcagaaaaatacttttctttatttaaaattaggtcctcaaagatgtttggaagaggttttttaactccgtcggaattgggatgtttcttgagtcataaaaaagctttaacggaatttttggcgagtggaaggaaatggttggtggttttggaagatgacgttttgcccaaggaaaatgttaaatatttggacgaaatgattaattcattctgctcatcaagtgtctatattttgggtggacaggatggtctaaaaagctttagtcgtgtcataatggggagaaaatcaatatgtggggtgcgaaaagtaatattaggtacacatcgttggttatataggacatgctgttattgtgtggatattaaaggcgctgagagaattctgaggttaatggaagaaaatagtttcttttgtgatgactggagttacattgtaagaaatgcgaaactggataatgtattttatggtcaatacttttctcatcctgtaaatttaaactctagttctatcgaagctgaacgtctttttattgcagaaaaatga

SEQ ID NO: 24189 - DNA, 594 bp, Escherichia coli
atgatatatattataattaatactattgtgcttttttatatgtttttgtttaatgcatataatcgtattccttatgggaaaataattatcgggggcatatgcgttttttttatgactctgttgccagcatttcaatacggtgttggaacagattattttagctatcaaaatatatataataatgctaatgaactcgataccttttatcaaaataaggaatatctcttttatggatatatgaggctatatcaactgactggatggggattcaaaggttttattgcgttaactgctttattacaatctttattggtgtttgttattgtttttcagttatggaaaaactatggttattctcttgttttggttttttttcttttttgggttgttactaatttatttcatacccagatgaatataataagagcatcattttcaatttatttgtttgcaatatcaattctctataagtttagagggaaattattgttatctttcatattaatggttgctgctttaggttttcatcgctctgctttgattggtttctgttttctcgtaattccagataagacgtattttttttgcgtgtaa

SEQ ID NO: 24190 - DNA, 348 bp, Escherichia coli
atgaatgtactaactaaaatgtattggattccatttaatttgctattccttatcttattaaaactaaaggtttttgttataaaagataatgagcgaaagttaattggtatgtgggctttaacggtgaatgtttatttgttaatgctcagttttgattttatttcaagggttaactactattttgtgatattttatataatcccgataatttatgttattaaatacactgttaagaatagatacttcgtttgtttgtatctctcattattatactgttttattccgtatctattaaaggttattctgtttcctatcgcagaattttattataaatcatacttgttctaa

SEQ ID NO: 24191 - DNA, 633 bp, Escherichia coli; identical to SEQ ID NO: 3679

SEQ ID NO: 24192 - DNA, 351 bp, Escherichia coli
atggcaatttatacccgaacaggtgattcaggaagtacgtctttatttaccggacagcgcgtcagcaaaactcatctacgtgtcgaaacctatggcacgctggatgaactgaacgcgacactcagtctgtgttattgcgccaccgccatcgaaagccatcgcatcttactggaagtcattcaacaacagatattttggtttagcgccgaactcgccagtgaaagcgaacagccgtcagcgcagcagcgttacatcggtacggaagaaattgccgcgctggaaaacgcgatcgatagcgcaatgaacgccgtcccccccggttcactgcttcattctgcctggtcgatgtga

SEQ ID NO: 24193 - DNA, 453 bp, Escherichia coli
atgaataactctgaattagaaacactgatccgcaatattctgcgtgaacaacttgtccccgctacaccacgaatgcaaagaaacgctattttccagactgttgatgaagcggtctgcgcagcacaccaggcctttttacgctttcaacagtgcccgcttaaaacccgtagcgccattatcagcgccattcgcgaagaattaatgccccgccttaccgaactggcagaagaaagcgccagtgaaacagggatgggaaataaagaggataagtacctaaagaacaaagcagcactcaataatacgccaggaattgaagatttaaccaccactgcactaaccggtgatggtggcatggttttgtttgaatactccccgtttggggccacacccgggagccaaatacgtttcgttaaaactgattaccacaatcgaagacatcgcgtttcgctgtag

SEQ ID NO: 24194 - DNA, 1344 bp, Escherichia coli
atgaacgtcgagttaacctcctgcgatgaccagaccatccgcgagcgagtacaagcagcaggtgttgtgggtgctggcggcgcaggttttccaacccatattaagctacaagcgcgtgttgacacgttcctggtgaatgcggcggaatgcgaaccaatgttgaaagtggatcaacagttaatggtgcagcaagccagccgcctgcttcgcggtgttcactatgctatgaaagccaccggggccagtagcggaatcatcgcgctgaaagaaaaatatcaacgggcaataaacgcactcacaccactgttaccaccggatatccgcctgcatattttgcccgatgtttaccccgcaggagacgaagtgctgaccatctggatggcaactggtcgccgcgttccacccgctgcattacccgttagcgtcggtgtggtggtcaataatgttcaaaccgtacttaatattgccagagccgtcgagcaacagtatccagtgacgcgccgcacactcactattaatggtgcagtggcgaaaccaataacggtaaccgtccccatcggcatgtctttacgtgaagtcctggcgctggcgggcggcgcaacagtagatgctcctggttttatcaatggcgggccgatgatgggaagtttgatcacatcgctcgacacccccgtcagcaaaaccactggcggattgctggttttacccaactctcattcactgatccaacgtcgaatgcagaatgaccgcagcgtacttgccgtcgcgaaaactgtttgtgagcaatgccgcttgtgtaccgatctctgcccacgtcatttagtcggtcacgaactggccccccatttattagtacgtgcggttaactaccaacagctcgctacgccacaactgttactgacggcgctcacctgttcggagtgcaacgtctgcgccagcgtcgcctgtccggtaggaatttcaccaatgcgcataaaccgcctgcttaagcaggaattacgcgcacaaaatctccgctacgaaggtgccttaaaccctgctgatcccatggcaaattatcgactgattcccgtaaaacggctggtaaccagacttggcttaaccccgtggtatcaggatgcgccattgtctgaacaggtgcctcagaccgaaaaagtgacgttattgttacgccagcacatcggtgccagcgcaattgcgtgtgtacaaaaaggcgatcgcgtcgttcatgggcaatgtgtaggtcaaattccacacggcacattaggtgcccccattcatgccagtattgatggcatggtcagcgatgtgacagaaaacgcaattacgcttgtgagaggttaa

SEQ ID NO: 24195 - DNA, 1083 bp, Escherichia coli
atgataaacgttacaaacgaaatgctcattgatgttgtcagtgatgctcttaccgggaagagggaaagtctcctcatgcggttgcggattatggcaaaaaaactaaaaaaagaatctcctgaattagcgggtaaattagaagatttacttattaatacaggtggcgcaattgcagtcgaaagggctaatccagttgttcctaaaataacacctgttgatgcggatacaagacaaaagctgctagttgaaacatatcctgtggtcattgatgttgaacctgtttggccaacaaaaactgatgttcaactgaatcgatttgtggctgagtgggaaatgaaagaacgcctttataaagaagggttgcatccgtccaaatctcttcttatgggaggaccacccggtgtggggaagactttggctgcaaagtggctcgcttttaaactcgatatgccattgttaacattagatctcgcaagtgtaatgagtagctacttggggaaaacgggtaataatattaaggcagtcctcaattatgcttcgtcattcccttgtgtactgcttcttgacgaatttgatgcgattgctaaaaaaagggatgatgcaacagatgttggagaactaaaaagattagttacagtattattgcaagcaattgatgaatggccaaatacgtctgttcttatagcagcaactaaccatgcggagctgcttgatcctgctgcatggagaagattcgatcgagttattgattttgaatatccaacacaagacctaatgagaagatatctctgttctaaaaatattggagatagcttatcgtactatattgctacaaaactcgaaaaagtttcatatgcagttcttgagagagctataaatcaagctaaaagaaatgccattatagaagatattcctttaagttcagctttaattgatgagttgttagatggcgtgtcacttgatgatgttataaaaaacatgtcaaacaacaatgtatcacaaagaaaaatcgctttagatttggggatttcaaggtcacaagtacgtaaggttttgacggttgaggatgaagacaatgaatga

SEQ ID NO: 24196 - DNA, 3474 bp, Escherichia coli
atgggaaaaggtggcggtaaggcacacacgcctcgtgaggcgaaggataatctcaaatccacgcagatgatgagtgtgattgatgcgattggtgagggaccgatagaaggtccggtgaagggactgcagagtattctggtgaacaaaaccccactgacggacacggacggcaatcccgtgatacacggtgtgacggcggtctggcgcgccggggagcaggagcagacaccaccggaaggctttgagtcctccggagctgaaaccggactgggcgtggaagtgacgaaggcaaaaccggtgacgcgcaccattacgtccgcgaacattgaccgcctgcggattaccttcggggtgcagtcactggtggagaccacctcaaagggtgaccgtaacccggcatccgtccgcctgctgattcagttacagcgtaacggtaactgggtgacagaaaaggacgtcaccattaacggcaagaccacctcacagttcctggcctcggtgattctggataatctgcctccccggccctttaacatccggatggtcagggagacggcggacagcaccacggaccagctgcagaataagacgctgtggtcgtcatacaccgaaatcatcgatgtgaaacagtgctacccgaacacggccattgtggggctgcaggtggatgcggagcagttcggcggccagcagatgacggtgaactaccatatccgcggtcgcatcatccaggtgccgtcaaactatgacccggaaaaacgcacgtacagtggtatctgggacggcagtctgaaaccggcatacagcaacaacccggcctggtgcctgtgggacatgctgactcacccgcgctacggcatgggaaaacgtctgggggcggcggatgtggacaagtgggcgctgtatgccatcgggcagtactgcgaccagacggtcccggatggtttcggggggacagagccgcggatgacctttaatgcgtacctggcacaacagcgtaaggcgtgggacgttctcagtgatttctgctctgcgatgcgctgtatgccggtatggaacggtcagacgctgacgttcgttcaggaccgcccgtcggatgtggtgtggccgtacaccaacagcgatgtggtggtggatgataacggcgtgggattccgctacagcttcagtgccctgaaggaccggcacacggcggtggaggtgaattacaccgacccgcagaacggctggcagacctccacggaactggtggaagacccggaagccatactgcgctacggacgcaacctgctgaagatggacgcgttcggctgtaccagccgcggtcaggcccaccgtgccggactgtgggtgataaagaccgaactgctggaaacgcagacggtggatttcacgctcgggtctcaggggctgcggcacacacccggtgacattattgaaatctgtgataatgactatgccgggaccctgaccggcggacgtgtcctgtccattgatgctgccacccgcaccctgacgctggaccgtgaggttaccctgccggagacaggtacatcggcggtgaacctgattaacggcagcggtaagccggtgagtgtggacatcaccgcacaccccgcgccggaccggatacaggtcagtaccctgcctgatggtgtggagacatacggggtgtggggactctccctgccgtcactgcgccgtcgcctgttccgctgtgtctccatccgggaaaacacggacggcacctttgccatcacggcggtgcagcacgtaccggaaaaagaagccatcgtggataacggtgcccgctttgagccgcagtcaggctccctgaacagcgtcatcccaccggcagtgcagcacctgacggtggaggtgagcgcagctgacggccagtatctggcacaggcgaaatgggacacgccgcgggtggtgaagggggtgcgcttcagtctgcgactgaccagcggaagcggagaagacagccgtctggtgaccaccgctatcactgcggatacagagcatcgtttcagtggtctgccgctcggggaatacaccctgacagtcagggcaattaacagttatggccagcagggcgaaccggccaccaccaccttccggattaacgcgccagcaaaacccgccaccattgaactgacgccggggtattttcagataacagcggtaccggtgctggcggtgtatgacccgacggtacagtttgaattctggttctcagaaaaacgcatcacgaacacggcacaggtggaaaaatctgcccgttatctggggactggcagtcagtggactgtctccggcccgcacattaagcccgggaaggatttctggttttatgtacgcagcgttaacctggtggggaaatctgcttttgttgaagccagtggacgggccagcaatgatgcagaagggtatctggggctgtttcgggaaaaaataggaaaactgcatctggctcaggggctgtgggagctgatagacaacagccagcttgcggatgagatggcggagatgaagaccaccatcaccgaaacccgcaatgaaatcacacagacggtcagtaaaacgctggaggaccagagcgccaccatacagcagatacagcgcgtgcagaaggacacaaatgatgaccttgctgcactttacatgctgaaggtacagaaaacaaaaaatggcataccctatgttgccggtattggagcggggattgaggatactgatggccagcccctgagcaacatactgctgctggctgaccgtattgcgatgattaacccggaggacggcaacaccacgccgttatttgtggcgcaggggaatcagttgttcatgaacgatgtgttcctgaagcggctgtttgcggtgagtatcacctcgtccggcaatcccccgacgttttccctgacgccggagggcaggctgaccgcaagaaatgctgatatcagcggtaacgtgaatgcgaactccgggacgctcaacaacgtcacgattaacgagaactgtcgggttctgggaaaattgtccgccaaccagattgaaggcgatctcgttaaaacagtgggcaaagctttcccccgggactcccgtgcaccggagcggtggccatcagggaccattaccgtcagggtttatgacgatcagccgtttgaccggcaaattgttattccggcggtggcattcagcggcgctaaacatgagagagagcatactgatatttactcctcatgccgtctgatagtgcggaaaaacggtgctgaaatttataaccgtaccgcgctggataatacgctgatttacagtggtgttattgatatgcctgccggtcacggtcacatgacgctggagttttcggtgtcagcatggctggtgaataactggtatcccacagcaagtatcagcgatttgctggttgttgtgatgaagaaagccaccgcaggcatcagtatcagctga

SEQ ID NO: 24197 - DNA, 1080 bp, Escherichia coli
atgaaaaaatatctcgcgctggctttgattgcgccgttgctcatctcctgttcgacgaccaaaaaaggcgatacctataacgaagcctgggtcaaagataccaacggttttgatattctgatggggcaatttgcccacaatattgagaacatctggggcttcaaagaggtggtgatcgccggtcctaaggactacgtgaaatacaccgatcaatatcagacccgcagccacatcaacttcgatgacggtacgatcactatcgaaaccatcgccgggacagaacctgccgcgcacctgcgccgggcaattatcaaaacgttgctgatgggtgacgatccgggttcggtcgatctctattccgatgttgatgatattacgatttcgaaagaacctttcctttacggtcaggtggtggacaacaccgggcagccgattcgctgggaaggtcgcgcgagcaacttcgcggattatctgctgaaaaaccgtctaaaaagccgtagcaacgggctacgaatcatctatagcatcaccattaacatggtgccgaaccaccttgataaacgtgcgcacaaatatctcggcatggtccgccaggcgtcacggaaatatggcattgatgagtcgctgattctggcaattatgcagactgaatcttcctttaacccgtatgcggtcagccgttccgatgcgctggggttaatgcaggtggtacaacatactgccgggaaagatgtgttccgttcgcaggggaaatccggcacgccgagccgcagtttcttgtttgatcctgccagcaatattgataccggcaccgcgtatctcgcgatgctgaacaacgtttatctcggcggaattgataaccctacatcccggcgttatgccgtcatcaccgcctataacggcggcgcaggcagcgtgctgcgagtcttttcgaatgacaagattcaggcggccaatattattaacaccatgacgccgggcgatgtttatcaaacgctgacgacccgccatccctctgcggaatctcgccgttatctttataaagtgaataccgcgcaaaaatcctaccgccgccgataa

SEQ ID NO: 24198 - DNA, 1245 bp, Escherichia coli
gtgttatttggtgttcttggctctgaaacggaaaaattaagtgttccttattgtaatattgaccattatcgtgtactggattctaatgttaataactcagatgtcgatctttttgacgttctgatccgtattaaaagtgtattagaacaaaaaaaatatgattatatcaatctgagcttaggacctagattacctgttgatgacgatgacgtgcatgtgtggacctcaactcttgaggagatacttgcatcaggagaaacactttgtactgtcgcggttggaaatgatggtcagctgcctgccaagttaaatcgaattcaaccacctgctgatttagttaatggtctgtcagtaggtgcagcaacctctttatctgatagttgggaaagatgttcttacagttgtattggtcctggacgaagccctggctttgtgaagcctgatggagttgcatttggaggacattctgatgagccattccaggtatacagccctatggttaatggtcttgcccgcactgcggggactagcttttcagctccattagtcctgaggcaagcaatcgcgttaagtgcttctctaaattacaacattacaccacttacggctaaagctctgcttatacatcatgcggagagcaataatatcaatcgtgctgaagttggttggggacgatttcctcatgatcttagtgaagtaatattttgtgatgatgatgaagttaaagttatatatcaaggtactttaaaaccatcacaacacatgcgagcacctattccgtttccagatgtacctatgcgtggatgtgtaaatttaagagcgacattctgcttttccagtcctgtagatgcggaacatcctttgaattatacaagaagcggtctagaagtaaccatgagaaaaggtgtttcagatagttccgggttaacgtttcctctttttaatctaaaaaatgtttatgcagatgaaaatgagcaacgtgttgatgcacataaatgggagactacgttaagaagtgaacacaaatttaaaccgaatgagctgacaaacccatgctttgatattatctactatggtagagactgtggtatgcctattgatgttgacgagttagaagaactaccatatgttcttgtcgtgactttatctgctgaagaaatgccggatttatataacctaattaggcagaaatatcaaaccttacagcctatccaagttcaacagcaaattatgttacgtacttaa

SEQ ID NO: 24199 - DNA, 942 bp, Escherichia coli
atgacgatacggtcgaagacctataaaggaagcgggtttaacgagctgcgctttgaggatgcgacggataaggaacaggtctatatccacgcgcagaagaacatggacacggaggtacttaacgaccggacgacggacgttaagcatgaccacacggaaaccattggtaacgaccagaagataacggtggggttgggccagacggtgaatgtggggagcaaaaaggaaggtggtcatgaccagaaagtgatagtggcgaacgaccggtgcatcacggtacgtaacgaccagatgctgaaggtgacgaacgaccggacggtgagcgtgagtcacgatgacagtctgtatgtcagaaatgaccgctgggtgacggtgaaagggaagctggagcacaggacgacggggaaccatatcagccaggtggaggggaagcacagcctggaggtgaagggcgatctggctgagaaggtgagtggcgcgctggggataaaggtggacggggaaatcgtgctggagagcagcagtcagataagcctgaaggtgggcaggtcgttcgtagtgatacactcgggcggcgtggatatcgtcgggccgaagataaatctgaatggtggggggagtccggggacgccggtgtcaacacttcagccaagcgtgctagaggttctgacagatgatgaaggtgatgataaaggcgaatgtgagaagaaccgtgactctgatgctggttcaggaggcaatgacgaccagctggataatcctaaaaaatattacttacgcttccattttacagatgatagcagtattccgtatgcgaatactaaatatatcgcatactttgcagatggtacaaaaagagaaggtatgatggatgatgatgggtatacagaagtatttataaaagatattgaagaggaaataaaagttcatttgcttatttaa

SEQ ID NO: 24200 - DNA, 1323 bp, Escherichia coli
atgaacgtggagcgaagggacagcgtcgggcagtctgcatcacagcccaactgtaggcaggaggaggctgtgtgtgaacagacaaaaccgtttcaggtcagtaaattgcatgtggtggaagcgtaccggcggataaaggcgaatgccggagctgccggagtggataaccagacgctgaaagattttgagcgggatctgaaaggaaatctgtacaaaatctggaacaggttatcgtcgggaagctggatgccgccgccagtgcgtgcggtggaaattccgaagaaggatggcagcaaaagacttttaggaataccgacagtaagcgatcgaatagcgcagatgacggtgctggtaacgtttgaaccattagtggagcgttatttcctgaatgattcatacggataccggcatggaaaatcagcgctggatgcaatagcagtcaccagaaaacgttgctggcaatacgactggtgtcttgagtttgatattaaagggttattcgataatatcccccacgatttattactcagggcagtagataaacattgtgcggataaatgggtaagactgtatattcgccggtggctgacagcgccggtgcagatgccggatggaacactgaaggaaagaaataaaggtacgccacagggtggagtcatcagcccggtactggcgaatttatttctgcactatgtgtttgataaatggctgacgttacattatccggaaattccctggtgccgttatgcagatgatggattaattcattgtggcagtaaacaacaggcagaggaattactgaataagctggcaaaacgttttcaggaatgtggactggaattacatccggagaaaacgaaaatagtttactgcaaagacagcgaacgacaggcgaaccatgaaacagtgcagtttgattttctggggtatacgttcagagcgcgaagagcacgtaaccaccggcggggaaacctctttacgagtttcagcccggcggcgagtaaccgtgcgcagaaaggcatgattggaaaactcaggaaactgtggatcagacgcagggtggagatgagtctcgaagatattgcgaagtggctgaatccgataatatcggggtggctgaattattacgcgagataccacaaatcagcgatgaagaaagtatgcagatatattaatctgacgctgattgcgtgggcgagaaagaaatataaaaccctgcggtatagaaagacgaaggcgtgtcagctaatggaaaggctgtcaaaagagaagccggagttgtttgcccactggaaagcaggaccaggaagcgcgtttgcctga

SEQ ID NO: 24201 - DNA, 234 bp, Escherichia coli; identical to SEQ ID NO: 20329

SEQ ID NO: 24202 - DNA, 1260 bp, Escherichia coli
atgatatcagcaagtttgttttctggcgctggctttggcgatatgggttttagagcgatgggatttttcccggcgctgttatgtgaaatagatccaaaaagaactgcatttacaaaaataaatttcccacaatcggaagtattaacttgtgacatatcggaaaatgtggaaaacataatcgatagaattaataaaatactagaacaaaaaaaagaagataaacttttccttctatatgccacaccaccatgtcaaggcatgtctaaaaatggaatcggatctatccttaaagctatggcagataataaaaggccacagatcgacaaaagaaatcatctatatttgccagttatagatattgtaagatctgtaaaaccaaaatggattttttttgaaaatgtctgccgactatttaactttaacgacattgataaaaatggaaaagtagaaaaaataacaaaaataatagaaaatgaatttagagaaattggttatgctggtaaatttgaacaagttcaaatggctgactacggtttacctcaaacacgcttaagaagcgtaggtatttttaggttaaacgaagacagtttttttaaaaaggatgaaagtttcataccaaaacctacgattaaaaatccgaaaaatagaataacgttaagaagtgtgatatcaaaaaatgaagaattgatagcaattgatcctaaaaagagaatgtcatctttaaacccattgcatagagtaccgaaatggagggatgatctagacttttggatgcgaaacacccctgaagggtgttctgcctttgataataacacttgcttatcatgctcttttgtgaataaaaagattgatgtaagatgtacatcttgtggttccttattaccaaaaccagtgatagtaaaaaatggagaagttaaattaataaaaggttttgtttccgcatataaaagaatgtattgggataaacctgcatcgactataacgaccagatctgcttatgcatgctcagatcataaggttcacccaagtgagaatagagttttatctatatatgaaatagcacaactacaaggcattgatatagatgaggtaatctggaaagactcaacaggaaaacagttttctgacacgcttcttcgtgaattgataggtgaaagcgttccaccactgtttaccaaaattattgcaaaaaaaatagttgaaattgaaaaatcaagatcaactattatcaataataaagagtgtttctttacagattaa

SEQ ID NO: 24203 - DNA, 666 bp, Escherichia coli
atgaactacaaaataaataacagatttagtatcgatgtcggtttcttagtgaattatgagcatattcggaagtctataattcaaacaaatgatatattaagtaatttaccatcaaccttgtttaacagtattgattataaaacaacaagtgcaatgattgggtctatctattgtgatactttggcattattaactaactctattgttaacccaatagaaaaagggcaccctgatattttacctaaaagcgccttaaacgctacagaagagcggctgagaaactatccacaagggcttgagataaagtgtactgttggtaacataacaactggagcgaatttacgcgcaggacaaaacagaatcgattacattaacggtattacgtggcaagctcatcatcaagaagtatctacattaatgggattggtttgggatttcgttgattgtgggaagtcatttttttatcctactattaccgcagtcttttactgtaataatttaacccccgaagactggggggctgtcagcggcacaacgggaagaaatactaaagtttctggaatgttaactagtgggaaaagaaaaatggcaagtggttggattgccgttatagacaatccaaagtatatcaatacatatggaaaagtattgaactttaatctgtaa

SEQ ID NO: 24204 - DNA, 1167 bp, Escherichia coli
atgttattgcgtatcaaattattaactttgcgaaaattaataatgcctgtggcgttaattattcttcctgtgcttgttatctcattcgtatctataactctgaccaaagataaaagtgcaacgcgtgccgaacgatttgaacataccccggatgtatttgcggactatgacccattaaacctgactcatcgcctcgtcaggatggatgagcaaaatggtatcattaattctaacgaagcgcgtaaagcatatggggctataaataattttttaaagaaagtaaaagatacatgtaggattgatgatactactgaaaatttcttggactgtgcaaacaaaatattaggagctaacttttattataaaccatcagctacagtagctaaggcttatgctaatcacttttctgactgtgatctgaacgtatatcttatgtttgatgctgcaagagcattcagtaaaaagttagaaatagtttatgctccacgtcatgcttttctatcatttattagtgaaaaatatggaatgagattttattgggaaactacagaaaatgagaatacaggtgttatagccaatatatcagactcattttataaaaaaacacatcatagattttattattctcctgtaggggaacgtgtcattgagaagttataccctatattatctttagccgatatggacagtcatcgatgggatgctgttgtcaaatctatcgataaaagtatgtcagacaacccactcgtcctcgatttttactatgaagatagagaaaacaagaaacaactgagtcaaaaagatatccatatattatatggattaattcaggatgatatatcttctgtggacaaacgacttatattagccagacatttcttgggaaaaggacagcgaaatgaggcaatgaatattcttaaccagatagatgacagtgagtgcaagctgtcatgtatggaggtaagggagaaaacatcgtcccttgatcgagttgtttattctttaatgaaaatgttcaaatggtttaattccgatatttcacgggtaggtataatattttatgttctagctgttattgtcgtatatggtattatattaatctttgttggaagaatgcagataaataatcgtaacaaaaataaaggcaataatttgaatcaagtatag

SEQ ID NO: 24205 - DNA, 219 bp, Escherichia coli
atggatataaagatcatgagattttatgaagtgtttgacagtgtaatgaataaactgaggggggattttatttttcttatcctgattattattttgtttgattcatgtatcacgaacaaatataaatatttagttctcgttcctttgttctttattagtgatgttttatcatcatggctttttaaacgttttgagaaaaataaaatcttggcaaaatag

SEQ ID NO: 24206 - DNA, 192 bp, Escherichia coli
atgtctaaaaaatatgaaacggtgatgctatttctgaaattttttctgaggttttcttttaactcattgaagtacctatgggcagcggtaataatgttattaagtttttattcattttgtaagtgtggggttttcttaacgattctcttaatgatgtgtgataatgaaaaagtgaataagaaagaattataa

SEQ ID NO: 24207 - DNA, 360 bp, Escherichia coli
  misc_feature (332)..(341): n is a, c, g, or t
atgaaaataaaaatggagcaatgctctttgaatatcatgaggacaggatacatcgcggcagctattctttttatgtgtttgttgattacgcaaaatgcatacgcagcagatttatttacggttcctgatacggataaatcaaaactgtggttcttggatgttttatttcctgagaatttagcccaaagcccgttagccagcacaatgacaatcctcaacagtgccattttgttggttggtgggattttagcagcatacacgctaatagccggaacgatgtcaacggcgcatgatggcgaaatgctgggtaagaaatggtcctctatgtggcnnnnnnnnnncctgtcaggacagcgttag

SEQ ID NO: 24208 - DNA, 951 bp, Escherichia coli
atgtggtttggtgtctgcgtgggctggatgattctgtgccttgaagcaatggtggcagcaccattatgggtaatcacacacttacatccagacggagatggtgttgtaggacgaggcggtgctggctatggtctggtgctgtcgttaactatgcgcccggcactgatggtaacgggactaatagccgcttatacgatgcttccgatacttggtggggtgattaatgaaacgttctccggcgcgttcggtatgatgtcagccaacgccgggattagcatcatagaatcactggccctgattgctgtttacattgcgctgatgtttacggttgtgaagaaatcactttccctgatccatgttattccagatgaaattatgaagtggcttggcgttcatagtggtcagagtatgtcgggttatgctcagtcggcatcaaaaggtgtggaatcggcagtactggcaaaaacagtattagatcagttatcacattcttcgaacgcgttaggtaatcagatcagaaacgggcaaatgaataaagaccgtgaacaacaacgtgagcttcaacagcagcaacaagttcaacaagggaaagctcaggcttccagtagagccagtgatactggatctgcattccgcacccatatgagtaatgcagggccgcttgatcagcaggatgaatatcaatctcttgaaagtgccaactctgcttacagtgcggctgaagctgcagatgctgttggtgatacagcgggagctgctggctatatggatgtcgctcaaaaggctgctaacagagcggtatcttttggcgagcataacaggccattgttgccactaaatcttcagggtaaagcgtctcctatagagagttttaagactccgggtaaaggtgatgggggcggatcttctggtggtgattcatcaccaaaagaaggcaatgagggaatgtaa

SEQ ID NO: 24209 - DNA, 252 bp, Escherichia coli; identical to SEQ ID NO: 19414

SEQ ID NO: 24210 - DNA, 840 bp, Escherichia coli
atgcatcttgaagaagaagatctgcgcgctttagaaagagccgtagaattattagcacaagatacaattacagaaacactaacccaattagttggaaccccaatagattacttaatgagtaaacttcccaaaggagcagaaaagaaaatttatagcctagtagaaaaatctctcaacaaagctgctaatgcagccttatggagcctagacaatgaacctaaccgaatagcatcaactaagacaaataagttctttgctgccttatctggagccattggtggtgcttttggcttttctgcattagcaattgagttaccagtttcaacgacaattatgcttcgttcaattgcggacatagcaagaagtgaaggttttgatctagataggattgatacaaaactagagtgtttagcggtgttttccttcggaggaccatctgaggacgatgatgcagttaatactgcatactatgcaacaaggaatttgactgctgagatcgtacaagatttatccaaagaaatttctaacattactgtcaagaacgctgcttcaacacaaacaggaaaatggttagcttcgttaatagaaaaagttgcgacaagatttggtatagttattacagaaaaaatggcagctcaagctgctcctgttattggagcactggctggagccacattaaacacgatgtttaccgactattatcaagatatggctcgaggtcattttattgtcaaaagacttgagagaaaatatggtgatgaattgataaaggctgaatatataaaaatctcagataaactcaccaatcagaaccaacggaagcatttgaacagcaactaa

SEQ ID NO: 24211 - DNA, 1557 bp, Escherichia coli
atgacaacaccatcatcaactgccggaaaggtctgtgtggagtgcaatataccagacacatgcttactggatataattactgatttccccaacaataaagaacatcatacatggtcaaaagaaggatctatttatttaaatttactggatgagggcgatggatgtgatggaaccattactatcattagtaaatgcaataaaagtggatgtccggtagcatggatggaggagattgcaggaggaacatctgaagcactgacatctgatggaattccgaataaaatcaagttatcttacaaaggacaagagtcatgcttaacaaatataacagatataatagattgtttttttccaccatattactatttaacttcagtcatccctccagcaagtttttctgaagggcctgccacatatattgtggttgcaaatggatgttacgagtgggggcagtatgttactatctatgttcagccaactattgaattccgtgcaagtttaggtttaagttatgaattaaaagctgatataaaagagatgagcatcaaagaacgcagagatgaacggataaagtctcgcttagcgatggaagacacaaaacctaaaaatggtaataaactacgtgatggctggacatatgcaacagataaattcaagctaactaattcattagatatgacttttgattatggcttaaaaatatgtaacactgaatatacagaagaatataaaaacaatataaaaaataaaattacaacagcatcatcaatacactcaaactcgattgataaactattaggctgtgtaaataaatattttgcaccagatcctgaaaataacaataaaattcgtgagtatgaagtatttagtacaaacctagaaccagtaacattgggggtctcatatgcttatcaatatacagatgttcatgatggcccttgtcatttttttggtctatatggagaacccttattagaaggtggtttaaggtttgatatcattcagtttatatgtgcttattgtaaaatagatcatcttgcaaataaatgcagaaaatacttagacaagcatggtgttagcgtcgagtgttatattgaaatacttttagggattaatattaacttaggtgtttcatataaaagtaaaaatgatgaatggtccattggtatattagaaaaaaaccagctttacttaggtataaaaggggttgttagtgcaacatttgaagcagaagtaatgtgtgtcgaattaagtctcggggccgaaggcagcatcgaggccaaggctggatttgaggtagactctcatgatgatggaattgatcttgtaggttatcacgatggtgttaaaggatattttgcgttttcgtacgatgtggcattttccgatggcgacgatggaaaagaagaacaaggcacctctactcatgtaaataaaacagaaacagagtggcagttggcagatcccctcaaagcgagtgaatctccattgcgggctaatctatatggaaaaattcgacaaatttccaaaccagctataactcctccctcaaattaa

SEQ ID NO: 24212 - DNA, 786 bp, Escherichia coli
ttgctggattttttacaggaaaaaaatcctccacactgctgcttatttccgccgcctgtacaaccagatttagaggcgttggctccctggctggtggaagtaacaccggaagtaaccacgtggctggatacgaaagagacgccgtgggggatatatgtctcctcatacagtaaaatccatgtagtgctacagcattttcgccgttatctgtgggttaatatacctgaaagaagcaaaccagttttgttccggttttatgacccacggaacatatggtcgctggtcagcgtactgaccccacgggagttacttttgtttatcgacccaatagataaaatcagcacctggtatgcaggagaagagcgggaagataacttttcatcacatcgtcgaccagatgccagaagaataccatcggagaataacaccatactgacattcagtcacagacaatatgaaaacctgagcaggcaggctcagaataattacattcagaaattaactcagtatattcataattattatgcatcatccaattatttttctgccaaagattacgcatacataaatcgacaggctgaaggttattttttattttgtcagtctctggatattaccgacgaccgttctgtcagagggattgtgtttttactattaaataacaccataactgacagtgccaatattccccagcaatggctggatatactgagtaataaggaaaggcccgcacacaaccgggttgaaatgttacttttacaggagctgggatttatacctcagtaa

SEQ ID NO: 24213 - DNA, 1167 bp, Escherichia coli
atggagctaacaaaagagcaaaaacaaatagctgaaactcgattgatgatagctcaacagcaatcaatcgaaagcggaacattcatcgatatacagatagataagatgatcaaagctatcattggtcaggtgaaaacgaaagcgactgatgcatcaaaggaacagtacaggaagcactaccgatctgctatagaacgtcacccggatgcatcctttcatgagcttctgatgcaagcggggacggcctctagctttgataagaggcgtacagccttcaggttttgcatcactgaagagatccagaacttgagacgtaaatctgaaaaggctatgcgttctaaagattatgaagcaggaaaaaaactaatccaagaagcatttaaactcgctattaagtttgaagatgagtttttatctgataaccgtattttatttaatgatgtgaaaagcaaggaagggtttaaaaaagtttccttcagcaaaaggaaaggattaaaaaaagcgccctcacctgatgatatattaaatgatttagcattgaataataaaatatatgaaaggcattcattagcttttgccgttatttccacgtttggaataagacctgctgaaatacgcaaaggagtaaagctaacatttaaagatggtatgatttatgcccttgttaaaggtgctaaagtatcagaggataaaggtcataaacatcgagctataggatcttcttttcgtgatgatagtaaatgtgatcaagttatcctgaacgctatttataaaggaggtgagggggttgtagttacgcaatcaaaaaaagattatgacagcttaagaaaatattttaataaccaccacaatggaacatcgctttatacataccgccatcaggtagcaagtgatttaaaaaaagcgggtgtttcaaagcgtcaaatagcggaggtaatgggccatagaacaactgaatcacaagtgcattatggatacgccagaagctctaaaggtgctcgttctatggttgcgaagggttctaacgatgttatcagtagcccagacatcaaagactatttgaaacctgcaccggctcctgcagctggtattggaagtaagatcaaccgtatgaaacagaacttgcctgatgttgtcagctatccaaagctgacgccacgtaagtag

SEQ ID NO: 24214 - DNA, 963 bp, Escherichia coli
atgggagcaggattgtactcgggtgaaaatccacaaaaaatccgcagtaagtttaatattgaggaatcatattgtgccatcaaaaccaacggtgtcctcgggttcagtaatcgaatgaacgcatggcgagagaatggtgattccaccggggccatatccagcaccaatgccatgatgctgatggcgaatggtgaaaatgaaatcagcctggaaatcggggcattaggatggttttctgacaagcctgccagtacggaaaaacgggggcgttttttccaaaaagcagggtgcagcctggatttggttcgttttattaaacaggaagaaactacgctttcttcgataaaagtgaccgtcaaccagcagggcatacctgaagcccggtcagacagcgtgcattccgttatccggaaagagatcctggcagagcaggcggaacccggatttatagatccagattattttgatgaaacctattttccgaaagggatgaaggtgtatcagtttacacaaaaagtcacggtgacggggcttcctgaatgggcctggactcgggcaaccccctataccggaagcgacgagcagctacggaagttaaaagccgcctataccgaaatggcaacaattattaacagcggggacagagcacgccttaagttatataacacagaggcgctgaaggcatggtcagccacaaccggtgactctgaggatgacatattactctcccactttccgaaagataaccttgagggtggaaaagccaaaatactgcctatcaggtggaacgattatgccgtccgggttatgaataatgggcgtatggtgcaattatataataaatcaatgccaacgtattccccgctgacttaccgttttacagatgaaagtggtgaagagcgtatggggtattacgctccggtattttcgctgattgatggtcagtttatccctgtcacttga

SEQ ID NO: 24215 - DNA, 477 bp, Escherichia coli
atgtatcaaatgagaggtaacagggtgtcaccgatgcaagaagaagaaatagcctacagagctataaacttctgtaatgctattggtcttacagcctcaaagcgcaaaagaaagcgttatgatatgttctttgaaagcctgtcaatttatggggttactcttgacgtcaggaccgacaaagagtgggaggctctgacgtatgatctaactatcggacattgtgaccccgcttctctaacaattacggttcccaataaaatatatgtgaatgcttgccttggggaagagcatgcacttgctgttatcttccacgagctaggtcatttgcttcttggacacaaagcagttttacacttttcagttaaagaacctactcgtattgaggatgcagaatggcaggcagatacatttgcggatatcgtactggaaacaattggcgtgagaacacaacagatgtcgttcgatttttatatgtaa

SEQ ID NO: 24216 - DNA, 360 bp, Escherichia coli
atggcactcactgaattcggtaaggccgttagaaaagcgaggatcgatactgacagtactcttctgactatgtctcaagaactgggcactacgccagcgtttcttagcggtttagaaactggtagcaaaaaaatacctctgaagtgggttaagaagattgattcttacttcaaggccaaaggtgtagaaattgaagggttacaggagttagcggcagttgcgaatgactcagttccagtaaacggtttgtctcagcaacagaaaatgcttgtagcgggattcgctaagtcgcagtttacgccggaacagctaaagagttttgcagatttattgcaaaagattaataacaatgaggggtaa

SEQ ID NO: 24217 - DNA, 489 bp, Escherichia coli
gtggtagatggtgaagcttgtaaacgtctgttcaacttgtctgcaataaccaacgaaaagctggataattcggcaagtttagatgcattacctgatgacttgatcttactcaagaacaggcaaattgacgccaggcttgcagaagttttggagcagaacaatgtcctttttgaagcggaaagagataagctggaaaaatgggctgaagacatgatctttgcggcggaagaagcattacgcgataccaaaatgcaaatcaagtcgttgaagcgagaagccaggctggcgcaatcgatcgaagaacaaaagcaaaaccaggaaaagcttaagctcctggaacggcagcagaagcgccaacgtatggaaatttttgacattgaagatgagatcgccgacaagcgggatgaactcatcagtgcccttgaagagcggatgaagcaaaagacggatatcaccgagctgtttaccatccgctggaaagttatttaa

SEQ ID NO: 24218 - DNA, 1167 bp, Escherichia coli
atgactcagcaataccctatccctttgctattgtttgtttccattgacaacaaaagagaaatccttgatggaatgcaaaaactagaagctttaatgagttttattgagcagcgattttcattaaatggtaaatactttaatttagatgccattgcattaacaaaacaactaaaagacagtggtaaacttcaacaaaaagagccagtgctatcccgcgaaagttctacattaattgctcgctatagatttgctatatctgaatactcttcaacagaggaccacattgacgaagtgtttcgacgcataaattccaatggtaaaattttatcaaaacaagaactacgaagtgcggggtgcgttagtaatttttcagagttagtaaggaaaatatcgacaattataagaggagatactacacatagcgatataatgggactgaataaaatacataacatatcaatttgcaatgatggactcgattatggaataaatatagacaatcatttctatattagaaatcatatcattagtaggcctagcattagagactctgacgatgaagagttagttgcaaatatcttgggctatatatttttagatgataagccaacatcaggatcaacatcgctcgatacattttacggtgaaggttcgacgagtcatgcaatccatacacgaactcaattagagaattacattcagacaaatggtgcagataaaattgtcaataattacctcttcgtttatgagatgattcaaaaattatttgatgcaaataatttgaactttagatcacacattctgggcaatgcatcttcatctcaagaatgtcctcgttactatcaagctgtttttcttgctttgtatgaattaatcataaatgaaaacatgcaacttgacgatgaacagaaatttatcgctcagttaggagacagtgtacaacgttcaatggtgcaaaccgaagggggccgttgggcagctagcgctcgtcagaaaagtgtcgaagatttatgtgctttaatcagacgatattttaaagaatcagaaaataaatttatcaatcatgcttggcaaacactgataagaactctacttaataactcaagaacagaacaaccaaattatgattttaaacagggaggtgatgctgccaacttactgatttag

SEQ ID NO: 24219 - DNA, 507 bp, Escherichia coli
ttgaataaactggcatactggaacgctactggttctggtaagacactgctattacatgtcaatattttgcaatatttacattatttccagaacggtaatagccatcattacccggataaaatcatcctgcttacaccggatgaacgcctatcgaagcaacatttagatgaactggaaaactcaggatttacccaataccagttattcgataagagtaaatccgcgccatttaaaggcacgattgaagttattgatatcaataaacttgccgatgaaatgggtgacaaaactgttgccgttgaggcatttgaaggcaacaatctggtcttgattgatgaagggcataaaggcacaggaagtgctgctggtgcctggatgcgccgtcgtgacaaattaacgcgtgacggatttgcgtttgaatattcagcaacttttggccaggcagtggccggtggcaataatgttgaggcagttgtttcaaaaagcagctttgcttttttcttctga

SEQ ID NO: 24220 - DNA, 381 bp, Escherichia coli
  misc_feature (365)..(374): n is a, c, g, or t
atggctaaaaaaccgaccaccggtaaagcagttaaaaaagagactaacagcaagctgagctttcataagcagttggttttaaaccgctttatgttccatttttttaaagatggcacattgcaaggtttgaagaatcggttaggcgaggatcgctttgaaggcatccatgaagatggccaaagcttattcttccatgagctgagtaactatttattcgaggtcgatcttatcgatctcgatgaactgcgtcgttacgatctcaatatcgtgcagcactggcagcagataaccgagcaccgtaatcgtaaagaagacacagtgctgaacatgaaatattttcagtacttgtcgcttctgtttaccgnnnnnnnnnnaccgtaa

SEQ ID NO: 24221 - DNA, 792 bp, Escherichia coli
atgatgtttcttgaaaatggcgagaatgagataagcttggaaattggtgcgttagggtggttttcaagagaaaacattagcgatcaagaacgttcacatttcaacacacaatctggctgtaaagtagatttagtacgaacagataaacaaagccaagtaaatctagcatcaataaatgtaataatcaacaaagatggtattcctgaagttaactcaaacgataagagttcgattatacggaagaaggtacttgcagaacaagcaataccaggccatatagaacctaaattttattgggaaaaatattacccaccccagatgatggtttatcaatttacaaaaaaaatcaacataagcggcataccagaatggcagtggatacacgcgacccaatttaatggcagcgatgagcaaatgcaaaaattacgtgcggcatatataaaaatggctgatgtcattaataatagagatcgagaaaaattaaaaaaaatcagccaaatagctcttaaggcatggtctacaaccacaggggatagtgaggatgatatactactatcactctaccctaaagataaattagagggaggcatagctaaaatcgatcctataaaatgggataattatgaagttagagtcatgaataatggaagaatggttcagctatataataaatctgagccaagatattctcctttaacataccattatgttaacaaaaaaggtaacaatgctataaactacttcgcaccaatattttctttaattaatggggaatttgtgcccgttatttaa

SEQ ID NO: 24222 - DNA, 189 bp, Escherichia coli
atgaatttaatattctctaaatattctgtattttttattcttttcgctttttttgcttttccgccctcagggcaggccaatgattcagttgttgttacatttactgggattttgttggcaaaaagctgtgacattactaccggaagtaaagatcagtcggtaaaaatgggcacttatgattacgattaa

SEQ ID NO: 24223 - DNA, 411 bp, Escherichia coli
gtgaatatttcaagccagctgaataccctggtgacggatctttctgctatcagcaactccttcagtgcggatcaggctgacaccactggcaccgcaggcgtttctggcggtactgagctgactgcgtctggctcggctaaccagatgatcaccagcatttctaccgcgatggatgatgtttcgcagatccaatccaagctgggtgcgtctattaaccgtctgaacgacactgccaacaacctgaccagcatgcaggacaacaccgaagtcgctatcggtaacattatggataccgactacgcgacggaagcgtccaatatgaccaaacaacaggtgctgatgcagaccggtatcaccatgctgaaacagtccaacagcatgtccagcatggtttccagcctgctgcagtaa

SEQ ID NO: 24224 - DNA, 252 bp, Escherichia coli
atggctatccctgcatttggtttaggcactttccgtctgaaagacgacgttgttatttcatctgtgaaaacggcgcttgaacttgattatcgcgcaattgataccgcacaaatctatgataacgaagccgcagtaggtcaggcgattgcagaaagtggcgtgccacgtcatgaactctacatcaccactaaaatctggattgaaaatctcagcaaagacaaattgatcccgagtcttgtcaacgacggatga

SEQ ID NO: 24225 - DNA, 378 bp, Escherichia coli
atgaacttaaatgaaatctctaaagaaatcgaaaaattaaaataccatattagaattcttggggagtctatcgattaccacaatcatcctgttgagtcactaattttgtcaatggattgggatgaaaaagatattaatcgcgcccatgatatatttgaaaaatatgacgagaagataaacagtgatgaagaagtagaatggtatgattttgaaaatgaattaaaagacgaattcagcattggataccaaacagtaaaacaaattgtccttgcattttacaacaaccaccagtggacggatgtttgttatcagtatgcgatgagtttcgaacctaacactcctgttgagttccatcaaattactcgccacaataaatga

SEQ ID NO: 24226 - DNA, 792 bp, Escherichia coli
atgaatagtaacctgaccaggatatgttaccgtggtgagactggagaaagtgatctcagaacgttgatccttggcgagatcttatatatctcattgagagacgtgttagtcacgctgaataaagaaaacagagaaataaacgctgactacactgtaaaatcgatggcggggataatcagagcacaattacaggctcttgaccctgatgagtatattaccacggatgctgaaaatagtgtttttgaaggtcagaaagagatcttcgtcacccaaccaggtttgtatcgagtcatgtcgagtgaccgaagcgcggctggtaagcgctttcagaagtggttattccatgaagtcataccgtcgttgactaaatatggggtatacccacctccgccagaagctaaaggatcagccttcgcgcaaatggctgagatattggcccaaaactcacgagcacttgctgatgcaattcataatcatgaaaaattggtagaagatgtatcacgagttaaaggtaaagttgccaacgttgaaaaccgtctgaaactgttagaatcaagtccttccactataactgaagatatgcaatcccttgatgagcgacttgctttccttgatatgagaatggaagaaaagcatttcaccgagacattagcttggtgtgaaaatctttcagttcaaaaaaacaggaaggtgattcgcaaggattgtagagagaattcactctttacaatacagactatcgacgaagtgatagcgataatgactgaaagcggaaaaataaaaacaaattga

SEQ ID NO: 24227 - DNA, 1131 bp, Escherichia coli
atggcgcgcccgcgaaaatataaaaccgatgttccgggattatctccgtattttgacaaaagaaataacaaagtttactggcgttacaggcatcccataacaggcaaaaatcacggtctcggcagtattgaccagaaactggcagaaactattgcagcagaagcgaacagccgtcttgcccggcagcaaatggaacaaatgctcagtctgcaggagaaaattattagtgataccggcggttcatcaaccgttaccatttttctgaataattacagaaaaattcaacaggaaagatatgaaaacggcgagatcaaactcaacacgctgaaacagaaagcggcccctctcagggtatttgatgaacgttttggcaccagaccgttagatgccataaccgtaaaagatgtggtatcagtactggaagagtacaaggccagaggacataacagaatgggacaaattttcaggaaagtactgatcgatgttttccgggaagctcagcaaacgggcgatgtcccgccaggctttaaccctgcagaatcggcaaaaaaaccgcaggtgcggatatcaagacagcgactgacttttgatgagtggatgatgatttataacgcagcggaaaaggatggttactttttacagcgcggtatgctgctggcactgatgacaggccagcgcctttcagatatttgcaaaatgcaattttcggatatccgggatggttatcttcatgtcgaacagcaaaaaacaggaacccggattgccatccctctggctctgcgttgcgataaattaaatctcaccctggatgatgtagtgtcatcctgccgcgattgcgttcttagtccgtggctattgcaccaccatcacgcgaaagggacagctaagcgcggcgggatggttaagccagcaacattaaccgttgcatttaaaaaagcccgggattctgtggattacaactggcgtgctaatggcaccccaccctctttccatgagcagagatctttatcagagcgattgttcagagagcagggggttgataccaaaattttgctgggccattcgaatcaaaaaatgaccgatatttacaacgacgcacgcggtaaggaatggaaaaaactggtcatttga

SEQ ID NO: 24228 - DNA, 924 bp, Escherichia coli
atgagtgttttatatccgttaattcaggcgctggtgttatttgccgttgcgccgctgctctccggtataacccgcgtggcgcgcgcccgcttgcataaccgtcgcgggccgggcgtgttgcaggagtatcgcgacattatcaaactgctgggccgccagagcgttggcccggatgcctccggctgggtgttccgcctgacgccgtatgtgatggtgggcgtcatgctgactatcgctactgcgctgccggtggtgaccgttggttctccgctgccgcagctgggcgatttgatcactttactgtatctctttgccatcgcgcgtttcttctttgccatttctggtctggataccggtagcccgtttaccgctatcggcgcgagccgtgaagcgatgcttggcgtgctggttgaaccgatgctgctgcttggtctgtgggtcgccgcacaggttgccggttccaccaacatcagcaacatcaccgacaccgtttatcactggccgctgagccagagcattccgctggtgctggcgctttgtgcctgtgcattcgccacctttatcgaaatgggcaaactgccgttcgacctggcggaagccgagcaggagttgcaggaaggtccgctctctgagtatagcggcagcggctttggcgtcatgaaatggggtatcagcctgaaacagctggtggtgttgcagatgttcgtcggggtgtttattccgtggggacaaatggaaaccttcaccgtcggtgggctgctgctggcgctggtgattgccatcgtcaaactggtggttggcgtcctggttatcgcgctgttcgaaaacagcatggcccgtctgcgtcttgatattactccgcgcattacctgggctgggtttggctttgcatttttagcgttcgtctccttgctggcggcgtga

SEQ ID NO: 24229 - DNA, 1827 bp, Escherichia coli
atgagcgcaatttccctgatcaatagtggcgtggcgtggtttgccgccgccgctgttctggcatttctcttttcttttcaaaaggcgctaagcggctggatagccggaattggcggcgcggtgggtagcctgtatacggcagccgcgggcttcactgtgctgactggtgcggttggcgtgagcggtgcgctgtcgctggtaagctacgatgtgcaaatctctccgcttaacgcgatttggctgattacgctcggcctgtgcggtctgtttgtcagcctctacaacattgactggcatcgccacgcgcaggtgaaatgcaacggcttgcagatcaatatgttgatggctgccgccgtctgtgccgtcatcgccagcaacctcggcatgttcgtggtaatggccgaaatcatggccctgtgtgcggtgttcctcaccagcaacagcaaagagggcaaactgtggtttgcgctggggcgtcttggcactctgctgctggcgattgcctgctggctgctgtggcagcgttacggcacgctggatctgcgcctgctggatatgcgtatgcaacagctgccgctcggttccgatatctggctgctcggtgtgattggctttggcctgctggccgggattattccgctgcacggctgggtgccgcaggcacatgctaacgcctctgcgccagctgccgcgttgttttctacggtagtcatgaaaattggcctgctgggcattttaaccctgtcgctgctgggcggtaatgcaccgctgtggtgggggatcgcgctgctggtgctcggcatgatcaccgcgttcgtcggtggtctgtatgcgttgatggaacacaacatccagcgcctgctggcttaccacaccctggagaatatcggcattatcctgctggggctgggcgctggcgtaacgggtatcgcgctcgaacaaccggcgctgattgctcttggcctggtcggtggtctgtaccatctgcttaaccatagcctgttcaaaagcgtactgttcctcggggcggggagcgtctggttccgtaccggtcatcgcgatatcgaaaaactcggtggtattggcaagaaaatgccggttatctccatcgccatgttagtcgggctgatggcaatggctgcgttgccgccgctgaacgggtttgccggggaatgggttatctatcaatccttcttcaaactgagcaatagtggcgcgtttgttgcccgtctgctggggccgctgctcgcagtgggtctggcaattaccggtgcgctggcggtgatgtgtatggcgaaagtctatggcgtcacgttcctcggcgcgccgcgtaccaaagaagccgaaaacgccaccagtgcgccgctcctgatgagcgtaagcgtggtggcactggcgatttgctgcgtaattggcggtgttgctgcgccgtggctgctgccgatgctctctgctgctgtacctctgccgctggagcctgctaacaccaccgtttctcaacccatgatcacgttgctgctgattgcctgcccgctgctgccattcatcattatggcgatttgcaaaggcgatcgtttgccgtcgcgttcccgcggcgcggcctgggtgtgcggctacgaccatgaaaaatcaatggtgattactgctcacggttttgccatgccggtgaaacaggcgtttgcgccggtgctgaaactgcgcaaatggctgaatccggtgtcgctggtaccgggctggcagtgcgaggggagtgcgttgctgttccgccggatggcgctggttgaactggcggtactggtggtgattattgtttcacgaggagcctga

SEQ ID NO: 24230 - DNA, 360 bp, Escherichia coli
atgaataagcacacactattactgactgctctttttctgaatttgatttgtactcccgtttttgctcaaaactggcaggtggcgacgtttggtcagtctacggacctcaacttttcatcgctgataaattcggccaagattggacggaataatgcctggcttgcgggaaacaataattttcttgaagcaggaaaattttacactttaccaacagatttttttattgaaagtcgtgggggaaaaattgctaactcccatgacggtatgaccgtcttttatactattgttccggttactcagacattccgactggaggctgatttgacattagaacagattggtccggaggtgaatggataa

SEQ ID NO: 24231 - DNA, 651 bp, Escherichia coli
atggacaaaatttatcgaaattttattcataggtgcagcgtatatcaaggcaaagttgatattcttcgttttaataggattgaatatgatgagtggacacatgccaaattgactgaagggttgatgtctgatttatggcaaaattggtgtctattctgtagaaatctcatccataaatcttgtagaggtgcagtttgtgctgatactaccgttttcggcccaagagtgacccagtatggaaactcctggcaacgacttggatatgaagcaaaaaatataaacggcacaataaaaaataatggacataacagttttcttatcagatatgaaccaacatggggagatattgacaagatagtaaatataatcacccatcttaatcctaaaaataagaattgtttgttagctgcatttggtatggggcttaaggatattaactacctacaacttgcaagaaatgcatgtgcacataaaaacgtcgagacaattgaggagctgattaacaaaacaaagcttttttatgacgtaactactttaaaaaaacccagtgatttcgcatggtctcttaaaaaggggactcatagttttgcattctatacttggttatgtgaaatgagaatcattgctaaaaatgccatattgacttgttaa

SEQ ID NO: 24232 - DNA, 1053 bp, Escherichia coli
atgaatacaaatgtagggcagatcacattaattgatctaatttcaatgcttgagagaaaagaactaataattaacaaggattatcagcgcggaaatggaatatggccaccatttgcaaagagttatttcatagacactattctagaaaattatcctttccccaaaatatatttatatcaagcatttgacaggacaaacgaaaggccaattaaagaaattgttgatggccagcaacgagtaacaactctcgttgatttttataaaaacaaatttgcacttacttcggcatcgaagaagtattctggcatgtattttaatgatttgcccgatgatgcaaaaagatgttttattagttatcaagttgaaacatccacagtttattcagcaagcagggctgaattactcgaaatgtttagacgaatgaatgcttatacatctccactaacatcagcagaaaaacggcatgctacttttcaaggtgcatttaagtggtatatcgttgaaaaagcagatacccacgctgagcttttagagatttataatatattgtcacccaaaatattagccagaatgggtgatgcagaatttatctcagatatggcaatactcattgatagagggctttgttcaaagtcggcacctgcaaccgaagctatttataaaaaatacgatgatgattttcctttagagaatatctataacgagagaattgattatttcttcaatttattggcggaagatttttccgaattacgtaattcatttatgatgaaatcgtatgttgttcactcattattttgtgctattaccgcattaaaatttggtttccccggaagtgatgaacttgaaaatgaactcggtttcacggctaacccaaactttgatgtaaatccttcccgtgtaattccgattctcttagagatggctgatgcccatgaaattcaggacgaagatggcccttatgcggcctatgtaacaagttgtttatcatcaacaaccaagctaccacaacgaaccacgcgcacaaaagaactgattaaagcattcttatga

SEQ ID NO: 24233 - DNA, 1131 bp, Escherichia coli
atggcagccagaccacgtaaaaataatgtttcagtcccgaacttgtatccactttatagtagaaaagtaaataaagtctattggcgatataaacatccagtgaccgggaagtttcattctttaggcacaaacgaagctgaagccattgctattgccactgaggcaaattcacgcctggctgagcaaagaacccggcagattctggctatcagtgacaggatcgcaaccagcaaaggaaaagcaatcacaacgtcaacctggttagatcgctatcaagcaatccaggatgacagactggaaagtggcgatataaagctcaacacctataaacagaaagccaaaccagtatccttgctcagggaacgagcaggaatgaaattaatttcatcagttgatgtaagggatatagcgcaattgcttgacgagtatatcactgccgggcaaccgaggatggcgcaagtagtccgctccgttctaattgatgtattcaaggaggcacaacactatggggaagtccctccgggctataatccagcacaggcaaccaaacaacccagaagaaaaattacccgacaacggttaagtcttgaagaatggcaaaaaatctttgatatcgcagatgccagtcatcgttatatggggaatgccatgctgttagcactggttaccggccagaggttaggtgatatctcgcgtatgaaatttagcgatatttgggatgatcatctccatgtcatccaggaaaaaaccgggagcaaaatcgccatcccgctttctcttcgtctcaacgcgattaactggagtttacgcgatgtagtcgcccgctgccgtgactatgcagtcagcccataccttgtgcatttttttcgtaccacttcacaggctgaacgtggcgcgcaggttaaatccaatacattgacgacgaattttagtagagcgagagatttggcagaaattgactggggtaatggctcaccagcaacattccatgaacaaaggtctttatctgaacgtctgtacaaagaacagggggtagacacacaaaaactacttggccataaaacgcaacaacaaaccgatcgttatcatgatgatcggggaaaagattggatgtatatccaccagttttaa

SEQ ID NO: 24234 - DNA, 537 bp, Escherichia coli
atgtcatttattaaaactttttccgggaagcatttttattatggcaggataaataaagacgacatcgatattaacgatatcgcggtttccctttcaaatatctgtcgctttgccggtcatctttcgcacttctacagcgtcgcccaacatgcggttctttgcagccagctggtgccgcaggaatttgcttttgaagcgttaatgcatgatgcaacagaagcgtattgccaggacattcccgcaccactgaaacgccttcttcctgactataaacggatggaagaaaaaatagacgccgtaatccgtgagaaatacgggttacctcaggctatgagcacgcccgtgaaatatgccgatctcatcatgctggcaaccgaacgccgcgatctcgggcttgatgatggctctttctggccagtattggaaggtatcccagcaacagagatgttcgaagttattcctctggctcctggccatgcctacgagatatttatggaacgttttaaagagctgcataagatacataagcaatcctga

SEQ ID NO: 24235 - DNA, 543 bp, Escherichia coli
atgatgtttcaagccttccaaacagcagtatttaaaaatgttgcagagtatttaaaagggcgcttccctcataagtcgttagggctcgtatatgccgacgagctggtactaaaagatatggagttcctcaaggctaacaataaactgcggtgggatcccggactaaagtcgcgagtgtttatggatatgatggaagaacacccgataaaactagttgtttattatcgtggggagcctattggatttgcatttgggtgttactgtaagccgaaaaatgcggtgcatatttgctggatggaaaaacgtaatgatgcacatgaagacctagaccatcagatgcttggtatcgttttggattgcttctctgcatatgcacgatttctgaaccttcagggtgaatctattgattcgatagctttagttagtccagttgatggggcaataagatactatactgaaagtggttttgagtacattgctgattacgaacgaggtggttgcgcaatggtgcttaggagcgttttacctaaccaatcagtgtga

SEQ ID NO: 24236 - DNA, 186 bp, Escherichia coli
atgaaacatcatgagcagatagagattgaggcagctaaagtcgtcgccgaactctttgctggcaatgcatctccaatggaaacctttggtattacatggagtcaaactcagatgttagagcgtaagaatcctggtgtagtgatcaaactagtaccggatgacggtaaaaaacttgcgtattgctga

SEQ ID NO: 24237 - DNA, 393 bp, Escherichia coli
atgaaacttcgctataagctggttatttctgctttcctcctgactttattcggttctctcgtctggtcagctaaccactaccacagcaaataccagcgcgaaaagaaacgtgctgatgaggctgtacaaaatgccgaatcggcaaccgctattaccaataacgtcctgcaatcactgcaaatcgtcaatacagttctggaggctaaccagcatgcaaaacagcagatcgcactggagtcacagagaacccaggctgatatcaaagtggctgttgcggatgatgattgtgctgtacgccctgtgcctgctgccgctgctgaccggttgtggaagtacgcgaacagtttacgtgagcattccgaagactccactaccagtcagcttgacttctga

SEQ ID NO: 24238 - DNA, 507 bp, Escherichia coli
atgagaccagatcaatttttctatccagatacttttacctttaattcatccacctattatggtcaacgtgactcatctaaaggccgattgtatattcctattgaaagtgacttatgcccatttaatatcggcgatatcattgtgcaaaaaatggtcgacagggaaagactatttgaagtgcttgattacgaggtgcaaattagtctcgaggttggttgccctggctactcacatttggcggtattgatagtgaaggcattggatgtaaaagagaagccgaagcagattacgacccatttgacgtttaacggtgctattaatgctggtggtgattttcaagccggtaatgataattcgatcacaaagaatataaccattcaacaactacatgatgctatagagcattgcaatgatccagaggttaaaagcctttggcaaaagctattggaaaatccgacgtttgcttcaattgcttcaatattggcaaaaagtgctttaggacagtaa

SEQ ID NO: 24239 - DNA, 1251 bp, Escherichia coli; identical to SEQ ID NO: 9859

SEQ ID NO: 24240 - DNA, 348 bp, Escherichia coli; identical to SEQ ID NO: 9886

SEQ ID NO: 24241 - DNA, 183 bp, Escherichia coli; identical to SEQ ID NO: 5345

SEQ ID NO: 24242 - DNA, 396 bp, Escherichia coli
atgacgaaagatgaactgattgcccgtctccggtcgctgggtgagcaactgaaccgtgatgtcagcctgacggggacgaaagaagaactggcgctccgtgtggcagagctggaagaagagcttgatgacacggatgaaactgccggtcaggacacccctctcagccgggaaaatgtgctgaccgggcatgaaaatgaggtggtatcagcgcagccggataccgtgattgatacggctgaactggtcacggtcgtggcactggtgacgctgcatactgatgcgcttcacgccacgcgggataaacctgtggcatttgtgctgccgggaacggcgtttcgtgtctctgccggtgtggcagccgaaatgacagaacgtggcctggccagaatgcaataa

SEQ ID NO: 24243 - DNA, 312 bp, Escherichia coli; identical to SEQ ID NO: 12825

SEQ ID NO: 24244 - DNA, 249 bp, Escherichia coli
atgacacagggctggcgggaggataaatgcccgtctgtccgcgccgggaaaagaccgcgcgccggtggcgctgaaaggggccgcgctcacgcgccgcccctttcattacgcggacgttctgatgggggcttctgtcttttcagacctgtcatttgtctgttactgatgatgttgttgttcctgctactgctactgctactgctactgctactgctactgctactgctcttctttttcctgccgctctga

SEQ ID NO: 24245 - DNA, 462 bp, Escherichia coli
atgtctttggcacttcatggaaagtatgaacttgaacttgctgctcaaaaagcattagagcttttacattatgtatcagacataaccaatgtcgatggaaaaattttagctattatgggactgataactggtctgtctggacaagcaaaagtatctcatatcttatttgaacaggctaagatacacacaactgatatagcctctctctactactatagagcacttgtcaattttcataatgaaagaattgaagaggcaaggatttgtatagacaaatcactacaactcgaacccagaagacgaaaagcagttgtgataaaagagtgtgtagatatgtatgtgcctaacccgctcaaaagcaacatgaaactctactataaagaaacttcgagtgaaagccatcgagttataattgacaacattttgaaactaaagcaactgacgagaatttgtatgcgataa

SEQ ID NO: 24246 - DNA, 660 bp, Escherichia coli
  misc_feature (641)..(650): n is a, c, g, or t
atggacttagaaaataaattctcatatcattttctcgagggattaacgctcacggaagatggaattcttactcaaggaaatgagcagatttatattccaccgaaagagttaggagtattgatcgtattacttgaatccgctggtcatgttgtcctgaaagatatgatcatcgaatcagtatggaaaaatattattgtaagtgacgagtccctgacaagatgtatctattctttgcgctgcatttttgaaaaaattggctatgatcgttgcatagaaacaatctaccggaaaggttatcgtttcagtggacaggttttcaaaactaaaataaatgaagataacacttcagactattccatagctatatttcctttcaccacttcattgaatactctggatccattaatacttaatcaggaattagtgcaaaacatttcgaataaaaaaatcgatggcctttatacctatccgatggctgcgacaaatttttgtaatgatcacatatcgcaaaattcatttttgagaagattcaagccagattatttcgttacaggaagaataaaccagaataacgcggtgaaaactttatacattgaactgatcgacgctaaaaatcttttcctcatcgccagtaatcatcnnnnnnnnnnaactacataa

SEQ ID NO: 24247 - DNA, 294 bp, Escherichia coli; identical to SEQ ID NO: 4105

SEQ ID NO: 24248 - DNA, 618 bp, Escherichia coli
atgtacaatcatttatctgtatgtctggcgcataatattaatgagtattttggtatacaagaaaccaaatatattcttgatcaattagagatgaagtatcctgatctattaaaagaaatattaagatatataaccgtgcagcgcatttcagaggtaattcagcgtctgatccaggagcgaatttcagtgcgcaatatgcgtttagttatggaggctttagcattatggagtccacgggagaaagatataattacactcgtcgagcatgtacgaggtgcattaggtcgctacatttgccataagttttcatattctggagaaattaaagcaattgtgatttcgcctgaaatagaggacagaatcagagatggtgtcaggcctaccgctggcggtacttttcttaatctcgatgcatccgaagctgagatgattctggataattttaaactggcactttctggaatcaatattcctattaaagacattattttactgggatctgtggatattcgtcgttttatcaaaaaacttattgaatctagttatcgagacctcgaagtactttcgtacggggaactaacggaaaatgttcccgttaatattctgaaaactatttag

SEQ ID NO: 24249 - DNA, 744 bp, Escherichia coli
atgacacagacagaatcagcgattctggcgcacgcccggcgatgtgcgccagcggagtcgtgcggcttcgtggtaagcacgccggagggggaaagatatttcccctgcgtgaatatctccggtgagccggaggcgtatttccgtatgtcgccggaagactggctgcaggcagaaatgcagggtgagattgtggcgctggtccacagccaccccggtggtctgccctggctgagtgaggccgaccggcggctgcaggtgcagagtgatttgccgtggtggctggtctgccgggggacgattcataagttccgctgtgtgccgcatcttaccgggcggcgctttgagcacggtgtgacggactgttacaccctgttccgggatgcttatcatctggcggggattgagatgccggactttcatcgtgaggatgactggtggcgtaacggccagaatctctatctggataatctggaggcgacggggctgtatcaggtgccgttgtcagcggcacagccgggcgatgtgctgctgtgctgttttggttcatcggtgccgaatcacgccgcaatttactgcggcgacggcgagctgctgcaccatattcctgaacaactgagcaaacgagagaggtacaccgacaaatggcagcgacgcacacactccctctggcgtcaccgggcatggcgcgcatctgcctttacgggaatttacaacgatttggtcgccgcatcgaccttcgtgtga

SEQ ID NO: 24250 - DNA, 483 bp, Escherichia coli; identical to SEQ ID NO: 18848

SEQ ID NO: 24251 - DNA, 312 bp, Escherichia coli
atggtctctctgaccattgtggcgacgctgaaagcggtaggtatcattctctccatttctctgctcattgcgcctggcgccattgcggtactcctgacacaacgctttcatattgcgctcctactggcgattggcatatcggtaatagtgtcaatgactggtgtctggttgtccttttttatcgacagtgcaccagctccgacgattgtcgtcttattcgcggttgtgttcatcatgacgttcaccgttaccagcatcaacgcacgcacaaagggaaacacccatacacaggatttgtcatcacccaattag

SEQ ID NO: 24252 - DNA, 222 bp, Escherichia coli
atgaaaatcatcacccgtggtgaagccatgcgtattcaccgtcagcatcctgcatcccgtctttttccgttctgtaccggtaaataccgctggcacggtagcacggatacatataccggccgtgaagtgcaggatattcccggtgtgctggctgtgtttgcagaatgccgtaaggacagttttggtccgtatgtccggctgatgagcgtcaccctgaactga

SEQ ID NO: 24253 - DNA, 186 bp, Escherichia coli; identical to SEQ ID NO: 10006

SEQ ID NO: 24254 - DNA, 1479 bp, Escherichia coli
atggcacaagtcattaatacaaacagcctgtcgctgttgacccagaataacctgaataaatctcagtcttctcttagctctgctattgagcgtctctcttctggcctgcgtattaacagtgctaaagatgacgcagcaggtcaggcgattgctaaccgttttacggcaaatattaaaggtctgacccaggcttcccgtaacgcgaatgatggtatttctgttgcgcagactactgaaggtgcgctgaatgaaattaacaacaacctgcagcgtgtacgtgaactgactgttcaggcaactaacggtactaactctgatagcgatctttcttctattcaggcagaaattactcaacgtctggaagaaattgaccgtgtatctgagcaaactcagtttaacggcgtgaaagtccttgccgaaaataatgaaatgaaaattcaggttggtgctaatgatggggaaaccatcactatcaatctggcaaaaattgatgcgaaaactctcggcctggacggctttaatatcgatggcgcgcagaaagcaactggcagtgacctgatttctaaatttaaagcgacaggtactgataactatgatgttggcggtgatgcttataccgttaacgtagatagcggtgcagtcaaggataaagataataaagatgtttttgttagcgctgccgatggttcgctgaccaccagtagtgatacgaaagttgatggtaaaagtattgatgcaacagagcttgcgaaacttgcaataaacttggctgaccagaaatccattgactacaaaggtattacatttactaacaagagtggtactgcatttgatgctaatggtaaaggcgttttgactgcaaatattgatggtcaagatgtaaaatttactattaacagtacagccgccacgggtgccgacgcaacaataactacagacatagatgtttacaaaaatagcgcgggccagttcactactacaaaagtggaaaataaagccgcaacactctctgatctggatctaaatgctgccaagaaaacaggtagtactttagttgtaaatggcgccacctacaatgtcagtgcagatggtaaaacggtaactgatactactcctggtgcccctaaagtgatgtatctgagcaaatcagaaggtggtagcccgattctggtaaacgaagatgcagcaaaatcgttgcaatctaccaccaacccgctcgaaactatcgacaaagcattggctaaagttgacaatctgcgttctgacctcggtgcagtacaaaaccgtttcgactctgctatcaccaaccttggcaacaccgtaaacaacctgtcttctgcccgtagccgtatcgaagatgctgactacgcgaccgaagtgtctaacatgtctcgtgcgcagatcctgcaacaagcgggtacctctgttctggcgcaggctaaccagaccacgcagaacgtactgtctctgctgcgttaa

SEQ ID NO: 24255 - DNA, 1272 bp, Escherichia coli
atgtcactgactgatattaaagcaaaaaatgccaaaccccttgagaaggaatacaagcttactgatggctttggtatgttccttcgcgttaccccgaagggttccaaatactggcaaatggcctaccgttttgaagggaagcaaaaactcttctctattggtgtttaccctgctgtttctctttctgacgcaagacaacgccgtgatgaagccagaaggcttcttgctcagggcattgaccctaatgccaagaaacaggcagaagttaaagagctaaaagctaaacgtgataaaacacgctctttcagcgtagtcgctaaagcttggttctccacgaaaacaaaatggtctaaagattatggtgattccgtatggaagcgccttgaaacctatgtcttcccgacaattggcgataaagatgttgccgaactggatacgggtgatctgctggttccagtgaaaaaggttgaggcacttggctatcttgaagttgccatgcgcattcaacaatacattactgcgatcctgcgtcatgctgttcagcagaaacttatacgtcataacccggcctatgatatggaaggtgctattcagaaaccgcagactgaacaccgccctgcactggaactggaagaaataccccaactactgaaaaaaattgccgaatacaaaggccgcaggttaaccatactggcaatacagctcaatctgatgattttcattcgttccagtgagctgcgtttcgctcgctggtcagaaattgatttcaaaagtaagttatgggtgatacccgaacagcgtgaagcgattgaaaacgtcaaacattcaactcgtggggctaaaatgaagcgtaagcacttcgttcccctttgtaagcaggccatgaagatactcaaagagatccgacaactgacttatgaagaaggccatgatgatggattaatctttactggctgttatgactcgtttaagcccatgagcgaaaataccatcaacaaagcccttcgcaatatgggctatgacacgaagcaggacatctgtgggcacggttttcgcacgctggcctgtagtgccttaattgagtcaggtttgtggtcagaagacgctgtagagcttcagatgagtcataaggaaagcaacagcgtccgtgctgcttatacccataaggctaaacaccttgaccagcgccgactgatgctccagtggtgggctgacttccttgatgccaatcgaaacgatatggtcaggccgtttgagtttgcccaaaggtga

SEQ ID NO: 24256 - DNA, 471 bp, Escherichia coli
ttgctgggaattcaggcgaagttctttatcaagatgttcacgaattgtacgcctaatcatatgacgctggatgagcatcgggtcaatatcacccacgacatcaccaacttgcatatagtaggtattagaaggcgtttccagcgtcagataaccgtctttgcccgtgcggatctcgcttatcctgtatccctgataaatatcacgccccgtttcgtcatcaagtgccgtaccgtcatacacggtaatctcagaacgattcacgcccccttttttatcggctatatcaacaataacagtcgcgctaatgctattcttcttactgttaatactgaccagttttacataggggctattgcttgcattctggacttcaagcccggcaacttcaatttgtttgaccagtttctgattgtaagcatcaatggcatcgaggcgatacaccatatgatgtttatgcacatgtgtcgctga

SEQ ID NO: 24257 - DNA, 231 bp, Escherichia coli
atgcgccgctggatttcacaaaataatatctggctccctcgtggagccttttttatatctgccttatttttcttcaatgctgtatgtatagtaagcgataacctgttgattattgaatctttcggggagatggcttataacatttcttacctgaccagggtaccgggaaccaacaccttactggcgtgttgctgtcttttaagaccagaagaggttaacagtgaatattga

SEQ ID NO: 24258 - DNA, 549 bp, Escherichia coli; identical to SEQ ID NO: 10880

SEQ ID NO: 24259 - DNA, 1053 bp, Escherichia coli
atgacagatattgcgcagttgcttggcaaagacgccgacaaccttttacagcaccgttgtatgactattccttctgaccagctttatctccccggacatgactacgtagaccgcgtgatgattgacaataatcgcccgccagcggtgttacgtaatatgcagacgttgtacaacaccgggcgtctggctggcacgggatatctttctattctgccggttgaccagggcgttgagcactctgccggagcttcatttgccgctaacccgctctactttgacccgaaaaacattgttgaactggcgatcgaagcgggctgtaactgtgtggcgtcaacttacggcgtgctggcatcggtatcgcggcgttacgcgcatcgcattccattcctcgtcaaacttaatcacaacgagacgctaagttacccgaatacctacgatcaaacgctgtatgccagcgtggagcaggcgttcaacatgggcgcggtggcggttggtgcgactatctattttggctcggaagagtcacgtcgccagattgaagaaatttctgcggcttttgaacgtgcgcacgagctgggcatggtgacagtgctgtgggcctatttgcgtaactccgcctttaagaaagatggcgttgattaccatgtttccgccgacctgactggtcaggcgaaccatctggcggcaaccataggtgcagatatcgtcaaacaaaaaatggcggaaaataacggcggctataaagcgattaattacggttataccgacgatcgagtctacagcaaactgaccagtgaaaacccgattgacctggtgcgttatcagttagctaactgctatatgggccgggccgggttgataaactccggcggtgctgcaggcggtgaaactgacctcagcgatgcagtgcgtactgcggttatcaacaaacgcgcaggcggaatggggctgattcttggacgtaaggcgttcaagaaatcgatggctgacggcgtgaaactgattaacgccgtgcaggacgtttatctcgatagcaaaattactatcgcctga

SEQ ID NO: 24260 - DNA, 183 bp, Escherichia coli
gtgctaatcctgaaaagtgtatttcaactgaattacatctacgaaacccgaaaaccaggcattaaagagcaaattgttgaaatggttcataacggagccggggttcgcgatagctccagaacgctgaaggtggatatcaacaccgtcattctcactttaaaaaacgctcaccacgtaaagtaa

SEQ ID NO: 24261 - DNA, 489 bp, Escherichia coli
atggcagcaccaaagggcaaccgattttgggaggcccgcagtagtcatgggcgaaatcctaaattcgaatcgcctgaggcgctgtgggctgcttgttgtgaatacttcgagtgggctgatgataacccgctatgggagggtaaggtattttcatatcagggagaaataattaaggctaatgtccctaagatgcgagccatgactatttcaggattgtgcaccttccttgatatcaccaggcaaacatggggaaccttccggtcaatggaaggtttttctgacgtcacatcacgagcggaagacatcatctacgaccagaaattctctggcgcagccgctgaccttctcaacgctaacatcatcgcccgtgatttgggcctcaaagagcagtcgcaagttgaagacgtgacacctgataagggagatcgcgataagcgacgctctcgtatcaaggagctattcaaccgtggaactggacgcgattcttga

SEQ ID NO: 24262 - DNA, 186 bp, Escherichia coli
atgagtcgacgaagtagctttttggggtttgtaatattcctgtcctgcactggttacatcgtaatctggtcaatttcgaacattgaccgtggcggggaatatctcattgtaatgttctttcctttgtttcttgggtggtacgccgcaaggttgctggaagaatggggttacaggcataaaaaataa

SEQ ID NO: 24263 - DNA, 315 bp, Escherichia coli
atggacgaatcaagaaagcagtttgaggaatacgttgccaaaaaattgagattaccattcgagatgataaccgaggcaagaaatggtgataggtactttgcattttcaagcatggatattcgtcactccttaaatgagtggtgggctttatggcaggcatcgcgagcagctattgaaataatcgcgccaaagtttatcgacagcagagaagcattagccaaagggtttactgttgattattccaatggcttcggtgatgcaatggatgcttatgaggaaaacatccgcgccgctggaataaaagtgaaggagtga

SEQ ID NO: 24264 - DNA, 1071 bp, Escherichia coli
atgggaagaaggcgaagtcatgagcgccgggatttaccccctaacctttatataagaaacaatggatattactgctacagggacccaaggacgggtaaagagtttggattaggccgagacaggcgaatcgcaatcactgaagctatacaggccaacattgagttattttcaggacacaaacacaagcctctgacagcgagaatcaacagtgataattccgttacgttacattcatggcttgatcgctacgaaaaaatcctggccagcagaggaatcaagcagaagacactcataaattacatgagcaaaattaaagcaataaggaggggtctgcctgatgctccacttgaagacatcaccacaaaagaaattgcggcaatgctcaatggatacatagacgagggcaaggcggcgtcagccaagttaatcagatcaacactgagcgatgcattccgagaggctatagctgaaggccatataacaacaaacccggtcgctgccactcgcgcagcaaaatcagaggtaaggagatcaagacttacggctgacgaatacctgaaaatttatcaagcagcagaatcatcaccatgttggctcagacttgcaatggaactggctgttgttaccgggcaacgagttggtgatttatgcgaaatgaagtggtctgatattgtagatggatatctttatgtcgagcaaagcaaaacaggcgtaaaaattgccatcccaacagcattgcatgttgatgctctcggaatatcaatgaaggaaacacttgataaatgcaaagagattcttggcggagaaaccataattgcatctactcgtcgcgaaccgctttcatccggcacagtatcaaggtattttatgcgcgcacgaaaagcatcaggcctttccttcgaaggggatccgcctacctttcacgagttgcgcagtttgtctgcaagactctatgagaagcagataagcgataagtttgctcaacatcttctcgggcataagtcggacaccatggcatcacagtatcgtgatgacagaggcagggagtgggacaaaattgaaatcaaataa

SEQ ID NO: 24265 - DNA, 183 bp, Escherichia coli
atgctcaacttccctcaagatttagggtcaacatggatgagtggcggtatcgggcttgttgctggtgtcctgattcgctactgccttgttcggctattcgtggtcttcaggttgttcggtcgagaatggtcgtttgacctgaaagacagaagccgtgaagacaaccaccaagacccatcctaa

SEQ ID NO: 24266 - DNA, 384 bp, Escherichia coli
atgtcagtacgcaaaacaacaaagaacagcatcaagaattatctggctaactttgacagctacgagcaattaccgagcaagcttgacgacatttttatcggattttgcagaagtgaggggcacccaaaatacaacaagaaattattttatcttctaaagaatcttgatgaaattaactcagctaccgtgacaaatcatctccagcgtcaggcaaccaggttaagccatgagttaccaagcgatgcctattgcgcattacttgctgtgatgtgcgcaaagttaattggtatggtcgagcatcatattaccgttggtaatatcagtcttacaaccagtgagccagactttgaatttgacgtgtacgcacaagcagaaggattttaa

SEQ ID NO: 24267 - DNA, 330 bp, Escherichia coli
atgagagaattaaacttcccgctacagattttcgttgatagcgacaccgctacgatggtgcaaagcttcgttggttccggtgtgtcaattgactttgataaattgctggagctagtggctgataatgcggaaaacatctctgactttattcagtcggtagaaactggtgacccatgctttatgtttcctgtaacagattcgaacatgaaaagattgattatcgaacagacaaacaaacttagtgtcagcccggagcaatttctgaaaggtgctgtaacaattctgcatagcgacagtattttggcgacgaattctgtgagggttcactaa

SEQ ID NO: 24268 - DNA, 216 bp, Escherichia coli
atgattgatttgcaacagcgttatgaaactattaagtcggcttgtgaaaacttaaagttacaaaccaaaccaaagctacgaattggaaatcaacgtcgagttatcacctcacacaaaccaaaggtacgtaagattccttcatggtgcttagataaattaccatgtgacgcacagattttaggtgatgatgggatgtattcttacgtttaccattaa

SEQ ID NO: 24269 - DNA, 285 bp, Escherichia coli
atgaatcgctgggatttacttagtttgaaaaataatatatttatatgtttttgtattgtgtttgttaaggagtttggattgaaaagaaaactgatttgtgttatggctttttggggggcgttgctggctggttgtaatgagagtaataaaaaagaagttgagggttgtattgaaagaggtgtccaatattttatagagattggttcttaccctaaattaagtgatgggcgtgatgctgtaaaagttgctactgaacgttgtaatagaacaataacggctttctga

SEQ ID NO: 24270 - DNA, 1035 bp, Escherichia coli
atgagcaagaaaaaagggaaaacaccgcaacctgcggcaaaaaaaatgaccgccagcgccccgaaaatggaggcattcacctttggtgagccggtgccggtactcgaccgccgtgacattctggattacgtcgagtgcatcagtaacggcagatggtatgagccaccagtcagctttaccggtctggcaaaaagcctgcgtgctgccgtgcatcacagctcaccgatttacgtcaaacgtaacattctggcctcaacgtttatcccacacccgtggctttctcagcaggatttcagccgctttgtgctggattttctggtattcggtaatgcgtttctggaaaagcgttacagcaccaccggtaaggtcatcagactggaaacctcaccggcaaaatatacccgccgtggcgtggaggaggatgtttactggtgggtgccgtccttcaacgagccgacacctttcgcgcccggctccgtgtttcacctgctggagccggatattaatcaggagctgtacggtctgccggaatatctcagcgcccttaactctgcctggctgaatgagtcggccacgctgttccgccgcaagtattacgaaaacggcgcacatgccggatacatcatgtacgtcactgatgccgtgcaggatcgcaacgatatcgaaatgctccgcgaaaacatggtgaagtcgaaaggccgcaataactttaaaaacctgtttctctatgccccacagggaaaagccgacggcattaaaattatcccgctcagtgaagtggccacgaaggacgatttttttaatatcaaaaaagccagcgccgctgacctgctggacgcgcaccgcatcccctttcagttgatgggtggcaagccggaaaacgtcgggtcgctgggcgatattgagaaagtggcaaaggtctttgtccgcaatgaacttatcccgttacaggacaggattcgggaaataaacggctggctcggtcaggaggtcatccgctttaaaaactactcactggacactgacaacggctga

SEQ ID NO: 24271 - DNA, 492 bp, Escherichia coli
gtgctggcaccgccggtggtggccggaggtaaattcagaatacttgagcgtcaccagtggaaaggcatggactttgccactcaggcggaatccatccgcaaactcaccgaaaaatacaacgtcgaatacatcggaattgatgccaccggcctcggtgtcggcgtgttccagctcgtgcgctcgttctatcccgccgcacgcgatatccgctacacgccggaaatgaaaaccgcaatggtgctcaaggcaaaagacgtcatccgccgtggctgtctggaatatgacgtcagcgccaccgacatcaccagctcgttcatggctatccgcaagaccatgaccagcagcggacgcagcgccacctatgaggccagccgtagcgaggaagccagccacgccgacctcgcctgggcgaccatgcacgccctgttaaatgagccactcaccgccggtatcagcaccccgctgacatccaccattctggagttttactga

SEQ ID NO: 24272 - DNA, 528 bp, Escherichia coli
atgcagcatttaaaaaatattactgcgggtaatccaaaaactgttgcccaatatcaactgacaaaaaattttgatgttatctggttatggtccgaagagggaaaaaactggtatgaggaagtaagtaattttcaggaagacacgataaagattgtttacgacgagaataatataattgtcggcatcaccagagatgcttcaacgcttaaccctgaaggtttcagcgttgtcgaggttcctgatattacctccaaccgacgtgctgatgactcaggtaaatggatgtttaaggatggtgccgtgattaagcggatttatacggcagatgaacaggagcaacaggcagaatcacaaaaagcagctttactttccgaagcggaaagcgttattcagccactggaacgcgctgtcaggctgaatatggcgacggatgaggaatgcgcacgactggagtcatgggaacgctacagcgttctgatcagccgtgtggatcctgcaaatcctgaatggccggaaatgccgcaataa

SEQ ID NO: 24273 - DNA, 294 bp, Escherichia coli
gtgaaagaaaaatacaccgtgctgaaaagtgcgccgtacttcctcgaaatcctcgataaacgcgttaacaaaggtacgggtgtgaaatcactggccgacgtgttaggtattaaaccggaagaaatcatggcgattggcgatcaggaaaacgacatcgcaatgattgaatatgcaggcgtcggtgtggcgatggataacgctattccttcggtgaaagaagtggcgaactttgtcaccaaatccaaccttgaagatggcgtggcatttgctattgagaagtatgtgctgaattaa

SEQ ID NO: 24274 - DNA, 330 bp, Escherichia coli
atgaaaaatataaatgtgcctgaaatatcatttatctttgataatgataaaactgaagttttctcaagaatggcaatggataacttagctctttatgtggaaaacatgtttaagataatgggtgatcaatttgaacgtcatctttatgatgaaaaatatatgaatatggttatggatcatattatttatatcacaaaaccagacttcctcaagtgggtgagagacaataatgttggggaatgtgtttttttgattgatgaagttatggaagatttaaaatactcttatagagagttcaaaaaaatctatcctaaacttggcattaaataa

SEQ ID NO: 24275 - DNA, 180 bp, Escherichia coli
atgccatgctgcgttacgttcgttctgaacgtactgagtcggggtgtctataccggcacgcatatcgacgggtttcacggccatcatacgttatcagatgtcatcatggcgaagctccctgaatacatcagccagttgcgcggcccggcagcacagtcggataccaccgggcagatataa

SEQ ID NO: 24276 - DNA, 1356 bp, Escherichia coli
atggtggatttaatggtgaatgagcaacggtcgggtacggtggggaaaggtgtgcctgcggggtataagctgactgagatggagatgattcctgaggattgggttgtatccacgatattaaacctgacaaccaacataattgattatcgcggcagaactcccaaaaaacttggaatggattggggggatggggatatcgttgccctttctgctgctaatgttaaaaaaggatatatagatttatctactgaatgctactttggttccgaagaactatataagcgctggatgacatccggtcatccccaaaaaggggacatagctttcacaatggaagcccctctggggaatgcagcatctattcctgataacagaaaatatattcttagccagagaacaattcttttacaaatagatagagagaatttttctccatcactaatactccaaatcttattatcagagcgttttcaatcatatatttctgaaagcgcgactggttcaacggcccaagggattaaacgttcagttttagagaagttatacatatctataccgaaaagtatcgtagagcaaaaggctattgctaatgtattaaccaatgttgatagcttgattctatccctagaaaaattactctcaaaaaaacagtccatcaaaactgccacaatgcagcaactactgactggtaaaacccgtttgccacagtttgcgttgcgcaaagatggctctgctaagggatataaaaagagcgagttgggggagattcctgaagattggaattgtattaatcttggtgagctaggtaattgcattattgggttaacttacaaacctgaagatacatctgattatggtacattggtattacgctcatccaacattcaaaataatcacttagcttatgatgataacgtcttcgtcagcatagaaccacctgagcgcacaattgtgaaagaaggtgatatcttggtatgtgtaagaaatggcagtcgccaacttattggcaaatgcgcattaattgacaaaaatgcgcagggctcagcattcggtgcatttatgtcagtattccgaactgatatatatggatttacatttcaccaattccagtctgatattattcaaaagcaaatcgctgaagttatgggtgccactatcaatcagataactaacaaagatatgttgggctttaaaatcccattacctgaaaatacagaagaacaagccgccatcgccgccatcctctccgatatggacaaggaaatccaaatcctgcaacagcgtctggacaaaacccgccagcttaagcaagggatgatgcaggaactgttaaccgggaaaatccgcttaatatag

SEQ ID NO: 24277 - DNA, 303 bp, Escherichia coli
atgcacagcccgcacgaggcaatattcgcacaagaaatcaggttcggaaataacctgctctggcatgacggggagagtatcaatggtcaggctttcggtaaaatgcggcgggatgaggtcggcgtgggttgcagcagtacaatgtcgcccgcagagggtaagccacagcgcgggatcctcggtttctatcagggattcgacgaagtgggcgcagttgtcgaccaaggcggtgaaatccatagtgacattataaggaaacgaacaatagatcgagtaaatcgcagtcagggacaaggattatag

SEQ ID NO: 24278 - DNA, 831 bp, Escherichia coli
ttgaaagttattagcttaatcaatatgaaaggtggcgttggtaagtcaacattggctaccaatattgctaatcatctttcagataaacttgggcaaaaaatattattaatagatatcgacccacaatttaacgcaacgcaatgtgtaatggatacaagcaaatatgttgcacatatgaaaagcggaggcgatagcatatgtgatattttttatagttcaaaaattcgactatctacaatgactggtcctttagttaacacacctaaagaattagccgatataacaccaattcaattaaatgataattttcacattgttcccggaagccttgggctatataaaattgaaatgaaaccaggagaagggatagaaaacaagcttagacgctttcttaaaatccatgaaaatgactatgattatgtcataattgataccccaccaaccccatcagtttggatgtccagcgcattaattgcatctgattattacctcattccagccaaacccgatcctctttcgatcactggtatcgatctattagatagcattataaatgagaagagagaaaatttcgatcttaagattgaatgtgcgggcatagtttttaatatggttgaaggtaatagtaatttatatgaggaaagtcttcgttacttcaataatcaaaaacgttggcgtaataagatctttaaatcatatttgagcaaacgtactgagttggcaagaaatcaaacaagaggcttatttattaacaatttaacggatgaggatatgaagttttcgctgtctaaaattactgacgaacttctctctagagtaggtgacttatga

SEQ ID NO: 24279 - DNA, 507 bp, Escherichia coli
atgactgacaaaaaaaataactcaaaagaaattaagcaactgttaaactttttagaggagttttcctttatttcaaaaaaattatcaagaatcaactttattgaattacttcaagatagttatactgataatttagaagttaacgaaagaaattcaaagtctaaaaaaaatgatattaaaggtttccttgttgggtatcttccgaggattttattagacaaagatctcttccaaaaaaataaagatatagatgattttgcacgcatgttaggtatcgaaatcagcaggcctgaaaaaagatctagagaggaaatgatcggcataatcgtgtgtgacgttcacgagaaaaactcatccgatttaggtaaggcttataatattatcaattcaatgtcaaataaccctctagttttgagtagaataaaagagaggaagaacctttctagcgctcaaaatgagatatatgactggaatgaagttataaaagatatattcaataaggactaa

SEQ ID NO: 24280 - DNA, 696 bp, Escherichia coli
atgtcgagagaagtaaacagcgatttcactgagttagttacttatttctctgaatataaattaaaaaatgttttcgagaatattaactcaagagggaaaataagcatgatacataagagatattattcttttatgtgccttgtttactgtttgtatcatttctccaaggagaaaatagacgccaactcattggagcgattgcaagaagcttcatctgaccttggtacagctatgtttatggttataaatggtgcatacaaaccagcaaatctaatgatgcgaagttatattgaaaattctttaaaatcaatcggttgcttactagattcttcaatacttgaagaaaaatcattgtttaaggtaattgaacaaactggggaacatcctgtcttcaaaaaaaatcctctactacatgaaactttaaaagctgaatactcttcgttatgcagtcacgtacatacagctactgtaaaagaaatggttcacataaaagctttaaatgtttttcccgaaatagacttggttaaaatagataatatttcgaaggtgattgataaggtggttaagactatgatatcaactatcataagaatttttcctgatgttttcttttcctttgcacctgagtatcgagaaaaaatcctccttagcttaacctctgcacaacgagcctcactttattccttaagtgattaa

SEQ ID NO: 24281 - DNA, 1431 bp, Escherichia coli
atgagttcagaattgattgcaaaacctggaacaggggtactttccacagatacaacaaaatttgaaggatatttatcctatcttggtttgccgaccgaaaatataattgcctctctccctgagcgccaaattattgaaaaaaacctccccacattcatagattctttacctgctgaggtaaaaagagatgctcgatatttatcaaagttcgttgctggtgcggctataggactatttgatgcatcgttaaattatgtttggaatgaagttgtactgaatttaagggaaaaagtagtagtttatggcctcgatatgttctttgatgctgcagttggaggaggacgtagagagctttattctaccgaagaagatctttctggtttaaaagacaacacccttattaatacttgccgaaaacttgaattaatatctgacgttgtttacaccaagctcaatcatatattgactatgaggaatgacattggtgcttcgcacccaaattcatactccataaatgcttttgaacttcttggctggctccaaacatgcgttcaagatattttgaacgacaaaccgtccgcgtctgccatacaaataaaatcattccttgagaatctaaaaagatccactgatgttcttgatgaagccacaattcatagcatggaaagacctttgaatgatctgtcgcttcagaatactgacaatctactcaatagtattttcggcatatatacagctgattcaacaggaaatgttgtcagaaaaaatatcgctctttttgctccgcatatctggaataaaagcagtgataacgtaaaatacaagctcggcgtgacgctagacggatacaagaacaatcttcacaacgagaaacatgctttaggtattgagttttttacgttttgtgatggtaatcgttatcaatcattagactctagaattatatcactggacggccatgccgacgatctcttagaggctaggtatgcttgggataacttttataatgaaccccctcatatgcggaagattctttcgtatttaaagactgaaaatgacatacctttagagagggttcataagcttataaaaacagttttgatttgtcgtgttggtaaaggaataccatataatactggtgtttctccggcgggacgacctttgtatgatcagttttttggcatgcttggcgatcaaaacattatcaatacagttatagcaatgcactctaatgaagtgcgagtgaatttagacaacaaatactgccagcaacatatggtaagcgttttgactttgttaagagccaatgctcgtagcgaaagaattcaagaaattatagattttttgatcgccaaccaaacgatcctccataaagtacacaacgataagagatatagagatctaactaaaaatcacatcagttttagctaa

SEQ ID NO: 24282 - DNA, 372 bp, Escherichia coli
gtgctggatgcactggagcaggcgttatgggcccgtcgaccgtccggcacggtccatcacagtgataaaggttctcagtatgtatcgctggcctacacacagcggcttaaggaagccggattactggcatcaacaggaagtacaggcgactcgtatgacaacgcgatggcggagaacatcaatggtctttacaaagcggaggtaatacaccgtaagagctggaaaaaccgtgcagaagtggaactggccacactcacgtgggtggactggtataacaatcgacgattgctggaaaggctgggccatactcctccggcagaagcagaaaaagcttattatgcttccatcggaaacgatgatctggcagcctga

SEQ ID NO: 24283 - DNA, 327 bp, Escherichia coli; identical to SEQ ID NO: 15729

SEQ ID NO: 24284 - DNA, 303 bp, Escherichia coli
atggtgcgcaaatatttcggcacagacggtattcgtggcaaagccaacgaaggcgcgatgacggcggaaaccgccttgcgcgtcggcatggcggctggccgtgtctttcgtcgcggtgaccaccgccatcgtgtcgtgatcggcaaggatacgcgcctgtcgggctatatgcttgaacccgcgctcacagccggtttcacctcgatgggcatggacgtattcctttttggcccgctgccgacaacgtataggaagaataaacgcccttttcacccaagtccaacagctttggaccgcagttga

SEQ ID NO: 24285 - DNA, 1494 bp, Escherichia coli; identical to SEQ ID NO: 13713

SEQ ID NO: 24286 - DNA, 390 bp, Escherichia coli; identical to SEQ ID NO: 22296

SEQ ID NO: 24287 - DNA, 441 bp, Escherichia coli; identical to SEQ ID NO: 22297

SEQ ID NO: 24288 - DNA, 126 bp, Escherichia coli
atgaggtatcgcagctgtactcagataaaaacagcccccgttgcggttgaggagcgaagggggctgaaaagaggaattaaggatgattgttattatggtgaaccagaaggttatccctgtctgtaa

SEQ ID NO: 24289 - DNA, 327 bp, Escherichia coli
atgcaggaaagccaagaaaataacagcaagccgccagcctggcggcttttttatttatatctacagctgacactgatttaccatagcatccactgtatctactcagtcttgataggtgtttttatgagtaatgaattagacagcctttcagaagtagttaaaggactcacaaagatagagctgcctggcggcggtggcggtgaaaccgatagccctgtagttgaggcagctatagctgttggcattgtaggggctgctgcatatgggatttataagctttttggtcgcgcagaaccccagaaagatgaggacaaactcggtttctag

SEQ ID NO: 24290 - DNA, 243 bp, Escherichia coli
atggctcttgttcgttcaggaaacacaagcaagatttttgaagcagataagaagtttaactcggtttttgacactgaatatcagccgggagaaacatgtaaatatgaagggatttataaatgtaccggttgcggtaaagaagtaactatcgcaggtgggaaaaaaatcccaccacaaaaccaccaccaacatacccccgcgcaagggaacattcgttggcaattgtttgtttatgctcagtga

SEQ ID NO: 24291 - DNA, 318 bp, Escherichia coli
atgcagcaagatcatgaacatgatgattgccgcattcagtttcgagacgattggctataccagttttacaaatatggtaaagccaatcgaaagattccaactgcgattagtgcttcattaggtcgcaagctggatatgctgaatgctgctgataaagttggagatttgcggtctcccccgggaaaccgatttgagaatctcaaccctccattgacagggtattcatccatacgggtgaatgagaagtaccgcttaatatttaagtggggtgaaaacggaatcgaggatttgtatctcgatccacatgattaccgatag

SEQ ID NO: 24292 - DNA, 357 bp, Escherichia coli
atgtcccaagcaactagaaagccatcaactgtaggggatattattctttatgaatatctcgaaccaagtggtttaaaaatcaatgacttggctgaaatgttgaatgtgcatagaaactctgccagtgctttagttaacaataatagaaagctgtctaccgatatggcttttaggttggctaaagccttcaataccactgcaaagttctggctaaatatacagcagtctgttgatttatgggaggttactagtagccctcgattgcaagaagaaatagacagagtgattcccgctcatgaaatcatagaaaggaaacacattgttgataattctgagaagaaacatgctattgcatga

SEQ ID NO: 24293 - DNA, 690 bp, Escherichia coli
atgtatccgatggatcgtattcaacaaaaacatgctcgtcaaatagatctgctggaaaatctgacggcagttattcaggattatccaaatccagcctgtatcagggacgaaactggaaaatttattttttgcaatacgctgtttcatgagtcatttcttacacaagatcaaagtgctgaaaaatggcttctgtcgcagagagatttttatgaattgatctctgtcacagagatggaagcatacaggaatgagcatacgcatcttaatcttgtagaggatatttttattcagaacagattctggacaatatctgtccagtcatttcttaatggacacagaaatattattctgtggcaattttatgatgctgctcatgttcgtcataaagacagttataatcaaaaaacgattgtcagtgatgatatcagaaatataatcagaagaatgagtgatgattcttctgtatcatcatatgtaaatgatgtattttacttatatagcaccggaatcagtcataatgctatagcaagaatattaaacatatccatctccacatcaaagaaacacgcatctctgatatgcgactacttctctgtttctaataaagatgagttaatcatcttactctacaataaaaagtttattcattatttatacgagaaggctatgtgtatcataaatatgcgttaa

SEQ ID NO: 24294 - DNA, 639 bp, Escherichia coli
atgaaccggaaaatatttgcactttttgctctgacagcagggatgcatcttgctgttcatgcttcagaaaatgtgaacacaactgaaaaccgccagttcctgaagcagcaggaaaatttaagcagacaactgcgagagaaacctgaccatcagctgaaagcctgggcggagaaacaggtgctggaaaacccccttcagcgttcagataaccattttctggatgagctggttcgtaaacagcaggcttcgcaggacgggaaaccccggcagggtgccctgtattttgtgtcgttttccatacccgaagaggggctgaaaaggatgctgagcgaaacccggcactacggtattcccgccacgctgcggggcatggtgaacaacgacctgaaggccacggctgacgccgtgttgtccctggtgaaagacggcgcaactgatggtgttcagatcgacccgacgctgttttcacagtacggcattcgcagcgttccggccctggtggtgttctgcagccaggggcacgacatcatccggggaaatctgcgcgtcaggcaggcgctggagaaagtggccgccacgggtgactgccggcaggtggctcatgatttactggcagggaaaggagattccgggaaatga

SEQ ID NO: 24295 - DNA, 360 bp, Escherichia coli
atgaatactgttttaagtgttcagggtgcttctgcgcccgtcaaaaagaaatcgtttttttctaaattcactcgtctgaatatgcttcgcctggctcgcgctgtgatccctgctgctgttctgatgatgttcttcccgcaactggcaatggcagcacagggccaggacctgatggcaagcggtaacaccacggttaaggcgaccttcggtaaggactccagtgttgttaaatgggttgttctggctgaagttctggtcggtgcggtcatgtacatgatgaccaaaaacgtcaagttcctggccggttttgccatcatctctgtatttattgctgtgggtatggccgtcgttggcctctga

SEQ ID NO: 24296 - DNA, 369 bp, Escherichia coli
gtgttccacgcttgtacgcatgccggggtcgatgacgatagcgccttgcggggtgagcgtgacgcccgtcgcatccagtgccagcttgcgtgtgttgggcgcgcggccggtggcgaccagcagcttgtcggcgcgcagttcgccgtgcgccgtggtgagcacgaattcgccgtccccttcaccattgatatacgcgacctggctggcctgggtgtgttccctcacctcgatgccctccatgcggaatgcggccgtgacggcttcgcctatagctgggtcttcgcggaagaacagcgtgctgcgagccaggatcgtcaccttcgctccgagtcgggcgaacgcctgcgccagctccagcgccaccactga

SEQ ID NO: 24297 - DNA, 411 bp, Escherichia coli
gtgcagcacagtgatcgccggattgccctccaagatgccttcgtacttggcgtggcgcagttcatcgacgcgggcctgctgctgggccagcagcgccgtgcgctggatggtcggcgtggtagcggcgatgccgccatcgaacgggctttcccggcgcagatgggcgatatgggcggcgcggatcatgatcttggacggcacacaaccgacattgacgcaggtgccgccgatggtgccgcgctcgatcagcgtgacacgtgcgccttgctcgacggccttcagcgccgctgccatcgcggccccgccgctgccgatgacggcgatatgcaatgcgccgctgctacccgtcttgtcgtttctgcccagcagatcgcgcatcttgtcgagcaatccgcccggcgtcgaaactga

SEQ ID NO: 24298 - DNA, 237 bp, Escherichia coli; identical to SEQ ID NO: 20448

SEQ ID NO: 24299 - DNA, 213 bp, Escherichia coli; identical to SEQ ID NO: 5358

SEQ ID NO: 24300 - DNA, 435 bp, Escherichia coli
atgtacggaacatgcgaaacgctctgccgtgagctggcagcgcagtatacggagaacacgccgctgatgctggttgtctggtccccggaagagattcaggcactggctgacggtatggaaatttctctgaccggttatgaaatcaggaccgtcctggcacgcctggaggacatcccggaagaacagcggattgagtccggtatttcttccgctgcggtgatggagatcatcaataacgtgagcgaaaaccgccaggtgaccgtccctgctgaactgctggcgtccctgattcagaccgctgaacaggcattgtggaaacgtgaatgggccgcccgggatcatggcctcgccgtcccggaatgcgtcacccgccgtcaggaggtggttaatcaggcccgcaccctgctgaaaaacaacacacacgaaaacgactga

SEQ ID NO: 24301 - DNA, 477 bp, Escherichia coli
atgcataaatcagaaaatgaaaaaatagattttattctggatgagcatgagcagatattcagaaaacagggttctttgtgtatggcactgggtaagggctttttagttatagctattctttgtggtgttgccacattctgtgtttctggcctgtatctgaaatccctgtgcctgtccgttgcctgctgttgtggggtattcagtcgtatttttaattattacagcgtaccggaggaatcacgcatggtactcagtcgtcaggaattactccggcttatgcgtctgactgaagacgtaccggatgcgagacaggaactgcttaaccgtttgttgtccggtaaaaaactgactggtcgggatgaacaggatatccggcgtctctggcaggagaaagtggatgcaatgcaggagtctgccacccgtcagcgtgaacaggatactattcggaagtttactgaagggaataaatccgaatga

SEQ ID NO: 24302 - DNA, 222 bp, Escherichia coli
gtgagtgatgaagccgatgaagcatattcagtgacagaacaactgaccatgacaggaataaaccggatacgccagaaaataaatgttcatggtattcctgtttatctctgtgaagcatgcggaaatcctattccggaagcccggaggaaaatatttcccggtgtgacgttgtgcgttgaatgtcaggcgtatcaggaaaggcagaggaaacactatgcataa

SEQ ID NO: 24303 - DNA, 510 bp, Escherichia coli
atgatcgtagcttcagaacaccaagcaaagctaaggcagaaagaaatacaggaaatcgacaggaaggcgtctaaagagcacgaggaggcgaagaagaatagtaacttcactcagacatacccaaagggctggcaacgcattagagagcttgtgagggacaaacagggtgctgccgctataggtctttactcatttttcgctgaacacatagatcctacatgcggtgccgtggtctgcgaccagcagtttttagctaatcagatgggtgtttctactcggacaattcgtcgttggttagattatttggaggagaaaggtgctttggtaagaataccagttgctggaaaggtttgtgcttacgctttagatcctcacgaagtctggaagggatataacacatcaaaagactactcagcctttgttaccaagacgttagtgaacaaggatggagaaataaaacgccggataatggctatgttttccggagaggagagcggtcaagagcagtag

SEQ ID NO: 24304 - DNA, 186 bp, Escherichia coli; identical to SEQ ID NO: 10006

SEQ ID NO: 24305 - DNA, 546 bp, Escherichia coli
atgtctctcactaaattactgccggtcattttgttgatgatggccacaggtgtgcaggcctccacccgggatgaaattgaacgactctggaatccgcagggtatggccgtgcagcctgcacaaccggcagcagacacatcagccagaacagaaaagccggctccccgctggttccgcctcagcaacggcaggcaggttaacctggccgactggaaggtggtgctgtttatgcaggggcgttgcccttactgtcaccagtttgacccggtactgaagcagctggcacagcagtacggcttttccgtttttccctacaccctggatggtcagggggatactgcctttccggaagcattaccggtgccaccggacgtgatgcagaccttcttcccgaatatcccggtggccacaccgaccaccttcctggtcaacgtcaacacacttgaggcattaccgcttttgcagggggcaacggatgccgccagttttatggcgcggatggataccgttctgcagatatacggagaggaaaaaggtgcgaaataa

SEQ ID NO: 24306 - DNA, 237 bp, Escherichia coli
atgtgggtattttccctgggtgtctggtttcatatcgtcgcccgtcttgtttacagcaaaccctggatggctttttttctggcggagttgattgcggccatccttgtgctgttcggcgcataccaggtgctggatgcatggattgcacgtgtcagcctggaagagcgtgaggcactggaagccaggcaacaggccatgatggaagggcagcaggagggcggacatgtctctcactaa

SEQ ID NO: 24307 - DNA, 840 bp, Escherichia coli
gtgtcgcgtgcgcagttgcacgtcattctcagacgagccgatgactggaaggacggccgccgcagccgtcacacggatgatacggatgtgcttcgccgtatacaccatgttatcggagagctacccacatatggttatcgtcgggtatgggcgctgcttcgcagacaaacagaacttgatggtatgcctgcgatcaatgccaaacgtgtttaccggatcatgcgccagaatgcgctgttgcttgagcgaaaacccgctgtaccgccatcgaaacgggcacataccggcagagtggctgtgaaagaaagtaatcagcgatggtgctctgacgggtttgagttccgctgtgataacggagaaaaactgcgggtcacgttcgcgctggactgctgtgaccgtgaggcactgcactgggcggtcacaacgggtggcttcgacagtgaaacagtacaggacgtcatgctgggagcagtggaacgccgctttggcagcgagcttccggcgtctccagtggagtggctgacggataatggttcatgctaccgggcgaatgaaacacgtcagttcgccaggatgttgggacttgaaccgaagaacacggcagtgcggagtccggagagtaacggaatagcagagagcttcgtgaaaacgataaagcgtgactacataagtatcatgcccaaaccagacgggttaacggcagcaaagaaccttgcagaggcgttcgagcattataacgaatggcatccgcatagtgcgctgggttatcgctcgccacgggaatatctgcggcagtgggccagtgatgggttaagtgataacaggtgtctggaaatatag

SEQ ID NO: 24308 - DNA, 840 bp, Escherichia coli
gtgtcgcgtgcgcagttgcacgtcattctcagacgagccgatgactggaaggacggccgccgcagccgtcacacggatgatacggatgtgcttcgccgtatacaccatgttatcggagagctacccacatatggttatcgtcgggtatgggcgctgcttcgcagacaaacagaacttgatggtatgcctgcgatcaatgccaaacgtgtttaccggatcatgcgccagaatgcgctgttgcttgagcgaaaacccgctgtaccgccatcgaaacgggcacataccggcagagtggctgtgaaagaaagtaatcagcgatggtgctctgacgggtttgagttccgctgtgataacggagaaaaactgcgagtcacgttcgcgctggactgctgtgaccgtgaggcactgcactgggcggtcacaacgggtggcttcgacagtgaaacagtacaggacgtcatgctgggagcagtggaacgccgctttggcagcgagcttccggcgtctccagtggagtggctgacggataatggttcatgctaccgggcgaatgaaacacgtcagttcgccaggatgttgggacttgaaccgaagaacacggcagtgcggagtccggagagtaacggaatagcagagagcttcgtgaaaacgataaagcgtgactacataagtatcatgcccaaaccagacgggttaacggcagcaaagaaccttgcagaggcgttcgagcattataacgaatggcatccgcatagtgcgctgggttatcgctcgccacgggaatatctgcggcagtgggccagtgatgggttaagtgataacaggtgtctggaaatatag

SEQ ID NO: 24309 - DNA, 684 bp, Escherichia coli
atgtcccgttttgtcctcggtaactgcatcgatgttatggcccgtatccctgataacgccattgatttcatcctcaccgacccgccgtacctcgtcggttttcgtgaccgtcaggggcgtaccattgccggcgataaaaccgacgaatggctgcaaccggcctgtaatgagatgtaccgcgtactcaaaaaagacgcgttaatggtgagcttctatggctggaatcgcgtcgatcgctttatgtctgcctggaaaaatgcgggattcagcgttgttggtcacctggtcttcaccaaaaactacacatcgaaggccgcatatgtgggctatcgccacgaatgcgcctacatcctggcaaaaggccgtccacgtctgccacaaaaaccgctgccggacgtgctgggctggaaatattcgggcaatcgccatcacccgacggaaaagcccgttaccagcctgcaaccgctgattgagagcttcacacacccgaacgcgattgtgctggacccgtttgcaggcagcggctcaacctgcgtggccgccctccagtccggacgccggtatatcggtatcgagctgcttgagcagtatcaccgtgccgggcagcaacgccttgccgccgtacaacgggccatgcagcagggggccgcgaatgatgactggtttatgccggaggctgcgtaa

SEQ ID NO: 24310 - DNA, 684 bp, Escherichia coli
atgtcccgttttgtcctcggtaactgcatcgatgttatggcgcgtatccctgataacgccattgatttcatattaaccgacccgccttacctagtgggcttccgtgaccgttccggacgcaccattgccggtgacgttaacgatgactggctgcaacctgccagcaatgagatgtaccgcgtgctgaaaaaaaacgcgttaatggtcagcttctatggctggaaccgcattgaccgctttatggcagcctggaaacgcgccggattcagcgtggttggccacctggtcttcaccaaaaactacacatccaaatctgcgtatgtcgcgtaccgtcacgaatgcgcttacatcctggcaaaaggacgtccggcgctgcctcagaagccattgcccgacgtgctgggctggaaatattcaggcaatcgtcatcacccgacggaaaagcccgttaccagcctgcaaccgctgattgagagcttcacacacccgaacgcgattgtgctggacccgtttgcaggcagcggctcaacctgcgtggccgcccttcagtccggacgccggtatatcggtatcgagctgcttgaacagtatcaccgtgccggacagcaacgactggccgccgtgcaacgggccatgcagcagggggccgcgaatgataactggtttgaaccggaggctgcgtaa

SEQ ID NO: 24311 - DNA, 216 bp, Escherichia coli; identical to SEQ ID NO: 5262

SEQ ID NO: 24312 - DNA, 246 bp, Escherichia coli
atgcaggatattatatactacataagaaaccatatcctatctttcccaaatcgaaacattttctcttcgctgattgtcttaatgatgcatcatctaatgcatcaaacctattcagcaaagtatcctggtgcattatattataatagctataatcatatgttaatggtcgcaaaatttgtagcaaaaaataaaaagcaattaataatttgctatacccacaccctcttttatttatatacctcttaa

SEQ ID NO: 24313 - DNA, 483 bp, Escherichia coli
gtgaccatcgcccgggataaagccctgaagtcacagattacaaaactgctcaccagtattcagaataaagcagtgagtgacactccgcttgacgcccgggaacaggggtttatttccagcaccaccattcccgtttttaaatatctgattgacccgcagatgctcggtgtgtccaacagcgtcgtttaccagctgacggactatatcggctacgacatcatgctccagtacattcaggaactgcttcagcaggcccgggccatgattgccaccgggaactatccgcaggctgtgatggacaatgttctggagaatctgaatcaggcacagcaacagattgccattttccagagtcaggtacaggtccagcaggatgcgctgctggttgtcgaacgtcagatgagctacatgcgtcaacagctttccgcccgtatgctcagccgttaccagaacaactatcacttcggagggaattcactgtga

SEQ ID NO: 24314 - DNA, 216 bp, Escherichia coli; identical to SEQ ID NO: 5262

SEQ ID NO: 24315 - DNA, 231 bp, Escherichia coli
atgtatgacatgcttggctggctggcgcaggaagaaggtattcgtcttgaaccatcggcactggcgggtatggccgggtctcagcgcgtgtgcgcatcagtaagttaccaacagatgcacggtttcagcgccgaacaactgcgtaatgccactcatctggtgtgggcgacgggaggtggaatggtgccggaagaagaaatggaacaatatctggctaagggcactgactaa

SEQ ID NO: 24316 - DNA, 132 bp, Escherichia coli
atggttgcctctggcgcagtttgcggtgatgccgttcccgggaatggattgccagtgcggggactgtggagcttaattccggtattggtggcctttccgttgattttgagccaacagccctcctgtgactga

SEQ ID NO: 24317 - DNA, 393 bp, Escherichia coli
atgaaagaaaaaagaaatgatgcggaactaaaaaacagaaaaactaaacggaattatgattatgaacgcagggtttctgatatatattttgatctgttttttgtgttcgttgctgccggaacttttttatgggtgattatgcacagtatttttgatgcctgtattgattcgtggaaagctgacccagcattaaataattttcgttatatgtggaacatcctgatgtatgtcattccgtatacgttatgggcgtttgcaggtggatttcttatcgtatacgtcaggaaccctttaaatgaattaataaacggggggatcaggatattccggctgaaacgccgtatgcgccgggagaacagtttcagggaggggaataacgatgcctcgcattaa

SEQ ID NO: 24318 - DNA, 264 bp, Escherichia coli
atgctccagtacattcaggaactgcttcagcaggcccgggccatgattgccaccgggaactatccacagaccgtgctggacagtgtgctggagaatctgaatcaggcacagcaacagattgcggttttccaggggcaggtaaaggtccagcaggatgcattgctggttgttgaccgtcagatgagctacatgcgccagcagctgtccgcccgcatgctcagccgttaccagaacaactatcacttcggagggagcacgctgtga

SEQ ID NO: 24319 - DNA, 183 bp, Escherichia coli
atgattcaaacacgtaatcaatatctgcagtttatgctggttatgctggctgcatggggcattagttggggagccagatttgtcatggagcaggccgttctgctttatggatcaggaaaaaactatttgttcttcagtcatggtactgttctgatgtacctgctgtgtgttttcctggtatag

SEQ ID NO: 24320 - DNA, 225 bp, Escherichia coli
atggattttaaaagaacaataagttcaagttgtgattatctgtttagtgtttccaccaaagctaaatacttcgctgagaaacctgaactttttgaaaagtatcgtgatgagagattaatccgcttttcaattaaaagaccagatggaaaagttggtaaagttgaaatctatactgaaaacggtgaacttatatttgaacaatataaaacccttaaactagtttaa

SEQ ID NO: 24321 - DNA, 1551 bp, Escherichia coli
atgacagcctttcgtgccgcatttaaggcatatcgtatgcatcaggtgttaatactgcctcgctttgcacggcttacctttgcccttggcttagcaactgcggtttttcccgttgacgcagagtattattttaatccacggtttttaagcaatgaccttgctgaatctgtcgatttatctgcctttactaagggacgcgaggccccacctggtacatatcgggtcgacatttatttgaacgacgaatttatggctagtcgggatattacttttattgcagatgataataacgcagatctcatcccatgcctgagtacagaccttcttgtcagtcttggcataaaaaaatcagcattattagacaacaaggaacattcggcagataaacatgtgccggacaacagcgcatgcacaccacttcaggatcgtttggctgatgcatcatctgagtttgatgttggtcagcaacatctgtcactctccgttccgcaaatatatgtcggcagaatggctcacggctatgtttctcctgatctgtgggaagaaggaataaatgcagggctactaaactatagttttaatggtaattctattaataaccgtagtaaccataatgcaggaaaatccaactatgcatatttgaatttacagagtggcatcaacattggtagttggcgactgcgcgataactcaacgtggagttataacagtgggagtagcaattcatctgacagcaataaatggcagcatatcaatacgtcggctgaacgtgacattattccgttacgctcacggttaacagtgggtgatagttataccgatggcgatatttttgacagtgtgaactttcgtggccttaaaataaattcaacagaagcgatgttgcccgatagccaacatggtttcgctccggtgattcatggtattgctcgtggcaccgcacaagtgagtgtaaaacagaatggatacgatgtttatcagactactgtcccacccggcccttttactattgatgatatcaactctgcggccaatggtggtaatctgcaagtaaccataaaagaggcagacggcagtattcagacattatatgttccttattcgtctgttccggttctccaacgtgctggatatacgcgttatgcacttgccatgggggaatatcgtagtggaaataacctgcaaagcacccccaagttcgtacaagcaagcttgatgcatggtctgaaaggaaactggacaccttatggcggaatgcaaattgcagaagattatcaggccttcaaccttggtattggtaaagatttaggactttttggtgccttttctttcgatattacgcaggccaatacgacacttgcagatgacacccgtcacagcggacaatcggttaaattcgtctacagcaaatccttctaccagacgggaaccaatatccaggtcgcaggatatcgctattctacgcaaggtttttataacttatccgacagtgcatacagtcgaatgagtggttacaccgattactttgtcattaaccgattgtccgattga

SEQ ID NO: 24322 - DNA, 471 bp, Escherichia coli
gtgattggcgcgctggttaaacgttactggttgcagctgatggtagtggcgttaatcggtgtgctggcgttcttcgtgaaccactaccgcgacaacgccatcacctacaaagacctgcgcgataaagccactgagaaactcagcctagctaatgccaccataactgatatgacaacccggcagcgagatgttgctgctctggatgccaaatacacacaggacctttttgatgcgaaaaagcagcttgatgatatgcagcgttgcgttagttctggcaagtgtgggttgcacgtcaacgccagatgtcccgcgaacggaacgaccagcaccggcgtcatgggcgatgcttccagccccagacttactgactccgctgaacggaattatttcaccctcagagagcgaatcgtcacagtgatcaagcaggttggttatctgcaggactacatcaaagaacaatgtttgcaatga

SEQ ID NO: 24323 - DNA, 441 bp, Escherichia coli
atgcaaaccagtgataaaggcattgccctgatcaagcaattcgaaggatgcaaactcaccgcgtaccaggacagcgtcggagtgtggacgattggctatggctggactcagcctgtcgacgggaaaccgatccgtgccggtatgacgatcaagcaggaaacggcagagcgattgctgaagaccggactggtcagctatgaaagcgacgtatcccgcctggttaaagtcagcctgactcaggggcaattcgacgccctggtatcgttcacgtataacctcggcgcccggtcattatcaacatcgactcttctgagaaaactaaacgccggtgattacgctggcgccgccgatgagttccttcgctggaataaagctggtggcaaagtcctgaacgggcttacccgtcgccgcgaggcagagcgcgctctgttcctgtcgtga

SEQ ID NO: 24324 - DNA, 342 bp, Escherichia coli
atgaaaatgcataacgatccccactcctggacggagtttatcgaactactccacagctggtggcgtggcgaaacgccgatgggtgccgtattgctatcggttgccatggccgcattgcgaatcgcttacggcggtggcggctggaagaaaatgctccttgagggggcaatctgtggagctctgacccttactgctgtgtcagctcttgattacttcaaccttccgcagtccctgtcgattgctataggcggcgcactcggttttgttggcgtagagcaagtgaaggttatggctgcgcgggtgtttaattctcgctttggaggcggtgatgcaaaccagtga

SEQ ID NO: 24325 - DNA, 816 bp, Escherichia coli
atgaaactggaagcatcactcaaacattttagtcctcagggaatgcacataagcgatgacgtgaagggaacctctccggaccgccttacaggaacagacgtaatggcggcgattggcaccaccagcagccgtgcgcgcttcggcctggcggcgttcttcggtaaagcaggcatcagcaaaacagatgaacagctcgcagttcaggcgctggcgcaggttgctatcaaaaacgctcctaaaaatgtccgcaaagccgctggcgacaagctcggagcatgcatgttgacgctggcgcagtttgcctttgctgattactcccgttctgcggctaccagcgtgacatgtcacagctgcagtggcaccgggcgaacaacccgcgagcaaattacccgcaaagtttcgtacccatggggtaaagcgccatattgggctaaccgctctcgtgccgttcgtccgtctgactgggagcattggactgaggtaacagaggttgtaccggctatctgtgatatttgcgaaggcaagggaacaatcagcgcccgctgtcggtgtggtggtaaaggagaggtgctcgaccgcaaggccacaagcgagcgcggcgcgccggtgtttaaaacctgtgagcgctgcagtggaaacggattctctgctatctcctcggcgacggtacaccgtgccattctgaagcgtctccctgacctccatcagtcctcatggtcacgcaactggaaacccttttatgaaatgctggtggacacgctgcgccagtgggagcgtcacgcggcagtagaattcgataaggcaacaacttattaa

SEQ ID NO: 24326 - DNA, 972 bp, Escherichia coli
atgaagacggtagaagcagcaaaaggccagtgggccatgatttttgagcattacggacttccgccgatcaccggtaaaaaccactttagagggaaatgccctctgtgtgattcggttggcaaattccgcatcgacgaccgcgacggcgcaggaacatggatctgcacctgcggcagcggtacgggaatggatttggttaccaaaacccagggcaagccatttaacgaggtttgccgcgaaatcgatgcactgatcggcaatacgttcaggcgtgacaaaattcccgaggctagcgacgcttctaagctgcggaaaaaggtactcagtaattttgcaaaaatgtcacccctgcgcggtacatgcgccgctgaataccttaactcacggggtatttatcagcttccggctgagtccgtgcggcttaatcccaagcaacggcataacggacgggtgtaccagtctatttattcactggcaacagatgataaaggcgagctgtgttacctccatcagacgttattggatggtgcaaagaaggctgacatcggggccagcgccaagcggcagaaatcactgcaggaagataactatcttgatcacgctcgctcagttgcgatccgtatgttcccggtcgccagcacgctgggcatcgcagaaggaatcgaaaccgccttgtctgctcatcaaatttacaaggtgaatacctgggccaccatgacaagcggattcatgaagaaattccgtgttcctgcaggcgtgaagaatttgattatttttgcagatagagacgtaaacagcgccaccggattggctgcggccacggaatgcgctcatgccaacttaatggcaaaaaatgacctgcaaaaaatcagcatctactacccggataacggtgattttaacgacatgctcatgaacggcgatcaggttcgtgaagtggttttctataaaaaacagcaggtggccgcatga

SEQ ID NO: 24327 - DNA, 1620 bp, Escherichia coli
atgcagctgacgatcacaccgaattttgcacaggaacgagcacttaaccagctgcgccgtaactggaaggatacgcaaaccttcatggtgtactcgccgacgggcagcggtaaaacaggactggccgccttcatcgttgccgggttcgtcagtcgtggaatgcgggtaatgttttgcgcgccttaccagatcctcataactcaaaccgcaaagcgttttgtggagtacgggttgccgggtgatgaaatcggctatgtctgggcggatcacccaaactacgatcctaccctcaaaatacaaatcgccagcgccgacacgcttattcgtcgcgtgttccctgacaatatcgatctgctgattatcgacgaagcgcacctgcgcaaaaaacgcatcctgcaggatatcgagcgcctgcgcgaaaaaggcgtgaaagtgatcggcctgtctgggacaccgttttccccgttcctgggcaaatactatgaccgactgattaagccaaccaccatcggcgagctgatccagcgcggcgacctgagcaaatacgaattttacgcgcccacaaagccggatctgaagggggttaaaacctctccgtccctgcagtacggtaccgactacaacgaggcgcagctggcggagatcatgtgcggttccacgctggtgggcgatatcgtccaaaactggctggagaacggccgggacctgccgacaatcgcgttctgcgtcaacgtagaccacgctaattttctgactattcagtttaaccaggctggcgtaaatgcagaggttatgactgcagatacgcctgcggaagaacgccaaaccatcattcaccgcttcgaaactggcgccacaaaaatcatcgtcagtgtaggggtgctggttgccgggttcgacagcgatgttcgctgcatcatctacgccaggccaactaagagcgaaattcgctggctgcaggcgctcgggcgtggcttgcgcaccgctccgggtaaagagtcctgcctcatcttcgatcacagcggaaccgtgcaccgcctgggttatccggactctatcgaatatgacgatcttccgggtaaatcagacgggatggaggagggcgctcgccgcgcagctgaggaacgagcagagaagctgcctcacgaatgctcgcaatgccacttcatgaagcctgctggcgtctatgtctgccctaaatgtggccacaagccgctggccggtgaggacattgataccgacaccgggcgaaaactcaaaaaacttgggggcgagcagcgccagccgacgaaagcagagaaacaagcctggtggagtcagatcaaattctatcagcgccagcgcgtatcgctggggaaaaagcctgtcagcgatgcctggtgtgctcacaccttccgcgaacgttttggcgaatggccgaacggactgagcgattacccgatggatatcacgccgacagtttcaaacttcattaagcacaagcggatcagcttcgctagacgaatcgaaaaagagcagcgccagcaggcacaggcagaagagctgcctacccaggaaagaattcagcaggcgcttaatcgcgtcagtgatatcagacagcagttaggaaaacgagcatga

SEQ ID NO: 24328 - DNA, 294 bp, Escherichia coli
atgcaacagtttgaaactctcaatttactaccttcggtgcatagccaggccgatgccgattggatcaagcagcagttactgagcctgacgccagcagcacgacaaaaagccattcagcgttatgcagctgtgtatcaggaatcgttcgaagccgagcccgtttcataccgcaaggagaaccgggcaaggcatgaagcaaatatgcggcttcgcctgtttgtgagaaatcacggcagggctttacaggggtataccgccgaacctcccctggccggaacgccaacgcgttcctga

SEQ ID NO: 24329 - DNA, 678 bp, Escherichia coli
atgaaaactgcggaaaggattaatgaacttttaaggctcaaggggtggagtcaggctgaactggcaagacagctgggtgtaacagcccaatcagttcaatactggacaaccggcgagacttcaccaagaggcaagcggcttgccagactatcggaaattagcggtctgccccagtcatggttccttggtgaatctgagagtccgaaatttccaagtacgcataggaacgatacccatgccgatagcgttaggttcagtgtcctcgatgtcgagtttagttgcggtgacggctcaagtgttaagggcgacttcattgatgtagtaagatccatcgaactcgatcctgaatacgctcgtcaattggttgggaataggcctttcaaaaatattgagataggtaacgccagaggcgacagcatgacgccaacaatatctccgggggatttgcttttcttggataaatcaataacttattttgatggtgatggcatttacgccttctgctttgatggtgaatgttatgttaagcgtcttcaaaaaatcggctccaaaatggtagttctttcagataactcaaactatcaaccttggagtattgagaaagaagcattcaacatgctttacatacaatcaaaggtaatttcttcagttcccttcaatatcaatagattcggttaa

SEQ ID NO: 24330 - DNA, 393 bp, Escherichia coli
atgcatacaaaatccaccacagagctaatttcaatggcacaggctgtactggtctctttaatcgaatcacataaggttatcgaaccttgtgagattgaagataatcttgtggcaattaactccttgctggttgatgcctcaatttcatcatctcaaaactcgtcaaaacataaagtaagtgatggacctttatcagcaatagcaatgctcgaagatctcgcagcagagatccatgaaagtacatcattgctagaactaatctttaaaaactctccagatatgggagaaacggataatgcattggcttgcctcatacgctcaatgattaagactggagaaaaagcttacggttacatttcacagatagaaagtaataacaaagtatcggagtaa

SEQ ID NO: 24331 - DNA, 171 bp, Escherichia coli
atgaataataactcagcaaaatacataatcagccagatacaaaatgtaattacgaatattttcgaaaatggcaaaattaacaaagatactcaagatgagcttttccatgcgatgactatgttagcagatgttaacgcggttcttagagggctagaagacgcttttttttga

SEQ ID NO: 24332 - DNA, 216 bp, Escherichia coli
atgggcaatagaatcccaacaacggtaaatgctcgcaactggacaatgcaggaaatgagtgtgcatgcagagcagctgtattacttgctccaaacaatttctgagaatttcttaaaaatggaagatgcccagcgcttcgcattgattgaaatggcttggaatcactcatcggatattaacgcatggtttggggctaacgaaaacaatgatggataa

SEQ ID NO: 24333 - DNA, 411 bp, Escherichia coli
atgatggataatttaattaacacctaccgacgccgaattttaaaggcagcgttattacgccaccagcgtaaaacgggcagtaactgccttgttattaagctcaaccaaggcggtattaacacggtcgagttaacagagattcttctcgatggattattacgaaaattcgaaaggctcgcgatcagtgagtacgggaatgtcgaaggcgtaaaagctatcagggcaatttacagcagtgctgttgatgtaaatggcagcggtgaattccttacggatagcgggaaggagttaatcgacgagctcatttctgagctggttgagttcgtcaaaaaacaaaaagtggaggctccgaaaacggagggtcatgaaatggggggatctgatggcactgacagcgatacgaattcctga

SEQ ID NO: 24334 - DNA, 414 bp, Escherichia coli
atgaacgataaacgcaccgtaagcatgattgacctggcattacagaaacacgatacgccagttggcccactgttcgtggcagtacgccacggtcgtatcaaaaaatgcttcacgcgagatacggcgatccgctatctggctttcttcatgaccaccgaggcttttgagcgttcaggttttccgcagcgtcacccgcgggtgcgtattgatcgcgatgatagggaggtatggcgagacggggaaacaaaggctgagtatctggccgcccatcagcgttgtgttcgccgtctacgtcgcatcctggcgcgtaagcgagaaatggagaagtggcgtaagaaatgggacgcgatgcatgaccggttcattaaagagttcgatgcacttcaagccatcaagcctaaaggagtgtattga

SEQ ID NO: 24335 - DNA, 579 bp, Escherichia coli
atgattgcctcagcctttactccggagcctacatcaacaggcatccgctttggtaaccgagtcataggttattccgtcgcggttcgccagctcgacaatggcaactatgacaaacgaattccggatggattagatctgctggcttgcatcatggaagcgattgaaagcggctggtttaccccgggcatcgagaaagaaatcatcatttggcgctggatgctggttgccgtcttcattgccgaggagcaggcaaagaacggcacggttgaggttgccaacgattctggagggtttgataccgcagttatctactcaggccaaaacggttcaatcagtgtttatccagcgccagagcggttcgcactagcaagccatgtggaagggttagctattgagaaatacggtcaggaactcggccagcagatggcgctgcgcatgtaccgggacatgttagatacggacgctgagaacgggcttcgactctcaaaaatggggcgggaaggttttaatctcctgcatgacagcttcattgaacagattcagaaagaaggtatgcctgacatgccggttatgcactga

SEQ ID NO: 24336 - DNA, 744 bp, Escherichia coli
atgaacactgtaacgatcaataacaaacagctgccggcagtcgaatatcgcggtcagcgcgttgtgaccctggcgatgattgatgaagttcaccagcgacctgaaggaactgctggacgtaatttccgagaaaacaagtctcgacttattgaaggagaggactacttcgaattaggttccgacgaaattcgtcgacacctgcctgacggtactttctccaagtttgcagcatcaggaattgtactggtcgaatccggttatctgatgttggtgaaatcctttaccgacgatctggcctggcatgttcagcgcgaactggttaacagctatttccgcactcgcgcgccgctgacggaaatcgagatgatcgccgcaatggccgccgatgccgttcgccagcaaaagcgcctgaatcatgttgaagagcagatcgaaacagtcacagaagctgtggagaacatcaaacgcgggaccatgcgcgccggatatgtcggttaccgccaggtggtagccaaaagcggaatgagtgacgccaagtgccgaaatttggtcaatgcctaccgcatccctacagacacgcacgaatttatgactccagacgggcttttgtcacgtagggctatcgtcgaactggagccgtttatggccgcgtttcgccagatgatgtcagaagctgaaccgcgcggaacccgctggtatcaccctaaaatgggcctgttccaggcgattgggtgggagggttaa

SEQ ID NO: 24337 - DNA, 372 bp, Escherichia coli
atgcacaaattcttcgtggagacaaacaacctgaacactatcagcgattgcctgcagcagcttgttaacgcagaagaagcgcagctcagtattgaagagcaactggcgagatcgaacagcaatagtgactggagcacatggcgcaaaaaggcagagaacgcgctgcggctgatcaaagggaagcgtcgaattatcacagctcgtttggcagttctgcgtcatgaggaaaaagagcgcaacctggagctgcaccagcagcacaacgacttcctggttcaggctctgcgcgaaatcgtaacgccctcctcttttgcgcgttgcgtgcgtctggctaaagagaaaatggaggagatccatgcaaaccagtgctga

SEQ ID NO: 24338 - DNA, 258 bp, Escherichia coli
atgcaaaccagtgctgaaatcgttcttctggtgccgaatgactgggttagcgaaaaggttctgattgcggttaccgggctcaagcccggaaccatcacccgtgccagaaaagaatcctggatgcagggccgcgagtacctgcacatttcaccagatggtaatcccaagccttcgagcgaatgcatgtacaacaggaaagccgttgatcagtggatcgaggcgcagaaaaaaaatcaaccaggtgcgaagacagcatga

SEQ ID NO: 24339 - DNA, 1293 bp, Escherichia coli
atggctaatgcatcatacccgacaggcgtcgaaaaccacggcggttcgctccgcatctggtttctgtataaaggtaaacgtgtcagggaaaacctcggtgtccctgacactgcaaaaaatcgcaagatagctggtgagctgcgttcttcggtttgttttgcgataaggatggggaattttaactatgcagaaaaattcccaaactcaccgaaccttgccaggttcggtcaggatagaaaggaaattactgtgctggagcttaccgaaagatggtcagagctgaagagaatggagatcagctctaataccatgagtaggtacgaatccatcataaaaaacatgcttccgcgcatcggcgaaaataaaatggtttctgcggttaccactgaagatttgctgtatgtaaggaaggagttgctgacgggcttccatgtaatgaagaaggatcaccggacacaggtaaaaggccggaagtcttccacggtgaataattacatgatgctgatggccgagatcttccagtttggagctgataacggctacgcaaaggaaaacccgtttagcggaattaaccgtctcaggaaggcaaaagacgaaccagatccactcactacagacgagttcatcaggttcattcaggcatgcggccaccagcagatgagaaatctctggaccgtcgccgtttataccggaatgaggcatggggaattatgtggtcttgcatgggaagacatcgatctcaccgcgggaaccattacggttaagcgcaaccttacccaaacgtatgagttcaccctgccaaaaaccgaggcaggcactgacagggtgatttatctcatacaaccagctattgatgccctcagggatcaggcccaactgacgcgccttgcccggcagcatgaggttgaagtgaatttgcgtgaatacggccagtcagtcattcatccatgcactttcgttttcagccctcaatgcgtcaagcgtgggtcccgcagaggatatcattacgcggttaattcgattaataaaatttgggcccctataatcaagcgcgccggtattcgttaccgcaacgcttaccagtcaaggcatacctatgcgtgctggtcattatcagctggtgcgaacccaaactttatagcaactcagatggggcatacagatgcacagatggtttacaaggtgtatggaaagtggatgtcagagaagagcggcgaacaggttactctgctcaacaaggcgctttcacacattgccccatcactgccccaaagcatggtagtagcgcagtag

SEQ ID NO: 24340 - DNA, 1560 bp, Escherichia coli
atgctttggtcaccgaatgatgctcctgaggggataaaaccggaatggccttatctttttaaactctcaagagatgcttatcccgatcagtactggatggaaaccgttgcttatatagttggagatgttatgggcgttcctgttcctaaagcattgccagcgcgaagaatgatggagaacggtgaatacgaatatggagctttgcttgagtggttttacgatcaaagtagccagttatttgttcatgcgtctgatttttttcatgtgttgatatcggattttgatgactcttccggaagacaccataaccttgttgatctacgcttaatttgtagggcttttagtatccgcggcctgatctctccagactggatccaatggctttacgatatgctgctttttgatgcgctcatcggtaatagtgatagacaccaagagaattggggttttgtttttgtacctgaatctgcaccaggcataacgccacctaaagtgaagggatatctcgcaccatatttcgataatggtactagtttggggcatgaaaggtatgtagagaggatcagaggatggaaccatcaaaatgtagatgaatacatacagcgtggttgtcatcatttgcggaagaatcgggcagacacgcatgaacgattaggtcatatttcttctatacaggatttggctcttgatgagcagtcaaaagcgtacttggcccggagacttgaatttgattttcaggaactggtcgacaagatagattcactttgcgaaattagctccgatgtgccgttcactagggaacgagcggattggacgattcgtttattgaggcgtagatacctaaggttatcactgattctaaatatgcgtactataaacagaataatggagcctactcggttgcttcttacatggcagccacccacaggcggtactcgttatgttgttggtcagattgatcgtcagcaaggggataactacgtcttcacataccattttcagtcagaagattatgctaaagcccaagagaaagggtttgcaggacatcccgcatttagtctgaaaagtgaagaacatacgaacaacgtgcttgacccgtttgttcggcgtttaccaccacggaaaagaaaagactttgctgagtatctggctcaacatttgctcccccatccatttgaaggctctgattttgcgctgttaggatatacaggagcaaaatcacctggcgatggtttttgtttggtgccagatccagaaattcttaatagtgaaggtgagcttctttttgaagtggcaggaactcgttatcaggaagggcttgatttgtcgaaagtaatggtcggtgatttggtcaagcttgttcctgaagaggataacccggttgatccacatgctatagctgttgttcatgagagcgggaaacttggttatataaacaaagtgttatgtaaaaaactcaagcaaaaaatagcaaaacacaaaatatctgcttttgttgcaaagaagaatgggacgccagaacgtccattagtgtaccttttagttgaatgtagatcttaa

SEQ ID NO: 24341 - DNA, 552 bp, Escherichia coli
atgaataatttaatgctcgatatagaaacattaggtgtgtcaatggatgctcctttgatttcaatcggcgctgtgttctttgagcctctgactggcaagtgtggggatgagttttatagagttataaccctatcatctgcattggaaaatagttttgtagacccaaaaactttacagtggtggatgatacaaagcgattctgcaagggcggtttttaatgacccgtctgctgttgacttacatgaagccttacaagaattttctctatttgtacgaagtcgtagtaacgatgacgtacaagtttgggggaatggggcaagctttgataacgctatattggcagcggtttaccgtaaacatgcgcaaaatatcccatggcgttttcgaaatgatcgagacgtgcgtaccatcgttgaactagctaaaagccttaagaatattgatgtaagggcaaatttttccattaatgttactgatgcgcatcatgcgcttcgagatgcaaagtttcaggtagcttatgttagtgctgctttccgtgcattagctgggtaa

SEQ ID NO: 24342 - DNA, 288 bp, Escherichia coli
atgctgggtaaacgcctgacggcgcaggaagcccaggtggcgaatttaattgatgaagtggtagaaaaagaacaggtggaaagctggatggcgaaccagttagcgcagctggaaaaatgtggtccggtggcactggcacatattaagcaactgattctggcgctggaaaataaacacgccgattactcccaccagttactggctggattaatgtccgccactcaggattgccaacaggcgacgcacgcatttgccgaaaaagccggcgtgagcttccacaatcaataa

SEQ ID NO: 24343 - DNA, 267 bp, Escherichia coli
atgtttgttgaactggtttacgataagcgaaacgttgaaggcttggagggagccagggagattatcctggccgagttgacgaaacgagtgcaccagattttccctgatgccgaagtaaaggtgaagccgatgcaggcaaacggcctgaatagcgatgccagcaaaagcgatcgggaaaaactgaaccgcatgctggaggaaatgtttgaagagtccgatatgtggctggtttctgagttcccgaccgttcgccaggttgggctttaa

SEQ ID NO: 24344 - DNA, 1365 bp, Escherichia coli
atgtctgcaggaactatcaccctgacaaacgggtccgctgttgttggcggttccggaacctcattcgcaacagaactcgccgcaggtgactttattgtctctactgtgggcggtgttgattatacgctgccagtaaaaacggttgacggtaatacccaggtgactctggttagtaactttaccgggcctactcaggccggcgcggcctggtcagctgttccccgcgttgcgctgaacatggtaactgctgcgctggtggcacaaagtgcagaagcgctgcgtggactgaattacgacaaacagaactggcaaagtattttttctggaaacggcaatgtaacagtaactttgccggataggacgaaatggacgggaccagcatggaatagcattaccactattctctcaggcaaggcggcaaaaggtgcaaacgatgacattacctcgctaagcggacttacgacagcgctgtcgctggagcagggcggtaccggttcgacaaccgcatcaggcgctcgcaaaaacctcggtttggtagatgaatctggcctcatccctgtatctattggcggtacgggagcaaaaacagcagcgggtgcccgtgctggaattggacttaaaaacgggttccctattgcagaatacaacgctacaaatgaaacggttatagataatttagtttcaaaaatgcgtggttttagtcttgcaacgcttcaaaatagtgggcaaatgacaggagacttttatgaaattccacagtctgctccaactttatgggtgggagcaaatgacacttggtttcttatgagtgttcattatctgaatcgtggtattcgtattatgtcagggtatggttcagctggggtatccacaacaaggcttctgcttgataacctttctacgacagtagatgcgaatggcttcattaaaaaagcctctcccatagctaggcttacagacaatcctgaaattatgccagccagttttctggatgattttaagctgtcaggatatgcgggtacgaactgtgaagctgaaggggtgacagctgaaaagctatcgacaggagtctatgaggttcgcggagcaaaaggactgtgtagcgaaggatggacactggaagttccacaggatgaaaacgggaatcgtttgtgttttgtcaccacggaaacatcagaaaatggaacagtcacagttcacgttttcaaacgtcgtttcgatattgatagtgcaatgatagtagcaggtgaacctatggatattccgcgtggacgctggatagacctgcgtcttgacatgccggaaaatagtgtctggaatcagcgccagaaaacagccatgggaacagatgatgttagcggttag

SEQ ID NO: 24345 - DNA, 618 bp, Escherichia coli
atgtcatatggtatgcagattttgcggccggacggaaatttatggctaagtcctgaggtaacaccgatgaaccttattgataaaggtgtcatggctggaattaatggcgaggtatttcagacgcgcatcccatcaggaataccggctatcttctttgtaagaatgcagaatgaattgtacgcatcattcagccagattgaccaaaacggatacaactcactcaggattgatgttaatgcaggtgtgggtagtatccatatttatgcttttgctgcgatggtagttgctcctccagcatttgggatcgcgatgtatgacgcttcagggaaaatgatttatcacggaaatatgaggccacttgagtgctatcaggttgcaagtcagggaacaaacacccgtattgatgttggatatcttgccgccgtgtgtcctgtgcagatgtcagtatattcagttgttaactcatcggttggtggatggaatatattcgtatcttcatcatcagcaagtggaagcattgtttccacgccaagccgacaagttgcaaacacatctggtccggcagggttcatatggagcaattcaatgttggtcattaatgcatcaaaatatgattaa

SEQ ID NO: 24346 - DNA, 273 bp, Escherichia coli
atgagctatggataccaaatatttgatgatactggggtggatataactggcctgatcacccccatatttttccttgacaagtttacatcgccatcagggaccaaaacataccctgccccaccggcaggtaaaacgcttaaggcattagtgataaattccatgctctggaatggttctgcaggtaattcgtcagttagcgtcagcggaaatactgtgacgtggagcggtcttgcagggaattctacattttttgccatggtttactgggggtag

SEQ ID NO: 24347 - DNA, 3171 bp, Escherichia coli
atggcgaataaaattaccggacgaaaaggggggagctccagttcccgaactcctaccgaacagcctgatgatctgcaatctgtagcgaaggcaaagatcctcgttgcgcttggggaaggggagtttgctggacagctcaccgggaaggatatctacctggacggaacggcgctggagaacgccgacggctcccaaaacttcagcggcgttacgtgggaatttcgcgcgggtacacaggcccagaagtacattcagggcattcccggtaccgaaaacgaaatcagcgtgggaaccgaggtaacgagcgctacagcgtggacacgaaccttcaccaatacacagctttcggcggttcgtttacgcctgaaatggccttcgcttttcaagcaggaggacgatggcgatctggttggttactcggttaattatgcgattgacttgcagacggacggcgggacatggcagacggtactcaataccagcgtgactggcaaaacgacgtctggttatgagcgcagccaccgtatcgatttaccgcaggctggcagcacctggacaatacgcctgcgtaagattacctctgacgccaacagcgcgaagattggcgacacgatgacgctgcagagcttcaccgaggtgattgacgccaaactgcgctacccgaacaccgcgctgctttacatcgaattcgattccagccagtttaacggctctatcccgcagatctcctgcgagcctcgcggccgtgttatccgcgttccagatacctacgaccctgaaacacgcacttatagcggtacgtggaccggtgcgtttaagtgggcatggacggataaccctgcgtggattttttacgacctggttgtttctgaccggttcggcctcggtcaccgtttgactgctgcgaatatcgataaatggacgctgtatcaggttgcccagtattgcgatcagatggtaccagacggcaaggggggcaacggtaccgaaccacgttatacctgtaacgtgtacatccaggaccggaacgacgcctacacagtcctgcgtgattttgctgctatcttccgtggtatgacctactggggcggggatcagattgttgccctggctgacatgccgcgcgatgttgattacagctacacgcgcgctaacgttgttggcggtcgattcacctattcgagcagcaccacgaaaagccgctacaccacagcgctggtttcatggtcagacccgggtaacgcttatgccgacgcgatggagccggtatttgagcaggcgctggtggcgcgatacggcttcaatcagctggaaatgacagccatcggctgcaccaggcagtcagaggcgaaccgaaaggggcgctggggtattctcaccaacaacaaggatcgcgttgtttcgtttgatgtcgggctggacggaaacattccgcagccgggctacatcatcgccgtggcagacgagctgctttccggaaaggttatgggcggccgcatcagcgccgttaacggtcgcgttatcaaacttgaccgcgtggcagatgcagcagcaggggatcgccttattctcaaccttccctccggagcgtcgcagagcaggaccattcaggccgtgaacggggaatcagtcacagtcaccacggcatacagtgagacgccacaggccgaagctgtttgggtggttgaatctgacgagctctacgcgcagcagtatcgagttgtcagcgtttccgataacgatgatggcactttctcgattaccggcgcatggcacgacccggataaatatgcccgtatcgataccggagccatcattgaccaacggccggtgagcgtgatcccgccgggcaaccagtcgccgcctgcgaatatcgtgatcagctcgttttccgtggttcagcaaaatatcagcgtcgaaacgatgcgcgtcagctgggaccaggcgcagaacgctatcgcctatgaggggcagtggcgccgcaatgacggaaactgggtgaacatgccgcgcagctccaccacgtcatttgacgtcccggggatttatgccgggcgctacctggtgcgcgtgcgcgcaattaatgccgctgaaatttcttccgggtggggatattcagaagagaagacactgaccggcaaagtaggtaatccgcctaagccagtaggattcacggccacgggcattaactgggggattcgtcttaactggggcttcccggcaaacaccggcgatacgctaaaaacggaaattcagtacactgccaacagtgacttttcagatcctcttttgctgtctgacgttccttatccttccgctgaatatactcagctcgggcttaaagcagggcaggaattctggtaccgcgcgcagctggtcgacagaacgggtaacgagtccgggtataccgactggatcagggggatgtctaacgataacgccgatgattatttgggcgatatcgcagatgatttcctaacctctgcagacggagaacgcctaaccggtgacatcgataccaacattgagggaatactgcagaacgccctggcgaaccacggaactgttgagcaccagtgggcacaatacggagaagtgcgtgccgatattctggtggttaaaacgacgattgctgaagttgataatgcaatggccgaactgtcaacgcaggtgcaggcgcagattgatgacgttactgcagcactggaggacaaacttaccgccgtcgttgatgcctctggcgcttcggctatctacaccctcaaaacaggcgtgaggataaacggcatcatgtataacgccgggatgtcgattgccgttctggcgcaggcagggcagccgattgttacccgagtaggtttcaacgctaaccagttcgtgctgatgagtggcagtggcgatacccagtattcgccgttcgctgtggttaatggacaggtctttatcagctcagggtttattcaggatggcacgatcaccaatgccaaaatcggtaactttatccagtccaacaattatgttgcagggtcgcagggatggcgaattgataaaaatggcacactggaaattaatggtgccacatcagggcagggcagattaacgctgaataatacccgtatggatgtttatgatcagaatggaacgcttcgcgtaagaatggggcaattatga

SEQ ID NO: 24348 - DNA, 609 bp, Escherichia coli
atgcaagaggtaatgacaagaattgagctaagtggcgtgctagctaagacatatggaagggttcatcaccgcctggttcgcactactgctgaagccattaatgcactcgcgaaaaccatcaatggattcgagaaattcttaaacacaagcaaagcccgagggctgacgtatgccgtttatagagataaaaagaatattggcgttgatgatttcggctttcccgtcaccggcgaagtgatccggattgtccctgtagtaatagggagtaaaaaggctggtcttttgcagacgatcctgggggccgtgcttattactgcagctgtgttgactggccccggcggtattggcgctgctttcgctgctggtggattgacggggtttgctgcagcaactggcgcctcgttggtcctcggtggggttattcagcttctttcaccacagccatcaggcatagctagcaaacaaagcgcagataaccgtgcatcgtatgcgtttggcggggtgacaaataccgccgcacagggttacccggttccgctcctttacggccgccggcgaatcggcggagcgattatttccgccgggatttatgtcgaagatcagcagtag

SEQ ID NO: 24349 - DNA, 225 bp, Escherichia coli
atgtatacagttgggtttggttggatcttcgtcggtatttttattgggttaattctctggtttttcatcaaccgcgccagcgtcagagcgaacaggcaggttgaattacttgagtctatcgaccagaaattatcaaaaatagtagatccaaacttcgaggcaaataacaaagaccagtcgaaagaaaactaccttgaagaagcaaggaaaaaagctgggctttga

SEQ ID NO: 24350 - DNA, 711 bp, Escherichia coli
atgcgtcagaaaaccatcgatgcgattatggcgcatgctgccgctgaatatcctcttgagtgttgcggcgtggtggcgcagaaaagccgcgttgaacgttatttcccgtgccggaatcttgccgcggcgccggaggacaattttgtcctttgccccgaagactacgcagctgctgaggactggggaacggtgatcgccatcgttcacagtcaccctaatgccacaacgcaaccgagcgaactggataaagcgcaatgcgacgcaacgcttttaccctggcatattgtgagctggccggagggggatttacgcaccatccagccgcgcggagaactgccgctgctggagcgtccgtttgtgcttggacacttcgactgctgggggctggtaatgagctatttccggcaaacgcatggtatcgagctccacgattaccgtgtggattatccatggtgggaaaacgaatatccggacaacttctatcaggattgctggtatgagtgcggattccgggaatttgacgggccaccgaaacccggcgatatggtgatcatgcaggtccaggctgataagtggaaccacgcgggaattctgctggagggcaatatgctgctgcaccatctttacggacacctgagccagcgcgtgccgtatgggggctactggcaggaaaggacgatgaagattcttagacatcagaattttatttaa

SEQ ID NO: 24351 - DNA, 759 bp, Escherichia coli
atgagcttaaacgcagattatcagaagctggaatccggaaacgatgttcgtctgattgaggtggacggttcttcctttgggctaacggacgttctccgctttcaccattacaacattccccacacagaagcggaaatcatcgccgctggtggggatgagtccaagcttccggcgaaaccaatctggtggcagggaaatgaatatgccgcctggccatatcaactggaaggtctggagaaatcaaccagtgggagcaatgcaacgccatccctgacggttgcgaacatcgaaagctccatttcagccctgtgtcttgcgtatgacgatctgctgcaggcgaaagtcactattcacgacacaaaagagaaatatctcgatgccagaaatttcgcagacggcaaccccacagcagacccgactcaggaaaagctgcaggtctggtatatcgacggtaaaacgggcgagcttgccggtgaaaccgttgaatttgttctgtccagcccgatggatctgcaggggcaaatgattccgacgcgacagcttcattcgctgtgtacctggtgcatccggaataaatatcgtaccggcgacggctgcgactatgccggcacccgctatttcgacaaaaacaacaacccggtaagcgatccgtcgctggatgaatgcaacggcacgctgacggcctgcaaactccgattcggcgaaaataacgaactctcgtttggtggcttcccgggcacgtctttgatcaggagttga

SEQ ID NO: 24352 - DNA, 339 bp, Escherichia coli
atgactatcgaaactttcacctggtgcccacggattaacgcggaggctgatacaagttttcgcgtcagaaaagcccagtttggcgatggatatgagcaggtctcaggggatggattgaacaccagaacccagcaatggacgctcaacttcactggcaacgaaacctacatttcggccattaaatcttttctcgacaggcatgaaggaacgaaagcctttcaatggaagccaccgctcgaacctttgggtttgtatcgttgcgaaacgtataaacccaccgggcttggcgcggggaaattcaaccttgaagcaacattcatccaggcatttaaaccatga

SEQ ID NO: 24353 - DNA, 3201 bp, Escherichia coli
atgggaaccgattactaccgcactatggaacagggcgggaaaaaagctgcagcggccacgcgtgaaactcagcggtctttggctgacctgaattctcagcttgcaaccgtgcgatcctctgctgccgggcttgccggtgcgtgggctggtgcatttgccacgcatcagctgattcagtttgccgacacgtggaaccagttgaatgggcgtcttcgccttgcgtcctcttccagtgaggattacgtgcaatcccagcgcgtgctgatggagattagccagcgcaccggaacatcactcgaggcaaacagcaacctgtacagcagaattgcgcagtccctgcgagatgccggttacgcttctgctgacgtcgcaaaagttacggaaaccgtagcaacctcactgaagctgtctggcgccagtaccgaagaggcgagttctgttatcacccagcttagccaggcgcttggctcaggcgttttgcgaggtgaagaatttaactccatcatggagaacggtagccgcctggcgaaactgctggctgatgggctgggtaccactgttggtggcctgcgaaatatggccaacaacggcgagctgacgaccaacaagatcgtcccgctgctgaccaacgttgagatcctccgtaaagaattcgacacccttcctgcatccatcagcggatctgcacagaaagtgcaaaacgcctttctcgcatgggttggcggggcgaatgatgctgtcggcgcatcatccacgctttctggcgtgctggatggtctggcgaataacatcgatgatgtggcaaatacagccggtcttctggttggtgttggcctcgctcgttattttggcaacatggtcggcagcgttgctcagtcaacccgggcagtcctcgctaatacggccgccgaggtcgcgctggcgcaggctcaggtccgtggagctcaggttagcgttgctgctggtcgccaggctgtttaccgcgctcaacaggcgcgtgcagcggcgacgagtattgaggctcagattgtcgctgagcgtaatcttgctgctgctcaggcatcactgaatacggcgcttgctggcaggacttcggccgttaataacctcaccaatacagcctcggtgatgtcccgcctgggtagtggcgttcttggtattctcggtggctggcctggagtgattatcggtgccggcgctgcgatgtatggcctgtatcagcatacccagcaggtgcaccgtgaggcggtaggttttgccaacaacctcgacgagatcaacaccaagctccagcagatgtcggtgcttggcctgcgttcgaccgcggctgatgcccgtacatctttacaggcgcaaaaacaggacctggccgacctcgactctcagatcgcgaaggtgaaagacagccttaaggcggttgaccaaatccagcaggactataaccgccatccgacgctgaccctgatcaacactttcatggaccaggccgacatcacggccaaaaatatcgatctgaccgataagctgaaccagttggagtaccagcgcgaacaggcagcctcaaaagtcgagcaaacgcagaagctggtaaaccaggccagcgatctggccacgcaaaaggctatcgaacaggctggcgccgtctctatcctgaaaggtgcgtatgacctgcttaaccgctcaatgtcagcgaccgctggcgccaagccgccacaatatgccgggcccgtcgtttcactggcgaacgcaacaccgcaacagcaaaccgcactggagcgctcgcgccgcgataatgagctggccagcttaagcggattagagaaactccatcagcagcacgtgtatgaagcagaagacctgaagctgacgggggcgctttacacccagtacatctacaacaaggatcaggcagccaaaaaggatgcagcggctgcggaggcaaaaaaaacctctaccgccgcctcgaaagcgcagagtaaagccgagcgcgaagcggccagcaccgccgaacagtattcccggaaaatggccgatctgagtgtggctatcgacgtgcaacgcgtcagggcgacggaaggcgaaaaagcatccgagctttacgcggcatcgcaccaggcaggcactaaatggaccgacgagcagcgcagggcgatccaggcatcatcagcagagctggcaaaatggacgcaaaaagccgacgagaacgtgcgcaagcagcgcgaacaggctgatgccctgaaggatttaactgaagcggcccgaaagttcagggatgaggcgacgctgacaaccgaaaccgcaggcatgagtgatcgccagcgcagccggttcgatgagacgcaacagatcgaccgtgtttttgctaaaacggacggcggcaccgaggccatcgcacagcgcgcagctgccctcgatgctctggataagaaatacaaggctatagcagcagctgaagcggactggatgtccggagtatcacgcggctatgccaactggtttgatgaaatcagtaacgtatccggcacggtttctgacggggtgaaaaccaccctcgacagcgcgtttggtaacgtcacctcaatgctcgaaggcaataaggttagctggaaatcgtggggtatttctgtcctgcagattatcgaaaaagtggctctgcagatggcggtggtcagcgcgatgggtggtgcctcttccggttctggcatctttggctcactcatcggcagtgtaggcagcttcttcggcggcgggccgggagcatcagccagcaccggtacggcggtttccagttatggctcaagcttccagtttaacgccaaaggcggcgtttatgactctccatccctgagcgctttcagtaatgggatcgtcagaaaccccaccatgttcgctttcgcaaaaggcggggccggaatcatgggcgaggctgggccggaggcgatcatgccgcttacccgcgcgccggatggttctctcggcgttcgtgcggtcggaagtggcggcggtcagtctgtatcttcggcgccacaggtttatatcaccatcgatggcaacggaaacactcaaacgcaggcgacaactggctatgagcaatttgcgcgggaagttggtgcttttacagataagcgttacagggaactgataatgagagatttagcgccaggaggcgctatctggaatatggctaaaggggggcgctga

SEQ ID NO: 24354 - DNA, 264 bp, Escherichia coli
atgtcgctggcgctccggttggggcgcactctccacgaactgcgccagaccatgaccgccagcgagctcaaaatgtggatcgagttcgaccgcatcagtccgattggtgactggcgcgccgatgctcaggcggcgcagatctccgttgcaatgctgaactctcagggcgggaaattcaccattcctgacgtgatgctgaaatggggtgagcaggaagaaggcgctgaagtctctgaacttgaagaatggatgtccagtctttga

SEQ ID NO: 24355 - DNA, 402 bp, Escherichia coli
atgccgcaaaaaacatcacagaattcattacgcaacgtggcgcttacagcatcgaaagcctatcgcaccaaagaaggtatcacggtccctgaatgggatggcgcaaaggtaacgctgcgtgaaccctctggcgatgcctgggtgaaattccgggagatcgttaatccccagctcgccgagggcgaagaggcaccgacgctgacggaggcggaaaagtttctgcgtaacaaagaggctgatgtggttctgtttattgacgttctgctggatgaaaacggcgagcgagtattcagcgatgaggatcaggagcaggtatctaaaatttatggtcctgtgcactcccgcctgctggctcaggccctcaacctcggcatgagccaggaagaagcgggaaagccgtaa

SEQ ID NO: 24356 - DNA, 471 bp, Escherichia coli
atgaccagtaagtatgaagtcacaaaggggatgacctttgccgtctccgacgcacccgtaaccgccgaggattttaacgcctcaggtttcccgggtgctggtgttacctggctggaagcagcctgtgcaacaaaggagatcaccttcaccggcgggcagaaaggggatatcgacgtaaccacgctgtgctcaactgaacaggagcaaaccaacggcctcgccgcgccagctgaaatgagcattacccgtaactgggttggcgatgaagcagcacaggaggcactgcagaccgcttacgaaaatgacgaactgcgcgcgctgcgcgtggtattcccgtctggcaacggtttctacgtgctggtggaggtacgccagagctcatggtctgctgcaacctcttccgttgttggcgctacctattctctgcgtgtacgcggcaaacctaaacgcatctacgcgtctggttcctga

SEQ ID NO: 24357 - DNA, 348 bp, Escherichia coli
atgacggaagacgatctctatcctctgctggcgccgctggccggagggcaggtttatccctacgttgcgcctctcggcagtgacggaaatccttcagtctctccgccctgggtaattttctcgattattaccgacgtggacgcagacgttctttgcggtcaggctgaatctgccgtttctgtgcaggttgatgtctattccagcaccatcgctgaagcgcgcacgatcaggaatatggcgcttgatgctctgcaggtgctgaagccggaaagcattgtgaaaacgccgggctatgagcctgatctgcgctatcaccgggcaacgctcgaatttcaggtaaccgtttaa

SEQ ID NO: 24358 - DNA, 450 bp, Escherichia coli
atgattgagacgagcctcgatttttccgggttaaatgacatcgcaaaggatctggaggcgcttagccgcgctgaaaacaacaaggttctgcgtgatgccacgcgcgctggcgccgaagtgcttaaggaagaagtgatcgcccgcgctccggtgcgtaccgggaaactgaaaaaaaacgtggtggtggtgacccaaaaaagccgccgccgcggggaaatttcttccggcgtccatattcgtggcgttaacccgcgcaccggcaacagcgataacacgatgaaggcgaagaacccgagaaacgccttttactggcgattcgtagaaatgggcaccgttaacatgccgccgcaccctttcattcgtcccgcgttcgatgtacgccaggagcaggcaacggaggtcgcaatcaggcgcatgaaccaggccattgacgaggcattaagcaaatga

SEQ ID NO: 24359 - DNA, 339 bp, Escherichia coli
atggaacctggacgattcaggcacagggtaaaaattctcaccttcacgacttcgcgcgatccatctggtcagccggttgaatcgtggacaggtggcaacccggtcccggctgaggtaaaggggatcagcggcagagagcagatgtcaggcggcgcggaaacggcgcaggcaaccattcgcgtctggatgcgcttcaggtcagagctgaatgcctcttctcgtctggaagtgctcagcggcccgtataaaggtcaggtgctaaatatcatcggtcctcctgtagcaaatgcgaccggcactcgcctggaaattctttgcaaaacgggagctgaaaaatga

SEQ ID NO: 24360 - DNA, 327 bp, Escherichia coli
atggcgatagatgttctggatgtaattggcctccgcctgtttaagcagcagattgaatttgaggaagacgacagggacgagctgatcacgctgtacgctcaggccgcttttgactactgcatacgctggtgcgatgaaccagcatggaaggttgcagctgatattcctgcagccgttaagggtgccgttcttcttgtctttgctgacatgtttgaacaccgcactgcgcaaagcgaagtacagctttatgagaacgctgcagccgaacgcatgatgttcatccatcgcaactggcgcggtaaatctgaacctgaggagggctcctga

SEQ ID NO: 24361 - DNA, 1158 bp, Escherichia coli
atgtctgaactcgctctcattcaaaaagccatcgaagagtcacagcagaaaatgtcccagcttttcgatgcgcagaaagcagaaatcgaaagcacgggtaaggtatccaaacagctgcaggccgacctgatgaaggtacaggaagaactgaccaaatccggtacccgcctcttcgatcttgaacagaaactggcatccggcgctgagaatcctggtgagaagaaatccttccctgaacgagctgctgaagagctcattaagtcatgggacggtaaacagggcaccttcgatgcgaagacgttcaataagtcgctcggcagtgacgctgactctgctggcgcactgatccagcctatgcagatcccaggcattatcatgccgggcctgcgccgtctgaccatccgtgacctgctggctcagggccgcatttccagtaacgctctggaatatgtgcgtgaagaggtgtttaccaataacgccgatgtggtggctgagaaagcgcttaagccagaatcagatatcacattcagcaagcagaccgcgaacgtgaagaccatcgcgcactgggtgcaggcgtcacgtcaggttatggacgatgcgccaatgctgcagtcatacgtcaacggccgtctgatgtatggcctggcgctgaaggaagaaggccagctgctgaacggcgacggcaccggggataacctggaaggtctgaacaaagtggctactgcctacgacacctcgctgaatgccactggcgacacccgcgctgacattatcgctcacgctatttaccaggtgacagagtctgagtttagcgcttccggtatcgtcctgaacccgcgcgactggcacaacattgcgctgctgaaagacaatgaaggccgttatattttcggcggccctcaggcgtttaccagcaacatcatgtgggggctgccggtagttccgactaaggcacaggccgccggtacctttacggtgggcggtttcgatatggcctctcaggtgtgggatcgcatggatgccaccgtggaagtcagccgtgaagaccgcgataacttcgtgaaaaacatgctgaccatcctgtgcgaagagcgcctggcgctggcgcactatcgcccgacggcaatcatcaagggcgctttctcttctggctcatga

SEQ ID NO: 24362 - DNA, 678 bp, Escherichia coli
atgcctgagatcgtaaaaacgctgtccttcgacgagacagaaatcaaattcaccggtgacggtaaacaggggatttttgaaggctacgcctctgtttttaataacaccgattccgatggcgacatcattctgcccggggcgtttaaaaacgcactggcgaaccagacccgcaaagtggcgatgtttttcaaccacaagacgtgggagctgccggttggtaaatgggacagcctgtcagaagacgaaaaagggctgtatgtgcgcggtcaacttaccccagggcacagcggtgccgccgacctgaaagcggcaatgcagcacggtacggttgaaggtatgtcggttggcttttccgttgcgaaagacgattacaccatcattccaacaggccgcgtttttaagaatatccaggctctgcgcgaaatcagcgtctgcactttccccgccaacgaacaggctggcatcgcagccatgaaaagtgtcgacggcattgaaacgatccgtgatgttgagaactggctgagggattcagtcggtctcaccaaatcacaggcagttgggttaatagcccggtttaagtcagcgattcggagcgagtccgagggcgacggaaacgaagcacaaatcaacgctctgcttcagagcatcaaatctttcccttctaatttaggtaattaa

SEQ ID NO: 24363 - DNA, 1275 bp, Escherichia coli
atggaagaacctaaatacacgattgacctgcgaaccaataacggctggtgggcaaggctgcagtcctggtttgtcggcgggcgtttagtcaccccaaatcagggctcacagacggggcctgtttcggcccacggacacctgggcgattcatccattaacgatgaacggatactgcaaatttcgacggtttggcgctgcgtgagcctgatttcaacgctcacggcatgcttaccgcttgatgtcttcgaaaccgaccagaatgacaaccgcaaaaaagtgggtttgagcaatccgctggcgcgactgctgcgctactcaccgaatcagtacatgaccgcccaggaattcagggaggccatgacgatgcagctctgtttctacggtaacgcgtatgcactggtggaccgcaacagcgcgggtgacgtgatcagccttctcccgcttcagtctgccaatatggatgtgaaactcgtcggaaaaaaagtggtttatcgctatcagcgcgacagcgaatacgccgacttttcgcagagagagatttttcaccttaaaggcttcggattcaccgggctggtcggcctgtcccccattgcttttgcctgtaaatcggcaggtgtggcagttgcgatggaggaccagcagcgagatttctttgccaatggcgccaagtctccgcaaatcctctcaaccggcgaaaaagtgctgactgaacagcagcgctcgcaggtcgaagagaacttcaaagagatcgccggcggcccggttaaaaaacgcctctggattctggaagcgggcttttccacatcggcaattggcgtaacgccgcaggatgccgaaatgatggcgtcccgaaaatttcaggtaagtgaactggcgcgattctttggcgtaccgcctcaccttgtcggcgacgtcgagaaatcaacgagctggggatcgggcatcgagcagcagaatctcggcttcctgcagtacaccctgcagccctatatctcgcggtgggaaaacagcattcagcggtggcttattcctgttaaggatgttggccgcattcatgctgagcacaacctcgacggcctgctgaggggcgattcggcatcccgcgctgcctttatgaaggcaatgggagaggcagggctacgcaccatcaacgagatgcgacgaacggacaacctcccgccattgccgggtggcgatgtggcaatgcgccagtcgcaatacgtgccgatcaccgatttaggaaccaacaaagagccccgtaataacggggcttaa

SEQ ID NO: 24364 - DNA, 1515 bp, Escherichia coli
atgacgcgaggtgagcgtgtaatagcgttcattgagcgcttttgcatcgtgccggaaggcaagcttatcggccagcctatgcggttggacccctttcagaaagatttcatcctggcggtttacgacaatccagccggaacggatatggcgatcctcagcatcgcccgaaaaaacggtaaaacaggcttaatcgctggaatccttctggctcacctggtggggcctgaagcggtccagaacacgcagattgtcagcggtgcacttagccgggaacaggcggccatcgtttttaacctcgcggtgaagatggtcaacctgaaccctaagctgcaggagattgtgcacattacgccaagcggcaaaaagctgatcggcctgccgtgtaacgtcgaatacaaggctttatccgcagaaggaaagacgacgcacggcctttcccccattctggccattctcgatgaaaccgggcaggttagggggccgcaggatgattttatcgatgcaataactaccgcgcagggggcgcatgaaaacccgctgctgatagttatcagtacgcaggcagcaaacgatgctgacctgctgagcatctggattgatgatgcggtcaaatcgaaagatccgcacatcgtgtgccacgtttatgaagcgccaaaagacgctgatatcagtaaacgcgagtcctggctggccgcgaacccggcgctgggcacattcaggtcagaaaaagacatggcgcgccaggctgagaaagctggccgaatgccaagcttcgaaaacaccttccgaaacctcaacctcaatcagcgcgtttctaccgtatcgccgtttatttcccgcagcgtgtgggagctttgcggagagatgccgattaacaccccgaggaagtggtacgcggggctggatctgtcagccaggaacgacttaacggcgctggttatagctggtgaagcagatgatggtgtctgggatgttttccccttcttctggacaccgcaaaagactcttgaagagcgaaccaaaacggaccgcgcaccctatgacgtttgggtgagggaggggctgctgcgcaccacgccaggcgcttcggtagattactcattcgtcgttgcggatatcgctgaaattatcggtgatttcgaccttacctcgatggcttttgaccgttggcgcattgaccagttcaggaaggatgccgatgccattgggctgaacctcccgctggtcgagttcggacagggctttaaggatatgggtccagctgtagacacgctggagtctctgatgcttaacgggcgtgtgaggcatggcatgcaccccgtattaacgatgtgtgctgtgaatgcggtggtggtgaaagatgctgctggtaaccgcaagctcgataaatccaaagcaacgggccgtattgatggcatggtcgcaatgacaatgtccgttggtgctgctaatggggaagttaccgaacagggtggtgacttcgatgacttcattttccgaccgctgagcatgtga

SEQ ID NO: 24365 - DNA, 486 bp, Escherichia coli
atggcagataaacgaacccgttccgacagttcggcggcagcggttcaggccatgaaaaatgcagcagtggacaccatcgatcctccgtcccatgcaggtttggaaaaaaaagccgaaccattctggcatgacaatatcagatcgaaagctctggacagctggacgccggccgaccttctggccgctgtagaactggcaaataaccagctctatataacggttttacgtaaggatttacgcaaagaagagcgaacacgcggagagggccgcgacgaagggcttatcaaagacctacgcaagcagattgttgagctgcagcgaactattctggctcagcgccgtgacctccagatccattcccacgcaaccaacggcgaaagccgcgaccagaagaaacgcaatcagaatgatcgtgatgcacgaaacaccaaaaccgagcatcaggaccaggacgacaacctgatcgcctttcccaagcacggataa

SEQ ID NO: 24366 - DNA, 204 bp, Escherichia coli
atgaaagacctcagcattgaataccgcgatggaaaattcgttcgcctggtgattgatggcgtggagatgaagcgcgtaacgtctatccagttctcccataccgtaggcgagaacgtaccgacactgaccgtctcagggcatgtattgccagagtatgggacatgcgctcaaaagctcgaacaggtagacaaacattcggcatag

SEQ ID NO: 24367 - DNA, 345 bp, Escherichia coli
atgaacaaagagccccgcgtatatggcagccgatgggataaggcccgtctgcgtttcctgcagcagcacccactatgtgtgatgtgtgagcaacaggggcgcattaccccagcaacggtggttgaccatatcgagccccacaaacttaaagatgcgcttaagtcaggtaaccctctggccatatcgaaagcacagcacctgttctggagtaaggagaactggcagccactgtgcaaagcacatcacgactcaacgaaacagagaatggagaagagcggcgcggtaataggctgtgatgcaaacggctacccgctcgatccggcgtctcactggagcacgtcatga

SEQ ID NO: 24368 - DNA, 591 bp, Escherichia coli
atgatgcagacagattttaagtttgtggtggtcggccatcactcgcgcttagagcatgcacaacggcttgctgagctgctggatgctcatctgcttattgatgacggtaaccgcggcgcgaactggaatcatcggcgtgcgcttgagtgggcagcagagcaaacatgccgggtagtgatgttggaagacgacgcgattcctgtgcagggcttcaccgataaggtaactgaatggctggtgcgcttccctgacgacatgctgagcttttatctcggtaccggccgaccgccgcaatatcagaaagagattgccggaatgctggtggatgcggatcgcgtctgtggtgaccacatcgtattaagcaaactgatacacggagtatgttacagccctccgcagggcaggctggcgcgcatgcttaacgcatggaataaaacgctggcagctgattacgccgtcggtgaggcattcggtggccgggtgatttatccgtgttactcgctggtggaccacgctgacctccagacggttgagcgtcaccctgacaacgagccgaggacagaacgccgccgcgcatggaggctggcatga

SEQ ID NO: 24369 - DNA, 513 bp, Escherichia coli
atggccgcaagaaagacgattgaagagagattttggataaaggttgataaaaaaggtgaagaagattgctggtgctggtgtgccgcaacagtgaagggcggtagcggagaaagaaagttaacttatggggttattggtacagatcgaaatacctctggtaacccaaaggttcttttagcccaccgggtttcttgggaaatgcataatgggccaataccggaaggtaagtatatagaccatatctgtcacaacaccttatgtgtgaaccctcatcacctccgacttgtatcaccaaagcaaaacgcagagaaccaatgtgttgttgattcccgctcaacatctggatatcgaggcgtatcgtggaataaacaaaaaaataaatggcttgcttactgcaatcatgaaggaaagcgttatcacgctgggttccatgaaacagcagagttggcagctgaagctgcacgtcgagcccgaaacaaggtgtttacccataatgatgcagacagattttaa

SEQ ID NO: 24370 - DNA, 1044 bp, Escherichia coli
atgaccgttctgtaccgggatgataagcatattgcttacaccgggcagcggggcgtgatgttgtactaccaccgcagcgctatcgagaaggtgggcgggttcgacccggtgtatggtcgcggcatgtatgagcatcctgatttggcgcttcggatttataacgctggcttaacgtcatgggcgtttgctgatgtagttggctctgaaaagctgattcactcaatggacgagtacgaagaaggcgcgcgcagcataccgaggccagaacgtgaagcgctcgataaaaagaacgctgtgatttacgggcagcgccgggattcaggatatacaggctatgccgaatatagatctcagcgcgacgtggtaataacaaccctgctaaccagccagcctgacccgcagcgcggcacgaaaatggtggccgcacctgacatgctgaccaagtgggctgcctcgcttcgaaattgtggccgtatcgcgctggtggatgaactgcaggcggcaccggcagacgttgagctgtatcgcgtccctgatgtgaagatgaatgtctacttccggcgctggctgcacatctggcagcatctgcgagaccaccctgaataccggttcgtctggtgtaccgatggtacagacgtcgaaatgctccgcgcaccgtgggaagaaatgcagcccggtagtgtttacgtcggttctgaaccgaagacctacgccgacacctgggcgaagcagaatcatcctgagcgtatctatcaggagttcattgaagcgcaccgcaacgatgtgatgattaacgctggtctgctgggtggtacccgctctgatgtaatggcgttcgctcacggcatcatccgtctttattaccggatcgagagttatcgtttctggaagaaagaacaggctggcgcagcggtgggtgacatgattgcttttggcattgttgctaaatcgtttggcgatcgaattgtcaccggcccccgcatccacactatttttaagtccgatggtgtcggaaaagagtacgctttctggcgccataaataa

SEQ ID NO: 24371 - DNA, 315 bp, Escherichia coli
atgcaggtcagtattgatggtgtcccgtatgtgcctgcgtgcacctcagcgtcacggattgggattgcaattactacctacaatcggccagacgttttaaagcgcgctattgagcagcaccagaagcatctgccagccggtgcgctggtggtagttgtcgatgatggttcaaaacctgcagcggtagtgccagacggcgtgcagctgctgcgccacgaaacatccctcggtattgttgcatcaaagaacgccagcttaactgccctgatggatgccgggtgcgagcatcttttcctgtgggacgatgatgcatag

SEQ ID NO: 24372 - DNA, 363 bp, Escherichia coli
atgagcagatttgtatatatgatggtggttttatttctggcaggatgccatgggcataagcaacatcagttaacaaccaaacagcaacaagaattaccagtattaaatcgttgggctgtgagctttaaagaagcagtagagcagagatttccttcagctagtgattacaaggggaaagaatgctctattcgtgttcatcagcctaaaggttctcgtaaaattaccagcatgcatgtcacagagggtaaccctgaattatgcatggctgcgaccaaagctatacaagcggcgagcgatgatggtgtattacctctaacacctggccccataggcgaagagtttcctttggatttcaaaccataa

SEQ ID NO: 24373 - DNA, 123 bp, Escherichia coli; identical to SEQ ID NO: 12909

SEQ ID NO: 24374 - DNA, 504 bp, Escherichia coli
atgccgggcaaccgcccgcattatgggcgttggcctcaacacgattttccgccatttaaaaaactcaggccgcagtcggtaacctcgcgcatacagccgggcagtgacgtcatcgtctgcgcggaaatggacgaacagtggggatacgtcggggctaaatcgcgccagcgctggctgttttacgcgtatgacaggctccggaagacggttgttgcgcacgtattcggtgaacgcactatggcgacgctggggcgtcttatgagcctgctgtcaccctttgacgtggtgatatggatgacggatggctggccgctgtatgaatcccgcctgaagggaaagctgcacgtaatcagcaagcgttacactcagcgaattgagcggcataacctgaatctgaggcagcacctggcacggctgggacggaagtcgctgtcgttctcaaaatcggtggagctgcatgacaaagtcatcgggcattatctgaacataaaacactatcaataa

SEQ ID NO: 24375 - DNA, 255 bp, Escherichia coli
gtgctcagcctgtttttcagcgatccggatatgcatccgctggatttcagtctgctgaaccggcgcgaggctgacgaagagcctgaagatgatgtgctgatgcagaaagcggcagggcttgccggaggtgtccgctttggcccggacgggaatgaagttatccctacttccccggatgtggcggacatgacggaggatgacgtaatgctgatgacagtatcagaagggatcgcaggaggagtccggtatggctga

SEQ ID NO: 24376 - DNA, 258 bp, Escherichia coli
ttgcattaccttgcagaccgcaccggtatcagaggccggttcagcaatgcggatgcataccatctggaccaggcttttccactgctgatgaaacaactggaactcatgctcaccagcggtgaactgaatccccgccatcagcataccgtcacgctgtatgcgaaagggctgacctgcgaagctgatacccttggcagttgtggttacgtttatctggctgtttatccgacaccggcagcacccgcaatcaccgtataa

SEQ ID NO: 24377 - DNA, 336 bp, Escherichia coli; identical to SEQ ID NO: 12930

SEQ ID NO: 24378 - DNA, 336 bp, Escherichia coli; identical to SEQ ID NO: 5363

SEQ ID NO: 24379 - DNA, 885 bp, Escherichia coli
atgcgttggcaagggcgacgtgaaagtgacaatgttgaagacaggcgcaacagctctggtggtccgtctatgggcggtcccggttttcgcctgccaagcggtaaaggcgggctgattttactgattgtcgtgctggttgcaggctactatggcgttgatttaaccgggttgatgaccggacagccggtttctcaacagcaatcaacgcggtcaattagcccaaatgaagacgaagccgcaaaattcacctcggtgattctggcaaccacggaagacacctggggacagcagttcgagaagatgggtaagacctatcagcaaccgaagctggtcatgtaccgtggaatgacgcgcaccggatgcggggcgggccagtccattatgggaccgttctattgcccggcggatggcacggtttatatcgatctctccttctatgatgacatgaaagacaaacttggcgcggatggcgattttgcccaggggtacgttatcgcccatgaagtcggtcatcatgtgcagaaactgttaggcatcgagccgaaagttcgtcaactgcaacaaaacgcgacgcaggcggaagtgaaccgcttatctgtgcgtatggaactccaggccgactgttttgccggtgtctgggggcatagtatgcagcagcaaggtgttctggaaaccggcgatctggaagaggcgctgaacgcggcgcaggccatcggcgatgaccgtttacaacagcaaagtcaggggcgagtagtaccagacagtttcactcatggcacttctcagcaacgctacagctggtttaaacgtggtttcgacagcggtgatccggcacaatgcaatacttttggtaaagcatttaacttccggggcagggatggctga

SEQ ID NO: 24380 - DNA, 762 bp, Escherichia coli
atgcaacgaaatcaggataacaacatttcgcatactgcttcgtggtatgactcttccgatcgaaataattcctggagcgtttctgcttcaggcgacaatgacgaatttaaagatatggaggcgtcactgcgcgccagttatcagcataataccgagaacggtcgtctctatctctccggtacatcacagcgggacagctactattctctgaatgccagttggaacggttcattcactgcaactcgccacggcgccgctttccatgactatagtggtagtgctgactcgcgttttatgatcgacgcagacggcgctgaagatattccgttgaataataaacgcgcggtaactaatcggtatggcatcggagttattccatcagtcagcagttacataacaacatcattaagcgttgatacccgaaatcttccagaaaatgtggatatcgaaaactcggttatcaccaccaccttaaccgaaggtgctattggctacgccaaacttgatacccgcaagggctatcaaatcatgggggttattcgcctggcagatggtagtcacccaccactggggtttagcgtaaaagatgaaaccagccacaaagaattaggacttgttgctgatggcggctttgtatacctcaacggcattcaggatgacagcaaacttactttacgctggggtgacaaatcttgctttattcaaccacccaagagcagcaacttaaccaccggaacggttattttaccgtgtattagctaa

SEQ ID NO: 24381 - DNA, 693 bp, Escherichia coli
atgccacatcacattgttattgttgaagatgaaccggttacccaggcgcgattacaatcttacttcactcaggaggggtataccgtttccgttacggcgagcggtgccgggctgcgggaaattatgcagaatcagccggtggatttaattctgctggatatcaacttgcccgatgaaaatggcctgatgttaacccgcgccctgcgagaacgctcaacggtggggattattctggttaccggacgcagcgatcggattgaccgtattgttgggctggaaatgggtgcagacgattatgtcaccaaaccgctggaactgcgcgaactggtagtacgggtgaaaaatctgctctggcgaatcgacctcgcgcgacaagctcaaccgcacactcaggacaactgctatcgctttgccggttattgcctgaatgtgtcgcgccatacgctggagcgagatggcgagccaattaaactgacccgcgcagagtatgaaatgttggtggcatttgtgacgaatccgggcgaaattcttagccgtgaacgtctgctgcgtatgctttctgcgcgtcgggtggaaaaccctgacctgcgcaccgtcgatgtgttaattcgtcgtttacgccataaactcagcgcggatttactggtgacgcaacatggcgaaggttatttcttagccgctgatgtgtgctga

SEQ ID NO: 24382 - DNA, 2547 bp, Escherichia coli
atgaacaataacgatctctttcaggcatcacgtcggcgttttctggcacaactcggcggcttaaccgtcgccgggatgctggggccgtcattgttaacgccgcgcagtgcgactgcggcgcaagcggcgactgaggctgtcacctcgaaagagggcattcttaccgggtcgcactggggggctatccgcgcgacggtgaaggagggtcgctttgtgacggcaaaaccgttcgaactggataaatatccgtcgaaaatgatcgccggattgccggaccacgtacacaacgcggcgcgtattcgttacccgatggtacgtgtggactggctgcgtaagcgccatctgagcgacacctcccagcgcggtgataaccgttttgtgcgcgtgagctgggatgaagccctcgacatgttctatgaagaactggaacgtgtgcagaaaacgcacgggccgagtgccttgctgaccgccagtggttggcaatcgacggggatgttccataacgcttcggggatgctggcgaaagcgattgccttgcatggtaatagcgtgggtacaggcggagattactctaccggtgctgcgcaggtgatcctgccgcgcgtggttggctcaatggaagtgtatgaacagcaaacctcctggccgctggtattgcagaacagcaaaaccattgtgctgtggggctccgatttgctgaaaaaccagcaagcgaactggtggtgcccggatcacgatgtttatgaatattacgagcagctaaaagcgaaagtcgccgccggtgaaattgaggtcatcagcatcgatccggttgtcacatccacccatgagtatctggggcgcgagcatgtgaagcacattgcggttaacccgcaaactgacgtgccgctgcaactggcgctggcgcatacgctgtacagtgaaaacctgtacgacaaaaacttcctcgctaactactgtgtaggttttgagcagttcctgccgtatctgctgggtgagaaagacggtcagccgaaagatgccgcatgggctgaaaaactgaccggcattgatgccgaaaccattcgtgggctggcgcggcagatggcggcgaacagaacgcagattattgctggctggtgcgttcagcgtatgcagcacggtgaacagtgggcgtggatgattgtcgttctggcggcgatgctggggcaaattggcctgccaggtggtggctttggttttggctggcactataacggcgcaggcacgccggggcgtaaaggcgttattctgagtggtttctccggctctacgtcgattccgcctgttcacgacaacagtgactacaaaggttacagcagcaccattccgattgcccgttttatcgatgcgatcctcgaaccggggaaagtgatcaactggaacggtaaatcggtaaaactgccgccgctgaaaatgtgtatttttgccggaactaacccgttccatcgccatcagcagatcaaccgcattattgaaggctggcgcaagctggaaacggttatcgccatagataaccagtggacctcaacctgccgctttgccgatatcgtactgcctgcgaccacgcagtttgagcgtaacgatctcgaccagtacggcaaccactccaaccgtggcattatcgccatgaaacaggtcgtgccgccgcagttcgaggcgcgcaacgacttcgatattttccgcgagctgtgccgtcgctttaatcgcgaagaagcctttaccgaagggctggacgaaatgggctggctgaaacgcatctggcaggaaggtgtacaacagggcaaaggacgcggcgttcatctgccagcgtttgatgacttctggaataacaaagagtatgtcgagtttgaccatccgcagatgtttgttcgtcaccaggcattccgcgaagatccggatctcgaaccgctgggtacgccgagtggcctgattgagatctactcgaaaaccatcgccgatatgaactacgacgattgtcaggggcatccgatgtggtttgagaaaatcgaacgctcccacggcgggcccggctcgcagaagtatccgttgcatctgcaatctgtgcatccggatttccgacttcactcgcagttatgtgagtcggaaacgctgcgtcagcaatatacggtagcgggcaaagagccagtgttcattaacccgcaggatgccagcgcgcgtggtattcgtaacggtgatgtggtacgcgtctttaacgctcgtggccaggtgttggctggagcagtggtttctgaccgctatgcacccggcgtggcacgaattcatgaaggggcatggtacgatccagataaaggcggcgagcctggtgcgctgtgcaaatacggtaaccccaacgtgctgaccatcgacatcggtacatcgcagctggcgcaggcgaccagtgcgcacactacgctggtggaaattgagaagtacaacggaacagtggagcaagtgacggcgtttaacggccccgtggagatggtggcgcagtgcgaatatgttcccgcgtcgcaggtgaaatcatga

SEQ ID NO: 24383 - DNA, 969 bp, Escherichia coli
atggtacgcgcaatgcgggcgatgggcgtcgactacgctgcagaatatctgcaacgcttcggcttcccggcgcaaaacattgtccacaccgaatcgctggcgctgggttcagcgtcattcaccccaatgcaggtggcgcgcggctacgcggtcatggcgaacggcggcttcctggtggacccgtggtttatcagcaaaattgaaaacgatcagggcggcgtgattttcgaagcgaaaccgaaagtagcctgcccggaatgcgatattccggtaatttacggtgatacgcagaaatcgaacgtgctggaaaataacgatgttgaagatgtcgctatctcccgcgagcagcagaatgtttctgtgccaatgccgcagctggagcaggcaaatcaggcgttagtggcgaagactggcgcgcaggagtacgcaccgcacgtcatcaacactccgctggcattcctgattaagagtgctttgaacaccaatatctttggtgagccaggctggcagggtaccggctggcgtgcaggtcgtgatttgcagcgtcgcgatatcggcgggaaaaccggtaccactaacagttcgaaagatgcgtggttttcgggttacggtccgggcgttgtgacctcggtctggattggctttgatgatcaccgtcgtaatctcggtcatacaacggcttccggagcgattaaagatcagatctcaggttacgaaggcggtgccaagagtgcccagcctgcatgggacgcttatatgaaagccgttcttgaaggtgtgccggagcagccgctgacgccgccgccgggtattgtgacggtgaatatcgatcgcagcaccgggcagttagctaatggtggcaacagccgcgaagagtatttcatcgaaggtacgcagccgacacaacaggcggtgcacgaggtgggaacgaccattatcgataatggcgaggcacaggaattgttctga

SEQ ID NO: 24384 - DNA, 348 bp, Escherichia coli
atggcgcgaaattttcatttcgaatatggaacagcgcgcgcctggggatcttttggctatgctattggcgcgttctttgccggtatattttttagtatcagtccccatatcaacttctggttggtctcgctatttggcgctgtatttatgatgatcaacatgcgttttaaagataaggatcaccagtgcatagcggcggatgcgggaggggtaaaaaaagaggattttatcgcagttttcaaggatcgaaacttctgggttttcgtcatatttattgtggggacgtggtctttctataacatttttgatcaacaactctttcctgtcttttatgcaggtttattctaa

SEQ ID NO: 24385 - DNA, 429 bp, Escherichia coli
atggcgattattcctttctttgtgaatcgggtagggccaaaaaatgcattacttatcggtgttgtgattatggcgttgcgtatcctttcctgcgcgttgttcgttaacccctggattatttcattagtgaagctgttacatgccattgaggttccactttgtgtcatatccgtcttcaaatacagcgtggcaaactttgataagcgcctgtcgtcgacgatctttctgattggttttcaaattgccagttcgcttgggattgtgctgctttcaacgccgactgggatactctttgaccacgcaggctaccagacagttttcttcgcaatttcgggtattgtctgcctgatgttgctatttggcattttcttcctgagtaaaaaacgcgagcaaatagttatggaaaagcctgtaccttcagcaatatag

SEQ ID NO: 24386 - DNA, 186 bp, Escherichia coli
atgtcaacgccggataatcgttctgttaatttttttagcttgtttcgccggggacagcattactcaaagacgtggccgctggaaaaacgccttgccccggtctttgtcgaaaatcgcgttatcaagatgacgcgttatgcgatccgttttatgccgccgatcgccgtatttactctctgctggtag

SEQ ID NO: 24387 - DNA, 207 bp, Escherichia coli
atgcagggattgtggtggctgggcaagcgttctgtaacgccattaccccctgctatcctcaactggttttatgaagttcgcggtaaattgcaggagtctggacaggtgttggcacccgttgaaggcaagcctgattaccaggcattagctgacacgcttaagcgcgccttcaaacaactggataaaactttccttgatgatttgtaa

SEQ ID NO: 24388 - DNA, 321 bp, Escherichia coli
atggttacagttgtcagcaattattgtcaattatctcaaacccaactctgtcagacatttgcagaaaaatttactgtgaccgaggaattactgcagtctttaaaaaaaacagcgttatccggggatgaagaaagtattgagttactgcataacattgcgttaggttatgatgaatttgggaaaaaagctgaagatattctttaccatattgttagaaacccaacaaatgagaccctatcgattatccgacttattaaaaatgcctgtttaaaattatataatttggcacataccgcaacccccccccctcaaatcacatga

SEQ ID NO: 24389 - DNA, 1191 bp, Escherichia coli
atgaaagagaagttatggacgaaggatttttgggcaataaccatcatcagctttattattttcttcgtcttttatgttttactaacattgttgccaatttatatctcagaccgcttgcatgcctctcctgataaagcaggtttgttggtgactttatttttaattgccgccattgttattcgcccctttgccgggcaatgggtaggtaaatattcgaataaaactattctggggctctcttctctggcctttttggtggtcactgcgctgtatcctttttgccactcaattgaatcactgctttttattcgggtgcttcatggtattaccttcggggttatcactacggtaaaaggaacgatttccgcgcggctgatcccggcctcccgacgtggggagggcatcagttttttctctctggcaatggggctggcaatggtggtcgggccgtggattggtctgaatatggcgcgctgggaaggctttaatctggctttctggctatgcaccggcgtggcagcggtggggattattctgtcgctgattatgacagtgccgccggttatcagccatgctgatggttcaacgccgaaaatgggcttcgccgccatgttcgatcgcgcggcgttgccatttgcgatggtcaccttttttatgaccttttcgtatgccggggtttctgcttttctggcgctttatgcacgcgaacttaacctgatgtcggcagccagtaatttcctgctttgctacgctatcttcctgatgatttgccgtacctttaccggcaatgtctgcgacaaaaaaggaccgaaatatgtggtttacccttgccttgtgttctttacggtaggactggtggttctcggctacacccagggaagcataatgatggttgtttctggcgcattgattggtatcgggtatggttccgtgacgccagtttttcagacgcagattatcagttcagtggaaccgcataaaatcggtgtcgcaaactccctcttcttcaatgcgatggatgcaggcctggcgctgggagcctgtgtgatggggatgatggttgcacatactggctaccgaatgatttatctgctgggtgcactattagtggtagtggctggcggagtctatgcgctgcaaatgaagggtaaaagcggtgtcgcgctagtagtggcaaaagaaattcattaa

SEQ ID NO: 24390 - DNA, 162 bp, Escherichia coli
atgctggaaaccaacaaccgtagctacttgacggtcgccattggttgtaccggcgggaagcaccgttcggtgtatattgcagagcaactggcagactacttccgctcgcgcggtaaaaacgtccagtcacgccatcgtacgctggaaaaacgtaaaccatga

SEQ ID NO: 24391 - DNA, 1725 bp, Escherichia coli; identical to SEQ ID NO: 23714

SEQ ID NO: 24392 - DNA, 243 bp, Escherichia coli
atgaaaaaacctgtcgtgatcggactggcggtagtagtacttgccgccgtggttgccggaggctactggtggtatcaaagccgccaggataacggcctgacgctgtatggcaacgtggatattcgtacggtgaatcttagtttccgtgttggggggcgcgttgagtcgctggcagtggacgaaggtgatgcgatcaaagcgggccaggtgctgggcgaactggatcacaagcgtgcgacatga

SEQ ID NO: 24393 - DNA, 333 bp, Escherichia coli
atgaagtatatagcaacatctgtagtggcaatgctgctcttatctggttgtgataatacgcaaagtaacaattcatccccgtcagaaacagaagtcggcgttgttacagtcaaatctcaaccggtctcggtagtcagtgaattaaccggacgcatcagtgctgcgctcagtgccgaagtacgtccgcaggttgggggaattatccagaaacgcttatttaaggaaggtgatctggtcaaggctggacagcgctctaccagattgatgcggccagttatcaggctgcatggaatgaagctcgggcagcattacaacaagcacaggcactggtaa

SEQ ID NO: 24394 - DNA, 1641 bp, Escherichia coli
atgaatagactagtaatagttggtcatccgagctctaattatcaaattgtagaagaacttttgcatcaaagaggaatgaattctctatgtccatcgaagcgagaaaatttaagcccccaagatatcactcagacgcttcgtaaggcatatcaatcccctgatatatacactgtaacagatagtgctgatttcgaaccattacacgtttctactgtctggaatggtatagcccttgacttgatgcttagtaatttgaaccaaaaattgtgcggatggtcggatcctaatgcaatccatacattagaatattggaagagtgttgatgaaaacattacatttattctaatttacgatcatccaaagtctattttaacaaattatttttcagatcaaaatatatcgtccaactatacgtcagaacatttaattaaaaactggcttgcctataatacagcattgttacacttttttcttaataatcgcggtaggtgtttattagtaagctcagaacaagtcaaacgtaatgcagaggattgcatacaacaacttcaacataagcttaagttgaaatttggtctttcattttcaaatacgattaatcattcactagaacaatctgtaaatgattttaagacggctgaagcttcgattactctggaaaaagagcatcaggaaataatgtctctatcaggtattgatataggaaccggagatattatattcaaacagagtgaaacagaggaatatttaattttcaatgtattgaatgattatccagattgtaaagagctttattttgaattacaatctaatgcaaatactccgcttagggttttagaaaaggaaaattacaagccttcctttatatgggagacatttataaaacaacgccaaataacattagatattgtcaatggattatatcagtcctctaaaaaaataattttagataacgagttacacacatcaaaacaattaaatgcatatcaggctattttaaaagaattgagtgactctaaagaagaattgattcaatatgatttaataataaaaaataagacaatacaagttcaggagcttgaatgcgccatagaaaattttgaatcgctgttaaagaaagaacaaaataaaaatgaattgcaacaacaaagattggaaaaattaagttgtgaaaaagaactactgcttaatcaattgcatttagtacaacaaaaacttgaacaatattttattgataatcaacgattagaaaaaaaacaacttccagaattatatggtgcagcagaacgtataaaacaggacattggatatcgcctgggtgctgtaatggttagtcgttcaaaaacatttttaggattaattagcattccttttgctttgatatccgaatggcgaacatggaaaaagaaatacgatagtgaatatcaagtctctctgccatcaatatttctttatgctgataaacatgaggcagaaagggtgaaaaaacatttatcctatcaattaggaaaattaatcataaataaaaataattttccactagggttgatatctttgccattttcgatatacagaacaatacgtcaattcaaaagaacaaaaaataattctcaggtaggggttaaatactatggaaaataa

SEQ ID NO: 24395 - DNA, 249 bp, Escherichia coli
atggttcatggcaaatcaaaagatgttccacagatttcacatgaagcattaaataatctgaaaggtcgagtggaaacattcacacaagatttaaaggttatcaagccgtcagtaaatattcagcctcagacaatcaatatcacaactcagacggtacttgatggaaaggttattgatgaaagaaccacatcgcatattaatcgtatgcaggaagataccttgattagctcagcttacccagaggaataa

SEQ ID NO: 24396 - DNA, 774 bp, Escherichia coli
atgtttgacacaaagcaaattagatactcaggtaaagatggtatctattttcaccttagagataatgtagaatcttttcttgccttaacagctactgaacagatggactatgactcaccgatgatggtgacaactcaggctatgcaatcggggcaaactatcactgataatgttcagagagcacctaagaccatctctattagcggtgttgtagtggttgattcgacgggttcagttctattaaccagacaggggcaacttgtagagacctttatttctacggttgaacaatggcgagaccagaagcaaatcatcactattgtttgtaaagatggaatatctatcactgatagtatcattactcagtttaaagcgagtaaagagcataccattgctaatggtcttcgtattcagatgaccttccaaggtgtagagtttcgttcaatcgtaggtcaaacggatatttcggctgctactggcaaaacggctaccacaaatgatggtggtgctaccagtaaaaagaatacagggaacactacaacaagtttaggtaatggtatgttgctgtgtcaggagctatataatcgctctacgagtgaactttctaatgagcaacttcaagcccgtatcaattgtggtagaagtgtcaaagttgagaatggaaaaagcaccttctcagatgccgctaatgagcaagctgcaaaggtgcttaataatgctggtacaggtaatgttttgaagaggctgtctgtgaatcctcacaagcgctactga

SEQ ID NO: 24397 - DNA, 333 bp, Escherichia coli
atgatttcagcgaaacaaattaataacctgatttcgcaagagaagtttgatgttgatgcggcaatgaagaaagtctctgaactggaaacgctggtggcgcaggccaaagaagcggataaaggcggtatgaatttctcgttcattaattcggcagaccagtatcaactcgaggctaaaaaatatgttcgccgcgtcagagataaagttccgtactctgactgggataaagagcaacttcaggatgcaaacacaagctggatggtcgacgactcatttccgcgagcgttacgcgagtacaacgaaatggtcgatgactataatagcctgcgttaa

SEQ ID NO: 24398 - DNA, 270 bp, Escherichia coli
atgaagcatcatcatatttacctacaaccgcatgagaatggcgtgtttgttctggtaagcgatgctcagcctacaaatcctactattgcacaccctaacctggtggagaatcttctgatatgggatgctcagggcaaagccgtagatgtatttaaccacccgttaactggcgtttatctcaatagcttcaccctggatatgctcaggagcggcgaaagcagtaaaagttcaatttttactaagcttgcccgattgatggttgagaattaa

SEQ ID NO: 24399 - DNA, 987 bp, Escherichia coli
atgtcttctgtttctacatcgggttctggcgcacctaagtcgtcattcagctttgggcgtatctgggatcagtacggcatgctggtggtgtttgcggtgctctttatcgcctgtgccatttttgtcccaaattttgccaccttcattaatatgaaagggttgggcctggcaatttccatgtcggggatggtggcgtgtggcatgttgttctgccttgcttccggtgactttgacctttctgtcgcctccgtaattgcctgtgcgggtgtcaccacggcggtggttatcaacctgactgaaagcctgtggattggcgtggcagcggggttgctgcttggcattctctgtggcctggccaatggctttgttatcgccaaactgaaaataaatgctctgatcacaacactggcaacgatgcagattgttcgaggtctggcgtacatcatttcagacggtaaagcggtcggtatcgaagatgaaagcttctttgcccttggttacgctaactggttcggtctgcctgcgccaatctggcttaccgtcgcgtgtctgattgtctttggtttgctgctgaataaaaccacctttgggcgtaacaccctggcgattggcgggaacgaagaggctgcgcgtctggcgggtgtaccggttgttcgcaccaaaattattatctttgttctctctggtctggtatcagcgatagccggaattattctggcttcacgtatgaccagtgggcagccaatgacgtcgattggttatgagctgattgttatctccgcctgcgttttaggtggcgtttctctgaaaggtggcatcggaaaaatctcatatgtggtggcgggtatcttaattttaggcaccgtggaaaacgccatgaacctgcttaatatttctcctttcgcgcaatacgtggttcgcggcttaatcctgctggcagcggtgatcttcgaccgttacaagcaaaaagcgaaacgcactgtctga

SEQ ID NO: 24400 - DNA, 1185 bp, Escherichia coli
atgaatgtttttaatacccctatctcccgtaaaggaacatattgcactcaatgggacttttgtgaggacagatttggtgtaaaagatgtattaccattttctatttcagatatggatcttccgataccggaagctatcatcagggcattaaaaaaacgcctggaacacccgattttagggtacagccgttggcagcatgatgattatctgaatgcgatagtcaattggtatcatcaacaatataaaactgaaataaaaccagaatggatcacctatagcccaagtgtgatgtattcaattgctaaggcaatagagttattaacattgaatggagataacattctcatttttacgcctgtttataacgcattttttgatgtaattaaacaaagtggtcgaaatatgctaacaacctctttgaataaagaaaatgagagaggctacgctatcaactggcaagattttgagctaaaaattaaaagcgcgaagatggtgttattgtgtaatcctcataacccgacaggaaccgtctggtcggaagaagatctcttcaaaatcgctgcaagctgcgcaaaacaaaaaatctggctatgttcagatgaaattcacagtgattttgtttttaaccatggtttcacgtccgcgttaaaaataaaaaatgacaaagtagtggtgttaaattcgatttcgaaaacatttaatgttcctgcactaacaggatcatatatgatatccgctgaccaggattttaatgataagtttagaacgatatcaagatatcgcgattttgtaaactcaccatctatattgaatgtgattgctaccattgttgcttataacgaatgtgaagaatggttaaagtcgttaaaggatcatattgcctctaacattcaatttacccagcagtatttgaatgaaaatattccagaattgatcgtgaggtccgctgagggttgctatttttcgtggatagattgctcggccattggctatccctttgataaattttaccgacgattaattgatgaagggaaagtgggtattatggcggggtatgtttatggtacggaaggtgagggctatctgcgtctgaatctggcctgcggtcgagaaaaattatatatggggcttgtgcgccttgcgagtgtaattaaaaatattaatcaggaaaaagaaaatgaataa

SEQ ID NO: 24401 - DNA, 1260 bp, Escherichia coli
atggcaaagctgacagatatccaaatcaagtcatggattaaggcaggagaacgcttcgaggggcgctctgacggcaacgggctataccttcgctatcgagtgggggataaagtgcctgtatggcgttttcgatatcagttcgctgggaaatcacgggtaatgcttattggatcttatagcgaaatatccctttccaaagcacgggaaatagccaaggaattatccgcacgtgtagccctgggcttcgatgtcgccggggaaaagaaagcgcgaaaagcggctgctatagaaaagatggagcgggagaaaaacgcgcttcgcgtgtcagagctagcaaccgagtatttcgaacggcagattttgggacgctggaaacatcccgatcttctgcgccggagaatcgataaggatatcaacccacatattggcaacatgaagatagaggacgtaaaaccccgtcatattgatgcgatgctacagagcgttgttgatcgtggcgctccaaccgtagctaatgacgttctgcgctggactaaacgcatattcgattatgctatcaagcgtcatgcactggaattaaacccagctggagcatttgatctgtcagacgctggcgggcaggaaagtagccgtatgcgctggctgacccgtgaagagcttatacgttttttccaagctatgcgcactgcaaaaggattcagccgcgagaacgagctgaccatgaagctaatcctctgcctgtgttgtcgcaaaatggagctgtgcggtgctcagtgggatgaattcgaccttgatgaagcagtgtggcatctaccagcagaacgcgttaaaaacggcgacgctattgatataccactacctccacctgcggttggttggttgagagagcttcgcactatcgcgggcagtgggagtaaatgggttctccccgcgcggaagatgcaacaccgcatgattccccacattcaggaaagcacactcccagtggcgctggcaaaagtacgccgcgaaatgccagaagtaccaaacttcacaattcacgatttcaggcgtaccgcccgcacccatttagcggcgttgggtgtcgatcccgtagtcgcagaacgttgcctgaatcaccgcattaaaggcgttgagggtatctacaaccgccaccagtactttgaagaacgacgggcagccctggaactgtgggcggggcttctggtttcgcttgaacgaggggaaaactacaatgttattcctttatctaaaatataa

SEQ ID NO: 24402 - DNA, 552 bp, Escherichia coli
atgaaagatattacaaacatcgcagtgactggcgaagatggcgtggtgacgtatgccgacggcagtaaagaggagttccagtgcagcggaaccgttgcgaccatcattgcaagtcttgcaacgacactcgagaaagaacgcaaaatgcgcatcgccaccggcgaccgcctgcgccgcatgtacacccgcgacagtgatatgatttcccgcggtttgaatggcacgtctgctacttccacggcaccgacagcaatgaatgctgagttcatgcgtctggtacgtgccgtagcgccgaaatacgattcagcactgcccgacgccgacccgcgcatcgttgcgctcgatgtgctgcgctacgcccctgctgaggcgttcagcgccgtacaccctaccccaatgtcagaaatccagctggatcaggctatcgatatactcgagcaggttggcgactacatgaaagcaaacaatatcgctccgaaaataatttctacaggagacgcaatccgcagcatcaatgctgacaacgccaccttctggggcaaaaaacactaa

SEQ ID NO: 24403 - DNA, 189 bp, Escherichia coli
atgcctatctatgacccgaaattagccgcaggcaacccacagcgcgcccaccgcccaatgctgacccgtcaggatcttgaagcggcaaaggcacgcaataacttcgatcgccagagtcgcaacctgcagcaactcaacgaatcaaatgcacggttctggagtgaacagaatgagaaagccaaacgttaa

SEQ ID NO: 24404 - DNA, 672 bp, Escherichia coli
atgggcgccattcaccagatatatgagcaggaaatgttctataactggataggcgatggtaaacgatgtgtagcattccacgaagcgggccatgcagtagccgcatggcttattcgcttagatatgcaggttatcgccattatggatgaatccggctacgttgctggcgaacatgtacatgaagcccagtgtttgggcgttgttaaacacggcataatccacagccacgatctcaggcgtttgcgggagagtaaatctggtgtagttgggcacgatggcaaagttatccctttcatacgctactacgcggaaggtataaagcgcgatgcaacaaaggccgcttttgtagccctcgctggaccagtaagcgaagccatttacgaaaataacgaaattttcaataaaaagtattcactccctcaccgctatgacatggctaacgtaaatgacatgctcgatttaatatgtgccacggataagcgaattaacaggaagttaatgctttctaaacttgttgaaaagaccaaattcctcatgactcaatactggccggaagtaggaaaaatagcgcatttgcttgagcgggataacattgttaatgggcgcgatgttagctcgctaatcggcctcaacgtcattgaccgggcaacgccatttttgctggcggaataa

SEQ ID NO: 24405 - DNA, 1059 bp, Escherichia coli
atgatgaataatttaatcaatcgcattgctttaacctttctagcgttagtactcacaggctgcactgcggggaaaatcgatcccgcaaaagcgttaacacaaatgcatatcgtcaaaagtgatgactataagaagcgccccggctggcctgcgttggttcgtctgggtactgacgattgtgagacatacaaaagtggcggcggtagcctctttaagtgggacgggctgacgtgcaacgacaaaagcattatcctggcggttaatagcaaaccacagaccattccagtgttctacgctgcttaccatgaatacgggagctatggggtcggggaactatccaattttgacaatagcacccgaacaggtgaggaagcctcgaagattctggttaacctgaccacagcattgaacaatccggcaaaagttgacgctatctatgctgactatgaaaaggatcgttggagcatgggacttggtacagtcaacgaaagcgattttaaaaagagcctggctacttttgctcaggaacgggataagctcgcctctgaataccataaattacgtgacgcaaaccaaaagagatacctagctgaacgggacgaacgaatcaaacgtgagaaagaagaggccatggcctctgaaaaaacgattgatctcgtgttatggcagaatccaacagttgagcaacagatggttgttgacgctctgcacactattaaattcacaataagaaacgatggcgtggcatacgctaacggtcgccgatttatgtcaattgccgggctggaatatctcaggaatagcctagctctgagtatggagtcatgttcagacgctggggcatatgttggtgatacggcattaaatcgcgcatgtattcagggcttggcgaggaacattgttgagtgggggaaaaccgccaacgaccgttctatttcagacagagcatggaacgcagctgcaatggatggcagcattaactacaacccaatcaagtatgaaatcctgttttcacattgggcaggaatggcccgtgtctactctgctcgtggatattaa

SEQ ID NO: 24406 - DNA, 819 bp, Escherichia coli
atgagtggttttgtttttcctttcgagtttcaaccagtgccagaggcattggcaatcctgaacgacatggatattgctccctttgaaataaccgaaaaacacctagaaagctggtgggcggaggggaaaattcaactgtgctttaactggggtagattctggaaagctggcttagccgacgaactggcaaaaacagaaggctacgcagaattaggggcgaaagaaaagatcactgcgctcaatgctgtatccgcttcccccgaggctaacatcagtcttgtcgtgccatcttacagcgatttaagttttatctggcgcgggcatagcgacgatccactccccagtatcgaggccaaaccatacgggcttgatcaaccttttgttatcaaacgcgttcctcacacctgcgaggactattgcgattacggtacgcagcattgggaaaaactttaccattcgctgcacatttcgagtatggtgctgccgcgtgctgaagctgaaaaaatttattatctctgcaaccctacagctattccaggcatggacgaaaagacggcatctgcagtatctgcgaaaacggttaactatctggccactgctttaaaagcttttattcacatccattacggggctgatgtggcggacaacctgcgcaaacatcttgaggatcccaccagtgatatacggaaagactttgcgaataaagggatcaaagcgccaggtggaaaagcgctggccagccatctgaaaaatattctgattgaagttttacccgcgctcgacaacgtcgatgtggagagtgacgctggtaatacataa

SEQ ID NO: 24407 - DNA, 213 bp, Escherichia coli
atgaaatcgcaaactttcacctttcccaccaatggcaacgcacgagccaaacaagtggcgcactatcttggagtgcatatcagcaccgtatggcgctatgcaaaacgtcctgattttccaaaaccccaccagttaaccgacggcgtgaccgtctttgacgccgcagctattcgccaatggaacaagcaaaaaaccgggggtgagaatgcttaa

SEQ ID NO: 24408 - DNA, 195 bp, Escherichia coli
atgtttaacgtcattgtcacggtcacctatcacttttcgggaacgatccgtcgttttgctattccggaacgtttcaataatcgtgagctcgcagagaaagcggcgcagcagttaacccataccagctatctggatgatggagtgagcagaattgtgacccacgcggcggaagtagtggaggtgcgccatgtatga

SEQ ID NO: 24409 - DNA, 189 bp, Escherichia coli
atgtatgacgcctacctgaacccaaaggacgcactccgtccgatcgccgttgcactcgaggctgcacagtttatcgcgcttgacccggagaataccgatttagcccatgagctgatcgcctgggcacttgaaacagccgcgcgtgcctcagctgcgcaacgtaacaccccggaggtggacaatgcttaa

SEQ ID NO: 24410 - DNA, 222 bp, Escherichia coli
atgccacgcaaacatcgctcatcaagcaacctgatcaaattaatggaacgccagaaaggtatagggcgcgacgatatccagatcgcagataatcgccctacattcatgccgtacgagccgaacggaacctacgccacaaaccgccatacccgccgtatgctacgcaagctccacggcatccaggcaaaaagaatgtgtgatctgaaaggaggtcagaaatga

SEQ ID NO: 24411 - DNA, 417 bp, Escherichia coli
atgaacgactgggaagtcaatttcgacgggctggtagggctgacgcatcattacgcgggcctgtcgtttggtaatgaagcctctacccgtcaccgttttcaggtctctaacccgcgactggcggcgaaacagggcttactgaaaatgaaaacccttgccgatgcgggattcccccaggccgtgatcccgccgcacgagcgtccgtttattccggtgctgcgtcagttgggattcagtggtagcgatgagcaggtactggaaaaggttgcacgccaggcaccgcactggctttccagcgtcagctccgcttcgccaatgtgggtagccaatgcggcaacgatcgcgccatctgccgatacgctggatggcaaagtgcacctcaccgttgccaacctgaacaataaatttcaccgttag

SEQ ID NO: 24412 - DNA, 576 bp, Escherichia coli
atggaatactttgatatgcgtaaaatgtcggtgaatctgtggcgaaacgctgccggtgaaacgcgcgaaatttgcactttcccaccggcaaaacgtgatttttactggcgtgccagcattgcatccatcgcggcgaatggggagttttctttgtttcccggtatggaaaggatagtgacgttgctggaaggcggcgagatgttccttgaaagcgcagaccgctttaaccataccctaaagccgttacagccttttgcctttgcggcagaccaggtggttaaagcgaaactgacggcagggcagatgtcgatggatttcaacatcatgacacgcctggatgtctgtaaggcgaaagtcagaattgccgaacgtacgtttactacctttggctcacgcggcggggtagtgtttgtcattaacggggcgtggcaattgggcgacaaactgctcactaccgaccagggcgcgtgctggttcgatggcaggcacaccctgcggcttttacaaccgcaaggcaaactgttgttcagtgaaatcaactggctcgctggtcattcgccggatcaagttcagtaa

SEQ ID NO: 24413 - DNA, 444 bp, Escherichia coli
atgagcagcaataaagagttaatgcagcgccgcagtcaggcgattccccgtggcgttgggcaaattcacccgattttcgctgaccgcgcggaaaactgccgggtgtgggacgttgaaggccgtgagtatcttgatttcgcgggcgggattgcggtgctcaataccgggcacctgcatccgaaagtggttgcggcagtggaagcgcagttgaaaaaactgtcgcacacctgcttccaggtgctggcctacgagccgtatctggagctgtgcgagattatgaatcagaaggtgccgggcgattttgccaagaaaacgctgctggttacgaccggttccgaagcggtggaaaacgcggtgaaaatcgcccgtgccgccaccaaacgtagcggtaccatcgccttagcggcgcgtatcacgggcgcacgcattacacgctggcgctga

SEQ ID NO: 24414 - DNA, 423 bp, Escherichia coli
atgttgaaaatacagttcccaaatgataatgaaaagcttagcgtatatttaaaaaataaaatcccctttgaaaatatcacaattgatttatctgcactggaaaaagaagccctggcatctttaaaatattgtaactttaaaaatgtgacattcactggtaatatatcttacgaaaatcttaatggttcagtatttgaaaattgtttttttgagggctgtaaatttgagaatgtgtcacttataagctccaggtgtcgagtaaaactaaataatgaaatacctatttacggcgtgtttaaagagtgttttctgtatcgatgtgaaataaaaaattttaacatagatacatcaaaaatatactctgtaaatcaagatcccaatgtgggtaagccagttggtgcatatctgtttaggctttgttga

SEQ ID NO: 24415 - DNA, 1242 bp, Escherichia coli
atgaacaaaacgctaatcgccgcagctgtggcagggatatttttactcgcttcaaatgctcaggcacaaaccgtaccggaaggctatcagctgcagcaagtgctcatgatgagccgccataacttacgagcgccgctggccaataatggcagcgtgctggagcagtcaacgccgaataaatggccagaatgggacgtccccggtgggcaactcaccaccaaaggtggcgtgctcgaagtgtatatgggccattacatgcgtgaatggctggcagaacaggggatggtgaaatcgggggaatgcccgccgccggacaccgtttatgcctatgccaatagtctgcaacgtaccgttgcgactgcacagttctttattaccggcgcattccccgggtgtgatattcctgtgcatcaccaggaaaaaatgggcactatggacccaacctttaacccagtgatcaccgatgattccgccgcattcagtgaacaggcggtggcggcaatggagaaagagctcagcaaactccagcttaccgacagctaccagctactggaaaaaatcgttaactataaagattcccctgcctgtaaagagaaacaacaatgttcgctggtggatggcaaaaatacctttagcgcgaagtatcaacaagaaccaggtgtttccgggccgctgaaagtcggcaactcgctggtagatgcgtttactttgcaatactacgaaggttttccgatggatcaggtggcctggggagaaatcaaatctgaccagcagtggaaggtgttgtcgaagctgaaaaacggttaccaggacagcctgtttacctcaccggaggtggcgcgcaatgttgcgaaaccgctggtcagttatatcgataaagccctggtcaccgatcgcaccagcgctccaaaaatcacggtgttagttgggcatgactccaacattgcctctctgttaacggcgctggatttcaaaccgtatcagttgcatgaccagaacgaacgcacgccgattggcggcaaaatcgttttccagcgttggcatgacagcaaagccaatcgcgatttgatgaaaattgaatatgtttatcagagtgcggaacagttacgtaatgccgatgcgttaacccttcaggcacctgcgcagcgcgtgacgctggaattaagcagttgcccgatagatgccaacggtttctgtccgatggataagtttgatagcgtgttgaatgaagcggtgaaataa

SEQ ID NO: 24416 - DNA, 1281 bp, Escherichia coli
atgggaagtaatggcttcaagttacctctaggatggaattgtaaaaaactggttgattgtacaaaggagggaaatatctcttatggtattgttcaaccaggtcagcatcaagaagatggcattggtattattcgtgtaaataatatacaaaatggaaatatttacatagacgatgttctgaaggtttctcatgaaatagaaagtaaatttgccaaaactaggttagaaggaggagaagtacttttaacactagtgggttccactggaattagcgccattacaactaaagcactacagggatggaatgttgctcgtgccgtagccgtaattaagccatgcgatgaaataagtgcagagtggatacatatttgcctccaatcaccttttacaaaatattttttggattccagagctaatactactgttcagaaaactctcaatctcaaagacgtgaaagaaattccattaccaattcctccacatgaggaaagagtaagtcttgagaaaatttacttcaattttgagaatagaataaacttaaatataaaaattaataaaatcctagaagaaatgtcacaaaacctgttcaaatcctggtttgtagattttgatccggtggttgataacgctctggatgcaggaaacccaattccggaagccctgcaatctcgcgccgaattgcgtcaaaaagtacgtaatagtgcagattttaaaccgcttccggcggaaatccgctcgcttttcccaagtgaatttgaagaaacggagttgggttggatgccaaagggatggcaaattaaatcattagatcatattgctaatttccagaatggtttggctttacaaaaatttaggccgaagaatatggaggatgattatttacctgtattaaaaatagcagatctccgagcaggacaaataactaatgacgaacgagcaagaactgatatttctgatagttgtaaggtgtatgacggcgatatgattttctcatggtcggggactttgatgatcgatatttggactggtggtaatgctgcattaaatcagcatttatataaggtcacatcaaaaaaatacccacaatctttttattttatgtggacaatacagcatctttcaagatttcaacatattgcagaggcaaaagcggtaacaatggggcacatcaaaaaaggagatttaagtaactctttctgtctaattcctacctcatcgttgattactaaatatgataatatcgttggaggatatttagggaaggtgcgaacaagtccctga

SEQ ID NO: 24417 - DNA, 534 bp, Escherichia coli
ttgcctgcacgaaaaagcgatccgcgtaaagagctgttggaagcggtaaaacgctataacgaacagcaaaaagagctgctgcgcgaacaaatcagcacgatgaacccgtacaaatttgaacaactggtcggtcaattactggaagcaatgggctacgagcaggtcgaagtgaccaaagcctctggcgataaaggcgtggacgtgattggtcaggtgcaggtcggcatcaccaccattacagaagtggtgcaggtcaaaagaatgcagaacactatcactcgcccgtatatcgaccagttgcgcggggcgttgccttaccacaaagccattcgcggtacgctcatcaccaccgggaaatttgcggcgaaatgtgcagaagcggcgctctttccgggtgccgcgcccattacgcttatcgacggcgatcgtttactggaactgttaatcgaaaataacgtcggcattcgccgcagcaatgcagtggaattgctggatgtagatttgcagttgtttgatgagctggagatggattaa

SEQ ID NO: 24418 - DNA, 435 bp, Escherichia coli
atgaacaatcctaatccatgtatgacgtgtggtgcctgttgtgcatttttccgcgtctctttttactgggttgaaacagatgatgctggcggcaccatccccgtaacgatgacagaacaaatctctccctaccatcaatgcatgcagggcactaaccagaaaaatcctcgctgtgtggccctgatcggccaaccgggagtcaatgcctactgcagcatttatgaacatcgctcatccacctgcagagaatttccgatgtccggagaacacggcatcgtgaatgaagcatgcaaccgcgctcgtgcaaaatatgggctaccccctctttataaacgcgatcataatcacggcaatggcatgttttatataacattcttagagggcgtaacaacaagcttgtcgtttcaagcgatttcttccgattggggagcctga

SEQ ID NO: 24419 - DNA, 1539 bp, Escherichia coli
atgaccaataatcccccttcagcacagattaagcccggcgagtatggtttccccctcaagttaaaagcccgctacgacaactttattggcggcgaatgggtagcccctgccgatggtgagtattaccagaacctgacgccggtgaccgggcagctgctgtgcgaagtggcgtcttcgggcaaacgagacatcgatctggcgctggatgctgcgcacaaagtgaaagataaatgggcgcatacttcggtgcaggatcgcgcggcgattctgtttaagattgccgatcggatggagcagaacctcgaactgttagcgaccgctgaaacctgggataacggcaaacccattcgcgaaaccagtgctgctgatgtgccgctggcgattgaccattttcgctattttgcctcgtgtattcgggcgcaggaaggcggtattagtgaagtggatagcgaaactgtggcttatcacttccacgaaccgttaggcgtggtggggcagattattccgtggaacttcccgctgctgatggcgagctggaaaatggctcccgcgctggcggctggcaactgtgtggtgctgaaacccgcacgtcttaccccgctttctgtactgctgctaatggaactcgtcggtgatttactgccgccgggcgtggtgaacgtggttaacggcgctggtggggaaattggcgaatatctggcgacctcgaaacgcatcgccaaagtggcgtttaccggctcaacggaagtgggccaacaaattatgcagtacgccacgcaaaacattattccggtgacgctggagctgggcggcaaatccccaaatatcttctttgctgatgtgatggatgaagaagatgcctttttcgataaagcgctggaaggctttgcactgtttgcctttaaccagggcgaagtttgcacctgtccaagccgtgctttagtgcaggagtctatctacgaacgctttatggaacgcgccatccgccgtgtcgaaagcattcgcagcggtaacccgctcgacagcgtgacgcaaatgggggcgcaggtttctcacgggcaactggaaaccatcctcaactacattgatatcggtaaaaaagagggcgcagacgtgctcaccggcgggcggcgcaagctgctggaaggcgaactgaaagacggctactacctcgaaccgacgattctgtttggtcagaataatatgcgcgtgttccaggaagaaatttttggtccggtgctggcggtgaccaccttcaaaacgatggaagaagcgctggagctggcgaacgacacgcaatatggcctgggcgcgggtgtctggagccgcaacggtaatctggcctataagatggggcgcggcattcaggctgggcgcgtgtggaccaactgttatcacgcttacccggcacatgcggcgtttggcggctacaaacagtcgggcatcggacgcgaaacccataagatgatgcttgagcattaccagcaaaccaagtgcctgctggtgagctattcggataaaccgttggggctgttctga

SEQ ID NO: 24420 - DNA, 1158 bp, Escherichia coli
atgcttgagaatcctgttaaaacgcagatttccgtctttacatggacagatgccatcgaccacggtacggaaatgaccgcgacccgtgatggtgttcgtggaaaagaaaaactggatgtccccatcaagtttttatggtgctacgccagtaacacattgatcaatcaacatggcgacatcaatcacacccatgaggtgcttcaggatgacagcaagtgcgagatgattgttggcattgaccacttcatgactgcctcggctaagtattgcgatatcctgttgcccgacctgatgccaacagagcaagaagaccttatctctcacgaatctgccgggaatatgggctatgtgatcctcgcccaacccgcaacctcagtaaaatttgaacgcaaacccatctactggatgctgagcgaagtcgccaaacgcttaggaccagacgtttatcaaacctttactgaaggccgcagtcagcacgaatggatcaaatatctccatgcgaaaacgaaggaacgtaaccctgagatgcccgactacgaggagatgaaaacgaccgggatctttaagaaaaaatgcccggaagaacactacgtcgctttccgcgcattccgtgaagatccacaggcaaacccgttgaaaacaccttcggggaaaatcgaaatttattctgaacgactggcgaagattgcagatacctgggaattgaaaaaagatgaaattattcatccccttcctgcgtataccccaggttttgatggctgggacgatcccctgcggaaaacctatccactgcagctaacgggcttccactacaaagcgcgtacccactccagctacggcaatattgatgtgttacagcaggcctgcccacaagaggtgtggatcaaccccattgatgctcaggcacgcggtatccgtcatggcgataccgtgcgggtatttaacaataatggagaaatgctgattgccgcaaaagtgactccgcgtattctgcctggcgttaccgccatcgggcaaggtgcgtggcttaaagcggatatgtttggtgaccgggtcgatcacggcggcagtatcaatattctgacctctcaccgcccttcaccgctggcaaagggaaacccgtcgcacagcaatcttgtccagatcgaaaaggtttaa

SEQ ID NO: 24421 - DNA, 405 bp, Escherichia coli
atgatttttaccaaaatcattaggggattcatcagtgttaagcaggggcttatcacctataagattgccgcccacgccgctgacctggcgaaagggcatccgggcgcgcaaattcgcgataacgccatgtcgaaagcccgcttcgaatttcgctgggaagaccagtttaatctggccctcgacccgtttactgcccgcgcttatcacgatgaaaccctgccgcaagagtccggtaaagtcgcccatttttgctccatgtgtgggccgaaattctgctcgatgaaaattagccaggaagtgcgtgattacgccgccgcgcaaaccattgaagtgggaatggcggatatgtcggagaacttccgcgccagaggcggagaaatctacctgcgtaaggaggaagcgtga

SEQ ID NO: 24422 - DNA, 531 bp, Escherichia coli
atgaaatacaataacattattttcctcggtttatgtctggggttaaccacctattctgctttatctgcagatagcgttattaaaattagcgggcgcgtcctcgattatggctgcacagtctcatcggattcgcttaattttaccgtagatctccaaaaaaacagtgccagacaatttccaacgaccggtagcacaagtccagccgtcccttttcagattacgttaagtgaatgcagtaaagggacaacgggggttcgggttgcatttaacggtattgaggatgcagaaaataatactctgttgaaactggatgaaggaagcaatacagcctccggtttgggtatagaaatactggacggaaatatgcgtccggtgaaattgaatgaccttcatgccgggatgcagtggatcccactggtaccagaacagaacaatattttgccttactccgctcgtctgaagtcaactcagaagtccgtcaatccgggactggtgagggcttcggcaacctttacccttgaatttcaataa

SEQ ID NO: 24423 - DNA, 2652 bp, Escherichia coli
atgacagcctttcatgccgcatttaaggcatatcgtatgcatcaggtgttaatactgcctcgctttgcacggcttacctttgcccttggcttagcaactgcggtttttcccgttgacgcagagtattattttaatccacggtttttaagcaatgatcttgctgaatctgtcgatttatccgcctttactaagggacgcgaggcaccacctggtacatatcgggtcgacatttatttgaacgacgaatttatgactagtcgggatattacttttattgcagatgataataacgcagatctcatcccatgcctgagtacagatcttcttgtcagtcttggcataaaaaaatcagcgttattagacaataaagaacatttggcagaaaaacatgtgccggacaacagcgcatgcacaccacttcaggatcgtttggccgacgcatcaactgagtttgatgttggtcagcaacatctgtcactctccgttccgcaaatttatgtcggcagaatggctcgcggctatgtttctcctgatctgtgggaagaaggaataaatgctgggcttctaaactatagttttaatggtaattctattaataatcgtagtaaccataatgcaggaaaatccaactatgcatatttgaatttacagagtggcatcaacattggtagttggcgactgcgcgataactcaacgtggagttataacagtgggagtagcaattcatctgacagcaataaatggcagcatatcaatacgtcggctgaacgtgacattattcccttacgctcacgcttaacggtaggtgatagttataccgatggcgatatttttgatagtgtgaactttcgtggcctcaaaataaattcaacagaagcgatgttgcccgatagccaacatggtttcgctccggtgattcatggtattgcccgcggcaccgcacaagtgagtgtaaaacagaatggatacgatgtttatcagactactgtcccacccggcccttttactattgatgatatcaactctgcggccaatggtggtgatctgcaagtaaccataaaagaggcagacggcagtattcagacattatatgttccttattcgtctgttccggttctccaacgtgctggatatacgcgttatgcgcttgccatgggggaatatcgtagtggaaataacctgcaaagctcccccaagttcatacaaggtagcttgatgcatggactggaaggaaactggacaccttatggcggaatgcaaattgcagaagattatcaagccttcaaccttggtattggtaaagatttaggactttttggtgccttttctttcgatatcacgcaggccaatacgacacttgcagatggcacccgtcacagcgggcaatcgattaaatccgtctacagcaaatccttctaccagacgggaaccaatatccaggtcgcaggatatcgctattctacgcaaggtttttataacttatccgacagtgcctacagtcgaatgagtggttacaccgtcaagcctcctaccggagacagcaatgagcagacacaatttattgattattttaatctgttctacagtaagcgtggtcaggaacaaataagcatctctcagcagcttggaaattacggtacgacatttttcagtgccagtcgccaaagttactggaacacgtcacgcagcgaccagcaaatatcatttggattaaatgtgccgtttggtgatattacgacttcgctgaattacagctattccaataatatatggcaaaacgatcgggatcatttacttgcttttacgcttaatgttcccttcagtcattggatgcgtacagacagtcagtcggcatttcgtaactcaaacgccagttacagtatgtcaaacgatttgaaaggcggcatgaccaatctatcgggagtttatggcactctgctgccggataataacctgaattatagtgttcaggtcggtaacacccacgggggtaatacatcgtctggcaccagtggttacagttctcttaattatcgtggagcttacggtaatacgaatgtcggttacagtcggagtggtgacagcagccagatttattacggaatgaatggtggcattattgctcatgctgatggcatcacctttggacagccgctgggcgacacaatggttctggttaaggctcctggcgctgataatgtcaaaatagagaaccagaccggaattcataccgactggcgtggctatgccatattaccatttgcgacagaatatagagaaaatcgtgtcgctcttaacgcgaattcccttgcagataatgttgaactggatgaaaccgtggtcactgtcatcccaactcacggtgctattgccagagcaacatttaatgcacaaatcggcgggaaagtattaatgacgttgaagtacggtaataagagcgttccattcggtgcaattgtcacacatggagagaataaaaatggcagcattgtcgcggaaaacggtcaggtttatctgactggacttccacagtcagggaaattacaggtttcatggggcaaagataaaaactcaaactgtattgtcgagtacaagcttcctgaagtttctcctggtaccttactgaaccagcagacagcaatctgtcgctaa

SEQ ID NO: 24424 - DNA, 2154 bp, Escherichia coli
atgaatagaatctatcgcgtgatatggaattgcaccctacaggtatttcaggtctgctcggaattaactcgcagagtaggtaaaacatcgacggttaatttgcgtaaatcctctggactgacaacgaaattcagtagattgtcgctgggtgttttgctggcactaagcggttcagcgtctggtgcgagtctggaagttgataatgatcagattaccaatattaatactgatattgcttatgatgcctacctggttgggtggtatggcactggagtgcttaatattttggctggcggtaatgcctccttaaccactattactaccagcgtcattggtggtaatgagaactcgaagggcaccgttaatgttttgggtggcacctggcgattgtatgatagcggaaataatgcaaggcctttaaatgtgggccaatccggaacggggatgctgaatattaaacagaaggggcacgttgacggaggatatttaaggatgggttcttcgacaggaggcgtcgggacggtcaatgttgagggagaggactcggttctgatgaccgaattattcgaaatagggagttacggtacaggctcattaaatattacggataagggttacgtcacgagttcaatcgtcgccattgtaggatatcaggcgaacagtaatggtaaggttgtcgttgaaaagggtggcgagtggctaataaaaaataatgattcctcaattgaatttcaaattggcaatcaaggaactggggaagcgactattcgcgagggtgggctgattacggctgaaaatacgattatcggtggcaatgccaccggtatcggaaccctgaatgtgcaggatcaagactctgtcatcacggtacgcagactctataatggatatttcggtaatggcaaagtcaatatttccaataatggactgattaataacaaagaatattcattggtgggcgttcaggacggttcccacggtgtcgtcaacgtgactgataaagggcattggaatttcctcggaacgggcgaagctttccgctatatctatatcggtgatgctggcgacggtgaacttaatgtctcgagtgaaggaaaagtagattcgggaattatcactgcggggatgaaagaaacaggcacaggcaacattactattaaggataagaactccgttatcactaatctcggaactaatcttggttatgacggccacggcgaaatgaatatcagtaatgaggggcttgttgtcagcaacggaggaagctcactcggttatggagaaaccggcgtcgggaatgtcagcatcaccacgggggggatgtgggaggtcaataagaatgtctataccaccattggtgttgcgggtgtcggaaacctcaatattagcgatggcggtaagtttgtatcgcaaaatattacttttttgggcgataaagcaagcggtatcggcacactgaacctgatggatgcgacatcattgttcgatactgtaggtattaatgtcggtaattttggtagcggcatcgtaaatgtcagtaatggtgccactcttaattcaacgggctatggatttatcggaggaaatgcctccggtaaggggatagttaatatttcaacggatagtctctggaatttaaaaacgtcatctactaacgcccaattgctacaggtcggtgtattaggcgcgggtgaactaaatattaccaccggaggtatagttaaagcgcgtgatacacagatagctctcaatgacaaaagtaagggcgacgtgcgggtggatgggcagaactctcttcttgaaacattcaatatgaatgtagggacgactggcacaggtacgttaacactgacgaataacggtacgctgaatgtcgaaggtggagaagtttacttaggtgtttttgaacctgctgtaggaacgctaaacattggtgcagctcacggtgaggcggcggcagatgccggatttatcaccaacgcgacgaaaatagagtttggctctggcgaaggtgtttttgtctttaatcatactaataacagtgatgccggctaccaggtcgataaatccgccatgtattcttctgcaaatgcattggccgcttctattgtacagatccccttaagcctgagctccttaacgagtcggtcctga

SEQ ID NO: 24425 - DNA, 696 bp, Escherichia coli
gtggcactcacggagctggcgcaacaagccgggttacccaattccacgacccaccgcctgctaaccacgatgcaacagcagggctttgtgcgtcaggttggcgaacttggacactgggcgatcggcgcgcatgcttttatggtcggtagcagctttcttcagagtcgtaatctgttagccattgtccatcctattctgcgcaatctgatggaagagtccggcgaaaccgtgaatatggcggtgctggatcaaagcgatcatgaagcgattattatcgatcaggtacaatgtactcacctgatgcgtatgtccgcgcctatcggcggtaaattaccgatgcatgcttccggtgcgggtaaagcctttttagcccaattaagtgaagagcaggtgacgaagttactgcatcgcaaaggcttacatgcctatacccacgcgacgctggtgtctcctgtgcatttaaaagaagatctcgcccaaacgcgcaaacggggttattcatttgatgatgaagaacatgccctgggactgcgttgtctcgcggcatgtattttcgatgagcaccgagaaccgtttgccgcaatttcaatttccggaccgatttcacgtattaccgatgaccgcgtgaccgagtttggcgcgatggtgattaaagcggcgaaggaagtgacgctggcgtacggtggaatgcgctga

SEQ ID NO: 24426 - DNA, 372 bp, Escherichia coli
atgaataaactgcttttactgttgataatgctctatcaacgacacctttctcctcgcaaaggataccgctgtgcttacagtgtgttgtaccaaacgcagggatgttcgggagcagtcaaagagattattcaacagaaaggtgttattgcaggctggggcgagatacgtcagcgttttgcagattgccgacttgcggcacagacaatcaggcagaagcaacacctgaacgaggtaatacgtaaaaagaagaataataattgtgattgttccgggtgcgatggtgcggtctgtcgtgattgcgacattccggtgccggatctggattgttcctgggactgttcttctctatatataaagcggtttatccaataa

SEQ ID NO: 24427 - DNA, 792 bp, Escherichia coli
atgagatacatcaaatcgattacacagcagaagctgagctttttgcttgcaatctatattggcctttttatgaatggcgcggttttttaccgccgcttcggcagctatgcgcacgattttaccgtctggaaaggcatttctgctgttgttgaactggccgccaccgtactggtgaccttctttttactacgtcttctttcgctgtttggccgccgcagttggcgtattctggcatcgctggtggtgctcttttccgccggtgccagctattacatgaccttccttaatgtggtcattggttatggcatcatcgcttccgtcatgaccaccgatatcgacctgtcaaaagaagttgttggtctgaactttattctctggttaatcgccgttagtgcattgcctcttatccttatctggaataaccgctgtcgctacaccttgctccgacaactgcgaaccccagggcagcgtattcgcagcctggcggtcgtcgtactggcgggtattatggtttgggcaccgattcgtttgctggatatccagcagaagaaagtggagagggcgaccggcgttgatttgccgagttatggcggtgtcgtagcgaactcttatctgccatcaaactggctttctgcgttggggctgtatgcctgggcgcgggtcgatgaatcttccgataataattcattgcttaatccggcgaagaaattcacttatcaggcaccgcaaaacgttgatgacacttatgtcgtgtttatcatggctttgttgaataaatcgaacttttgctga

SEQ ID NO: 24428 - DNA, 339 bp, Escherichia coli; identical to SEQ ID NO: 5805

SEQ ID NO: 24429 - DNA, 1050 bp, Escherichia coli
atgaagatcaaagctgttggtgcatattccgctaaacaaccacttgaaccgatggatatcacccggcgtgaaccgggaccgcatgatgtcaaaattgaaatcgcttactgtggcgtctgccattccgatctccaccaggtccgttccgagtgggcggggacggtttatccctgcgtgccgggccatgaaattgtagggcgcgtggtagccgttggtgatcaggtagaaaaatatgcgccgggcgatctggtcggtgtcggctgtattgtcgacagttgtaaacattgcgaagagtgtgaagacgggctggaaaactactgtgatcacatgaccggcacctataactcgccgacgccggacgaaccgggccatactctgggcggctactcacaacagatcgtcgttcatgagcgatatgttctgcgtattcgtcacccgcaagagcagctggcggcggtggcacctttgttgtgtgcagggatcaccacgtattcgccgctacgtcactggcaggtcggtccgggtaaaaaagtgggcgtggtcggcatcggcggtctgggacatatggggattaagctggcccacgcgatgggggcgcatgtggtggcatttaccacttctgagtcaaaacgcgaagcggcaaaagccctgggggccgatgaagttgttaactcacgcaatgccgatgagatggcggctcatgtgaagagtttcgatttcattttgaatacagtagctgcgccacataatctcgacgattttaccaccttgctgaagcgtgatggcaccatgacgctggttggtgcgcctgcgacaccgcataaatcgccggaagttttcaacctgatcatgaaacgccgtgcgatagccggttctatgattggcggcattccagaaactcaggagatgctcgatttttgcgccgaacatggcatcgtggctgatatagagatgattcgggccgatcaaattaatgaagcctatgagcgaatgctgcgaggagatgtgaaatatcgttttgttatcgataatcgcacactaacagactga

SEQ ID NO: 24430 - DNA, 1485 bp, Escherichia coli
atggaaaccttcctttcccttcgtcatatcaacaaaacgtttcatgccacgcgagcgctgcgcgatgtttctctcgactttatgtcgggtgaggtgcactgccttgccgggcaaaacggctgtggtaaatcgacgttgattaaaattatgtccggtgtttatcgcccggatgagggggcggaaattacgcttggtgggaaaaactggtcaaagctgacacccgccgcttcggtggcgcaggggattcaggtgatttatcaggacctctctttatttcctaacctgagtgtctgggagaatatcgccgtgaatcactatcaccacggtctgtttgttaaccgccgtcgtctgcgtgaggtggcgcaggcggcaatgaccagtattaacgtcacattgccactggatacgctcgtttctgagctttcaattgcccgctgtcagctggtggcaatttgccgtgcactggcgcaggacgcacggttgatcgtgatggatgaaccaaccgcttcgctgacccatcaggaagtgcaagggttattacaggtggtgcatcaattgcgggaacgcgggatctgcgtggtcttcgtcagtcatcgtctggaagaagtgatggaagtttccgaccgtatttcagtgctgaaagatggtgagctggtcgggacctttccggctgcagagatgaccacaaaacaactcggtttcctgatgaccggccaggagtttgaatatcaggtgcgagagttgtggcagggaaaatccagcatcccagtgctggaggtgcgtaatttaagtcgtcatggggaatatcaaaatattaacttgcgggtggaagcgggcgaagtggtgtcgattgttggcctgcttggtgcggggcgcacggaattatgtctgagtctgtttggtatgacccgaccggatgctggcgagatcctcatcaacggccagctggttacactgcatagtaaccaggacgccatccgccacggtattggttatgtttcggaagatcgcatgtcgcgcggtttggtgatggcgcaatctattgaagacaacatcattagcactgtttttcacaaggtaaaagatcgcttcggctttctgagtgaagctaaagtgcgtgacctggtggacaggctaatcaaggcattgaccatcaaagtctctgacccacatctcccggtgaatacgctttctgggggtaacgcgcagcgagtatcgatcgccaaatggctggcgattgggccacgactgttgattctcggtagcccgactgtcggtgttgatatcgccaacaaagcaggaatatacggcattatcagcgatctggcggctcatggcattgcggtattgatgatctgcgatgaaattgaagaagcgtggtatcaaagccaccggattttggtaatgcaaaaaggtcagatcacccatagcttcctgcctgacagcagttctcaggccaggattgcggaggtggtaaatggctga

SEQ ID NO: 24431 - DNA, 672 bp, Escherichia coli
atggatctcgcgtcattacgcgctcaacaaattgaactggcttcttctgtgatccgtgaggatcgactcgataaagatccgccggatctgatcgccggagccgatgtcgggtttgagcagggcggagaagtgacgcgagcggcgatggtgctgctgaaatacccctcgcttgagctggtggagtataaagtggcccgcatcgccaccaccatgccttacattccaggttttctttccttccgcgaatatcctgcgctgctggcagcgtgggagatgctgtcgcaaaagccggatttagtgtttgtcgatggtcatgggatctcgcatcctcgccgtcttggtgtcgccagccacttcggtttgctggtggatgtgccgaccattggcgtggcgaaaaaacggctctgcggtaaattcgaaccgctctccagcgaaccgggcgcgctggccccactgatggataaaggcgagcagctggcctgggtctggcgcagcaaagcgcgctgtaacccgttgtttatcgctaccggtcatcgggtcagcgtggacagcgcgctggcgtgggtacaacgctgcatgaaaggctatcgtctgccggagccaacgcgctgggcggacgcggtggcctcggaacgtccggcgttcgtgcgctatacagcaaatcagccctaa

SEQ ID NO: 24432 - DNA, 774 bp, Escherichia coli
atggatcgtataattgaaaaattagatcacggctggtgggtcgtcagccatgaacaaaaattatggttgccgaagggagtattgccatatggcgaagcggcaaatttcgatcttgtgggtcagcgcgcactacaaatcggcgaatggcagggggaacctgtttggttagtacaacagcagcggcgtcacgatatggggtcggtacgtcaggtcattgatctcgatgttgggctgtttcaactggccggacgaggcgtacaactggcggagttttaccgatcgcataaatactgtggttactgcgggcatgaaatgtatccgagcaaaaccgaatgggcgatgctgtgcagccattgccgtgagcgttactatccgcaaatcgccccctgcattattgttgccatccgtcgcgatgattcgatcctcctcgcccagcatacccgccatcgtaacggtgtccatacggtacttgccggattcgtcgaagtgggcgaaaccctcgagcaggcagtcgcgcgggaagtgatggaagagagcggaattaaagttaaaaacttgcgttatgtgacttcccagccgtggccgtttcctcagtctttaatgaccgcgtttatggcggaatacgacagcggcgacatcgtgatcgacccgaaagaattgctcgaggcgaactggtatcgctatgacgatttgccgttactcccgccgcccggcaccgtagcgcgccgtctgatagaagatacggtggcgatgtgtcgggcagagtatgagtga

SEQ ID NO: 24433 - DNA, 327 bp, Escherichia coli
atgctgcgtcgggcgttaagcaacctgctttcgaacgccctgcgttatacgccgcccggagaggcaattgttgtgcgctgccagacggtcgatcaccaggtgcaagttaccgtcgaaaaccccggtacgcccattgcgcccgagcacttaccgcgattgtttgaccgtttctatcgcgttgacccctcccgtcagcgaaaaggcgaaggtagcggcattggtctggcgatagtgaaatcgatagttgtcgcgcataaaggcacggttgcagtaacgtcagatgctcgggggacaaggtttgtgattatgctgccggagagagagtga

SEQ ID NO: 24434 - DNA, 753 bp, Escherichia coli
atgtcaaccggattacgtttcacactggaagtggacggcctgccgccggatgcttttgcggtggtttcctttcatctgaaccagtcactctcttcgctcttttccctcgatctctccctggtcagccagcagtttctctcccttgaatttgcgcaggtgctggacaaaatggcctacctgacgatatggcagggcgatgaagtacagcgccgggtgaaaggcgtggtgacctggtttgaactcggggagaacgacaaaaaccagatgctgtacagcatgaaggtgcacccgccgctgtggcgtgccggtctgcgccagaacttccgtatcttccagaacgaggacatcaaaagcatcctcggcacgatgttgcaggaaaacggggtgaccgaatggagtccgctgttcagcgagccgcatccttcccgtgagttttgtgtccagtacggtgagactgattacgatttcctgtgccggatggcggcggaggaaggcatcttcttttatgaggagcatgcttacaaaagtaccgaccagagcctggtgctgtgcgacacagtccgccatctgcccgaatcttttgaaatcccatggaacccgaacacccgtaccgaggtgagcaccctctgcatcagccagttccgctacagcgcacaaatccgcccttcttccgtggtgaccaaagactacacctttaaacgccccggctgggccggacgttttgaacaggaaggccagcaccaggactactag

SEQ ID NO: 24435 - DNA, 996 bp, Escherichia coli
gtgctgacggggcatccgcaggcgaacctgaaccgggaatggcaggtggtggcaagtgaactgcacggcgaacagccacaggcggtgccaagacggcagggagcggggacggcgctggagaaccattttgcggtgatcccggcagacagaacatggcgaccacagccgttgctgaaaccgctggtcgacggcccgcagagcgctgtcgtgacaggaccggcaggcgaggaaatcttctgcgacgaacatggtcgcgtgcgggtgaagttcaactgggaccgttataacccggcagaccaagacagttcgtgctggatccgtgtggcacaggcgtgggcaggcaccggttttggccacctggcgataccgcgtgtgggtcaggaggtgattgtagacttcctcaacggcgatccggaccagccgatcattatggggcgcacctaccaccaggaaaaccgcacccccggcagcctgccgggaacaaagacgcagatgaccatccgctccaaaacgtacatgggcagcggatttaatgagctgaagtttgatgatgcgacagggagagaacaggtctacatccacgcgcagaagaacatggataccgaagtgctcaacgaccgtaccaccaccgtaaaacacgatcaccgcgaaaccgtaaaaaatgaccagacagtcacgatccaggaaggtaaccgccttcttacggtggaaaaaggccacaaaatcacaggcgtactaaaagggtctttatctgaggatgtttttcaggacagaggcacgattgccggttcagtgcatgttgacgctgtaaacaatggtggcgaaggcgacggtatacaggcttatacggcgattaaggaaattttgctggccgtggaggaaagcaaaattgcgctgacgccggatggcattcagctacaggtcggggaatcgacggtaatcaggctgtcgaaggatggcatcaccatcgtgggcggttctgttttcatcaactga

SEQ ID NO: 24436 - DNA, 534 bp, Escherichia coli
atgacgattatgcttacattagaaaatgaaacaaactacaaagatgttgttgttaatatagatgaatttgtaccttttgatataacttttggaaaggggagcgaacagtgtttgtactggagaggcggcaatggtaaaagttctttggttgaagttgggttaaatatgtacagcggagaagtaagtaacatcacactagcaaatatcgattcaggtgaaattaacattacagatgagatgttagccaacaaccttcctgaaatacaagggtctgttatatttcagacaagcgagtggcttaataaagacatttccgaatactcaaacagatttattgatgattttgattgcaatatcaagttaataattggtagtaattacattaaattattatttaaaaaagcaacaaatcccatttgttatatcattaataggaatataagatttggtttttctttgagtagggaactttcgacattggaaatattagacctcaatcaagaaaaattagatattctaaagttatttaaatag

SEQ ID NO: 24437 - DNA, 432 bp, Escherichia coli
atgaaaatcgaagctaattcccttactcatccctatgactacaacgcctcactgaacaattatttacattattttgagaatttctctcgtaatgactggaataaagattcatgtggaggatattttacttttagagatgatgacagagagtgtgttttgttttttgtgaattatggtgataatttttcattgcgctatgattgtacacaaagttctgatggaatagtgtcatgctggtatagtaaccatgaagatgataaaatgaatatcatcgtcgatgctgatacagaacaatttatccctttaggttcttgcttacctcctgatattactttatcagtaataaaagattttttcaaaaatcctttagagaaatcaaaaaaagtaaaatggatgaatgcagatgacattgactggtcatctgtgtattaa

SEQ ID NO: 24438 - DNA, 216 bp, Escherichia coli
atggtagttattgaagataatgatctttatgaccctataaaagcagagggagttgatggatggatgtattataaattcatattatccatattcccattaaagggagtagacacaacattagaatatcaacgggaattatcttttcttttcttaaagaaattaaaagatgcgggtctgttaggtgaacttatatgcgaggatgattttcatgactga

SEQ ID NO: 24439 - DNA, 369 bp, Escherichia coli
gtgggtatgaataaaaatgaaatccatttccctataggatatggttggttgaatgaaaaaaaaattattggcaccagtgaatttagccaattagaaccatggttttatctagatgagaacaggtgtttttttgcgaataaaaaatggccaaatgtcataggtgaacaattattcgcttttgctaaacgtcaagataatgatgaattggcttgtttcaaaattaatgaatctggagtctgtgagggtgtttatttaattaatgggtggactcctaacgggtttgatattatacaattttaccctgatttttgggaatgggtacatttggttatacaagatgtctcggagtggattgataataaaggataa

SEQ ID NO: 24440 - DNA, 207 bp, Escherichia coli
atggaacgcttcttcaggagtctgaagaacgaatggatgccggtggtgggttacgtaagcttcagcgaggcagctcacgccataacggactatatcgttggatattacagcgcactaagaccgcacgaatataacggtgggttacccccaaacgaatcggaaaatcgatactggaaaaactctaactcggtggccagtttttgttga

SEQ ID NO: 24441 - DNA, 765 bp, Escherichia coli
atgaaactgaaaacggtcgagattaacggaaaacaatacgcagaaattgatactgctggcctgccagtttatgtgcacgacgatggtaaagaaattggcttcgatgcaccgctggcgacaaaaaaaattacagagcttaatggcgaggcaaaaaatcatcgcctggctaaagaagctgcagaggaaaaactggctaagtttgccgctatcgaagacccgaagaaggcgatcgaggcactggaaatgctgtcaaaaatcgaccagaaaaagctgctcgatgcgggacaggttgaccaggttaaggcagaaattacgaaaaattttcagcagcaattagatgaagaaaagcaacgctctcagatgctggagaagcagctttacgattctatgattggcggtagttttgcgggttcaaaatatattgccgataaaattgcgatcccggcagatttattacaagcccgcttcgggcaggcattcaaagtggaagaagggaggatcgttgcttatgacgcttccggcaacaaaatttattcccgcgcgaagcctggcgaactggcgcagtttgatgaggcgctggagttccttgtcgaaaattaccctcagaaagactacatcctgaaagccagtggcaacaatggcggcggctcccgtccgacacagcatgatattggtcagaaaacgatgaaacgctctgcttttgatgcactggatgttgcaggtaagcaaaacgcattgaaagacggtatcacaatcgttgattaa

SEQ ID NO: 24442 - DNA, 1170 bp, Escherichia coli
atggcgaaacgggtatggcggcgggagtgtgacctgacggggtggatgtcgctgtcgcgtaaaccggaggtgacgtggtacggctgggacggcgaccacctgacgacggtgcagaccgacagcacacgtatccagacggtatacgagccgggaagcttcacaccgctcatccgcatcgaaacagacaacggcgagcgggagaaaacgcagcggcggagcctggcggagaagctccagcaggaagggagcgaggacggacacggcgtggtgttcccggctgaactggtacggctgctggacagactggagggggaaatccgggcagaccgcgtgagcagtgaaagccgccagtggctggcacagtgcgggctgacggtggagcggctggcgacacagatagagccggtttatttacctgagcgaaaaattcatctttatcactgtgaccaccgggggctgccgctggcgctcatcagcgaagacggcaatacggcgtggagcggggagtatgatgagtggggaaacctgctgaatgaggaaaacccgcatcacctgcaccagccgtaccgtctgccagggcagcaacacgatgaggagtcagggctgtattataaccggaaccggtactacaatccgttgctgggacgatatattactcaggacccgattgggctggcggggggatggagtctgtatgcgtatccgctgaatccggtgaatggtattgatccattagggttaagtcctgcagatgtagcgttaatgcgaaaaaaagaacaactaaaccatcaaagagcatgggatatattatctgatacttatgatgatatgaagagattaaatttaggtgggactgatcaatttttccattgtatggcattttgtcgagtgtctaaattaaatgacgctggtgttagccgatcagcgaaagggctgggttatgaaaaagagattagagattacgggttaaatatgttcggtatgtacggcagaaaagtaaagttatcccattctgagatgattgaagataataaaaaagacttggctgtaaatgaacatgggttgacatgtccattaacacaagattgctcaaatagatgtattgattatattaatccagagcataaaaaaacgataaaggctttacaagatgctggctatctcaagtaa

SEQ ID NO: 24443 - DNA, 3144 bp, Escherichia coli
atgattgaatggattattcgtcgctcggtggcgaaccgttttctggtgctgatgggcgcgttgtttctgagtatctggggcacctggaccatcattaacacgccagtggatgcgctgccggatctctccgatgtacaggtgattattaaaaccagctatcccggtcaggcaccgcaaatcgttgaaaatcaggtgacttatccgctaactaccaccatgttgtcggtgcctggcgcgaagactgtgcgcggtttctcgcagtttggcgactcttatgtgtatgtcattttcgaagatggcaccgatccatactgggcgcgctcgcgggtgctggagtacctcaaccaggtacagggtaagctgcctgcgggagtcagcgccgagctggggccagatgccacgggtgttggctggatctatgaatatgcactggtggatcgcagcggtaagcacgatcttgccgatttacgctcattgcaggactggtttctcaaatatgagctgaaaaccattcctgacgttgcggaagtggcgtcggtaggcggtgtggtgaaagagtatcaggtggttatcgatcctcagcgcctggcgcaatatggcatcagtctcgccgaagtaaaaagcgcgctggatgcttcaaaccaggaagcgggcggttcgtcgatcgaactggcggaagcggaatatatggtgcgcgccagcggctatctgcaaacgctcgacgactttaatcacatcgttttaaaagccagtgaaaatggcgtgcccgtttatctgcgcgatgttgcgaaggtccagattggcccggagatgcgccggggcattgccgaactgaacggcgaaggcgaagtggcgggcggggtggtgatcctgcgctccggcaaaaacgcccgagaagtgatcgccgccgtgaaagacaaactggaaacgctgaaaagtagtctgccggaaggcgtggagatagttacaacatacgatcgcagccagctcattgaccgcgccatcgacaacctcagcggcaagttgctggaagagtttattgtggtggcagtagtctgtgcgctgtttctctggcatgtgcgctcggcgctggtggcgattatttcgttgccgctggggttgtgtattgcttttattgtcatgcactttcagggactgaacgccaatattatgtcgctgggcggtattgctattgccgtcggggcgatggtcgatgccgctatcgtcatgatcgagaatgcgcataaacggctggaagagtggcagcaccagcatcctgacgccacgctggataataaaacgcgctggcaggtgatcaccgatgcatctgttgaagtggggccggcgctgtttatcagtctgctgattatcacgttgtcgtttatcccgatcttcaccctggaagggcaggaagggcgtctgtttggcccgctggcgttcaccaaaacgtatgcgatggcgggtgcggcgctgctggcgatcgtagtgatccctatcctgatgggttactggatccgtggcaaaattccgccagaaagcagtaacccgctcaatcgctttttgattcgtgcttatcatccgctgttgctgaaagtactgcactggccaaaaaccacgctgctggtggcagcgctttcggtgctgacggttctctggccgctcaataaagttggcggggaatttttaccgcagatcaatgaaggcgacttgttgtatatgccatcgacgctgccggggatttccgcagcagaggcggcgagtatgctgcaaaaaaccgacaagctgattatgagcgtacctgaagtggcgcgggtatttggcaaaaccgggaaagcggaaaccgccaccgattctgctccgctggagatggtagaaacgaccatccagcttaagccacaagatcagtggcggccaggcatgacgatggacaaaatcattgaggaactggataacaccgtgcgtctgccggggctggcgaatctgtgggtgccgccaattcgtaaccgtatcgatatgctctcaaccggcattaagagccccatcggcattaaagtttccggcactgtgctggcggatatcgacgcgatggcggagcaaattgaagaggtggcacgaacggtgccaggcgtggcttctgcgcttgccgagcgtctggaaggtgggcgctatatcaacgttgagattaaccgtgaaaaagccgcacgttacggtatgacggtggcggatgtgcagttgtttgtgacttctgcggtgggcggggcgatggttggcgaaacggtggaagggattgcccgttatccaattaatctgcgttatccgcaaagctggcgcgatagtccgcaggcactgcgccagttgccgatcctgacgccgatgaagcagcaaatcaccctggcagacgtggccgacgttaaagtctctaccggaccgtcgatgctgaaaaccgagaatgcgcgcccgacgagctggatttatatcgatgcccgcgatcgtgacatggtgtcggtggttcacgatttgcaaaaagcgatagctgaaaaagtgcagttaaaaccgggcaccagcgtgacattctccgggcagttcgagctactggagcgcgccaaccataagctgaaactcatggtgccgatgacgctgatgatcatcttcgtgctgttgtatctggcgttccgtcgggtgggcgaagcgttgctgattatcagcagcgtaccgtttgcgctggtgggcggcatctggttgctgtggtggatgggctttcatctttccgtggcgacgggcaccggttttattgccctcgccggagtcgccgccgaatttggcgtggtgatgctgatgtatttacgtcacgccatagaggtcgagccgtcgttgaataatccgcaaacattcagcgagcagaagctggatgaggcgttgtatcacggcgcggtcctgcgcgtgcgcccgaaagcgatgacggtggcagtgattatcgccggtctgctgccgattctgtggggaacgggagcaggttcagaggtgatgagccggattgccgcgccgatgattggcggcatgatcaccgcgcctttgctatcgctgtttattatcccggcggcgtataagctgatgtggctgcaccgacatcgggtacggaaataa

SEQ ID NO: 24444 - DNA, 906 bp, Escherichia coli
atgggcattttcggctatgaacgcaataccacaccgaaacttgctcaggagaaaaatctggcggcgttccgtggttactcctgtgatactgcaaccaaactctcactgcgttgcatgtttgtacgtcagggtggagcagaagataatccgcagcgcacattaaaagaacagaacattttcgcggtattgaagcagttaggattcagttctgatctctacgctatgcaaagcgaaatgtggttctacagcaatacgatggcggacaacattgcttatcgtgagcagattggtgcggagccacgtaaccgtggcaagccggtagatgatatgttgctggtagacgaaatgcagcaatcgctggggcgcaacccggatggtaagcatctgatcattctgcataccaaaggctcacactttaactacacccagcgttacccgcgcagctttgcgcagtggaagccggaatgtattggtgttgatagcggctgtaccaaagcgcagatgatcaactcatacgacaactcggtgacctatgtggatcactttatctccagcgtgattgatcaggttcgcgataagaaagcgattgtgttctacgcagctgaccacggtgagtcaattaatgaacgcgagcacctgcacggcacgccgcgtgaactggcaccgccggagcagttccgcgtgccgatgatggtctggatgtcagataaatatctggaaaatccggccaatgcgcaggcatttgcgcagctgaaaaaagaagccgacatgaaagtgccacgccgtcatgtagagctgtacgacaccatcatgggttgtcttggctatacttcaccggatggtggaattaacgaaaacaacaactggtgccacatcccgcaggcaagagaggcggcggctaactaa

SEQ ID NO: 24445 - DNA, 198 bp, Escherichia coli
atggaaataaagacacggagagaaaccaggcagacgttggcgcagtggtttgaagagaagggaaggcaggcggttagacaggaggtaagtcaggaattcgcccagcgtcttctgagtaaaggaatgtctcgggaagacgttgcagagatggcaactttatctcttacagaggttgataagctaattaactctaactaa

SEQ ID NO: 24446 - DNA, 2499 bp, Escherichia coli
atgtgtatttacactttgtctttcagccacttaaaagtaggcgaaaaaggtattttgcagtacatggagcaatacaggatgtattcaagtagcagaaaaaggtgcccggaaaccaaatgggctttgaaaattcttacggtcgcattattagcagcgagtcctgcagcgaatagtgcggttaataatgcctatgatgcattgattgtcgaagctcgcaagggtaatactcaaccagctttgtcatggtttgcacaaaagtcagcactcagtaataaccagattgctgactggctacagattgccttatgggaggggcaagataagcaagttattgccgtttacaaccgctaccgtcaccaacacttacctgcgcgtggttatgcagctgttgccgtcgcttatcgcaacctacaacaatggcaaaactcgattacactgtggcaaaagacgctctctctggagccgaaaaataaagattaccaacggggacatatcttaaccctggcagatgtaggtcattatgacactgcactagtaaaacttaagcagaataataccggtacgccagacaaagtcagtttactcgcagaagcctatatctataaactggcgggtcgtcatcaggatgaattacgggcaataacagagtcattatctgaaaatgtctctacacaacattcagaagagtacgtgcaggcattacgtaataatcagctttctgccgctatcgacaatgccaatttaacaccggatattcgtgctgatattcatgccgagctggtcaggctgtcgtttatgcctacgcgtagtgaaagtgaacgctatgccattgccgatcgtgccctcgcccaatacgcagcattagaaatactctggcaagataacccagatcgcacggtacagtatcagcgtattcagattgaccatcttggcgcgttattaacccgcgatctttataaagacgtaatctcgcactatcaacatttaaaaaagaatgggcaaattattcccccctgggcgcagtattgggttgcgtccgcttatctgcgcgatcgtcagcctgaaaaagcacaagcaatgatgacccgactgttctataaccagtcacaaccgaatattgaattatcagaagaagaacgtgcggacctcttttatagccatctggaaagtgagaattatagcggaattttaacagtcactaatcacacccttactacgacctctccttaccgtcggattatgggctcttctgtaacaatacctgatgacaagtggctacaaggttattcatttctttcggccgccgaacaatacgataatgatttgccacaagccgaaagaataacccgaaatctggccaataacgcacctggtaatcagggattacgtatcgattacgccagcgtactacaggcacgaggactaccacgagctgcggagacagaattaaaaaaagctgagctgcttgaacccagaaatattcttcttgaagttgaacaagcatgggatgcactagcattgcaggagtggaaacaggcgtcggtattaaccgaggatgttgtcatgcgtgatgctgaaaattctgcggtaaaacgtatacaacgcgcagttgaagtacacaacatggcagagctacgcattgcaggctctttagggctggattctgaggggccggataatggcaaacatgatgtgaattttaccagtgctgtttactcaccaccgttgaatgaaaactggcgtgcttttgctggttttggatatgccgatgggcaatttagcgaagataaagggattgttcgtgactggttaactggcctcgaattgcgttcgcgcgatatctggctggaggcagaatttaccggacgttattttaatggcgaacaaaaaaccggtgcgcgtttatctggttggtacgattttaacgacaactggcgactcggtacagaactggaacgcatctctcaccgcgtccccctacgagccatgaaaaatggcgttaccggcaacagtgcgcaggcatatttacgctggtatcagaatgagcgtcgtcaatacagcagttcatgggcttttactgatttttccgacgggaaccaacgtcacgaagtatttatcagtggtagtgaacgggtgtggtctacatcccggctgattgtcgattttcaacccacaatttattacggacagaatacaaaaaataatacaccttattttaacccgaaaaaaacacttgatattgttccggcgctagaggcgagccatttattgtggcgtaaatatgagaacagctggcagcaattatttagtgcaggcgctggcacctcatggcaaaaaaattatggcaccgatcttgttactcaattgggttatggccaacgcattacgtggaatgacgttattgatgtcggagcaatgatacattgggaaaagcggccttatgacggcgacagagaacataacctatatcttaaattcgatatgacattcaaattttaa

SEQ ID NO: 24447 - DNA, 510 bp, Escherichia coli
atggaaaaagactatctaggaattagtagtactgtattggtgagcttattgtttgggcttgcattcgttttggtaaatagttggtttaatcagccaaccgttgaggaggttgttcctcgatcaacctatctaacggttatgattgctttattttttatcgatactgttgtatttattttcatgcagttgtatttcatttatgatcgtacgcgattttcaaactgtatacttagtttggcgtttctgagttgtttgatttactttgttaaaactgtcattatcatccagcaatttattgaggggcatttgacaagcagtaatgttcaaaatgacattgcaatttattatttttttcgccagatgagtttgtgcatgttaatatttctggcgttggtgaataaagttagtgaaaacaataagcaacgcagttttttttcaaaaaaaatgactttttgcataagcctgatttttattttgggggggggtggtagttgctcacatgctaagtag

SEQ ID NO: 24448 - DNA, 870 bp, Escherichia coli
atgctaagtagtcattatgagaactacagtttacacattgctgagttaacaaataaaaatggccgagttgtctggaaaacctcatatgttaccataataatttccatgtggttaaccttgcttttggttaatctatactttaatggtttacgctgtgatatctggaatggagtatcggtaattgctttctgtgccgtgctgtataatatctctctgttatttatgagcaggtatagtgtgtccacttggtatattagccgtactattgaagtaatcagtaaattaactgttatggtaatatttatgtgccatattttcagtgcactacgagtaacaaagaacattgcccatcgcgatccattaactaatatatttaacagaaattattttttcaatgaactgaaggctcaatcagcatcagcccaaaaaacgtcttattgtgtcatgattatggatatcgatcacttcaaaaaagttaacgatacgtgggggcatccggttggcgatcaggtgataaaaacagtggtgagcatcattgggaaaagcatacgaccaaatgaccttttagcacgcgttggcggcgaagagtttggcgtcttgctgacggagaccgatactgaaagcgcgaaagttttagccgaaaggataagggcaaatgtagagcatttgacaggcgataatcctgaatacgccataccgctaaaagtgacgattagcattggcgctgtggtgactcagggaaatgcgttaaatccgaatgaaatctatcgaatggctgataatgcactatatgaagcgaaagaaaccggacgtaataagatagttgtaaaagaagcagaaattgttatcaactgcaaggatgatgattga

SEQ ID NO: 24449 - DNA, 354 bp, Escherichia coli
atggacaaaaaacagttacaggctctggttaacgaactggccaaaaacctcaaaacccctgaaaacttcagccagtttgatcggctgctgaaaaagctcagcgttgaagccgctctcaatgcagagatgacaaaccatctcgggtatgagaaaaatcagcccataccgggaactaactcccgcaacagttattctacaaagcccgttatcacaggcgacggcccactggaactgcgtactccgcgcaatcgtgacgctaccttcgaaccacaactggtaaagaaaaatcagccccgtatttccgggatggataaccagctcctctctttgtatgccaaaggatgccccccgtga

SEQ ID NO: 24450 - DNA, 450 bp, Escherichia coli
atggatgccctgcaaacgggatgtgttcatataaagctatatgacgcagatgtttcactggcactgatatcaaaggtcaccgatgccgtgatggagctggttgtcgaatggcaaaaccgactactggaaaaccgactactggatgctgtttaccccattgtttatcttgactgtgtcgtcctgaaagttcggcagggcagtcgcgtcatcaacaaatcggtgttcctggcattgagcatcaatatcgaaggtcagaaagaactgctgggtatgtggctggccgaaaatgaaggggcaaagttctggctcaatgtgctgactgaactgaaaaactgtagtggatcacaaaatcaggacaccgggatacctgtttccacttttcttcatgtaagcaaggcggtaaaccaccgttgttcgtgtgaggtcgataaacgttgtaataaccattaa

SEQ ID NO: 24451 - DNA, 456 bp, Escherichia coli
atgtgggaatgcgggctgacaagtcgacagctggttaaacatcactaccgggtaaacgaagacaaaagtccgccattgccaaatatactgaaccggcaatttaaccccgccgcaccaaaccgcgtctggtgcggcgacatcagttttattcgcctgcaggacaaatggtgttatctcgcgctcgttgttgatttatattcacggcggattttcggttcagctctctcattaaccgctgatgctgagttggtgtgtagggctttgcgtaatgcactggaaacacgaccgcgtgatggccgcctgctgtttcattcagatcaaggtgttcagtgtaaaagcaataaatacagaaagttactctggcgttatggggtaatgcaaagtatgagtcgcagagggaattgcctggataattcgccgatggaaagagtctttcgcagccttaaaagtgaatag

SEQ ID NO: 24452 - DNA, 270 bp, Escherichia coli
atgatcaaaactcgtcggactaaacgtaccttttccccggagttcaaacttgaagctttcgagcaggtggtggttaaataccagcgtgatgtcagagaagtcgcgctggcactcgagctcaaccctgaccatttgcgtaaatggatacggttgtataagcaggaacttcagggtattgagccagctggtaatgctattacccctgaacaacgcgaaattcagcagattaaagcgcagataaagcgccttgagatggaaaaagaatactaa

SEQ ID NO: 24453 - DNA, 945 bp, Escherichia coli
gtgttatttgtccagtcattgttactggatatggaaaatgaattaagttggtctttgggagagccttattacgttaacatttttactcacatccttattatgatgtatcgcaacacgcacgggaatgcgttatccagagaagaagatcaaaccaggcaatatgatgaaaatatctttaatgttgccagtcagatgattcataagatagaacaacgaattgcacatacattgcccgatgatgaagtctggtttatttatcaatatatcatttcatcaggtgtggcgattgatggacaaaaagatgttagcattatttcacatatgcaggccagcaatgaagcgcgtctgattacctggcgtttaattacggtattcagtgacatcgtggactgcgattttagtgaagacagcgcattatatgatggcttgttggttcatattaagccgctgattaaccgactaaattatcgcattcatatccgtaatccattgctggaagatattaaagcagaattagcggatgtctggcggttgacgcaatatgtggtgaatcaggtatttaaaacctggggtgagaatgcagtgagcgaggatgaagtaggttacctgaccgttcattttcaggctgcgatggagcggcaaattgcccgtaaacgtgtattactggtctgttcaaccggaatcggaacttcgcatctactgaaaagccgtattctgcgagcatttcctgaatggacgattgttgatgttatttcagcagcgaatttatcacaggttttgcctgacaatatcgaactgattatttcgaccattaatttgcctacagtcactatgccggtcgcttatgttaccgctttttttaatgatgccgatattaagcgagtcactgaaatggtgattacggaaaaattacatcatgcgacatctcgggtcgttgaaatttaa

SEQ ID NO: 24454 - DNA, 609 bp, Escherichia coli
atgcaaatgattacctcgcgacaaaacagattattacgattccttttaccacgaagggaatatacgactattgttacgattgccggctatttaaatgtttcggaaaaaaccattcaacgtgatttacgtttacttgagcaatggctggaacaatggcgaataaccgttgagaagcgtgctggcgcaggtgtgatgttagactcgaagaatattactgatttgctgcatcttgatcatttgttgggagcagaatgtgaagagattgatggtgtaatgaataatgccaggcgcgttaaaatagcgtcgcagttattaagtgaaacaccgaatgaaacgtcgatcagtaaattgtcagagcgctattttatcagtggagcctctattgttaatgacctgagagtgattgagtcctggcttgcgccgttggggttatcattgatccgcagcccaagtggtacgcatattgaaggtagtgaagggcaagtccgacaggcaatggcattactgattaacggcattattaaccataatgagccgcaaggtgtcgtgtattcacgtctggatcccggaagttataaagcattagtccattattttggagaagaatag

SEQ ID NO: 24455 - DNA, 930 bp, Escherichia coli
atgcaaaacgcaggcagcctcgttgttcttggcagcattaatgctgaccacattcttaatcttcaatcttttcctactccaggcgaaaccgtaaccggtaaccactatcaggttgcatttggcggcaaaggcgctaatcaggctgtggctgctgggcgtagcggtgcgaatatcgcgtttattgcctgtacgggtgatgacagtattggtgagagcgttcgccagcagctcgccactgataacatcgatattactccggtcagcgtgatcaaaggcgaatcaacaggtgtggcgctgatttttgttaatggcgaaggtgagaatgtcatcggtattcatgccggcgctaatgctgccctttccccggcgctggtggaagcgcaacgtgagcgtattgccaacgcgtcagcattattaatgcagctggaatcaccactcgaaagtgtgatggcagcggcgaaaatcgcccatcaaaataagactatcgttgcgcttaacccggctccggctcgcgaacttcctgacgaactgctggcgctggtggacattattacgccaaacgaaacggaagcagaaaagctcaccggtattcgtgttgaaaatgatgaagatgcagcgaaggcggcgcaggtactgcatgaaaaaggtatccatactgtactgattactttaggaagtcgtggtgtatgggctagcgtgaatggtgaaggtcagcgcgttcctggattccgggtgcaggctgtcgataccattgctgccggagatacctttaacggcgcgttaatcacggcgttgctggaagaaaaaccattgccagaggcgattcggtttgcccatgctgccgctgcgattgccgtaacacgtaaaggcgcacaaccttccgtaccgtggcgtgaagagatcgacgcatttttagacaggcagaggtga

SEQ ID NO: 24456 - DNA, 4956 bp, Escherichia coli
atgatttttaccaaaatcattaggggattcatcagtaccggtagtctgattaatggcgatgacgccaaagtcgataataaaggtacaatgaacgttgatggtgaaaattcgactggctcgaaaattaatggtaatgatgcactggtgaaacaagagggtgacctctttgtcagcggtggtgcgaagggtattgatgtcactggtaatagtaccattatcagcaataaaggtaatattaccgtagttgatgaaaaatccattggtatattgttggacggtaacgatagcgcattcatcaatatgggggacatcagcgtcagtgatggctcagccagtgaaaacgcaatcggcgtactcatcgagggtgatggctcaacgttaattaacgtgggtgatgtgagtgcgcaaaatgcggcaactgcaattaaaattgttggtgataattccagtatcgcccttgccgggcttgttgaaaccggtggtttttcgaccggactggaaatcaccggtgacaataataccctgacgatgtcaacatatgcgctgaatgttatcggtgaacagtcagcgggggttattgtatctggcgataataacaatctcgaaattacgggttcgatggtcgttgatggtgattccgttgggacacttgttaccgggaatggcggaaaagtaagtcagaaaggtgacctttttgttagtgatgccggacgtggtattgatatcagtggtgaccgggttacactcggtaatactggtaaaatcacggtagaagatgctaactctgtaggcattattattgaaggtgatgatgcagtatttaagtctactggggaaatcaatgtttcacttgatggccagggagcagcgatttcaggcgaccgtgaagacgtcagtttgagcggggatattaatgtaactcagcaacgtgacagtaatggggtttttgtaggaggaaccggcgttgatatgtccggggacgatagtcatatctcattggatggtaatatcaatcttgtatcccttatgggagactctccgacaatatctggggatagtttaactgggttatccgttggcggtgataacaatacggtcgatttgagtggtaacattaatatcaatgttggttctggctatttgaatgaccaagctgtgctggttggagtggatgttacaggtgaaaataacacaatcaatttagagggcggtataaatatcactggtgatagcggtggtcattcaatcaagggagtttctgttaccggaaacaacgtgatgaatatcagtggtcattcacaaatgaactcgcggcaagtcagaggagccttcacattagtgagcgtagcggatggcggacatgccatttttgatgaaaattcagtcactgattttgacgtcagggcgagagataccaattggtatctggatgatgccctaattaccgcaacgggtatcggctctgaaatagaaaaccacggcattatcaatactaccgatgcgcaggacttgatgatggcgcgtgctggtgcagagataaaaaatacgggcaccattaacgtgaaacctggcactgaagcgtacgcaagagctggcgttatgcgcgctatagatgagggctctcgtgcagtcaatggggctggtggtattattaatctggtatcaacaacagtaccaacgggttcctccggttcgtatgagttccctgttgtatggtatcacggcaccaactttgcgctgttagccagcaattacggtgatgtgacgaatgagtccggcgcaacaattaatattcatggtcctggggtctatggtgttgccgcttctcgtggtactgcgactaacgcaggtgtgatcaatgttgatggttttattccttcagtagatgaaaatggtgatattactgatgaagcctattgggattttaacgcttacttcctgatggctggcggcgcgttagcgggttcgaccgatgcgggtcatggcgatgccgatatagtcaatactgggattattaatgttaagaaccagggctttggcatgctggcgatggagggtggcacggtcatcaaccagggcgaaataaatctgctctcagatgagggactgacgcagcaacatgaaggtcagttgttcgcgatgggagctatccgtagtggtacagcaattaatgacgtaacgggcgttattaatatcgatactgacatcggccaggcattttacggcgatggaacggggacgatcgttaactatggcacaatctgttcttttggcatttgtcagagcccggaacaatataacccgactgatagttatgtgtcagtacagtacaccgggggtgatattctggtggctgaaggagagtcgacaaacttcattaacccagtcctgataactgatgcaacgccaggaagcacgattaatgcaggaacggtatctggtagcaatatcaacgttcaaagcggtacgctcgaaaatacctccacgggcattattaacaccctggtgaaattggcaccagatgctgtaatagataatgcgggttcgatgggcaatattgatgctcagggaggtaccctcaataatgagggtaccatcaacggtaatgtgacaatgtatgctggggctagcactaatctggtgaacaactccggtactattagcaatgttgtgcaaaaatccggcgtctttaataacagtggtacagtgagtaaacgtattattcagaccagtggcatctttaataacttacaagatggcaaagtggacaatggttctgcattaaccggtgatgcctgggtcaataacgaaggaacctggcgcctcggtagtagcagtggcggcaataacgcaggtatgctggaagttaataacaacgccgtcttcaataacagcggtgagtttatcctcgataacaacaagaatgctgtacatattaatcagtccggtacgctttataacactggtcacatggacatcagtaattcctcccacaacggtgctgtcaatatgtggggtgggaatggtcgctttatcaacgatggaacgattgatgtctctgctaagtcgctggtggttagcgccagtaatgctggggatcagaatgctttcttctggaaccaggataacggggtcatcaactttgaccacgacagcgccagcgctgtgaaattaacccacagtaacttcatcgcgcagaatgacggcactatgaatatcagcggtaccggtgctgtggctatggaaggtgataagaacgcgcaactggttaacaacggcaccatcaacctcggcacagagggcactaccgatacgggcatgatcggtatgcaactcgatgccaacgccacggcggatgcggtgatcgagaacaacggcaccatcaatatcttcgccaatgactcgtttgcattcagcgtgctgggtacagaaggtcacgtggttaacaacggcacggtggtgatcgccgatggggttacgggttctggcctgatcaagcagggtgacagcattaatgttgaaggcgtgaacggtaacaacggtaataacacggaagtgcattatggcgactatacattgccggatgtgccgagtcccaatacggttagcgtaacgccgggaagtgatgcaactgatggcggcatgaacaatctcaacggttacgtggtgggtacgagtgccgatggcagcgccggtaagctcaaggtcaacaatgccagcatgaacggcgtagggatcaacaccgggtttaccgccggtacggcagacaccaccgttagttttgataacgtggtggagggcagcaacctgaccgacgcggatgctatcacctcaacgaccgtggtatggaacgccaaaggcagcaccgatgccaacggtaacgttgacgtcactatgagcaaaaatgcttataccgatgtggcgaccgatgcttcggtgaatgacgtcgcgaaagcactggatgcgggttacaccaacaacgagctgtataccagcctgaacgtcggcacgactgccgaactgaacagtgccctgaaacaggtcagcggtagccaggcgaccacggtattccgcgaagcgcgcgtgctaagcaaccgctttagcatgctggcggatgccgcaccgaaagtgggtaacggtctggcgttcaacgttgttgcgaaaggcgatccgcgctcggagctggggaacaataccgagtacgacatgctggcattgcgtaaaaccatcgacctgagcgaaagccagacgatgagtctggagtacggtatcgcgcgcctcgatggcgacggtgcgcagaaagcgggtgataatggcgttacaggcggttatagccagttctttggcctgaaacatcagatgtccttcgacaacggcatgaactggaataacgcattgcgttatgacgttcacaaccttgacagcagccgttcgattgcatttagcaacacaaacaaaacggctgataccgacgtgaagcagcagtacctggagttccgcagcgaaggggcgaagactttcgaaccgagcgaaggactgaaggttacgccatatgcgggtgttaaactgcgtcacacactggaaggtggctatcaagagcgcaatgccggagactttaacctgaatatgaacagtggcagcgaaacggcggtggacagcatcgtcgggttgaaactggattacgcaggtaaagacggctggagcgctagcgctacgctggaaggcgggccgaacctgagctacgcgaagagccagcgtacggcaagcctggcaggcgcaggcagtcagcactttaatgtcgatgacggtcagaagggcggcggcatcaacagcctggcaagcgtcggcgtgaagtacagcagcaaagaaagttcgctgaatctggatgcttaccactggaaagaggacggcatcagcgataaaggcgtgatgctgaacttcaagaaaacgttctaa

SEQ ID NO: 24457 - DNA, 129 bp, Escherichia coli
atggttaacatgagtgatcactttcagaacatcaccacggcaggagaaacggtagcgaaggtgtgttccgataccatcaggattcttttcgtcgatacgctccagagtgattccaagctggcgttctaa

SEQ ID NO: 24458 - DNA, 258 bp, Escherichia coli
atggcaacctgctggctgaccggagaatgtctgcaggaaggttcacgggaatgtcgccagcaccagggacagggcccggctccacaataccagcgccggcattttgcacactgccagcgcaccggcatcacaacacgtatcatgcaactccccctcgtgattcctctgttcgctgctgcatccactgctccacttcgcttctgtacccgcggctgctacgacccggttttatgggttcaggaaaatggccttcactga

SEQ ID NO: 24459 - DNA, 384 bp, Escherichia coli
atggcttttcaggtaaaaattcatcaaattcgggcttttgttgaagtggctcgtcagggcagcattcgcggagcgagccgaatgttgaatatgtcgcaaccggcactgagtaaatctattcaggagctggaagaagggttggcggcacaactcttttttcgccgtagtaaaggcgtgacgttaactgatgccggtgaaagtttttatcagcacgccagtcttattcttgaagagctgcgcgcagcgcaagaggatattcgccaacgacaagggcaactggcagggcaaattaatatcggcatgggggccagtatttcccgcagtctgatgccagctgtcatatctcgttttcatcagcagcatccgcagggctttgttgaataa

SEQ ID NO: 24460 - DNA, 180 bp, Escherichia coli
atgcatttacgtcatctgttttcatcgcgcctgcgtggttcattactgttaggttcattgcttgttgcttcatcattcagtacgcaggccgcagaagaaatgctgcgtaaagcggtaggtaaaggtgcctacgaaatggcttatagccagcaagaaaacgcgctgtggctcgccacttag

SEQ ID NO: 24461 - DNA, 1428 bp, Escherichia coli
atgagcaaattcacagttgattcgtttatcgttgagctaggcttcagcgagaacgttattaagggcttgcaaagagttgaaaaggcagctttgcagtcagcacaaagaattgaacgtaatttgaatagagcgtttaaagttaacccaaagagcatggataaggatttaacagcctctttgggaaatatggaaaagaagattaaccagacttttaataagctggaggaaagagccaaatctacgaaggtctttaagttcaaaactcaggttgaagaaactgttaaagcagcaagacagccacgaattagcggaaacagagcaatcacagcagcgcatagcgtgaatatgagcaagcttcgtgactttaatcctatgcttgagaagtattttaagagccaatattacaacttaagcagtaaatccaagatacttggaaacgaagcttttaatcgtgagttagcaaagttaaatcagtctcttcgtgaaacactttctaagtttaataagaccaccagcaaaaataatcacagtgaaaatgcttcgaatggtctggatgtattagctacaagtgcaatcaaagcaggtacagccatttatagttttcagacagccttagaagcttacaggcggattatggaggttggtctgaaaaaagaagcatcacaacgagcggcacaattcgttttaggtgatgaaggtgctaaacgagctacagaatttgttaagaatcttgctgatagtagtggtgtagaccagattgaaacattaagcagttttgctaagttttccgctggtgctggtgatatgaatacagaccagaaagaatccttattttctaatgtgattggtacatccagattaatggggctaagcactgatgaaattaacgggattctgaaagctttcgagcagatggcatctaaaggaaagattcaggctgaagagctacgcggtcaattaggtgacagaatggcaggtgctttccagttatttgccagaagccttgggatgactacagaagaattagacaaggccatgaaagacggtaaggttctttctaaagatgttcttcctaaagtatccgctgaaatgggaaggatgattgataaagctggtggatgggaaaagattattaactctactcagacgcagttaggccgcttaagtaattcatggaataataatctggccttaatgttcgatggttcacaggaaggtctggtagattttacaaggtcactgactaatttacttaattcactaggtggtcaatctaaaagtcttggtgaacattttggcgacctgatgaaaagtatgtcaaacggtattgatgatttaaccacgattagctaccgagtgcagggattctttgacagagtgacccttgcttacagagaattaaatgacactcaaaaagggctttgttga

SEQ ID NO: 24462 - DNA, 708 bp, Escherichia coli
atggaaagtctatacatcaacggtaaaaagattgattccttcggtgactggtcaccacagattgaacatccagctatcgctattcagcgtaaagaacatgatgaaagaattaagcttgagcaagagctaaagatgtcaccaaaggaaatcatctttgtgacccctgagcctcaagaaatgcctgatatctgcaagggtgaagcattacttgaacttgaaaaacggttttacccattgttgaaaaatcaaaaaattgcacttgatgacgcttacagcaaagttaccttgatgcaatcagctattgagccatcagaatttgagattcaggatgaattgtcacagaaaccatttgtctattaccaatacgaagacaatgatggttttggtatttatccagaaaacatcccagccgcgattagtagtcttcctgagggatatcgaattgtgaagatggttaaagcttcaagaggtgctggtcaatttatttatatgactaataagagcgatgaagaactctgtgaaattgctaaacagaacatcttggcatcacgtaacaagcaacttgaaaatgttaagttgtatctctcaagagagcttcaggctatgaaagagcttgttagtgaatatgagtcgcagaagaagattgctatgcaggctgatattgagcagttagtgaagatttcaacgaagtatagcaaggtactttaa

SEQ ID NO: 24463 - DNA, 426 bp, Escherichia coli
atgctatgcacatttgattatcatgcgttttatcgccatagaggccaccttgtccgtgagaatagcggaacatggaaagatttaactcgtaatgctgaacccttcacacaccagcaattaaaatcccgcttctccagatggaagaatgcaccagcagatactggtgattttgagattatccataccttcgattatgcctcagaagatgaccttcacgatgcaattaagctgattgaagacttcaatacctcagaagatgtggatggtgacaaatataaatcccgtggtaaccgctataaccgtgatgatatcactcaggccataaatgctggtcaatctcagcgatacatcacagaaaaatatggtatttcacggagacagtatttctacgttaaatcattgattaataaagacaattcaaaataa

SEQ ID NO: 24464 - DNA, 864 bp, Escherichia coli
atggaaaaatttcacatgtttgatgaccgtatttatcagatgactaatggcgttaaagctgccgaccgtattatttacactgtcatgttgaatgaacaaaagttttatcacgataaggggcaatattataccccttcatatgctcatcttggtcagtatgctggaatcacaagaacatccgtgattgcatgtatgaaacgacttgaggcacatggtttaatcaagaaaactaacgttgcaagcaatcagtgtgttattaaagtttattcacttgatgaagtaccggaagttttaacagagcttacagctaaggaagccagaaaggcaaagctggagtctaaagtttctcagtcagtcaagaaagatgacccactgagtcaaaattctttacccactgagtcaaaattttttactcagtcagtcaaaatctttgacacgtataataacagtaataacaagaaagaacttattaatactatgaatgaaactgaccttgatagtgaagctactaaagagacctctaaaacatctgacttagaggaagataaaatctctgatgtgattgctagtagtgaccataaaaacacacagtgcctcgccactgatgatgagatggaccccttcgatgattaccttgatgaagagtcagagcgtgaagaggctattaaaaaagcacaacgcaaagcagagattaaatcacgcattgaaatggcgaagctaaagaataaggttaatgacctcgatgactttgatgatggtgacgatgatgacttttctttcacaccaaagaagaaagtagttagtgaaaataagaagcaaaggattaagcctaaaatgtactatgcaggtggaggtatccaatga

SEQ ID NO: 24465 - DNA, 480 bp, Escherichia coli
atgaatcacagcgaaacaattaccatcgaatgcaccattaacgggatgccttttcagcttcacgccgcaccaggcatgccgctctcggaattactccgcgatcaaggactgttaagtgtcaaacaagggtgctgcgtgggtgaatgtggtgcctgtacggtgctggtcgacggcacagcaatagacagttgcttataccttgccgcctgggctgaaggaaaagagatccgcacgctggaaggtgaagcgaaaggcggaaaactttctcatgttcagcaggcttatgcgaaatccggcgcggtgcagtgcgggttttgtacgcctggcctgattatggctaccacggcaatgctggcaaagccgcgcgagaagccattaaccattacggaaattcgtcgcggtctggcgggaaatctttgtcgctgcacggggtatcagatgattgtaaatacagttctggattgcgagaaaacgaagtaa

SEQ ID NO: 24466 - DNA, 1545 bp, Escherichia coli
atggccagcattaaagacatccgcccattcgcccccggcattcccccatcttccgttaacccaggcgtacgcccaccagggcagttcttcctgccggtggaactcaagaatgaaattttgcggaacatgaagtatatcggcccgcaaatatttagctggggtgatgaccaccggcagatcattgacctcagtaccgcgggagaagtgaaaatacatatggtagacaataccatcatcacgttggagcgcctgaatccgaatccgcaacataacgagttcatgatggtcgccgaatggtgccaatgggctatggagcgggatggtttgcaagaaaacctgcaaaaaaacctgtacgaaatcctggaagaaaaccagcaaaacaaacagtcagaaattccccaagaagacctgaaagaaagtctggaagaaatcaaggaaaatatcctggaagaaaacctgccagcaagccggattgaaaaccgggcagaagcattgcgcagaatgaaggaatatctcattacaagacggagtatgctcaatcttagcaaccttgggttgacttcactccctgaaaatttgcctccacatctgattgaattttactgcagtaaaaacgtgttgaccgcgttaccgaaggtgatgccaaagtggctgctggtgcttgactgtacagataacgtcttgatcttgttaccgaaggtgcagccctcaaaactgatggtactgaagtgctatgaaaactgtattatctggctgcctgagctgtcgactaacctgagagtgattaactgttctgaaaacttcttgcaatttttaccgccgtcgatgccccagtacctgtataaactatcctgtgccggcaacaatattcactcaatacctgatgagatgctggagaacttgactcgcctgaaagtatttgactgttctagtaacgatttgatctctgcaccacggctgccgcccaaactaataatttactactgtggagaaaacaagtttaaaacggtacaggtgccacagccccagagcctgaaggtgtttgactgtaatggtaacccgtgggacaaagacaatttaccgacgctgttcaaagccgtcgagggcctgaaaaaacagcagggcctgaaggaccttttgggctttttgcacaaggagggccagatgaagctggagaagctggagaagctggagaagctggaggatctggatgaccttatggatctagagctcctggatgacccggtactcctggagcgcgtgaaggtacaggaggacctggagctcctgaatcagcagttgggcctgttgattctggaaagacaacaggactcgcagcctgttaatcctgaatctgtttgtagagtattggcttcaatgccgcattgtagctggtttcttcctaatgtgatttttgattatgtacacccttatgtacacggttttttcgggtgctttggtcagaagccattgcctacatccctcacgatcgaggtgtgtaaccatgttcaggcttgttgtcctgcgcgcgcgtattgctcgtga

SEQ ID NO: 24467 - DNA, 546 bp, Escherichia coli
atgaaaatcaaatatacaatgaaaatggccgccgttgccagcgtcatggtcgccggctacgctatcgcggatgcaaatgggctcaacactgtgaacgccggggatggcaagaatctgggcaccgcaaccgcaaccgcgacgatcaccactctgcagagctgctctgtcgacctgaatctcgttaccccgaacgcgacagtgaacagagcaggaatgctagcaaaccgcgaaatcactaaattttcggtagggagtaaggattgccctagcgacacctatgctgtatggtttaaagagatcgatggcgaaggacagggggtcgcgcagggcactacggtgaccaacaagttttaccttaaaatgacatcggccgacgggaccgcgagcgtaggggacatcaacataggaaccaaatcaggcaaaggcctgagtggtcaactggtagggggaaaattcgacggaaaaataacggtggcatatgactcggccaccgcccccgccgacgtttatacatacgatctcatggccgccgtgtacgtccaataa

SEQ ID NO: 24468 - DNA, 264 bp, Escherichia coli
atggcgtcgccggaggtggcaagggattttgtctcgctgcatcttccggaggaatatcgtcagttgtgtgatttatcgacgctgcggctggagccctgcacgtttgtggaccaggagctgaagcagtatgcatgtgatgcactgttcagtatgaagactgtcagtggtgaggatggctatgtttactgcctcgtggagcaccagagtacggaaaacgcgtatatggcgttcagaatgctcaggtatgcggtagctgcgatgtag

SEQ ID NO: 24469 - DNA, 1185 bp, Escherichia coli
atgaaactgaaaaaactccccgggtttagtttaggacttattgctttggcggtgggtaatgcatatgcaacacaattgttggatgattatagtatactttcctatataactgatgaagaatcgccgattgaaatcaaagataataattcgataagtaatggagagtatctaaccactaaagacgaaagccatgctgtgaaagtggatgacggtgtaactggatatataaataatgccagtgtgatgactagtggtgatggatcttatggtatttctgttgatagtcataacaaagtattatatataagcgatagcgatattaagacctctggaagcgtatctgacaaaggaaataaccaagatgttaatggagggataacagccagcgcagtagtcagtgaatttggtggcaccatcgttatgaatggtgataattcagtcgagacgaggggggcatattcagcgggacttttaagtcaggttaatgattctgggattgtggaaaataacacccgtcttgaaaccacagataaaacgaacattgttacctatggggaaaatgcagtaggtgttcttgcatgttcaagtcctggagagtctcgaacatgtgtcgatgctgtagatgatgaagttagtgattctaacagttacgaagttattagccgtgctgatttaaaaatgaatggtggttccataacaactaatggcactaatagctatggtgcttatgctaatggggaaaaagcatatattaatttagattatgtggcacttgaaaccggggagcatggaagttatgcagttgctattcgacaaggtaacattgatataaaaaatagttctattacaacaaaaggcactaaagcccccattgcaaaaatatacaatggtggagagttatttttttccaatgtcaccgcggtatcagaacaagataaaggaatatcaattgatgcatcaaatatcgattctcaagccaaaatagcactatcaagtgtcgaactttcaagtgctttggatagtattgatgttaacaaaactacaacggatgtaagcatccttaatcgaagtattatcacgcctggtaataatattctggttaataatactggaggtggcttaaacataatttcgtccgactctactctaaatggagcgactaaactcgttagcgggctttgttga

SEQ ID NO: 24470 - DNA, 423 bp, Escherichia coli; identical to SEQ ID NO: 7160

SEQ ID NO: 24471 - DNA, 768 bp, Escherichia coli
gtgggcgataaagcgaagttacagcattacgccgcgacgacgccgattgtcgacatggtgcgtttctctccggcgcaactggatgccgaagcgctgattaacctgctgcgcccgctgaccccgcgcctgtattccatcgcctcctcgcaggcggaagtcgagaacgaagtacacgtcaccgttggcgtggtgcgttacgacgtggaaggccgcgcccgtgccggtggtgcctccagcttcctcgcggatcgcgtggaagaagagggtgaagtccgcgtctttatcgaacataacgataacttccgcctgccagccaatccggaaacgccggtgattatgattggcccaggcaccggcatcgcgccgttccgcgcctttatgcagcaacgcgccgccgacgaagcgccggggaaaaactggctgttctttggcaacccgcactttacggaagatttcctctaccaggtggaatggcagcgctacgtcaaagagggcgtgctgacgcgtatcgatcttgcctggtcgcgcgatcaaaaagaaaaaatttacgtacaagacaaactgcgcgaacagggcgcagagctgtggcgctggatcaatgacggtgcccacatttatgtctgcggcgacgctaatcgcatggcgaaagacgttgagcaggcacttctggaagtgattgccgaatttggtggcatggacaccgaagcggcggatgaatttttaagtgagctgcgcgtagagcgccgttatcagcgagatgtctactaa

SEQ ID NO: 24472 - DNA, 579 bp, Escherichia coli
atgaacagaatcagtcgctattattttcaccgctcagtactttccttattgatagctgccatgatatatgccccgcctgggatgacggccttcacttctaatgttattggcgttgtaaatgatgagactgtagacggcagccaaagagtagatgaacgaggtacaacaaataatgctcatatcatcaatcacggcaatcaggaggtatatggcgggatttctaatggaagtgttattgatactggtggacatcaagaggtatctggtcatggctcttatcaggggcaggctaataatacagtcattaacggtggcagccagacaattagtgagggaggaatttctacagggacgataattaacgataaaggaacaatgtcagttttaacgaatgctaaagctgatgcgacccgaatagataacggcggggccatggatgttgccgggaacgcgactaataccataattaatggcggtacacagaatatttataatcatggtattgctacgggaaccaatatcaacagtggcacgcaaaatactgatgaatcccctaatgattttggtaaaaatcattaa

SEQ ID NO: 24473 - DNA, 708 bp, Escherichia coli
gtggtcatcggtccttttatcaacgcaagtgcagtattactgggtggcgtgctcggtgcactgcttagccaacgcttaccggaacgtatccgcgtctccatgacatcaatttttggtctggcatcgctggggattggtattttactggtggtgaaatgcgccaaccttccggcgatggttttagcaaccttactcggtgcattaatcggcgaaatttgtctgctggaaaaaggcgtcaataccgcggtcaccaaagcacaaaatctgtttcgccactcacgtaagaagccagcgcatgaatcttttattcagaattatgtcgcgattattgtcctgttttgcgccagcggcaccgggatcttcggggcaatgaacgaagggatgaccggcgatccgagtattttaatcgccaagtcatttcttgatttctttacggcgatgatcttcgcctgctcgctgggtattgcggtatcggtgattagtatcccattactgatcatccagttaacgctggcgtgggctgccgcgctgatattaccgctgaccacaccgtcgatgatggcagacttcagcgccgtaggcggtttattgctgctggcaaccggattacgcatctgtggcattaaaatgttcccggtggtcaacatgcttccagcactccttctggcaatgccgctttccgccgcctggaccgcctggtttgcctga

SEQ ID NO: 24474 - DNA, 609 bp, Escherichia coli
gtgacctaccccttcccgttgacgacaaatactaatgtattagatattggtgataagacaccgatgccattaccgttaaaactctatattaccccagtcggtgcggccggtggagttgtcataaaagccggggaagttattgcccgtattcatatgtataaaattgccacgttaggaagcggaaatccgcgtaattttacgtggaatattatttcaaataacagtgttgttatgccaacaggcggctgcaccgttgatagtcgtaatgtcaacgtgaatctcccggactttcctggaagcgcagaaataccccttggcgtatattgctcaagtgaacaaaagctctcattttatctttcgggtgctaccactgacagtgccagacaagtgtttgctaacacagcaccagatgcaacaaaagcatcgggagtgggtgtctctctgatgcgtaatggaaaaatactggctacgggagaaaacgtctccctggggacagtaaataaaagcaaagtacctctgggtttaagcgcaacctatggacaaacaggaaacaaagtttcagccggaaccgtccagtcagtcattggtgtcacttttatctatgaataa

SEQ ID NO: 24475 - DNA, 219 bp, Escherichia coli
gtgctgccgctgtatcccgacatcagcccggaaattattgcgattgctatcggttcaggtgcgattggctgcacgatcgttacggactcgcttttctggctggtgaagcaatattgcggcgctacgctcaatgaaacatttaaatactatactaccgcgacatttatcgcttcagtcgtcgctctggcgggcacattcctgctgtcatttatcatctaa

SEQ ID NO: 24476 - DNA, 888 bp, Escherichia coli
atgcttctaataatgtctggttcctatgttcaacaagaattaggggccgaatttggttctattcctccaagctttcttcctttagctaataaacgattatttaagcatcaagtatctttagggcatgatggtcatgcaatatatctggttttaccggaagattttgtgtttgacaaacatgattatgaatggttgcttcgtaataaagtaacaatgattcctgtcgatagtaacttgacattagggcaagcgatagttaccgcatggaatttaataggagataaagatgacaaaggcttacaattattgtttggcgatacactctttaaaaaaattcctgcaggggatgatttagtagcaataagtcattctgatgataattatcaatggtcatttttttacgaaacagagttaagagccgtcagtagagaagataataaaaatgtaatttgtgggtatttttcttttagtaaaccgaatttttttattagggaattagttacttcaaaatttgattttacggcggcacttaaaaagtatcacgacagctatagtttagcttctatatacgtgtctgattggcttgattttggacatattaatacatactataagtcaaaagtacaatacacaacccagcgtgcatttaatgaattatgcattacaacaaaatccgttatcaaatcaagttcaaatgaaagtaaaattgaagctgaatcaaaatggtttgaaactattcccggagaattaaagatctatactccaatgttattggaaccgtttgatcatatcagaaagagttataagcttgaatatttatataatacgacgttaaatgaattatttgttttttctcgcctaccaaataatattggctttgttgaataa

SEQ ID NO: 24477 - DNA, 360 bp, Escherichia coli
atgaatactgttttaagtgttcagggtgcttctgcgcccgttgaaaagaaatcgtttttttctaaattcactcgtctgaatatgcttcgcctggttcgtgcagtgatcccggttgctgttctgatgatgttgttccctgagttagctatggctgctggtaaaggcgacctgatggctaaaggtaacgatacggttaaggcgaccttcggtaaggactccagtatcgttaaatgggttgttctggctgaggtgctggtcggtgcggtcatgtacatgatgaccaaaaacgtcaagttcatggtcggctttgccatcatctctgtatttattgctgtgggtatgagcgtcgttggcctctga

SEQ ID NO: 24478 - DNA, 567 bp, Escherichia coli
atggaacacggtgcccgtttaagtaccagtcgtgtaatggccatcgcctttatatttatgtcagtgcttattgttctcagcctctctgttaacctcattcagggggtgaataactaccgtcttcagaatgagcaacgcactgccgtgaccccaatgggatttaatgtgccctttgccgtgtcacagaacagtgccgatgcctcttatttgcagcagatggcgctgtcatttattgccctccgtctgaatgtctcaccggaaatcgtcgatgcttcacatcaggcgcttctgcaatatatccgcccgggtgcacagaaccagatgaaagttattctggctgaagaagcgaaactcattaaaaaagataacgtgaattctgcttttttccagaccagtgtccgtgtctggcctcagtatggtcgtgtggaaatccgtggaattcggaaaacatggattggtaactccgaaccttttactgatatcaaacattacatccttattctgaagcgggaaaacggggtgacctggctggataatttcggggaaacagacgatgagaaaaaataa

SEQ ID NO: 24479 - DNA, 729 bp, Escherichia coli
atgagaaaaaataatacggcaataatattcggcggcctgtttttttcctgcagcgtgatggccgcaaacggtacgctggcccccactgtggtgccaatggtgaacggtggtcaggccagtattgccatcagcaataccagcccgaatctgtttaccgttcccggtgaccggattatcgccgtgaacagtctggatggtgccctgaccaataatgagcagaccgcctccggcggtgtggtggtggccactgtcaacaaaaagccctttacgttcattctggaaacagagcgtggtctgaacctttccattcaggctgttccccgtgaaggcgcggggcgtaccattcagctggtcagtgacctgcgcggaaccggagaagaagccggagcgtgggaaacgtccacgccttacgaatccctgcttgtgaccatcagccaggctgtccgtggcggaaaattacctgcaggctggtatcaggttcctgtgacaaaggaaaccctgcaggccccggcggggctgtcttcagtggcagattccgtatggacggggaatcacctgaagatggtccgctttgtcgtggaaaataaaacgctgtctgccctgaatatccgggaaagtgatttctggcagccgggaacccgtgccgtgatgttcagccagcctgccagccagttactggcaggtgcgcgcatggatgtgtatgtcatccgtgacggggagggcaactga

SEQ ID NO: 24480 - DNA, 1257 bp, Escherichia coli
atgagtttattaaaaaacactggctggaatattttaggtctggttattccacttatcatggcgatccccgttatggggatcttagctcggttattaggtgttgaacgttttggtcttttcactatagcttatgctttaatgggatatgcaagtgtttttgatggtggtatatctcgtgcagttattcgatttgtatctatttatagaaatgacaatgaaaaagtaaatgttattttaggttcttctttatatacagtaaccgttttaagtatcctaatagcaatattaacttatttaatatcgccacacttagttgtttttttgaaagtgtcacagaatattcgacatgaagttgtaatagctctccaattactgggggcatgtgtgcctgcattgctacttacacaagtatggcgagcatatcttgaaggcgtcgaaaatttttcttctttgaacattcaacaagttcttacaagtcctttcataatattattaccattaattacaacatggttttcacacacgcttatttcagcagtctttggattgattttggggcgttggattgttgcgtttattagttggaaactttgttcgcgccatcttaaaaattttaaaagaatatttagtccaaaagttttgaaggagcttattagctttggtggctgggtaactctgagtaatattataggccctttaatggggtttattgaccgttttgctgtctcacatttcgctggcgctaatattgttgcttactattcagggccgtctgatatggtatctcgacttactttatttccgggggctgttgctagagctctatttccaaaactaagttttgaaactaaagaagagagcaaagttacttattttcggtctttaattctcgttttttgtttatctattgttttagcgttaccttttttcttattttcaagcgatatattaggtatatggttagggaatgagtatagaggggatgcagcgctagtattccgcatattgttaatagggtttattttcaattcaatagcacaaatatgttttgctagaattcagtctgctggatttgctaaatggactggtattgtacatattatagaatttataccatacttagttcttttgtattttctgaccgtcgaatattctttttttggagcggcgtttgccttttcattgagagcattattagattttataattctattcctggtggaaaggatcggtatctataacatggataggatataa

SEQ ID NO: 24481 - DNA, 1161 bp, Escherichia coli
atgtcccctgtttcatcaattggtaatgatattagtagtgatttagcccgtcgaaaaatgaatgaccttcctgaaagccccataggaaataacctcgaagcactagcaccaggcatagaaaaactaaaacagacctctattgaaatggtcactttacttaacgcgttacaaccaggtgggaaatgcattatcactggtgattttcaaaaagaattagcgtacttacaaaatgtaattctttataatgactcctctcttcgtatggatttttttggttataacgcccgaattattcaacgatcagacaatacctgtgaacttacaattaatgaaccgttaaaaaaccaggaaatatccacaggcaatatcaatgttaattgcccattgaaagacatttacaatgaaatcaggaggttgaacgtaatctttagttgtgggactggaggtatagttgatctatcctctctggacttacggaatgtcgatttagaactttatgattttacagataaacatatggccaatacaattttaaatccttttaaattggatgacacagattttactaatgccaacatgtttcaggtaaatttcgttagttcaaaacaaaacgccacaatctcatgggattatttactaaaaataacgcctgttataacaagcattaacgatatgtattctgaagaaaaaattaagcttgtcgaaagttgtttaaatgcgcttggagatattaccgaagaacaattaaaaattatgagacttgcaattatagaatctataccaagagcaactctaacagatgaattagaaaatgaattaacaaaagaaatatataaaagctcatcgaaaattaacaattacttgagcagaattaaattaccagagatgaaagcattctcattagaaaaaatagattattacatcgatataatcattaaagattatgaaagcgtcaaagaaaatgcttatctaatcgttccaaaaattaattacaatacagatttaaacatagaggactctagctcagaggaattccttccagataatacaatcgagaaagacgaaaattctccagacaattgctttgaagtcgtaaaatataatacatatgaagcttataactcagagaagcaatattataccagagaggggctttgttga

SEQ ID NO: 24482 - DNA, 540 bp, Escherichia coli
atgaaaggcttcccaattgcacatatttttcacccttcaatcccgccaatgcacgcagtggttaacaatcacaacagaaatattgattattggacggtaaaaagaaagtttgcagaaattgtctccaccaatgacgttaataaaatatacagtataagtaatgaactgcggagagtattatctgcaattactgcattgaacttctatcaaggcgatgttccttctgtcatgattcgaatccaaccggaaaatatgagtccattcatcatagatatttctacaggagaacatgacgattatatcatacaaacattagatgtaggcacttttgcaccttttggcgaacaatgtacttgctcagccgtcaataaaaaagagctggagtgtattaaggagacgatttctaagtattgtgcaaaattcacccgaaaagaagccatcttaaccccccctacgtactttaataaaaccgccattccttcagattgttggcaaattctctttttttcacccgatcattttaataatgatttttattga

SEQ ID NO: 24483 - DNA, 960 bp, Escherichia coli; identical to SEQ ID NO: 7433

SEQ ID NO: 24484 - DNA, 1044 bp, Escherichia coli
atgaaaaattcaaaagcaatattgcaggtgccgggcacaatgaaaattatttcagcagaaatacctgtgcctaaagaagatgaagttttgattaaagtggaatatgtcggtatttgtggttcagatgtacatggttttgaatcaggcccgtttattccgcctaaagacccaaatcaagaaattggcctgggtcatgaatgcgccgggacggttgtggctgtgggaagccgagtgcgcaaatttaaagcgggggatcgagtaaatatcgaacctggcgttccttgcggtcactgtcgttactgtctggaaggcaaatataacatctgcccggacgttgattttatggcgacacaacctaactaccgcggcgcattaacgcactatctgtgtcatccggagagctttacttacaaactgcccgacaatatggacacgatggaaggggcgctggtggagcctgccgcagtcgggatgcatgccgcgatgctggcagatgttaaaccgggtaagaagataattattctgggagcgggttgtattggtttgatgacgttgcaagcgtgcaaatgcctgggagctacggatattgccgtcgttgatgtactggaaaaacgtctgacaatggcggaacagctcggcgcgacagtggttattaacggcgcaaaagaagacactattgcacgctgtcagcaatttaccgaagaaatgggcgcagatattgttttcgaaacagcgggttctgcggtcaccgttaaacaggcaccttatctggtaatgcgcggcggtaaaattatgattgttggtactgtaccgggcgattcggcaatcaatttcctcaaaatcaatcgcgaagtcactattcagacagtattccgctatgccaatcgttatccggtcacgattgaagctatttcctcagggcgattcgatgtgaaatcgatggtgacacatatttacgattatcaggatgtacaacaggcatttgaagagtcggttaacaacaaacgcgacattattaaaggcgttattaaaattagcgattaa

SEQ ID NO: 24485 - DNA, 1302 bp, Escherichia coli
atgagtcaggatataaataataatatagctgtcagcaaacaccgtcgaataataagacaactacggtggtggatgttaatcctttttctaatgggtgtcactgtcaattatattaccagaaactcattaggtattttggcaccagagttaaaagacagccttggaattacaactgaacaatactcctggattgttggtggatttcagcttgcatataccctttttcagccactttgtggatggctaattgatgttattgggctcaagattggatttatgatttgtgcttcattatggggaattgcttgtcttctgcatgcaggagcaggaagctggatacagcttgcgttgcttcgttttttcatgggaggtgctgaggcttctgcgacacctgcaaatgcaaaaattataggtgagtggtttccaaaatctgaacgtcctgttgctgctggctgggcgggtgtcggtttttctatcggtgcaatgcttgcaccaccaattatttactttgcacatgcgtcatttggttggcagggtgcatttatgtttacaggtgcacttgcaattctttgggttttcctttggtgggcgtgttataacacaccagaagagcacccaaacttaagtaaaaatgaactcaactttatccgacaggataacgaagctcctccggtaaaaatgccttttctgaccgcgttaaaaacagttagtaaaaataaacgcttttatggaatcgctatccctgcatttatggcagagccagcatgggctgtaatgagcttttgggtgccattatatcttgcaaaagcatatggcatggaccttaaacaaatagctctgtttgcatggttaccatttctttgcgctgatttaggaagtattgccagcggatatctgacaaaactctatacccgtctgtttgggttaagcagagtaaattctgttattgcgtcctctgtaagcggagcatttctaatggtttcgcttgctgtgattgcttttatcgacaatccatatattgctattgtacttatctccattggtggttttggtcatcagataatttcctgcatgttaagtgccctggtcgttgaatcttttgataaggggcagatggccactgttaatggaatgcgtggttcagccgcatggattgccagctttttgttctcactgattattggcgttactgctgacaaaataggctttaacccgctatttatcgccatgggattttttgatcttattggtgctttttttctggttacttttattgcagaacgtcgcaaaaaacgcacctga

SEQ ID NO: 24486 - DNA, 522 bp, Escherichia coli
atgaaaatcacccctgaacaggtttgtgaggctctggatgcctgggtatgccgaccaggaatgacacaggagcaggcgacgatattaatcacggaagcattctggactctgaaagaacgcccgaacatcgatgttcagcgtgtcatagatgaaggtggcgcggttgatcagcgagcgcttggcgttaatcgagtgaagatattcgaacgctggaaggctatcgacaccagggataagcgtgaaaagttcacggcgctagtgcctgcaattatggaggctatccggattaatgatttcaggttgtatcgtgaaattagtgacggaaaaagcatcacgtacatgatcgccgggttaaacaaagaatatggcgatgtggtggagtccggactgctttttgctgatcctgccgtagtggatcgtgaaactgacgaacttatagaaaaagcaattgctttcaaacttgcgtatcgacagcaataccaacaaaaagctggatggaattatgagccttctttttgctga

SEQ ID NO: 24487 - DNA, 456 bp, Escherichia coli
gtgattgttgccgatcgcattgatgaacgactggaaaaagcgaaagagagcggggctgactgggcgattaataacagccagacaccgcttggcgagattttcgctgaaaaaggcataaagccgacattaattatcgatgcggcttgtcatccttctatcctgaaagaggccgtaactctggcttctccagcggcacgtattgtattgatgggcttctccagtgaaccgtctgaagtgattcagcaaggaattaccggaaaagaactctctattttctcttcacgcttaaatgcaaataaattcccggtcgttatcgactggttaagtaaagggttaattaaaccagaaaaattaattacccatacgtttgatttccagcatgttgctgatgccattagtttatttgaacaggatcaaaaacattgctgcaaagtcttactcactttttctgaataa

SEQ ID NO: 24488 - DNA, 138 bp, Escherichia coli
atgaaaaatgtactgattcttggtgctggcggtcagatagcccgccatgtgattaatcaactggcagataaacaaaccattaaacaaactttatttgcccgtcagccggctttgttgaataaatcgaacttttgctga

SEQ ID NO: 24489 - DNA, 588 bp, Escherichia coli
atgcagccagtgattaacgcgccggaaattgccactgcccgagaacagcagttgtttaatggcaaaaacttccatgtgtttatctataacaaaactgagagtatcagcggactgcatcagcacgactattatgaatttactctggtattaaccgggcgttatttccaggagattaacggtaagcgcgtgttactggaacggggcgattttgtttttattccgttaggttcgcaccatcaaagtttttatgagtttggtgccacgcgcatattgaatgttgggatcagtaaacgcttttttgagcagcattacctgccgttgttgccttattgctttgtcgcttcgcaggtataccggaccaataacgcttttctcacctatgtggaaacagtgatttcttcattgaatttccgcgaaacagggctggaagagtttgttgagatggttactttttatgtcattaaccgtttacgtcattaccgcgaagaacaggtgattgatgatgtaccgcagtggctgaaaagtacggtagaaaagatgcatgataaagagcagtttagtgagtcggcactggagaggctttgttga

SEQ ID NO: 24490 - DNA, 807 bp, Escherichia coli
atggaaacagggctggatgtggtgctgttcactcgcagtacccgaagcattgagttaacggagtccgggcgttattttttccgcaaagctaccgacctgctgaatgattttcacgccatcaaacgcagcatcgatactatttcgcagggtatagaagcacgggtgcgcatttgtattaaccaactgctttatacgcccaaacacaccgcacgcttattacaggtactgaaaaagcagtttccaacctgccagattaccgtgacgaccgaagtgtataacggcgtctgggatgcgattattaataatcaggcgaatattgctatcggcgcgcccgacacactgctggacggcggcggcattgattacacggagattggcgcaattcgctgggcttttgctatcgccccggatcacccattagcctttgtgccggagccgatcgccgaaagccaactgcgtctctatcctaatatcatggtggaggacaccgcgcatacgattaataaaaaagtgggctggttgctgcatgggcaggagtcgattctggtgccagatttcaacaccaaatgtcagtgccagattttaggtgaagggattggttttttgccggattacatggtccgtgaggcgatggcgcaatccctgctggttacccgacaaatccataatccgcgccaggattcacgcatgttactcgcaactcagcattctgctacgggtcaggtgacgcagtggattaaaaaacaattttcgccaaatggcatattaacggggatctatcaggatttactgcatcgggagaattaa

SEQ ID NO: 24491 - DNA, 150 bp, Escherichia coli
atggtgatagtgattatcattaatatatttgtgactattattacccgtggcggatatgatctccggattgtactgaaagaaaatatcccgccagaaagtaatatcgctctgaatccccagtttctcaaagagctgtttcttttgatgtga

SEQ ID NO: 24492 - DNA, 1350 bp, Escherichia coli
atggtcgcgaataattattacgcgttcactttggggactggctggaatacacgcattggtgccatttccgtcgatgccacgaagtcgcatagtaaacaagacaacggcgatgtgtttgacgggcaaagttatcaaattgcctacaacaaatttgtgagccaaacgtcgacgcgttttggtctggcggcctggcgttattcgtcgcgtgattaccggacatttaacgatcatgtttgggcaaacaataaagataattatcgccgtgatgaaaacgatatctatgacattgccgattattaccagaacgattttggccgtaaaaatagcttttctgccaatatgagccagtcattgccagaaggctggggttctgtgtccttaagtacgttatggcgagattactgggggcgtagcggcagcagtaaggattatcagttgagttattccaacaacctgcgacggataagctataccctcgcggcaagccaggcttatgacgagaatcatcatgaagagaaacgttttaatatttttatatcgattccctttgattggggtgatgacgttacgacgcctcgtcggcaaatatatatgtctaactcaacgacgtttgatgatcagggttttgcctcaaataatacgggattatcgggaaccgttggaagccgggatcaatttaactatggggtcaacctgagtcatcagcatcagggaaatgaaacgacagctggagcgaatttaacctggaacgcgccggttgcgacagtgaatggcagttatagtcagtcgagtacttatctacaggctggagccagtgtttcagggggcattgtcgcctggtcggagggcgttaatctggcgaaccgtctttccgaaacgtttgcagtgatgaatgcgccaggaattaaagatgcttatgtcaatgggcaaaaatatcgcacaacaaaccgtaatggagtggtggtatacgacggaatgacaccttatcgggaaaatcacctgatgctggatgtgtcgcaaagcgatagcgaagcagaattgcgcggtaaccggaaaattgccgcaccttatcgcggcgcggttgtactggttaattttgataccgatcagcgcaagccctggtttataaaagcgttaagaacggatgggcaaccattaacgtttggttatgaagtcaatgatatccatggtcataatattggcgttgtcggccagggaagccagttatttattcgcaccaatgaagtaccgccgtcggttaatgtggcaattaataagcaacaaggactttcatgcacaatcaccttcggtaaagagattgatgaaagtagaaattatatttgccagtaa

SEQ ID NO: 24493 - DNA, 324 bp, Escherichia coli
atgaagagaaatttaatgctgtgttttgtcattaatgccttatttagcaccagtgcgatggctctgacgctgaatgacgctcgaactcaggggcgtgttggcgaaacgtataatggttatctggttgcattaaaggcggataccgaaacacagatgttagtcaaaaggattaatgaatcgcgtaataagagctatcaacaactcgccatgaaaaataatctgccggttgcggaagtggaaaaattggcggggcagaaactggtagcaaaagctaagcctggagaatacattcgcgggataaacgggatgtggttgcaaaaataa

SEQ ID NO: 24494 - DNA, 1173 bp, Escherichia coli
atgcaaaggaaaaaattgctcagtgtctgtgttgcaatggcgttaagcagtcagacatgggcggcagatacgtcgatagcggaaacatcggatgaatctcgtaaatccagcaagattagctgcccggctaatattaaatcactaagtaaagaacagctagaaaagctgccggcagagtgtaaatcagttgaagataatgagttattaccctgggctgcagtggggctggcagcggcagtcacaggcgtcgcagtatatgcactccacgataataataatcatcatgacgatccgtctccggtgccggatgatggcggtgatacacccgtcccgccggatgatggcggtgacacgccagtcccgccggacgatggcggcgatacacccgtcccgccggatgatggcggtgatacacccgtcccgccagatgatggcggcgacacacctgtcccgccggatgatggcggcgatacacccgtcccgccggatgatggcggcgatacaccagtcccgccagacgacggcggtgacacgccagatgatggcggcgatgataccccggacgacggtggcgatgacacgccagtcaaacacgatcctgtggtctataaaaacgatgtcacctgggatcaggacgcgaagaccctaaaattacgtgataccacctttacctacgccaaaaatgacgatggcagctatacgcttaccggacctggcggcactaccacaatcgtgaaggattggttagtcgacgaggctgctaacacggcttcgttcaatggcgtcaatcctggcggaacctccacctggcgctatgacgaagcgggaaaaatcgaaataatcatagagtcactcaccaccgcagacggtacaactggcgaacatttccatattaacgatgccactattaccgaccatggcggcaacatcgccctgaatggcggcgttgtgataaacgttgacggtaacgacatcaccctgaacaacgacggcaaaactaccgcgattggtgaaggttcggtggtaggtattcttaccggtgatgatatcaccattactaataatggtgagacggaagttgatggtgggacggccgttattgtcaatggcgatcgtacgacattgaatgtcgcaggtgattcgacattcaccaatggcggtaccggtagctga

SEQ ID NO: 24495 - DNA, 159 bp, Escherichia coli
atgatgagcggactcaccggtatcattacgacagccggcaccggctggtgcactacacgcggacacaatatgcagagccgctggtcgaaagtcgctatctttacgacccgctgggccgcagggtggcaaaacgggtatggcggcgtgaacgggacctga

SEQ ID NO: 24496 - DNA, 1374 bp, Escherichia coli
atgacatggagccgttacggtcagttgctgagctttaccgactgttccggttatgtaacccgctatgaccatgaccgttttggtcaggtgacgacggtgcaccgcgaggaaggcctgagccagtaccgcgcatacgacagccgtggacagttaattgcggtgaaagacatgcagggccatgaaacgcggtatgaatacaacgccgccggtgacctgaccgccgtcattgccccggacggcagcagaaacgggacacagtacgatacgtggggaaaggccatccgtaccacgcagggtggtctgacgcgcagtatggaatacgatgctgccggacgggtcatccgcctgaccagtgaaaacggcagccacaccaccttccgttacgatgtactcgaccggctgatacaggaaaccggctttgacggccgcacacagcgttatcaccacgacctgaccggcaaacttatccgcagcgaggatgaggggctggtcacccactggcactatgacgaagcagaccgcatcacacagcgaacggtgaatggtgaaaccgcagaacagtggcggtacgacgaacgcggctggctgacacaaatcagccatctcagcgaaggccaccgggtgacggtgcattacgggtatgatgagaaaggccgcctgaccggtgagcgccagacggtgcatcacccgcagacggaagcactgctctggcagcatgaaaccagacatgcttacaacgcgcagggactggcgaaccgctgtataccggacagcctgcccgccgtggaatggctgacctacggcagcggctggctgtcaggcatgaaactcggcgacacaccgctggtggagtacacccgcgaccgcctgcaccgggaaacgctgcgcagcttcggccgttatgaactcaccaccgcttacacctctgccgggcagttacagagccagcacctgaacagcctgcagtatgaccgcgattacacctggaacgacaacggcgaactcatccgcatcagcagcccgcgccagacccggagttacagctacagcgacaccggcaggctgaccggcgtccacaccacggcagcgaaccttgatatccgcatcccgtatgccacggacccggcgggcaaccgcctgcccgacccggagctgcacccggacagccccctcagcgcatggccggataaccgtatcgcccgtgacgcgcactatctttaccggtatgaccgtcacggcaggctgacagagaaaaccgacctcatcccggaaggggttatccgcacggatgatgagcggactcaccggtatcattacgacagccggcaccggctggtgcactacacgcggacacaatattatccgcacggatga

SEQ ID NO: 24497 - DNA, 1071 bp, Escherichia coli
atgttgagaatgaccccacttgcatcagcaatcgtagcgttattgctcggcattgaagcttatgcagctgaagaaacctttgatacccattttatgataggtggaatgaaagaccagcaggttgcaaatattcgtcttgatgataatcaacccttgccggggcagtatgacatcgatatttatgtcaataagcaatggcgcgggaaatatgagatcattgttaaagacaacccgcaagaaacatgtatatcaagggaaattatcaagcggttaggcattaataccgataactttgccagcggtaagcaatgtttaacatttgagcaacttgttcagggtgggagctatacctgggatatcggagtttttcgtctcgatttcagtgtcccgcaggcgtgggtggaagaactggaaagtggctatgttccaccggaaaactgggagcggggtattaatgcgttttatacctcttattatgtgagtcagtattacagcgactataaagcgtcgggtaatagcaagagtacatatgtacgttttaacagcgggttaaacttactggggtggcaactgcattctgatgccagtttcagtaaaacaaatagcaatccaggggggtggaaaagcaataccctgtatctggaacgtggatttgcccaacttctcggcacgcttcgcgtgggtgatatgtacacatcaagcgatatttttgattctgttcgcttcagcggtgtgcggttgtttcgtgatatgcagatgttgcctaactcgaaacagaattttactccacgggtgcaggggattgctcagagtaacgcgctggtaactattgaacagaacggttttgtggtttatcagaaagaggttcctcctggcccgtttgcgattacagatttgcagttggccggtggtggagcagatcttgatgtcagcgtgaaagaggcggacggttcggtaaccacctatctggtgccttatgcagcggtgccgaatatgctgcaacctggcgtgtcgaaatatgattttgcggcgggtcgtagccatattgaaggggcgagcaggctttgttga

SEQ ID NO: 24498 - DNA, 1227 bp, Escherichia coli
gtggagagccgctacctctacgacccgctgggccgccggacgggtaaacgggtgtggcggcgggtacgtgacctgacggggtggatgtcgctgtcgcgtaaaccggaggtaacgtggtacggctgggacggtgacaggctgacgacgatacagacacaacagagccggatccagacggtatacgagccgggaagcttcacaccactcatccgcatcgaaacagacaacggcgagcgggagaaaacgcagcgccacagcctggcggagaagctgcagcaggaagggagcgaggacgggcacggcgtggtgttcccggctgaactggtacggctgctggacagactggaggaagaaatccgggcagaccgcgtgagcagtgaaagccgggcgtggcttgcgcagtgcgggctgacggtagagcaactggccagacaggtggagccggaatacacaccggcgcgaaaagttcatctttaccactgcgaccaccggggcctgccgctggcgctcatcagcgaagacggcaatacggcgtggagcggggagtatgatgagtggggaaacctgctgaatgaggaaaacccgcatcacctgcaccagccgtaccgtctgccagggcagcaacacgatgaggagtcggggctgtattataaccgtcaccggtactacgatccgttgcaggggcggtatatcatccaggacccgatagggggggatgggggatggaatctgtaccaatatccgctgaatccagtgcaacacgttgatccattaggccttagtactatgataataggtaatggccccgttcctgataatccttttgggcatgctgcggcggcaaatcgatatggattaatgagttcgggaactggggatgagatgggcgcctctgtctctgattattttaaaaagatgcaaccccgcagagatacctggatttggataatagatacaacagatgaagaagaacaatgtatgatgaataaggcaatagaccttaataaaaaactaaaaactattaacctcgggcctcttcctgttgcaaataattgttttagccgaacgaacatgatttttgaggcgtgcgggtttaacaacccctctatgaatacaaatgcgcctataagcctacaagtgctcggtgagttttatggatatcaaagatatattatgcctaaaggtcctttcactggattcccatttaaatttcaagaggtaaagtaa

SEQ ID NO: 24499 - DNA, 399 bp, Escherichia coli
atggaaatgcttgggaagatattagtgataattatttccatgataattatatcttgtgattattataatgctggcatggactatcaagataatatagccctcgagcaagtcgtaacatgggattctgataatatattcacacctaatatctttgaacataatggaagatgttttatgaagaaaaatgaaacatggatgttattaaatggagatgcaacaccaaacattagaacaatgagcaataagaaaattgaatgcctggagaagagtgaagtagaatgggctagtagggtttgcgacagtatcacagacaaggaaagggaaaatctgaaggcattaatatgtagcaaaccagctaaatcagttaatacaggcaaaagaccagcgttaggatattga

SEQ ID NO: 24500 - DNA, 1143 bp, Escherichia coli
atgacaaataaacacccatcattgttttctccttttatgctgacagaaaaaataaagctacgtaatcgtatcgttatggctcctatgacaacctggtcagctaatcctgatggaaccatctctgagcaagaactcgaattttataaacgtcgctcacaaaatgttggtttagtaataacaggatgcacctatgtcacgccaagcggcattgggtttactcatgaatttgccgcgtatgacgaccgtttcattaacagccttgaaaagttagcagctgcagccaaaagtggcggtgctccggctattttgcagattttccacgctggtaataaagccatcccggagcttgtgccaaataacgatgttattagtgccagcgcatcaagcgtaaaatctggtgactttatgaagagagtggtacaaagcagggaaatgactgaaaacgaaattcaggaaaccattagagcattcggagatgtcacaaaaagggcgattaaagcaggttttgatggcgttgaacttcatggtgcgcacggattccttctgcagaatttcttctcccctctatttaaccagcgtaatgaccgatggggaggagatcttgaaggacgtatgcgcttcccgctggccgtattacaggaagtaaaaaatgtagtctatgaatatgcgacaaagcgctttgctatcggttacagaatatctcctgaagaatctgtaacaggggggctgcggatagaggatacttataaactccttgatcgactcatttcatccggtatttcgtatatacatacctcgctggtcagtattaacgatagctaccctgttgagtcgccaaatggcccccgaactattgaattgattttaaatcatattgcaggcagagtgccggtaatcgctgcaggtaaaatacgcacaccgtctcaggctcaagaagcaatttccgctggcctgccacttgttgcgatcggtaaagggctggtgataaatccagaatgggtgactttagctgaatcaggtagaagccatgaaattcaaacaacccttaatccacaacttgttcctgaattaaccattccggataaactatgggatcaaattcaggcatcgaaaggaactggctggtttccgttaatggattaa

SEQ ID NO: 24501 - DNA, 246 bp, Escherichia coli
gtgggttgggatgcatttcatcttgcagaagtcctgttaactcaaccaataatggttgtggtgggcgatagagtgggcgcatttggtgcctaccgtgacggctgcgaaattattggccgcgctgcctcaaaacataaagagctggtcgtggttgaaggttattcacattacgacctgtatgataagccagaacctgtgaaacaggcactcgaaaaattaattcctttttataaaacacatttgtaa

SEQ ID NO: 24502 - DNA, 198 bp, Escherichia coli
atggaatatgtttataaagagggtctgtacttactgcattatatcccattgcgtccaggttccgcatttcatagcgttttcctgtgcgttgcagatccccggatttatcaccaagtccataaaaacgctcgtcattacgtcgactttgatagtgtgcaacaccatcaccatgagcgtttatcagataagcactggtag

SEQ ID NO: 24503 - DNA, 981 bp, Escherichia coli
atgaaaaagatacctttaggcacaacggatattacgctttcgcgaatggggttggggacatgggccattggcggcggtcctgcatggaatggcgatctcgatcagcaaatatgtattgatacgattcttgaagcccatcgttgtggcattaatctgattgatactgcgccaggatataactttggcaatagtgaagttatcgtcggtcaggcgttaaaaaaactgccccgtgaacaggttgtagtagaaaccaaatgcggcattgtctgggaacgaaaaggaagtttattcaacaaagttggcgatcggcagttgtataaaaacctttccccggaatctatccgcgaagaggtagaagccagcttgcaacgtctgggtattgattacatcgatatctacatgacgcactggcagtcggtgccgccattttttacgccgatcgctgaaactgtcgcagtgctcaatgagttaaaggccgaagggaaaattcgcgctataggcgctgctaacgtcgatgctgaccatatccgcgagtatctgcaatatggtgaactggatattattcaggcgaaatacagtatcctcgaccgggcaatggaaagcgaactgctgccgctatgtcgtgataatggcattgtggtacaggtttattccccgttagagcagggattgttgaccggtaccatcactcgtgattacgtcccgggcggcgctcgggcaaataaagtctggttccagcgtgaaaacatgctgaaagtgattgatatgcttgaacagtggcagccactctgtgctcgttatcagtgcacaattcccactctggcactggcgtggatattaaaacagagtgatttaatttccattcttagtggggctactgcaccggaacaggtacgcgaaaatgtcgcggcattgaatatcaacttatcggatgcagacgcaacattgatgagggaaatggcagaggccctggagcgttaa

SEQ ID NO: 24504 - DNA, 936 bp, Escherichia coli
atgattcacaccactacctggtatgtgaccaatgctcatagtgttagccccgtcacatgggatatcgccaatgttctgaattctgcctctcgtgtcagcgtgccgctatttttcatgatttccggctatctcttttttggcgaacgcagcgcccagccgcgccatttcttgcgtatcggcttatgtctgcttttttatagcgcaatcgcactgctctacattgcgctgtttacctccatcaatatggagttagcgctgaaaaacctgctgcaaaagccagtgttttaccacttgtggtttttcttcgcgattgcggtgatttatctggtttcaccgctgattcaggtgaagaacgtcggcggaaaaatgttgctggtgctaatggtggtgattggcattatcgctaacccaaacacagtgccgcagaaaattgacggttttgaatggctgccaattaacttatatatcaatggcgatactttttactacatcctgtatggcatgttgggccgcgctatagggatgatggacacacagcataaagcactgtcgtgggtgtgcgccgcactgtttgcgacgggggtttttattatctctcgcgggacattatatgaattgcagtggcgcggaaattttgccgatacctggtatctttactgtgggccgatggtttttatctgcgcaaccacgctattgactctggttaaaaacacgcttgatacgcgtactgttcgcggacttggcttaatctcccgccattcgttgggtatatacggattccacgccttgattatccatgcactgcgcacccgggggattgagcttaaaaactggccaatactcgatattatttggatcttttgcgcgacgttggcagcgagtttgttactttctatgctggtacaacgaatcgacagaaacagactagtgagttaa

SEQ ID NO: 24505 - DNA, 306 bp, Escherichia coli
atgggtattattggcagactcaaaagcctcgcagatggcgcgccgctgttctggcgacacttccgactgctcagcagcgagagcgcgcatcacatgcgcggcaatactctgattctgatacttatcataaagaaaggaggagtctgctctctgcacgatatagcgcagataggcactcattgctctgtcgctggcgacaagttcaaaaataaggaaggaagatgtcagcacaatgacacttgcggcgataaaatgccggagcattctatggtgcaatttcatgataaatggcactccttcggttag

SEQ ID NO: 24506 - DNA, 339 bp, Escherichia coli
atggttgtttatcacatccgtggtgcggttattcagcacctcggtgttcatgttcttctgcgcgtggatgtagacctgttctttccctgtcgcatcgtcaaacttcagttcattaaacccgctgcccttataggttttcgaacgaatggtcatctgcgtctttgttcccgacaggctgccgggggtgcggttttcctggtggtaggtacgccccataataatcggctggtccggatcgccgttgaggaagtccacaatgacttcctgacccacacgcggtatcgccaggttgccaaagccggtgcctgcccacgcctgtgccacacggatccagcatga

SEQ ID NO: 24507 - DNA, 861 bp, Escherichia coli
atgtcgaaaatagcagttttgatagtaacgtataatccagttctaagtatattggatgatctaataggaaagataaaaaaagcaaaatacaatttagagatatttctcgttgataatgctagtgaaaattcaaacatattaaaagttaaatataaggacgaatccaatatattataccttgatgaaaatatgggattggctggggcacaaaatgcaggtctgaaaaaaatattaagaacagactgcgaagcagtccttttttttgatcaagatacttctcctacagatgcattttttactaatttaatagagtctatgtcgaagttggcccaacagggagaaaaaattggtgctattggacctgttttttatgactcaagaacaggaaccaagtatccatttatcctcttaaaaggaatgcgagctaagaaggttttcccaagaggtgatgtgccactcaaagtttcatttttgataaactcaggtatgttagtaccagtaagcacattaaaagatattgggctaatgaaggaggaattattcattgactatgtcgatattgaatggtgtcttcgggctgcaagtaaaaagtttaacttttacgcaataccaagtgcaacaatgagccatgcaataggtgatgagcgtaaatcagttttgggtagagaaattagcattcacagccctttgagacgttattatttagcaagaaattctatttatatgcttcgtttaccatacgtccctctggggtataaaataagagaaattttgttttcagtgttgagaacagtgatatttatatcaactgtcaataaattatgggaagtatattggaataaggtagacatgatttgttga

SEQ ID NO: 24508 - DNA, 1302 bp, Escherichia coli
atgatttttaccaaaatcattaggggattcatcagtacactgcgtcattccggcatggaaaacaggcagctctcactggcactggataatctgagcctcgggtatgccttaacctatttaatcggtctggtgagtttgattgttggtgcgcgttacttgccgaaattgcagcatcaggacttacagaccagcgcccagcaaatcgcccgcgaacgtggcctggacactgatgccaaccgtaaggtttatttaccggtgatccgcgcctaccgcgtcggcccggagctggtagcctggaccgacggcaaaaatctgcgtgaactgggtatttatcgacaaactggctgttacattgaacgtattcggcgtaacgggattctggcaaatccagacggtgatgccgtactacaaatgggcgatgaaatagcgttggtaggctatcctgacgcccacgcccgactcgatcccagtttccgtaatggcaaagaagttttcgatcgtgaccttctcgacatgcgtatcgtcactgaagaagtggtcgttaaaaaccataacgctgttggcaaacgcctggcacaactgaagttgaccgatcacggttgcttccttaaccgcgtcatacgtagccagattgagatgccgattgatgacaacgtcgtgcttaacaaaggtgacgttttacaagtcagcggcgatgcccgccgggtaaaaaccatcgccgatcgcatcggctttatctcgattcacagccaggtcactgacttgctggcattctgcgccttctttgtgattgggctgatgatcgggatgatcaccttccagttcagcacattcagtttcggcatggggaacgctgccgggttgttattcgccggaattatgctgggctttatgcgtgctaaccacccgaccttcggttacattccgcaaggtgcattaagcatggtgaaagagttcggcttgatggtgtttatggcaggcgttggtctgagcgccggtagcggtattaataacggcctgagcgcgattggcggtcaaatgttgattgccggattgattgtcagtctggtgccagtggttatctgcttcttgttcggtgcttatgtattgcgaatgaaccgcgcactgttgttcggcgcaatgatgggcgcacgcacctgcgcgccggcaatggagatcatcagtgatacagctcgcagtaatatcccggcgctgggctatgcgggcacctacgcaatcgccaacgtcctgctgacgctggcagggacaatcatcgtcatggtatggccaggattaggataa

SEQ ID NO: 24509 - DNA, 603 bp, Escherichia coli
atgtatccgtcttctgtaatggcagcttccggtgctccatttgcaatcagtgcttcaactatcctcggtaactgggctgcgccgctggtttctgcattcaccgcctttgcgtgcctgacttctctgggctcctggatgatgttggtaggccaggcaggtgtacgtgccgctaacgacggtaacttcccgaaagtttatggtgaagtcgacagcaacggtattccgaaaaaaggtctgctgctggctgcagtgaaaatgactgccctgatgatcctcatcactctaatgaactctgccggtggtaaagcatctgacctgttcggtgaactgaccggtatcgcagtactgctgactatgctgccgtacttctactcttgcgttgacctgattcgttttgaaggcgttaacatccgcaactttgtcagcctgatctgctctgtactgggttgcgtgttctgcttcatcgcgctgatgggcgcaagctccttcgagctggcaggtaccttcatcgtcagcctgattatcctgatgttctacgctcgcaaaatgcacgagcgccagagccactcaatggataaccacacagcgtctaacgcacattaa

SEQ ID NO: 24510 - DNA, 555 bp, Escherichia coli
atgaacgttattgcaatattgaatcacatgggggtttattttaaagaagaacccatccgtgaacttcatcgcgcgcttgaacgtctgaacttccagattgtttacccgaacgaccgtgacgacttattaaaactgatcgaaaacaatgcgcgtctgtgcggcgttatttttgactgggataaatataatctcgagctgtgcgaagaaattagcaaaatgaacgagaacctgccgttgtacgcgttcgctaatacgtattccactctcgatgtaagcctgaatgacctgcgtttacagattagcttctttgaatatgcgctgggtgctgctgaagatattgctaataagatcaagcagaccactgacgaatatatcaacactattctgcctccgctgaccaaagcactgtttaaatatgttcgtgaaggtaaatatactttctgtactcctggtcacatgggcggtactgcattccagaaaagcccggtaggtagcctgttctatgatttctttggtccgaacacggctttgttgaataaatcagatttcgggtaa

SEQ ID NO: 24511 - DNA, 312 bp, Escherichia coli
atggctatgccttatatggaaggtgtcgcagaaaaatcggctgaccaatggttaatacaattgaccaatcaaattaaaaacatccctcaggctaaagacaaatctattttagaattacaggcacaaaactggcagaaaaatggtcagcatcaggctatttcttcgcaacaactcgctcactggatgagcctattacaactgaatggagtgaaaaactatggttattatcccgacaattttctgcataaccaacctgaaatagacgttattcgtcctgagttttcaacagcctggtatccgaaaaatgattaa

SEQ ID NO: 24512 - DNA, 171 bp, Escherichia coli
atggctcatgatggcttaaaatggctaatgatagctggcgtatcttttagagatggggtgattacagatgaactaagccgaacagatatagcaatggctaggcgagaattatctatgctggtggagatgggtaaacaggtaatgccccgccattgctttggaggggcgtga

SEQ ID NO: 24513 - DNA, 198 bp, Escherichia coli
atggaaaagaaaaaccgcccattacaggcggctaattcagatattcgcgtatctgatgttacgcccctgacaaaatcccttcaagcaccaaagcgcacaccgaaaaagcatcgtgccagagtctatatgctgcgtactggtatagagggatggacagaaaatgacattcttcgctactgccgtggctttgttgaataa

SEQ ID NO: 24514 - DNA, 591 bp, Escherichia coli; identical to SEQ ID NO: 6668

SEQ ID NO: 24515 - DNA, 447 bp, Escherichia coli
atgttcggcaatgatattttcacccgtgtaaaacgttcagaaaataaaaaaatggcggaaatcgcccaattcctgcatgaaaatgatttgagcgttgacaccacagtcgaagtatttattaccgtaacccgcgatgaaaagcttatcgcgtgcggtggaattgccggaaatattattaaatgcgttgctatcagtgaatccgttcgcggtgaaggactggcgctgacattagccactgaattgataaacctcgcctatgagcggcacagcacgcatctgtttatttataccaaaaccgaatacgaggcgctgttccgccagtgcggtttttccacgctgaccagtgtacccggcgtgatggtgctgatggaaaacagcgccacgcgactgaaacgctatgccgaatcgctgaaaaaatttcgtcatccagggggctttgttgaataa

SEQ ID NO: 24516 - DNA, 192 bp, Escherichia coli
atgttgcagcttaacgagaataaacagtttgcatttttccaaagactggcatttccgctgcgtatctttttgctgattctggtgttctcaatatttgtcattgcagccctggcgcaatattttacggccagttttgaggactatttaacgcttcatgctgagagatcccctcataatttccccaaagcgtaa

SEQ ID NO: 24517 - DNA, 921 bp, Escherichia coli
atggctaaccttttgaataaattcattatgacgagaatactcgctgcgataacccttttgctgagtatcgtattgaccattttggtcactattttttgttccgtcccgatcatcattgccgggattgtaaaactattgctacctgtgccagtcatttggcgaaaggtttcgcgtttttgtgattttatgatgtattgctggtgtgaatgccttgcggtattactgcatctgaacccacacctgcaatgggaagttcacgggctggaagggttaagtaagaagaactggtatctgcttatttgtaaccaccgtagttgggcagatattgtcgtactgtgcgtgctgtttcgtaagcacattccgatgaataaatatttcctcaagcagcagctggcctgggtgccttttcttggcctggcatgctgggcgctggatatgccgtttatgaagcgttattcccgcgcttatttattacgtcatccggagcgacgtggtaaagatgttgaaaccactcggcgttcttgtgaaaagtttcgcctgcatcccaccaccattgtcaatttcgttgaaggctcccgtttcacgcaagaaaaacatcagcaaacccactccacttttcaaaacttgttgccaccaaaggcggcaggcattgcgatggcgctaaatgtactgggtaaacaattcgataaactgcttaatgttacgctgtgttatccggacaataaccgtcagccgttcttcgatatgttaagcggtaaactgacgcggattgtcgtacatgtggatttacagcctattgccgatgagttacatggcgactacatcaatgacaaaagctttaagcgccattttcagcaatggctgaactcactgtggcaggaaaaagaccggcttctgacgtcgttgggctttgttgaataa

SEQ ID NO: 24518 - DNA, 477 bp, Escherichia coli
gtggtgtttattaatgaggactgtttcatccacgatgcttctaacagtcagcgcatcaagcacatcattaatcaacatcccaatacgttatttatcgtttttatggcaattgccaatgttcattttgatgaatatctattggtcagaaaaaatttattgatcagttctaaatcgattaaaccggaatctctcgacgatatccttggcgatattctgaaaaaagagacaacgataacctcgtttttaaatatgccgacgttatcattgagccgaaccgaatcgagtatgttgcgaatgtggatggcaggtcagggaaccattcaaatctccgaccaaatgaatatcaaagccaagaccgtttcatcgcataaaggtaatattaaacgtaagatcaaaacgcataataaacaggttatctaccatgtcgtccgactgacggataatgtgactaatggtatttttgtcaacatgcgctaa

SEQ ID NO: 24519 - DNA, 399 bp, Escherichia coli
gtgttcgaaaatttttgcaatgaaccaccgaaaaaagaaatagattgttacatccgtaaccgtgtgtgtgatggactaagtatatctttgctgcattcttttgaaggtagtgagtttgttatcagtgagataaaaaacaaagcgttttgtttttttgaatactttgattcattgaataaaatattcgatgctattcgtgttgtagatattgaagagagaaatatttgcgatgagctaagtggtgtaagcagcgtaagattagctttgatgtgtatgaactaccagtatgagaaaaaaaaatttagccttgtttctgattttgcgaactatggtcttgctatatctagaggcccggtaccgaaaaaagcatttaaggatatgataaaaataacagagtga

SEQ ID NO: 24520 - DNA, 435 bp, Escherichia coli
atggatagttatatcgcgcttacactgtttggctgtttttttgtgctggtctttattggtgtgcccatttcgttctcaatcggtattgccactgtagcttcaatgcttttgatgtttccctgggatatcgcggcaatcactgtttcgcagcgactggctaatggactggataactttgccctgttggcaatcccctttttcatctttgccggaacgctgatgaacagcggcggtattgcgatacgtttgattaacctcgcccaggtaatggttggccgcgttcctggttcgcttggtcatgtgaacgtcctggcgaatatgatgtttggttccatttctggttcagccgttgcggcagctgctgccgttggtggcacactgaatcccattcagaccaaagaaggggctttgttgaataaatcagatttcgggtaa

SEQ ID NO: 24521 - DNA, 174 bp, Escherichia coli
atggacattgagttttcgcagattcatgaaatggtctatatgcatgatattgtaaattcggactcgaaaaagaaaccaaggattccgttaaaaaaattccttaatgctgagaaggttctcacgcaaacaacatcatgggtactaaattcaaaaaagataaatgcaaaaaattaa

SEQ ID NO: 24522 - DNA, 384 bp, Escherichia coli
atgctggatgtcgatttttttaaacgttacaacgacacttacgggcatcctgctggggatcgttgtctaatacaagttgccgacgctctacagcgttcaactcgccagtcggaggatgttgttgtccgttatggtggcgaagagtttgccatcatactttttaatgcaacattgccggaagcagagacggtagcagccagagtgaagcaagaacttaaactggcagctatcccacatcaggcatctgctgttaatgcatttgttacggttagtcaggggattacctgttctgctcccgcaaaaacggctgaacaaattatttcagatgccgacgctgcgttataccgggcgaaagaaagtgggcgaaatcgatgggctttataa

SEQ ID NO: 24523 - DNA, 303 bp, Escherichia coli
atgccatatacgcaacaaagcatacttaatacagtaaaaaacaatcagttaccagaggatatcaaaagctccctggtctcctgtgtcgatatattcaaggttttgattaaacaatattatgattatccctatgattgtcgtgatgatttagtcgatgacgacaaactcattcatctcatggctgccgtacgagactgtgagtggtcagacgataacgcactcaccataaatgtgcagtttaatgatttccctggattttatgactggatggaggctttgttgaataaatcagatttcgggtaa

SEQ ID NO: 24524 - DNA, 459 bp, Escherichia coli
atgaagcatgaattatcaagtatgaaggcatttgtcatactggcagagtccagttcatttaacaatgccgctaaattactcaatattacgcaacctgcattaacgcgaagaataaaaaagatggaggaagatttacatattcaactatttgagcgtacaactcgcaaggttacgttaacaaaagcaggaaaaaggttgctcccggaggcgcgggaattaataaagaaattcgatgaaacgctttttaatattcgtgatatgaatgcttatcatcgtggtatggtgacattagcgtgtattccgaccgcagtattttattttttaccgctggcaatcggtaaatttaatgagctgtatcccaatattaaagtgcggattctggaacaaggcacgaataattgcatggaatcggtgctgtgtactgatgaatcccctaatgatttttatcaaaatcattaa

SEQ ID NO: 24525 - DNA, 609 bp, Escherichia coli
atgaacaccgaggtgctgaataaccgcaccacggatgtgataaacaaccatgctgagaccattggcaacaatcagatgattgcggttaccaacaatcagatacagacggtgggcgttaaccagatagagacggtgggcagtaaccagatcattaaagtgggctctgttcaggtggaaacgattggacttgttcgtgcgctgactgtgggcgtggcgtatcagacgacggtaggtggcattatgaacacttcggtggccctgatgcagtcctcgcagatcggtttgcataaatcgttgatggtcgggctgggttatgacgtcaaagtcggaaataacgttaccttcaccgttggtaaaacgaaaaaggatgataccgggcagaccgcgatttactccgccggtgagcatctggaactctgctgtggtaaggcaaggctggtgctgactaaggacggacaaatttttctcaacggcacaaaaattcatttgcagggtaaggagcaggttaatggtgactcactgttgattaactggaactgtgcagcctcgaaatccccaccgaagacccctgatgaaaagcaggatacgccggatatgagagagtactga

SEQ ID NO: 24526 - DNA, 531 bp, Escherichia coli
gtgtatggtgccgccctggcaaaagctggctttatcgtcattgcttttgatgccagttttcagggaagcagcggtggagaaccgcgttatctggaagatccaacaatgcgagtaaaagacttcagcattgtcgttgattaccttaccaccttaccttacgttgatgccgggcgtattggtgtactgggtatttgtggtggaggtggatatgccattaatgccgcaatgacagaacgtcgaattaaagctattggtactgtcacgggtgcaaactacgggcgtcttatgcgtgagggatttacagcgtttaatcctatcggagcactcgaagcgatggcgcaacaaagaacagacgaagctaacggcgcaaaacttcgcgtagatgatttactcccctcttctccggatgcagctcttgaagcgggattaacagaaatagacctttttgaagccacagaatattatcgttcgccacgaggctgtgcactgagagatcccctcataatttccccaaagcgtaaccatgtgtga

SEQ ID NO: 24527 - DNA, 516 bp, Escherichia coli
atgacaaacatgatctcatatcagggacttgttcgcaccttccctaacaccgcaaaacgttacgcggcaacaatcaggcttcgcctgaacacgctggataaaagcgcgtggacattgattgccgaaggtagtgaacgggaacgccaacaacttctgtttgtggctctgatgctacattcgccggtagttaaggattttctggctgaagtggtgaacgatctgcgcaggcagttcaaggaaaagttgcctggcaatagctggaacgaatttgtgaatagccaggttcgcctacatccggtactcgccagctactcagattcatctattgcaaaaatgggaaacaatctggtgaaggcgcttgctgaagcgggttatgtggatacgccccgcagacgtaacctgcaggcagtttaccttttaccggaaactcaggcagtgttacagcgcctgggacaacaggacttgatatctattctggagggaaaactgaaccgccccgggaatcctggagactaa

SEQ ID NO: 24528 - DNA, 384 bp, Escherichia coli
gtgtttagtgcgaaaaaacgccagtggggtagccaggaggatctggcgtgtgcgcagtggatatgggggcggatcgtgggtctctacgaacaggccgcaagtgatgatggcgagatcatgcgaccaaaagagcctaactggactgtctgggccaatgatgtgcgcacaatgcggatgctggatggcagaagccacagacaaatttgtgaaatgtttggtcgggtacagcgggatccattctgggtaaaaaacatcatgagcccgtcaaagctccgcgaaaaatgggacgaactggtcatccgcctggggcattcacctgtacagcgttgtgttaatcatatttctgaaccggatacagaaattccgcctggtttcagaggataa

SEQ ID NO: 24529 - DNA, 183 bp, Escherichia coli
atgagcggtcgcgttgttaccaaagccaacctgagtgacgttaacgctggagttagatgcagtctggtcaacagcagcaccgttaccgccaccgaactgtttaacagtcatagtagaatctttaccattccactgatcaagagtagcgctgttgccgaaaccacgctgagtcagatcgattga

SEQ ID NO: 24530 - DNA, 258 bp, Escherichia coli
atggaaattagccgttcatcgacaaatattaatttagataatctcggtttattaaccatgcaggccaacattacaggtaccagtcgcgttgatggtaaaagcggtacggtaaaccttaattaccatcatgaagagaatatttttacgctgtggcgcagtttacgctttggcgataatctccaggcatggttggagcagaacgcacgtctgccgggaaatgactgtccgcaaggaaaagagtgtgaggaaaaacaatga

SEQ ID NO: 24531 - DNA, 129 bp, Escherichia coli
atgtatgtgcctaacccgctcaaaagcaacatgaaactctactataaagaaacttcgagtgaaagccatcgagttataattgataacattttgaaactaaagcaactgacgagaatttgtatgcgataa

SEQ ID NO: 24532 - DNA, 222 bp, Escherichia coli
atgtatggcgatgaccttctgggtgatgaaatcgcgcgcagctggctgaagacggtgaatcagttctatctggaacagcacaaactgatcgagaaataccatattgccgatggtgttccccgcgaaggcggcggtggcgagtatccgttgcaggatgggtttggctggactaacggtgtggtacgccgtttggctttgttgaataaatcagatttcgggtaa

SEQ ID NO: 24533 - DNA, 162 bp, Escherichia coli
atgttagacttgacggacattgtgcagcgatctgctgctatcctccggcaaaaaacaaaatataccttcgttgcgccaatgtcaccttttccgcagcgcaaaaactgcgtcagggaggacgaggtcgcacattataacgatttcgtagcaattggcagctaa

SEQ ID NO: 24534 - DNA, 1104 bp, Escherichia coli
atgattaattatggcgttgttggtgttggatattttggcgcagaattagctcgttttatgaatatgaatgaaaatgccaaaataacatgtgtttatgatcctgaaaatggagagactattgctaaagaattaaattgtataaatatgtcaactttggatgatttggtttcaagcgaactagtagattgcgtaattgttgctactccaaactatttacataaagagccagtgattaaagccgcaaaatataaaaagcatgttttctgtgagaaaccaatttctttaaattataaagattgtaaagatatggtccatgcttgtaaaaacgcaggtgtgacttttatggctggtcatataatgaacttttttaatggtgttcaatatgcgaggaagttaataaaagatggagtgattgggaatgttttatcttgccatacaaagagaaatggttgggaaaataaacaggaacatctctcctggaaaaagattaaagagcaatctggtggtcatctttaccatcatatacatgaattagattgtgttcaacatttgctgggtgaaaaacctgatactgtaactatgattggaggaaatttagctcactctggtcctggatttggtaatgaagatgatatgctatttatgacgttagagtttgcgtcaggaaaaattgcgacattagaatggggaagtgcttttaactggccagaacattatgtaattatcaatggaactaaaggttctataaaaattgatatgcaggaaactgggggaactctcagagtaggaggtaagacagagaattttttggtccatgaaacacaagaggaagataatgaccgtaagaaaggaaatttgacgtctgaaatggatggtgctatcgcatatggtcgtccaggtaaaaaaacaccattatggcttgccagtttaataaaaaaagaaacattatttcttcataaggttttgagtggtgaaaaacctgatgatgattatattgatctgctcaatggtgaggctgctatgtctgcaatagccacagctgatgcagctacagtttctaggactgaaaatagaaaagtgaaaatgattgagatcactaattaa

SEQ ID NO: 24535 - DNA, 1218 bp, Escherichia coli
atgacaacagtatggtacaaacaggttaatccatcacaacggaaagctcttttttctgcatggcttggatatgtatttgacggctttgattttatgatgatattttatattcttcatattataaaagcagatcttggtattacagatattcaggcaactttaatagggacagtcgcctttatagctaggcctattggcggtggtttatttggggccatggcagataaatatggtcgtaaaccaatgatgatgtgggcaattgtcatttattcagttggaacagcccttagcggtattgctacaaacttatatatgctcgcagcgtgccgttttattgttgggctgggtatgtctggtgaatatgcatgcgcttcaacctatgcagtagaaagttggcctaaaaatcttcaatctaaagccagtgcttttttagtcagtggtttttctgttgggaatattatcgctgcacaaataattcctcagtttgccgaagtatatggatggcgaagctcattttttataggcctgttaccagttttacttgttctttggatcagaaaaagtgccccagaaagtcaggagtggattgaagataaatccaaggataaatcgacatttttatctgtattcaggaaaccacatctctcaatctctatgattgttttcttagtctgtttttctctatttggggtaaactggccgataaacggactacttccttcctacctggccgaaaatggagttaatacagcagttatttcaacattgatgacaattgcaggtttaggaacactgacaggtacaatcttttttggctttgttggtgataagattggtgtaaaaagagcctttgtcgtcggtctaatctgttcatttattttcctttgcccactcttctttatttctgtgaaaaactcttctcttataggattatgtctctttggattaatgtttacaaatttaggtattgctgggttggttccaaaatttatatatgattactttccaacaaaattaagaggattaggaacaggtcttatttataacttaggagcaactggaggaatggctgcacctgtattagccacatacatttcaggatattatggcttaggtgtttcattatttattgttacagttgcattctctgtattattaattttattagttggttttgatattccaggtaaaatctataaattatccgcagtaaaataa

SEQ ID NO: 24536 - DNA, 441 bp, Escherichia coli
atgacagcacagattgcagcttacgggcggctggtggacgacccgcaggtaaaacagaccagcaagggtacaaacatgacgctggcgagaatggcggtatccgtaccgtgccataacgcagatgacggacaggcgacgctatggcttgccgtaacagcctttggtaaacaggccgaccatctggcgaagcaccagaaaggcgaccttatcagcgtggcgggtaacatgcagataagccagtggaccggacagaacggggagacgcggcaggggtggcaggttatcgccgacagcgtaatcagtgcccgtactgttcgccctagtggaggtcagagaaaacacacaggccagccacaaaacacaggggcacagacctcatcacggggacatccaccgcagaataatcacgatgacctgttccctgacgatatcccgttctga

SEQ ID NO: 24537 - DNA, 255 bp, Escherichia coli
atgacagagaaacacgctaaaaaatcacactcacccgccatcgatttaaccgaacagggatctgttgtgaagttcgtatcggcacgaggcaggccagtgcttttagtgccaggaaaacatctgcattactgcgatgaaaatcatatcccgatcctgattgtctggaagcgaacagtctacgccgatgtgacatggctgaatgactcgctggtgttgatacaccgcgacctgtttgagcgtgaagaattccggtga

SEQ ID NO: 24538 - DNA, 294 bp, Escherichia coli
atgaaatcaaaaaatactggcttaactgccagtggcaaaactcaacccgaatttatgcgcggggatatttaccgcgataagtacggcggcatcgtgatgattatcagcatgagggaacggcgcatcacctaccgccgtgaagggtatgactatgactgcgtgatgcctgtttgtcagttccggcgtgatttttccctggtgcaggccgtaccacgtcgtagcccaaccagcaacaacaaagcaaaggcgcatgttaaggccatgaagaagacgatcagcagaggtaagaaatga

SEQ ID NO: 24539 - DNA, 204 bp, Escherichia coli
atgcaggaaataacactggcagaagcatcactgaaagcgcagcaggtcgaagtaatcagccgcatgattgagcgcatgatagaacgtaaccacgaagaaattgacgaccatgacctttctgttattgcgggactgattaaacaactttccgcaaatgtggcggtatggttaatgacggaggaagaaaaacgcgctgaacaataa

SEQ ID NO: 24540 - DNA, 186 bp, Escherichia coli
atgcttaaaaccttccgcgtcttttcccgtgctgttaataatcgcggctataccgttggcatcacgcagaacgtgaaggccgaaaacgtccaggctgcaatcagcacagtaattaacaaatcagctaaagccggtttatccggcgtaattatccacgccgttcatgaaataaatggggtgcagtaa

SEQ ID NO: 24541 - DNA, 465 bp, Escherichia coli
atggataaaaacatgttgatcgcctcttctttcgggctgtatgatgccggagtcgcccacatggcgaccgggtttagcagcctgaataaattggcggacagccgcccatatccgataagcggtttttttgtgtccgtaaacctacccatacccgcattatggcggggcgtaacgggggagcctttgcgctcgctggtttcccaatttgccagtctgctaaccctgttacgtctcgccaccatgtttagcagcgtagtagcgagactccttaacattaaattgggagcctttcacatggctgtatccgcacgcccttactttgtctggcgctttatgcagtgcctgacaggcagcattgcaatattcaccgttacagctgccactgagcgcgaagcacgcgcgcagctgccgcacgcacatctgatttttgtcgcccgtatccgtcaggaggtgactcatgcttaa

SEQ ID NO: 24542 - DNA, 1278 bp, Escherichia coli
atggaagggtcgccagtggagataaaggaaatcaagcgcatcaccaactatgccatgagtgtagctggtggacaatgctatcagcctggcgggcgatttttggttgcttttagccgccgtgggtatttcctgagaaactcttcaagtgcaaattttttatctcttgtatgcgatgcctttgactcgtcgtcacatgtttttccgcgccttatcctgttttcaataaaacgggaggcggcctttttattcagcgatgaatctatcgggctgctctttgtttgctgctcgacaatggcatccatgagtagttggtgttgtagttgtcgtaaaaatttctcatcgtctggtgataaatccatacttatttcctgtacagctgagcgacgcagtacctcacaccacggcgctgatggtttttattcgttttatggagtcggagaagcaaaagcggatcgctatcggtttttaggcgagattaaccgccgagggcatttatccagaaatgcttcaagcgcaaatcgttttggtctggtgagaggaggtggattaagcaaagactctcgcttctggcgtgctttttcgcgctggcgctcaagtatggataatgcgattgcctgtaattcttcgttggtcattgtctgtacccgtaaagcggtgcgctgtagtacctcatatcacagcgcaggtattttttatggttgtaatttgcgtgatgattcaggtcgctttgcgacacactgcataaacataaataacgtgatgttattatgtgctttcaaagaaaacgcaggtatttttcgcacaaacttttctcgcaacacatccgaccacttaagcaaaaaagcggcatatactgaggctatcccttataaaacggggatcgggattggcctcccgctggagttagaggcgatacacgacgcgccagcgtctttttttgtatcggcgcacacgcacacctcaacaatggtgggctgtatggaacttccttcgggaaggctggtttcctctaacaccagtaaggccaattccgtacagtccaccgccagcaagattggcctcttgggcggtgggtataatcccaaagtcagaggagcctttcacatggctgtatctgcacgtccttactttgtctggcgctttatcatctttggcgcgtcagaatcccaaatcatcaacgtaaccgcctggacggaactcgaagcgcgtaaccgttgcccgtcaggttgcgttgctgtattcgccgcccgtatccgtcaggaggcatcacatggataa

SEQ ID NO: 24543 - DNA, 213 bp, Escherichia coli
atgcctgacatcctcaaacctgccgtccggtacatcgacacggcggataagttcgcactactgaacatcaaccatgctgattacatgcgccatatcgtgagccatttcgccgctgagcgcatgaaacacgttaagcaatacttggggaggttttatcaaattatcgcgctggcggccctgtacggcgcgaatatccgcatgatgcaggaatga

SEQ ID NO: 24544 - DNA, 156 bp, Escherichia coli
atgaccgctgatcaactggcgttgctcgcgtatctggaaagccgtaactgtgcgctactggatatggatatgccaacgccagaacgtaaagaacgtctcaccgaattagcccaacgctggctggcccgtcgcctgggagaacgtgaacatgcctga

SEQ ID NO: 24545 - DNA, 585 bp, Escherichia coli
atgcgtaattatgatttcgccgcaattatttcggtaatttccggcaatgagattattgctgacggaataaataaaaatgcactcaccgcgccggaagtgtttccttctggcggtgagcctgtaaccacttcacaggctatcgcccgatttttcagaaaggatcacgataaggttgttaaccggattgaaaaccggtgttgttctgctgaatttttaacccgcaattttcggcgggttaaatttgagcataaggggcgcgtattgagagcctacgaagtcaccaaagacggcttcgtgtttttaacaatgggatttaccggaaaaaaagcggctgcattcaaagaggcatacattgcgcagtttaaccgcatggctaactggatagcagagagatgtgaggccaaagctgagatgcgctctatgggggatgccatgaagggatacatagagcgtactggagacactcaacacggtcatgcttataacaacgaatgtactttcattgcgcgccttgtattagggatgcacccgcctgtatgggccaaaaaaacggcatcccatcaaaaaaagttcgtgaccatatga

SEQ ID NO: 24546 - DNA, 516 bp, Escherichia coli
atgaaacgtccgaatatgcccgtacaggggcagggcttcgttcagcctgaaatcaaccagaacgatatattgattcgccacaaagcagagtcgcgtattgattcccgcgttatttctgagcgagcaggaatacaacacgaaagtctttgcgcgacgatcaaaaaacatcagcagcagttacgcgatctgggagcattgcctcgctatagtctgaaatcaggccataagcgcggtcgcccagaaatgcgctatatgctgaatgaaatgcaacatgattacttgttacgcattgttcgcggtcgtaacccagaacatatgcgccacctcaagcaggacgaaacaaaacaccgctttcatttgttgtcagttgtacaagaaatcgggatatcggcttttaacgaggtgatacagaacggcatgacaccgaccgaagcggtgcgggaagttgctagccgcatggagacgttcgccagcctgatgacgtcagcgccgtctctgggggtgaatcatgcgtaa

SEQ ID NO: 24547 - DNA, 204 bp, Escherichia coli
atggctaataacaattcattcatccgtctttctgaggttatgcgccgtactggttacggtcgcgcatggatttatcgcctgatcagcctggggcgcttccctaaaccggtaaaaattggtccccgctccgtggcttttattgaaagtgaagtcgacgaatggattaaccagcgtattgatgcttctcgcaacaacgccgcgtaa

SEQ ID NO: 24548 - DNA, 1254 bp, Escherichia coli
atgcgtataggacaaaatcgttttttgggggctatacacatgttgctttcagaccttgctatccgccgcgcgaagccaaaagagaaagcctatacactcaatgacggcaacgggctttcgttactcattgagccgaacggttcgaagggctggcgattgcgatacaggtttgcaggcaagcccaaaatgttgtcgctgggtgtctatcctgaggtgtccctttctgatgccaggacggcaagggatgaagccaaaaggcttatcgctggtggagttaatccgagtgaggtcagaaaggcccaaaagcgagaacaggcgaacaaatgcggtaacacctttgaggtgatcgcccgtgagtggtatgaaaaacgcctggaccgatggtctccctcatatgcagaggaaatgatagagacgtttgaaaaagacgtttttccgtacattggaggtaggcccatcgcagagattaagccgatggaattgctcgcggttctatcccgtcttaatgaccgtggcgcaactgaaaaattgcgtaaggttcgccagcgatgtggcgaagtgtttcggtacgcaataattaccggacgcgctgaatataaccccgctcctgatctggcaagcgcatttgcaccacacaaaaaagagcattacgcgtatctgaaagttgatgagctaccggaatttttccgcgtttttaatacgtacaccggaagccagatcgtcaagcagggtatgcgattgttgattcttacaggactccgcccaggtgaattgcggcaggcagagtggcaggagattgattttgataatcgtctgtgggaagtgccgaaagaacgaatgaaaatgcgccgtcctcattgcgtgccgctttcagaacaggcgattgctattctggaacaactgaaacacatgacggggcagtatccgtttattttccctggtcgaatacagcacagtaaaccgatgagtgaaatggcgatgaacgtgcttattcgtcgtattggctatgctgggcgcgttactggtcatgggttccggcataccatgagtacaattttgcatgagcagggttataactccgcgtggatagaaacgcagctggcgcacgtcgataaaaactcgatccgtggcacatacaatcacgcgcaatatctggacggacggcgggagatgctccagtggtacgccgactatatggactcactggaacagggcggaaacgtggtgcacggcaagtttagtgtatgtgcataa

SEQ ID NO: 24549 - DNA, 276 bp, Escherichia coli
gtgggcgatattgtttacctgagaataatcggtgagaagcagggcgatatttcttcaggctgtgggacgtatgcgtcggttggtaatcgctggcaggttggccatgaagatgaaatttttgcctttgcactcaccaacgccattaccagtactggtaaaggcgttaatctacagggctacaattttgcaaactcattgataaaagctcaccgctactgtctaatgccatcaatcagaatgagcggttatttattgaagtcgatttgtatcgtataa

SEQ ID NO: 24550 - DNA, 1518 bp, Escherichia coli
ttgtatcgtataaataaaagcgggcgctgggaacggtattattatattcagctaagaaatgcttcattaactgctattcatgtaaacatttctgacaataatcttcctaccgaatgtgtaaatgttaattatgactacatattatgcaaacatctaatagccaatacggaatttgactggttggcctttcctgctggctataatagcttatttattccacctaaaaacccacctgccagtaatcttaaccctgagccgctaccagttgttaaccttccactctctccaccagcggttaaaccggtctatgccaaatcctgtctgaaggagaagggatgtacagatgccggaacggcagaagaacccgctgaaaacttcgggcaagtagcgatttttgctctgccagtggttgatgactgctgtggataccaccatccggaggctaacgatgttgggcaacccgcagaagctcaaaccatgctactgtttccgggtagtgtgttggcggctcaaatatggggaaaatggtcgctcagtggcatactcagtgcaacctgcggctcttacatcggtgcgttggcatctgctttgtatattccctctgcgggcgagggcagtgctcgcgtgcccggacgtgatgagttctggtatgaggaagaactgcggcagaaagcactagcaggcagtaccgccaccacccgggtacgttttttctggggaactgacattcacggcaagcctcaggtgtatggtgttcatacgggtgaaggtacgccgtatgaaaacgtccgcgtggcgaacatgcagtggaacgagcagacgcagcgttatgaatttacccccgctcacgatgtcgatggccccctgattacctggacgccggaaaatccggaacatgggtatgttccgggccataccggtaacgacaggccgccgctggagcagcccaccattctggtgacgccgattccggacggcaccgatacctataccacgccgccattcccggttcctgatccgaaagaattcaacgattatattctggtttttccggcgggatccggtattaagcccatctatgtttacctgaaggaggatccgcgaaagctgcctggtgttgtaacagggcgcggcgtcctgctttcaccaggaactcgctggctggatatgtcggtatccaataacggcaacggcgcaccaatcccggcgcatattgctgataaattgcgcggacgggagtttaaaacctttgatgagtttcgcgaggcgctgtggctggaggtgagtcaggatccggagttgatagcgcagttttcaagtggtaaccaaacacgtataaaacaaggattaaccgcaaaagcacctattgacggttggtattatggccctaaagaaatggttaaaaaattccagatacatcatcgtgttgcagttgaatatggcggcagcgtatacgatattgataatttacgaattgttacccctagactacacgatgagattcactacaggagataa

SEQ ID NO: 24551 - DNA, 993 bp, Escherichia coli
atgtcgattaagcaactcaaagacgggcgttataaggttgatgtaagaccgcaagggacggaaggaaagcggatccgtaagatttttaccctgaagtcaaaggcacaggagtttgaaaggtatgttttgcagaatttccacgataaaccgtggcaggccaagccagctgatcagcgtcggttatccgaactgatagatgcctggtgggtgcttgatggccggaatcagccttacggggatacttacagggtcaggctggaaaaaataaaccgtgagatgagggacccccgcgccagtgagatgacgcgaaagtttatgctcgggtatcgttcagataaattacaggccggattaatgccctccagtgttaatcgtgatttgtgtgccttgtctgcaatgtttacctcgctgattgatgcggatgttttccataacgaaaacccggtgcgtggaatacgtaagctcaaggtcaggaatacagaaatggcctttctttcagatgatgagattgatcggctgcttgaacgactcgagggggatgcgcgtcgtgttgctgttctgtgtctttccactggcgcaaggtggggggaagcagctggcttacgtggtgagcatatcgttggtaaccgcgtaatgttctttaacacaaagaatggaaaatcccgcgcggttcctgtttctgatacggtgctttcgttgataaaaacccgaaaaaccgggctattgtaccaggctgattacatccgttttcgggatatccttcaggaggtgaaaccggatttacccaaaggtcaggcgactcacgttatgcgtcacacgttcgccacgcatttcatgatgaacggcggaaatatcgttacgttacagcgaatccttgggcacgccacgattcaacaaacgatgacgtatgcgcatttttcaccggactttttacaggatgcgattagctttaatccgctggctgatagtgtccataaactgtccattgactag

SEQ ID NO: 24552 - DNA, 342 bp, Escherichia coli
atggtgaacatgtcaagagattacgccaaaaaactaaaggcaatcagaaacgcggaaaaccttacacaatctcagttttcgcaagtaacgggggtttctgtaggaactataggaaattatgagtctggatataaacctgcgcgaattgaggttgtagaaaaagtaatccaagtcgagcgattcgaaaaatacactatgtggatacttcacgacaaaacatttcccgctgccgggcaggttgccccggctctctctcttgatggctccattcagtcggagggcgatcaggtttcaatcggcattacccaaaaatcaccccgatctcgtcgcaatgctggctaa

SEQ ID NO: 24553 - DNA, 525 bp, Escherichia coli
atgcggaagtcaattgccgataaagagttatctgacacacaagcccttcaggaaaacgacagcatcaccgaatccgttggcgcggcaaacgacgatgaacaccaagaggaaaagaaaaaacgcacctacaaaaaaggggcaaccttgcgactggatggcccggtagccgaactttgctcacttgaaaaaggggcagcctatatcgggttgacaaaagctgcattgcgcgtggcgcttcagcgaaatcagatgcctggacacaagacccgttcaaaccctgaagatgaaaattcggatggcgtatggtggtttaacgccagagagtgggacaagctggctgacgaactaccagaatgcgagccgccagaatggcacaactggaaaagctactggacgtacgaccgacagaaaagaaagttttccccggcaaacaaagaagactgccagaccatcaatggaaagcgggtttacacaggaagaaagtcaaaactggagcaacaccaatacagcgaaggcaaccagtga

SEQ ID NO: 24554 - DNA, 294 bp, Escherichia coli
gtggcgcacgtcttcggtgaacgcactctggccacactggagcgtcttctgagcctgctgtcggcctttgaggtcgtggtatggatgacggatggctggccgctgtatgaatcacgcctgaagggaaagctgcacgttatcagcaagcgttacactcagcgcattgagcgacataatctgaatctgagacaacatctggcaaggccgggacggaagtcactgtcgttctcaaaatcggtggagctgcatgacaaggtcatcgggcattatctgaacataaaacactatcagtaa

SEQ ID NO: 24555 - DNA, 1035 bp, Escherichia coli
gtgggaacccgcactggccgcgccgcagaatcgctgttagcacagctcaacgccggacagattgagtatgtcgggcttgagcagagccaggagatgctgctgagcgcccggcagaggctcgccccctggcctggcgcccgtctgtccctctggaatgcagacacgctggcggcgcacgctcactcggcggacattatctggcttaataacgccctgcatcgtctgctgccggaagatcccgggctccttgcgacattacaacagcttgccgttcccggcgcgctgctctacgtgatggagtttcgccagttaacgccgtccgccctactcagcacgctcctgttaaccaatgggcagccggaggccttgctgcataacagcgccgactgggcggcattatttagcgcggccggcttcaactgtcagcatggcgatgaggtcgcggggttacaacgcttcctcgtacaatgtcctgacaggcaggtgcgccgcgatccccgtcaacttcaggccgccctcgccgggcgtctgccggggtggatggtgccgcaacggatcgtcttcctcgacgccttaccgctgacggctaacgggaaaattgactaccaggcgctgaagcgtcgtcatacccctgaagcggaaaacccggccgaagcggatttaccccagggcgacattgaaaaacaggttgccgccctctggcagcaactcttatcaactggcaatgtcaccagagaaaccgacttcttccagcaaggcggcgatagcctgctggcgacccgtctgaccgggcaacttcatcaggcaggttatgaagcgcaattaagcgacctgtttaatcatccccggctggcggattttgccgccacgctgcggaaaaccgacgtcccggtcgaacaaccattcgtccactcccctgaagatcgctaccagccctttgcgcttaccgacgtgcagcaggctcacatttctttgttgaatttgaaattgccgatctggatctcacccggttggagacggtctggaaccgattaa

SEQ ID NO: 24556 - DNA, 1140 bp, Escherichia coli
atgagcgaacccctgttaattgcccgcacgccggacacagaactgtttttactgccgggaatggctaaccgtcacgggctgattactggcgcaacggggacgggtaaaaccgttacgctgcaaaaactggcagagtcattgtcggaaatcggcgttccggtgtttatggccgatgtgaaaggcgatctgaccggcatcgcgcaggcaggaacggcatcggaaaaactactcgcaaggcttaaaaatatcggcgtcaatgactggcaaccgcatgctaatccggtggtggtgtgggatatctttggcgagaaaggccatccggtgcgggcgacggtttcggatctggggccgctgttgctggcgcggctgttgaatctcaacgatgtgcaatctggcgtgctgaatatcatcttccgtattgctgacgatcagggattgttgctgctcgactttaaagatctgcgggcgattacccagtacatcggcgataacgccaaatctttccagaatcagtacggtaatatcagtagcgcatcggttggtgccatccagcgcggactgttgtcgctggaacagcaaggcgcagcacacttctttggcgagccgatgctggatatcaaagactggatgcgcaccgataccaacggtaaaggcgttatcaatatcctcagcgccgagaagctttatcagatgccgaaactgtacgccgccagcctgctgtggatgctttcagagttgtatgaacaattgccggaagcgggcgatctggagaaaccaaaactggtgtttttcttcgacgaggcacatctgctgtttaacgatgcaccgcaggtactgctggataagattgagcaggtgatacggcttattcgctcaaaaggcgtaggcgtctggttcgtttcgcaaaacccgtctgatattccggataatgtgctcgggcagctcggtaatcgcgttcaacacgctttgcgtgcttttacgcccaaagatcagaaagcggtaaaagctgcggcgcaaaccatgcgggccaatccggcatttgataccgaaaaggcaatccaggaactggggaccggcgaggcgttaatctcgtttcttgatgtgaaaggaagtccttcagtggtggaacggcgatggtga

SEQ ID NO: 24557 - DNA, 183 bp, Escherichia coli
atgcctgaaacccgcgctacacaaggctttcctcgattttcccctcaactgaagtcaacctgggtcaacccacatcaacaagcttgtgagtatactaatgagtatatttgccgattcgatattgcttgtatactcacgatataccaatggaaggaggaccagtatggccctaacggatactaa

SEQ ID NO: 24558 - DNA, 663 bp, Escherichia coli
gtgaaaaactttgtcgtggcgaatatcacgggagcggattgtcggcaactgatccatgttgaaaatggtaaacattttgttatccgtaatatcaaagctcgtaatatcacgccggatttcagtaagaaagcaggtattgataacgccacagttgctatttatggttgtgacaactttgtgattgataatattgaaatgattaatagtgccgggatgttaatcggctatggggtaattaaaggcaaatatctctcgataccgcagaatttccgagtgaataatattcaactggataatacccaccttgcttacaaattgcgcggtatccaaatctccgccgggaatgctgtctcctttgtggcactgactaacattgagatgaagcgtgcctcgctggagcttcacaataaaccgcaacatctttttatgcgaaatatcaaagtgatgcaggaatcctctgttggacccgcattgagcatgaacttcgacatgcgcaaagacgttcgcggcgtctttatggcgaaaaaagaaacactgctgtctcttgcaaatgttcatgcggtgaatgaaagagggcaaagctccgtcgatatcgacagggttaatcaccatattgttaatgtggaaaagattaactttagattgccggaacggagggagtag

SEQ ID NO: 24559 - DNA, 1281 bp, Escherichia coli
atgagctttaatcttgaaaattataaaataggaattattgggctggggtacgttggcttacctttagctgttgaatttggcaaaaaaataaagactcttggttttgatatcaacgagaaacggataaaagaattatcagcaggtaatgactttacgcttgaatgtagttctgatgaactggctcaagcttactatcttcaatattcatgtgattataaagaattagcgacttgcaatgtattcattgtgacggtacctactccaattgatgaatataaacaacctgatttaacacctcttgttaaagcctcggaaacactcggaaaaataatcaaaaaagatgatattattatctacgaatcaactgtttatccaggtgcaacagaagaagtatgtatcccagtaattgagaagatctcaggtctggtatttaatatagatttttttgccggttacagcccggaacgcattaatccgggtgacaaagagcaccgcgtgacaacgatcaaaaaagtaacttctggttcaacgcctgaaattgctgagattgtcgataaattatatggaaccatcatcaccgctggaacgcataaagcatcttcgatacgtgtggcggaagcggctaaagtgattgagaacacccagcgtgatttgaatattgctctgattaacgaacttgcaatgattttcaataagctggggattgatacggaggaagtattaaaagccgcaggcactaaatggaacttcttaccattcagaccaggcttagttggggggcattgcatcggagttgatccctactatttgactcataaagcgcaagcgataggttatcatccagaagtcatcctggcggggcgtagaattaatgatggaatgagtaaatatgtagcatcacagttcattaaagccatgctcaagaaaaaattacaaattgaaggtgctaatgtcttaattatggggcttacctttaaagaaaactgtccggatcttcgtaatacaaaagttgtagatatcttggctgaactgaaagaatacaacgtgaacgtggatatttatgatccatgggttgatgttgaagaagcctattatgagtatggggttaatgtattaaacacattatctgataagaaatatgatggtgtgatctttgcagttgctcactctcaatttaaaaatatgagtaaagaagaagtccatggaataattagaaatgatggtgttatttatgatttgaaatacatcattgaccctaacttagtagatattcgtctttaa

SEQ ID NO: 24560 - DNA, 1026 bp, Escherichia coli
gtgaaatataaaaaaatagaagacgctttgtcttctaaatctgaaacatggttgattacaggtgttgcgggatttatcggttctaacctattagaggccttactaaaacttaatcaaaaagtagttggcttagataattttgcaactggacatcaagcaaaccttgatgaggttaaagagtccgtttcagctgaacaatggtctgcttttacctttgtggaaggagacatatgtgagccagagacgtgtgtggaggttgttaaaggagttgatcatgtcctacatcaggctgcattaggttctgtgcctcgttcaattaaagatccaattactacaaataatacaaatatatcgggtttcattaatatgttggttgccgccaaagatgccaatgtcagaagtttcacttacgctgcaagtagctcaacgtatggtgatcatcctgcattacctaaaattgaagaaaatataggtaatccgctatctccatacgcagtgacaaagtatgtaaatgaattatatgcgcaagtatttgcaagaacctacggattcaaatcaattggattaagatactttaatgtatttggaaaacgccaggatcctaatggggcatatgctgctgtgataccgaagtggactgctgcaatgatcaatgatgaaccgctgtatatcaatggtgatggcgaaacaagtagagacttttgttttattgagaatgtcgtgcaaatgaatattcttgctgcacagtctgatgcgtctgcaagagatcaggtttataacgttgcagttggtgaccgtacgacgctcaatcaactgtttaatgtacttaaaaatacattaaaaaataataatgttatttatgaaaaaaaaccagtctataaggactttagggctggggatgttcgtcattctcaagcaaacatagataaagcaaagcgcttattagggtatgtgccaacacatgatatattggatggtattaaggaatctatgccttggtatataagcacattagatgttaaataa

SEQ ID NO: 24561 - DNA, 123 bp, Escherichia coli
atgtatattgagacaaaagatgcgcaaataagcggggcggtaggccgttattcaaagaaattcgcgccaggtaaggtgttcactgtatataaggtgggtaatgctgccaacttactgatttag

SEQ ID NO: 24562 - DNA, 321 bp, Escherichia coli
atggaagcggcgaactacacgtttgagcacaatgggcgtaaatgggactacgggaagtcaacgcagacgcgtcttgagccgtcggtggcggcagcgaaagcggggaaactgccggaggcgtttttctggacggatgcggacaataatgacgtaccgatggacgctgaaacactgattgctctgagtgctgctgcagagcaggcgatgtttaccaaagggatggaaatccacgtccggcagcgtaccatgaagaaagagctggaaaagctgaccagtgcggatgagatactggcatacagggttggctgggcacaggaataa

SEQ ID NO: 24563 - DNA, 399 bp, Escherichia coli
atggtgatgtttatgcaactgattaatgttaaacgatattacccggaaaacaccctctatggtaatgatgtacagtattttcagagtgaagatggtaaggatttctacgagtccctgccattattcacaaaaaaatataaactttgtataacacctgacagcggcattatctgctcaatatcacaggacgcttcggcgctgtatcctgcggggttctctgtggttgaagtcgacgaactccctgaaggtgctgatatttcgggtaactggaagtttgataatggcgtgatctcccgtattccggttaactacgcaagaaaactggaagcaatgcgccagtcatatcttaatcaggcatatgaaaaaattaatggtaagcttccggggaactcatattga

SEQ ID NO: 24564 - DNA, 561 bp, Escherichia coli
atgctgattggctatatacgcgtatcaacaaatgaccagaacacaggtttacaaagaaatgcgctggaatgtgcaggatgtgagcagatttttgaagacaaaatgagtggtaaaacgacgcagcggccgggactgaagcgggcactgaagaaactaaaacccggcgacacactgatggtctggaaactggacaggctggggcgcagtatgcgccaccttgttgcgctgacagatgaattacagcaacaggggataaattttcgtagtcttactgacaacattgatacgtcaacccccatggggcgcttcttttttcacataatgggtgcgctggcagaaatggagcgtgaattgattgtcgaacggacacgggctggtcttgctgctgcccgtgaaaggggacgaaccggcggcagaccccgtcgtctcacgcaggaacaatacgagcaggtcgggcgtttactggccgggggtgtcagccgaagacaggtggcacttatttttgatatcggcctttcaaccctttatcgttattatcctgcgagcgtttcggaaaaataa

SEQ ID NO: 24565 - DNA, 2040 bp, Escherichia coli
atgacgtccaaatgggttcaactatcatcaatgcccggaaactttactgttaaagtttccggtggtacagcggcatttcttgaggctccctttcctccggccgaaacaaaaggaggaatgacatttgctgactgtctcatcagttttaatacacgggattgcctgtgggtaaggccagtatccggtgatccgagcgtggaaattaccggtgcgggtattggtgctgtcattccgttaagtgctgatgttgccggtactgctgaaccgtcagactgggataatgctgaaacacatacccgtccgtcaggaaatgaaactgcttccagctccccttcctggtattacgtggtggttcttgctggtcagtcaaacgggatggcctacggtgaaggtctgccgctgccggagacatatgaccgccccgaaccgcgtattatgcagttagcccgtcgcagtacagtcacgccgggaggtaaagcctgtcagtataacgacatcattctggccgaccactgtctgcatgatgtgcaggatatgagtggaaaaaatcacccgaaagcggatgtggctaaagggcaatatggcaccgtgggtcaggggcttcacattgccaaaaaactgctgccgtttattccggcagatgcggggattctgctggttccctgctgccgtggtggttctgcattcacggcgggtgctgacggcacgtacagtgacagcacgggtgcttcagaggactcagcccgctggggtgtggataagccgctgtataaggacttaatcagccggacaaaagcggcactggcgaagaacccgaaaaaccgcctgcttgctgtggtgtggatgcagggcgagtttgatattgatgcgaagccgacggagcattccgcgctgtttctggcgatggtggaaaaattccgcgcagacctggctgaacaggcggaacagtgtaccggtggcagtgctgctggcgttccgtggatttgtggcgataccacgtatttctggaaacagaaaaacgaacaggcataccaggcaatctatgacggctacaaaaataaaacagataaaaacattcatttcgtcccattaatgacagatgaaaatggcgcgaatgtacccaccaacaatccgacagaagacccggatattgaatccattggttattacggctcaacgtggcgtaacagtgccgccacctggacatctgcgggccgggccagccatttcagttcatgggcacgtcgtgggattatttccgaccgtctggccacggctgttctgactcatgcagggcgaaccacagtaaaagccgatgttccatcttctgaaactgaagcaccagtgccgtcaccttcagaaactgaagcagtaaccacaacactgctgtcttaccgtgtcagtgagtcagaaggaaatctgaaagcccagggctgggagccggctggcggtaaagctgaaattatcagtgatgcaggaggcacaggtggtaaggcaatgaaactgaccaaggaaacaggtaaatcatcctggtatctggatcatgatgccggtactggtgctgaactgctgaaaaatggtggtttaatcagttgtcgttttaaagtacctggcgacttggtggcaaaccagtatgtcatggcgctttactggccggtttcctctctgccgcagggtgtcaccctgacaggggatgcagggaataatctgctggcatcgttctacatccagacagacgcaaaagacctgaatgtgatgcaccacaatgcaaaagtggcaacaaataaccagaaactgggaacctttggtgtatttgataatgaatggcatacgctggccttccgttttgcaggaaataacagccttcaggttattccggttattgatggtcaggatggtgccgcgtttaccctgacgcagtcaccagtaggaactttcccggtggacaaactccgcgtaacggatatcaccaaaaatgcaacttacccggtgctgattgacagcattgtggtggaagtgaaaaaagcggtaacagaataa

SEQ ID NO: 24566 - DNA, 183 bp, Escherichia coli
atgacattcgttcatacaatgctgctttatttctgcgctgtggtcagtgcgttatatctggtgagcggcggttataaggtcatcagaaattatattcgccgcaaaattgatgacgcagcagccgaaaagctcagtaaaacagcacaggcaccatcatccccaaacgacccgaccccgctctga

SEQ ID NO: 24567 - DNA, 246 bp, Escherichia coli
atgccagagattaaaggcacggttactgaagagcttgtcaaacaggcactttattctgaagaagtgaaccgcgtgctgaaggcgcaggttcgcaaggattttgaggcacaaatcgacgcatatgttgatgaagtgctggcccgaatggttggccgttctccggctgaaaacagcacggaaaatgctcctcaacccgtagagcaaccagagccggttcagcccggaactgacggtactatgatgtaa

SEQ ID NO: 24568 - DNA, 1053 bp, Escherichia coli
gtggggaacaagaaacattactttcagtctgataagtcactaacctatggttcagtatgcagtggtattgaagctgcgacagtagcctggagcaatcttggctggaaagccagatggttcagtgaaatagaggacttcccgtcaacacttctttcatatcgctggccccatataccaaatcttggtgatatggctttgcttgcgcctcgtatcagggatgggcttattgaagcaccagatattcttgtaggtggaactccgtgtcaggcattcagtatgtcaggcaaacgaaaaggcctttcagatccacgggggcagttaacactgtcttttgttgaactggcgaatcagatagataccgttcgggcatcgctcaataaatccccctcaataatcgtatgggaaaacgtcacaggagttttaagtagccatgacaatgcattcggtcattttcttggtgcgctggccggagcaggttgcgcattacagccagcaaggaaaagatgggcaaacgctggtgttgtgtctggaccatcgcgtatcgtcgcctggcgagtacttgatgcccaatatttcggagtcgcccaggctcgcagaagagtgtttgttgtggcaagtgctggaaaaaggctcgatcccggaaaggtattatttgagttcccgcctgtgtcgcagggcgataaaaactattacggaaagaagaaaaaatccgaatcccttcttgatcaaggcattgaaggaaaattgcaccgatattgccttgaagcattgccaaaacgaacaggcacagtaatagctggctataacggaacaactaaccaggacatgactatgtctggtgggctcatagttgaaagagcgccatattcaagggttcgtaggttgacgccaaccgaatgcgagaggctacaaggttttcccgatggatatacagatattccatggaaaaattcatctccagctcatcgttataaggccattggaaattcaatgcctgtaccggtcatgaaatggattggtcgaagaatacaggaagcgttaaacgaagtttaa

SEQ ID NO: 24569 - DNA, 378 bp, Escherichia coli
atgtcaagcagccttgaaaaacgcttctctacgcggctgaaaattgatgacgatgccctcgctcgcctggtttcctgtgcatggcctggcaacgattttgaactttacagcgtcatcgagaatcttgctctgagtagtgataatgggcgcattcgcgtcagtgatttgccggaacatctgtttaccgagcaggcgacagatgatgtcagcgccacccgcctttccaccagtctgtcatttgcggaagttgaaaaagaggcaattattaacgcagcccaggtcacaggcggtcgcattcaggaaatgtcggctttacttggaatcggccgcactacgctgtggcggaaaatgaagcaacatggcattgatgcagggtag

SEQ ID NO: 24570 - DNA, 369 bp, Escherichia coli
gtggagcgcaacgtcacgctcgattttgttcgcggcgtcgccattctggggatcctgctattaaacatcagcgcctttgggttaccaaaggcggcttatctcaatcccgcctggtacggcgctattacgccacaggatgcatggacctgggcatttctcgatctcatcggccaggtgaaattcctcacgctttttgcgctgttgtttggtgcggggctgcaaatgttgctgccccgtggcagacgatggatccagtcgcggttaacgctgttagtcttgctgggctttattcacggtttattgttctgggacggcgatattctgctggcggctggtgcgcgatgcgccatcggtaaaaagcctgtttaa

SEQ ID NO: 24571 - DNA, 2289 bp, Escherichia coli
gtgagcgggcggctgccagaagcggaagtcacaatcatgatgaataatctgcatatcagggttgctctggcggcggcagacaccctgacacaacctctcaggcgcgcccgcgaaaccgtgggcgcgctttctgattccctccgtgaaactcaggactccatccgctcgcttgaacggcagagtgaagcctttgctgcggcacagactaaatttgacgaagccacccggaaaattgccgctgttcagcagcaactgaaccgtctgcagcaggcggagcgtgagggtaccgtgctcagtgaacggcagcgtgaaatgatggcttcgctgaccacccggcttgaacgtctgaaccgggtgagggatgtgcatcagcgacgcctggaggattcacgccgggagctggagaggcacggtattgccgcagagggcagcagtcagaccatacaggcagccattcgccggacggcagagtataacgaagcgctggcgcgacagcggcaggcacttgcacaggtgacccgtgcacagcaacgctatgagcaggcgcaggagcgactcgggcgaatacgtaatgccggtgcggcggcactggctgccggtgcagcaggactttacgctggcgggcgtgctgttgcgccggtgatggatctccagcgtcatggtgccgtcattgcggctcaggcaggagagggcgcgtcagatgccgtggggtataccggggttataaaccacatggttcattccggtgtcacaccggatgcacaactggcggctgaagctgtgggtgctgtccgttccacgctggggggactgggggcggttagtgagaatgaactgacccgaatcacccgaaaaatgctggatatgcaggccgtgatggggggcgatatcccgcagcacattcaggcggctgccatcatgatcaaaaacggtcttgcacgcagcagtgacgaggcggttgatctgatggtggcgggcatgcagcgcatggggccggttatgcgcgatgagctgcctgagatccttcacgagtattcgacccattttcgtaacatggggctgacagggtcggaaaccatgacgctccttgcggatatggcgcagcaggggaagtttgcgctggataaaaccggcgatgccatcaaggagttcagtattcgcggctccgatatgtcaaaggcgagtgctgaagcgtatgcgcttatcgggctggatgcagccaggatgtcatcggctgtagccagtggtggaacggctgcacgggccgcgatgcagaaaaccgcctcgggtctgttgcagatcgtcgatccggctgagcgggccaatgcggccatcgcactttttggtacaccggttgaagatctgtctgtcgatcaaatccctgcctttcttggcgcgctggcgcgggtgtctgaccgtatggctgacgtgtctggtgtggcggaccggatggggcaaaccctgcgtgacaatctgagtggtgatgtggcgcggcttaccgggacgttcagcgtgctgagaagtgggattatcggggagattacggacgatctgcgtgggcttgtccggatggccacggcgtggggtgagcgtctgcaggcgtgggtgaatgcgcatccggaactggtgcgaatgattgcgctgacgacgggagcggtgctggcgttaaccacagcggtgggggcgttgtccgttgcggcctggatggttgtcgcgccgttactgaaactgcgtctggggcttgccttgcttcgcgcgatcccggccggactctccgttgccggtacgctgtttggcggactgacgggtgtgatttcagccgtgggggctgcgctgggggcgctgacctggccggttgtggtggcggtgggagccctggtcggtggtgctctgctgatctggcgctactgggatcgggtcagggcgtttgtgagcggatttattgaaggggtacagtcagcactggcgcccttcatggcgacagcctcccgttttgcgccgctgctggatctggtttcaggggcactgtcccgtattctgggatggtttaaatccctgttaacgccggtctcctccacgcgtgatttgcttgagcagtgcacctctgccgggcagacgttcgggagcactctggccggtgcgttagccacggttttttcgcccctgaaagctctgattgacggtctggcgtgggtgctggaaaaactcggtgttctgcccggtgaagctgagcgggttaagcgaaaactggatgaggcccgtaaaacgccggtggtaagcgtaaactga

SEQ ID NO: 24572 - DNA, 390 bp, Escherichia coli
atggataaagaaacggaaatgaccactgacactgccgtcagtaacggggaggcttccgcggtggcggttgccgctacggctgcacctaagaacgtggtgaagctgacggtgcctgttgtgcgcggagatgtgtcgtacagtgaaattaaaatcggtccgctggcgaatcaggccggatcgctgcgtgggctgtctttgcttgcgctttacaacatgaactgtgatgccatggtcacctggcttgcgcgtgtgacagagccaaaactcaaggaggccgaaatgtatgccatgaatgtggcggattttacggcgctgagctcggcggcggttaattttttcgcaccctcggggtcgaatgcaccggcaccggagaacacggcagagccgtaa

SEQ ID NO: 24573 - DNA, 510 bp, Escherichia coli
atggcggtaccaaacaaacttcgcgttttcacggtgtacatcgatggcgaaaacaagctggggcgggtgacgtccttcacgtcgcctaaactgacccgaaaaacggagtccttccgtggtgccgggatgcccggcagtgtttccgtcgactttggtcttgatgatggtgcactggatctctcttttgcggtaggcggcgcagatgcccaccttttctcccgttatgccgggtcacttgatgaagtccgtcttcgcttttccggtgagtactattcggatgcggatatcagatatgtggatattgaggtccgtgggcgcatcactgaaatcgatatgggggaggcgaagcagggtgaagacactgagcacagttattcgatgaaaaacacctggtacagactgagcgtggatgatcgggaaaaaatcgaatttgatgtgctgaattttatctggcgcattgacggtaaggatgtgctgccggatcgcacccgctcgatgctgggcttctga

SEQ ID NO: 24574 - DNA, 1188 bp, Escherichia coli
atggctgaaacccgtttccatggcgtgcgggtccgggagaatgcggatctggtcacggccattaatgatattgactccagtgtgattggtatcgtggctgttgctgatgatgctgatacaaaaacatttccgctggataagccggtgctcctgacgcgtgtcatggatgtgctgggtaaggccggaaaaaccggcacgctgtataaaagtctgaaagctattgccgatcaggtcagcaccagagttgttgtggtgcgggttgctgctgcgaaggagggggatggtcagccgacacaaacgcagcttgttattggtgaggtcaaaaatgacggaacctatacaggcatgcaggcgctcctggtggctgaacagaatgaggctgttggtgttcgtcccaggatcctggccgtgccatcgcttgacaccaaagaggtggtggcggcactggtaaccgtcgcgaaaaagctgcgtgcctttgtgtatgcgggctgtcccggctgtaataccgtgcaggaggctgtcacctggcgcgccgatcttgctcaccgtgaagttatgctgatctggcctgattttatcgcgtacaaccctaacagtggccagaatgaggcttttcctgcatctgcgtatgcgtgcgggttgcgtgcgaagattgaccacgagcagggctggcataaatccctgtccaatgtggcagtgaataatgtcctgggtatttctgtgccggtgttctggtcgctccaggcagaggacagtgacgcggaaaccctcaatgacaaggagatcaccacactcattaaacgtaacggcttccgtttctggggtaaccggactctcgacaccactacctacacctttgagacctacacgcgtacggcgcagtcgctggcggataccatcgccgaatcgcagtttgaaaccgtggacaagccgctgacgccgtcgaacgtgaaggatgtgttaagcgatatccgggcaaaactgagtgcctttgtgacagcgggtaaacttatcggggcagagtgctggtatgacgtggtggataacggcacaacggatctgcgtcaggggggtgtgcgcattcgctacaagtatacgccggtgccaccgcttgaagatcttgagcttcaccagacgtttaccgatgaattctttgcgggtgcatttgcatcactgggaggtgagtaa

SEQ ID NO: 24575 - DNA, 1125 bp, Escherichia coli
atggtattgctgaacggtaacacggtttattcccccctgaaagaactggtgaaaatgcctgatttcagcgtttcactggacagggagcaggataaaaacactcttcaggaactgaataaccgggtgatatcgctttccatgacagacaaccgggggtttgaagcagacagggtcactcttgtgctggatgatgccgacgggcagctggctctccccgggcggggaacacacatcagagtcatgctgggatggaagggagagcctctggttgataaaggcacctacattgttgatgaggtcgctcatgaaggacctccggatcggctgacactgagtgcaaacagcgcagacttcagggaggaatttaacgtcaaacgggaagtatcctggcacgacgtgactgttgaacgcgtggtttccgctattgcccaccgttacggactgaaagcccagataagcgatatgcttatggatattgaaatcgatcatgccgaccagacggaagaaagcgacatgtcattccttacccgcatggctgatatgctgggagccatcactaccgtcaaaaatggctgtctgctgttcattctgccgggtggcggcgtgacagctgacgggcgcccactcccctcatttgcactggcacgcagtgacggagacagtcaccagttcagaatagccgatcgccaggcatacacaggggtgaaggcgtactggctggatttgaatcatggcaaaaagaaagccgtcaacataaaaaaacgaaaaactcacgctgaaaagagcagcagccgggaaggcagctacatggagggggcagaaggtaacgtgttcgttctgagaaaaacctacccaaatgaaattgctgcacagcgcgcagctgccgccaggtggcagcaattacagcgcggtgcggctgaattctccatcacgctggcccggggcagagcggagctttaccctgaaatgcatggcacggtaaccggctttaaaaccgaaatagacaatcaggactggctcattgcaaaagtggaacacaatatcgacggaagcggcttcaccacaaggcttgaactggaggcaagaatacccgagtggatagccgaaaaggaaagcaatggttag

SEQ ID NO: 24576 - DNA, 303 bp, Escherichia coli
atgtttcattgtccattctgcggcgcatctgcccggatccgtaccagtaaagccgccaatgataccggcaccatccgctacaaatactatcagtgcaataaccttgagtgcagcgccacattttcaacaatggaaagtgtgcacagaattattggccagcctcagttgatcttccacgataaagatattccacgggagacaatgcgcaaatcccatcagggacgcagtcagttaacgctacaactggaggattgcggtatggctttaaaaccagtacattacgcgcgggtgcctttcggctga

SEQ ID NO: 24577 - DNA, 141 bp, Escherichia coli
atgccgcaaaaaacgatcatcgtgagcattttatgcttaaccatgttgttggccatctggatgatacaccgttcgccgtgtgagttcagacttaacatcatgtggtcagaatttgcggcgttcttgcagtgtaaacagtaa

SEQ ID NO: 24578 - DNA, 141 bp, Escherichia coli
atgccgcaaaaaacgatcatcgtgagcattttatgcttaaccatgttgttgacagtctggatgatacaccgttcgccgtgtgagttcagacttaacatcatgtggtcagaatttgcggcgttcttgcagtgtaaaccgtaa

SEQ ID NO: 24579 - DNA, 351 bp, Escherichia coli
gtgcgggcgaaatatattgatgagttgatcgatttgctgttcatgcaggcatccgcttttcagcaagaaaaatggcagggatggtccgcacaatcaccagacttacctcgccaccaacaactttggctggacccgtggcgaagcctctcagatgagactttcaaacaggagcgtgagaaaaacgactggcaagtaactgtcgccgatgatttcgcacgctggctgaactatcgcctgaaaaaatccagttttgacgtaggcgctgtcgaacaaaaagagtggcgcagccagtctctgttcgctcaacggatgcgtgaaatggaagctgttttgcaggaggcgctgaaatga

SEQ ID NO: 24580 - DNA, 2478 bp, Escherichia coli
atgaatgtcctaattatctcacgctgtacgaaaaatgctcgcgtggaaagctgccgtattattgatcagtttgccgaacgcactggtgacgcagcatggcaaacggtgattactctggaaggcgttaatacactccgccgtttactgcgcaaaaccgccaggcgaaataccgcagtggcttgtcactggctgaagaagaatgggcaaacggagctgatgtggattgtcggcaatattcgtcgctttaatgctcaaggccgcgttcccacaaatcgaacaacgcaaatcagcctggtgaacaaagaagaaaatcgctggcagtgcgcggaaagtattgcactgctggcggctatcgctgggctatttcatgattttggtaaatcaggacgcagctttcagcaaagcctgactcaaaagaatacccgcagttatcaaccttaccgacatgaatggatctcactgcggctctttcaggcgtttgtcggtgatcggcccgacgatgtgtggctggcgaagcttggcgaactcacggcagatgatgaatctgcgattcttgagcgcctgcaaaaagacactcctcaattttcaaatagcccgttcagttcgctgcaaccattagccaaaacggtaggctggctgatcctttcccatcatcgaatgccggagaatctttctccacagtcggaacaatcatgtaaagggtgtgaaagttggctggagaagcaacttaatgctgactggaatgccgttaaccaccgcagagatgactggtcacaacaggattttgcgcacgtctggcagtttccatcaggaacgccgcttcaaagcgcgagctggcgggaaaaagcgcgtcagatagcccgccgggcaagcaacgcgctaggtttaaagacatatgggcagatggaacagttgttccccttacatatggcgcgtttttgtctgatgcttgccgatcattactattcctcaagcgatgcgcagcaaaaatggcaggacccggattatatcgtctgggcaaatagcgatcgccaaagcggcacgctcaaacaacgggtagacgaacaccttgtgggcgtcgcgcatcatgcgtatctgcttgggcggcaactgatgcacacacgggcatcgcttccggcaattgcccgacataaaggttttagccagcgggccacagatgtgaattatcgctggcaagataaagcctgggatgtggcgcgagcgttacgtgaacgaagtcgtgaagagggatttttcggcgtcaatatggcctcgacggggtgtggtaaaacctttgcgaacgcccgcattatgtatgcacttgccgacgagcgagaagggtgccgctttaccgttgcgctgggattgcgcacgctgactttacaaaccggcgatgctctgcgcagtcggcttgggctgggtgaggatgagctggcggtactgattggttcggcggcagttaatcaactgtggcaacaggaaaaaatagacaatgattgcggaagtgcttcgcaagagtcgccggcagaggagcaacagttcgttaagtacgaaggcagcctgcataccgggacgctggaaaaatggttgaaggatgacagcaaacttaaggagttagtaagcgcgccgattctggtctcgacgattgatcatcttatttccgcgaccgagggcgtgcgaggcgggaaacagcttccggcgatgttgcgcctgttaaccagcgatttagtgctcgacgaacctgatgactttgatattgccgatcttcatgcggtatgtcgattgatgaactgggccgggatgctgggaacgcgggtattactttcttccgcgacgttaccgccaggtttgattcaggcgctgttcgcggcttatcttgctgggcgaaaaatgtggcaggcgtcttgtggtatcaacggcaggcccgtcaatatatgctgcgcctggtttgatgaaaaagatgctgatgccacgcaaatttacgacggacctgggtttcgtgatgctcatgccaaatttgttgcacgacgagcggtaatgctggctgaaaaagaacgattgcatttcgggcgtgtagcttcggtttcatcagcatcaggcgcgatacaagatgttaccgaaagtgtggcccagacggtgcatacgcaaatgctgaagttgcatcaggcgcatcgccagcgacacgaaagcggtaaaaccgtttcgctgggcctggtgcgcttcgcgaatatcaatccactggttgcggtgaccaaagccctgattgtcattccttcaccagaagatgtctgcttcattactgtgtttaccactcccgacacccgctggcggtgcgttcagatattgagaagcgactggatcgcgcttttactcgtcataacgaactcgatttctggaacaacgaagatatcgcagatgccttacataaccgtccggaatcgcaccatctgtttgtggtgttggggacatcggttatag

SEQ ID NO: 24581 - DNA, 207 bp, Escherichia coli
atggctgaagagaaaaaaggcggtgtttcggtgtacataagccccgacatcgtgaaggcgctcaaggaacgccaccagcagaacgtaaaagcaggcattgcggcaggacttgatccgctggctatggttgagccgtcaacaggctggcaggtacgcgcctacttacgtgcggcgctgggtatgaatcaggttcacgggggtgaataa

SEQ ID NO: 24582 - DNA, 423 bp, Escherichia coli
atgacagcacagatagcagcttacgggcggctggtggacgacccgcaggtaaaacagaccagcaagggcacaccaatgacgctggcacgtatggcggtatcgttgccatgtagtcaggcgcaggatgggcaggctacgttatggctatcggtgatggcatttggcagacaggccgaagcactggaaaggcaccgcaagggtgaactcctgagcgtggcgggtaacatgcagatcagccagtggactgggcagaacggagaaacgcggcaggggtggcaggttatcgctgacagcgtaatcagtgccagaacggcgcgaccaggtggtaaaaaaggccagcagggccaggctactgacgcactgaacagggcaaaacaacaggcgggtaacgatgatccgtacggggataacataccgttttaa

SEQ ID NO: 24583 - DNA, 252 bp, Escherichia coli
atgaccagaacacgcagagacagaacagagccaaaatataaagcgttagacatgactgagcacaccttaaaggtggcaatcagaacgatagaccgccacacgcgggaaggatacgcgaaggaacatcccgacctgataagcgcattcatgaccacggcggcggcaaactttgccacgctgacagaacgggagattgccgaagcggaacaggtaacaaccatcaacgttaaaaccggagaggtggaatcatga

SEQ ID NO: 24584 - DNA, 171 bp, Escherichia coli
atggctgtatccgcacgcccttactttgtctggcgctttatgcagtgccaccacagcaacatcgatgtattcaccgttaccgctgccactgagcgcgaagcacgtgcacagctgccgcacgcacatcttatttttgtcgcccgtattcgtcagggggtgttccatgcctga

SEQ ID NO: 24585 - DNA, 252 bp, Escherichia coli
atgcgtaaaaaccgcttgcaaaaaattatcacggggctgtatgcttcccccgtcgcccacatggcgaccgggtttgacagcctgaatactgtagcggacagccgcttacattccgatatgcggtttttttgtgtccgtaaacctacccatacccgcattatggcggggcgtaacgggggagcctttgcgctcgctggtctcttgccagtctgtcaaccctgttacgtctcgccaccatgtttgacagcgtag

SEQ ID NO: 24586 - DNA, 198 bp, Escherichia coli
atggttgctgtaaatcatataccacaccttgtacacacacaaacggcctttgtgtggcgttttctggcactgagtgccggagaatctcaaatcatccacgtaaccgcctggacggaacgcgaagcgcgtagccgttgcccgtccggttgtgttgctgtattcgccgcccgtattcgtcaggggtcacatcatgcgtaa

SEQ ID NO: 24587 - DNA, 735 bp, Escherichia coli
atggcacataaaaaaaaggcgaccttgggaggtcgccagtttggaaacactaaacataagcacggggatgatagccgctatcaggctggtgggcggtttttgtttgctttcattaccctggggtgtttatcgagaaaatcatcaagcgcaaatcttgtaggcgctggttctgtatttggtggcatttgtttagctcgcgccttctcttgctggcgtgaaatgatactttgcaaaagcaatcttcgttgttctgcaaaaatctcatctgctgatcggtgttttttgctcatagtactgacctgtaaagcaatgcgccggagtacctcacgccacggcgctgatagtgattattctgattctttggccttccggcgctgttcatattttaatttgcgtccacaggcatctaagacccatgcggaaaaattagcactaggattagttaatttttcttgttcaacgctggcatcaatcccatctataagctcatgtgggaatcgaatatttttctttgctgatttgttgtttgtgttaccgctagacattgatgcacctcacttaaatggactttatgggcgcacacaatacagcaaaaaaaatgagatgttaagtattgacatgtgcgcacacatgattttaatctgtgcgcacagtttgagttttgtcactcaaattaagcaacgccccgcagtgctcgcaacacatgcggggcgtctaaccaacaacgtaaactag

SEQ ID NO: 24588 - DNA, 210 bp, Escherichia coli
atgcgtgaaataaatgaagatcgcgtaatccgcgaaaaagaatgcagagagctaacaggcgtttgccgcacaactcgttacgagatggaaaagcagggccgcttcccctcccgtatcagtctcggcggtcgttctgttggctgggttaagtctgaggttgtggcgtgggtcaaaaaccgcgaacgcattaattcaggtaaggccgcttga

SEQ ID NO: 24589 - DNA, 414 bp, Escherichia coli
atgttgagtatttttaaaccagcgccacacaaagcgcgcttacctgccgcggagatcgatccgacttatcgtcgattgcgctggcaaattttcctggggatattctttggctatgctgcttactatttggttcgtaagaactttgcgctcgctatgccttatctggttgagcagggattctcacgcggtgatttaggttttgccctttcggggatctcgattgcttatggattttcgaaattcatcatgggttcggtatcggatcgctcgaatccgcgcgttttcctgcccgcaggtttgattctggcggcggcagtgatgttgtttatgggctttgtgccatgggcgacgtcgagcattgcggtgatgtttgtactgttgttcctctgcggttggttccaggggatggggtga

SEQ ID NO: 24590 - DNA, 2673 bp, Escherichia coli
atgcgtcagaaagagacaacggccacgacccgcttttcactcctaccggggagcattacccgcttctttttactgttgatcattgtgttactggtgacgatgggggtaatggtacaaagcgccgttaacgcctggctgaaagataaaagttaccagattgtcgacattacccacgctatccaaaagcgagtcgatacctggcgttacgtgacctggcagatctacgacaacattgccgcgacaacctccccctcctccggcgaaggtttacaagagacgcgcctgaaacaggatgtctactatctggagaaaccacgccgcaaaacggaagcgttaatctttggctctcacgacaactcaacgcttgagatgactcaacggatgtccacctatctggacacattgtggggcgcagaaaatgtaccgtggtcgatgtattacctgaatggtcaggataacagtctggtgctgatctcaaccctgcccctcaaagatctcacctccggatttaaagaatcgaccgtcagcgacattgttgattcacgtcgtgcagagatgttgcaacaggccaacgccctcgatgaacgcgaaagtttttctaacatgcgccgcctggcctggcagaacggtcattattttaccttgcgtaccacgttcaaccagccgggacatctggcaacggtagtggcttttgatctgccgattaatgatttgatcccaccgggtatgccgctggacagtttccgccttgagccagacgcgacggcaacgggaaacaatgaaaatgagaaagaagggacggatagcgtcagtatccactttaacagtacgaagattgaaatctcctcggcactcaactctaccgatatgcgcctggtctggcaggttccttacggcaccttactgctggatacgttgcaaaacattctgctgccactgctgctgaacatcggtttgctggcgctggcgttatttggctataccacattccgccatttctccagccgcagtacagaaagcgtccccagcacggcggtcaataacgaattgcgcattttacgggcaattaatgaagagatagtctcactgctgccgctcggcctgctggttcacgatcaggaatcgaaccgcacagtcataagtaacaaaattgccgatcatttgctgccgcatttgaatctgcaaaacatcaccaccatggcggaacagcatcaggggattattcaggcgacgatcaataacgagctgtatgagatccgcatgttccgcagccaggttgcgccgcgcacacaaattttcattattcgcgatcaggatcgcgaagtgctggtaaacaagaaactcaagcaggcacagcgtctgtatgagaaaaaccagcaggggcggatgacctttatgaaaaacattggcgatgcgctgaaagaacccgcacagtccctggcggagagcgcggctaaactcaacgccccggaaggcaaacaactgacgaatcaggcggatgtgctggtgcggctggtcgatgaaatacagttagcgaacatgcttgcggacgatagctggaaaagtgagacggtgctgttctccgtgcaggatttaattgatgaagttgtgccttcagtgttgcctgccatcaagcgtaaaggtctgcaactgctgattaacaatcatctgaaagcacacgatatgcgccgcggcgatcgcgatgccttacgacgtattttgctgctactgatgcaatatgccgtgacctcaacgcaattgggaaaaatcacccttgaggttgatcaggatgagtcctccgaagaccgcctgacgttccgcattctggacacgggagaaggcgtaagtattcatgaaatggataatttgcacttcccgtttatcaaccagacccaaaacgatcgctatggcaaggcggacccgctggcattctggctgagcgatcaactggcgcgtaaactgggcggtcatttaaacatcaaaacgcgggatgggcttggtacacgctactctgtgcatatcaaaatgctcgcagctgacccgaaagttgaagaggaagaagagcgattactggatgatgtctgcgtaatggtggatgttacttcggcagaaattcggaatattgtcactcgccagttagaaaattggggtgcaacctgtatcacacccgatgaaagattaattagtcaagattatgatatctttttaacggataatccgtctaatcttactgcctctggcttgcttttaagcgatgatgagtctggcgtacgggaaattgggcctggtcaattgtgcgtcaacttcaatatgagcaacgctatgcaggaagcggtcttacaattaattgaagtgcaactggcgcaggaagaggtgacagaatcgcctctgggcggagatgaaaatgcgcaactccatgccagcggctattatgcgctctttgtagacacagtaccggatgatgttaagaggctgtatactgaagcagcaaccagtgactttgctgcgttagcccaaacggctcatcgtcttaaaggcgtatttgccatgctaaatctggtacccggcaagcagttatgtgaaacgctggaacatctgattcgtgagaaggatgttccaggaatagaaaaatacatcagcgacattgacagttatgtcaagagcttgctgtag

SEQ ID NO: 24591 - DNA, 567 bp, Escherichia coli
atgggacgtagtgttttctctgaagtaattagttactatatttgtgaagcgctatatgttgagtataatggtttgacagatgcagcacagaaaatcattgatagtttagttgcaatagaggatgagcttacaaagcgaattcgttccccactaaaagatatgcataaagtcactacaatgaatggttataatgttgagttatcttatcgaaaacctggatcaccagaaaacattataacgttgacaccagaaactgagattaatatttcagatactgaaatactacaggtttcccatgatatatctgtaatcataactcgttttaattcaatgacaggaaatggtcgacttatacttgaagggtatgaagaacatggcactgtagcatttggattttatgataatttaagatatgtaacagaaaaccataaaagacaaatcactcaaaacttgcatcacaataatggccttccatcagatagatggcaatatatgaatttaactgtaagtgatatggttcttcctagtggggatgttattaaatatctaattcgtaatataccttga

SEQ ID NO: 24592 - DNA, 696 bp, Escherichia coli
atgaaaattcactctattaaaatctttgctgcattagtaattataattacgtggttgagttattttgcaaagtttggtgattggtttaacttctcgagtgatacggctgtttgggggcagtttggggattttttaggaggggtgattaatccactgcttacatttatatctgttgtttacttgattaactctgtaaatcttcagcgagaggcgaacgctagcctgattgcgcttgaagagtttaagaaaactgagaccaaattttataacatgcttgagtcacaacgaagtggcttcgaaagctttaaaattgtagatagtgtggatgggaaacctttagttatcaaggacggtgacgcggttacatatattgaggatgttgttgtagaaatggtaatccaaggaagtacaaaaggagaaatctcaaataaaataggtggaatggataaagcggataatatatttagtatagtgaggcgctttcataatattattaagttgattaaaagggaaattccggaaaacttacgaagtgaatattatgatagtttagttaatatgactgagtataagcaaatatgtcttatattaatatcaatggagctttttgattggcctattttaagtagcattgatgaaagtggtgtgtttaatattgaggcattaatggaatatagaaaagcatttagaccataa

SEQ ID NO: 24593 - DNA, 969 bp, Escherichia coli
atgtatttcgtggataacaataccggtacgacagagatgccagcgctggctccatcgcagggtactgaagttaagtggtttacggaaggcgacggtaataaaggtatcagccatatcgggcaggactggcttaatatcattcaggcagaattgcttgcgattttgactgaaggaaaaattcaaccagataaaatgaagctgaatcagcttacactggcaatcaaggccattattacggccaatgcttttttacgtaaaaacaacctgaaagaaatcgaggatgcgggagctggtgctcaggcgaatgccagaaaagctcttgggctggggactctggcgacaaaagataagctttcaccaacagatgttggtgcgcttgaaaaaagcaaaaatttgtctgacgtacccgataaagttgcggcccgtaccaaccttggggtttacagtaaagaagaaggtgatcggcgttatctgaaaagcggcgcagatattggttcatatagtcgcgaacaaagtgatgggtcatatcttaaggttgcgtcaaatggttctgacattgcaaacagaagtgcctttatcgataacctcggtttacgggaaacggtaaacagggcggcgaatgccctgccatcgaacggaacggccgttgccgcgaacaggctggcaaatgcccacacaattaatggtgttccctttgacggaacgcaggatatcaacattacctccggtatgaccgaagctgctgctgataacaaatacgttcgcaacgttcagcttggtgcccagagttaccattcacccggaggtaatgaaatgtcctggagttatggcgcgccttccggttgtatgctttcaggtattaacgtgcaggagaccgggagaaattcagccgataatatcggaggcgtttattaccgtccggtgcagatatatatcggtaatgcctggcgcacagtttcatccgtctga

SEQ ID NO: 24594 - DNA, 558 bp, Escherichia coli
atggctctgacgcttgcagctcatcagcgcgcattgttgcagctcctacccgatggcctggcatgggataaacgtcctgaatccgtgttgtcagccttatgtcttgggctaagtcacgccaccgagcgtgtatcctggacggctaatcagttactttcggagcgctttccggaaacatcccggatgttactggaggactgggagcgttatctggggttgcctgaatgtgatatggcaggagcaacgttgcaggagcgccagcgatacgcggcgaataaataccgtatgaagccgtcactgaaccgcgagttttatatccggtttgcggctgaatttggctatgtgattgatattcagccatcaccggaatcgcagtggatcagtattgtgaccgtaaaaagcgaggttggctatcgtcacatgcatgtgctcgatcacattctgacgcctctgcggatatatgaaggtggtgcgctggaatgcattttaaaccggtataaaccggcctggcagacgtttttatacatttacgaaaagtcgcatgaggagacggaataa

SEQ ID NO: 24595 - DNA, 1083 bp, Escherichia coli
atgccttatcagcccttgccactggcgcaactgatcacccagacacagcaggatatcagccagcgtcttcccggttcccagccgggtgtgagtgaaacaacattaaatgccattgcatatgctcaggccgggttgtctgcgcaggagcatgagcaccttgcctggattgccaggcagattattccgacagaagcagacgaggctgaactgctgaaacactgttccttctggggtgtgatccgtaaaccggcatcacgtggcgatggtcccgtccagttgatgctgacgacagatgccggggtgaccgaaggggtacaacttcagcgcagtgatggtgaggtgtaccgcatcaccgggtctgttaccggaaaggccggaaccctgaccgtgcaggttgaagcggaaaatgcaggtcgttccggtaatgccccagcaggtacccccctgacgttcgtcaccccgcaggcgggtataaatcagacagccaccattaccggtacggggatcaccggaggtgcggatgttgagtcagtcccggaattgctgtcccgcctggtgtttcgtgtacagaatccaccatccggtggtacgcagtatgattttgagcgctgggcgcgtgaagttccgggggtaacccgtgcatggtgtaaaccggaatggcctcaggctggcagcgttggagtgacctttgttcaggataacaaccctgatattttccccggcgaaggtgacgtacagcgcgtggcggaatatatccgtagccatgatgatccagcaacggggcaacccgtcggacagccactgggaccaacggtaaaggtctttaagttaacgaataagcccgtggattttgaaatccgcatagtcccgaaaacgccggagaaccaggctgctgtaaagcaggcgctgacagacctgttgtataacgaatcaagcccgggggccctggttcttccgtcttcattctggcgaaccgtggcaggtgtgaaaaatcttgaggattttgaagtccgcagccccctcaaatcggttatggctggtgatgctgaattgctgacggtgggagaaattacatggctctga

SEQ ID NO: 24596 - DNA, 438 bp, Escherichia coli
atggctgatattgccgtgatatggaaacaggggcatggtgcactgcaactgaatggcgcagatcttctgacagacaatacattgcagacggcagtgattatctcactgtttactgatcgtcgagccctggcatcagatgtcataccagatggtacccgcgatcgccgtggatggtggggtgacagcttccgggaataccccataggctcccgtctgtggttgctgagccgggaaaaaacgcttacttcggtggtaagtcgtgcacaggcgtatgcggatgaggcgctggcatggcttcgtcagagcggcgttgcatcggatgttgtgtgtcgtgctgaacgaacggcgcacgagcaactttcattatttgttgaaatcacgctgccggacggcagtcgggaacccatgattttttatgctgatattaagggggaatga

SEQ ID NO: 24597 - DNA, 615 bp, Escherichia coli
atgataaatgaagaggttttcagccgccttatagcccccgttatgcgtggggtgcgtcttctgattggacggggggttcttaccggtatccgtgatgagctgaaaatgcagaatgtacagcttaccggaatggagggggaaacgtttgatgatgttgaacggccacagcagtacggacaaatcagcgtacccttaccgggggcggagctattcttcgcctgtcctggtggtcagcgtgatcaggccgttgttctggtggttgatgaccggcgttaccgcccatccgggctgacttccggcgacagtgggctttatcactacgaagggcaccgcattcgcctgacaaaagacggacgcatcatcatcacctgccggacgcttgagatttttgctgatgagcgcgtgagcgttgatacccctgaaacggtcttcaccggcgatgtcatcgtggaaaaaaatctgcatgtgaaaggcaatcttgcgatcgatggaaccggtatgtcaaaaggcacatttactatgtctgaagccaagattgcggggatcacctattccggacatgtgcaccatgacaacggcaaaggaagtaaaacaggaggaccggaaaatggctga

SEQ ID NO: 24598 - DNA, 261 bp, Escherichia coli
ttgtgggatcttaatctgctgacgcgcgttaccgcttcacggtttggtattgaccagcgtgatctgctgatttgccaggttgaattctccctggacgcacaaaaaggcgaaaccacgcggctgattcttgccccccgtgatggttttattgttcctgcggagcctgacagtaaaggtcggggcggaaatgatgccggtggcgtggatgcctttatccatcagcagatgaaaaaacaggggatcacctttaatgataaatga

SEQ ID NO: 24599 - DNA, 852 bp, Escherichia coli
gtgaacagtaaagtggagctgtatcttggcagccagatttttaccggctgggtgacggtcagtgtacgacgttctcttgaacatcttgcgggatcattcgagctgggccttatgctccccggtgaaccggttccggcgatcatctcgcccggtcagtcagtgacactgaaaattaacggtcagacagtcatcagcggctggctggatcaggtgaatcagagtatcagcgccacgcgttatcaaattactatcagtggccgcgataaaacaggtgatctggttgactgctctgctgttcaccagggaagtcagtggcggaaccggacgctggcccagatagccgctgatttgtgtgcgccgtttggtatcagcgttcgctggcaggttaatgatgtcacggcagagaaaccgttcgcatctttcacgcttgagaactcagaaacagtggcggatgcactcacacgagccgcacggcatcgtggggttctggtaaccagtaacgctgtgggtgaactggtttttactcaggctggaagcaagcagaccgatacgcttgtactgggtgagaatttgcttgaggccatttataacgatgaccaccgtatgcgctacagcgaataccgaatcagaggacacgggcgcggaggcggcaaatccggtgacagcgcaaaaccagccagcctgtctgcaccggtcggggtggtgaatgacgaaggtgttacccgttaccgtccgaaaattgttctcgccgatcatcacattgataccagcggagccacacagcggggattacgggaaatgcgccgggcagtggcccgttcctcccgctttaccgccgtggtgcgtacctag

SEQ ID NO: 24600 - DNA, 1416 bp, Escherichia coli
atgtccactggtgacggcaagggggcgtttcgcggtgtgccattcctggtatttcgcgaacagcgtgaacgcggtgggcgtaatatcgttcgccgggaatatccgttacaggaacggggcggtgcagatgatctggggccaaaactgccggaatacaccttcaccgtactggtgatgggagaggatgttcacacgcaacgaagccgtcttcgggatgcccttcgcgcccccgggccgggtgaacttatgcacccggaatatggcactttaaacgtgatgataaacagctttgaaagccgttacagcgccgatgaacagcgcattgttgaattcacaattaatgtgtctccggtcagtgatgaaacagcgccaacggccagccaggatacggctgcacttctggaggccagaagtggtgcagccctgaacagcatgtttggtacgctggcaagtggctggaccgtcatttccgatggtatgcatgatgtgcaggcaatggctgaaaccatcagtgacaaaattgaggcgctggaaaattccgtttccgggatggggattgtgcaggatatcagtgcctttacggccacgtttacggcgcttaaaggtaacgttaccgcattgctcacaagtccgcagcgaatggcggaatcactggcgggtatgtttgtcaccctgacggcattacccacgatccctgcgctctcccttacccggaagaataccggcagtaccgtaaccggtgcttccggggggaatggcggtacggtttacaccagaggcagtggaggcgaattgcccgcagggagtctggatgtggtgatgcagagcacccttgaacagggacttcctcagctctacagaaccttatcctccctgcgttatgcgctgacagaacaggatgatccacagcgtctgattgggcttaccccgccagctcaacaaaatatccggcttctcagggcagtgatgcagagtgcagccgtggtgtctcaggctcagacagtgggaaaattgctggatcaggtaatcagtcttgaaacagcccggacaagtaataacacgaagtcagccggtcttgtctggctggaaagtgccgcagatgttgagcgtatcaaccgtgatttgagtgatgcgcttgaattacaggtcatggatttgtctgcgctggggtatacctccacagccctgactctcagggatgcccgcctggcgttgacagaagatcttacggtcagggcggtctccctgccgggggctgtacaggtatccgtccgggcgacagaacctgcactggtaaccctgtaccgtgaaacaggaaacagcacccgctggcaacattttgtgcgtcgtaacaacatttcagacccgctttttgtgccggggggaagtactgtggaggtgatcagtgaacagtaa

SEQ ID NO: 24601 - DNA, 2067 bp, Escherichia coli
atggcaaaaaatctgaaagcctccctgatagtcgatctgctcggcaatatttccgctaaatctcgccagtggtcgcaggagctgggggcattttcccgttccggacagtcggggctgggtggtctgggtaatgcagcccgtcgtgccggtcaggaaactgatcttgttggcacccgtatgcaacgtatgcttgccggagtccgtggcagtatccgttcagtcacctctgattttgaccggcttcagggaagtattaccggtacgctgggacgtatcagcaacctttacgggatgctggccggtggtgcggctgcgtacggatttaacaaggcttttcttcgtcccgcatcagagatggagaattacattcttcgtctcaatgccatcaatcatggtgatacatccagaacagaagacgtccgtaagtgggctgtccagaatgcaaaagaaaccacgtgggggctggccggcgttatgcaggaatacgcttccagccgtggttttggtatgagtgataaggaagcacgtaactttatcaccatgcttcaggatcaggggggctatcacggctggtcccttgctgacgcgcagggcgcatcccttcagctcaaacagatgtattcccgtggtgcaattcaggcggctgatgccagtattctgacgggctacggtatcaacgtttatcagttgctggctgaaaaactgaaagttgatcagaaagtacttcgtgatctgggtggcaaaggtaagctgggaccggacagtattcgtctcctgttccaggtcatggcagaacaggcaaaaggtgcacagaaaaatgccatgaactcctggacgggcatgactgccatgatgggggatgtatgggatgactttgcccgtgacgtcatggccaaaggaccttttgacagccttaaaaacagccttaaaggctttctggattatgctgatgaggcaaagtccagcggtcttcaggaaaaactggcggcacagacagcgggtgccctgaatcagggctttgagtatgcccgtgatgcggcaactggtttttaccgggctattcagaaggtacgggaaacgcttcaggcgctgcgtgatgcagggtatggcgatacgctggacggtatcgctcgtggtgcacagacagctgcgaaatatctgctgtatatgtatctggccacccgggcactgaaactggtcagggctgttggtggaagtgcgctgcgtcttggtgcaacaccgcttcgctggggcatgtccaccgcttctgttctgacctcccccttccgcaaaccacagaccaccgttcccgaaaccataccggggcgtggcggtcggttcctgaattttctgacgggggttaaccccgcagccattcagcccgtaaatgtcatgaactggccagccggtgccatggcggggggcgtttctgatgtgatcagcggaggtgaaggaaaacgtcagcgtggacgcaccagacgcgggccggggcgcggacgcccggtgacgtcggttgttactgtaccggcaacgccgccagcctcaccccctcagggcttcttcgggcgcatgatgagccgtgccggtggcttgctttcatccgccggtaaccggctgggtatggggcgtttctccggccttttccgccgtgccggtggggttgccggtcgtttgggcggtggagccctttgggccggggcgatggccgcccctgtcctgctggacgatagtgccagtgctaccaacaagggggaggctgtcggctctcttgctggcagcattgccggtggagcgctgggagctgcggcaggacctgtcggcgtggctatcggttcaacggtgggaagttatctcggtaattatctcggcggctggctgacagaagcctggcaaaaactacggggggataccgataacagcggaggaaaagccgctgaacaggcttctgcccgtgtggagctggttgccccggatggctggagcgcaagaagtattgatatcaatgaaacctccggcagttcgctggatgtggatgtctggaacggaggtaactatgtccactggtga

SEQ ID NO: 24602 - DNA, 477 bp, Escherichia coli
atggcatcacgtaagaaaaaaacagcggtttcagacgaaggcgtcatggaggccattcgtgaagcgcttgaaggaggcgatccgcgcaccgccggtctgactgaacaactggctaatgggtatgtggatctgctggatggtctgccctgcggtgaaagccgtgaataccgtgtcacattccgggaactgaccgcgaaagacagcattgatgctgaatcagaagccgagaaagtgatggatacacgtaacggtccgatgctgattgcgtctccctctctacgggggattgcacttctgcgccgtcagattgccgctgtcggtgagattcagggaccgttatccctccgccaggttgggcagttgagtgaacgtgacctgtcccgtctgatggcggcggtcggcattctggatacagccatggccggaaagctggcggctgaccgggggcgagcaggcgcagtgtcgggcgcagattga

SEQ ID NO: 24603 - DNA, 366 bp, Escherichia coli
atgagcggaaaacagtatcaggggaccgcaaccatccgtgtgaacggtcaggagtttgccacgctggaaggcgcaaccttctcgccatccggttttgaacgtgaagccgtgaaaggcgcaaaggtctacggttaccgggagaaaccccgtgaggccacgctggaatgcaaatttccggccggtggtgaaggctcgccggcaacggatgaaatcaacagctggaacgcagtcacaattgaattcgtcgccgataccggtgaagtccatatgatgaccaaagcctggagtgtggagcccgcgtctttagatggtggtggcgatatctctgcgaagttcgccagcgcaaccagtacccgtgttcagtaa

SEQ ID NO: 24604 - DNA, 1503 bp, Escherichia coli
atgatcagttttaatcagattggggatgataaccgcatcccgcttgtacagattgaatttgataattccatggccgtcaccggcaccccggcgcaacgtcagtctgtgttgctgttcgggcaggctgccatgaaagacaccgccgtacagggttccggtcaactggacattcctgtacgtattacccgtgcatctcaggcaagagagctttgggggcgtggttccatgattgcgctgatggtggcggaattcatcgccattaatcccgacacagagttatatgccattgcccagggggcgggcactggtcagccgcaggcgtgtgtgatgaatatcattggtacggcgacggcagacggtgtgttatgcgtctatattggtggtcgccgttatctgctggctgtcggtacagggcaaaaaggtaaagcgcttgtggaagcacttgtgaaggtcattaacgccgatgttgatgcaccattcacggcttatgcagcagaagtcagtggagataatgctgaaggccttaaaggcagtatgggggtgaatgcccgttttaccggtgagtgctcagttcatgatttacgtgtgaactattacgacggtgaaaccaccccttccggccttacattgcagataacatctccaaaacagaaggccacaaacccggatatcacccgcagcgtggcggggatgggggatcgtcagtacaactacatcgtcatgccctataaggatgacgcaaacctgaaggtgatcagcgatgaactgctgaaacgctggggaccggtcaaaatgtccgatggagtcatctggatggctcacacgggcacattcggagaagtacaggcgttcggtgaaaaacgtaacgattttcttgctacctgtacggctattccaaaagcaccggaacccgattatctgtgggcagcctcggtgtgtgcgacatgcgcaccgtcattatcttcggatccggcacgtccacttcagacactggccatcacgccccgactggcacccgccgcagcggatcgtctgacccgtgaagagcgaaacagcctgctgtggagcggtatcgctacagtaaccgtcgcaaccggtgatgtggtgcaaatcgaacgtcaggtgacgatgtatcgtcagaacgcctatggagacaatgaccccagctatctggatgtggaaaccgtctacaccctttcatatctgcgttactccctgcgaacgttcatcacgcagcgttttccgcgccataagctggcggataatggcacaccggtgagcgcgggacagaatattgtaaccccggaaatcatgacgcttcagttgattgctctgggtgaggaatgggtcgatcaggggttggtcgagaacctggacacttttaaaaagaatctgctcgtggagcgtaacacatcagatcgcaaccgccttgatgtgttgtgcacaccggacctggttaaccagttccgctttatggccgcgcagatccgtttcattttgtga

SEQ ID NO: 24605 - DNA, 279 bp, Escherichia coli
atgaaaaccatctttatcaaacccgcgccgggacgcctgattcgtgatcccgacacaatgcgcccgctggcacaggagggggaggaaaaaaccttcacgccgttctggtgtcggcgtcttgatgacggcgatgtcattcagcctggaagcctgccggaaagtgaagctcccgccgtgacggaagaaaacagtgataacgacatggcgatgaatgccgacccggttatggacagtgacacggtatcctgccccgcagtctcagatgaggaaacgctctga

SEQ ID NO: 24606 - DNA, 561 bp, Escherichia coli
atgattacggaaaccgaacaggcatacatcgcccgtatccgtgagtatttcgggaatgaacttgtgtctgttgacacgcatcccggcgactggagcgacagcgtactgcgcaccatgctgattaacgctccggcgatctacgttgcctggctgggtgccggtgaaggccgtacccgtggtcgcctggtcagtcactgggtgttctacgtcatcggcgacatgctcaacgggcgtgaggccagccgtcccggactgtatcagattgtggcccggctgattgccgtgcttaacggcttcagaaccgaaaaaacctcaccgctttactttgaaaaggcggtcaacggttacaccgaaacccaggcgaacagtggtgcggtgatgtatgcgctttatttctcctgcgaggaaatgatcgcaccgctgaccgatatcagctcgctggacgacttcctgcgtcattacgaaacctttgtggagccgcccggtacgccgccgtttgaggcacatattgatttgccggggaacacgacaacggcggtcgaaccgccggaggaactgtaa

SEQ ID NO: 24607 - DNA, 420 bp, Escherichia coli
atgaattacgccactgaaagcgatatgcgggcgcgttaccgcgaggatttgctcaggccgttactggcagtgccccgttcggatgagctggacacgcgcaagctgaaccgggcgctgacagatgcgtcagcccttatcgacagctatctgtccgcccgttacacgctgccgctggaggttatcccggctgttcttgttcagcactgttgcgcgattgccttttattacctgtgcgatcagcgagcctccgatcaggcgcgtgaccgttaccgtgaagcgctggcctggctgaaagatgtcatgaacggcaatgtgccggtaggtgtggatacgaacggtgcggcccctgaatccggggatttaccacaggttcagtctgatgcagcggtattcgggcgcaaccagaagggcttcatatga

SEQ ID NO: 24608 - DNA, 402 bp, Escherichia coli
atgaatgaacatcacactgtggcagcaacagatgattcaggtcttcaggtcagtggtgacaattctgtcacggtgctggcagaagtgcgttgcagtcgttcggcgtttcgtcgtgcggggttcctgttcacgcgtggacgtcagcaggttgaggtcaccccggagcagcttgcccgactggaggcggagccatgcctcactgtgcgaatactacagacgcctgctgatgatgcggggagcgtggcgggtgtggttcatgcagtggccggtacagatttagccgaagccgaagccgaagccgaagccgaagccgaagccgaagccgaagccgaagccggacaggatgctccccggaaaaagaccggtaacaaagcgaaacaggcgaaaaaggcccgcgcatga

SEQ ID NO: 24609 - DNA, 948 bp, Escherichia coli
atgcctaccccgattacaccggcgatgatcaccgccctgatgacgggctaccgttctgattttcaggccgggatgtccatggccccgtcgcagtacaaaaaaattgcgatgaccgtgccctccacctcgaaatccaacacctacggctggctggggcagttcccgcagttccgtgagtggatcggctcccgcgtcatcgagaagatgaaggcctatggctatgccatcgtgaacaaaacctttgaaggcaccgtcgccattaaccgtgatgacttcgaagacgataacctcggtatttattccccgttgttccaggagatggggcgcgctgctgcggcacaaccggatgaactggtctttgctgctcttcgtgacgggattaatgcggcctgctatgacggccagaacttctttgataccgaacatcctgtttaccccaaagtggatggctccggggatgcgcagatggtcagcaatatgtttgtggcaaaaaccggctctgtcggtgcacaggcggattacagcggtcctgcctggtatctgctcgactgttcacgcgcaatcaaaccgctgatttatcaggatcgccgtaaggctgaactggttgcccagaccaaagtcgatgaaggtcgcgcattcaccgataacgaatttgtgttcggtgcttccgcccgtcgcaatgtgggctacggcttctggcagatggcctacatgatgcagtcaccgctgacgctggatgcactgtggcacggctggtcagccatgcgcgaatttaccgctgacggtggccgcaagctcggcatcaaacccacccatattgttgtccccacctcgctggaaaaacaggcggtgcagctgctggagcgtgaactgttcgcagacggaaacgccaccgtctctaacgagatgaagggcaagctggagctggttgtcgcggattatctgtaa

SEQ ID NO: 24610 - DNA, 1125 bp, Escherichia coli
atgaagacgaaaaacacgcccaaacttgcttatgccattctgaatgccatcagcctgtccgcagacggggacggtgactggtgtcagatcatgccagccggtcgggtaaaggcccgtgacggtcgcccggaaaaaccggctgaaggctggctgattaaccgtgcgaccgttgagcgcatggtatcccgggttgtggcgctcaatcagccggtaaaaattgactacaaccaccagaccctgattaaggggcatcaggcaccggctgccggttttgtgacggcttcaccggaaaacttccgcttcagtgaagagcgtggcttcgaggtgcgcccgaagtggaaccctccggcccttgaacatctgcgtaataacgaattcccctggttttcaccggtgattggctatgacgagaacaccggcgaacctgtcgaacttcggatgctggctattaccggtgaccccggtctgaccggcatgaatcctgtcgccgcgctgtcggcggatgacctttataacgccttaaaccctcctttaaaggatacctccatgaatgagcaattacgccagttgctgacggcgctcggtctgaccgtggctgacggtgacgaatttacgccggagctgggcacggcggcgctgtctgccctcaccgggatcaaaaaccgtgcggatgcacacgacaacctgaaaacacaggtcgccagtctgtcggcagagctggaaaccgcaaaaggcacaccggctggcggcagtattgatctgacgaaatacgtgcccgttgagacgtataacgccctgcgtaccgaatatgtcgcgctgtcggcacagcacggcagcaccacgctggagcagttgctggataaggccgagtccgaaggacgcattttcaaaagcgaacgcggatacatggaaggactcggacaacagattggcgttgcagcactttctgcgcagcttgacgcccgccagccggttgcggctctgaccggtcttcagaccgacaccgtgaccgtgccggataaaaagaccgccaccgcctcgctgtcggctgaagatatcgccgccgcccatcttctgggtaaaaccgaagccgaattcctgaaaatgaaagaggaaatgcaataa

SEQ ID NO: 24611 - DNA, 474 bp, Escherichia coli
atgtcatccattgatgccgctgtcgttgttgacgttacgcgtctccagcgggtgtttgcccggcttcagtttgtggggggcggaaaagacctggcccgcagtgtggcgtccagccttctgtcatcctcagaaatggcgtttgaacaggaaaaagagccggacggcgaacgctggcatgactggtcagatccttaccgcaagtggcgtacccgtaagggatacacgcccggcaaaatcctgacgctgaacggcgatctggcccgccgcctgaccacggattatggcgatacctgggcgctgattggatcaaatgaaccttatgcagccattcatcagtggggtggcctgcctggtatgccaccgggactggcagccattggcgcacgtccgtatatgggctttgatgaggtggctgaacaggagatcatggacgaaatcagaaaacgctttaaaaaggccacagaaacgccttaa

SEQ ID NO: 24612 - DNA, 1326 bp, Escherichia coli
atggcacaggggattgatctgggttatgccgccacgcttccctcaaaagaggcggtggcatacttccgcgccaaaggggcgcatatcagctggaactggttcgaaacagacgcggatgttcatgcccgttcattcacggcggcaaaagtggcacgcctggacgtactgaccacactacaggcggaagtgcagcgtgctgttgatgaggggatttcacagaaagcatttattcgcacgctgacaccccgcctgcaaaagctgggatggtggggaaaacagattgtggtggacagtgccggtaacgcggaagaagtgcagctgggcagtccccgccgtctggcgctgatttacaacgtgaacacccgtgtggcttacaatgccgggcgttacacgcagatgatgaacaacacggacacgcatccgttctggcagtatgtggcggtgatggacagccgcacccgcccggcacattccgcctttaacgggctggtattccgctatgacgatccgttctggaatacacactacccgcccaatggctggaactgccgctgccgtgtccggccattatctcaggcccgtctggatgcaatggggttatccgtttcatccggtcaggatcatctctccacccgcaatgttgaggctggcgtggataagcagaccggagaagtcagagaaatgccggtgaccacatattcagatggcaccagaaccatgacaccggatgtgggctggtcatataaccccggttcggcggcgttcggcacagaccaggcgctgatccgtaaactgatcgaggtgaaaagcccggcgttacgggaaatggtggttcaggagatgaacaacagcccggagcggcagctggcgttccgcatctgggcaaaaaacatcatgaagacccggcgaggtggtcacgatatccgcacgctgggctttatgaccgaaagtattgcgcaggcggtggaaagccggacgggaacgccaccggcccgcctgctggcgatgagcggtaaaaatgtgctccatgcggacagcgtgaaacatcagaatgacggcattgccctgacgccggaggatttcgggcgattaccggcaatgctggccgcgcctgatgccgtgctgtgggatcatgtccatcagaatctgctttacatcactgaaacccgtgacggaacggcaaagattgccgtcaatgcgccttatagtgtgaaacgtcagccggataagctggatgtggtgattaatgcctacagagtcaaaaaggaggcattacttgatgatctgcgcggtggaaagctggaattactggagggtgaattgtag

SEQ ID NO: 24613 - DNA, 1590 bp, Escherichia coli
gtgggacgcataattgatcttgacggaaaacctttctcctttgacccggagatgcagagtgccgtgctggatattccgcagattgccagccgttatattgaacatccggcctcgggtatcaccccgaaccgggcggcgcagtgccttcgcggggctgaacatggcgatctgattgcccagtccgatctggcggctgacattgaagaaaaggacacccacctttttgcagagctgggcaagcgacgtcttgccattcagggcgtgccctggagtattgagccgccaccgaacgccagcgcgaatgagaaaaaggacgcggaaatgctcgacgaatatctgcattccgccgactggtttgatgccatgctgtttgatgctaccgatgccatcctgaagggctattcctgtatggagattgagcacgggatgctcggtaaaatgcacatcatccgcgccatccgctggcgtgacagcgggcatttctgccttaacccggatgatttgagcgaactgcggctgcgtgacggcagccatgccggggtggcgtttcagccctttggctggatagtgcatcagtcacgttcacgcaccggttacggcggcgcaacggggcttgtcagaacgcttatctggccgttcattttcaaaaactattccgtgcgcgatctggctgaatttctggaagtgtacggcctgccgatgaaggtcggtaaatacccgtccggggcaacaccggagcagaaaagcgccctgatgcgggcggtgatggatatcgggcgacgtacaggcgggatcatcccggccgggatgtcgctggagtttcaggcggcagcgaacggtcaggccgatccgtttgaaaccatgatttcgtggggggagcgttccatctccaaagctatcctcggcggcacgctgaccacggaagccggagacaaaggcgcgcgctcgctgggtgaagtgcataacgaggtgcgccgggaaatcagggattctgatttacgtcagctggctgccacgctgaaccgcgatctggtgtatccgctgtacgccctgaacaccacgcacactattgatatccgccgtctgccacgtatctgcttccagacaaaagaaccgggggatatcaccaaaatcaccagtgcggtgatgcagctcagtacggggatggatatttctgatccctggatacgtgagcagacgggtattccgcagcccacgcccggcgaagccatcttccgtgtccgtcagagtggcaatgaaccggctcagactgacagggaaataccaccggaaacacaggaaaagacagagcagacggcgctgtcagcccgagtgccggaagcgaaaagcagcccccgtgatgaactggacgacatgggggatgcggtgcctgcccgccggttacaggaggccatcgacccgctactggagccggtcattgatgccatcagaacgcgggggctggcggatgcgctggcagacctgcccgccctttaccgtgaaatggatgattcccgcctgatgacgctgctcagtgatgccatgtttgctgcggaaatgaaggggatgctggatggcacaggggattga

SEQ ID NO: 24614 - DNA, 1665 bp, Escherichia coli
atgaataacgccgaagaactctcccccttactgacgaataccgtctccacccgcaaaattgatctggccggtgaaaaagccctgctgggcgtggatgtgccggacagccttgatttgcccggtgatatgccggtatttctggattatcaggcccgctggtttgaggatgaaagcgaggtctgcatcgcggaaaaatcccgccgtaccgggcttacctgggcggaagccgggcgtaacgtcattaccgctgcaaaaccgaagcggcgcggtggccgcaatgtgttttatgtggggtcaaagcaggagatggcgctggaatatatttctgcctgcgccctgttctcccgtgcctttaaccagctggcagatgctgatgtgtatgagcagaccttctgggatcgggataaaaaagaagaaattctgacctacatgatccgctttccgaacagtggattcaaaattcaggcactgtcttcccgtccgtcaaacctgcgcggccttcagggggatgtggtgattgatgaagccgcgttccacgagtcactggatgagcttctcaaggcggcaatggcgcttaccatgtggggcgcgcgcgtgcgtattatctccacgcataacggcgtcgataatctgtttaatcagtacattcaggaagcccgcgagggacgcaaggattacagcgtccaccgcataaccctggatgatgccattgcggacgggctgtaccgtcgtatctgttatgtcaccggccgcgaatggtcaccggaaagcgagcagaagtggcgtgatgatctctacaaaaacgccccgacccgtgaggatgccgacgaggaatacggctgtatcccgaaaaaatccggcggtgcctatattcctcacgcgcttattgaaatggcgatgatccgcgacatcccgattctgacgtttgaagccccggacgacttcatcagccgtgctgcatggctgcgtgaatcggaggttttaacctggtgtgaagaacatttaaaaccgcttttagagaaattaaatccccgttcccgcttcagcttcggggaagactttgcccgcaccggtgacctgtcctgctttgtgctgctggaaatcaccgaatccctggcaaaacgcgaggtgtttcgcgtggagctgcgtaacctgccgtatgcccagcaggagcaggtgatgatgtacatcctgacccgcgttccggcactgactggcgcggcgttcgatgccaccggtaacggcggctatctggccgaagccgcgctgctggcctttggcccggacatcatcgactgcgtgatgttatcgccgaagtggtacggcgagtggatgccaaaactgaaggccgagtttgaagatcagaatatcctcgtcgcccgtcatcagaccacgcttgatgatttgcgccatgtgaaggtggtgaacggtatcccgcaaatcgacaaggggcgtacgaaggaccagaacgcaacggctgtgaacgcccgccgccatggtgattttgccgtggcgctctgtatggcaaaccgggcgtcatacatggagggcttcatcctggatgaatcagcctgtcaggcgctgccggagcggtcgcgggccatggagggcggttatcgtgatgacgatgaggcatatcataaatttgatcgggggtgctggtag

SEQ ID NO: 24615 - DNA, 582 bp, Escherichia coli
atggacaagccgacgcgtggccgcgtgcgcaaggtggatttgctccccgacagcatccgtaagccgctgctggaaatgctgcgtgaaaaacgtctgacgcaggtccagatccgcgaggaaatcaaccgtctgatccgcgaggcaggcctgccggaagagcagcagctttcaccggcggccatcagccgggaagcctcccgtaatgagctgattgcccgtaacctgcgtgatttacgcgagcagacaaaagccatgatggccgaactgggggacaagccgaccggtgaaaccactgcactgattctggaaatgtcccgcgccctgatgtaccgccgcctgcgtgccgcgaccgaatccctgaacagcgacagcgacgtggatatgcgcctcatcaaagatatcctcctgtcagcacagcgtgcggaaagtgccgccgagcgcagcattaagcgtgaaaaagaaatccgggccgcatttgctgaagagatggcaaacgcggtcaccgacgaactgcgcggcgtggacgggatgagtgaacagcttgagtcccgtattaaggggattctgttgggtaaagtctga

SEQ ID NO: 24616 - DNA, 291 bp, Escherichia coli
atgagtgatttcattactgaagatcagcgtctggtcattctgcggtcgctggcagattacaacggtgaactgggtgaatccgtgctccaggactgtctggatgattacggtcaccgcgtgtcccgcgacaccgttcacacccacattgcctggcttgccgaacagggactggtgcgcaaacgcgttctgattaacggttatttcatcgcagagctgaccggccgggggcaggatgtggcggaaggccgcgccagtgttccgggtgtgaagaaaccacgcgcaagggggtaa

SEQ ID NO: 24617 - DNA, 309 bp, Escherichia coli
atgtgggtcagcatcgttaaagattatgttgtgccgatcctttcggcgacggcaaccgctggcgggatattcatggcgctgatgcgcaaaacgtttgtcccccgcgaggcctttgaaaaactctccgaccgcgttgagaaggtggaaacccgcctgtcgtcactgccgacagaagccgaggtcaaccgtctgaatgtggaaatcgtgaccctgcggggtgaactgaaaaccacgaacgccacgctccgctctgtctcctatcagaacgaactgctgctggagcaggctgtaaggaaaaaaacgcaatga

SEQ ID NO: 24618 - DNA, 228 bp, Escherichia coli
atggatgattcagatcgtgctcaggctgtgatggagcggggatcagaacgcgccctttgtaaccggctgacacgtaagtgccgggcaatggatgctccgggcagacgtgtctgcgcagactgtggcggagagatccccgccgcacgtcttgttgctgtgccggatgccatccgttgtgtgaactgccagaacatcatggaggcccgtcatgtgggtcagcatcgttaa

SEQ ID NO: 24619 - DNA, 501 bp, Escherichia coli
atgaatggttatgtcgctacgatttgccgaaagtctgaaccgcttctggcgaccgctcatgatagcgctgctgtgtgcggtactgctgttacggggtgtcctgtggctgcggtgaataatgccttaccggccctgattgccggggcgtgcatggcggcgctggggattatcgctgtactggttgccgcgatatggggaatgcaccagaagacgcagcgccttgaggacaataatcaggtgcttgtgcgtgagcgggatgaagcgcgtcaggtgctggcaaatcagcagcacaccctgcacctcatttcacaaatcagtgaggcggccacgaatgaaaaacaacagaacattcagtacagcgaggggcagcagagcgttgtccgccggtcgctggcagcagtgcctgcggcctctgcccctgttcctgatgatgtggctgatcgggtgcgccgggccgtctgtgaaatacgtgcctgtgaagccggtgccgatccccgctga

SEQ ID NO: 24620 - DNA, 501 bp, Escherichia coli
atgccaaaactccccgcaccactgcgtaaaaagctgattgcccttgttctggccggtgccgggacgttcaccattaccacgcattacaccggttactgggaagggaaagaaaactccacgtatatcgatcccaccggtacacccaccatctgctacggccataccggcccggatgtgaaaccgggtatgaccctgacggatgaagaatgcctggaactactggaaaaggacatgaaatgggcctttgcggccattgatcggcgtgttcaggtgccgcttacccgtggtcagacggtggcgctggcttcgtggatcttctgggccggtgaaacgaacttccgcaactccacgcttttgcgccttatcaatgccgggcagatgcccgcgtcctgtaagcagtatatccgctggatttattcaaagggggtgaagctccccggccttgaggcccgccgttcggcggatgaatggttatgtcgctacgatttgccgaaagtctga

SEQ ID NO: 24621 - DNA, 426 bp, Escherichia coli
atggcagaaactcagatgagcatgtttggtggtgacagtgagcaactgcacgcccttatcgaccgccttgatgacatccctgatgatgttctcaaaaagaactggccgcggaccctgtcagaactggttgaagtcaccggcgcagaacttcagcgtcaggggattgagccggtactggccggtaaactggcacgcaaggtggctgcggctcaggccgcctatatgggcggacggggttattacctgccggtcggggaatctctctttgccgagctgcgaaacaatgagatattttcgcgctgggatcggggcgagaaaattgaatcccttcgccgccattaccggatgtcagaaacccagatttataccgtcatacgcgaacagcgccgtctgcatctggcaagaacgcaaccgccacttttctga

SEQ ID NO: 24622 - DNA, 513 bp, Escherichia coli
atgaatcgcgcttccctgattaccttaatacatgtcgcaaaacgcgatctacagcttgaccatgagacttatacatccgcgctgctggcagccaccggcaaaaccagctgccgggatatgtcaccggatgagttatcccgcgtgctggatgttttcaaaaaacgcggttttaaagtgcgtcagaacccggttaaccgggccttaaaaccgggtacggtgaccgctaaaattcgtgccatctggaaggtgatgcaccggcagggctttatctctgatggtgcggaaaccgctcttaaccgctgggtgaaatcgcagacggccgcgcagaacggcggcgaaggtgtggcaaactggcagtggctggagcaacaccccgccctggcctcagatgtgctggagcgtctcaagcgatggcaccgccgcaaaatgctggccgcgatgggaatgcccgaacgcacgctgatggggtatgacgctgtttgcaggcagtatgaaaaatcacttccccgttaa

SEQ ID NO: 24623 - DNA, 261 bp, Escherichia coli
atgaataaagaaaaacaaccctatgatgttgcagcctatgttattgcttcaaaactactgagccttctggttgataaaggcattgtaaccccgtctgaaggaacaaatatctgcgcttgcgcaaaagagctattacccagcgcatctgccatgcgggcaacctccttgcatggaatgcaactggagcaactccttcaggatgttattgattcctttccgtcacaggatcaagaaggagattccgaacgtcaaacgccttaa

SEQ ID NO: 24624 - DNA, 318 bp, Escherichia coli
atggaaaaagaaatcaaatttgagcctaaagatattgacgaagaattggcaaaagcaggaatgctggagagaatgcgggttattgtggaaatggcaattgagcagggtttaaccgtcacggaaactcaattcattattaataatgaaatcgcgatgattgaggatgaaattgtgttgtttaacaaaaaagcccgcaacgaatttattcgacgcaggcttgacattgatgattcagatcttattacacgggatcatgagattaaggcgtttgacgttcggaatctccttcttgatcctgtgacggaaaggaatcaataa

SEQ ID NO: 24625 - DNA, 333 bp, Escherichia coli
atgataacgaccttatttgttgaatcagatgaacctcttgtgtgtgccgccggaatgccgctctgtggcggaacgctgaccggtgtttatttcggggatttacgaggttatccctggcattcactgaatgatgctttcccacctgatatggaggctgtcgtgctgattgttcagtatggtcaccgtcaggagttgcgcatcggccatatggggtatgaaggcttttttgttgatgaagaaaccggagcctgccttgaagatgaagacggacaggtgacgcactggtgtcatatttcagctttaccggagttacaggagacgcccaatggatga

SEQ ID NO: 24626 - DNA, 549 bp, Escherichia coli
atgaaattacaacccatgggacgaaaaggtcgggcacccgctcatgtccgcgcatggacacctgaagaagatgcgctgctgattgcgctttattcgtccaccccggttaaggatattgctgtcagagtaaaaagaagttactggggagtatataaccggattattttattacgcggtatttacccgcagttgctcaaatgcaaacgtcccagatttaaacctgatgaagataaatttatccgaaaaaatgccaggacgatgaccggtaagcaaataggagaatatctggggcgagaccgggattctgtccacaatcgggcgcgatatattggcgcaagcatgaagaaatacggagaattgctgcccttcacccgtatacctgacgatgatgttcatcttattcgtgaattacgggatgcagagtcgccacgacgccttaccttccgggaaataggcgagaaatttgaattatccgagggcacggtgagttttatttatcaccgtcgtcggactgccggggacgctgtattacaggagttaacgccatga

SEQ ID NO: 24627 - DNA, 516 bp, Escherichia coli
atgttctttaaaacatcaaaccctgccgcgctggctgcgtggcaaaaataccagcaggactacaagaaagttaaggatgaggcaaaacgtcttgaggccgtgctgaatgttgcgtgccggtcggtatttgtatccggtatcaatggtttttattttaagggactgcgttttacggatgacaaatatccttttcatcgagacttatggcgaaaaccgactgcgtcgaatggctggagctgcacgccgcgcacatcgtgtattcccaaagccctgcgctctgcctctgacgaacttaacagtctgtggcgtgaatattcgcccgtcacgtatgccagaaccgatgcgctgttgttctggctgggcattgacttctcagcaatattgcatggtcccgtgaagtggttctgcgttgacgatgtgatttaccttgagtgtggcgtaaaacccgcaaaacagaaaatgaccgaaattctgtctgatgagttttatgctgctgaaaagcgagtcagggggtga

SEQ ID NO: 24628 - DNA, 534 bp, Escherichia coli
atgattgatgcaaaagtgcttgaaggggttaaaagctggctgcgtttttctggccgtctgaccagtcgttctctggcagaaaaaatgaatatgccgctatcctccatggtttattttctgcgtgatgcggtcgatgccggtgtgctgacggaccgtaacggtttttatgatattccgcgtccccgcccggtgcagccggttcgtcacaaatgcagccgggaatctgcggctgatgatgttcagtggtgcagcttcagaaaatccctgcaatggattgaggggcatgatattccgtcgatggcgtgggaatttgctcagggcgttctgacctgtgaaaccgtttatgtggtggcagaagttgatgagcaggccatgaaagaaggcgtgccccagtttgtgatggcgtatatcgacattcgcctgggtgtcattatctgcggtttaagcggctggaatatcaccgcgcgtgttctgcgttacctgattgttgaccggacggccgcgcctgccgggatatctgcggaggtggcgtaa

SEQ ID NO: 24629 - DNA, 579 bp, Escherichia coli
atgagtattaaatatcgttattttaaaatgaatgagagcgattcccgtcattatcacagggaatggcttgattgtgttggcagggagcgccagaaattgattgatgattttctcagtaatcagaatgccagagggtattgttgttcctggtattgtggggatttttttgtcaaatcaatactggtgcatgaggatgttgatgtcggaagaaataaacgggtgttgtctgataaatttgatgaagatggccgtactttattttcagttaagcccgaccgcagattcagagagggaaaaaaactgaacaaagcactgaatatcttaaacgagaagttaaaacagcttccgtcattcagtacctggatggttaataaactggactgctattttgaggtttttggtgtcagcaacggccgcacagttatggcgtgctcttctgccgggttctatggcgacaaaggggctgttgtggttcgtattcctgtcggtgaatcagataatgccttttcacctgaaaagctgcatccgtcattgatggcaatcaagcattccgaattcatcgcaataacggaggaataa

SEQ ID NO: 24630 - DNA, 531 bp, Escherichia coli
atggttaaacgtgttacaaaattaaaggccgcagccgaggctgcaccgcagacccgcgaagaagtcagccgcgatatccgcaccctgggcgatattcagcgagaggcgctgcgcctggaaacggcaatgaatgatgaagtggcagaaatcaccgcccgttatacgccgcagattgaaaaccttaaaaaagaaatcaaagtgctttttaaagggattcatgactggtgtaaaaccaaccgcaatgagctgacgaacggcggcgaaaccaaaactgccaatctgaccaccggaacggtgtcatggcggctgggaaatccatcatgcagcgtcagtcgtgatgtggaaggtgtgattgaaatgctgcgtcgtatggggcttgagcgcttcatccgcacgaaagaggaagtgaataagcaagctgtcctggcagagccggatgcggtgaaaggggttgcgggtattaaggtgaataaaggcgctgaaagttttcatgtcgagccttttgaacaggacgccggactgaataaataa

SEQ ID NO: 24631 - DNA, 294 bp, Escherichia coli
atgagcaaagtacgcgttatttttgaatttgagcatgtttcgcatgacgaaaaaccggcaggcaatgacagtgttgaagtgcatgaaaagattggagtggatgtgaaaacagaacgtgatacggataacaggccgacgtcactctgtgacgtttatgcaagcattctccagtatcacagtcctgtaattattcagtttctctcagcggaatttcaggcatctgtacaggcttttggggcggatgccatcattaaacgccaccgtgtgcataaagcatcaggcacactgcaataa

SEQ ID NO: 24632 - DNA, 351 bp, Escherichia coli
atgaagttacttcatggttcggctctgtcatcaggtcagacgccgggtcagttatccaaacagaacgaggaccagagggtgagtaaagtcgtacgcattattttcgaatacaaggagcacgttatccataaaaacgcggatggaacagtgcgcatgggggtaagtctggacatacgttcaaccgggataaagcagaaaggtgatggacctgccatgatttttggggtggttatgctcgcggaaagcagagactttgctgaacttgtggcaatgaaagccagtgcgctcatgaaagatatgaacatgagttccggggttattaaaggtaatgaatttaatcagcaggggtaa

SEQ ID NO: 24633 - DNA, 231 bp, Escherichia coli
atgaatttgtttgattcactgaataacgcccgtcgcctgaccgagcttgccggtgcggtactggaacgcagtaagcgctatccgcaacgttttgcactgaaaaccacgccgccggtaggcgaggttcaggggagtggtgaagaaattgaaatcaccgttaagaccaacggcctgcgccgccgtgtgaaggccacccgcataagcggatgcacggtttactgggaagtatga

SEQ ID NO: 24634 - DNA, 414 bp, Escherichia coli
atgcagatacagcaggaaatcaatgttctccacagctttcgtgagtttaacaacaatgactgtgaggttcgtgattatatctatgaattgatgaacggtgacggtgtgtgttttctgtttatcgacctgtatcaatggtatgcagaccagcagtgtgaatctgtccggcagcgttttgattatgagtgctttgatgtggacgtatgggaaggcctgcgttttggttttctgatcccgggagattatcgccgggagtggcgacatagttactccattcttcgggcaatcatgcgtggcgaaacccgaaaaatgccggggatgggtaaggttaatcgcggcctcctgttagagatagcagcagcgcacatgaatccattactgatacaaccggagtttacttatgaatttgtttga

SEQ ID NO: 24635 - DNA, 222 bp, Escherichia coli
atggctgtatttaatattcctgatatttacggacgcttttacctggttaatttcgataacgtcaaagcagtctccatgtctgacagtgaagaatgtgacgatttactctttgaatttaatgatcgcacccgaatggcaatatcggcaggacttgatcgtgaaggtgcgaaagaagcttacagcaatatttgtcgctttatcggtgcaagacgggttagttaa

SEQ ID NO: 24636 - DNA, 933 bp, Escherichia coli
atgaccgatattaacgatgtaatcaagaccattgatgaactcattgatggcggcgtactgacgcagtatgtcatcgccagagaggcgggaatttccgacggtacattatcggctttccgcaaggggaaatataaaggagacaatgatgctatcgcggcgactatgcgctcctggtacaaagactggaaaaagcggccttctctgccggagccgccgcagtttgtggaaacacagacagtccaggagctgcgcgcactgtttcaggcggttcgcctgatgggctgtattaacgtcattgtgggcgtaccgggtgtgggtaaaacggccactgcccgtaattactgccaggagcaaccaaacacctggatgatcaccctgtcacccgcgcactccagcgtcacggagtgtctgctggagctggccgatgcgctggggattgattacacccgcgcgaacaaaggggcattatcccgcgccatccgccgtcgcctgatgggaacgcgtggactggtgattgtggatgaggcggatcatcttggtattgacggtctggagcaactccgggcaattcaggacgccacggggatcgggatggtgcttattggtaacccgcgcggattgtttaaaggtggacgccgcgcctttgatgatttatcgcgcctgttcagccgtcttgcccgtacaaaacaacttcgcaaggccaaaaaggcggatgtgctggccattgccagggcatggggaatcagtggtgaggccgagctggccgtcatgcaggctatcgctgaaaagccgggagcgttacgcgttctgacacatacgcttaaccaggcgtggctcaccgccagcggtgaaggcgcagcgctgacagaaaaacatattaatgcggcctttaaagaggtttataccaaccctgaattactctcgcaggtgtga

SEQ ID NO: 24637 - DNA, 2091 bp, Escherichia coli
atgtatgtcattgcaaaagaactgattggcgcgcccggaatgcctgctacaacaaaaggtattcgccaggcattacaacgttacgtacaagggaaaagctgttgttcccgtcgtcgctcaggctctaaagcaactgaatacagcatcgactgtttacctgaagtgacgcagcaggcattacgtgaacgctacgccctgcaactgatgactcaaaaagtcgatgaatcaccggttccggtggtgacaaaggccagactctcacctgacgtggttgatgcggtggaggcatatcgcggttcaccacaactgatggtcgaacgcctcaatgccctgactgaaaaacagcgccaggtggcagaggcacgaatcgcgattgtcagcgaggtgctgaaattcgcgcaacaacccggtttcagctgcgctagagccatccgttttatcgttgaccgcctgtcacgctcacaactggacgagcgcatagtggcaatggttgagacggcgaacgccaaaaagggaaacagccgcgtgttgagtgaaatcacgctgaaacgctggattgcggcctttaacaaggcacagaacgccgctgaacgcctgcttttactggcaccgggtaaacgtcaggaaataaaagccgaagatattaactggctgcccgaatttctggcgcagtatcgccagtcaaacggccgaccaatgaccgaggcttacgaggattttgttgctgaatggcagcaccggcacgctgatgagccttatatgctcgatatcatgccgtcttatgacaccattcgccgcgcaatgaagaaactgccggaagtggtgaaacaaaaaggccgggtgaccggcagtgaataccgccagcttgagggattcacgcgccgcgactggtccagaatgccggtgaactatgtctggattggtgacggtcacggcatgaagctgaaatgcaggcacccggttcacgggcggccatttgcaccggaagtaacctttgttatcgatggcggtacacgctttgtggtgggctggagccttgacctggctgaaaatgttttcgccgtagccggtgccatacagcacggtattcgacatcacggcaaaccgtttctgtattactcggataatggctccggggaaaccgccgacatcctggataaggagattgtggggatactaccgcgactggggattaatcacccgaccgggattgccggtaatccgcagggacggggcattatcgaacggcttaaccgcacattaccgatgcgcatagcccgtaaataccgcacctatttcgggaaaggtgcagatcgcgagacgttacgcaaaaccaaccgcgatttacgctcggcattcactgccctgcaacagggcaagcggctgaacgcccggcagcagtcagcgatgcgtgatttaccgtcctggtctgaactgattgatgccattcgtgacggcgttgagtggtacaacaaccggccgcacgatgaattacccatgaagccgaacggtaaacattacagcccggcggagttcagaaaaaaacgcctggcagaagaggacacggaaattgaatggctgtccgatgtggaattgcgggacatgttccggccgatggtggaacgccctgtaagacgctgtgaaatacgctggctgaataatatttactacgcgcccgagctgcgtgatgaacatggccgcaaagtgcttatcagctatgacattcatgatgccgaacgaattaccgtgcgtcgccaggatggcagcgtgatttgcgaggcggtatgggacggcaataaacgcgaagccttcccggtcagcgcggaatactacaaacagcagcagcgccttaaaggtatgcgtaaacgcgcagaggaaaaaatccgtgatgccgaggatgaggttgtcaacgtgctggagcacaagccgcaggagccatggctggaaaacatataccgcccggtaggtaatacggtggccgttcagcgacctgccgttgatgatgaacctgatgaagaatacgagcgtaatttccagcggggattgcaactgctcgaagcgaaattaaaagaaagtgatccgctggcctga

SEQ ID NO: 24638 - DNA, 585 bp, Escherichia coli
atgaacatgaaaaacagttcttttctcgacgaaggaaaagaaccagtgatcgaacggatttttcgtcttgcagagcgttacaaatcgagaagtgaggcggctagagcatgggggataaacgttcagacattgcagaactactacaaaaggagaaacaatcagccgccaccacaaccaagaaagcaccatctccagaacattgcagaaagagaacatgtatctatggagtggctagtccatggttatggtgatgagccaagcatgaaaaaagaaccaattgaacaaacaaaaagaacaaaaaaacaaaaaattgatgatagtgattccatcatcatgagggcgtgggactcgctaacttcatctgaacaagagattttgtccaacttattgatcagaaaaggggccgaactactaaccgttttgcttgatacagatattcaaaaactgcactcattgagcggagtcaaaagagcactagcattgagtctacaagagttacccgatgatactgtaagagagatttatgaagaatgtgaagctaaggttaatcatttaaatgtaacccagaaaaaggctagtgcgtaa

SEQ ID NO: 24639 - DNA, 258 bp, Escherichia coli
atggtaactaatccgcaaattccattaattggtttatatgtatctaaagttaatccatctaatcgtatagttgttactaatgttcatattgtcaaggacgatgacgatgagcccggagatcttcctttctatttggttacttttgtaaatgagggggatgaggatgatatgtcggctccttcttgggagcttgatcccgatgaatgggagcagttagttgatgaaaagctctttatgcgggttgagcaaccatcttaa

SEQ ID NO: 24640 - DNA, 645 bp, Escherichia coli
atgacggtcaactcaaacggttcagataatcgtattgctgggcgagattaccaagaaaagaatattcagatagggcgatatgatggctctcataccgtcaatatcgcaattccttcgagcaataacagtgatccacgccccttacttaaggggcaacggaaggcattaaatagattagttgctgctattgtagatgccagcaataccgaggcgtttattatttggcaaaaattgcatgcagagattggtgtagacagtattgatgatataacaatgaatcaatataagaccgcagagagctttctgtgtgcgatgcttgaacgatgtaaagatcatgatgcgcgtaaggcgcttgtaagtattttacttcgtaatagtgaagatgaagtgcttcgtcaaaaacttatccgctattgccatatcaatttcggaacgggtcgcttaaacgatcttactcgttctcagcttcagatggctctttcctggttagaccaacaatcagtggaaggagaaaagaaattaactgccaacaattctgccggtagtcaattacagatgaattttcagcaaataattagaaaatacccgaaagaaacaggaatgtgtttcgttgttggtgttttattaggcagtgttcttttctga

SEQ ID NO: 24641 - DNA, 138 bp, Escherichia coli
atgcgtgccatgttagaggatgagcgctgttctttagttgccatttcatcaatgacggctcgctcttctgctgacaatcgaagtgccagtcgcggtcctgtagctgtgttacgcggaatccgtgatctggtgtcgtga

SEQ ID NO: 24642 - DNA, 261 bp, Escherichia coli
atggcgcgcttcgcctggcaggtggcgtgcaaaacatttggtgaagatcgggctgagtttggcatcaaacccctgatgggcagtgaagatttctctttcatgctggaagcccaacccaaaggcggtttcctgttattcggtaatggcgatgtcggggaaggttcctgcatggtgcataaccccggttacgactttaacgatgcaagcctggtcccggcaagcagctactggggcgcactggttgaagcttggctgcaataa

SEQ ID NO: 24643 - DNA, 660 bp, Escherichia coli
atgaaaaagatacctttaggcacaacggatataacgctttcgcgaatggggttggggacatgggccattggcggcggtcctgcatggaatggcgatctcgatcgacaaatatgcattgatacgattcttgaagcccatcgttgcggcattaacctgattgatactgcgccaggatataactttggcaatagtgaagttatcgttggtcaggcgttaaaaaaactgccccgtgaacaggttgtagtagaaaccaaatgcggcattgtctgggaacgaaaagggagtttattcaacaaagttggcgatcggcagttgtataaaaacctttctccggaatctatccgcgaagaggtagaagccagcttgcaacgtctgggtattgattacatcgatatctacatgacgcactggcagtcggtgccgccattttttacgccgatagctgaaactgtcgcagtgcttaatgcgttaaaggccgaagggaaaattcgcgctataggcgctgctaacgtcgatgctgaccatatccgcgagtatctgcaacatggtgaactggatattattcaggcgaatacagtatcctcgaccgggcaatggaaaacgaactgctgccgctatgtcgtgataatggcattgtggtacaggtctactctccgctag

SEQ ID NO: 24644 - DNA, 138 bp, Escherichia coli
atgacttactcaggcaaatatttaccggattttttccggttatcctctatgaagctggtggggtgtggtcattttagccataccctcgatcaccataatgatgatccagatgtgcacctttcccccccaacggggtaa

SEQ ID NO: 24645 - DNA, 345 bp, Escherichia coli
atgtccggcagtgcttttgccgttacgcaccacgccttcagtagcggagcaggaaggacatctgatggaaatggaagccacgcaagcaccttaaaatcaccatcatacactaaatcagtaagttggcagcattaccaaaaacctgagtcattaaaagcagtattcccttctctggataacttcaaatatctggataagcattatgttttcaatgtcggaggcaatgaattacgtgttgtagcaatggtcttttttgaatcgcaaaagtgctacatacgtgaagttatgacgcataaagaatacgatttctttaccgccgttcatcgtactaaggggaaaaaatga

SEQ ID NO: 24646 - DNA, 573 bp, Escherichia coli
gtgctggggatccacggacctaatacaacgtcggcaattcgagaaaccgttttttctgaggctaatctggagaatctctcctgggccgctcaacacggcactacctggggcgcgccatatccgattacctggacttctattaatgatgcattcgccaactgcggcggttcaggtatgacgttggggttattgttggctatttttatcgcttctaagcgtgcggaataccgtgatctggcaaaaatgtcatttattcccggtattttcaatatcaatgaaccgataatgttcggccttcctattgtacttaaccccatcatgatggtgccgtttattatggttcccattgttaactgtgccattggttacttctttgtttcgatggaaattattccaccggttgcttatgtcgtgccctggactacgcccggacctttaattgctttcctcggaaccgggggaaactggctggcattactggttggttttttatgtttaggtgtggcgacaatgatctatttaccttttgttatcgccgccaacaaagtcaataacatggcaactaacggataa

SEQ ID NO: 24647 - DNA, 750 bp, Escherichia coli
atgggattaatggcatcattcgaacgtggaatggaacgttttcttgttccagttgctatcaagttaaactcacaaaaacatgttgcagcggtgagagatggattcgtttttacgtttccaattatcatggcaagctcattaattatattaattaactttgccatattatcgcccgacggttttattgccggattactgcatctgaacagcattttccccaaccttgaaaaagcacaagctatttttactccggtaatgaatggttctgtaaatatcatgtcaattatgattgctttcctggtcgccaggaatgtggcgattagctatgagcaagatgatcttttatgcggattaacggcaataggagcattttttattgtttataccccataccagatgatagatgggcaggcattcctgacgaccaaatatctcggcgcgcaggggttgtttgttgctgttatcgttgcattgatcaccagtgaaatattttatcgcttagctcgaaaccccaaaatcaccataacgatgccggcagctgtacctcctgcggtagcgcgttcatttaaagttttattgccaatattttttgtcatggtgttcttttccgcacttaattattgcctgacattgatatccccggcaggattaaatgatctcatttacacattaatccagacgccgctcaaacatatgggaacgaatatctttgcggtaattatcctgggggctgtgggtaatttcctctga

SEQ ID NO: 24648 - DNA, 165 bp, Escherichia coli
atgactgctactattgatacgaagaatgaagacattgccgagatgcccgatctggcttcaaccgtgacgtccatgcctgcttataccagtaaggctttagttatcgataccagtccgatagaaaaagaaattagcaacattatttcgcataatggacaactttaa

SEQ ID NO: 24649 - DNA, 1170 bp, Escherichia coli
ttggcactgagcgacaccaaactacgaggcctctacggaaaaccctactctggccctgctgaaatcaccgatggtgacgggttaagtgtgcggattactccagcaggaactatcacgtttcagtaccgttatcgctggaatggtaagccagtacgtcttactgtcgggcgctatccgtctacttcactgaaggacgcgcgtgttatcgtcggtgagatgcgcgcattgtacatgaagggagttaaccctaaaaattattttgcgcccagtgacggcgaactgacattaaaagaatgcctggatcagtggtgggataagtatgttactgatctgaaacccaatacacagacgctttacagatccgtcgtgtacaacactatgtacacacagtttgaaggctcgccagttgccagtattccagtatcggcatgggctcgtttctttgacaaacaagaaagcctcaacaagaaaaaggctcgtgttttgttgttacaactgcgttcagttattaactggtgtatcagccgccagttaatcccatcatgcgaattactcaagcttagtgttaagaatattgggaaaaaaccagatgtagggagtcgtgtacttacctatacggaactggcaaaaatttggctggcgctggagaactcaaaagtagttacttccaacaaggtgttacatcaattgctattgctatggggggccagactttctgagctacgtctcgcgacagccagtgagttcaacatggaagatctggtctggacaaccccaaaagagcattcaaaaatggggaatattatccggcgtccggtattcactcaggttaaaccttatatcgagagattgcttaatgcgggttttgatgtgctattccccgggcaggaaatagataaacctattgatcgttcgtcggctaatttgtacatgaaaaagttaagggagaaaattgatattcctgaatggagaacgcatgattttaggcgttctctggtaacgaatttatctggggaaggaattatgccccacgtcactgaaaaaatgctggggcatgaacttgggggagttatggccgtgtataataaacacgactggttgtcggaacagaaagatgcgtatgagttgtatgctgataaaattttctggcacgctaaacagctcggttaa

SEQ ID NO: 24650 - DNA, 183 bp, Escherichia coli
atggaagtcaacttaatgaccgaaaaagaggtttctgatttgttacaaaaaaggcgcacagctttgtataatttgcgaaaaaaacacggattcccggaaccagtacttactcatccggcgcgatatagtcgtcaggccgttgaacaatggcttaaagccggaggaattaaccgagctgtttag

SEQ ID NO: 24651 - DNA, 387 bp, Escherichia coli
atgaacgccgtactcacagaattgaacaaattaggaaaagcaacagccgacagcatttctaaaggtctcaatattgatttgaatgacgtcattgatacgctgtggaagttgaaaaaccaggggatcgtaaaggtaaaaaacggcatctggcaggcagtagagggagttggaagcaaaacagatattgattcagttcaaccagttcagccagttcagccagttcagccagttcagccagttcagcacaacattataggtgacctgctacgtaaatcacggaaagaagcgcgccgcgccgggcggaaacagaaacgatgggagggtgcatgtaaggcgttgcaagaactgaataaataccgtgacttgatcaacgaattgtcagagtga

SEQ ID NO: 24652 - DNA, 213 bp, Escherichia coli
atgagcgaaaaaacgacgttgacaaaggcatcaccagttgaattaaggcagtgtctggaaatcgcaaatcaacttgccagaagtggaatacgctttgttccaatcccgatcacagcagatgcagaacttcatctgtttggtgaaattctttcccgaaagctggatgaactggaaaagctggtagaagaagctgacacctcaccaatcgcataa

SEQ ID NO: 24653 - DNA, 627 bp, Escherichia coli
atgactaacaaatacactctcatttacgcagatccaccttggacattccgcgacaaagcaaccgatggtcaacgcggtgcaagttttaaatatccggtcatgagccttctcgatatctgccgcctcccggtatgggaactggcagcagataactgcctgttggctatgtggtgggtgcctacacaaccacttgaagcattgaaggttgtagaagcatggggctttcgcctggtgacgatgaaaggattaacctggaacaaatgcgggaaaagacagaccgacaagctggtcatgggtatgggtagcaccactcgcgctaacagcgaagactgcctttttgcagtgaaaggaaatctgcctgaacgcattaacgccggaataattcagtcatttacagcaccacgccttgatcactcccgcaagccggatatggcgcgagaaaaacttgtgcaacttcttggcgatgttccccggatagaactgttcgcccgccacacctcgcatggatttgatgtatggggtaaccaatgcggaacaccatccattgagatggttccgggtattgttaaatttctggagaaaaccaatgagcgaaaaaacgacgttgacaaaggcatcaccagttga

SEQ ID NO: 24654 - DNA, 432 bp, Escherichia coli
ttgaaacagatcgctttctacaggcgttctggaaggcccggtgtcttccgtgggttaaaagaacgcgtcacctggatgattcagtctcgtggtcgtcctgttactggcagtgaaatagcagagaaatttggtgtttcactttgcgagttcaacaaggtagctcgcagcctgacaaaaggcagtaaggttgtgaaaatcaaggcttcagagtcattcaccacagacaccggaatcgttgatcgctttttctccctcgaatcaaatcctcgtcgtgacacacctcgttcacgcaatgccgttcctccattcagtcgcagaagccgtgaacacgcagcaaaaaactgccgcgaggaatacgagcaaaaggccaaacgccgtcgccgactgattaaagcaggactttacattgatgagtttgaaaaggcgctatga

SEQ ID NO: 24655 - DNA, 678 bp, Escherichia coli
atgacaactcaagtttctgttgaaacactctccacgattacttacaagcagatccccgttatcactaccgaacttttggcgcacctttacggcacagaagctattcgtattcgccagaatcaccacgaaaacaaaggtcgtttcattgaggaaaaacacttcttcaaacttgaaggtgaaactttacgtgagttcaagcacagagtagcttttaactactctgtgaaaattgcccgtaacgttcgttccctcatcctctggactgaacgcggcgctgcccgtcatgcaaaaatgctcgaaaccgatcgggcgtgggaggtgttcgaaaaactggaagactgctatttcagtcaaaaaatcccagaacaacttcagcttccagaatcaacgctatctatcaactaccctctatcgtggttttcagagcatcacccctactccatgatgagctatgttgatcgaaaaactcttaacctggacgtttccgtgctcttcgatatgccaagcccaactatgcgcatcctcaacgagctacacagcaagggctataacgttgacgccgctgttgctgaatttaacgccttcaaacatctgacggaagaaatgcgccgtactctacaggatatttcaagactgtcagatcgaaattcccgaaaaggcttctcgttaagcctctga

SEQ ID NO: 24656 - DNA, 372 bp, Escherichia coli
atgcgcatttttaaaaacgcctggtttgagcgatttgcacacaaaaacaaaatatccgaccagtcactgcgcgaaattgttaaacaggctgataacgggcttatctcagcaaacctgggtaacggcgttatcaagcaacgtctgccacgagtcggtggcggcaaatctggcggttatcgcacaatcattttctatcgtgtcggtatgagggcatttttcgtatatgcatacgcaaaaaatgaacgtgaaaatataaccgctactgaggaaagcacatttcggaaggctgcacctcacgtactcaatctaacagatgaacaactggcacaactgattctacagggtcagtttacggaggtaccaaatgagtaa

SEQ ID NO: 24657 - DNA, 321 bp, Escherichia coli
atgagtaaaaattaccgcagtgatgcgcttgcatccgtacatgaaatgatggaatcgcttcatgatatcggcgcagtaacgaaacagactatgcgagaattcgatgaactctgcctgcaaccagcaccttcaatgtctcctgaaagaatccgggcactccgtgagcgtgaacatctgtcacaacccgtctttgccagatatatgaatgtcagtaaaaacctgatatctgactgggaacgcggagtgaaacgccctggtggtcccgccctgcgacttctttccgttattgaaaaaaacgggattcaggccataaatgtttga

SEQ ID NO: 24658 - DNA, 465 bp, Escherichia coli
ttgctgatattctggaagatcagaatattggaatcagggaactggcaagagcgcttgatgtcgcgccttccactgttcagcgactggtttcaggtaatgcgacaatatctcctgaaatggctgttcgtctcgctgctgtcctgggtggaactccgtcttcatggattcgtctccagacggcatggagcctcgaaaaagcggaaagagaagttgacgtatctcatctctcaacaaaataccgcccggcagaaatttcgcctcatgcttaaccaccgcgccgtcattctggcggcgtcggagagtggaggatatcaggttccgaactctgctttgttctccgcctccaggatttcttcaatcttccgtactccccgattattgtatcgaaagctttctacctgcttatccgaatacggggatttgtcgatgaaccatttcccgtattgttctgttttgagcatgtag

SEQ ID NO: 24659 - DNA, 783 bp, Escherichia coli
atgaaatctattatcaaacattttgagtgcgaaatctcacagggtaatatcgttgggctggatgcagctttctatcagggtaagcctgtgtttctggctgctccattcgcaaaagccctgggatacgccaacacggcggacgcattgaaaaagcactgcaagtcattgattaaacttaattatcgcgaatcgcgagaattaggtttaggtgacaatccgcgaggaattcaacttattggccaaggtgacgcttttcgtctcatcatgcgtagctcgttaccatcggcagaacgggttcaggattgggtttgtgaagttgtcctcccagccctgatggagacaggaacttacagccttaaacaggagaaaagtacaccatcaaacggccttcctgaataccgcaaagctaaagcgctgaaaatggaaatggaggttatctcaagcgttctggatcgtttaccgcacctgggcgacaaggcgaaacaggctgcttacgcctcagtgattaaccgttctgctggttttaatgttatcccccttcctgttcttgatgaacatcactacagtgcaacagaggttggtaaacagtttggcgtcactgcaaacaagatcggtcgcattgccaatacctacatgctcaaaacagaacaatacgggaaatggttcatcgacaaatccccgtattcggataagcaggtagaaagctttcgatacaataatcggggagtacggaagattgaagaaatcctggaggcggagaacaaagcagagttcggaacctga

SEQ ID NO: 24660 - DNA, 279 bp, Escherichia coli
atgaaaaataatgtaatgaaaaatggaactatcgacagccaggctctgttgaaaatggtgaatgaagcgcggagactgtgcggtgaaaaagaagtacgcaacaacgacttcattgcacgcatcaaagatgaacttgatggggagggttacgaaattttcgtaacccccatggataagaaaaaaggcggtgcggatcaggttgttattgtgatgacctataaacaagcgcttcgcgtcgccgcacgtgagtcgaaagccgtccgccgttcttttgcgtaa

SEQ ID NO: 24661 - DNA, 615 bp, Escherichia coli
atgacggcttttaccgacaaagagctaattaaagaaattaaagaacgtatcagcagtctggaggtgcgggacaatattgagcgccgtgtttatgagattgcgttgactgcattgaccgctgaaccattcgccactatcgacaccgtgggaattgagctcgttaaatatggttgtaacacgtttatttgtcccgacaattcgatggagccgggaaatgtaccgctatatatcggcctgccacgaattgagccagcaagccagactgccaagctgtcattccaggaatggttgtcagaacaaaaagaaaaaatagacgttgattgcggatgtgtaagcatcgaaacgcttacgcactggatgaaatcagcttatgaggctggcaactctccggtaactccggatggttggataagctgtagtgagcgaattccggacgataaacagtatgtttggtgttggggtaagtcttacggctggactgagtgcgataccttcgaagggtattacgattggtcgagaaacaaatggtgggcagttactgacgatggggaagaaccggcatcgaaagtaacccactggatgccgctaccagaaccgccgcaggaggttaattga

SEQ ID NO: 24662 - DNA, 477 bp, Escherichia coli
atgcaatttaaagatttaccagaggatattcagaaaatagctgcggatacgcttaaagaccatttatcggtgataaatttaacaaaggaaccaaaggcgaatctggaaaatatatcccgtaacatgcgagatgtttttgtcgggatgtatgcttatgacaatgaaaagcacgaggaacatattcaaaattgccgccttaataaaggacaacaaaacatcaaacacaatataacagaaaacgacaaatcaattaattctgttgaaagagtgaataattcgcagaaaacagacccattggtattctggaatatcgttcaggcttttgccttgagcaaggtgtatgagtttaacaacatcaatcattcagggatcgacactcatcaatcatcacatcgtgagggggtgtccatgcttctgtctctgttacgagagcagggcgaatgtcctcactcgacattgaacgacactgagcaatag

SEQ ID NO: 24663 - DNA, 822 bp, Escherichia coli
atgtctcagttagatagcaatgccattaaagaaattgtaaaactcaccactactgctttttctggtgaaaatttgccgcttacggaatgccctgttgcgttattgccggacaatgtaaatatcgaaagtctggaacgattcatgacagaacgttttcgtttccgtggagtcatgaccacaaccagtattgatgactttgttgaatacagcaaagggtatgccgatgagtgctcccgctgcttcattaacgcggaaacgatgaaagcagtcactgtgttcaatatcggcactctggagcaacctggacacgctgacaacaaagctctgctggaactgaaagccacatcaccatatcgcgcattacgtgacgtggacggcaaaaaacaactccagaaatctctcgctgaatggctggaagactgggccgacttcctcacagcctatgacagcgacggtaatgtgctggatatcaaacaggcgatctctgctgtccgtcgtcttaccatcgacgcaaaacgcagtgctgaatatgaagagcaaaacttcagcggtagccgctcagtcatggagtccgttgaggctaaaagcaaagaaatcatgcctgccactttccgctttgaatgcatcccatacgagggcctgggcaacagggaattcacgctgcgattaagcattctgacaagcgaacaacctgttctggtgctacgtatcgtgcgtgttgaagctgcggaagaagaaattgccaaagagttccgtgacctgctgaaagagcgtttcgaagaagaagatatcttaaccttcatcggcacgttctcagtgtga

SEQ ID NO: 24664 - DNA, 348 bp, Escherichia coli
atgaaccagcatcaaactgatgttaatgttttcattaacgacctcgacggcggggtatttgttaacaaacttggtgcggtattaagtgaagttgcctttggcgtaaacagcacaaacaaaaaaggaaaggtatgtgttgaattcgaattatcttcacttgatgaaaatcgcgtatcagtttcccataaactaaaattcacacgcccgacaatgcgtggtagtaaatcagaagaagatacgactaacacaccaatgtttgtaaataaaggtggtgagcttactttgttccagaaagaccagggacagctttttgataaacagggccaacatgacgctgttttacgctga

SEQ ID NO: 24665 - DNA, 588 bp, Escherichia coli
atggatgatgtaatttttacttacaatgaagaatcagcactaaccgccggacaaggtggttttattaccgaaacgggtgcgcatatcattaacatcaccgaagcagaactcaagcaatcagaaaaaggtgcccgattcattgagttttctggagaatccgacgacggacggaaaatccaatatctcagtgtttgtgttcagaagaatgacggcactgaaaataaatttggggcgagcattattcacgccatgatgggatgcacaggaattgggcagttaacgcaacatatggtttccgtcagtaaatatgttgcacctgagtttcacggaaagaaaatcgggttagtgctccagaaagtattaaccacaaacagaaagactggcgcagacagttaccagatggaaatccgcattccattcattgcagaaacagggcagacactgaaagaaaaagctgaaggaaagaaaccagaaacggtagcaaatatggtttccactctcaaagacaaagacaatcgcagcaaaaacgcaaacccgaatcacacggacgacccgggttactggcagtacggtggcgataatttttaa

SEQ ID NO: 24666 - DNA, 693 bp, Escherichia coli
atgacaccagaaattattctccagcgaactggcgtggatattaccagcctcgaccagggcgatgatggatggcacaagctgagactcggtgttatcactgcttcagaagttcacaacgtcatagccaaaccacgttcaggcagcaaatggcctgatacaaaaatgtcatacttccacaccctgctggctgaagtttgtactggcgtggcaccggaagttaacgctaagtcgctcgcatggggaaagcaatacgaagatgatgcccgtgccctcttcgaatttatcgcggatgttaccgtcgcggaaacgccaataatttttcgtgacgaaagcatgcgcaccgcctgctctcccgacggtttatgcagcgacggtaacggtcttgagcttaaatgccccttcacttcccgcgacttcatgaagttccggcttggcggctttgacgctatcaagcctgcttacatggcccaggtgcaattcagcatgtgggttacagacaaggacgcctggtacttcgccaactacgacccacgtatgaagcgtgaaggcctgcattatgtcgtggtcgagcgggatgaaaagtacatggcgagttttgatgagatggtgccggagttcatcgacaaaatggacgaagcactggcggaaattggttttgtatttggagaacaatgggggggggttaataactaa

SEQ ID NO: 24667 - DNA, 951 bp, Escherichia coli
atgttcgatatcgttgaatttgttaagcagcaggagcgctttttctgcgaggcattaactgaaccgacgctgacatgggcgaaggaaagtcagtttgcaattcagcaattccagaaaaatgcctttctggctgacacagcacgggcaaatctgcccagcgcacagaacgctatcatcaatgttgccgccataggcataaccctgaacccggccagcaagctggcgtatctggtaccacgaaaaaaggctgtatgcctggatatcagttatatggggcttctgcatctggcacaggtcacaggagccattcagtgggggcaatgcaaacttgtttacgagaaggacatttacgagtccaacggtattgactgcgcccccacgcacaaatacaacccattcgtagacaggggcgcacgcattggcggttattgtgtcgtaaaaacatccgaaggcgactatctgaccgaagagatgagcaacagggaaatcgaggtcatcagggcgtgcagcaaagccggaaataacggaggaagtagcccgtgggatagtttccccgatgaaatggccagaaaagccattgttaagcgcgccagcaaatactggccccgtcgcgatcgcctggatacagctatcgactacctgaacactcaggccggtgaaggtatcatcctgaatgctgatcacatccctgagcgtgacgtcactcccgcatcagatgagattatcaatgagatcactcaggcaatcaccgaaattaacaagacatgggatgacctgcttcccgtatgttccaaaacattccgtcgcacgattgcatcacatgaagctctctctcaggaagaagctgtcaaaacgcttgattttgtcaaaaagaaagctgccagaaacaaggccacggcggaagcgaaagttcacgccaccacggaaaataacagcgaggccgtgtcatga

SEQ ID NO: 24668 - DNA, 282 bp, Escherichia coli
atgaacgcatacctcacctgcgaccgcatagaggagcgtcgctggattaatcagcaaattcaggatgaaaaggataaatggattgatgatcgggcgcaggagcttatcagcatgttccccgataaaccattgcttatgagcagcctttttttacccaaagaagcccaactggcactcactggcgaaaaagctgaagaggcgtacaacgattatatctcagcgatcgcctatgctcgggcggaagaagaatgggagagaaaattctccccctgtcctttctga

SEQ ID NO: 24669 - DNA, 282 bp, Escherichia coli
atgctcaatcaaaaaataaatatcaatgtaaaaagcgtcgtaactccagcaggaacgataatgggagaagtttttatggatgataaaatcatcgcctattttgtcgtcctgtctgatgaggctatttctgttattgatacggaaggcaatgttatgtttatcgcagaacatccagaagacatcgcattacaggccgctgcatatttcttcgctaaggagcaggaggaagaatgtaactgccctgtatgtcagctttcccgacaaattaatttaatgcattaa

SEQ ID NO: 24670 - DNA, 213 bp, Escherichia coli
atgctcaaacctcactacggaaccgcattagtttctcgcgaggacgttaaacccggcacagcaattctttacaacgggcgttattacatggcgtcagcgaacgttaataatgcactttacgctcattcactgattgaaaaaattcgcattatctcagatgcaatagaagtttacctgaacaataaaggccaaccgttaatctcaccagcctga

SEQ ID NO: 24671 - DNA, 639 bp, Escherichia coli
atgaactctcaactcatccccgtattcaacggcactatatccaacgaaaccaccctgctctgtaatgcccgtgatttacacgcgtttctcgaagtcggaaaagacttttccacatggatacgaatccgcatctccgagtatgaatttacagaaaaccaagattttattttgctccccaaaacgggggagcaaagaaaaggaagaggcggtcacaaccgcaaggactaccacctcacactggacacagccaaagagcttgcgatggttgaacgtaacgaaaaaggccgtcaaatccgccgctacttcatcgagtgcgaaaagaaacttcgccagagccttttacctgcaccaatgaacatcaactaccctctctcgtggttctcagataaccatccctacgccacgatgaactatgttgatcgcaaggttatcagccttgatgcttccgtgctcttcgatatgccaagcccaactatgcgcatcctcaacgagctacacagcaagggctataacgtcgacgcagctgtcgctgaatttaacgccttcaaacatctgacggaagaaatgcgccgtaaattgctggatatttcccgcacatcggaaaagtcttcccgctttggtttcaacgttaatctttaa

SEQ ID NO: 24672 - DNA, 549 bp, Escherichia coli
atgcgaaaaatactcaggacaactcttatcactacaatttttttttcaccaatagtacaggcggagtggtatacagtaacagaagacgatttgttctctgatggtcacacggcgctgatggtaggaaaaaaaacatcaaatcctgaagagattgataatcacatgattgctcttaattgtacgccaagatccctaacattctcattagtcgaaaaggacatagaagaagaaacatcgcccccaatttattcattcccaatagatgtggcaataaaaattgacaaaaatagtataataaggctcaacgcaacactttcaagaagaaactcaatgctaacacaagctatcactgaacgtactgatactgaaatgaagaaaattaaaattatactcaggcaactcagagatgctaaacatagagtgagggtcgggattcgacgccaagacatcacacgagaagatgccatgacatattctttcaactttaatgtattaggctccactggtgctgttaataaatttatcactgcatgcggaataaagctgtaa

SEQ ID NO: 24673 - DNA, 381 bp, Escherichia coli
atgtctgaacttgaaaaaatcacaatcccgaacggagcagcatttccaggcacagatatatcaagccttgaagatacgccaccaacaacagaatcttcatcagatggagataatttaaacgcccagcgcgcagcagatgcaaaatctaacagggaattaagagaaaaatttgcagaaaaagcctataaagttgccaagtatgggctttactggtgggctagtgttttgttgttgtctgcgacaggccgcgtcatggggaaagaaatcttttcagatgaagtgctcattgcggtgaccgctgcttcaactctgaatctgttcgctgcttttcttggtgttatcaggaggcttttccctcacgccaaatctcacacagagtaa

SEQ ID NO: 24674 - DNA, 471 bp, Escherichia coli
atggcatattcagctgctgccgtagctaacgcctttattgataaggctaaacggggagaaatcaaagatttaactccgatgaagctacaaaaattgttgttctatactcagtcgtggcatctgaaactattcaacggaaggccattattcgacgatctgtttgcgcgctggccttacgggcctgtaataccgcacctgtaccacatgttaaagaaatatgggggcgatgaaatacaggaaatgatcagcatcatcattgattcagatggggaatggaaacgaatcacaccgacaatacagaagggtgacacagaaaccaggaggctgatcgacagaattgttgaggtatacggcagctacagcggaaccgagctttctaacatgacccatgcaccaaacgcggcctggagtaaaggtcaacctgatggtggcccaattcttcatactgatatggcaaaccacattcattga

SEQ ID NO: 24675 - DNA, 1026 bp, Escherichia coli
atgaaagatattattaatgtttcaagtctggacgacattgaatctttgttcgcaaggttagatggtggcgaagagatcactatcgacaggatcaagttagacctcttcaataatgtgaattttaagatttatggtgatccttctcgctacaatggaacgcttccctcttctctggctcagggtttatgtgaatttcagactgaaatttataaagttttcacactgataaaatataaaactgacaaccttcaaaggttaactggtaaagataaagaggaagcagagatcatctttaccattaatgaaggttgtactgatatacttgctgcattaacagagctttttgaagcattcggtaaagcctttgagaaggtcacacacggtatgagtcctagccaaaaaacattatgcttcttgtttgctgtcaccgttataggcggtgcgtgggttggtacatcatacttagagaaaaaagccgaagtagaagttaagcaagaagaaacaaagcttgaagaagccaagattaaatcagaaaacgagcgcatgacgatcttaagggacggaatgcttgagtcgattagagctaaagcgggcatagatgctgtagagcgcgccgaagggattcaagagcatactgcaaaagcgtatacaggggtattaaaaggcgcgtctgatgctgacaaaattgtcatatccggcgcaagcaccgttgaactgtctaacaaagaaatccacgaactaatcaagaatcctatcgaaaaagcaaaaaaagaagaaagaaaccttgaattagtcattgatgggatcaagcgtactgcggaaaagataaccctaagctgccgcgaaccatctagtgaagacagtttccctgtttcagtcgacacgtcgttcatagatgataaagacgagatcgccatactgtttgatgcaatgaaagaaaacaggacagtaaaaatcttgggaagctacacgatacgagcaggtgtaatagaaaacggaaacgcatcaaccatcactcgcccataa

SEQ ID NO: 24676 - DNA, 714 bp, Escherichia coli
atgaacatgaaaaagaaaccgttaacccctgagcaactggaagacgccaagcgtcttaaaagcattttcatcgctaaaaagaaagagttaggcttgtcacaggagtcattagcctatgaactaggtgttacccaaagtgccgttaatcagctaatggctggcatcaacgccataaatgccagtcacgcagcgcagcttgctaagttactgaatgtaaaggtcggagatttcagccccagcttggcaaaatctattgcagaaatggcgctcgcgattgaagagccattaactcgtgtccctgcttacgaatatccgttactctcctgcgtacaggctggcgcattcacaatggatgatatttcgtacaccgcaaaggatgcgattaagtggatctccaccaccacaaaagccagtaacaggtcgttctggctggaagttaaggggcattcaatgaccgcgccacagggaggtaaacccagcttccctgaaggtatgctgatactcgttgaccctgaacgggaaatcgaggatggcgatttttgcgtggcccgaatgaacggcgatgaattcaccttcaaacgattcattcgtgagagcggtaaagcgtacctggagccactcaacccacgattcgacatgattgagtgtaacgaaaactgccagtttgtcggaaaggtcataaagtcgcagtggaatgatgagacttttgattga

SEQ ID NO: 24677 - DNA, 204 bp, Escherichia coli
atggcgatgaaaaaagagaccctggctgattacgtatacaggttcggtcagaagaaagccgctaaggactttggtgtggcgcagagcgcgatcagtaaagcgcttcttgtcggacgtgaaatttacgtcaaaacctttgatgacggcagagttgaggcggaagaggttcgaccgttccctgcgttcgtaagaggcgatgattaa

SEQ ID NO: 24678 - DNA, 378 bp, Escherichia coli
atgtcagcagcaaccaaatcggcactgatccgtacactgagcactgtaccactgagaacagaggagcgttacagctttctggctgatgttgtaacgctccttgagtcacaggggatgcatgtggcaagcaatgtcacagtaagaatcgatggcagaaatttccgtgttgatattctcgcaacagcaaaaactggtgggagtgtggctatcgagatcgatcgtagctctccgcgatcccgctcagtcatgaaattgcgtgaattggcacgtcgtggcactgaaggctttgtgttgcttcgaatgccaaagaaactgaccagttatagcgatgctgggatcgatatcatcccggcgaatggcaagggggcgtcatgctga

SEQ ID NO: 24679 - DNA, 1521 bp, Escherichia coli
atgctgaaaatcaccccaaactttgctcaggagcgcggtttaaaccagctgcggcaccagtggaaacagcatcgcacgtacctgatgtatgcacccactggctctggcaaaactggtcttgcagcattcgtcactgccggaatggttgaacgtggtatgcgggtgatgtttgtctgtccgtacaccatcctgctgaaccagacagcggaacgtttcaccgaatacggtttgccctgggaagaaatcagttttgtatggcgtgatcaccctaactatgacccgtcacgactgattcagattgccagtgccgacacgctgatccgtcgtgagtttcctgacaacatcgatctgctgatcatcgatgaagcacacatgaagcgtcgtgcgttacttgaggttatccgggacagagacatcagggttcttggactttccggcaccccgttcgcagcctggatggggaagtactacgaatgcctgctcaagcctacaacgattcgtgaacttattcagcgtggtgatctgagcgattacgagttttttgccccctcaatgcctgatctggctggcgtaaaaaccagtaacaccgtatttggacgggattacaacgaggagcagctcgcatccatcatggggagttcggatctggttggcgatatcgttcgcaactggcttgagaatggcgaggatttgccgacgatctgcttctgcgtgaatgttgcgcatgcgaattttgttacccgtgagtttttacaggccggtattggtgcagaggtgatgacggcagataccctccatgatgaacgacaggacatcattcgccgttttgaagagggcgcgaccaaaataattgtcaacgttggtgtactggttgcgggatttgacagcgatgttcgctgcctgatctacgcccgtccgacaaaatcagaaatccgttggttgcagtgcataggtagagcgttacgtacagccccaggtaaaaaacgtgcgttgattttcgaccattctggtacggttcatcggctgggcttccccgaggatatcgagtatgacgaactgccgggtaaaaatgacggaatgaaagcgtctgctggcggtggcgaggttaaggctgagaaacttcccagagaatgccccaaatgccacttcatgaagcctgctggtgtacacatgtgtcccaaatgtgggtttcgtcctcttggtggcgatgatgtggcaacagaccgcgatcgaaaactctctcgcgtaaacaaagggaaacgcgaatacagtcgcgaggaaaagcagcgttggtggagtgagatcaaggggtatcagaattaccgcaacgcgacgggtaaacccctgagtgacggatggtgcgctcatacctacaaggagaagttcggtgtgtggcctaaaggcttcagtaatgcgccgctgcaaacctcagttgaagtatacaacttcatcaagtcaaagaccattgcctatgccaaagggcgcaagaaagccatgacaggaggccagcatgcagactaa

SEQ ID NO: 24680 - DNA, 972 bp, Escherichia coli
atgcagactaagaaggcagcggccgggcattgggggcgaatttttgaatattacggcatgcctcctgttactggcttgaaacattatagcggcccctgcccgatatgtggtgccagaggtaaatttcgctgtgatgataaggatggttccggttcatggatttgtgtctgtggtcacggggacgggatgaatctgttgcaacttgccacgggtaagccctgggtgacgttgtgtgatgaaatcgatcggctgatcggaaatacctggaagagggagaaagtcagccagcctgtaacagagataagcagaaagcgggagctggtcatagataagtttgccggactcccgtgtctgcggggtacaacaggtgaggcgtacctgcaggggaggggaatactccagttaccgaccgaatccgtgcgtttttgtgaccgtcagatcgccagcgggcgcgaatatcaggcaatttacgctattgcaacagatgacaaaggttctctttgctatctgcatcgtacgttgctggatggtgatcgcaaggcgaatgtagaggcggctaaaaaaatgaccgcgctacaggagttgcctggtttgcagcatgccaaatcggtggcaatacgcctgtatccggtgtcgtccactctggggatagccgagggtatcgaaactgcgctttcatgccgtcaaatcttccgctgcaatgtgtggtcaacaatgaactccggttttatggagaagtttattgcgccaccaggcgttaatcacctgattatctttgcagacaatgatgagcacggcgcaggtctggcggctgcctttaaatgtgggcataagaatctcatgagtcgtaatgacgttgagaaggtcagcattcgctggcctgacttgccggattttaacgacatgctcattcaggggtgtgaagcccgtgaacatgtgttgacgcgcaaattcaaagcggaggctgcctga

SEQ ID NO: 24681 - DNA, 450 bp, Escherichia coli
atggaaatagagatgatcaaggcggctaatggcgtatttgtaccggcgtatgagcgcgatttaccccgactggcaaaatttaaaaacggtgagctgtatacactggaagcaaaacttacccgtaacccatcttttcaccggaagatgttcgcttttcttaatttctgctttcagtactggtgcgctgaacatgctggatacgaattctctgatgaagcgacgcagtttgatgagtttcgtaaaaatctgacaattcttgccgggttctatgatgtggtcacaaccataagaggcgaggtgagatatcgggcaaaaagcctgagttacgcgaatatggatcaggatgagtttgaacgttgctacaacgcaatgattaatgccgcgttaaagcatgtgtttgggcgctcaaacagccctgaactgaataaccgcctgctgtcgtttttctga

SEQ ID NO: 24682 - DNA, 564 bp, Escherichia coli
atgaagcaacgtaaacccaaaaaatgcaaagtgtgcggctcctcgtttgtgccgttccgctcatatcagaaagtttgctgtggtcagtgcgcactggaactggtcagaaaagaaaaggcgataacttcagcaaaagagcaggcagacaagctgaaagcgcgcaggagggacttacagccccgcagttactggattaagcaggcacaacaggctgtgaatgcttatatcagggagcgggaccgtcatttgccgtgtgtttcatgcgggacgttagattcagcccagtgggatgctggccattaccgtacaacagctgcggcacctcagctcagatttgatgaacgcaatatccataagcaatgcgtggtgtgtaaccaatacaaaagcggaaatctcgttccgtatcgcgtcgaactgattaaccgcatcgggcaggaagcagtagacgaaatcgaatcaaaccatagtcgccaccgctggactgtcgaagagtgcaaggcgatcaaggcagagtatcaacagaaatttaaaggcctgcgaaacagcagaagtgaggccgcatga

SEQ ID NO: 24683 - DNA, 201 bp, Escherichia coli
atgacgttcaccgtaaaaatcattcctgacatgcttgttgaggcatatggaaatcagaccgaagtggcccgaatactgaactgtaatcgtgccacggtcagaaaatatattggcgataaagaaggcaaacggcacgccgtcgtcaacggtgtccttatggtccatcgtggatgggataagggtaaagactctgatgcgtga

SEQ ID NO: 24684 - DNA, 426 bp, Escherichia coli
atgcgtgatattcagcaggtgcttgaacgctggggcgcatgggtggccaataatcatgaggatgtgagctggtcgcccattgccgccggatttaaggggctgatcccgtcaaaggttaaatcacggcctcagtgtaccgatgacgatgcgctgattatcagcaattgcatggcgcaactgaacgtcaacaacagcgatttgcatgattttctgtatgattattatgtgttcgggatgacgcttatgtcactgggccgtaagcatgggcgctctgattgctgggccgggcgggtactgcaaaaagcagaaggtgttattgaggggatgttgatcatgcagggagtaaagctggaaatggacaggtacgttgagcgtgaaccatcaggatcacaggccagtcagtttgccggacgtgcgggaaattga

SEQ ID NO: 24685 - DNA, 294 bp, Escherichia coli; identical to SEQ ID NO: 24554

SEQ ID NO: 24686 - DNA, 1125 bp, Escherichia coli
atgatcgttgctttttgtttatataaatattttccctttggcggtttgcagcgcgattttatgcgtattgctcagacagtcgctgctcgaggtcatcatgttcgggtttatacccagtcgtgggaaggcgaatgccctgatgtatttgaactgatcaaagtgccggttaaatcgcataccaatcacgggcgcaatgcggaatattttgcctgggtgcaaaaacatttacgtgaacaccccgtcgatagagtcgttggatttaataaaatgccggggctggacgtttattatgccgctgatgtttgttatgccgagaaagtagcgcaggagaaaggctttttctatcgcctgacgtcacgttatcgccattatgctgcctttgagcgggcaaccttcgaacagggcaagccgacacagctgctgatgctgacagataagcaaatcgccgatttccagaaacattatcagactgaagcggagcgttttcatattctgcctccggggatttatcctgatcgtaaatatagccagcagccagccaatagccgtgaaatcttccgtaagaagaatggaataaccgaacaacaatatttattgttgcaggtcggttcagacttcacgcgtaaaggtgtcgatcgttccattgaagcacttgcttcgttaccggattcgctgcgccacaacacattactatatgttgttgggcaggataaaccgcgaaaatttgaggcgctggcagaaaaacgcggcgtgcgcagtaatgttcacttcttctcggggcgcaacgatgtctcggaattaatggcggcggcggatttattacttcatcctgcctaccaggaagcggcgggaattgtgctgctggaagcgataactgcaggattaccggtactaacaacagccgtttgtggctatgcgcattatattgtcgacgccaattgcggcgaggctattgctgagccattccgccaggaaacattgaatgagattttacgcaaagcgttaacgcaatcttcattgcgccaggcctgggcggaaaatgcgcgacattatgctgatacacaagatttatacagtctgccagagaaagcggcggacatcataacgggtggtctggatggttga

SEQ ID NO: 24687 - DNA, 975 bp, Escherichia coli
atgagtaacgcattgcaaataagcattattaaaaccgacgctggtaaatgttttatcactgattgcacagcaaaggacggttatcactaccagtaccatcaatctaaaatttctgatctcctatttgacggagttaaccccaaagccagctttcacaaaaactggtttgaaattgaacattaccctgaaaaggttgagagaattatctctggtgaaagaattaatgttcgctacgagcttaaagatgctgaacttgagagtaaaaaataccctttgacacttagttacaatgagcgtgacgcagtggacgaggatatcagaggctctctttatgaatacaaatacgatactgcacctgattacacctctccagttgacgctgaattcacattagtatgtgaggttgaaaattttcgtgacgcaccagaatttaattactctgcaattaggcaggttgggttccgggaggagaggtacgttgtaaaaaacataaacgtaaaacactctcttgttgactgcatcataattcctgagcctttgcgggctaacagcccttgtgaaatttcatcaaaagaaatgtatgacattgtacgccagcacgtaaaagataacatcgacaacaaactggctagaataacaagtgattacgcattttgctttaccgttaaaaaaataataccgctccttaagcctcacacatattcatatcaggatatttttgccagaaccaagaagcaaagagcaaagttgcactttaagactgacacggtgaaagaaattgaaattttccaaatgacacatgaccaagaaaattacaaaggttatacggcgattaaagggttcaaagccaataacgaatgggagctaaaggaaatgattgataacttccttacgacgcttatggataccattcacgcgccaatagagcaatgctcatgctgtggcggtacaggctacacgcaagacatcaaatag

SEQ ID NO: 24688 - DNA, 294 bp, Escherichia coli; identical to SEQ ID NO: 24554

SEQ ID NO: 24689 - DNA, 681 bp, Escherichia coli
atgaaccccatcgtaattaatcggcttcaacggaagctgggctacacttttaatcatcaggaactgttgcagcaggcattaactcatcgtagtgccagcagtaaacataacgagcgtttagaatttttaggtgactctattctgagctacgttatcgccaatgcgctttatcaccgtttccctcgtgtggatgaaggcgatatgagccggatgcgcgccacgctggtccgtggtaatacgctggctgaactggcgcgcgaatttgagttaggtgagtgcttacgtttagggccaggtgaacttaaaagcggtggatttcgtcgtgagtcaattctcgctgacaccgtcgaggcattaattggtggcgtattcctcgacagtgatattcaaaccgtcgagaaattaatcctcaactggtatcaaactcgtctggacgaaattagcccaggcgataaacaaaaagatccgaaaacgcgtctgcaggaatatttgcagggtcgccatctgccgctgccgacttatctggtcgtccaggtacgtggcgaagcacacgatcaggaatttactatccactgccaggtcagcggcctgagtgaatcggtggttggcacaggttcaagccgtcgtaaggctgagcaggctgccgccgaacaggcgttgaaaaaactggagctggaatga

SEQ ID NO: 24690 - DNA, 1410 bp, Escherichia coli
atggggagtaagtggaaaagcattgtgttgaatgacctaattaaccaaggtcatgcatttttacagaccggtccctttggtaccgctttgaaagcagaagaatatagcgacaacggagtccccctaatttctgtccgagaaatcaggaatggttatataaaaattgagagtacgacacctagagttagtagacatactactagccgccttcccaaattcgtattaaataaaggcgatattgtttttgcaaggaagggtggagtagaccgtactgcatatattactgaaaaagaggctggttggtttcttgggtcagatggtatttatttacgccttgatgacaactataactctcttttcattagctatataatgcgaagccccacaacaagagagtggctgatcaaaaatagcgaagggacaacaatgccttcactaaatcaaaaaatattatcgcgtattccattaactatacctgatttatacaaacaaaaaattattgctaattttctttattctttagataagaaaataaatataaacaaccaactaaatcatacactagaacaaatgtcccaaaccctcttcaaatcctggtttgtagattttgatccggtaattgataacgctctggatgcggggaacccaatcccggaagcgatgcaatctcgcgtcgaattgcgtcaaaaagtatgcaatagtgcggattttaaaccgctcccggcggaaattcgctcgcttttcccaagtgaatttgaagaaacggagttgggttgggtgccaaagagctggaatatatccctggctggtgaagagtttattgttaaaggtggttcaacaccaagtacagcaaatgaagatttttggattaatggaactatttactggacttcaccaaaagatttgactggaaatcaaagtaaagttttgctagatacggctaaaaagattacgccattaggactaaccaaaatatcatcagggcttttacctgtaaatacagtattgatgtcatcacgagctcctattggatatttagctatcaataaagttccaatggctataaatcaaggatatattgcaattccttctgctaaacatttatcaccagagtttaccatctactggcttgaaaatattatggatgatatcaaaggtatagccggaggaacgacttttgcagaaataagtaaatcagcttttaaaacaattaaattacttattccttcttcggatataattaccgagttttcacgtgtaactcgcaaccactttgataaggtggttcaaaatacaaaagagatagacttactaaccaacctccgcgacaccctgctcccgaaactcatctccggtgagctatccctggaagatcttccggatctcaccaccgatacagaagctgcataa

SEQ ID NO: 24691 - DNA, 543 bp, Escherichia coli
ttgattcaatggggggggaaaatccgctttactggccgtgtagtgaaagctacctgtaaggtcgcaaccgattcaaaacagattgaagttgtcctgccggttgtgccttccaaccttttcactggtatcgacgtagaagcacagggggcgagcaaccagaccgatttcaatattaatctgaccgaatgtagcaatacagatgatcagaaaattgagttccgttttaccggtactgcagatagcgctaataaaacgctcgctaacgaagtagaaggatcaacggatgctgacaacagcggcaatgcgggggcgactggtgtagggattcgaatttactccaaaggtacgacgaataatggtctgattaacctgaataccactgcggcagagggtagcgcctccaccgccgcttatacaattccaggaaatgctacgacccatgatttcagcgcggcctttactgcaggttatgctcaaaacggtagcactgttgcaccaggtgtagttaagtcaacagcaagttttgttgtgctgtacgagtaa

SEQ ID NO: 24692 - DNA, 1068 bp, Escherichia coli
atgtccggcagtgcttttgccgttacgcaccacgccttcagtagcggagcaggaaggacatctgatggaaatggaagccacgcaagcaccttaaaatcaccatcatacactaaatcagtaagttggcagcattaccataaatggtgggggcttccgctgttcctgccttctttaatcttgcccattttcgcccacattaatactttcgcgcatatttcttccggtgaagtttttctcttttatctgccactggcactgatgatcagcatgatgatgtttttcagctgggcggcattgccagggatcgccttagggatttttgtccgcaaatatgcagagctgggtttttacgaaacgctctcattaacggctaattttattatcattatcattctctgttggggcggttacagggtttttactccccggcgtaacaacgtttcacatggtgatagccgtttaatttcccagcgactattctggcagattgtgtttcctgcaacgctgtttctgatacttttccagtttgctgcgtttgttggattactggcgagcagagaaaatctggtcggcgtcatgccctttaacctcgggaccttaatcaattatcaggccttgctggtgggtaatctgattggtgtcccgctgtgctacttcatcattcgggtggtgcgaaatccgttttatttacgtagctattcttcgcaattaaaacagcaggttgatgccaaagttaccaaaaaagagttcgcaatctggctactggcattaggtgctttactattgctgttatgcatgccgttaaatgaaaaaagcacgatttttagcaccaattacaccttgtcattattgctgcccctgatgatgtggggagcgatgcgctatggttataagctgatttcattgctctgggcggtcgtgttgatgatcagcatccacagctatcaaaattacattcccatttatcctggctataccacgcagctgaccataacctcctcagttatctggtattctcttttattgtcaattatatggctgtactggcaacccgtcagcgagcggtag

SEQ ID NO: 24693 - DNA, 243 bp, Escherichia coli
atgagcaccagtaataacatgggtagaaccacacaggctcaaccaaagcccggtgtaaatgtctgcatagtaaaaaaagaaataactaataaattcaatgagattattaccaatgctttggctgaacaactagttgttttaaataaaagaaaaaaagacttatatagatgggaggagacagaaaaaaagaatttcttgatatttttgggagaaatgagattgaggctaataaatggctgctga

SEQ ID NO: 24694 - DNA, 1119 bp, Escherichia coli
atgaaatacgatctcatcattattggcagcggttccgtaggtgctgccgccgggtattatgcaacccgcgccggtttaaacgtgctaatgaccgacgcccatatgccaccgcatcaacacggcagccaccacggcgatacgcgattaattcgccatgcttatggtgaaggtgaaaagtatgtcccgctggtcctccgcgcgcaaatgctgtgggatgaactttcccgccacaacgaagatgatcccatttttgtacgctctggtgtcattaacctcggtccggctgactccgcatttctcgccaacgtcgcccacagcgccgaacagtggcaactcaacgttgaaaagctcgacgcgcaagggattatggcccgctggccagaaatacgcgtcccggacaactacatcggtttatttgaaactgattccggttttttgcgcagcgaactggcgattaaaacctggatccaactggcgaaggaagcgggctgtgcgcagctgttcaactgcccggtcaccgcaattagtcatgacgatgatggcgtaactattgaaacggctgacggtgagtatcaggcgaaaaaagcgattgtctgcgcgggaacatgggtaaaagacctactcccggagctgcctgtccagcccgtacgcaaagtatttgcctggtatcaggccgatggccgctatagcgtgaagaataaattcccggcatttaccggtgaactgcccaatggcgatcaatattatggttttccggcagaaaacgacgcgttgaagattggcaaacataacggaggccaggttatccattcagcggatgaacgtgttccgtttgcggaagtggtcagcgatggttcggaagccttcccgttcttgcgcaatgtgttgccgggtatcggctgctgcctgtacggttctgcctgcacctatgataattcgcctgacgaagattttattatcgatactctacccgcccacgataatacactgctcattaccggcctgagtgggcacggttttaaatttgcgtcagttttaggggaaatagctgccgattttgcgcaagacaaaaaaagcgattttgatttgacaccattcaggctttcccgcttccaataa

SEQ ID NO: 24695 - DNA, 585 bp, Escherichia coli
atggatattcactcttatcactgtgaaggtttggtctgggaacagtactggatggaatttacccccaccagtatgatggatattcccgtcggtcagcaaagcgttatttataatggcgaagtttataatcaggaactcaccgaagttgctgagttaattacttcaccagaagcaataaaaaataatctggcagtcgcttttctgacgaaaattatttatcagtggatttgtcttatgcacgcagtcggtaaaaaagatccacaacggcggcaaattgaaaaattaattgccactttacatgccagtctacaacaacgctggagcgtagctgatatggctgccacgatcccctgtagcgaggcctggttgcgtcgtctgtttttacgctataccggcaagacgccgaaagaatattacctcgatgcgcgtctggatctggcgctatcgctattaaagcgacaagggaactcggttggcgaagtcgctgatacgctcaacttcttcgactcctttcatttcagcaaagcctttaagcataaatttggttatgcgccgtcagctgtgctgaagaatacggacaggtaa

SEQ ID NO: 24696 - DNA, 174 bp, Escherichia coli
gtgttaccggacctgcagcgtcttcaggtgattcaggggcagatgatgaataaagacaaatgccgtatgtacgggagaaaacgttatacagcgggagcaatgtgcttcatgctgtttgtgtggctgggtggtgtggtgacactctgtgccgttgctgcaattatcatgcaataa

SEQ ID NO: 24697 - DNA, 123 bp, Escherichia coli
atgattttctcgtttattgcgttcgacctcctggagatttttttctgcccagtcgaatggatcgcgttgtttgcgctcggcaaaccagacttgagcaaaggaatcgacattcaggctttctaa

SEQ ID NO: 24698 - DNA, 810 bp, Escherichia coli
atgaatttgaccatcaaagatgattggatgaacgattatttatctgatcacggatattttgtatcagaccatgaaagttatcgaattagtttggggctaccaaagcaggcaaaagttagtttgcgtttttttggtaatgttaaaatcggctatttctatgcgatagtgataaattgtgatgagagcggatggaaacaatgcataactactagtattttagagcataaggaaaaattaaaagatattttggatgggaatatttcaatattaatgtttgacaacaataaggatagtttttgtatctacgatggtgcaattagtaaaattagctcagcccagcttgttacttatttttcaaatattaattctgatttgacagctgagtctggaacttttaaacaaattaatagaactacaaatgatgctttccaagtttggacaagaaaaaatttatccaaatatgtatcatgtaatgatattgatgcttttaaaattatgggggatacaatagagtttgttgaattaaaaaggccagtgcaggattgttataattggcttccttatttaaatgattatggaaattataaagcattacaggtaatgggaagagtcaatagaaatataaaatcaattttcactctatcatataatgctaataataatgcaaagtttgtggtttttgaattagatagaattgaaagggacgttatcgaagggcgtttatcaaaggtaaaaacctcagaaattgatattataaaagggttttcactattaacctatcagccatttacttcacacaatagaaagtaa

SEQ ID NO: 24699 - DNA, 399 bp, Escherichia coli
atggcccgctgggtgcaaagcaatttaaaaccctttgatatcaatgagaaaatacttcaacaagggatacagctggcacaatctcgctactggcaaaccggcgatatgtatcagggtctgggctgggaaatgctggactggccggtaaatcctgacatcatcattaacggcagtgacaataaaattgcactggcagcacgccccgtaaaaccgattacgcccccaactcctgcagtacgcgcatcatgggtacataaaacgggggcgaccggcggatttggtagctatgtcgcgtttattccagaaaaagagctgggtattgtgatgctggctaacaaaaactatcccaatccagcgagagttaccgccgcctggcagattctcaacactctacagtaa

SEQ ID NO: 24700 - DNA, 879 bp, Escherichia coli
atggtcggttgctatagcggtaaaccgctgaatacgcaaaatattgatagtctggcggcggaaggtattcgctttaattccgcctacacttgttcaccggtttgtacgcctgcacgcgccggactattcaccggtatctacgctaaccagtccggcccgtggaccaacaacgtcgcgccgggcaaaaacatttccaccatggggcgctactttaaggatgcgggctatcacacctgctacatcggcaaatggcatctcgatggacatgactatttcggcactggcgagtgtccgccggagtgggacgctgattactggttcgatggagcgaactatcttagtgaactgacggagaaagagattagcctgtggcgcaatggcctaaacagcgttgaggatttacaggcgaaccatattgacgaaaccttcacctgggcgcaccgcatcagcaatcgggcggtggattttctgcaacagcccgcgcgcgccgacgaacctttcctgatggtgatttcgtatgatgagccgcatcacccgttcacctgtccggtggagtatttagagaaatacactgatttttactacgaactgggtgagaaagcagaggatgacctggcgaacaaaccggaacatcaccgcttatgggcgcaggcgatgccatcgccagtcggtgatgacgggctttatcaccatccgctctattttgcctgcaatgactttgttgatgaccaaatcggacgggtcatcaatgccttaacgccagagcaacgtgaaaatacgtgggttatttatacctccgatcacggcgaaatgatgggcgcacataagctgatcagtaaaggagcggcgacaggtcgatacgccagtcagtcatattga

SEQ ID NO: 24701 - DNA, 405 bp, Escherichia coli
atgcgtgtcatcacttgtaccgagttgcatgagttatatgataatgccagaaaatcagaaagactgcgtgcacatttgctattgcattcttgtcatgatgacaaagttcagcgcctatttattggcatggttaagggcagttatgttgaaccccattttcatgaattgccacatcagtgggaaatgtttattgttatggaaggccagataaaggtttgtctctacaatcaatcgggagcgatcgtgagggcatttgttgccggtgacgatgctgatagttctgtcgtggaatttgctccgggagatatacatagcgtagagtgtatctctgagcaagcactgatgatggaggttaaggaaggcccgtttgactcgaattatgccaaggtgtttccgaattggtaa

SEQ ID NO: 24702 - DNA, 1236 bp, Escherichia coli
ttgaaattggtgctaatcattgatgattatttgcccgatagtactcgagtaggcgcaaaaatgtttcatgagttggctctcgaactacagtcccgcggacatgtcatcacggttattactcccaatcgtcagcaaaacattcctttactaatagaaaaatatgatgggataactatctggagattcaggagcggtccgataaaagatgttggtcgtatccagcgggcaatgaatgaaacattcttgtcattgaaggcatggaaggcagttcagagtttaatatctccgtctacttttgatggagtaatttattactccccaactattttctggggtggtctggttagaaaaatcaagaaacgctgcaactgcccatcatatcttgtactccgggatttgttccccagatgggtggttgatgctgggattataaaagaaggttcttttatagagaggtatttcaggttttttgagaaatattcttatcagcaggctaattgtattggtcttatgtccgagagaaatcttgaggtctttcagtctagtaatgtgggatatcactgtgaaatcctgaggaactgggccagtttgacgcctgtaatgaaaaacgaagaaattcttgcttcgggatttaaggcgcgcttatcccttcagggaaaaattatttttttctatggagggaatattggacacgctcaagatatggcaaatttaatgcgtcttgctcgcaatatgcgctctttcgagcaagctcatttcctttttgtcgggcaaggtgatgaggtagtgctgataaattctctagcaagagattgggaattaacaaattttacttatttagcgtctattaatcagaatgactttaaaaccctcctttcggaaattgatgtcggtttgttctcactttccgcaagtcattcgtcgcataactttcctggaaagctgttaggatatatggtgcaatcagttcccattttaggaagcgttaatgcgggtaatgaccttgcggatttggtgaataacagtggtgccggatttattcacattaatggcgaggatgataaactgctccattcggctaagcgtttgttattagaacccgagttgcggaataagttaggcgatgcggctaatactttgttacatgagcaattttcggtaactgctgctgcaaagtcaattgaacaaagactggaggctgattatgcgtgtcatcacttgtaccgagttgcatga

SEQ ID NO: 24703 - DNA, 1134 bp, Escherichia coli
atgcaaaaattgaaagtgatgactattgttggcactcgacctgaaattatcaggctatctcgtatcattgcaaagcttgatgcttattgtgaacatactttggtacatactggtcaaaactatgattatgagcttaatcagattttttttgatgatctaggtattcgtacacctgatgtttttttagaatgtgctgggagcagtgctgctgaaactatggcacaagtcatcagtaagtcagaagatgtatttgtaaaattccagcctgatgcattattaattcttggtgatacgaatagtgcattagctgctataactgccaaacgtaataaaattcctatttttcatatggaagctggtaaccgctgttttgacttgcgtgtgccagaggaaattaataggaaaattgttgatcatattgcagatgttaatatgccttacagcgacattgcacgagagtatctgatcagagaagggcttagaccagatttgataattaaaacgggaagtccgatggatgaagtgttaacttattatcacgataaaattcgagcttctgtcattgttcaacatttatccttaacagcgaacgagtattttttggttagtgttcatcgtgaagaaaatgttgattctgataaaaacatccatagttatgtacaagtgttaaatgaattagctgaaaaatataagtatccaattattgtttctactcacccaagaacaagaaagaaaatcgaggcgctaaacttacaatttcatcctctagtgaatcttctaaaaccactaggatttagtgattatgttcgtttgcagatggatgcaaaagttgtattaagtgatagcggaaccattactgaggaatcttctattttgaatttccctgctctaaatattagggaagctcaggaacgacctgaaggttttgaagagggggtggcgatgtttacgggaatgagcattgatagaattttgcaagcaattaatattcttgaaagtcaacctcgtggaactacgaggttaataagtaaagttagcgattatgtagcacctaatgtttcagataaagttcttcggataattctgagttatactgattatgttaatcgtgttatatggagaaaatcgctttga

SEQ ID NO: 24704 - DNA, 888 bp, Escherichia coli
atgattttgaatgtcatgattttaggtgtcactgggatgcttggctatagtctttttaccaatctaaaagactataaaaacctgaatgtaattggcacagcgcgtaatcttcttgggaaagagcaatattttaagacacaaaaacagaatcttgttcttaatatcgatgctactgatattgatagcattgataacgtgattaattcggttgaccctgatgttgttataaattgcattggcctaattaagcagcatgagatctctaagcaacatgttgaggctattaaaattaatgccttattacctcatcaattagctgaagtatgcaataaatataatgccaagctaattcaattctcaacggattgtgtttttgatggaaaaaaggggctataccgtgaatctgatacgcctaattcaacggatctatatggtaaatcaaaatgtcttggtgaagtcaattacggtaaacatttaactcttaggacatctattataggtcatgagcttaattcttcagtaagcttaatcgactggttcttgagtcaatctactgaagttaatggttattcaaaagcgatattttctggtctgccgacttgttatattgctaaattattggctgaaaagattatagccaatgatagcttgaaaggaatatatcatctttcagccaatccaatagataaatacacattaatctcattggtttcagagatatatggtaagtctattaaaataaataaatccgagaagttgataattgatcgctcgcttgattcaactagactgagggaggcaataggatttattcctccatcgtggtatgacttgattaagtttatgtttaatgactatgttacaaggtattctctatgcaaaaattga

SEQ ID NO: 24705 - DNA, 906 bp, Escherichia coli
atgcgtaaacatttcaaatcagataaattgaaattttatattggtgatgtacgcgattatcagagtgtttcaaatgctatgcgcggcgttgactatatataccatgccgccgctttaaaacaagtaccttcgtgcgagttctatcctttagaagcggttaaaacaaatgtattaggcaccgaaaatgttttagaagcagccattactcatggagtaaaaagagtagtatgtctaagtacagataaagcagtttacccaatcaatgccatggggatttctaaagcaatgatggaaaaagtcatcgttgccaaaagccgcaatttaactcatacgaacacaactatctgttgtactcgttatggtaatgtcatggcctccaggggatctgtgattccactgtttataagacaggttgttaatggtgaggctattactattacagaccctaatatgacccgtttcatgatgacattagatgatgcagttgatcttgtcttatatgcctttgaacatggacgtaatggagatatatttgtacagaaagcacctgctgccactatagatgtattggttaaagcattgttagatattatgaatgaaccaagacaccctattaatgttattggcactcgtcatggtgaaaagcaatatgaagcactatgtagccgtgaagagatgtttgttgcgcaagaggaagggaattattatcgagtgccagcagataaccgtgacctcaattattcaaagtattatgaacatggtgataagaatctcagtctagtggaggattataattctcataatactcaacagttagacattgaaggtatgaagacacttctgcgcaaacttgatttcatccgtgaaattgaaaatggtcatctgtttattcctgaaggagtatga

SEQ ID NO: 24706 - DNA, 462 bp, Escherichia coli
ttgtttggcgataacaccaccaaagggatggataagtatgctgaccagctttataccgatgtggtcgatttgcaaaaacgcatcagtgaactggctttccctccttcaaaagtggtcggcggtgcagccggactgattgaggaagtggcagccagcaaaatcagcggtgaagaagatcgctacagccacaccgatctgtgggatttccaggctaacgttgaaggctcgcagaaaattgtcgatctgctgcgtccacaactacaaaaagcgaatccggaactgttggcaaaagtcgatgccaacttcaaaaaggtcgataccattctggcgaaataccgtactaaagacggttttgaaaattacgacaaactgaccgatgctgaccggaatgcactgaaaggaccgattactgcgctggcggaagatctggcgcaacttcgcggtgtgctggggctggactaa

SEQ ID NO: 24707 - DNA, 438 bp, Escherichia coli
atgaaaaaccttttaaataattttcctgacaattgcattgaaaatattttaccaaaagatgattttggttatgggcgtcttttaatcggctcaaagggtaaacgtattaaaactggcgcgcataggttaatttaccgaatttttattggagaaattcctgcgggcatggttgtcaggcattcttgcgataatcctgcatgttgtaatccaaagcatttactaataggaacaatccttgataataatgctgatcgacagaaacgaaaacgccaagcacgtcatgaaaaacatgggcgagcaaaactaactaaagagcaagtgctatttataagagctaatgaaatgagtataccaaattcagttcttgcagataaatacagggtctccaatagcttaatatggcaaataaaaaactatcgcatttggaatgaattgtaa

SEQ ID NO: 24708 - DNA, 630 bp, Escherichia coli
atgaccactcaactcatccctgtgtttgaaggtacaatctcaaatgaacctacgcttctggtgaacgcgcgtgatttgcatgggtttttagaggtaggtaaagatttttctaactggatacgggccaggctaaacgagtatggattcgtagaaaatttagactacattctattttcgccaaatttggcgaaaactctaggccgccgccgcaaggactaccacctcaccctggacacagccaaagagcttgcgatggttgaacgaaacgaaaaaggccgccagatccgccgctacttcatcgagtgcgaaaagaaacttcgcaacattcagccagtacaagcagaatcacagccacaatttaccgccgaggaaatcatcctcctttgctacatgcaactctggatggaaaaagcccaggaccttagcaagcagctgtaccccataatgaaagagctgaactcctcatacacgaacaagctgtatgacattgcgtttgagactatctacatggtgacgaagaacagagacgcgctactaagggaggtaacacgtctcgacatgtcaagttccgttatccagcgggccatgccaatgctgaaaagcctgcgggcaagacaatttgaattctga

SEQ ID NO: 24709 - DNA, 489 bp, Escherichia coli
atgcgtttcattaagctgatgtatctctctgaccgcaaagcaatggagttgtatggttttcccattagtggtgatcattatttctctatgaacaaaggacccgttttatcgcagacatattctttggttaaggatggaagtgaaaacgagtacagtccgtgggaatcatggatatctgatgtagcggatcataaggttgaaatgtggcgtacattttcttctgttgatgagctgggggagttatcgcccgcagaaatagagtcaatggacataatttttggtcaatatggaggttgggatgcgttcaggctttgtgatgaaactcacagaatttgcggtgagtggcgcgatccgcatggttcatcaattccaatcagccttaaggatatatttattgctcttggaaagttgccagaagcagcaacagtaatggcgaatagcattaatgcgcaaaataatcttgatatattattaggtgatctgaggtag

SEQ ID NO: 24710 - DNA, 189 bp, Escherichia coli
atgaacgggcttatgcaggatacccggaagagactgaaggatttgcgtaaacaacgtgatgccatttacgccgacagtactctcagtctggcgcaacagtcggcgatggtgaaatcggtagagcgggatatgaaaattgcagtggatcggtttaaccgcgagtacaacaaaaaagtgggagtggattaa

SEQ ID NO: 24711 - DNA, 528 bp, Escherichia coli
atgagcgaattaaccgtaaccgtacgggatcaagatggtgatatcactctgacgcgccaggatttattaaaatatacgactaacgctaatgttattgctgctgcactaatgattcgtgtgagccgctacgctttttctctgttgtctccgcaacaaccggtgatgcgccgcgagctttactggagtctgggttttcccggtccgggaattgtggattgtgtagagatactttctcacgctgtacgtgaaggacgttgcctgcaaaaccctactttaaggcaccctgatgcccctttctctttagggggacagtttatttttgagattagttatcgtggtaaaactctggtggtatggcctgataagtctgtgtttgatgatgagttccgcactcaggtggccacctggcaagaagcggaagagggatgtactggacgtgctgatttcttgctgtataaagaaaaaaaagtggggttgattatgagcctgactgatgaaaaattgctgcattctacgtggaaagcctga

SEQ ID NO: 24712 - DNA, 942 bp, Escherichia coli
atgaaaaagatacttctgaccacgttgttttctgcattgttgagttctggactggcccatgcggatgataaaacgctggatatcagctatgttaaatcaccatttaatctgcaaatgattgtaatgaaggagcacaacctgttggaaaagcaggctgaatcgctgggattaaacgtggaatggcacgaaattacttccggagccaaacaggctcaggcgctagctagcggtgatcttgatattgcaggggtaatgaatacttcttcagttttaatgtctaatagcgagggtaatcctgtgatgatcatcgctggtgtttctcgtcctaccgatacttttgccattgtaggggctaagaatggtgttaattctattgccggattaaaaggtaaaaagattgcagggcctaaaggcacggttttacatcagacgttggtggctgctttggtgaaaaatggtttaagcatgaacgatgttcagtttgttcaaatggatttgccacaggcatttgcggctttacaaagtagtcaggttgatgccgcactattggctgccaccatggtgattaaagcagaacaggaaggagctaaagtactgacgaccgccagtggtttggttgtacctaaattggtcatggcatccagtgataaggtagttaaaaaacacccgaactggattaaagtcgtcattgctgcccatgatgaggcaagtacatggatagaaaaaaatcagtcggaagccatagcattaggcgcaaaagtacagggcattagcgttgaggatgcacagaaattgtataatcggtctcacttcactcagcgtctgaatcaggacgatataaccagcatgaaagaagatatccaatttatgattgaaaatggaatgattcgcaacgaaattgacgttagcaatattgttttaccacaggctatggagcagtaa

SEQ ID NO: 24713 - DNA, 669 bp, Escherichia coli
atgatagcattatctcatattaataaaagctatcagcaaaaacaggtattgatcgatgtctcactttcgctgccgccgggagaaattatttgcttgctcggcccttctggtggaggaaaatccactttattgcgtattgtagcaggtttgattaaaccggatagcggaacagtcaacatctctgcatcacagtgtgccatggtgtttcaggaaccacgtttattaccatggttaacggtagctgaaaatctggcattagctttgccatttttatgtagcagaaaaattaaacaagccaaaattgctgaagtattacaacaggttcaactgggagaaagttattccctgatgcctcatgaactttctggtggtatggcgcagcgagtaggaatcgcaagagctcttctgcaaaaaccacaagtattactgatggatgaaccttttgcagccctggatgccatcacgcggtcagaacagcaagaaatgttaattcgactgattactcatcaaaacattagttgtttgtttgtcactcatgacctcaatgaagcgataactattggtcagcagattttagttatgagtcaaggacgaattgcggtggtataccgccgccatcatgatatttcccacacagaattaaaacaacgaatactgacccatttataa

SEQ ID NO: 24714 - DNA, 756 bp, Escherichia coli
atgcgctattggcgaccgttgctgacaccaatattactattgatttactggcaattgttatcaagtttggagttaatctctgcttatttactaccatcacccataacggtgttttattccgccgtaaatatgtggcaaattggcgcattgcctcgtcatatatccacttcattattacgagtgtttgaagggttttgtctgagttgttgtcttggaacgatgttggccggtttggttgctcgttactcatggctggaacagttattgtccgcgcctttggcactctttcgtatgatccccccattggccatgacgccattattgattttatggttgggtattggggagacgacacaactctcgattattgttttggcctcggtgtttcccatatttcttaacactcgtgatggactgcgtcgcgtcagtacagcccataaggaattggccattagcctgaatctttcacctttacgctatctgttggcgattgtaattccaagcgccactccttctgtggttactggttttcgtctggcttttggttatagctggcgagcattaattggcgcagaattgatcgctgccagcagtggactgggatacttgattattgattcacaagagatgatgcgtactgatgctgtaatagtgggtattttaaccattggtttaattggctggctattggatacgctattttatcgctcattggtgctgctattacgtcgtcgttttccggaggtaacaagctga

SEQ ID NO: 24715 - DNA, 558 bp, Escherichia coli
atgagtactaatccaggtcttatccctgtatcccaatgggttatgccatccctaaacgttgcagataatcatcagcttttttctttctcggttcaggatgccttcaattatcatgggtatgatgctgttggtggcgtagtactgggatttcggttactacaaagggctatttcattgctatcaccgcaggatgagcccctgcaacgtcgggaattagcattatttacagcctttccggggaggggagcccgtgattgttttgagttggtaacccgcatggtgtcggaaaatcgttttatattagatgtcgactttgaccaaaccgaagcacagcaaggtcttactggacgtttctattttgaatttagttatcgtagtaaaaaagtatcattagctccggtaggcgggcagccaactactgaatttttgaaaatagggcgtgcaagtaagcagccagatgcaacaccagaagttcaacgacagtggatggtggctaaatatcagttagctaatacgctgttaaccgtctcaccaatggattcaatacaggtattgtga

SEQ ID NO: 24716 - DNA, 888 bp, Escherichia coli
atgaacaaccaaaactattttttagtccgttgtatgtacgtaattctgatgggactaggttttcctatcatgagatatatgagtttaaactttgacacattaaataacaatgctatcagatttatctctggaggtgttattttttgcattgtctgcttattaaagtacaataaccacttaaaaaatataaatattaaaacaatactactgctttttgttctttctattttcatgacatgtaacatgttcttttttattaatggaataaagcatacttcagccttatcagggagtatttttagtatattagcaatgccattaggtattcttgtcgccagtttattttttattgacgaacgagaaagagcacttagctataaatttataacaggttcattaattgcaattattggatcatttatttttgtttttaatggttactctttggattccggctcatttagttatacaggctttatatttttaaccatcgcaatttgcattcaatcgatacaaaatgtcattgttaaaattgtagcacaataccttcccgcaattgtaattagtgcgtcaacagcaacaatttcagggttaatgtttttattattagcaataaaaacaggcgttatcacagaattatcagtaacatccaaagaattattaatatatttggttcttgctggcatatatggaatgatgacaggtatgcttatggcattttacatagtaaaaacacaaggggtaactatttttaatataactcaattactaatccccgtatcaacaggaatttttggatacatcactttaggtgaaaaagttgatcttattcaggcaacaggagcagtgatcatcattgctggctgtatttttgcaacaaagcgataa

SEQ ID NO: 24717 - DNA, 996 bp, Escherichia coli
atgtataatgttggtattattgggctagggcaaatagcttattcaatcgataatgacccggcaagaaagattacctggtctcatataaatgcatacaaaaagtctaaagatacgcaagttatatcaatctgtgacatagatgaaacacaagtcaaaaagatatcacaggaatgtgatatctattcagggtataccgattacagagaaatgctcaaaaatgaagacctcgatatagttagtatttgcacaccgataaatactcatgttcaaataataaaagactgcataaagcataatgtcaaagctatattttgtgagaagacaatatcatacagtctggatgattcgagtgaaatcgttgaattatgcaagaaaaataatatagtactggctgttaatcatgtccgtcgatgggatgattttaatcaaaaaataaaaaatataattacacaagataattatggcgatatttatactattgactgctatggtggaacggcactccataccagtacaagtcacttaattgacttaatgtgcttcttttctgattcagagccagaatggagcattggatgtaaacaacaggattatgttcgtaatgttcacggtgtacatgattacgggggcacagggtttataaaatttaaaaatggaattattgggatagtaaaatcaaattcatcttctgaatttaatatttgctttgaaattgatattgcatgtaaaaatggaagagttattataactgacgctggagatacatgtgagttttataaatttacacacagtaatagttcgagtggtagtcattacaaaacgttatctctcgtacataaaatatataaaaatcaaactgaaagaatgatcaatgctgtaaataatatcgttatggcattaaaaaaagatcagcaagtcaaatcaacaggtcaaacatcattagcttccatcaaaataatcagtggtattttatctgaggaaaaaacattattctaa

SEQ ID NO: 24718 - DNA, 1719 bp, Escherichia coli
atgccacggcgacaaatactgagtagtgaagagcaagctcgcctgctggttataccagatgatgaaattattctgaccagaatgtgttttctttgtgataaagatattgctctcattaataagcaccggcgtccagctaatcgcctgggctttgcggtattactctgttacctgcgtgggcctggatttgttccggacaaaaataatgttccccactgtggcgttgtatccagaattgcttcaagactgaagcttcagcccgatttatggcatgaatatgcagccagagagcaaacccgctgggagcatctggctgaactttatcgctacctgaaattatctccgttcagccgaactctgcaaaaagactgcattcggcatctgcattcctatgccatgcgaacagataaaggatttactctggcggaggaaatgctcagttggctacataacaataatgttattttcccgtcggttgatgtgatcgaacggacgcttgccgaagccatcacacttgctgacagatctgttttttcggcacttacgacacaactgggaaagcagcatagatctgcactcgacagcctgctcatatcagaaggggaacaaccttcccgacttgcgtggctacttcagcctcccggtaaaattaacggtaaaaacgtgctgcaacatatcgatcgacttaattctatcaccgcgctggaattacctgatggtattgagctttccgttcaccagaacaaattactcaaactggcgcgtgagggccgaaaaatgagcagcagagatctggcaaaattcaccgatatcagacgttacgctacgctggtttgtgtcattcaggaagccagagcaacattgactgatgaagttatcgagctacacgaacgcattatgggcggtctgttcagccaggcaaaacgcacacaagccgagaggcttcagttaacaggcaaacttatccagagcaagttaagacaatatgttactgtcggtcaggcgctactgcatgccagaaagtcaggtgaagatccctgggccgcgatagaagatgttattcccaggcaggagttcgtcaacagccaggaagaaacacagttgctgtcccgtaaaggtaatttcgatcctcttcacctgatcaccgaaaaatacagcacacttcgaaaatacgctccacgaatgttgtcagcattgcagtttgtagcgacacctgcggcgcagccgctcagcgatgcactggatactataagggaaatataccgtaagcagcttcgtaacgttccgcctacagcgccaacagcatttattcctgaaagctggcgaaaactggtattaacgccttcaggcatcaatcgaaaatactatgagttttgtgtactgaatgaactcaagggggcgttacgttccggagatatttgggtaaaagggtcgcgtcgttacagaaattttgatgattatcttatcccggtcactgaatttgataaatcccgacaaaatgaccagttacaactggctgtgcagactgattgccatgcatatcttcaggcccgtatgacgcttcttgcatctcgtctggaagaagttaacgcaatggctcttgccggtgagctgccggatgttgatatttcagataaaggagtgaaaatcactccgctggagaacggggttctgaggtgtactggcaatagcggacactaccatttgttctttttttaa

SEQ ID NO: 24719 - DNA, 216 bp, Escherichia coli
atgaataatgatgagctggccaccagacgtgcgcaggcgattgccgaagacaggtgtttctcgaaaggacgtctgcgcgatgaatccagaatgaaaccagcccccggtgctgagccggttaagtggtataaaaacacttatggtggcaggttcgctgtaggggtcagtttggatatgggaaaattttgtacgttaagcgcattatttaaccaatag

SEQ ID NO: 24720 - DNA, 219 bp, Escherichia coli
atgcttcttcctgccaaattttacgcctgcggcaagtgccgctattctgccgtcgtttgtccgctccagaatacgctcacgttccgcttcagctacggcagcaaggatttggataaccattttgcccattgtcccttctgtactgagaccgttctccaggaaccggatggcgatcccctttttgtaactattctcaataagaaacacgccatcgaatga

SEQ ID NO: 24721 - DNA, 288 bp, Escherichia coli
atgattactgttattatttttgagatgaatggctggcgtgaatggacacaccgcgcccgaacaaaggatgcacagacagccatcattcgggctatgaataaacattttccacgatcttaccatttcgtccctgatgatattgataatgcacctgtattatttgaatctgtaacacgtacaccgaatgtaaaaataaccggtcatatctggaaacctatgtggaacaggggaatttgctggagcgtcaagggtccgtcagtaattgtcacgctcatccagggggattga

SEQ ID NO: 24722 - DNA, 666 bp, Escherichia coli
atggataatcttttgaaggcatgcctcgcattttcttttataagtggaacatctgttcgaccaacctgttcaacgccttactccaaagtcgctttaattcaacctggagagaaattcccaagagatcattcaattcactcacctgaatcttgcttgaatactttaagtgattacatagattttgttgaggtcttctgtaacaataataacattttcagcacggaaaaaatgttacttataatacattattaccttgattctattgctgcgtggtctttagaaaatcaatatacccttctcacaactatattacaaattattggagatacggaaaaaacatctggaagacaatttgccaaattgcatgcaacgcaaagaggttccaaggtcggtttttatgattatttagcaggcgcagcagatcgagcaggaatcaaaaaattaacatttaatgttgtgaaactaagaaatgaattgatacatgaggggaagtttgataattctacacacccatctaaaagtaatattaccgacttaatttcagaaagcttttcttggatagactcctatatattcaaaacaattggagtacaacaccaacctaatcaaaggtatgcatctaaaatgcttgaaaattatatgaacagtttctcctatgatctttag

SEQ ID NO: 24723 - DNA, 213 bp, Escherichia coli
atgcaagggttttatttaaccaatttacttccacctggtatgccaagtgaattttccattactactaacggcatcctctgggaattagaaaaaatacaacacgctaattttaataaagttattgaacagattaaaaatggtgcatgcgccaatacatatactatgtcaacaaatataccaagtaaccaactgagggtgtctggattaatttaa

SEQ ID NO: 24724 - DNA, 261 bp, Escherichia coli
atgaaggttagttttgatgttgttattaaaagtggtgcttatgatgttgatatggattacgcgcttaaaacattagctggtacatcgaatgtagtttgccttttggcagaagcgatacttcgtggaagaattattgaacggcgtacctatgcaaatgatatcagagcaaagcttaaacacagttttccgggttcttatggtcaaaaatttgacatcgagataaatgactcgacactgatttctcgtttgaattctaggtaa

SEQ ID NO: 24725 - DNA, 213 bp, Escherichia coli
atgaatgggcaagttaacaaccataataattatcattctaatatattcacgaggaagttttccgttagtgctattcgatatatggtcttttctcgctggttatacttcgttggtgagaatagtaaaatctcgtttcgttctttgtggttttctccgcgcttatatcaatctttgtcttttattcactcttatcctttgattaatactggttga

SEQ ID NO: 24726 - DNA, 387 bp, Escherichia coli
atgtttaagcctaatagtgtaattttgtacgttgataacgtagagaccagcaccgcgttttacaaatctatttttggtgaggggccggtagaggcttttcccggattttcagtattcttgttaaaagatggttttattctggggctacagtccaagcacgacattgagccgaaacctcaaccggcatttggtggatttgagctatgcctgagtgatatttcgatcgaggaggtcgatgccatatatcgcgactttaaagcgcgcaatattccaatggtattaccaccaagcagactggagtttggctacacatttgtggcgctggatcctgatgggcatcgtattcgcctgtgtgcgacggatacaagtgggatcgagaagttgtaa

SEQ ID NO: 24727 - DNA, 783 bp, Escherichia coli
gtgagaaaggtatggttaatcaccggtgcggctcgcggctttggccgtatctggacagaagcggctcttaaaagaggggatgccgtcattgctacggcacgtgagccggagaaattggctgagctggctgctaggtatggcgagtgtctcttgcctgtgaaggtggatgtgtgtgatcgcgccgctgttgcgtctgcagtggaaactggctttcaggctttcgggcgcatagacgttgtggtgaataatgccggttatggtctgttttgccccttagaggacgtgccggaaaaggaagctaggcagattgtcgaaactaatctgctggggtcgctgtgggttattcagtcggtgctgccatatttaaggcgacaagggcatgggcacattgtccagatttccagcattgctggtttgctggcgttacctggcatggcgatgtacaacgcgacaaaatgggcggtggaaggaatggtcgaaacactggctcacgaggttaaagagtttggaatcaatgtaacactggtagaacctggcccccaccttaccgattgggtcggcagttcggctgtgcgcccagaacgcggtcaggcctatccctcacatgagcagatgatgcagcaaagctggccacgtttgccattggccgctcctgatgccgccgcggcgccgatgatggcgctggtagactcgaatacgccaccgttacggctactgttgggagagtcgttaaatgcattgatcatgcaggaggggcagctgcgtctggctggcatcgtataa

SEQ ID NO: 24728 - DNA, 459 bp, Escherichia coli
atgatggaaagtgaagtgcgtgcgagaaatcgcgatattgtcgagcaatatatgaatacttacgggcaagcccgtttatccaggcacgaactgtttgacgaggaaggatgtggaggactttggactactgatagtggcgaaccggttgttatcaagagcaaaaagcagctggctaaacatgcagtatggtcgttagcctgtttccccgactggcgctggtacaatgtgcagatattcgatacacaggatccagatattttttgggttgaatgtgatggtaaaggggagattaatttcaagggctaccccaaaggattttatcaaaatcacttcattcattacttccagtttaaaaatggaaaaattatccttcaacgtgagtttatgaatccttgccagcaattccgggcactaggtatcgaagtgccgaaaataatcagagaaggaattccgacttga

SEQ ID NO: 24729 - DNA, 621 bp, Escherichia coli
atggctatacctgaaattgaagactatgatctctgttcggtggtatcgttaatgccaaataaagtgaactggagcatcactccatccaggagcttgcttttagttcacgacatgcaaaatttcttccttaacccgttacctgagttattacgaaataccttgttgacgaattgtgcacaattgttagcctgggcaagaggccagtccattcctgtggtttacaccggtcagaaaggcagtatgaacgccaaagagcgtggattactttatgacttttggggagtgggaatggatgccgatccggtgcacacagcaatcacaccattattatcgcctcagccgggcgagccagtattaaaaaaatggcgatatagcgcgttcttttcttcggagcttgctaatatcttttcagaccagcagcgtgatcaaataatcatatgtggtgtttatgcacaaatcggtattttaaccacagccttggatgcttactctagggatattgaggtctttttagtgcgggacgcgatagctgatttttcgcaggcggcccatcaacgcatgctgacttacgctgcttcatgttgtgcgtcgatattatcggtgggcgaggtgacggcatga

SEQ ID NO: 24730 - DNA, 1866 bp, Escherichia coli
atgaatacagatccggcaatcacctctttgttgcggcatggcagcaaacatgaatcgtttgcgctgttattcagatgtgagcacagcgcagttcccgaaatcgaagtaatcataggggaagaacggcatctaaacagtttgcagagtctggctgatttaccaacgaatgctggcggtagcgatgggcagcaaacgttgcttgtcgcgccttatcggcagattgctgaacgaggctatgctgttaatgacgacggtaaacctctcattgcgttcatcaatacacgcagccataaagtaccactccatgaggctctggccttgctgcccaatgctccattgaaggtgaacaacgccgtgtttgagccttcggacgatgagtatgcgcatatggtcgctcaagtcattcagcgggagatcggcactggtcaaggagctaacttcgttatccgccgcgcctttactgccaccttcacagattatggctgcgagacgggattaactctctttaaaaacctgctgctacaagaaagcggcgcttactggacttttttcattcagtgccgggatgtcacgttgataggcgcatctcctgagcgacatatcactctgcagcaacaaagagtttccatgacgccgattagtggcacctatcgctatccctcctccgggcctacccgtgaagggctgcttgacttcttatccaatgagaaggagaaggatgaactatcgatggtgctggatgaagagctgaagatgatgactcgcatctgcgacgccgacgttaaggcatttggtccctttttaacgccgatgtcgcgtctagtgcataccggctatcggcttgaggggcattcgtcgttgcccgtacctgagattttgcaatcttccatgtttgcgccgacagttaccggcagcccgctggaaaatgcggcgcgcgttatcgccaaatatgaagcatccggacgaggctattatagtggctttgccgccttgctgggctatgaggacggtgagccgacgatcgattcagcgatcctcatcagaacgagtgaaattgatccgacgggcgcgctaactctaggggtgggagctacgttggttcgcacttcagatcctgacgcagaagcggcggaaacccgggcgaaggccgccgcgttacagcgggccatgggtgtgaatggaaagtcaacgtccatttttcaggatgaacaggtcgccattgcgctacaaaagcatagtcatcgcctcgcagctttttggcgtgataacgccggtacaaattcaatatgccataagggcgaggtgctgctgattgataacgaggatgccttcacctcgatgatgaagtatcagttgtgtgcgacaggattcaacgtccggcttgttcattacacttctcctatccaacccaagccgcatgaactgcttgtaattggcccaggtcctggcgatccacgtaatctgagcgacgaacgggtgatctgtagccgcaaactaattaagaccgcgatgcaagaagggcaaccgtttatcgcaatctgtttcggtcatcagattctgtgcaccatcttggggtacccgatagttgcgctgacgttacctaatcaagggatccaaaaagagattccattttttgggaaggtcgaacgcgtgggtttttacaacacgttcaccggactggcgaccagcaatacgttagccagcgagtatggcgagattcgcgtcgcgcgggatgaggcgactggccaaatttatggtctgcgcgggccgcgcttttcatcaatgcaattccatccagagtcggtgttgaccatcgatgggccgcggatcctttatgaatcaatccaacaggtggtggcctcatga

SEQ ID NO: 24731 - DNA, 354 bp, Escherichia coli
atgatcatggaatgcgtgtggtgggagttggggccgggcgagccggacatcaagcaactgcaggcgcagcttgagcaagtcgacttggtcgcttggcagcgaattcacgccttgcaggtcaaatactggattatgaatgagttgccgccgcgttggggggcagtgatggtatggcgcgatgataagcccgaactcgcggcgttgccgttgaatgcggctgctgaggcgatcggccgggagccagatgtgcggctgcgtttcatcgttgccgcatcttgcctgaatgaatcgattatcgcgccttgggcgtctttactgaatcgggaggaaacatgcaccgctatgtcatcgtaa

SEQ ID NO: 24732 - DNA, 846 bp, Escherichia coli
atgcaccgctatgtcatcgtaaatgcgttcagcgatcgtgtgctggctggcaacccggtcgccgtatttttcgattgtgatgatcttgaaccggaaatcatgcagcgcatcgcggcagaaatgcggctttcagaatccacatttgtgtcatgtcctcgtagcggtggggatgcgcatgtccgtatttttactccggtgaacgagttgggatttgccggtcatccgttgctgggaacagcgctggctctgtctctacggttgaaaaaaaacaccctgaatattgaaacggcgaaaggcattttccccttcacgctggagaatgccaggctgcgcagcgatttgccggtcgcacatgtcgatatgcttcagccatccccgataatccaaccttatgcgcaagctgaagcgctgatgctcgcgctgggggtgtcgcacagcaccttgccgattgaacagtacgatgttgggccgcgtcacgtctttgtcggcatcactgatatacaaactctggcggccctcaatcccgatcagagagcgttggcacagcatgagaatatggccgcgctctgtttctgccgtgacggcaattactggcgtctacgcatgttctcaccggcatacggtgtagtggaggacgcggcgactggctcggctgccggacctttggcgctgcatttggcgcggcacggctggagcgactttgaccagccgctggagatctggcaggggatagagatagggcatccgtcaaaaatgtacggcatggcacatagagatggcgagacatatcggctgtatgccggaggacaagccatccaagtagcgcagggcacctacgcaatttga

SEQ ID NO: 24733 - DNA, 636 bp, Escherichia coli
atgggaagcagtgcgtttgaaagtgtcagcggcaaggtagatacggactttttgcctttccatacacagctgaatcaaccgattgaactcgcctgtgcctgggtgcaggaagcgatacgcgaacaggtcagagaaccgcgtgcaatggtgctaacgaccgccaacgctcagggggaaatgagctcgcgtgttatggcaatcctcgattttgatgaaagaggtattctgtttgctactcacagctgtagccgcaagattcaggatatcaacagccatccacatgcttgcgctcacttttactggaaagagttgggacggcagctctcagtcagcggcagagtggttagacagccgcagtccgtgtccaaggcggtttgggaaaaacgcccgattccgttgcatgcgatgtcgacagtttctcatcaaagtgaaccgctgttggacagtgagacgttgcgtcgggcggcaaaggctcttgagagcaggggagcattgccctgccctgagcgtttcgccgtctaccaattgataccgcaggcggtggagttttgggccgccagttctgatcgcctgcaccggcgactgcgggccgagtatcaccggaacgaatggcgaagcacttggttacagccgtaa

SEQ ID NO: 24734 - DNA, 1059 bp, Escherichia coli
atgaatttacctgactttactacccatctgacgggaatgatgaaatggcatttttcaccagaaactggtgcgccgttctggttggaaatgcgccaatcgctcgattttgatccgctgcatgaggttaataccttcgccgatctggcgcgtttccccgatgtctcggatcgtttacgcgatattccagtcgaagcgctgatcccgcgcggtttgcatcacttgacactggcgggcgtttttgaaagcggcggcactaccggcaagccgaaacgcatcgttgtgtttgagcagtggctagacgagttggttagctggcgtttgtccggcctgctgtctggcactgacgaacagcccggcaatactctggcgttggtccccaccggtccgcatattgtcggcgcaatcaacgctcgtcgtgcccgggctaaaggtgggttgtgttttagcgtcgatttagatccgcgttgggtcaagaaatgcattcagcgcaacgatatagcaggaatgcaagcctatgctgcgcatatcgtcgaacaggccgaggatattctgtacacacagtctatccagtaccttatcgccacgccgccgattctggaacggatggcgcaacgcccggcgctggtagcgcatatgaaccagaccttgaaggaaatcacttggggggggacccaaatggatcccgatacactggcgttcctgcagaaggatgtatttccgatggtgccgatcaacgccagctatggcagtacgatggtactgggagaagccaaggcgcgttgcccagtggattccagtgattcagtaattttcgatagttttgcgccctatatcttgctggaggtggttgagccgcaaacgcggcatcccgttcagtttggcgaacgcgggcgagttatcatgcatcatcttagccgttacgccttcttccccaatatcctggaacgtgacacagcggtacgctggcctcgcaacgacgattttcccggctcgtcagtcagtgatgttggtccgttgccggtcattgacggacgtacggtcattgagggggtctattga

SEQ ID NO: 24735 - DNA, 1371 bp, Escherichia coli
atgcactctccttttgattcttcaaccgtggagcagattgaggccattgcgatggggcgcgagtatgcccctcggcgccgagtcacggtccaggatctgctcggtactcctgtagcggaaatggcgatcgctccgccagtttatatccatagtaccgttagctcaatgagagaagcccccactttctccctggcggaaattcattctgcaatggcacgtgcggcggatagttttcaacatgactcgatcgcggggctgtcacccgatgcatattgtcaacgggtacgccgtaccaccggcttaccgatggcagtgacgcaaaacgccttggcagttatcgcgcaggcactgcgcgatatgccgcagattatcgatgcgggtaggccaaaaggtgcttgctggtcaaggtacgatgcgcaggcgttggctggatgcagtttattcagccgaaaaggagacgttttcgcggtactggcggctggcaacgggccgggcattcatgcactttggccgcaagcattagcgctgggctaccgtgttcttgtcaggccttctacgcgcgagcccttcacggcgcaacgcgtggtctgtgcgatggtgaaagccggcttggcgcattatgttgcgctgatccccacggactatcgcggagcggatgagctggtggcttcggctgatctgacgctggcgtatggcggccaagatattgtggataaataccgttttcatccccaggtgcgcgtgcaagggcctgggcgcgccaagattgttgtcggcgctgacgcttgcttggatgaagcggctgcattggtggcaaaatcaatgaccgatctcggcggtgccgcctgcgtgtcggctagtgcagtgctagtagagggagatacgcatgacttttgtcgacgtttaaggctggcactgcaacagctaccgctggagaggttgccgcttgtatctcggcaatcggtagattggctgagcagcgtgcttgattcgcccattgaggttgatccgacgccggagggctacgtgctgtatccgctggtgactgaagtgactgagcctgatgatccgcgggtacagcgcgagttgcctttcccatgcgtgacggttgcgccttatcaggctatacgcagcgcaccgatgctatctggatctctggtcgtgacagtcttttctcgacaaccccagttgctggaaccaattttatccgatgccagcatcagtaatgtttatatcggcgacattcccactacctggatggctccctcggtgcctcacgatgcctacctgagcgattttctgatgtgtaatcggggatttcgcgtcgcaccatcctggtcagaaaataaaagtaaaggagagatactgtga

SEQ ID NO: 24736 - DNA, 933 bp, Escherichia coli
gtgacccccccttatgcgctgatttttggacctgcagatgtttcccacatgatgaaagacatgcagcgtctttacgataaccaccctcaggttcgagcccgcttcgggcaagttgcacgcttggccggtgtggatgtcaacacgatattacgtaagacgccgctgcctgatgacacatcatgcatgcaggtagtttctttagggctactcgctggaatgctgggcattgccgacgacatcgttgaacaacgtggtgcgccgagctgtgtaggtggcatcagccttggagaggtggctgcgctctgtgtaagcggaggattaacggtggacgacgcaaccgcactgattagcttgcgggccgacacaccagagggcgaagacgaaacggtgggatttgtcatggtgacggaggagcgtgaacgcgatttctatcatcagccgccggaaatgcgcattgctgttgattatggattgattcatcatggtattggctcactgctgatggttgccggattgcgacgggtgctggaggggcgtgggcaggaaggttcaggtgtgctggaggtgctaccgccggcgttgtgcaactcggcgtatcacaccccttatcgccggcggatcgctgaacaggtcgatgcatatttgagggagcgcgttttgccttcgctgcgtttcccggtggtgacctgcttgccagagatcggcatagttgacgatccgctgggagtcaaacagatgtgtgtacgcggcgaaacggaaacgttatttgtgcctgcgatgattcggcagatgcagagcttcaacgtggcggatgtcatttgcattggaccgttcctacgtagtctcaatatggatttcggcggtgtatcggcctcatttcgtgatgaacagtgggtagacgatattatgtcgtctctctcggcagttgaataa

SEQ ID NO: 24737 - DNA, 1770 bp, Escherichia coli
atgccagacctgatgacaggaaatcgcagtgtgaatatcagtgaaaccggcaacgtggccgagttgattttacagtcaatcgttacgcatccagagaaaactgcgctgatcaacggcgagagccgtatggattacactgaattcgggcagcgtgtcgttgccgtacagcagcaactgaaggaggccggtgttggcccgaatgacgttgtcgggttattgctgcatcgcgatcaatggctgatcccggcgatggtcgctacattggctcttggggctacctttgtaccgctggacccaacctatccattgtctaggttgaaacgctacgtcgatgttgccaaaccgaaagtactgctcattcatccggacgagaacgttctggcgcgacagttgcaccagaacgtggtgtatcccaaacttgacgcggtcggaaagatggtttgcgtcaccagacggtacgatgacattgcttacatcctgtttaccagtggctctactgggcaacctaaaggcgttagcatcgggcatcaagcattacgcaacttcttaatcgccattgccgagcggttggaagtgcgctcatcccatatctttttggcgcataccacggtagcgttcgatatttccattcttgaactgctcctgcctctgagcgttggcggggcggtactgttggctaacaatgatgaagtgagtgccatcgaaggtattatccctctgattgagaaatgcgatttcattcaggcgaccccgagcctatggaaaattttgtgggcaactggctggcgtcctaaagcttctatgacgctgctgaccggtggtgaggcgatgccattggcattggcgaaaaagttgtgccaggtatgtggcaaattatggaatatgtatggcccaacggaagcaacaatctggacatcgtgcgaatgtgtagaatgtgacgcagattatatttccatcggcgaaccgttggcgaatactcaactgcatgtgcttaacgaagcacttgagccatgcgagctgggggaactctatatttcggggctcggtctggcacaaggttattacggcaacagcgaagggacagaaaaagtgtttatcactcaccaacaaaccggcctgaggctttatcgctcgggagatcgcgttcacttgcacaagtcgggaaaaatagagtggcttggacgtggtgaggaggaaattaaaattcgcggtaaccgtatcggtgtgagcgagattgagcaagagctggagaatatctctggtatcactagcgcggtggtggcggccaggccgtttgaagggcagggggatgatatgcttaccgcgtatattgtcagccaggcctcattgagcaaagcgtcgctggaggtttatttagctaataggttgcccgcttatatggtgccagatctgttcgtagtactgcctgaatttcctctccagccgaacggaaagcttgacagaaagtctctgcccgatccctgttggaataacacgttgcaccatgacgcagccggctcctcggaagcgcaggacaatgtccaacggcaagccattgttgagacggtttgtcaggttttcgctaccatattgggatgcaaagaatttgacgccacatcaagctttttcgatcgtggaggcaattcggcgctggccgtaatttcagcaggcgttatcagtacgaagttacaacgtaaaataccggtatccttgatcatcagcggtgaaaatcccgacgccattgcagagcaaatattgcaacactcctga

SEQ ID NO: 24738 - DNA, 459 bp, Escherichia coli
atgaataacgaacagcaattacgtgaaatctgccaattcattaatcgggagcgtgtattaacgctcagcgccgctgcggaagggatagtgtggtctgcaagttgtttttatcaattccaaaaagagcaaatggtactgtacttgatgagtgatatcaattcacgccattcgcagttaatgcttaagacaccaatagtttccggaactattatatcatcggtgaaatcaatgatatcgatgcaaggagtgcaatacttagctcacatcactccattgtgtctggaagaagaacagcaagcgcgaaatttctattgtgaacgttatcccatcagccgcattatggacttgaaaatatggcgactccaattgatggaaataaagtttacgcaaagacgcatgggcatgaaaagatgtttgcattggctgcggacgccgaaactggagacatgtacacaatga

SEQ ID NO: 24739 - DNA, 1413 bp, Escherichia coli
atgaagaaaaaaaacattgctattatcggtggtggcgcggcgggcacagtagcggcttggcagttgcgcgactggcataatgtaaccgtgtttgaagcaaacccttatatcggcgggcatgtttatacgtgctttgttgataccattgaacaaaagaatattcccgtggatatgggcgtagagtattttaatgaacgggttgcaccgaacgtttctaatttactgaattacttaggtatcgaaaattacgtggcaccttcgtcgttctttgcttgtttccccgaagaagagcagtactggagtaatgttcactacgatggccctatgcgtcaggtcatgcagagcgaatttagtcgtttccagctgggcatgtcagaggtaatgagttctggagacgcgcgttataaaacgatgtcaatcgcggattacctggcggaaaatggctattcgtctggttttgcgtatcaggcactctatccgatgatcagtatttctaccggttgcaaagtcgatgtgagtagttatccgctgatgtttttcgcattgtcgttcaacgctaatctggtttcgttttttgcccccggttactggcgcaaggtcgttggcggcatgaatcgctacttgcaatgcttggccgacgagttgggagatcgcgtgcggctgaatacaccggtacagtgggtaaaaccccgtgacaaaggcgttgtattgtttcattcgggaaaagaggagatttttgatgctgtgatttttgccacttcggcggaagtaactctgtcgctgttgactgaggcaacggcacaacaacgggagatcctctcctatttcacctatcacgatatcgagagcgtggctcatcatgatacgcgttatctgggagggaaatcggaactacattacttcaactattgccagttcactgattttcctgctgaaacgctaggtgggagtgtcacccgtgtgattaacgcgttatcaccatatcgacatctcaccacgccgttgttggtgactctcgaccccaaaatccccattgatcctcaaaaacagataaaaacttgccgctggcgcgtggccagacagttgccaggagattttgcgcacaagatgcgtcttaaagaaatacagggcaagtccaacatgtggttttgcggtgttgacaccagcttgggaggacatgaaggggcagtagtgtcaggcatggtgattgccgagcggtttggggctccttatccttacaaacatgacctgctggcgtatattcaattccaggtaaccaaagatattatgggggtcaaaacgcgtggtgaaatgttaaaagattggttatccgaattgctattcttaaccgccaaaaaatgtgctctccataaaagtctttcctacaaattcattaaagattttattgtataa

SEQ ID NO: 24740 - DNA, 1041 bp, Escherichia coli
atgtacaaaatagatgaattacgtatcgacaatttagtaactcccgataaattagcggcgaaattaccagcatctgctgacattatcaatcatgtcactggaacacgtgaacgtatcggacgcattctgaatggggaagataaaaggttgctggtcgtgattggcccctgttcaattcacgacagggacgctgcgctggactatgccggactgcttgcgatccaacgtgagttgtatcaggaacgactggagatcgtcatgcgcacctatttcgaaaaaccacgtacggtggtgggatggaagggattgatttccgatcccgcgctggatggtagttaccaagtgaaccgtggtatcgaaattgcgaggcagatgctgttggatatcaatcagcttgggctacccaccgccactgagtatttggatgtggtggtatggcgctacatcgctgatttaattagttggggggcgattggtgcgcgaacgacggaaagtcaagtgcaccgtgaaatggcgtcagcgctagcttgcccaatcggatttaaaaatggcactgacggtaatgtcgccatcgctattgatgccattcgggctgctcgcaacaggcatacatttttctcacaagatcaacatgggcggatggcggtttatcaaactaagggcaacgctcacgggcatatagttttgcgtggggggaaaaaaacgaattaccatgcagcggatattgccaccgtgtgcggcagattgcgtgctaacaatctaccggtgcatttgatgatcgatttcagccatggtaacagccagaaattagcgcgtaatcagttaatggttgctgaggaggtttgtcggcagattcgtatggggtcgaaggcgatagccggcgtcatggtggaaagttttctgattgagggctcgcagccggctatttcagggcaggccttgacctatggacagtcgatcaccgatccttgtcttagctgggcggacagtgtgcagttgttggcaatgttagcggaagcggttgactcgcgcttctcttaa

SEQ ID NO: 24741 - DNA, 726 bp, Escherichia coli
atgtttacttttgaacagtatattaccgcatcaaatttttttgtttgccagcagggcatcggttttgtgaaaaaccatccggaaataagcgtttgcctagtggcttttgataagaactattatagagataccctgttcactcagttttcactcccgtttccgaatatgttggaatcagctgttataaaacgtagggccgaatatcttgccggacgttatgctgctggacagttattaaaaaaagttgggtgtaatggtgccgttgctactggtacggatcgtgcacctatatggccaaccggttggcagggcagtatttcgcatacagatacatgggctattgctattcttacacagcattatcccagtataagtttaggcgttgatattgaaacgtttcggcctgaactgatacgggaaatagccacaagatttactacggacgatgaacttgacgtattgactgcaagtggtatcccatttgaaatagcaatactcatatatttctctgccaaagagagtttgttcaaagcattatatccactagtacgctataaatttgactttgagacagctaaactatgtgaacttgactcacataatcagagttttacgatggaattgaccagacaattggcatcgaatttgtgtacaggatatcgtatcactggccattatatgatcagtcaagatggtgtaatcactatgattgtcgctttggtataa

SEQ ID NO: 24742 - DNA, 321 bp, Escherichia coli
atggaagcggcgaactacacgtttgagcacaatgggcgtaaatgggactacgggaagtcaacgcagacgcgtcttgagccgtcggtggcggcagcgaaagcggggaaactgccggagcagtttttctggacggatgcggacaataatgacgtaccgatggacgctgaaacactgattgctctgagtgctgctgcagagcaggcgatgttcaccaaagggatggaaatccacgttcgccagcgcaccatgaagaaggagctggaaaagctgaccagtgcggatgagatactggcatacagggttggctgggcacaggaataa

SEQ ID NO: 24743 - DNA, 192 bp, Escherichia coli
atgcaggagtttacattaaacgaaattgtggaaagagcgcagcaggttgaaatcatttgccgccttcttgaggtatgccctggcaaacttacggatgccgatatatccgcgatttccagtcttctggcgcgtctttccggcaatgtggcggcatggttaatagcggagggagagcaatacaatgaacaataa

SEQ ID NO: 24744 - DNA, 183 bp, Escherichia coli
atgcttaaaaccttccgcgtcttttcccgtgctgttaacaagcgcggctataccgttggcatcacgcagaacgtgaaggccgttaatatgcaagcggcgattgattcagtaatcagtaattccggtaaagcaggtttatcacatgtaattattgcagcagtacatgaattaaaaggggtgtaa

SEQ ID NO: 24745 - DNA, 1173 bp, Escherichia coli
atgcctgacatcctcaaacctgctgtccggtacatcgacacggcggataagttcgcactactgaacatcaaccatgctgattacatgcgccatatcgtgagccatttcgccgctgagcgcatgaaacacgttaagcaatacttggaggaggttttatcaaattatcgcgctggcggccctgtacggcgcgaatatccgcatgatgcaggaatgacaggcaaaacaaaggcgaccacggaagggttgccagtggagataaaggaaatcaagcgcatcaccaactatgccatgagtgtagctggtggacaaggctatcagcctggcgggcgatttttggttgcttttagccgccgtgggtatttgtccagaaatgcctcaagcgcaagtcgttttggtctggtgagaggagagggattaagcaaagactctcgcttctggcgtgctttttcacgctggcgctcaattatggataatgcgattgcctgtaattcttcgttggtcattgtctgtacccgtaaagcggtgcgctgtagtacctcatatcacagcgcaggtattttttatggttgtaatttgcgtgatgattcaggtcgctttgcgacatactgcataaacataaataacgtgatgttattatgtgctttcaaagaaaacgcaggtatttttcgcacaaacttctctcgcaacacatccgaccacttaagcaaaaaagcggcatatactgaggctatcccttataaaacggggatcgggcgtaggaacccgtttaatcagtacaaggcgacacaggcgcgcccagcgtctttttttgtgtcattccatcgcgcaaccatacccagcggcaaggcccgtactgtatctatggtggcgctggtggggcagccgaaaggctggccggtttccttgtacgccggtattcctacccccgccagcgtcaccgccctttatgagcgtaggaactccagcggtgactccttaaaacagtacaaggaggcctttcacatggctgtatccgcacgcccttactttgtctggcgctttatgcagtgccaccacagcaacatcgatgtattcaccgttaccgctgccactgaacgcgaagcccgcgcccagttgccgcgcgcacatctgatttttgtcgcccgaatccgtcaggaggcaagccatgcttaa

SEQ ID NO: 24746 - DNA, 849 bp, Escherichia coli
atgaaacgtccgaatatgcccgtacaggggcagggcttcgttcagcccgaagaactgagccaacagtatttcgccgcaattattccggtatcacctggcattattggcggatatgaaacgggcattgtcagcgcacgcgcactgcataaagcgctcggtgtaggccgtgatttcactacctggatcaaagggcgtattgaggagtacggatttaaaaaaggtgtggattttgaggttgtagaaaatttgtactttgattccccgaaacgggggagccaaagtgtaaatattgaacagtttgattctggctggacaacaaagcgcggcggtgatcgccgcagtgaagactatttgatctccacgaacatggctaaagaactggcgatggtcgaacgcactgaacagggccgcgcaattcgccagtacttcatcaaatgtgaagaagagctacacaaggcagcgccggaacgtgccgcagctttgcgccgtgaactgaaagcgcgtgtcaccgttgccagtttttttaagcctatgtgcgctgcgctggagttgtaccgcgcagagctgggaaaagagactcatcaacaccactacaccacagaatcaaatatgctggcgcgtatcgtgctgggcggcatgacggcgaaacaatgggcgcaggagaacggcatcaaaggaaaaccgcgtgacagcatgagcgttatgcagcttgaacacctttcctaccttgagcagagcaatatcacgctgattgagttgggtatgacttaccagcagcgaaaagccgaattaatccgcctttcacagcgctggctggcccgtcgcatgggagagcatgaacatgcctga

SEQ ID NO: 24747 - DNA, 216 bp, Escherichia coli
atgacagctaaccatcaagaagctatccctaccacgggctatatccgccgctgcaacctggctaagttgcttgataccagcgtgtcaactatcgaccgctgggtgcgtatcggcaaattaccgaagcccacgaagctgggggagaaaaacaccgtatttaatgcggtggagatcaaccactggctgaacgagcgccgcaacaacaccaagcagtaa

SEQ ID NO: 24748 - DNA, 651 bp, Escherichia coli
atgattaatatcctgaagaaatcgccaatagagcgcctttgcgcttctgtttcaatcactccccacgaaatggcccttgcgttagctgatcttaatccgtcaatgaggataggcgacgtaccgcaggacaagttcgaacaggtcgaatcagccagaacgatgatagcccgtgctatctggttgcatagcggcaggaaagcgggaaaggatgagccatacagagcgggggatatattccttgcgtccttcccgttcattgaggcaggaacgccagaggcaataattacggcggtaactgatgccattgatgatttacgaggaacaaaaaattgggaagaaaaagcacttaatcttggtgggcggcggctggtcagccacatcaaagaaacaagccgcagcggaagggggcagtacaggaaactcgacgaagaacagggaaacatgaagatgatggggttgctggttttactgctcgtgaagaaatcaggcacaaccgcatacattcaggacggagaaccaaaccgttcagccatttaccgcgacgtggaagcgctgatgaaggagaaagggatatcgccaaaagggatcgccaaatccacgtttatgcaaaaaatatcagccgcattactggcagtaagccaggcagattaa

SEQ ID NO: 24749 - DNA, 1323 bp, Escherichia coli
atgccatttatgtacatcactttatgtacacacctctattcaatgtttagggatgccttaatgccaaaacttacagatattcagatccgtgcctggataaaggcagacgagaggtttgacggcaaagctgacggtaacggcctgtatctctgctatcctaaaaattacacaatgcccttctggcgattccgctataagtttgctggcaaacaacgggcgatggttatcggatcatatgcagagttatcactatccagagccagagaaacagcaaaggaactatccgcccgcgtcgcacttgggtacgacgtagcagcggagaaacaggagcgtaaagccgaagcactggcaaaaatggaggcagaaaaaaacgccatacgagtatcagagcttgccgccgaatatttcgaacgccagatcctgccgcgctggaaacatcccgatatcctccgtcgtcgcatcgacaaggacataaacccgcgtattggtcatatgaaggttgaggatgtaaaaccacgacacgttgacgagatgctaaaagcaattgttgaccgtggagcgccaaccatagcaacggacgttctgcgctggacgcgtcgcatattcgactacgggataaaacgtcatgtgctggagattaacccgtgctcggcgtttgaagtctctgatgctggtggtaaggagtcatcccgcgatcgctggctgacccgtgaagagttaatccggttctttcaggccatgcgtaccgcaaagggattcagccgacagaacgagctaaccttcaagttgctactggcgctttgcgtcaggaagatggagttgtgcgccgccagatgggaagagttcgaccttgataacgccgtgtggcatttgccagaggaacgcagcaaaaacggcgaccccatagatattccacttgttccccccgttattgaatggctgaaagaactgcgcgtcttgtcatgcaatagcgcgtgggtacttccggcgcggaaaatgcagcacaggatgatcccccacattcaggagagcaccctacccgttgcactgcaaaaagttcgcgcagagatgtcggaggttccagatttcactattcacgacttccgccgtacagcacgcacacatttagccgcgcttggtgttgatccggtagtcgctgaaagatgcctcaatcaccgcatcaagggagtcgaaggcatatacaaccgctatcagtatttcaatgaacgacgggacgcactggcgaagtggaccaatctgttagtgtcgctggaacgcggagaacactacaacgtgacaccaatcaggagagtcaaaaaatga

SEQ ID NO: 24750 - DNA, 933 bp, Escherichia coli
atggaatggagatttttaggttctctatcagaggccaggaaatctggctgtagcggagtttatcttattgtccataaaggacttttcagtcgtgtggtttacgttggggtaagttgtaatgtaggtagaaggataaccgaacattacgacggttatcttagaggaaatcgaacaatttacgacgctggtcacgacgaagacgtttatcgcttcatgtcagcttataaaattcataaccacacaaaatactatcaagccttggcgaatgattataagatatgggcatctaccacaatgtattctgatttgccgaaaaacatgctagcaaaaagccaaacctttgatactgattggcagagcattgcattagaaaaatatattcctcaactggtagtatgggcccttccaatggcaaagtactgttattcaaatgcaagcaggattgaaagtgtaatccaatcaaagctcattaaatcttttgatttgagaggtttttttaatataaagcaattaagcatattgggtaaaattgaatatccctatatggaaaaggtcaaagttttcattattaacacacctgatttagacccggcatcccagcttatttttagcaatctatataacaaaaaaactgataacaacttctgtaaagagttccgttcacaatttaaaagcgagatttttcagagggaaagtgaaactcagagaaagcgaactatcagggagcataaggtatctttttatgaaaattatggcaagccttggactttaaaggaaatggaaaaacttagagtcatgcttgtcgattttgatttgtccccgacagaaatatctgagtatctaggaagagagccgcgctccatatctaaaaaaataagcgaaaatgataaagttactaattataaatggcgagagagcgtcggctggttgtga

SEQ ID NO: 24751 - DNA, 456 bp, Escherichia coli
atgcacagcccgcacgaggcaatattcgcacaagaatcaggttcagaaataacctgctctggcatggtggggagagtatcactgagcaggctttcgttaagatgcggcgggatgaggtcgtgttgcgtgagttgcagcagtacaagatcgcccgcagagggtaagctacagcgcgagatcctaggtttctatcagggattcggcaaagcgggcgcagttgtcgaccaaggcggtaaaatctatagtggcattataagggaacgaacaatagatcgaataaatcgcagtcagggacaaggattgtactctatagagaagtctcctgtaacggttttcaggaggctaattctgacgcctgattttgcaggcgcggagggagaggatactgcgaccattaatccgccacaaagcatttacgtgcataaatcacgcagtcagctccgactctcactgtag

SEQ ID NO: 24752 - DNA, 477 bp, Escherichia coli
atgccattctatttcaggaaggagtgtccgttaaactcaggctacctcatggagatgggctttagcgacattaaaagcaaggatgctggaccagactttgtcgccgagaaaaatggtgagactttttgttttgaagtagtcacgccaacgccacgagattctatcagagagcttattgagcgaggcgagttaacgtctgaagagcgggatttagtgttccgtgagcgtttgttgtcagtcacatcagcgatcaaaaacaaattgaagagcctgtacatagatttgtgtaattgtctgattttgatatgttcaatccagcatcaaatgaaggttaatttatggacaaaaaacagttacaggctcaatcaatactcccatgcctcaaacgctaacggcatattatttaacaaatcccgacgctcacgccagtcaggaataaaccgatccatatgcaaccggaagcgagcattatggtga

SEQ ID NO: 24753 - DNA, 504 bp, Escherichia coli
atgctggaaattcttcaacatacgcctgtatgggtatatatcgtgtttgttgttctgctgtatttaagtatcagggcatgtttttcacatgaagtaaacacgcgtcaggcgattatttttccgctggtgtttattctgctgtcgatactgacctttcgctattatccgtatccggcattaaccgtgccggtctggggcgctggcgcgctggctggtgccttactatcacgttatttgttcccgcgtagtcggtttaaattaggggaaagagcgcatagcctcgttgtaccgggtagctatgccatattgattattctgctgctctattttttcctgcgctactatcttggttatcaggaagcggttcgtggcggcgtgctacagttgacgacaacgcaactgattctgtttttctgctcgtcaggttttaccaccggattttttattgcacgcgcctggttgctgcgcaagtattatgtatcactcaatcatgcttcaacctga

SEQ ID NO: 24754 - DNA, 132 bp, Escherichia coli
atgtctaacactaacgccaattttgagatgaccgggatcctgttagggcaagaagcccgcaaacgtaagactcctcaggagaaaatcaccattatggggtttcgggagcaacagaacagtaaacgctgttaa

SEQ ID NO: 24755 - DNA, 513 bp, Escherichia coli
atgacaacgcgtggcaaagctacaggcaaaagtgaacggctggcggttttaaatagcgccgagcaggaggcactgtatggtcttcctgatttcgatgatgcacagcgactggaattcctggcgctggaggaatcagaactggcgctggcctgtagtcgtcagggtcttcacgctcaaatttattgcatccttcagatcgcttactttaaagccaaacacctgtttttccgcttcggatggggtgatgttaaggacgacagtaactttgtgctgagccgttattttcagggtgaatcacttccggagctgactctcaccaggcacgagcgctatgctcaacgcgaaaaaatctgctcactgtacggttaccaaccgtggtcatcttctctgtcgccacagcttgaacagcaggcagccaacattgttcaccgggatgtaacccccggctttgttgccacggagctgattatcttataccacgcttcaggagctggtaagccgggtcctttctga

SEQ ID NO: 24756 - DNA, 2358 bp, Escherichia coli
atggttcacgaacgggaaaagcgggctatcctggagccgctgcaccataaagcctgcgatattttgccagcactgaatatttcgcagcaaaacctgctgtactacgccagtctggcaaatttctataccgtttacgatctccgcaacctgaaaccggagcagacccgcctttacctgttgtgttatgcctgggttcgctatcgccagttcagtgacaacctggtggatgcgatgtttttccatatgaaacagcttgaggatgagagccgcagcgtggccagccaactcatggctgatatgcaggaaaaataccggcgcgaaacgtctaaaatcgggcgtctgctgtcgctttatgttgatgacagcgttcctgaccccaccacctttggtgaagtccgccgccgggcctggaaaataatgcccagggagacgctgaaaactacagcacaacgtatgagcgtgaagcccgtcagcagactggcgctacagtggcaggccgtggatggcatgacggcattaatacggcgtcacctgcgaccattatatctttcactcgatctcaccagcgtggtccgggacagcccgtgggcagaggcgcttaactggctcagaacggtgttcagcaaaaaacagacgcttttgcagcggccacttgaggagtgcccgcaggtaacgttacctgcgcggctgcgcccgtacctgctggaattcggtgaggatggtgagcccacaggcctgaatgccgggcgttatgagttctggctctatcgtcagataagaaagcgttttcaggcgggagaattccacctcaataatagcctccggcaccgccatctttctgatgaactggtaccggaaggggaacaggccacagtgctggctgaaatgaacatcccgttcctgcagaagcccattaaaacacagctaaaaaaactggcatccgagctgcaccgacagtggaaagtgtttaaccgtgagctgaaacaggggaaactgaaacatctggaatacgataaagaaacgcagaagctgacctggcataaatcggtggccagccgttataagtcgcagaataagcgtttttatgagcaactgccattctgcgatgtgaccgacgtcttccgctttgttaacgggcagtgtcgatttcttcccgccatgaagccgctgcaaccccgttacgccaaaaaagaagctgatgtagacagtctgatggcggtcatcgttgcccaggcgatgaaccatggcaaccatgtgatggcgcgaaccagcgatataccattccatgtgctggagaccacgtacgaacagtaccttcgtctggcgtctctgctcacggccaatgactgtataaccgatgctatagaagcgctaccggtttttccgctctattcgtttgatccggagacgctttatggagctgttgacgggcaaaaatttggtgttgaacgtccgacagtgaaagcacggtattcacgtaaatattttggtcgtggtaaaggcatggtggcctacacgctgctgtgcaaccacattccagtcaacggatacctgattggcacaaacgactacgaaggccatcatgtatttgacatctggtaccgcaatacctcagcagtgaaacccacggccattaccggtgacatgcacagcatcaacaaagccaactttgcgatcctgcactggtttggccttcgctttgaaccccattttactggccttaacaaacaacttcaggaactgtactgcaccagagacacgtcagcatataaaaaatgcctgatccagcctgccggtcagattgacctggaccttatcacccgcgaaaaaagtaatcttaatcgcatcgtcgctacgctggggctaaaagaaatgacgcagggaacgctgatccgtaagttatgtacatatactacggccagcccgacaagacaggcggtatttgaatacgatcggctggttcgcagcatttacacgctgaagtatctgcgtgacccgcaactggaacgcaatatccgtcgttcccagaaccgcattgaatcttatcaccagctgcgtgcagcagtcgccaaagtcggcggcaagaaggagttaacagggaaaaatgacattgaaacggacatcagtaatcagtgcggacggttgatctccaacgcgatcgtttattacaactccgcgatcctgtcacggttactggaacggctggaagccgaaggtaacgaaaggggcatagagactctgacccggatatcgccggtggcctggcagcacattttgctgaacgggcattatacatttcagaacactaatgaaattattgacctggatgctctggttgtcggactaaaactggggtaa

SEQ ID NO: 24757 - DNA, 615 bp, Escherichia coli
atgcggctaaccccagtattcggcatggttaactttattaatgatgctcatttccgccgcatatggaggcatccgaagaaaatcattaactctcgtcagaaagcatgggttcactacatgctacaggtatggggaaatgttaacgctggtgatgattctccttgtggtgcaattaacgttattgggcgactgatgattcgcagtcagtggagcgatgacaaagctaagcagattgagtctgttgtcatgcgtctgtatgaagaagacggactacgtggagatgaactccatcagaaagcccgagaactggtcatccctcagtcatcggcaggtaatatcattgctctcgccaaagaatccgatgatgctgctttcgttgaacgtgtgatggttgagacctttcatcgtgaaagccctgtccgtgatgtagctattaggcgatattgcaatcgcgacagcacgcaagatatcgccaggatgatttctcagataacaggagttgatattcagtattgccggaggcgggtcgtgtggtgcgagagggtccttgattcagaaatgttttatgcaatgaagcgagaattggagaaagaacttctagtgattgctggatga

SEQ ID NO: 24758 - DNA, 243 bp, Escherichia coli
atgcgtgatattcagcaggtgcctgaacgcatggctttattcaggtcgtctggaaaagcgcatgagcagcgtaatagcggagttcatggcgaagagtatatgaacagattattcgaatgctatatgagactgaagcacggagatcgctatgacctgacacgtgatgctgacggtttctactgccgtgaagttgtgaaacgaatgtttgaagtgtggtgtcattgtaaaggatgggggctgtga

SEQ ID NO: 24759 - DNA, 201 bp, Escherichia coli
atgaacgccacaattcaaacaataccggaattgcttatccaggcacgaggcaatatgactgaagtttcacgaaaactgaactgtaatcgtgctacggtcagaaaatatgtcggtgataaagaaggcaaacggcacgccgtcgtcaacggtgtccttatggttcatcgtggatgggataaggggaaagctactgatgcgtga

SEQ ID NO: 24760 - DNA, 294 bp, Escherichia coli
atgatgacaaacctacgcaaagaagcgcgcggcagagaatgccaggtacggatttatggcgtatgcaatggcaaccctgaaactacagttctggcgcattaccgaatggctggaatttgcggaacgggaacaaagccagatgatctgttggctgcatgggcctgtagtgactgccataatgaaatcgatcgccgtactcgcattctcgacaacaacgacgccagactttaccacctggaaggcgtgatcaggacgctggcgatattgctgaaggaggggaagattaagtcatga

SEQ ID NO: 24761 - DNA, 693 bp, Escherichia coli
atgacaactcaaatctctgttgaaactctctccccgatcacccataaccagattcctgttattaccaccgaacttttggcgcagttgtacggtgctgaagttaagaacattcaaaataactacgccagaaatgctgagcgctttattgaaggaaagcattttttcaaagtggctggcgatgccctgaaaaatttgcgggtagctttaaactactcacaaaatttgcaaccatctttaagagggttacaaatttccccgaaagcccgctccctcatcctctggacagaacgaggcgcagcccgtcacgccaaaatgctagaaaccgatcaggcgtgggaagtgttcgaaaaactggaagactgctatttcagccagggaaaaacaacacaaaccgaacagcagtcgcagattcagccacaatttaccgccgaggaaatcatcctcctttgttacatgcaactctggatggaaaaagcccaggaccttagcaagcagctgtaccccataatgaaagagctgaactcctcatacacgaacaagctgtatgacattgcgtttgagactatctacatggtgacgaagaacagagacgcgctactaagggaggtaacacgtctcgacatgtcaagttccgttatccagcgggccatgccaatgctggaaagcctgcgggcaagacaatttgaattctga

SEQ ID NO: 24762 - DNA, 279 bp, Escherichia coli
atgataaaaagctggaaacacaaaggacttcaacgtttctttgaaacaggaaatgcatcaggcataaatcccaatcacgttaaacgcctgagaacgcgccttcaggtaatagatcaagctgaaatcattgatgatattaaccttgccgggtacaggctgcaccagttgcaggggggcagatccgatacatggtctgtcaccgtctccggtaactggagaatcacattcgagtttcggaacggcgatgcttatattcttaactacgaggattaccactaa

SEQ ID NO: 24763 - DNA, 306 bp, Escherichia coli
atggcgatgtttaacccccctcatcccggagaaattattgctgatattctggaagatcagaatattggaatcagggaactggcaagagcgcttgatgtcgcgccttccactgttcagcgactggtttcaggtaatgcgacaatatctcctgaaatggctgttcgtctcgctgctgtcctgggtggaactccgtcttcatggattcgtctccagacggcatggagcctcgaaaaagcggaaagagaagttgacgtatctcatctctcaacaaaataccgcccggcagaaatttcgcctcatgcttaa

SEQ ID NO: 24764 - DNA, 246 bp, Escherichia coli
atggatattcctcgcgaaattaaagaaattaacgaaatcattgaggttactgatcgccccgagtttaccctcatgcgtcgttatgaaacaggaaccgacgaacaaaaatacatcatggttacagcattggctgtgatggcgatagaaagggagcgaagggaaaaggacgtaatggttattcctgagagaaatgattcaccggatttgagatggcaggagccggagtgggatgtggtaatccggtga

SEQ ID NO: 24765 - DNA, 492 bp, Escherichia coli
atggcggaaagccagaaaaaagacctcgatattctgatttcaggaaatagccagtaccgtttccgcaagatctatcctgtggtcaaaaaaattaccgcaccagaatatacgcccccggttgcagaccgtacttttgttgaggcaaaagaggatttacagaggaggcggtacgacacagtggttattctttgtcgcagagtcctcgatatctccacgaaaaaactgctcggcgatgaagcaggaaaagaatcgctgtcgcaacgtattcagatgatttacaaaaaaggcctgatcactgaacagatgaaggaatgggctcatattgtacgaattgatgccaataaagcagttcatacagatgaagttttcacaccaattgaggcaagccagatcctgagttttaccgaaatgtttttagtctacgccttcactctgcctgcaatggtggaagccagacgtgaacaaaaaagatcagattcagcctctatatga

SEQ ID NO: 24766 - DNA, 771 bp, Escherichia coli
atggaaaccgtattgcatgcactgaaagcgatgggaaaagccaattctgttgaactggcggcgcggcttgatatcagccgtgaagaagttctcaacgaactgtgggagctcaaaaaaaatggcgttgttgataaaacgggtcacacctggtttctggctgtcgaaggtgaatcccgggtaaccgaagagcggccagtaaaatctgaaacacaggatatgctgaccgaagaggtcgctccaaaagttagcgctgacatgatgattgagtttatcggtcaggatggtgctaaaacgtgtgaggaactggcgggtaagttcggtgtcagtactcgcaaggttgcttccacgctggcggtggtaaccgcaacggggcggctggcacgcgttaatcagaacggtaaatttcgttactgcatgccggggggtaatttaccagcagatccgaaaaccgcgccggtaacggaaaatgatggtaaggcctttcctcagccagcaggtgctgcgttaccagtccgggaagccgcaacacaggaagaaattaaaacagaaactgtggcggacattgtgcagtcgttgccatcgtttaccgaaacgcaagcagatgagctgatttttccgtccctgcgcagggcaaacctggcgctgcgcagggcgaaaagtgatgttcagaagtgggagcgagtctgcgccgcgctgcgggagctgaataaacaccgggatattttcagttcgattgctgatattccggttcattcaccgacaacaaagtga

SEQ ID NO: 24767 - DNA, 741 bp, Escherichia coli
atgaaaaacatttcgacaggagggattcttgaacgggtgcgccgtctggcaccaccgcacgtggcagcaccgttccggacgaccgacgaatggcgggaatggcaactggctgagggccgtaagcgcagcgaggaaattaaccgcctgaatcatcaggcgcgggttgaaaaaatcctgaaccgtgcgggcatccagccgcttcacaggaagtgctcattcgggaactaccgggtgcagaacgacggtcagcgccatgctctgagccaggcgaaatccattgtcgatgaattgatgaccggttatacaaacttcgtgttcagcgggaatccgggaaccggaaaaaatcatctggcggcggctgtgggtaatcgtctgctgaaggccggtaaatccgtgatagtggtcaccgtggcggatgtgatgagcgcgttacatgccagctatgacgacggactgtcaggggaaaaatttttgcgtgaactgtgcgaagtggacctcctggttcttgacgaaattggcatccagcgtgagacgaaaaacgagcaggtggtactgcaccagattgttgaccgccggacggcatcactgcgcagtgtcgggatgctgacaaacctgaatcatgccgcaatgagcacgcttcttggtgagaggattatggaccggatgaccatgaacggtggtcgttgggtgaattttaactgggagagctggcggtcaaacgttggacgtcagggtatgtga

SEQ ID NO: 24768 - DNA, 219 bp, Escherichia coli
atggagcaatacacgggaataattctgccacatctggaagaatttcgccagcaacaacaccaaccgcagcagcctgaagccgattgggttaacccggagataccgggaccgtctgtgaagatgtgcagtcacaccaatgtgcagtcacaccaaccgcagcagcctgaagccgattgggttaacccgggagataccgggaccgtctgcggtatggagtaa

SEQ ID NO: 24769 - DNA, 297 bp, Escherichia coli
atgtcacaaacaagttacagcaaactgtcacagcgcgatatcgatcgcgctgaaacggatttacttatcaacctgtcagctctgacgcaaaggggactggcgaagatgattggctgtcatgaatcgaaggtcagtcgtaccgactggcgatacatcgcggcgattttatgcgcgtttcagatggcatctgatatcagtccgatcagccgggctttccagcatgccattaacgttcatgcaaataaaaaacgtccggttggggccggacgttctgagcaaatcctgatgaatatctga

SEQ ID NO: 24770 - DNA, 543 bp, Escherichia coli
gtggctaaaaaaggcgactttaagcctacccagaaagaggttgaccaagctattactcgcttgaaaaaagtaacttttagcggagttacatggaccggaagtgagggacgaaccccaatctggtttaaattggatctcaaagcttttgatgaaattggcaacccaatcacaggcataagatttatgcttcactggcgtcctcctatcgttgaaggggtggatatagtgaagatttcatttgtgatgtttcttcatgacaggcgcatttacgcgcttgatccgtaccctgcggataacaagccacaccgtaataaatctatagtgaaccatccagattttgttgaggtggctcgaggtcctcactatcacatgtacttcgaatcagctggggaagaaattgcacttaagcttgaaacgaacatcaagccagatgatttttttggctactggaattatttttgcgaggcgcttaatatcatatatgaaggcagcccacctttacctaatcaagataaatcaggtcagttatcatgggaaatgtaa

SEQ ID NO: 24771 - DNA, 777 bp, Escherichia coli
atgggaaatgtaacgtgttcaacagtcatatctaagctcgggtttgaatgccacccaatgagcgacacgttgctgcgcgttattagtccattcacatactacgatgattgtgagcagataagtgtattcgttcaagagatgagtggtcagtatagggttacagactactgcgatacattgatgaatattgaatcacgcggcatccacctgactaaaaagaaaattgatctgatcaggtcatcactcgcttcgcaaggaatttcattaaatgactctggagagatatctgcgtgggcagatgagtcgtccgttggacaggtaactgcaaatgttattcgtggtgggattcttgcatccgcccaaactgctgattggtatgctgaggtcaaagacgataagttcgaaaaatgtgtaatcagttacttaaaatcagcagggcttgggaagcgactagccttaaaggaaaaagtgaaaggtattagtgggcataacattactgttccgttaacgctaaggaatgagtctcgactaataccaccaaaacgcgggtttacggtaagccttgccagcagtaagggatggaatactgcccactcaacagttgggaagattgttgacttaagtcaggtcgttcctgacataaacaatagatttgtaatagttgacagcgatgggttaacacctgagctacagcaactatcactactatttaatgataccgcacgagtgttgccattccataccagagactcttggattgagtctctggtagcctag

SEQ ID NO: 24772 - DNA, 312 bp, Escherichia coli
gtggtgacggttttcgtaccattcacgttgatgccacgccagcgtcgggaggattttttcacgaagcgcgacaatctgttcttcggtgaagtgatttttcagtctgcgtttacggggctttttaccggaaacggcctgttctccctgaccgtcattcagttttttcagctggcgcgtgagaaggtcaatttccttaaaatcgctgccgcttttctctgtttttgtggtgagctggatcaggcgcgcatcaatggactgggtgacccgctggatcggaggtgtggcatcccactcatcgcgttttttccatga

SEQ ID NO: 24773 - DNA, 195 bp, Escherichia coli
atggcaccggatacctggatgaatgcgcgggcgtttactcttgagatcaaacagcaagggggcgtcaatgattcaggatgcatttgtccgcataagggcaagacaactttactggcaagggtacacacctgcggaaatctcgcaactgatggggatcagccagaacacgatttactcatggaaaaaacgcgatga

SEQ ID NO: 24774 - DNA, 837 bp, Escherichia coli
atggcaagtaaaaacgcgccagtacggaaaaaattccgcgtcgccgtctcgggcaccaccatcgacgggcgtgagatttcggggctgatgttgcgtcaggccgctaagaattacgacccggaagtgtgggggtcacgggtgaacgtggagcacatgctttcacgtatgccatccagtgaattcagtgccgtgggcgatgtgatttcactgtccaccgaagaaatcagggaaggcaaactggccggccgcaccgcactgtatgccgaaattgagcccaccgaccgcatgacgcagatgctgaatgatggcaagaaaatctactcaagcattgagcttgaacccaacattgatgccgttggcggcccttacgtaattggcctggcaatgaccgataccccggcaagtctcggcactgaacgactgaagtttgccgcccagcagcgcgccagcatcatgcagttcaacagccgcagcggtgagccagtcatgttcaccgaatgtatggaagcggaactcgcggcctccgtacaggacagcaccgaagaaagccagaaatggttttcgcgcgtcatggcgctcatcagcaaaacccgtgacacggacagcgagcagttcgctcacgtgcgcgaagccgtcgagagcattgccacggaacaggccggccttctggatcgcttccatgcgatggaagagcaacagcgcagtgataaggcatcactggaaaccctgacccgcgaactgactgaactgaaggcgcagctgaaaaccgaagatgcagacaaggaacagcgctttgcttcaaccggtggcaacagccacgccctggctgatttttaa

SEQ ID NO: 24775 - DNA, 1095 bp, Escherichia coli
atgggaaaccgcttaacgctttctcgcgaaggccgcagcaatcttgaggcctatcttgcacgccaggctgaactggccgaaaccaccgtagaacgactggggaaaaccttcagcgttgatccggctgttcatcagaagatggaaaacgccatcaaagagagcgacgagctgctgaaaagaatcaacagcatcggcgttgacgatcaggagggtgaaaaagtcctggtgaataccagcggccccatcgccagcaccaactcaacctgtgacggcgtgaagcgacgcaatcccgctgacgtctctgatctggcatcacgtcgttatcgctgcgaacaggtgaactacgacaccttcatcagctacgcacagattgacgcgtggagcagccaaaaaaacttccagcaactgctgagtgcacaaatcacccgacagattgcactggaccgtatcatgattggctttaacggtgagtcgcacgccatcatctccgatcgttctgccaacccgaaacttcaggacgttaacaccgggtggctgaaacacatccgtgaacacgccacgacgcgtgtcgtgaaggcaatgacgctgacccgtcgcgatcatgaaaacaaactggttgcaaaaggcgactacggcaacgctgacgcgatggttaacgacattcgttcttccgtactggatgagtggcacaaggacgccccggatctggttgttgtcatgggccgcaacctgttcaacacgctgcgtctgcctatgattaacgccatcagcaccaccaacccgaacacggagctggtcgccggacagctgattacagcctcccgcaccattggcgcgctgccgaccttctttgcgccgtacttcccggacgatgccatgctgatcacgtcgttcagcaacctttcggtctacttccagaaagggtcactgcgtcgcttcatccgtgaagagccggagtacaaccgtatcgccacctaccagtccatgaacgactgctacgtggtggaagactacggcaagtgcgcactgattgagggcatttctttcgccggtgaagatccggaagacaagaaagaggcagaagcacaggcgtaa

SEQ ID NO: 24776 - DNA, 810 bp, Escherichia coli
atgctgacaccggcacaacgataccttcagcgcgtgatggcgcatcatcgggctgatccattcagtcgcgaagagcagcgaacacgaacggcacatgaacaggttcttcaccagttacgcctcgcccagttgcagctgaagggcgtgcagtcgaacatcgcgaaagcggagctgaagaagcacctgataccgaattttgaaggctggatagacggcacgctggcaggcgacagcggacgccaggacgaagtcattaccaccatgatggtgtgggcaattgactgccgggattatccgctggcactgcgtatcggtgagtacgtcattcgtcaccggctggcactgccggacaacttcgggcgcgattcggcgaccgtgctcaccgaagaaattgccgaagttgtgctgacagaagccgccaccaacagcgaaaccgacttatccggctatatccgtatgctggacgagctggatgcactggttcacgaccaggacatgccggatcaggttcgtgcaaaactacataaggcgcgggcattttcacggcgcgcatcaggcagtacggaagacatgactgtgtcacttggtctgctgcgtgaagccatgcgcatcaatccggcagcgggcgtgaagcgtgaaatcgccacgctggccagaaaggtatcaaaggttcagccggaaccggaaaaaccggcagaagagaaaagtaaatcgaaagcaacatcagggcgcaaaaagccgactacaaaagcgacggccagaaaagccacgaaaaaaaccgccgcaaaaccggcgcgcaaggcgacctga

SEQ ID NO: 24777 - DNA, 495 bp, Escherichia coli
atgagcatggtagccagaccccgtgtgaacgacgccacggatgacacgacagacaccgacgacggagaagcgcgcatcagtacagacgcgttctggccggatatcgtgctgaaagagctgcgccttgccatgcgcattcccgggcgcaccaccacctcacgtctgctgcattcggccaccgaagctgtggcacatgtaacggcagagcttgacgcctggaaacagaaacaggaggcggcgggacggtcgacactggcggacgttccggcagcacacatcaacggtgagagcgtgaacgtgcaccggtatcgacgcgcggtgtatgcactgacccgcgcgggcgttcttgagcgttcgcgggatgtggacaccaccgacaaaggtgatcgccgggccgatgcgctggacatgcagattgaagatatgtggcgcgatgcacgctgggcaatatccgatattcgcggcgtcagacggatttatgcggagctgatttaa

SEQ ID NO: 24778 - DNA, 201 bp, Escherichia coli
atgaaggtaaccgcgcatgacggcgacaccgttgacttactctgccagcgtcattacggcatgacaaagggcgtgacagagcgcgttctggctgccaatccggggctgagtaacacggtattcctcactgccgggcaggaagttgaattaccggaaatcacacaggaaaaacagcgcgaaaccgttcagttgtgggattga

SEQ ID NO: 24779 - DNA, 291 bp, Escherichia coli
atgtttcagagaatttacgaccacattacgtttttcacatccgtcatggtcaccggtataggggttatgacgctgagcgagaagatggcgctggcaggactgattctgggggcgctttcactgctgcgcggatggatgcacagaacacgtatggagcaggcacaggagcggcgcaatgagcttattgcacgcattgccgaccagatgcagcaccgaccactaaaaggcagcgagaagcgcgctctggaagccctgaatgcagacggggaatcacatgccaggacagattaa

SEQ ID NO: 24780 - DNA, 540 bp, Escherichia coli
atgccaggacagattaaacgctatgccgttgccgccatcgtggcgctgggtttttcgctggcccccggggagctgagaacctcacaggaggcacaggaaaaaattgccacctgggaagagtgtcgggcattcccgtacagggatatcgctggcgtgaaaacagtgggttgtggctcaacgggaaacgtccccgaccgccaccataccaaacaggaagttgccggtcgatgggtgaacgatttacgacgggcggagaactgcatcaatcagaatttcaatggccgcgacatgccacagcgccactttgaggcaatgacggatgctgcctttaatctggggtgcaaaggcctgatgtggtttaaggggcgtgacgggaggatgcacagaacaaccatctggaagttcgctcagggaaagaactggagcgcaatgtgcggcaggctgacggattttgtgaacagcggcggacgctattcacaggggctgtttaaccggcgcaatgacttcaggaactggtgtatgaacggagtgaagcaatga

SEQ ID NO: 24781 - DNA, 435 bp, Escherichia coli
atgaaaacacctgccgtgttgctctggtttcttgccaccctgttgctttgtggcctgacaggctgggaagcataccgcaaagggaaggaaagtctcggacgggaacagatgatggacatcatagaggacaaccgcgccgccatgcaggaagttcgccatgcatacacagacttttccagggtgataaacgtgatccgcattctggaccagcaacggatcacagaaggagagcaacgacgtgaagaaatgcaaaaagccgtgcagggcgacacgtgtgccagcgcttatcctcccgctgctgttactgagcggttgcagcaacacgccgcacacgttgaaaaccagactcgtttacgagccggtgccgacagttctgacaaggcagaccccggttccggcactggaaatacccgtgacatggtacagggtgactga

SEQ ID NO: 24782 - DNA, 1971 bp, Escherichia coli
atgagcaaaaaacactttgaactgattactgccaccaaccgcgcagaattcgctgaaaaagttaacaagcggttacaggaaggctgggaacttctcggtaatgccggtattgcatcagagccgggagtcccctggtatctcatgcaggctatggtttcaggcagtgatgaccagggaggcaccattatcaccccgacatccgacagcgaaccggagtggtattacgttgtggtgagcgctggtcagtccaactctatggcatacggtgaggggttacctctcccggaaagttacgataaacccgattcgcgcattcgccagctggcacgccgcagcaccgtaaccccgagcggaaaagcttgtgcctataacgacatcattctggcggatcactgcctgcatgacgtgcaggatatgagccagtacaaccacccgaaagccgacctgaacaaaggtcagtatggctgtgtgagtcagggattgcacattgcgaagcgcctgctgccatttatcccggcaaatgcggggatccttctggtcccatgcagccgtggcggttccggctttacaaccggtgatgcggggcaattcagcgagatcggcggcgcaactgaaaaatcctgccgctggggaacgaacacgccgctgtacaaggatttaatcagccgcacaaaagcagcgctggcgaaaaatccgaaaaacgtcctgctggccgtctgctggacacagggcgaggcagatcttgagaaagaacaaaacgccgcacagcataaagatcttttcacagccatggtgaagcagttccgggctgacctggccgatgttgcgaagcagtgcaaccagggcaaccctgaaagcgtgccgtggatttgtggagataccacctaccactggaaaaaaacctacgaagcacagtacgcaaccgtgtatggcggatacaaaaacagcactgagaagaatattgtttttgtgccttttgttacggatgagtacgggaaaaacaccccaacaaacgagccgacagaagatccggatattgcggaagcgggttattacggtgccgcatcccgcagtagcggaaactgggtaagccatctgcgtggaacgcacttcagctcatgggcccgccggggcattattgccgatcgcatggcgtcagcaatcctgcttaacgtcggccgcacgctgccatttattgcgggtacagagccggaacgcgtggcaaaaccatcacaggatgcaccgggcggcatcagtaagccatcttcaccggaagcagaacaaccggcagtcagaccggggccggtcacgctcatgagtctgctggcatcatctcctgaactggaaagccagggctggacgctgagcgaaggcaaaaacggggccaacacaccaaaacaactgaaagacatgctgatcggtgatgaggaagcaacagggaaaaaagccctgaaactgaccaaacaggaaggcaatacctggtatctggagcataaggccggtaatggtgctgaccttctgaaaaatggcgggactgtaagttgccgattcaaaatcgagggtgagctgaaaaaagaccagtacgcaatggcgatgtactggaaaacatcagcattaccgcaggatgtgaaattactgggggcagatccaaataatttattgctctcattctttcttcagacagacagcgcaaacctgaatctgatgtatcacaaaacgccaaacgaacaactgggaacctttggtcagttcaataacaactggcacaccatagcgtttcgttttgcgggaaacaacagcacccaggtaacaccggttctggatggcgtggacggaaaaccgttcatgctttccacatcaaaagccgatgttaccaacgacacgttacgcgtgaccgatatcacgtatcggccgacctataccgtactgattgacagcctgagcgttgtcgtaaatcagccaccggcataa

SEQ ID NO: 24783 - DNA, 165 bp, Escherichia coli
atgggatttattcatcagataatgttgtatttcagtaccgccgtatcccttctgtatctgatctcagggggatataaagccgtccgcaatttctggaacaaaaagatagatgaagcagccgccaggaaatcagctggcggagcggtcaacggggtattgccataa

SEQ ID NO: 24784 - DNA, 471 bp, Escherichia coli
atgctgaaactgaattcattacgcgaagctctgaccagcaactgccggtggtgtaaggccagcccggaaaaattcacggtattcattgaatcgggtggcattgaaaccaccggtgaatccccctcattcctgtaccgctacaacctggtgttgttcgtcatggacttcacagaaagtatcgacaacatcatgctgccggtcatggcgtggctgtacaggaatcagccggatcttcttctcaatccggagaagaacaaaagcatcaaattttcgacggccatcaacgatgacgacagtgccgatatcctgctggaaatcccggtatgggagcgcgtgattgtgcgccgtaatgacgacggcacggtgacggcagagcacatcggtgagcccccgataagccgggcactggaagcatggcgcgtagtgtttgaagacatgacgtggcgaaccggaacggagaccagcacatga

SEQ ID NO: 24785 - DNA, 636 bp, Escherichia coli
atgagagcggaccgcgaactggatgtcatctttcaggatattctttccggcctgtcggcagccggaattcagcgcacggcaatgagcgtgggtaaggtcgtccgacagctacagacaaaacgcatcagaagccaggtatccccggaaggccagccatgggagaaacgaaaacgccgcatcatgcgcatacaaaaaggcgtgaagtttatctggaaggacggccaggtaagaaacctgaaaaactggagcacgtcacagggatgtttcgggcagaaaatcaccggctacgatacagacgccggggggatcaggacgttttacaaggcagacatcggggactacctggaaattaacacacagcgcgtcgcagcaagagcatcacgtcgctcacctatgttcgaaaagctgagaacagcacgctttctgagaatcatccccgacacaaacggcgtaagtgtcggctttcagggccgggccgcgcgtattgccagagtgcaccagttcggtgaggtgggcctggtatcacccgggaacgccacgaaataccccgtgcgcgagctgctgggcctgaacgaaaaagacaaacagcaaatcacagaaaccgtgattgccggactggggaaagcagcgaaatga

SEQ ID NO: 24786 - DNA, 582 bp, Escherichia coli
atgaacatcgagcttatgcgtctgctggaaaacattgtgcggattggtgtggttacggaaatcaacaccgacacctgggaggtgcgtgtgcagaccggcggcctgaccacaaactggatccgatggaacagcgggcgggccggaaaatttaaaatctggatccccccatcaccggacgaacaggtgtttctcctatgcccgggcggcaatccggaaaccgcagtcagcgcaggaagtctgtacagcaacgacaacccgccaccgggatcgctggaaaacgaaatggtcattaccgcgccggacggtgcggaatttcgctataacgcacaggaaagcagcctgacggccagaggtataaaaaccgcaaccattacggctgaaaccagtatcacgctggacgcgccaaaggtggaatgtacgcagttgctgaagacaaagacattcgagctgaccagcggcggaacaatgaaaggcaacgtgaaacacagtggcggcagcctcgaatcaaacggcatcaccgtacacacccacgtacacagcggagtgaagagcggtagcgatacgagcggaggcccacaatga

SEQ ID NO: 24787 - DNA, 369 bp, Escherichia coli
atgagtaccggctacacaggcatgaatcacgcaggctacggaacgctgacagacatcgaccatctgaaccagtcaatcacggatattatcctgacaccggaaggttcgcgtgttatgcggcgcgagtatggcagcaacctgcccgctcttcttgacagtccggcaaatgaaataaccagactgcgctgtatgagtgccgccgtgatcgccattacacgatgggagccacgcgttgccataaacagcgtggacctgacgtggagaaacaatggcagcgcagtgttatccatgagctatctgattgtaagcaccatgcagagcgccagtatttccgttgatatacagggagggaaggatgccgacaattga

SEQ ID NO: 24788 - DNA, 897 bp, Escherichia coli
atgccgacaattgatttatcccagctgccgcaaccggcgatcattgaatcgctggattatgaagtgattctggcacagacaaagacattcatgattagcgtctttccggaagccatgcgcgatgaagtggcggcagcccttgaactggagtccgaaccactgaacatcatcgctcaggctatggcatggcgggagctgttactgcggcagcgtatcaatgatggcgcagcggcctgtatgctgagtcattcatcaggaagcgatcttgacaatctgggtgtaaacatgaatgtgcagcgcctggttatcaccgaagcaacggagaccacaccggcggtaatggaaagtgacgccgcgttccggatgcgcatacagagcgcctttgaagggatgagtgttgccgggccttccggctcatatgagtattttgcacgcagcgcaagcggaaaagtggcagatgccagagcaaccagcccggcaccggcggaagttgtggttgcgctcctttcagccgacggagacggaacggcgaacgaagcactgattaacgaagtgaaagccgtactgaacgacgaaacagttcgccccgtggcggacagactgacggtgaaaagcgcggaaatcatcagctacaagattgatgcgacactctatttttacccggggccggaatcagaacccatacttcaggccgcacgggcacaactggaggcgtggctggcagagcagcgaagaattggtcgtgacgttgcccgttcagccatcatggcggccctgcatgtgcccggagttcagcgggtggagttaacacaaccagcgaaggatctggtgatcagcgaaacacaggcggcgcgatgctccgccacagagattcgcgccggggggaccgatgagtaa

SEQ ID NO: 24789 - DNA, 720 bp, Escherichia coli
atgagtaaaacggtgcttccgccgtctgccagtgtttttctgaaaaccgttgatcgctccggggaaaaaatcagccagctgccggtgaaacttaacaccctgtggaatgcggacgaatgccctgaagtactgctgccatggctcgcatggacgctttcagtggacagatgggataaggcatggacggaagagactcgccgggacgttatacgcgagtcgtggatggttcaccgtcataaggggaccatcagcgccatgagaagagctattgccccgttcggcgcgctgctgagcattacagagtggtgggaaaacggcgaccctccaggcagttttcgtctcaacatcgatgttacacatgcagccctgacagaggcgacctatcaggaaatggagcgcatgattgcgctggcgaagccggtaagccgtcacctgaaagcactgaggctgacatacattgcaaaaggggaagtctttaccggggcagtgagtcatagcggagacatcatacaggtatatccggacgcaacactgccgaacccctgcattaccggaggagaaatttattgtgctggcgcgatttacgacagtgacataacccgggttaaaccggatacggagataccgtcaccgtgcgccgcacaagccgctatctgtatagccggaacaacatacgacggcacaacgaccatcgtaaaaccggcaccggaggaaccatga

SEQ ID NO: 24790 - DNA, 675 bp, Escherichia coli
atgctgaaaccgccagagtggctcaggaagccgccggagacgttcttaaacgtgctgaggctgctacggttagtgctgaagaagccagacgtatggctgagaatgcacgaggacctaaaggcgatacagggccgaaaggtgatgctggtcctcgtggtgaaacaggtccggcgggtccgcgtggggagaaaggtgagcagggagagcgcggacctcagggcataccgggccagaaaggtgatacaggagaacggggacctcagggagtgcaggggccagctggcgcaacagggccatctggcccacgtggtgcgaccgggccacagggagcaatggggccgcgtggtgaaaccggggccagaggcgaaaaaggagacccgggggggcctcagggaccaaagggggatgctggtccgagaggtgagccggggccggcaggagcaaagggagagcgcggtgagaccggacctgcggggccgaaaggggaacccggggaacgtggtccgcaaggattacagggccccgccggagagagaggtgaaccgggtccggcaggtccgaaaggtgaacgaggcgaagccggacctcaggggcctcgtggggagccaggcccggcgggcagcgcagcaaatgtggcagatgcgacgacggcacagaagggaattgtgcagttaa

SEQ ID NO: 24791 - DNA, 393 bp, Escherichia coli
atggcaaagactatccttgctccgtcactgagtgagcgggtttattcaggtacgcatggtaatgagtcggtggcagaaggtgtgtttacagtgaatgctgccgaacaggaaaccgttattaatcttctctcactgccgactggcgttcgcattaatgggatccaactgatttcaaaaggtggtcttggtggtacggcgaccgtcagcgttaaatctggcaagcatgagctcattggtgacagtggtgcagtaactgccagctttgctaaatatgtgccagtggagccgtacaccacacagagtgatggagagctggttacggtcaccattaagacagctgctgcgaccggtaccctgaatgttctgctgcgttataccgtggtgggatactga

SEQ ID NO: 24792 - DNA, 852 bp, Escherichia coli
atggcaaagctggactggaaaaaactggagcaggcattccgacgcgaacatgccagaactggcataaaacttcaggactggtgtcgacagaacaatatctgctatggcacggctcgtcggtacataaaactgcgcaaaaactcccccaaaaatacagaggaaagtgcgcagaaaaatgcgcaaaaaagtgcgcaaattgacactcaaaaaagcgcacaaaaaaatgcgcatggagctgatgacgagtccagtaatgacgagtcttacggcgatgatggcagtgatgaaaaatgcgcaaaaaactgcgcaaattcggcagaaacgaaacgcaacagcagatcgggcaatcctcaccccgttgcccggtttagcgaccgtaacacccacgccgtgagacaccgtggatatgcgaagtatcttgaggcagataacctcatggatgatgcgtccgatatggtgctgttcgatgaactggtgttcacccgtgcccgcgcactttcagtaacaggaacactgaaaaaaatgttcgccgacctgaaagaggcggctgacgtggaaacccgtgttgccctgtacgacaaaatactcaaagcagaacaggcccttgaccggaatattgcccgtatcgagtcaattgaacgctcattgctgacgctggacgttctggcggaaacagcaccaaaacttcgtgctgaccgggaaagaatcaacgctgccagagataaactcagagcggaaaccgatattctgaccagccagcgtcggggcgttgttacgcctgtcagtgacatcgtgtcatcgctgcatgaaatgagtaattcggggagactggatgacattccggaagaatga

SEQ ID NO: 24793 - DNA, 252 bp, Escherichia coli
gtgttcgttctgatccagcgcgggcagtccttcgtcgacgccaacaactatccggttcaagtctgcaaggtaacgctgacacaggtgatcttccgaaggctggatgggagaaccagagccgcatcaattaactcatttaatgcagaatttgagcgaatcgatcacaacgaactacatatgattaaagcggaaattgagaaggaaaagcatattgccagccttcgaaaaatgcgccgcacatcaatcaactga

SEQ ID NO: 24794 - DNA, 606 bp, Escherichia coli
atggctaaaccagcgcgaaggaaatgcaaaatatgcaaagaatggtttcacccggcattctcaaatcagtggtggtgctgcccggaacacggaactcaattagcactcgaacgacgaagtaaagaacgcgaaaaagcggaaaaagcagcagagaagaaacgacgacgagaggagcagaaacagaaagataaactgaagattcgaaaactcgccttaaagccccgcagttactggattaaacaagcccaacaagccgtaaacgccttcatcagagaaagagaccgcgacttaccatgtatctcgtgcggaacgctcacgtctgctcagtgggatgccggacattaccggacaactgctgcggcacctcaactccgatttgatgaacgcaatattcacaagcaatgcgtggtgtgcaaccagcacaaaagcggaaatctcgttccgtatcgcgtcgaactgattagccgcatcgggcaggaagcagtagatgaaatcgaatcaaaccataaccgccatcgctggactgtcgaagagtgcagggccatcaaggcagagtaccaacagaaactcaaagacctgcgaaacagcagaagtgaggccgcatga

SEQ ID NO: 24795 - DNA, 528 bp, Escherichia coli
atgactatcaaatcaaatacgccagcacacgacaaggactgctggcaaacgccgctttggctttttgatgcactggatattgagtttggattctggctggattcggcagcgagcgacaaaaatgctctgtgtgctcactggctaactgaggccgacgacgcgctcaattctgagtgggtaagccacggtgcaatctggaataacccaccgtacagcaatatcaggccgtgggtggaaaaagccgctgagcagtgcatacaacaacgacagacggtagtgatgcttgtgccagaggatatgtctgtcggatggttcagtaaggctctggagagtgttgacgaagttcgcatcatcactgatggacggattaattttatcgaaccatcgacagggctggagaagaagggaaacagcaaaggttccatgctgctgatttggcgaccgttcatcagtcctcgacggatgtttactaccgtatccaaagcggcattgatggcgatcgggcagggcgtcaggagggcggcatga

SEQ ID NO: 24796 - DNA, 216 bp, Escherichia coli
atgagtacgatagctgagcttgtcagggctaattttcgtgaagagttggtgcgttggtatcggtatcgttcatcgtccagtttgccgcttgatgagttgtatgagcattcacctgccgcacgacgctatccgcgtgaccgtgttcttcgacggttgttcaaactcaacaatgagtttcagcgcaacagaattatccggagtctggatttaaagtga

SEQ ID NO: 24797 - DNA, 435 bp, Escherichia coli
atggcacttaatttagaaagaatatcttttataaccccatttgatagcagcgaagaacccaaccaaccgacgcttaattttacatgcaatgaatttcctgcgcggctatcaattgatttcagggttggtatgatcgggttgaaaccaaattcaagatataatttgggtattatggtaatccccgcgcacctaattataaaaaaaggtgaggaaattcaattccctgacggctcttcggaatcagtttcacttttcatcgatacgaaagatagccattttgaaacaggggttggcggacaggtaatagtaacattgaaagaaattagggtcccagctaaagggctgtatagtgttatagggatattgcaagataatgaagaccctaaaaatgaacttcataaaaatgaatcatttttcaccgtagagctattatga

SEQ ID NO: 24798 - DNA, 621 bp, Escherichia coli
atgagtgacgacagtaatttaaataatcatggaaagcaagacaccaacatatctgaaagccggaggttgaaggttgttggcggttccgattttgaggctgaatttgataattctcccaccaaggtgcaaaataattacataaaaccgccacaaacggaggaagaagtgggaacgatcagcagagaggaacttgatgctcgcttagctgctaataaagcagagatggagtctattgcttcttccattagggctgacatggctctatctcgtgaaagcgttaatgtccaatttgcatcacttaatgcagccataagctctctatcgtccaagatcgatggaaagatggatagcgctgctggcgatataaaagcaattaatgggagattcgaaggaattcaaggacaaataacaggggttaataccgcaattagtggtgttcagtcgggtatttctatacgattagccatttttagtgtcattatcgctgtaatagttgcgattcccgggctggtatcagctttaaagtcagaccacgcacctttgcaacagccttccactttgcaagcgccgccacaaaatacccagccaacagacaacaaaaaaatcactccccagcattaa

SEQ ID NO: 24799 - DNA, 201 bp, Escherichia coli
atggaagaggagcatgtgaaaaagattctgtatcttcttaattatattgatggtgaggggggctgctggaattcggaaaataaaccacataaaggctattttttagccaaattcttttggggaatcgacagaatggtggggctacggcggttttggtgtccggcatcgtacaattctgcacatctatgcaaggggatgtag

SEQ ID NO: 24800 - DNA, 1206 bp, Escherichia coli
atgaacacctcagcctttctgtgcatccgttcactggatatcacccaggcctcgccttttatgcaaatggcatggcaaaaaataaaacgcacccacccacattcactactgtgcttgaaggatcagccggccatggcggctttgccgcccgacggagtgatagagggagatgtcgacctcaacgctcacgacgtaaaagccgtcaagcgggtaatatcatggtccatccccaatgaaaagactattgaagatgtgacattgctcaacagcgtcgaggcgattccgggaccgttgaaggcagtgtataaactttccgacaagcgcgcgacaaaaacgctatttgaacagttttctctgccgacaccggcatgggaagtcctcgatcgggagttcacgcacggggcgctattaaaggataattttggcggcaaacttgagtgtgatttagtcagccacttgtcttttcccctgatagcaaaaccactgtgggattgcatgggccacggggttgagatcattcacgataagcacgtcttggtgcagactctctgcaccaatgcgcacagaaacatcctgattgagtcttttattgatggtgcactgggctgcgttgaaattatcggcacaccgggcaattatgtgttccagcctgcatgctacaccgggcaaagcatctatggtgtgcgctctaatttcgatacgattcgtgtgtcgcatcccgactttttcaaaaaacagctcaatgaagatatccagtcgcgcctgtgcgacttattaagtcacatctctttttcaggtgcctgctgcgtagattttattgtgaaaggtgaggagatttacttcctggagatcaatcctcgtatcagcggcattagttgcttgagctctgcggcaagtagtatcaattcctttgaagcgctctatctcattgcgagcggagagtggtgtaaaccccgcgtgttggacgatttcatcaagaacggtgcagtgcaaattggcggacaattggcggatgactttgcaccattgcttaaagctgaagggtctaaaatcaccctctttcgtgatgatataattaatgttgatggcgtatcttcaagaaatatcatcgcgggcgggtgccctgaaaccattttgaatatgctcgggtccatcgaccacaccatcttaaagtggctcagagaaacatcctcagctgatgcctga

SEQ ID NO: 24801 - DNA, 1269 bp, Escherichia coli
atgaacgctgcaaattttaagccaaataaaagcattctggtaatagagccaatcggtatggggggagagttgctactgaaagctattcgcgcactgggctatcatgcggttatcgctacgacagaatatgtttataataccatgctgaacaattacaaatccatgattgatgaggcgatattcgtagatttttcggcaagagagctcgcgattgaaacgctggtcgatgaatcaaggcgcaaaggcgtggcaggcgttgtggtagcctgggaatttttaacggatattgccgccgaggtggcgcagcggcttaatctctgtggtccggatgcatcgttatcacatgcacgacgaaacaaatatgttatgtatcgcacactctcgcaggcgcaatgcccgctaccagtgttgcaggcggtgttaacgaatgtggataaaatcaatcaattaccgcttgaagaactaacgtatccactggtggtgaagcccgctgaaaattcggcgtcatttggagtttccgttttagaggacagtaaagacctggtgcaggcttgtcaggatgctgcccaatggacccatgaattcccgcatggcattcccttcagcaacgaaattcttatacaggaatatattcctggtcaggagtttagtgttgaagggatttccgtttctggccaatatttgccctggggcgtaacaatgaaattcaccacgtctggcaaagcacgtgcagaaaccgggcatattttcccggctcccattgatacgtgtttacgtgatgaaattctcgcagtagcaaaacaggccgttatagccctcggtattactaacggcattagccacaccgaaattaagttagatcagcagggtaaacctcgcgtgattgaaagtggcccaagacctgcaggcgactatattccgcgcctggttgaactcgccacagaagaaaatcctttggtcatttatgccaggcaggctgtgggcgatctgcaagcagacttcatgcctgccgcacctaaacgttattctgcggtgcaatttattcgcccggatgtggaaggaacatttaaatcactcgccattccctcaggactcaggaacgctgagatcatcgaatcccgcattaccgcaccggtcgattcacatgtaaaaccgggctcgaccaatatcgagcgactgggatgggccatttttacagccaatgatgagccgtcgattttttcagccatggatgaattatcccaacttactagggttaatatagcatga

SEQ ID NO: 24802 - DNA, 1122 bp, Escherichia coli
atggcctttatgatgatctattttgatcggactacgacgctcagcttgtctgttattggattatcaatttccattgggcgtactctgtcctctatagtgcccatattaattggccaattactggataaattaggcccaaagaaattatcaatctatggtgattttatcagtggtatgggttttattatgtgttttttcgccagagatcctataactatcatactgacacagtttctcacacaaacaggggttcatattttttggacatgtaatcgagggttggtgtcattagcctcaggcaacagtggcacaaaaacctggttcggattaattgcttctatacgtaatattggactaggcttaggcaccttttttacatcactggcactggaaattaattcggatgaaagtttgcacttggttattattgcctccgcattactgttctttttgtcctgcttggcattgttgatatggcaacctacaagcacggaggaagaaacagttgatgccggagaaacagagaggcacagtttaaaatgggtttttgctgacacaacctatcgtcgactccttatcgtcaatttgggtttggtgctggcagcaatggtgatcccacttgctatcgtggtgtatgtcacagagcaacttggcctttccccctttttctcgggaagtctggtgattctcaatacagtgattgtggcaggcttaaacacacacgttgcctcatggactaaaaatcatgatccggtaaaaaatattaaatggtcgtatttttttaacattttctcctttgtgcttttctggatggccagtatcacttttgaaaataaactggtgacctactcaatattaattattgcaatgctgatttatagcctggcggaaattctctctactcctgctgccaatatgctgtgtattgatttagctcccagaaaaaacaatgggagttatatggcagcatttcagatgacctggtccgtgggtatgactttatcaccagcgatattcggttacttacttgatttaaataaacactcgacatgggctgttcttctgctgctcaccattttgatttttagcgttggtttcagaaaattaaaagaggataaataa

SEQ ID NO: 24803 - DNA, 1083 bp, Escherichia coli
atgtatcgtaatatcactgaagcattggtaaatacactgaataatattttgaacaacggtatatgcgtaggatcgcgtgatcaggaacaaatggaagttctatcgacgttgactaaaatacaatatcccactgagcgcttcttggtattgccttatcgtaataacaatgtattcgcccaggtggctgaaacattatgggtactttccggacaaaatgatctggcctttttaagttattacctgcctcgtgcagaagatttctctgatgacaagttaacctggcgagctgcttatgggccacggttacgtaactggaaaggcaaggttgatcagctacaagaggtcgtaaaacgtttcaaagaagatcctcttaccaagcgtgcggtgatgattattttcgatcctgaaagcgattaccagcagaccaaagacgtgccttgtaataactggctgcattttatccagcgcgatggctatgttgatttgcatgttacagtacgcgctaatgacgctatttggggattcagtggcatcaatttctttgaatggagcgtgttacacgagattatagcaaatacactgggatggaaagtgggtaagctgtcatggtatgtcggcaccttccatatttattcccgtcactatgctacggcgaagaaaattgccggtttaaaccgcccgctcagcttgtacgaatgcaaaattaaacccacgtctatcactatagggattgatgagatggatgaagtgttagagcaggtctttgaagccgaacggtgcgcaagggcaggtcagttcaacaaggcaacggaaatagaagaacgaattcaggatccgttcttcagaaacgccaccatattaatgaaaatttatagcgcattaaagctgaatgtggagcgggatatcattaatgactatcttcatgatcttggcaaaacggattttcatatcgcagctctggagtatttaagtcgcaaatggaaatcacaagacacactggaaagaattagaagtatctcaccagattttttccagtcatttactaatatgaaaaattctgttaccagtagtctaacggcatag

SEQ ID NO: 24804 - DNA, 489 bp, Escherichia coli
gtgagtgaagtgattcatactcttgctggtgatattttctatgaaaagtcattatatatttattttgctggttcaatcagggcgggaagagatgatgttcccacttatgcaaaactgattaataaactgcaaaaatatggaaaactactcaccgagcatgtcggtaactaccaattatccgttgagggacagtcatttttaagtgataaattaattcacgacagggacttatattggctgagaaattcgcagatagtggttgctgaagttactacaccgagcctgggtgtcggctatgaaatagcctctgccgttaactggcgcattccggtaattacgctgtataagcgtggagagaagtcagtttcagcaatgatttcaggctgtgatggctgtcgccatttcgaatatgaaagtattgaagaagcatatcatattatcgaaaaagaaatggcgaaattaggctatgaggcacgttatgtatcgtaa

SEQ ID NO: 24805 - DNA, 909 bp, Escherichia coli
atggaaaactttcggagcatcaaggcctttgtacatgcggtggaactcaacagttatgccgctgccgcccgcgtgcttggtgtttcaccgtcggcgattgccaagagtgtcgcccggctggaaaacgagcttgggatacgcctgtttcatcgaaccactcgcagtattggcttaacaaaagaagggctctttttgtatgagcggtgcaaattcattctggatgaggttcgcaacaccaaagcgctgattgcagagactcgctcctcgccaagaggaaaactgcacgtcagcgtgccgcatatatttggtcattcgctgttgatgcccctgctcccgaaatttttagcgcagtttcccgatgttcaactggatattgattttgaagatcgagtggttgatctgattgctgaaggcatcgacgttgctgttcgcagtggggagctcgcggacagcaggctggttggcaggaaattaggcgagcaatattttgtggtatgcgcgaacccagcctacatcaatgcacatggcttacccgatacgccagccgacctgttaaatcaccattgtattcatttcaagtatccgtccagtgggcgtattgccgcctggtcatttagaaaaccctatgaaaatctggatttgccacgtaatttgattttcaataatactcatgcgggattacgcgccgcagtggatggattgggtgtggcgcatcttccggtatatgttgctgagcaagcattccaacaaggattactgattcctatcctgaccgactttatgttgccgctgggggcgatgacgctgatctggccttcaaaccgacatctttccccaaaagttcgggccttttcggatttcatcagcagtgaactggcggcagggagacattttttgccaaagaactga

SEQ ID NO: 24806 - DNA, 255 bp, Escherichia coli
atggcaaagcaaaagtttaaaatcaacaactggcctgcctacaacaaagcactcagacaacgcggctccctgacggtctggcttgatgagtcagccattctacagactataaaatccctggtgaagcgcaaggttctgattgatgctgatagcattcatcgacacgtaaaaacacctgtttttcactcccaaaagtcggcaattgtgctcagttctttggcaaaaaatgtctccctgccgccagttcactgctga

SEQ ID NO: 24807 - DNA, 339 bp, Escherichia coli
atgattctacagccctccttttctctggagggcgttatcctttataattctatggggaaatatgtcgtcacgtataagcaaagtttaggggggatgaaattttttatttcaaagaaggataaagatagcacaattgctaaaaacgacactgtttcccctgttaacaatttctttgtcgttttcactcttgtatcttccttggtttactctgtcagaatatgtttttccatgatatctcattctagtaatgttattgagatgtattttttcgtgatgtttgcagtattactggctgttttcagttttgtaagggctttgttgaataaattgaacttttag

SEQ ID NO: 24808 - DNA, 399 bp, Escherichia coli
atgcaccggattatattcagttccctgtttttcctgccgacggcggtgtcagccgacataaccctttataccgattctcaacatcctcctgtaaacccgccttcagacgtgcgggtgatccttctggatggtcctgaacaactgcaggctcgtttttttggtgcattgcccgccgatgccggtgaggccgaagaaagggtcagagcgcgtatgcagtccccggagtggggggcgatgcaggcggggctggctgagcgttaccgggaggtggcgcatgcatggtcactgggcgtgaagaaatatccggccgtggtctttgatgatcgtgacgtggtttacggtaccacggatgtggcagaggccgcacaactgagagcacaggaaggagttcagccatga

SEQ ID NO: 24809 - DNA, 975 bp, Escherichia coli
atgatgagccggtcatttcgtctgcgtgccggggccctgctgctgagtgttgcagctctgcctctggcgtcagcctcactgaatacagccagtattgtggccagtgcggcagcaccggattgtatcagctggcgggtcagcggaatttgctactggctgtactgctccgggttcagctgtaaggtcagaacatcggtgaaagtgacacattatattccggaagtggtggtatccacctacaccgcaccgggtggtaatccctggaaagagatggcgctggtcagtcagactgccggaggggtggagaattctattacgaaaggcctggcggggttgagtgccggtgggggaaatcctgcggatatgaaagctcagggagagcgtcgttcggccattcgttttaaatatgccgacgcgctggggcatccggcaacgcgtcttattggcggaatggtgccgggattcagctgcgattcgccggtgacaccggcaatgccttatttcctgagtaccctggacagtctcgtctggcggaccggaatgcctgaatccctgtatccggaagccctcattcccggtaaacgtgaaatcggcagtcaggctgaagaaaacctgtggggcagtgtttatccccgttcaggttttgtgatgcagaccgatgatgacaaggcagcggccgtggttgcccagcgggtggctgacatcatcagccggaccggtgagccgcatgtttataaatcaatacagacccggaaaaaggatggtttctggccgccggatccggttgaggaaaatacgggcacccgtaaccacaagtggcagagactgacgccctccgtctcccgctcctgtgccgtgtttcctgacggagaccatcaggccgcggaggatggtaatgccgcttttgcgctctggcagccctacagttgctgcaagaagcgggggcagcggttccttggcagtacgaatttttaa

SEQ ID NO: 24810 - DNA, 1422 bp, Escherichia coli
atgacgatgaaggtaaagactctggtgatgatggtgatgctgtcctgcagtacgccggtcatggcagacagcattctctcgctgccaaaactgaatgacagcacgtttggttacggaaaatcggtggatggtgcggtgtcggacaagctgttttacacccttggcggtggctccgttatttcccagccggcgacgcgcagtaacatgcagaagctcgggctggacctgggctggagcagcgatctgatgtgcgggaacttcgatctgaaaaccacagtaggaaaccagctcaacgggatcactgacggctttaaaaacctgatgggggatgtgattcagggggcgaccggtgcggtctccagccttcctgcaatggtgatacagcgtgcgaatcccggcctctacgacatgatcacgaatggcgtgttacaggcaaacgtggcgttcgacaaggcacaactgaactgccagaacatggcgaaacggatgatggatttttccgatcgcagcaagtggacgcaggccgcgatgatggaggagtacaaaaaggttgttaataccagtgacggtgatgccgttaaaggtgatgacgccggacgccaggcaacggggaaagaggggcagaaatggattggtggtcagcaacgtggtggtgccggtcagcccgccatccgtccggttcatgacatgacggccgcggggtttaacatgatgaacagtctgccggtgaccagtacatccggtgttggtgcgggaagctgtaatggcagtgcctgtgagaaattcaggaatgcagaggaggcagccagcgctgtggtgaaggtactgggtgatcgttcaatgcgcacctgtacggatgcgaaggaatgtaccagtggtgactccgaccagcagccgggaacggcggtggccggaacagggtttgcgccgatgcttgaggaggcgacacgcataaatacggaacagctggttcgcctggtgaacgggcaggataaacccacggcagagaatctggcaaaactgaagaccggcagtctggcggtatctgccggggtgatacatgcgctgcgtcgcgatccggacaatatgtccctgacctcccgtctggccggtgaactggcgatggctgatacggtggaaacggcactggtgatgcgcagaatgctgctcacaggaatgtctgaaccgtatgcggctgcacagcctgctgcgctggaagaaggcgatcgtcgtattgcctctctggacagggagatcatcgccctgaaaagtgagatggagctgaaacgggatctggcgcgtaacagtgtgctgaccatcattgtgcgtgacaatgaacgcgtgagtaataacccgatgattcagcagaccgacaacgctgacagccgtgtccgttcactggaggtccctgaaaatgaataa

SEQ ID NO: 24811 - DNA, 366 bp, Escherichia coli
atgaataaaaccgtgctgatggtgcccgggagccgggccgggctgcttgtgaaagggatgaaactgctggggaaatgggggctgacagtgattgtcatcatggcgtcagcgctcctgattgcggatacaggtatgcgtcatgcgcaggaggtggatgcgctgaggctctggttccacgaaacccgtttcggatggctgggctggcggttttgtatttactgcgggctggtatggggatgccggaaaatctggcgtgcaccgggattccgggcagagtaccgtctgcgttttgctcggatttgtatggtcagtgcgctgtttttcctgctgtgcgaatacgcgattttttccgccgcgggggactga

SEQ ID NO: 24812 - DNA, 1503 bp, Escherichia coli
gtgacgaccaataactatctggaatattttctgaccctgctgggctggctggtcaataacggtctgtgggatttgctgattggcacgggactgtttgtgcttcctctggctttcaaagtgatcggtatctggctgaaggtgagggaagagggggcggacgaaggcaacaagggaatgctctcgttaccccgcatcgagaatgcattgtatggtgcgttttttgtgatggtggcttcctgtgtaccgctggttcaggtgacgctggataccctgaagtttgatcgcagccgggcccagacctgtggtgtgtggacgccgaaagcccccggggacaccggttatcaggggattatcagcagcctgggagataagacggcggcggccccgatctggtgggttgttgtgcacaagctttccaaaggggtgacacaggcggccgtggcgtccattccctgcaggcctgatctgcggcaactgcgttttgaagtgcagaggacgttcattgcgaacagggcgctggccgatgagttgcaggatttcaccaatgactgctactcgctggcgatgtaccagtggaaacagcgtgaccagggtatgacgaaggacagaaaggtgctgtcggatatcagctggattgggagcagcacgttcatgcagggggattacggcacgctgcagtccagaatgccaagggcggcgtttccgtggaatgacgcccgtgacagcggtcgtccggatacggggcgcggaggctacccaacgtgccgggagtggtggaacgacagcagtgtggggctgaaaaagcgggtcacggaggaagttgatgaagggctgtggctgcgtctttcggcagcgatgaagcttctggggaacagccaggcgacttatcaggaggagattatcaaacggctggtcagtccggctaacctgacgatttctcaggggggagaagtgtataggggatatggtggtaatgcagacatgaccacgatgaatgccatttcacgcattggcgcaacggcaggttccggtgtcgccagtcagggggcgtttccggcgtttgatgccatgcggcaggcactgccgatggtgcagagtattctgttgatggcggtgtatatcatgatcccgttggtactggcatttgcggcgtatgagttcagtacgctgatcacgctgacatttgtcgtgtttgcgctgaactttctgacgttctggtgggaactggcgcggtggctggacagctggatgataacggcgttgtatggttcagatacacattcgagtctgaatatgatggggctgcagaacacgtcggacgatatcatcatgaatctggtgatgggcacgatgtttctcgtattaccggcggtgtggctgggggcattatcctgggctggagttaatatcggacaggctatttctgagggattcaatcgagcagggcatgttacacaacaagcaggccagcatgctggaagttttgttaaaagaataaaataa

SEQ ID NO: 24813 - DNA, 300 bp, Escherichia coli
atgaaaaacgaagcagaaaaagctatgtggagttgtaaaacctctgacacaccatggactttcagccgcctgctgaaaaaggctatctgtgcggttttaccggattctggtccacacacggttcatcgtgtcaataagaaagaaaacaattatttaacatctgttttatctgatatatgcgattcaaatgaaaaagattcgaatgaagcgatgttcaatccctttcatcctctttatcgagatcatcatcctattgatagtagagaatggagtggtagcccttacaaaacgccagaataa

SEQ ID NO: 24814 - DNA, 138 bp, Escherichia coli
atgctgcattcactgaaccattacagagaatatttcaacagagttcaatatacctccatgtataacaactacaccttgggggctgtattgggggctatttatagagatgtgtttaaatatatacttattattcaataa

SEQ ID NO: 24815 - DNA, 138 bp, Escherichia coli
atggcagtgagaatggaacagaaaaaaatcaaatgcggaaagcggaaatacacagcgggtgcgatgtgcttcatgctgtttgtatggctgggtggtgtggtgacactctgtgtacttgctgcactgataacacaataa

SEQ ID NO: 24816 - DNA, 255 bp, Escherichia coli
atgcgttatgtcggtggtgttgatgaacagggaaatccgatagaaatcagtgatccactgttacctgttattcagaaggcagtacaaagtagtgctgaagggacagcgcgcgtccagtcactgctggcaattaaggcgatctttggtgatgatttaccaggcaatagtttgtttacgacaaaagtaacggaagcgtacttgtctttattagcgcatggcgcgaaagcgaccgtggcgaaatattccgtgaagtaa

SEQ ID NO: 24817 - DNA, 312 bp, Escherichia coli
atgggagttgagcagaataatttcagggacatgttgtccggttatctccccgtcacggcgcagacgcagcatgtgttttgtgtattcccggcgacccgggtcacgcacacgtgtctggcaggcgaagaatggctgaaagccttcccgctgcagactttccagtacggtgatggtgggaatgtacgcatagcgttcactgcgggaggtatgccggtcttctccaaaaatactgggaacatagtgcatcagctcttcatgtgtcagtggacgttcacggcgtatctggtttgtataaccaaaacgactggctaa

SEQ ID NO: 24818 - DNA, 414 bp, Escherichia coli
atgaaaaatatcatcactattttaatgattgcagttatcagtttctttactgctaatgtatcagcaaacaatgccgttcctttaccgaccaacctgacagacgttactgacggtacagaattctggtgtcagggtactgatactatcgacggaggttgtgaatacctgggcacatccaaagacatgcaatacggtctggtacacgccatggggggtacagcgtgctgggatggtttatacggcgtaattaatttctataccggtaaagcccagaccatcaaatacaacaacaatcaaagttgtgaaggcaacatcaccgccggtttcgttaccctaaaaaacggtaaaccgggcgttaaactttacgacaatacgattcataagattgtcgggcttgacgaaatcaaaatttaa

SEQ ID NO: 24819 - DNA, 189 bp, Escherichia coli
atgaacgaaaactccgtaaatctggtgttgataccacagcatttggctggcatggctgatcccggtttatctgtggcgtcgggcaaagatcctcgggcaaaaacctgcttatttctgggtctggctggttatgctgatactggtgttatttacgatctgatattctttctcgcagagtttgctaaataa

SEQ ID NO: 24820 - DNA, 435 bp, Escherichia coli
atgaactggcattatgaaaaaaatggtgtacgttatgataacgtaacagaggaagatattatcgaacgtatccggcgtggtgaactgaatgcatcaacactggtgtggcaacagggcatgctggaatggcagccagtttcagccacatcactggcggaaatactgaaacaaagtgaagttcctccggcccttccgggtcaccgcattcccggagacgttgtctggacgctggcatttgcccctttgattgggtacatacttgagatgtggactaccgggctgaacggtatgtcatttgaacgggcttatgatgcagtcagcgaaggccagtactggtttatctctctgattctgaatattgctctgggatatctggatgaacgaaaactccgtaaatctggtgttgataccacagcatttggctggcatggctga

SEQ ID NO: 24821 - DNA, 174 bp, Escherichia coli
atgaataagaatgcgtgggtatactttatcgatgctatcggtgaagccacgaagctcgacgttttagtaaacggtaagaaagtcgacagctataccgcaaatatcaaaaatgagaaaaagactttgggtaacaaattctacggtagctgctggaacacctggttccaggaataa

SEQ ID NO: 24822 - DNA, 1146 bp, Escherichia coli
atgagcatcactgaatcagtaacacatcacatcaacagcgcactggatgcagcggaagataccgttagggtgccagacttcactatcacactggaagggaaagatgccagcctgaagaacatcacgcagcgcatcatgagcctgaccatgacagacaacaggggttttgaggctgacagggtgacactggaaatcgacgacgccgacggcggggtggtacttccggaacgcggaacacgattatcgctggcgatggggtggaaaggtgaaagcctcactcgcaaggggacgtttgtggtggacgaagtgagccacgaaggtccgccggataagctgaccatatccgcgaacagtgcggattttcgcgaagagtttaacgtgaaacgcgaagtctcctggcatgacgtgaccgttgagcgtgtggtatctgccatcgcgcaccgttacggactgaaagcacaaatcagcgaaatgctgatgaatatcgaaatcgaccatgcagaccagacagaggaaagcgacatctcgttcctcacgcgtatggctgacatgctgggtgcaataaccaccgtaaaaaacgggagcctgctgttcattctgccgggtggcggtgtgacagccagcgggcgcgccctcccctcattcgccctgacccgctcggatggcgacagtcatcgctttcgcattgctgacagaaaagcctataccggagtgaaagcttactggctggatttaaagttcggccagaagaaggccgtgaacgtgaaaaagcgaaacgcgaaaaccacacagaagccggagaaaagcagttcacgggagggtggatacatggaaggcgcagaaggcaatgtgtatgtgctgagaaaaacctacccgaacgaagaagccgcgcgtcgcgcagctgccgcacgctggcagcaacttcagcggggtgcagcagaattcagcatcacgctggcgcgcggacgcgccgacctgtatccggagatgcacggcacggtatccgggttcaagagcgacattgacaatcaggactggattatttcgcgcattgagcacgtcatcgacgacagcggcttcaccaccagactggagctggaagcaaaaatcgcagactggatagcagagcgcgccacaactggctag

SEQ ID NO: 24823 - DNA, 1206 bp, Escherichia coli
atggtgaatcgtatggctgaaaaacgatttcacggtgtgcgcgtcacggagaataccgaccttgtgacggccattaatgacgttgattccagcgtcattggtattgttgccgttgcagatgatgcggataccgggcagttcccccttaacaagccagtgctgattacccgtgtatcttctgttctggggaaggccgggaaagcgggcacgctttataaggcccttaaagcgatatctgaccaggtcagtacacgggtgattgtcgttcgcgtggaggcggcaaaagagggggctgagaataaaacacaggatcaactggtcattggtaccacggaagaagacggaagctacagcggtatgcaggcgcttctggttgccgaacagatggaaggtattggttgccgaccccgcattcttgccgctccgggccttgaatcggatgctgtcacggctgcactggtgactgttgccggaaaaatgcgcgcatttgcgtattccggctgccctggctgcacaaaaccgtccgatgctattgcgttccgtaaaaagatttccggtcgcgaaatcatgcttctgtggcctgatttcattgcgttcaacccggtgtccggtaaaaacgaaaccttcccggctgcggcgtatgcgtgcggtcttcgtgcccgactcgaccatgaacagggctggcatcgctccctttctaacatgcctgtgaaaaatgttcttggggtgtcagcgtctgtttcctggtcacttcaggatgaaaacagcgatgccaacacgctgaacaacagcgaggtgaccactcttattcaccagggcgacggctccttccgtttctggggtaaccgtacgccggaaactgcggagtacatctttgaggtgtacacacgtacggcgcagcaactggctgacaccattgcggaggcgcaacttcagatagtggattcaccgcttacgcctgccaatgctaaggatgccgtgagcgctatcaaggcaaagctggatgcactggtgacagccggaaaactcattggggcggaatgctggttcgatattgtcgacaacaatacaaccagtcttcgtcagggcattgtgcgtattcgctacaaatacacgcccgtaccaccgatggaatgtatggaactctatcagacgtttaccgacgagttctttggctctgcttttgcatctcttggaggtagctaa

SEQ ID NO: 24824 - DNA, 513 bp, Escherichia coli
atggccgtaccaaaaaaacttcgtgtgtttaccgtctttgtggacggtgacaacaagctgggcaaggtgacgtcttttaccccgccaaaactgacccgcaaaacagagtcgtatcgcggggcgggtatgcctggctctgcgtcggtggatctcggtcttgatgatggtgcactggatctctcctttgcggttggtggcgtcgatcgtcacatctttgctaaatacgccgccggtattgatgccgtgcgtgttcgcttctcgggtgaatactattccgaagaagggattgagtacgtcgatattgaagcccgtggtcgcattgtcgaaatcgacaagggcgaggccaaacagggtgaagataccgaacatacctatgcgatgaaatgcacctggtacaagctcagcgttgataacagcgatgttattgaaatcgacgtgctgaacttcatctggcgcattgatggtaagaatgttcttcctgaccgcacccgctccatgctggggcttggctga

SEQ ID NO: 24825 - DNA, 381 bp, Escherichia coli
atggatcagactgaagaaaatatcgtgacgaatgacacagatgctgtgacgaatggcgacacggaaaacgcagaggcgatcgcaaatgacacggttaatctcagggttcctgttgtctgcggtaataagacggtttccagcgtgaagattggggcgcttgcgcgtcaggtgggctcgcttcgagggatccgcatgacggacctgttcaacaccgatgttgatgctgccgccatttttctggaacgcgtaactgaacctcacctcagccgcgcggcacttatgtcaatgtgcccggaagacttctttaaactgtacgaggtggcagtcggttttttgcttccctcgtcagcgaagaaggcgcaggaggcgggcggcgcgtaa

SEQ ID NO: 24826 - DNA, 2832 bp, Escherichia coli
atgagtaataatctccagatacgtgtagcccttactgcggtcgaccgtctcactcaacccgtcaggcgcgcccgggaaatgaccggcgcgctttccgaatctctttcctccacgcagaacgctcttaagtcactccagcgaagcagtgatgcgttttcccgtgcccgccagcaggtgacctcgactgaaaacagtctgaacgaggcgcgtgcgcgacttcagcgcctccaggaggcccagcgtacaggcacaacactaacggaaaaacagcaggaagctatccgctcgatgactgtgaagattgatcgccttaatacggtttattccctccacaaatcccgacttagcgaagccagtcgcgaactggaatctcacggtatacgggcggacggaagtaaccgtgcggtcgagagggcaatcaggcggacgcaggaatacaacgatcagctcgaacgccagcggggccagcttgcacgcgtcacgcaggcgcagcaacgctatgaccgtgttcaggatattgccggtaagctcagtcagcgcggtgctgttgccatggcggctggcagtgccggtctgtatgctgccggtcgcgcggttgcacctgttgttgaagagcaacggcagggtgcgctcattgcggcacagagtggcggcagcgcagaagacggccagcgctacagccgtatgattcagagcatccgtgcgtcaggtgcggccacggatatcgcgatgatttcggaagcagcagctgcggcgcaaagcacgcttggcgcactgggtaccgtagggactgaagaactggaaagggtgacacggcaggcaatcgatcttgctcaggtcaccggcggtaatgtggctgaacaggttcaggctgctggcattatgctgaaaaacgggcttgccgcaaatgcaggtgaggccgtcgacctgatggcggcagggatgcagaaaatgtctgccgaaatgcgcggcgaacttcctgaaattctgcatgagtattccacgcatttccgcaatatggggctatccggctctgaaaccatgacgctgcttgtcagcatggcgcagcaggggaaattcgccctggataaaaccggcgatgctgtcaaagaattcagtattcgcggctcggatatgtccaaatccagcgttgaagcctatgagctgattggccttaacgctgaaagaatgtcgtcagcgatcgccagtggcggcgcggccgcgcgtgaagcgatgcgtcgcaccgcgtcaggtctgttacagattcaggatcctgcagaacgggccaatgcggcgatagcgctgttcggcacacccattgaagatctggctgttgaccagatcccggattttctccggtcgcttgcaacggtatctgaccgtatggggctggttcagggaaccgcccggcgaatgggggatgttctgcgtgacaacctcggcggcgacaccgatcgtctgtccggcattttctccggtattcgcagtgatgttgtgtcgctggttactgatgatatccgcgagcttgtacaggctgttgcttctgtgggtgaacgcttcaggtcgtgggttcaggaaaacccgcagcttgtacgcacgctgacccttaccgtgggtggcgtgcttgcggccacaacggccattggtgcgttgtctgtcggaggtgggttactgacggggatttttgcaaaacttcagcttggctctgcgcttcttggtggcgggctatcctcgcttacaaacggtgttggtggtcttgctcttcgcctgtccggccttccggcactgtgggggatggtctccggtgcggtttctgtgctgggcggggtgctttccggtcttctcagtcctgttggtctcgtgattgctgctcttgccggtggggcgctgctcatatggcgtcactgggaacaggttaaggcgttcatgctcggcacattccggtcgctgtgggctggccttgcgcctgttcgtgaaagtattgctcagtttgcgccgttgtttgatctggtgtcgggtgcggtgtccacggtgtttgactggtttacccggttactcacgcctgttcaggccagcaacgaatctcttgaacggtgtacgtctgcgggagaaagcttcggtcgtgtacttagtggggcgatatcgcttgcgcttacgccgctgaaggcgctgatggatggacttgcctgggtactggaaaagcttggcgtgctgcctgatgaagctgaaagggcgcgccggaaactggaggatgcacagcggacttcgtttcttcagggcaagctctccctgcttcagggggatgttaatgccattatctcgcccgctaagccagttgatggcaatgataaaggtaataatggtggcaagccttctgtcataaacgacggcaccagtggcgttcttcgcaggctcaaaggtatcgagggtaatacgtcgggtatgcttcaggaagcccgcaagcgtatcggtcctggcgatatcgtgtttaaaaatctcccccgtgcgctggctgttcgcgggcagtggaatgaaccgactgttgcacccgggcttccgcttatgccagcgttttcgcctgtgtctccggcggtttccccggattcttcccgtcctgtggaggttaagcggtgggatccggtgtccccgacaccccgggggccttcgcgctctcctgaaccgccgtctgtgtacggtggtgatattcatgttcaccttcacaacgtggttacgcagaaccctcgcgaccttgccagaatggtgggggaggcggtacgggaagaaattcgcagacaatccggcggtatgaacagtttccgcgatcgtgattag

SEQ ID NO: 24827 - DNA, 465 bp, Escherichia coli
atgatgatgatttacggcatgtttgtttttcagttaagcacactgccacaccaacaaatacaacagtcccgtaactggaggcatgtaaagaacgagcgaatcaaccgctcagccagctggcagtatatcggcgcgggtgacgataccatcacgctttcgggtttgctctacccggaaattacgggcggtgaagtctccctgaccgcactgaccagccaggcttacgtcgggcgaccatggccgctgattgatggggtagggcagatttacgggatgtatgtcattaccgggcttaacaccacccgctctgaacttgatcgctatggtcgggcaagaaagattgagtttactgtcacttttgagcgtgtggatgaagatctgcgtgaacgtcttcagtcctcgtcgcttggtgatcttgcgaataacgtcaaaggtgccctgaataatctgtccattccggtttaa

SEQ ID NO: 24828 - DNA, 342 bp, Escherichia coli
atggaatcagccagttatattttcagctttaatggccgtaactgggattatggaaaggaaacacaggatcgccttggcccatcagttatcgcagcaaaagaaggcaatctcccggagaagtttttctggacagacgcagacaacaacgacgtccccatgactgcggaagaactgattgcgctgagtgaagccgcgcaacaggcaatgttcgcgaagggaatggaaattcatgtgcgccagcgcaacatgaaaaaagagattgcagaacttcaggatgcggaggccattcagcgttacgttgtgggctggcccacaacggaagaacccgccaccgaaagatga

SEQ ID NO: 24829 - DNA, 837 bp, Escherichia coli
atgggaagcaaaaacacgccagagcgcaaaaaatttcgcgttgccgtttccggttcaaccatcgacggacgtgaaattcctggtgaaatgctgcgtcaggccgcagaaaactatgacccgtccgtttacgcctcccgggtgaacattgagcacgtcctttcgatgtggccatccagtgaactctgcgcagtgggtgatctgatcgctctgtcaactgatgaaatcaccgaagggaaactggcagggcgtacagcgttatatgccgaaattgaacccaccgaccgcatgaaaaacatgattgctgacgggaaaaaagtgtattcgagcattgagatgttgcctgagctggacgccgtcaaggggccttacattgtgggtctggcaatgaccgacacgccagcaagtctgggcactgaacgcctggagtttgccgcacagcaacgcgccagcatcatgcagttcagtaagtgcacaacagaaccccccatgttcaccgtcgccatggaagcagagatgcttaccaccacagaacagcgaacggaagagagccgtcagtggttcagccgcgtcatgacactcatcagcaaaacacgcacagcggatggcgagcagttcagccagctgcgcgacgttgtggaaaacatcgcatccgatcatgcagatcttatcgaccgtttcagcactctggagcagaaacatgccatcgacaaaacggcgctggatgagctcagtcacgagcttgcagcactgaaagcgcaactgagaaaccaggatgccgatccacagcagcgttttacttccgctggcggcactgaccagacactggctgaattctga

SEQ ID NO: 24830 - DNA, 1101 bp, Escherichia coli
atggcccgtttatccctttcccgtgaaggacgtgacagtctggaacgctatatgattcagcaggcatcgctggctggtatcacaacagagcgcctgggtaaaaccttcagcgtggatccatccattcagcagaagatggagaacgccatcaaggaaagcgccggactgttacaggaaatcaattttatcggtgtggatgaccaggaaggtgaaaaagtcctgattgacaccagcggccccattgccagcacgaacgcaacgagcgacggagtgaaacgccgcaatcctgcatcagttgctgatctggctgcacgccgttaccgctgcgagcaggtgaactacgataccttcatcagctacgcacagattgacgcatggagcagccagaaaaactttcagcaactgctgagcgcgcaaatcacccgccagatagccctggatcgaatcatgattggtttcaacggggggtcacacgcgctgatttccgatcgtgccaccaaccctctcctgcaggacgtcaacccgggctggctgaaacacatccgcgacaaggctgccacccgcgtggttaaagggatgaccctgacccgtcgcgatgatgaaaacaaactggtggcaaaaggtgactatggtaacccggatgccatggtgcacgacatccgctcatccgtgctggatgaatggcataaggacgcaccggatctggtcgtactgatggggcgggatctgttcaatacactgcgtcttcccatgattaacgccatcagcaccaccaacccgaacactgagcttgttgccgggcagctgattgtggcgtcccgtaccgtcggtggtcttcagacgtatcttgcgccgtacttcccgaaagacgccatgctcatcacgtcgctgaaaaacctgtcgatctacttccagaaaggctcactgcgccgtttcattcgcgaggagccggaatacaaccgtatcgcaacttaccagtccatgaatgactgctacgtggtggaagactacggaaaatgcgcgctgattgaggggatcaccttcgcaggtgaagatccggacaacaacgccgaaagcggacagccgcaacccgaagcataa

SEQ ID NO: 24831 - DNA, 798 bp, Escherichia coli
atgctgacaccggcacaacgctatgtgcaacaggcggtggcccgcaaccgggtgaccatgaacgcccgggaaacacaacgggaaagaaccgcacatgaacaggtccttcaccagttaaggctggcacagatgcagctgaagggtattcagtcaaacgtcgccagggcagagcttaaaaaacatctgttgcctgactttgaagggtggattgaaggcaccctggcaggagacagcggacgccaggatgaggtcatcaccaccatgatggtgtgggccattgactgccgtgactacccgctggcactgcgtatcggggagtacgtgatccgccatggtctggcgctgccggataactttggccgtgacgccgccacggtactggctgaagagattactgacgccgttctgacgcaggccacaacggacagcgaggcggatttgtctgtgtacaccgccatgcttgatgagctgaaccacctggtcagtgagcaggatatgccggaccaggtcaggtcaaaactgcacaaggcacgcgcattttcccgccgcgcctcctcctctcccgatgatctgcgtctgtcgctgagcctgttacgtgaagccatgcggatcaatccggcttcgggagtgaagcgtgaaattaccacgctggagcgcgcggtcaggaaactggcagacggaaatcaggtggtgcctgcatccacaacgggcaggaaaaccaccaccggcgggaaaaagagcagcgcaaaaaagaaaagcgctgccagccagaaaaaagccgcgcgcaaaacaaactga

SEQ ID NO: 24832 - DNA, 495 bp, Escherichia coli
atgagtctgatagccagaccccgcgtgaacagcgctgacacagataccaccgacaccgatgacggcgacgccatggtgagcgcgggtgacttctggccggcgatctcactgcatgaaattcgcctggcttcccgcattccggggaggacaacaacaacccgtctgttacatgcagcaacggaagcggtcgcccatgtgatcgccgaactggagctctggaaacgtgagcggatggctgaaggcgcggcctcactggctgacgttccggccacgcaggtgaacggagagagtgtacacgtccaccgctaccgcagggccgtcttcgcactcacccgcgcgtttgtactggagcgcacccgggatgtggataccaccgataaaggcgaccgcagggctgacgcgctggacatgcaggttgaggatttgtggcgggatgcccgctgggcaatatcagacatacgcggtgtcacccgcatttatgcggagctggtctga

SEQ ID NO: 24833 - DNA, 201 bp, Escherichia coli
atgaaagtaatggctctggacggtgacaccgtcgatttactctgtcagcgccattacggcaccacgcagggggtgactgaggcggtactggccgccaatccggggatttcagccgtcatgtttctgcatgccggacaggaagtggagctgccggagctgcaggggcagacccggcgtgaaatgatccagttgtgggggtga

SEQ ID NO: 24834 - DNA, 285 bp, Escherichia coli
atgtttcagcggctttgtgatcacatcacgttctgggcgtcagtgacgacagccggtatcggcgtgatgacgctgagcgaaaaaattgccgtggccggttttgtgctggggacgctgtcactgcttcgtgcctggcttcaccgccgcaggatggagatcgcccaggcaaggcgtaacgaactgattgaaaaaatccttatgcagtcagaaggaagggagctgaacgacgcagagcgccgggcaatgatgcttctgaagcaggatgagcacgatggccggacctaa

SEQ ID NO: 24835 - DNA, 543 bp, Escherichia coli
atggccggacctaagcgttacgccgtggccgccattgtggcgctggggatctccctggctcccggagaactgagaacctcccgcgaggcacaaatcaaaattgccacatgggaggagtgccgggcccgaccctaccgtgatctggtgggggtcggtacggtcggatgcggatccaccggtaacgtggaaaaccgcctgtacacacaggaggaagtggccgggcggtggatcaacgatatgcgccgcgctgagaactgcatcacacagaatttcagggggcagcagatgccgcagtctgcattcgaagccatgacggacgccgcctttaacctgggctgccggaatctgatgtggtttaaaaacaaaaacggcacgccgcaacgcaccaccatctggaaacacgcgcaggcacggcaatggcgcctcatgtgttaccggctgacagattttgtgaacagtggcggaacgcgcacgcagggactggttaaccgccggaatgattttaagaactggtgcctgaaagacgcgggagcgcagccatga

SEQ ID NO: 24836 - DNA, 426 bp, Escherichia coli
atgaaactgaacattatcctttgtgcgctgctgctgaccatttcgctgcaggcaatggtggtcatccgggcctatcgctcaggtcaggagagcacccgttatgaagcgctggaaaaagccgtgaaagagagcaatacgaccgtccgggagttgcttaaggccacggcggagacacagtcagcgctggccgctatccggcgcgaagatcaggagcgtgcagccagaggggaagaacgacgtgaaacgatgcggaaaaacttacaggcggatgagtgcgcacgcacttctccccctgctgatgttgctgacagcctgcaacaacacgccagcgccgctgaaaaccggcgtcatttgcgggagcgtgccggaaagtctgaccagacagacgccggtaccggtgctgccgcaacacatgatatgggctga

SEQ ID NO: 24837 - DNA, 2046 bp, Escherichia coli
atggtaccgaaacattatcagcttgtgacggcaatgacgaacaaggaacttgccgaaaaacttgcgcccatgctcagggaaggatggggacttcttgggggacctgtctcagcatcagagccgggagcaccattttacctgatgcaggcactggtcactgacagagacctgccatcagccatcccggtaccagaaggcgaggaaaaacccgtaccgggcactaccgacggatacaacactggacacacaactgagccagagttttattatgtggtgccactggctggtcagtccaatggcatggcatacggtgaggggctgccattaccggatacattcgacagtcctgatccacgaattaaacagttagcgcgtcgcagtacggtgacaccgggcggcgctgcatgtacctataacgatattattccggcagatcactgtctccatgatgtacaggatatgagcagccttaatcatccgaacgccgatctgtcaaaaggtcagtatggctgcgtcggacagggtttacatattgccaaaaaattactggcgtttatcccgaaaaatgccgggatcctcctggtaccttgctgtcgtggagggtcagcgtttacttccggcgcagagggggcattcagtgaatcttcaggagcaacggccgaatcatccctgtggggcgtcggcaaaccgctgtataacgatctgcttacccgtacaaaagccgcgctggataaaaaccccaaaaacgtcctgttatccgtggtctggatgctgggagagtttgatctgaaatcagcaacatacgcacagcacccgcaattattcctgaacatggtgaatcagttccgcgccgatctcagcgcatatgctgcacagtgcaccggaggcaacgcatcacttgttccctggatttgcggcgataccacctatatctggaaacaacaatatacctctcagtacccggtggtttacggtgcatatcagaacaaagaagcgcaaaaaatttattttgtgcccctgatgaccgatgagaaaggtgctaacacgccaacaaacctgcctgccgaagatcctgacctgacagaagccggttattacggtgctgcatcccgtagtaacggaaactggacctcttcagatcgcgccacgcatttcagttcatgggcccgccgcggcattatttctgaccgcctggcaacggcgatcctgatgcatgccgggaagaccgtcgccttcctgaaaggtgcacccgcaccgttcagcgtggtcgcagtacctcccgccacggccggttcagacagcaccaccacggaaagcccgcagccctccacacctgcacctcagccgggcgcaggtacgcagtcatcaccggcaagaacaacggccgtcgcttatcgcgcagacgcacaggaagggaaactgaaagaacagggctggacaggggcagatggaaaagcctccgtcgtaaatgactctgctgctgagagcggtaaagccatgcgagtggaaaaagtccaggggcaacaaacagcctggaaaatcgcccacgatgtgcctgcaagtaaagcagctgaattacttcagaaaggcggggaaattgcctttcgtttcaaaatcccggaaggtgttcagctggcagcaaaccgcttcgccatggctctgtactggccggtttctcagctacctgaaaacgttgttccggagggaagcacaggaagcaatatgctggcagccttcttcatccagagcgacagcgcaaacctgaatctgatgcagcacaaacaacagaatgcaaaactgggaaccttcggggcatttaatcataactggcacaacgtggtgttccggtttgccggaaataacagcatcagcgtgacaccggtcatcaacggtcagacccaggcggcctttaatctggcgaaatgcccggcggcaggactggataacgacaaactgctgatcacggatatcaccagtaaccaggacacctaccccgtgctgattgagtatgtgacggtggatatcaataacagcaacgccgcataa

SEQ ID NO: 24838 - DNA, 732 bp, Escherichia coli
atgaaacatgccagaattatttttgcgtgcacaacttttgtgatgagttttgtagcagcccctgcctgtgcagcacaaggtgacagtacagtttctttcggatacgctcatcttcagctctctggactgaacaattttgttaaggatttaagtctttataatcttgatacttttaaccgttttacaaacagacactacttcaattcaggcgaatatgcagatgcttctgtccgggggcatgatggcaaaggcaaatctcctcaggggatgagcatcaggtatcgttatgagataacggatgagattggtgttataacatcttttacatgggcgcgttctatgactaatgcgcaggcatttattgatgttaacccaggagatgaatccagagaggttaaaaatccggcagcttcaggaagaacagatatcagagcgaattactggagcctgttagcgggtccttcgtggcggtttaacgaatacctcagtgtgtatgcaatggctggtatgggcgtagctaaagttaccgctgacctgaaaattaaggacaacattaacagtaccggtggattttctgaaagcaacagtacgaaaaaaacagcacttgcatgggctgctggtgcacaatttaacctgaatgaaagtgttgctatggatgtcgcgtatgaaagctccggatctggtgactggcgcacgagcggggttgttgtaggtattggcctgaaattctga

SEQ ID NO: 24839 - DNA, 183 bp, Escherichia coli
atggcggtcctgccggatgcgcagaatcttctgatagttcagaaggtgcagatgatgaataaagagagatgccggacaatcggaagaaaacgttacaccacaggcgcaatgtgcttcatgctgtttgtgtggcttggtggtgtgctggctcttgttgctacagctgcggtggtaatgcagtaa

SEQ ID NO: 24840 - DNA, 471 bp, Escherichia coli
atgaaggtgattctggctaccaggaaccgctatctggagtatggtctgcaggcgttactgaaggggcacagtgtgatactggcgagggagtttttcctgccggagaaccgccgttatatcccggactttgacgaatcctggctgataatcagtgatggcctgctgggcaggctgatgcgctgtatgttccaggggcgtcattttctgcaactggatgcggagttgctccgtgatggtgagcagataagtgatgccatacacaacggcgtctggacgtataacagtgctgcccgcccgctgacgatgtcagagatggtggtgatgttcggttatgtctaccgccagtcgagaccctgccgccttgccagtgagatgggtattaacacaaagacggtgaatacctttctgtatacgggaatggcaaaaaacggactgtatggtgtgagtgtcagacggcttgttggtgcctga

SEQ ID NO: 24841 - DNA, 174 bp, Escherichia coli
atgaccgttcatggtatacaggaaggcagtattgttaacttacgtgaaaaagatggggaatggcttgtagtacaaactattaaaaacgacgaccttacatatcaactccgaaatacagataccaacgaagaagtaaacgtcgcacttcaggacattatctccccaaataaataa

SEQ ID NO: 24842 - DNA, 360 bp, Escherichia coli
atgctcatagatttggttttaccttacccgccgacggtgaacacttactggcgacgccgtggcagcacatattttgtatcaaaagccggggagcgttatcgccgggctgtggcgcttattgttcgccagcagcggctgaaattaagcctgtccggaaggctggcgataaaggtgattgcagagccaccggataagcgtcgtcgcgacctggacaacattctgaaagcaccgctggatgcgctgacgcatgcgggagtgctcattgatgacgagcagtttgatgaaatcaatattgtacgtggtcagccagtatctggtggacggctgggtgtgaagatttacaaaattgagagtgagtga

SEQ ID NO: 24843 - DNA, 198 bp, Escherichia coli
atgctaaaacagcaggatatgaccgaaaccgccagagtggtgtttaatgaattaagtgccaccgaaccggcgacagtcggggagattgcgcagaatacttacctttcacgtgaacgctgccagttaatactgacccagcttgttatggcggggctggcagactatcagttcggttgttacagacgccttcagtcctga

SEQ ID NO: 24844 - DNA, 1155 bp, Escherichia coli
atgaaaaaaatgacagtggcactttctgctgtagcagtggcagtgatgtttgctgcgggggcgcaggcagcagaagtttataataaagatggtaataaactggatctttacgggcgtgcaaccgctcggcattacttctcgaatgataaaggtaatgacggagaccagacttatactcgtctcggctttaaaggcgaaacgcagattaatgatcaactgaccggatttggtcagtgggaataccagttctctggtaacaaaacggaatctgaaggttccgcgggaaataaaacccgtctggcatttgcaggtctgaaatttgcagatgttggtaccgttgattacggacgtaacttcggtattgcttacgatgtcggatcatatactgacgtactgccagggtttggtggtgatacctggacgcagaccgataactttatgacggcccgaacttccggtgtcctgacttaccgtaatacagacttcttcgggctggtcgatggtctgaattttgcggcgcagtatcagggcaaaaatgagcgtgatgaccttcagaaggctaatggcgacgggtatggtttctcggccagctatgagcttgatggttttggttttgtggctgcgtataccaagtcagatcgtaccgataagcaggttcaggggttgaacggtactgaagatgttcttgatcctgaatcaggtaaaaaggttggagaaaaaacagttgactcaggtagtgtggcaaaaggtaaacatgctgaattctggggaactggtcttaaatatgatgccaataacctgtatctggcagcagtgtattctgaaacccagaatatgacgacctttggtgatcaaggtgttgcggataaagctcagaatatcgaagccgttgttcagtatcagtttgattttggtctgcgcccgtccctggcctaccttcagtcccgcggacaggatgttatggttggtggtgtgaatcatggcgatcaggatctggttaaatatattgatgtcggtgcggcttattactttaacaagaatatgtccacctatgttgattataaaattaacctgattgatgaaagtgaatttacccggaaagccggtgttgcgacagataatatcgttgctgtgggtatgacttatcagttctga

SEQ ID NO: 24845 - DNA, 342 bp, Escherichia coli
gtggatgagattaagacccttcactggtgtccccgggaagggatgcaggtgacggagaaaccgtcggtgatgacggtgaagtttggcgacggttatcagcaacgtcgtccggcaggactgaatgcgcaactgaagacctttcaggtggtttttcgggtgacaacggatgctgagcgggaggcactgtccgcgtttctgtcatggcatggtggttaccgggcttttttgtggaagcccccgaaacataaccggacggtcagggtggtgtgccgggagtggagtgttacggataacgcccggtacagtgatttcagttgcacgatagagcaggtagtcagatga

SEQ ID NO: 24846 - DNA, 492 bp, Escherichia coli
gtgctgcaggaaatatcaaaagttcttatgaatgccgcgattgtcaacgggatcaagacggcggcaaacagtatgtccggtgcaggaggatttattggcagcattggtgactggctgggcggtgcggtggccaatgcaaaaggcggcgtgtatacctcggcaaacctgagcgcgtacagcaacagtattgtggatacgcccacgtactttgcctttgcaaaaggggccgggctgatgggggaagccggacctgaagccattatgcccctgacccgggcggcggatggctcgctgggcgtacgcgcggtgggcagtatgaacggcagtgccggtctggtgtattccccggtctaccacatcgccattcagaatgacggcgctaacggacagatagggccggaggcggcaggcagtcttgtgcagctgattgaccagcgggtacaggcggtgatgttatccatgcgtcgtgacggaggaatgctgagtggatga

SEQ ID NO: 24847 - DNA, 2421 bp, Escherichia coli
atggatatcagccagcgtacgggcacggcattttcagataatgcggccctgtttgcccgctcggcagcctcaatgcgtgaatatggctacagtgccggtgatgtactgaaggtgacggaggccatttccacggggctgaaaatctccggtgccagtacggcagaggcgggctcggtgatcacccagttcagccaggcgctggcacagggtgtgttacgcggtgaggaatttaattcggtcaatgaaagcggagaccggatcgtacgtgcactggctgcgggtatgggcgtggcccgtaaagaccttaaggcgatggcggacgacggaaaactgacggcggataaagtcgttcctgcgttaatcagccagctgggggtattgcgtgatgaatatgccgccatgccggaaacggtctctgacgggatcacaaaggtggaaaacgcctttatggcctgggtgggtggcgcgaatgaagccagcggagcgacgaaaacgctctccggcgtgctgaacggtgtggccggacatattgataatgtggcaacagcagcgggggcgctggttgccgtcggggttgcccggtactttggcaatatggccgcaggcgtgggaaaggccaccacagagctgatcgcggcgaagtccgggacggttgcccttgcagccgcacaggcagatgcggctgttcaggtgcagcgtaaggcggcagctgacgcgctggcggcagaacgtgcctggcaactggcacaggctgaacttgcactggccagaaatagcagtgcggaggcgctggccacacagaatgccgtcgcaaaacgccgggccatgattgtggccaatgccgcactggtacagtcgaatcaggcggtggcggcctcggggaaggcgctggagaatgccacgtcggttacgggaatgctgaaaagtggcgcggcatccctgctttcgcttgtcggcgggatacccggtttactgatgctgggagccggtgcctggtacacggtgtaccagaatcaggaacaggccagggagtccgcccgtcagtatgcatcgacgattgatgaaatccgggcaaaggtatcgggaatgacccttccggaactggctgataatgagggtaaaacccgcgaggcactggaagagcagaatcgtctgattgctgagcaggaaagtaaagtccggggactgaaaacacagattgctgactatcagcgctggctgcaggaaaatccacagggtggttcaggtgcggagattataacccacggccttgcggaggcaaccggcaggctggcggtcgagcagtcacgcctgacacagatacaggaaaaggcgaagtctgtacaggaagctctggcgtcactggaatacaaccgtgtggcgaggatacgtgaggaggcggcagagcagaataaggtgtaccagtccatgctggttatgaacggtcagcatacggaattcaaccgtctgctggggctggggaatgaactgcttcagcagcgtcagggactggtgaatgtaccgttacggctgccacaggccaccctggatgataaacagcagagtgccctgacaaaaacagagcgtgagctggccctgtcccgactgaagggggaggaaaaagagcgtgcccggctggggtatgcggcggatgaccttggttttgtgggggattcgtatcaggaggcgagacagcgttatatcagtaatgctctggaagcctggcgtaataacgaggcgaacaaacctaaatcccggggtggaaaatcagagacggaaaaagcggaagacagtttttcccggccactgaagcagcagaaagagcaactggcactggcgggtcagaatacagagctggcgaagctgaagtaccagactgcgcagggcgaactgaaaaccctgacggagatgcagaagcaggaactgctgcgtaacgcggccctgattgaccagcaaaaaatccgggaacagttgcgatcccgggaagagaccctgaagaatgataatgtggctgcgcgtgcatcaaatgaagccgaactgctggggtacgggcagggagaacgagccagggaacgcatgcgggagttgcagcagatccgcgacagcttccgccagaaggatgcggaccttcagtctcagtatcagaccggggatatcagtgaggatttttacagacaggcacgggcacagaacgcgcagtatctgagcgaacgccttaaggaccaggcagccttttatgccgaatcggatgtgcagcgtgcggactggcagaaagggctgcaggaggggttcagtaactgggtggataatgcgtccgattacgcctcacaggcagcacagcttgcgacggagggtatctcagggatggtgaataacatcacggagatgctgaacgggaataaagtggaatggcgcaactag

SEQ ID NO: 24848 - DNA, 534 bp, Escherichia coli
atgaacaccaaaatcaaatacggcctgtcggctgccgttctggcgctgattgccgctggtgcgcctgcgcctgacattctcgaccagtttctggatgaaaaggaaggcaaccacaccacggcataccgtgatggtgcaggtatctggaccatctgccgtggtgccatcatggtggatggcaaacctgtcgttccgggcatgaagttgtcgaaggaaaaatgcgaccaggttaacgccattgagcgtgataaagcgctggcgtgggtggagaaaaacatcagagtgtcgctgaccgaaccccagaaagcggggatcgcgtcattctgtccgtacaacattggtcccggtaagtgtttcccgtcgacgttttataaacgaattaatgcaggcgatcgcaggggggcgtgtgaggcgattcgctggtggattaaggacggtggcagagactgccgtattcgctcaaacaactgttacggtcaggtatcccgtcgcgaccaggagagtgcgctggcatgctggggaatcgacagataa

SEQ ID NO: 24849 - DNA, 405 bp, Escherichia coli; identical to SEQ ID NO: 20458

SEQ ID NO: 24850 - DNA, 378 bp, Escherichia coli
gtggcgattagtcttgaccgtactgaaggtgccacgctggagttttacgaagctgaggcgaaaaagcaggcgaagcagtttttcatggatattgctgccgctttatgtgaaggggatgagcagtcgccggaaaagcgccccataattttagaggcgcaggatgtgttgataacctacagaggaaaactaccgggaataattactggttctctgaagacgccaccgacggcattgcggtcagaaaacgatgatattgaatcacgcattgaaaaactggagtgctatatcgctgaattgaaaaaaagcgccccaacaaaaaatgaggtgcttgcagcagatgaaatgaaagaaactattcttgatcgcgcgggcatctaa

SEQ ID NO: 24851 - DNA, 174 bp, Escherichia coli
atgttattcattcatcagatcatgctgtatttctgtactgccgtctgcgcgctgtatctgatcagcggcggttacagtgttatcagaaattattttcagcgaaaaattgacgagcgcgccgctgaaaaaatcagtcagaagtctgcacaacagaacaaccagaacatgccataa

SEQ ID NO: 24852 - DNA, 468 bp, Escherichia coli
atgctgaaaattaacaccctgcgcgacgccatgactgacgcctgcccatggtgtcgcgccaacccggagaaattcactgtgtatgtgaataacggaggcattgagacgaccggcgaatccccctcatatctttaccgttacacgcttgggatctttgtcatggacttcacgcaggatctcgatgaactgatggtgccgctgatgcgctggctgtaccgcaatcagcctgatctcctgcttaatccggagaaaaacagggatatcaaattttctgttgccatcaatgacgacgacagcaccgatatcctgctggaaatcccggtatgggagcgggtgattatccgccgtaatgatgatggcactgttcacgcagaacacatcggagagccgcctgtcagccgggccctggaagcatggcgcgtcaccctcgaagatgtcacatggggtcagaatgatggctccggatga

SEQ ID NO: 24853 - DNA, 243 bp, Escherichia coli
atgatggctccggatgacctgcacagactggacggtctctttcaggagatcctcagtggtctgtccgctgccggtataaacaaaacagcacgtgctgtcggtcaggctgtccgcgccgcgcaacaaaagcgtatacgttcgcaacaatcaccggacggtaaccggtggcccgcccgtaaaaaacgtgtattccgtgtccaggcaggtgtggtgttcatctggaacggcactcaggtgagatga

SEQ ID NO: 24854 - DNA, 363 bp, Escherichia coli
atgatcaccggttacgacacggagcgccggggaatacgctcgttccacaaagccgatattgaagaatacctggaaattgacacccgcaggcgaacgcagagcgccattaagcgtccacccatgtttgagcagcttcggacaaaccgctttctgaaggtaaaaaccgatcccggcggcgtcagcgtgggatttgaaggccgcgcagcccgcattgcccgcgttcatcagttcggcgaagtgtcactggtctctgccggtaatgccgtccgctatccgcaacgcgaactgctgggattcagtgaagccgacagacagaaagtgacggaaatcattatcaacaacctgtggagaaacacccgttga

SEQ ID NO: 24855 - DNA, 582 bp, Escherichia coli
ttgaatgctgaaatcatgcgactgctggaaaacatggtccgcaccggcgtcgtttcggaggtggatctgaaaaactggcgcattcgcgttaccagcggcggactgacaacggactggctccgctggaactgcacacgcgccggggcgtttaaaatctggctgcccccctcccccggtgaacaggtgctgttgctctgcccgggcggcagtcctgaaatggccgttgtggctggcagtctctacagcgaagaacacccggcgcccggcacaaaacagaatgaagtgatactccttgcacctgacggtgccgagatacgctatgatgcagaaaaaggcgcgctgacggtgaaaggaatcaaaaccgcagagatctctgcggaaacacgtattaccctggacacaccggccgtagagtgcacaaaacatctgaaggtcaggacgtttgaactgactgacggtggcaccctgaaaggggatatcacacacagtaacggaaacttactctcaaatggtgttaccgtgcatacgcacgttcataacggtgttcagtccggcggaagcatgacaggggggccgaaatga

SEQ ID NO: 24856 - DNA, 366 bp, Escherichia coli
atgacaccggtatgcacaggcatgaacccgcatggtagcggatgcatcagtgacacagaacacctccgccactctgtaaacaatattctgaccaccccgcgcggcagtcgcatcatgcgaagagagtatggcagcctgttacctgaactgctcgatgcgccacaaaacgacgtgacgcgtctgcagtgcatgagcgcggtggttatggcgctcgcacagtgggagccccggatcgccattaaccgggtggatatcgcctggctgcctgacggacgcgctctgctggccatctcaggcgtgctcacccgcacaatgcagcccgtacagatgagcattccgctgagggggagtaatgccgacaattga

SEQ ID NO: 24857 - DNA, 897 bp, Escherichia coli
atgccgacaattgacctgtctcagttaccacgtccgcagatcattgaatcactggattatgagagcatactgaaagacgtgaaggcctttatgattgatgccttccctgaaaacatgcgcagtgccgtcagcgcagccattgcgctggaatcagagccactcaacatcattgctcaggccatcgcctttcgcgaaatgctgctccgtcagcggatcaacgatgcagcggcggggtgcatgctcagccatgccgtatccacagacctggataatctcgccgctatcgtgaatgcgaaacgccttgaactgaaacctgctactgatacagaagctgccatcatggagagcgacagcgcgttccgtctgcgggcacaatccggatttgaaggtttcagcgtcgcaggcccctctgctgcatatgaatattttgcccgcagtgccagcggtcttgttgccgatgcacgggcaaccagtccgtcacctgcgacggtcattgtctccattctctcaacggaaggagacggcacagcgtcaccggaattaatcgcgaccgtcagccgggctctcaatgatgaaactgtgcgccccctggccgacagactcacggtacagagtgcgaccatcgtcagttacgatattgaggccgtactctatttttatccgggcccggaatccgaacccattcttgccgccgccagaaatgcacttgacacatggctgagaactcagaatgccataggacgtgatgtggcccgctctgccattatggcaacgctacacgtaccgggcgttcagcgagtcgagctgaagaaaccagcgcagaatgtggtgatcagtaacacccagtcagcccgctgcacatcccggaacatctctgcaggtggcaccgatgaataa

SEQ ID NO: 24858 - DNA, 624 bp, Escherichia coli
atgaataaccgactgctgccgccatcatcgccctccttcctgcatcattcggaacagggcgctcagcgcctgtcagagctgccgatccatatcaacaccctctggaaccccgacacctgcccagcccatctgctgccatggcttgcctgggcgctttccgttgaccgctgggatgaaacatggagtgaagaggcacgtcgtcagatcatccgtgactcgtggcatattcaccgccacaaaggcaccatcagcgccatgcgtcgggctgtggagcccttcggcgcgatactgagtattacagaatggtgggagaacaacgatccgccggggtcattcaggctggatattgacatatcggagcgcggactgacagaggaaacccggcaggagatggagcgaatgattaccaccgttcgcccggtaagccgacaccttgccgccatgaaaatgacctacgttgcacggggtgtatcccgcataaccggggccacgctgaccggggaaaccatcgtggtatatccggcagcagaactgacaagcccgctgtcagtcagtggtgacatccacccgggcggagtcacctatgaaggcatcacagtaaccatcagaccggacaaggagtaa

SEQ ID NO: 24859 - DNA, 1338 bp, Escherichia coli
atggccgcaaaatacaaaaccattatcacaaatgccggcacagcagccctcgcagctgcggtgttaccggatggagaaaagatcacgctgacacatatcgccgtcggagacggtaacggtaaacccacagaaccactggccacgcaaaccgctctcgttaaagaggtctggcggggcgaggtcagcagggtcagccgtgacgcggaaaacaccagttttttaaccgccgaagtgatcattcctgcgaatgaaggaggattctggatccgcgaaatcggtctgtttgacagcaaaggcacactcatcgccgtgggtaatgttgcggaaggttacaaaccgcagcttgatgagggctcaggcagagaacaggtattccgcatggtgattctgctgagcaacaaagcctctgtaaatctgacagccgactcatcaaccaccatggcaacacaggctggcgtggcagaaatgataaagcagcatgaacaaaacggtaaacacccggatgccacaaccaccagtaaaggatttactcagctcagtagtgaaaccgacagtgatgatgaaacccgggcagccacacccaaagcaataaaagcacttaaggcgctgacagtaacaagaccaacagcccccctcgccgtggatctgaatacactggggagacctgaacatcatggtgactactatcagcccaacaacaacggcgccactacagcacatcactacccggtaacatcagccggatcattatccatcaggatgggcgcatggggattctgccagcaggaatacaccgcctggaatccaccacgaaaatttatccggacagtgacaggtaacttcaccggcaacgggccatggtctgaatggaaggaggttgccatactccccctcacgcagaccggcgacgcctccctgacagagcgaggtattgttcagctaagcagcgcaacggacagtgacagtgaagtgctggctgccacaccaaaagctgtgaagacggccatgacggcagcagaaaacgccgggcagaaagcacggcaagcactggaggctgcacaggcaaaaacacagcggacactctgggatgtgggcagctttattctggcggcaacggatgccgagggggtatatcctgccagaattaatatagcgcccggagatacccgcccgggcagtaaactcagactgatgagcatgactaattccgacttagaaatcagtttttatgaatccatgcaaaactggaacacaaaccgcaggccaccgggcacgtggcgggcctgcgctgacatttatgcaggcgcaggaatcggaatatttgagcgcattgcctga

SEQ ID NO: 24860 - DNA, 588 bp, Escherichia coli
atgcacacaatcaaatcagcaagaaatgccgcttataaccgtgacggcactatcgactgtgagatccagtttgaaggggaggagagctggctgccctatacggcaaccgaatatgacaactcgccacacggcaaaaaactctggggcgaactgaaagcaggaaatcacggctctgtatctgaataccaggaaaacgacactgacagggaaaacgccagacgcctgaaaaacgacgaaatcaacgcctggcgtaatgcgatggaagcagcgagttacacctttgaacataacggcaggaaatgggactacgggaagtcaacgcaggcccgccttgagccttccgttgctgccgcaaaagcggggatcctgccgctggattttttctggactgatgcacagaacaacgatgttcctgtttctgctgatgagctgattgccctcagcgatgcagccgcaaaagccctgtttgccaaagggatggaaattcacattcgccagcgtaacatgaaaaaagagatcgccgccctgaacgatacggcggcgattctggactataaggttggctggggaaaagaagccgaagcatga

SEQ ID NO: 24861 - DNA, 492 bp, Escherichia coli
atgatgatgatttatgggatgtttgtgtttcagttaagtaccctgccgcatcagcaggtggaacagagtaaacgctggcgacacgtcagtaatgaacgggttaaccgttcatcctcctggcagtatattggctccggtgaagatcacatcacgatgtccggtgtgctctgtccggaaatcaccggcggggaggtgtcactgactgccctgaacaccctggcctacacaggattaccctggccactgattgatggtgtcggacagatttacgggatgtatgtcattacggaaatcaggaccacccgtcaggagctggatcgctacggcatggcccgtaaaattgagttcactgtcagctttcagcgatgcaatgaagatctgcgtgagcgtcttcagtcgggctcggtgggtgatctgatggcaggattaaaaaacagcgcgtcgtcggccctgtcgtcggcgtcctctgcgctgtctggtctcatgttgtga

SEQ ID NO: 24862 - DNA, 525 bp, Escherichia coli
atggttcagaaggcgtggcactggtcgcctcctggtggggccagtgtgccttccggcgcctccggtacacagcctccgccggtggcgctccctgcggggatagcgccggacggtaaccgtaacgttctccgtcacctgaaaggcattgaggggaataccggtggtctgctggctgaaaaccgtaaacgtataggacccggagatattgtgtttaaacatcttccacgggcgctggcggtccgggggcagtggcatgaacctgtcgtcgcgccgtcttccggtggaatgcgcgcgctgccacaggaggagattcaggtgcagcaatggcctgcggcacgcccggcgccacgaatgcaccggcaggaaaccttcgccagcgcctttcagggggagatacatgtgcatcttcacggggtgagttcgcataatccccgggaactggcgcgcatggttggtgacgctgtcagggcggaaatgaacagaatggcacgtgccggaaccggtagcttccgcgatcgcgactga

SEQ ID NO: 24863 - DNA, 339 bp, Escherichia coli
atgaaacaacaacgaaatgcacgcattaataacaacgcagaacgccacgttgcacgccagcacttccgtaaaaatagtgcgaccacaaccactgaaatccatgtaacaccagacggtcacccggtaaaacaaaccggcaaacacacctgggcgattggcgacactgccatcgttattcacaaaagttttcgcagtcctgttactggcagatttaatttcaccctgactcgcggggatgattacttcggacaggatttcacattttttgaagccttaagaacggcagacagattaatcaacggcctgtgttttcaatatccgggaagtaagtaccgataa

SEQ ID NO: 24864 - DNA, 243 bp, Escherichia coli
atgatcgaagcctacaaaatacttattaataacgcgttgcagcgttaccacttcgaacttgcaaaccggggcgtaactaaggatgaaagccttcgtaactcactgcgcggcgcaattatgggactgtataactgcgcgctgggcagcgatgaccgtgaagcgctggaagaattaaagtcgattatgacagaactgtttgaaggtgaaattgttgagccttacttcacaggggtagccgcatga

SEQ ID NO: 24865 - DNA, 126 bp, Escherichia coli
atgagcatatttctttcatgggtaattctgattatctccgtgcttatggcaatcggcattatgcgaattatccacacactgaaggatatcgaattattctttaccggcgataaacgccgtaaataa

SEQ ID NO: 24866 - DNA, 231 bp, Escherichia coli
atgagaacagccgaatcacccggcagagaaataaccgccagaccagctaaccatcatgcgcatatcagcatggccgcaagaaaagccgagcgtgcacatatctgcgaattactgcgcaagctgactgagacagcgaaagagacacacacctgtccacaggaaacctgcgcagccattgaacgactgattgcaatactcgccaacccagacgaactgaaggggtgcgcataa

SEQ ID NO: 24867 - DNA, 582 bp, Escherichia coli
atgaaccatctcatgattgacaccgaaacactgggtaacggaccgggcgcagccatattcgcgattggggcggtgtttttcgacccgttcaccggaaagctgggcaagcagtttgagaaattcatcgacccggtggattcagaacgcaacggcggaaccgtcaatgcagccaccgctgtatggtgggccggacaatccgtggaggccagatcctgcctgcgcaacgcagagggaacagagcttgcggcagtaaccgaatttctggcgttcatttcacgcaatatgcatgacgaaagcccgggcaattcactgaccatatggtgcaaaggcgcatccttcgatttcccgatcctgaaatccgccataacacgcacagccggagaaaaaagcatcccctggtgctactggaacgagcgctgtatgcgcccgcttatcgccatggctgaatcaactggatggaaaatgccaggcagatcaggaaaggaggctattgctcacactgcactgggcgatgccgtttaccaggcaaaggtcgtgtcagaaatctggcagcgcttcacaacaccattcctgaacatatga

SEQ ID NO: 24868 - DNA, 975 bp, Escherichia coli
atgagcaaagaactgttatccggcacgccgcttaaatgggtgggcggaaaaagtcgcatcatgaacacactgaaggcgcatctgccagaagcagactgcctggttgagccgtttgtgggtggcgcatcggtattcatgaacaccagttacaagcgttacatcctgggtgattccaatggtgcgctgattaatttctaccggcaagccagggacaacaccgacagcctgatcgacgaggcgaaaaccctgttcctgaaccacaacaacaggggtgactatctcatcattcgcgaaatattcaacgcagagaatcatgactttctgaacagcagaacgggaataagcgaccgccgtgagctgcgactggccgccatgtttttgtacctgaaccgacacagctttaacggtttgttccgcgtaaacggaaaaggtgactttaacgtgcctttcggctgctaccgcaagccctacttccctgagcgggaaatccgcgcatttgcagacaaggcaaacagcacccgaacgctgcttatccacgcagattttaaggatacgctgaactctgccagtcacctgttcggcatgggcaacacgctttgcgtgtactgcgatcccccttacctgcgattcagtggccgggacaatttcaccgcctacggaaaaccattcgatgaagacgagcacgttcgtctgagggcagcgcttgaccgcctttcacaggaaacgggcggcatgaccagcatcaccatctccaattccgacacaccggaaaccagacgcatttatcagggttaccggatgaacgccatccaggcaccacgaagcgttggcgcaagaacccgggaatcagcaccggaagttatcgccaccctgagacagtgcgacgcctgcggtcaccatggcggtggctactgcccggactgcggacctgtaacgggaaatgcaacttacagcgcaatgtttggcaatcactga

SEQ ID NO: 24869 - DNA, 231 bp, Escherichia coli
atggtgaacatcaataacaccgaatacggcatcacagttctggcattgaaaggcctccttctggagctgacggagcttcaggacgacgccatggatgagggtaacgagaagcttgaaatcacgttatgcgcaaccgaacgactgattgagtctgcgctggacatcatggaacagcaacaggaacaaatcgcaaaagtgaagagggcaataaacggaatgcatgaagagtag

SEQ ID NO: 24870 - DNA, 219 bp, Escherichia coli
atgattcaggaaaaaatcatcatccggttcacagccaacggccgtcagtacgaggtagacgaagccctgattgattacagcatgacccgccagagctcacgctttcaggacatgcaccacatccggctaatcaacggttcgcacttctgcgccacgaacatggaagaagtacgcgtgctgacagcagcacgcaatacgggaggtaaagcctggcagtga

SEQ ID NO: 24871 - DNA, 345 bp, Escherichia coli
gtgatttatatcgccggtcccatgaccggatgcaaagaccacaacaggacggcattttgcgtggaggacctgaaacttcggtgcgccggaaacatcgttcttaatcctgccgtactgcctgacggattaagccagcagcagtacatgagtatttgtattccgatgctcatgtgtgccgatgtcatttacttgctggaaggctgggaggattcagctggcgcgcgggcggagtacgtaatggcactcaaactgaacatgccagtgtcattcccggaaaaccgggcagccggcgaaaccgtcgcgcagctgcttcacaaatcaaaagccgcacaggcgactgagtaa

SEQ ID NO: 24872 - DNA, 603 bp, Escherichia coli
atgaggtgcagcggaaatgtaacccgacacgacgagcgctggcaagcggtttttgtgttgcgtgttgatgtggttagaatgttgcgaattaatatcacctggcaactggtgattgtctgcatacgcggggtgtttctgatgagtgataagctcccttctgattacgaaattctttttgacctgtggtacagctactggcttgaacacatgacaaaccttctccaccgtcgcgcttccttggttctgaggattagcgctttccttgcgattgttgccgcattcattttttgcgacagcgcaacgtttgttttcgccagtgtggtgctctttctggtgtggcaggtcatggctgcctctctttctatcagagctgaaaaggctgaatggcaggcgcttagctatcaaagactgattagccagcgccacgtgctcaccccggaatgcatgattgcgcgcctctcctttgttgaggaaagtgacagccccgtgatggagtgcatgatcaaccttgcctggaataaagcctgtgagacggttggtagctctgcgcgcaatcatgtttcgatctccggtcggttactcagtcgcctgtgcggcttttga

SEQ ID NO: 24873 - DNA, 222 bp, Escherichia coli
atggcaaaccgcaagcaacagcgcgcccgcgctgagcgtcttcacatccgcagcgaaatcaaccgcagactccatcgggctgcatctgtcgcctttatcatgcagtcaaacgtattacaccgacttaacgacggtatcgctgccgggtattacgcggcagtcttcagctatctcgccgaagatctggcagaactacaaagcctcatcaaccagcaccgataa

SEQ ID NO: 24874 - DNA, 717 bp, Escherichia coli
atgtctgctttgtatgaacgctcacagctgacgcaggtgatgatttcatctgccccggcgactgctgaaactatggataaggcggaatatctgcgcctggactgcaccatcaaggaagtccagttcaccgccggtcagaaacaggatattgatgtgaccacgctctgctccacagagcaggagaacatcaacggtctgggggcgtcgtccgagatttccatgtcgggtaatttttatctgaatcaggcccagaacgccctgcgtgatgcctatgacaatgacacggtgtatgcgtttaaggtgcagtttccgtccggtaagggctttaagttcctggcggaagtgcgtcagcacacctggtcatccggtaccaacggcgtggtggctgcaacgttctcactgcgtctgaaaggcaaaccggtgtcctttgtggtacccctggcgtttgggaaaaatccggagaagacacttaccgtgaataccggtgcgctgctgacaatgtcagtcagtgccaacgggggaacgccgccgtataaatacgcctggaagaaggatggtcagccggttgacggtcagacgacagacaccttcagtaagccaggtgcgcagtccgctgatgcggggaaatatacctgcgtggtgaccgattcggcagagaaagcacagagtgtgacgtctgttgaatgcatcgtgacagtgagcgcagccgccggataa

SEQ ID NO: 24875 - DNA, 327 bp, Escherichia coli
gtgacaacattactgacactggaagaaatcaaggctcatctgcgtgttgaccatgacgcggatgatgacatgctgatggacaaggttcgtcaggctacagctgtgctgctggcctacattcagggcagccgggataaggtaatccgtgaggacggtgaactgatcccgggcgaggcattaacccggatgaagggggctgccatgcgcctgaccgggatgttgtaccggaatccggatcttgctgagcgggaagacctcgtgcagggggaactgccgttttctgtgtccgtgctgatttacgatttgcgttgtccgacggtgttatga

SEQ ID NO: 24876 - DNA, 1224 bp, Escherichia coli
atgactgagcgtgaactgtccattatccgtgcgctgggtgaagaattcgctgcggtgctggcggatttacagcgtacatttgaggggaaaatagccgcgcaggcacaaatgtttgaagaaaaactgacttccctgtcggcggtattacagaagcatgtgacggtggatgaggtgcgtctggttctgcaggcgatggtggatgacgctgtgggggccattccggtaccgcgtgatggtcgtgattacgatccggaagtactgaagcaggcggtgaatgatgcggtcgcaaatattccggtaccggcggacggcaaaagtattacccccgatgatgtgcgtccgatgcttgagcagatggtgaaagaggccgtaagtcatatccctgctccgcgtgatggtcgtgattacgatccggaagtactgaagcaggcggtgaatgatgcggttgcgaatattacggtaccggcggacggcaaaagtattacccccgatgatgtgcgtccgatgcttgagcagatggtgaaagaggccgtaagtcatatccctgctccgcgtgacggtcgtgattacgatccggaagtactgaagcaggcggtgaatgatgcggttgcgaatattccggtaccggcggacggcaaaagtattacccccgatgatgtgcgtccgatgcttgagcagatggtgaaagaggccgtaagtcatatccctgctccgcgtgatggtcgtgactatgatccggatgttctgcggaaggcggttctggaggcggtgaatgccctgccggctccgcaggacgggcgtgatgccacggcactggaagtgctccccgctattgacgatcaaaaatcctttccccggggcacgtatgccacacaccagggcggactctggcgggcgtatgaaaaaacgcacgggatgcggggatgggaatgcctggttgacggggtggcggatattgacgtcagcatgacgggtgaacggttgttctctgtggtggtccggcagagcagtggccagcgtacggaaaaaacattttccctgccggtgatgctctaccgcggtgtgttcagagccggtgaaacctaccaccccggcgatacggtgacgtgggggggctcgctgtggcactgcaacagtatgaccgaagataaacccggagaagctcattcatcagcctggaccctggctgcaaaacgtgggcgggatgcaggaggtggaaagtga

SEQ ID NO: 24877 - DNA, 222 bp, Escherichia coli
atggcaaagatccgatatctgcagggcacgcatgatgcccggaccggggatatccgtgatgtggcacagccgtgtgcggaggtgctggttcgcctgggaaaggcggagtacatcacggtgcgacgtccggcaggtcagaaaaagaaacgtgatgcggagcatggcgaatgtggaaccttttacggcgaacccgaaaaaaccagaaatcaggacgtgacgtaa

SEQ ID NO: 24878 - DNA, 1362 bp, Escherichia coli
atgaatattggcgaacagattaaaagttttgaaaacaagcgtgcagcgctggcagcctcccttgaggaggtcatgaccaaagccgcagaggaagggcgcacgctggatgtggaggaggaagagcattacgacaacaccgcagcggaaatccgtcaggtggatgcgcacctgaagcgcctgcgtgaactggaagccggtaaggccgccacggcgcagccggtgaaacaggccggtaacgggaatgtggccgcggtggcttctgcgccggtgatccgtgtggagcagaaactggataaggggattggcttcgcccgctttgccaaatcgctggctgcggctaaaggcgtccgatctgaagccctggaagtggcccgtcgtcagtatccggatgacagtcgtctgcatcatgtcctgaaatcggcagtgggcgcggggaccaccacggatccgcagtgggcaggcagcctgtctgaatatcaggaatacgcacaggactttattgattacctgcgtccgcagaccattatcgggcgatttggtcagggcgggatccctgcacttcgtcaggtgccgttcaatatccgtgtgcacgcccaggtgtccggcggtgctgccggctgggtgggtgagggtaaggcaaaacccctgacgaagtttgattttgaatccatcaccttcagtcatgcgaaggtgtcggccattgcggtactgacggaagaattgatccgtttttccagtccggctgctgatgcactggtccgtaatgcgctggcggaagcggtggtggcgcgtctggatacagactttgtggacccgaaaaaagccgcagtggcagatgtctccccggcgtccatcacccatgatgtgaagggcacggcatcaaccggtaacccggatgcggatgcagaggctgcgtttggacagtttgtggcagcaaacctgcagcccaccggtgcggtctggctgatgtccagcaccaatgccctggcactgtccatgcgtaaaaatgcgctgggtcagaaggaatacccggacatgaccctgctgggtggctccttccaggggctgccggtgattgtctcccagtacgtgggtgaccagctggtgctggtgaatgccccggatatttatctggcggatgacggcggcgtggcagtggatatgtcccgcgaggcatcactggaaatgcagtctgagccgaccggcgacagtaccacgccgtccccggtggagctggtttccatgttccagacaggcagcgtggccatccgtgcggagcgctggatcaactggcgtcgtcgccgtaccgcggcggtggcggtgatcaccggagtgaactacggcagtgcgtccggcggctga

SEQ ID NO: 24879 - DNA, 273 bp, Escherichia coli
atgaattacgatgaaataatgaaaattaccgctgaacgtattagcgactacatgactgaagcagttaatacagactctatagccgttgcagaaatgtttcataacgctgcatggggagtgcgaacattgtggtttgaactcgtcacaaaaatcgatatggatatgcataaaaagaacaggtatgcgagttatgatcttagaaggaaaatcgaaatgcagcatgaagagtttcagaaaatgacagatcgcgagcaagtgcctttattgaaatag

SEQ ID NO: 24880 - DNA, 927 bp, Escherichia coli
atgccaaactggtgctcgaatcgtatgtatttttctggtgaaccggcacagatcgctgagattaaacgactggccagcggtgcagtcacaccgttttatcgccgcgccacaaatgaaggtattcagctgtttctggccggaagtgccggacttctgcagaccactgaagatgtgcggtttgaaccatgccccggactgacggctgccggacgtggtgttgtatcgccggagaatatcgcgttcacccgctggctgaagcacctgcaggacggtgtactgctggatgagcaaaactgcctgatgctgcatgaactctggctgcagagcggtactggacagcgtcgctgggaaggattaccggacgatgtcagggataccatcaccgcacttttcaccgcaaaaagaggtgactggtgtggcttctggagtaacgaggctgtatcggggtggtggaaccgtctgtgtgacaacgtactgccggaaaaaaccatgccgtttgacctgctgacggttctgcccacccgcctggatgttgaagtgaatggctttaacggtggtgttctgaacggtgttccttctgcatatcactggtatacggaacagtatggtgtgaagtggccttgtgggtatgacctgaatatcagcagtcagggagacaacttcattcaggttgatttcgacacgccgtggtgtcagccggaaagcgacgttattgcagaattaagccgccgtttcagctgcacgctggagcactggtatgccgaacagggctgtgatttctgtggctggcagcgatatgagcgtggcgagcttgttgatgtgctgtggggggagctggaatggtcttccccgacagatgacgatgagctgccggaagtcaccggacctgcgtggatagtcgacaatgtggcgcattatggcggatga

SEQ ID NO: 24881 - DNA, 360 bp, Escherichia coli
atgcttgtcggttttgtgcgactggaggacgggctgcgtcccgttcttgcgcttccgtcgccgaattacagtcatctgatggtaagtaccatcacagaaaacgggatacacctggcaggctacggtgaggccataaaccgtgatgctgatactccgtacccaccggagccgaagctgatgcagttccggcttaagggctgtcaggacacgctttttactgccatcaacaaaccggaagagatgccggattatctcttccgtcaactcggatttaatcagacctggcatgaatggaagcgggacgaacagcacaggcaacaacaacgacaccccggacactaccggggcatgagtatgtaa

SEQ ID NO: 24882 - DNA, 1119 bp, Escherichia coli
atggcaaaattatatctttaccttgttcttgctgcatcattatcggcattatcaactgacatgattgtgcctgcgttaccagaactacagaaagcatttaatgctgactactcattaattcaactaagtattagtggatttcttattgtatttgcatttagtcaactgatatcaggaaccataggtgattattttggaaaagtacgcgtaatgactatatgcttaattatttttcttattggtagtattgtgtgttttatggccaataatttaaatatgcttcttttgggtagaattctacaggcaataggtgcaggtgccggacctgtaatatcaaaagcaattgcaaaagagtcttttccaccactaaagctaaaaagagcactttctgacatatcatcaacaagtgcgataataccattaatagcacctctggccggagcattaatacttgattattataactggaatgtaatatttattgtaatgggtgcatttagcattctaaccatactcctgtcacctaaagagtctaataaacaggagaaaaaaacacatcaagataatgtaaaatttgtgactaaagatttcatctgcgggacaatactcgtttcactaatgctaagctcactattttgctacatatcaatatcgcctgcactatttatgagcgattatggattaaatacatttaactactctgttgttttttccctgtcagttttgtttttcatcattggaaaccaattatcaaaaatcgaaaaaatatcaaacccatggatcttatttcccctaaacgcaatatcagtcacacctttccttatattaaatgatgcttttataatatgtgttattggagcaatgattttcaatttaactcttggcgcatactatccaatagctaatttcatctcattacagataaacggttcacgaactggtttggcagcatcaattacaggctttactcaaacagtaagcgcagggacaattagttttctttcagtaaaaataagcgataatggagtttctttgggaaccactttaagtattagctgtcttattcttgcattattgtcaatattcgtaaccattattatagggaataataaaaaatga

SEQ ID NO: 24883 - DNA, 276 bp, Escherichia coli
atggcttacgacgaacattcgattcgcgtgatgtccgctgacgagatcgagcaacgttttgactggttgcggctggagaacctggcgaaggagcatcgcctgcccgttgactgggtcagacggggatttgaagcctgctggcgactgggtatcgggccggattatttcatcgacaggtatatcttcaaacgggatgtgccactggtgccggagtttgaggtcgtgttcagggaaatcgtgaacgaaaaccgatacagggatcggatgcggttctga

SEQ ID NO: 24884 - DNA, 702 bp, Escherichia coli
atgtccgatctgattgcctataaatccaatgcgttagttgaggccagttataagctcaccttacaagaacaacgtttcttgttgctttgtatcagtcgattgaaatcaggagctgatgcagcatcatcggagttgcaaaaaaatctgataattacggcggaggagtatttcaattcattccctgatatgggcagaaaaaacgctgagattcagttacaggaagccgttgatcggctgtgggacagatcgatccttctcaaggatgacgagaagcgagaggaatttcgttggatacaacgtcgtgcgcaatacctgaaaggcgaagcaaaggtacagatcactttttctgattctgtgatgccatacctaacgcaactacaagggcaattcacaaaggtgataattaagaatatatcaagattatcaagaagttacagcattaggatttacgagttgctccagcagtttcgcagtacaggtgagcgcattatttcacttgatgactttcgttcaatgcttgatatttgtgataaatatcaaacatataaatctcttaaccaacagttattaaaaccctgcattgatgaattaaacctgaaaagtgatctgcttgttactgttgagacaatcaagaaggggcgtacggttgtagcactacattttcgcttcaaggaagataaacagatcaaagtcccctcataa

SEQ ID NO: 24885 - DNA, 279 bp, Escherichia coli
atgagcagaacactcgaacagaagattgccgaagctgaggccagattacagcgcctgaaggcgaagagccggagcttggacacggcgcaaaaagtcattgtgggggcagccatgctggcaagggtacggaggccggaagaggcacaactgcgtgcgttcctgctccagttcctgcgaaaggaagtcacaagacaggccgatgtgaaccggatacagccgctgattaacgagctggagaagctacccggaccacctgtaaaaccgcaaaagaacggttga

SEQ ID NO: 24886 - DNA, 288 bp, Escherichia coli
atggggattggtccggtccatgtgatggaacgccacatcggcaatcatgccccgactgacaaagttttcccggacaaaagcgagaacggtctcccgtgcggcctcgcgggaaatctcacggggaatggcaagttcaatctcccttgccagctgggagttccggcgctgttcggctttctcgaccgcattccagagaacggaacggtcaccacaccaggacggtgcattcgcaggggtgagaatgaccgcatcatcaacgccgcgtttacgggtgtaatcgtggattaa

SEQ ID NO: 24887 - DNA, 141 bp, Escherichia coli
atgtttactgcattcaatgagagaaatgatttcagttatgcttttgaaaaaatccgtaatgcgatttccgcgccaggagaaaataatgtttatgctgcaacagaattaggtcttggcattctgctccgtaaatacgagtag

SEQ ID NO: 24888 - DNA, 321 bp, Escherichia coli
atgttgccagataagtggcattctggattaaaagcccggattgagtggggaattacaccaaatacagtccctctgccaccactctataaggattgggataaatatcaggcctgggagaaaaaactcaaagaaagttacattcaacataccgcaattgttgatatcccggaatacggtgctgagcgttgtggcatgaccgttcattttctgccatgcaatcagataaaagtgacaacagtctgccaagggtatggtacaccaaattatcccatcaaagaaccccgcgagatgaaggaaccagcaacatgtccatcaaaataa

SEQ ID NO: 24889 - DNA, 192 bp, Escherichia coli
atgtggatactgattttctggctctcatccccctttaatgtctcctccggcgatgcccggcaacccacactggccgttcacagtcaggagttccgtactgaaaaagcctgtcgggatgccttcaccgcgctgaaaaaagaaaacgtgggagaattcgctctccggggagtctgcgtccccgccggagaataa

SEQ ID NO: 24890 - DNA, 366 bp, Escherichia coli
atgaatgatggcagacagacgcctccgtcccctgaggcatggaaaatccggtttctggcgaacggtacacccggcacatggttttacaccgatgacgcagccgtcacaaaagagtggctgcgggcacattgtgacgatgtggaagtgatccccctgtgccgtatgcatgacggtcccgttttccgggaacaccatattaatgaactcagcgccgcactggccagaatgctccatatgcaccacatactgctggaacgaacccggtacagagaaaatatccatgatgcagaatgtattcgtgaaattcacgaagctcccctgcaggctatcggcatcctggaaaaatacaaacgcacaaaatcataa

SEQ ID NO: 24891 - DNA, 210 bp, Escherichia coli
atgaagacgaacgcgccgcgcttgttctttgtggataaggagtccggtgtgagtttttatgtttttcatgtgctttccgtttctttcccggtgacagttgtgccacacatgacgggggaatgtaacattcagaatcttactgaaaatgtgccatttgtgggcactggcaatcaatcctgtattcaggggctgtgtcacaattccggataa

SEQ ID NO: 24892 - DNA, 486 bp, Escherichia coli
atgataaaatatatattcgcactcacacttctgctttccgggtctgtctgtgccgatcaaattcagggactcgttattcgtgtgctggacggagatactctggagatattacaggcccggcatcctgtgaggattcgtcttgttaatattgatgcaccggaaaagaaacagccttttgggcgctggtcaatgaatcaacttaaaagccttgtggtaaatacgcccgtaaccgtgacatacacacagacagaccgctacgggcgtattcttggacgggtatatacagaagacggcatggaagttaaccgctggctggtacagcatggtgcagcctgggtatatcctgatttcaacacagattacaccctgccggcataccagagagaagccagaacaatgaaacggggtctgtgggcagacaaaaaacctgttccaccatggctgtggcgaaaagaaaataaaaatagccacaataattataaataa

SEQ ID NO: 24893 - DNA, 456 bp, Escherichia coli
atgcgagataaatcagaagtattaaccggagcgcagaaaaacagatttggtctgattctttatattatactattatcagttatttatatattgataacaaggcttaatctcacaaccacatattattcgctgtattcatctctggatgagaattcacaggtgacggagtattttataatatctatagctacatttctttttctggcggctttatgtttgttcttcatttattctttctttaaacggaaaagagttgtcgggaaattacttctgtgcatttatattctttatatatcacactatgctatcacttttgtttattgtctttatgttgtcggtgctgagtgtatgacaaccggaaagattgagcatattttgattgatattattatagccatgctttctcttttgtatgtttgcctttccgggagggcaagacatatttttgttaactaa

SEQ ID NO: 24894 - DNA, 1536 bp, Escherichia coli
gtgtcttgtattaaagaaaaatcaaaatatgcttttgagagagcaaaacagttttattttatgttgtggtgtaaagagtcactgatttatctgttgttttctgtgcttgttacatggtgttgcggatatacagtgaaaaacaccctggggaatgtgcttatattgttcctgatgttgttgttggggcggcagaatgttatttcagcaacgtgtgtctgtatctttcttttgttaagtgcattctatgctccggttgggatgatttacggaaaaataaacaacagttttattgcgtctgtaatgcagacaaatctaaatgaggcaggtgaatttatcacaggcatacctgttctttattttattgtttcactaatcattgctgcttttacattctggttctggcgtaagcgtgataaaaaccagcggggatttatctttctgttgttctttatcgtattgtcagtaaatgcatggccaaaacgtatggttacgaatgtaatgacagggatagctgaaaccagagatgaaatgatgcgatatgaatcgctgaaacacaatcagaaagactcatgggatattgtgaatgtggagaagaaatataaaaccataattatcgtaattggtgaaagtgtcagacgggattatctttctgtttatgggtatcctttgccgacaacaccatggttgaattctgctccgggtatatttattaatgggtatttctccgcagctccgaatacgataggttcactcagcagaacactgactcttgattacactgaaacaggtaatccgggtaataatattgttacgcttgccagaaaagccggatatgagacgtggtggatatcaaatcagggctctttagggcgacatgatacgctgatttctgtcatcgccgccaatgcggataagaaatattttcttaaggaagggagctcttcttcccgtcgcattgatgatgaagatatgcttcagtatgtcagggaagctgttaattcgtcttctccaaaagtgattttcattcatatgctggggtcccatcctaatccctgtgacagactttttaatgatgcacagccgttcagggaattattcggacataaagtatcctgttatttatcaacattgcttaagctggatcggtttcttcaggcaatttataacatgacgacagagcatggcgatgattttgccatgctgtatttttctgatcatgggcaatccgtcagttcagacagcacccctgtgcatcatgcgccaggtttgcgttcgggatacgatgtacctctcatgatgatggccagtgatattactgagcaccacctcaatcatgtgcatatcagtgcacgtcgttttcccgagatttttcaatggatcacagggatacaaaccaaaaatctgccgttaagtttttctttgttacagaatgatttcgctgaaagtgtttctgtattcaatggtgaacgtgacgttccggtaatgtctttgccagaagagccgatactgaccggaaatgctgaatcagaaaaataa

SEQ ID NO: 24895 - DNA, 243 bp, Escherichia coli
atgagtaacgaatatcaaagcaccagtataaacccggatgtttttgaacaattttttaccctcctgaatacacactgtaaatcatcagaagctgcacttgccatgctgagtacactctgctacgaactgatgaggaggagtgggatccattcactggacagcctgatgctcaacggagagggtatattgatacaattacagggggctgatattcgcgaaaaaacaggtcagcatattcactga

SEQ ID NO: 24896 - DNA, 681 bp, Escherichia coli; identical to SEQ ID NO: 11860

SEQ ID NO: 24897 - DNA, 264 bp, Escherichia coli
atgcaaagtgccacatgtagtgtgctgaaagccgcacagatgcctaacaatgacaaccgaaaaatttcgcgacgcacggatcttgcttctgtgcgtaagtgcccgaagcaggcctcggattacctggtgcttcctcgcccactcgctcgctacgctcggtcgcaggggctgcggcgagcactaccaccgctcacgtactgtcaggggatctggcctttgatgggtaagatgtcgccagaagaacactgccccaaagagccttag

SEQ ID NO: 24898 - DNA, 297 bp, Escherichia coli
atgaatgcctggcttatccccgatcgcattgaagagcagtcatgggcacgacactaccagcaaattgcccgtgaagaaactgaagctgagctggcagacgacctggaaaaaggtctgccccaacacctgtttgaatcgctatgcatcgataatctgcaacgtcacggggccagcaaaaaagctatttcccgtgcatttgatgacgatgtcgattttcaggaacgcatggcagaacacatccgctacatggctgaaaccatcgcccgtcaccaaattaatattgattcagaggtataa

SEQ ID NO: 24899 - DNA, 2073 bp, Escherichia coli
atgagcgctgataaacagacttttgcactacactgcgaagcaaaaaacgataaagtcagaaaacgccttggcatcaaaggcggttttttctggaccgaggccagaaaactttctgtcgcagtttcccgctgcattgcagccatggacgatgcaggctacgacgaggatgatttcaaaaaacccgttcgcgtaaatttccccgtcgtgaatgaccttccaccggaaggcgtgtttgatactgaattctgcaaccgctatgaaaaaggcggtaacgatggcatcaccatgatggctatccccttcgatgacaacatcaacggtgaagatgccacaactgctggcgatgacaacgataacctggacggaactattccggatgatgtggagaaaagcgaatccccggacagcgacgatgactgttctgagtgtgaaattcccgtcgccactctgagccttactcatcgcttccttcacctcttcttattcagcaaagatgaagatggaaaataccggcatcatgccacaccagaacaacgcaataacgtgatccgtatggagatggacacagaggacagttaccttcagagcctgcttactgctgtgcgcgccgcgcatcatgaactggataaactgacgaactatcaccttagtcgcctggctgaatctgtagggaaagcattcccccactctgcaaatcatcgcatcagcccggctgaattcgacaagttcatttccacctggatgaaaactgactaccttgatcagggcctgctgacaaaagaatggcagaacggaaattatgtttcaggcattacccgtacgccttccggtgctaacgctggcggcggaaatattaccgatcgtggtgaaggattcaaacatgataagacatcactcgcacgagatgtagccaccggcgttctggcccgttcaatggatgtggatatttataacctgcacccagcacacgcaaaacgcgttgaagaaatcgtgtcagagaataagccgcccttttctgtttttcgcgacaaatttatcgccatgcccggtgggctggattattcccgcgccattgtggtggcttccgtgaaagaagcaccaatcggcattgaggccatcccggcacgcgtgactgaatatctcaacaaagtgttgaccgaaaccgatcacgctaacccggatccggaaatcgtggaaattgcctgcggtcgctcatcagcaccgatgccgcagcgcggaacagcagaaggaaaacatggcgatgaagaaaagcaacaagcatcggacacaatggctaatgaacaggcagcgcctgaatcagtggaagaaattccagttaaacataatgaggacacgcaatcactggaaaatgtctcatctgtagaaacgaaataccaggaactgagggaggaactcaataaagccagggaaaacatccccccaaaaaatccagtcgatgccgacaaattactggctgcctcgcgtggagaattcgttgaaggcatcagtaaccctgctgatccgaagtgggtgaaggggatccagactcgcgacactgaggaccagaatcagtccaaagtggaacaaattgccccagaagcgggacaaaacagcccggatacgcaacaaaacgggccagaagagcaacagccagggccagtagcgcaaccggagctggaaaaaaactgccgcgtctgtggtcagactggcgggggtaactgccctgactgtagtgcggtaatgggcgatagcacttacacagaaacttttggagaaaatgacgccgctgatggagaagactcagcacaaactgaggagaagatcattcaggaaaactctgttgatgccgctcaggagggcgaaaccgttgttcagaacgagccaggcagtgatacgtccggcgatgacgccaattctgagccagtaactctcgactggaaaagacagctcgtgattgccgccgtctatggtttgtgcgccaaccccgcatgtatagccacagcgccagcaatccctgatatcgccatcatgattgccaacaggcttgaaaatttcggaggtgataaatcatga

SEQ ID NO: 24900 - DNA, 387 bp, Escherichia coli
atgaaagaacttgcgcaaaatgaaatattttccgaaaccagtcctgatgcaataaatgaactcaaagaaattgcagaacgcatcagtaaaatatgcaaagaatacaaaatcgactttgtattttctttttcagtgcttacagaagttggaaataacgaatataaggacagtcgttttgttttatgtgggttaaatggcaaaacaccaagcccatatattcatgctgcacgtgaagttgtcagaagcaacattggagtacaacaaatccatacacttgcacaggctcttgagtttgcaagagaaaattctgagtgcgactgccctgaatgccagcacgaaaagggaaaaacaactcacaaaacagcaaaccaggcaaccttccactga

SEQ ID NO: 24901 - DNA, 222 bp, Escherichia coli
atgattgctcatcacttcggaactgatgaaataccacgtcagtgcgtgacgcctggcgattatgttcttcatgaaggtcggacatatatcgcttcagcaaacaatattgaaaagagaaaactctatattcgtaacttcacaacaaaaacatgcattaccgactgcatgattaaagttttcatcgggcgcgatggcttacccgtaaaagcagcgtcgttgtga

SEQ ID NO: 24902 - DNA, 210 bp, Escherichia coli
atgacacaagaagaaaaagtgatgtttctgatgcggctggctgtcgatacctacaacacacaattcagggagaaagatatacctcaaaaggcagttcctgccgcggtagataagggcggtgctattgccgtattttacgatgcatttgaatcattttttaatgaaaaactcgacgctgttagcggcttcggaacatcgagtaataaataa

SEQ ID NO: 24903 - DNA, 360 bp, Escherichia coli
atgaacgaaacagaactgaagcacattatcgccctgcttctggaagatgccagacaggtttatcgacttagcccaaattccgcaacgctgacacgcatccagatggcagaaaaagcactgaaacaggataatgaaaacagcgcatccgaagttgatgctaatggtgaaaatgaagtaatagaaataaacagcaatatcagcgacagttgcatcgcttacagccaccaaataattcgtgtaagtgcaagaataatggaagtgatggcaagtgagcttgaaaagaacaacatcaagcccactgattgttgtttaagaaccgtaatgaacgttatttattactcgatgttccgaagccgctaa

SEQ ID NO: 24904 - DNA, 714 bp, Escherichia coli
atgaccacgccttcagttttgccgcaaaaattatggcgtccgcttgcagagattaaaaacttcgttgaaaaaatgcctgatggtgttcgccttacggaggttacaaaaaaagttaagacgtttgccgaactgtcaggaaaagagagaaaccagctcatagattttatcgataaacgggaaagcatcattgtatttaaggtcagaaaagaaggttctggtaacggagtaacctttttccgccacaaaaaatatggatatcccaaacgggaaggaaacgtcacaatcattaaggaccttcaatcaaaattatgtaccagatgcgggcagacaaaatcagtcaatgatttttattcagatgccagcaagcgtgacgggagagccatttattgcaagaagtgcgaatctgcaatgaaacgctcacgcagagaatgcaacaaattaattctgcaacaacaggaacctgaaatgaataacctcaaagcagtttcaccttcaccagaaatactcagaaaacaggctgaagaattgctgaaagccgccgaaattgcggagaaaaaacgccaggaagatgatgcattcaacaaaaaacttgcgcccttaaaacttgaaattcttcaggccgccggaaaaatgcagcttaaactggacgaattcatcgactgtatggatgaaatgaataaagcagttcagaagcttaaagagctgaccgcctga

SEQ ID NO: 24905 - DNA, 471 bp, Escherichia coli
atggcgttgatgtgcatgataaaccgccagcgaaaatgcacggcgcatcatggcatggctacccagggcgcaatcaaaacgcgtcatcccccccattttcaggatcagacgaactccttccccttcctgccccaacaaccagccaatggcatcctgaaactccacttcgcagctggcgttagagcgattacccagcttatctttcagccgctcgaggcgaatcgcgttgcgttgcccgtcaggcaaaaagcgcggcacaaaaaagcaggacaaaccgcccgtagtctgcgccagcaccagatgcgcatcgctttgcggcaccgagaaaaaccatttatgccccaccagccgataagagccatcttccaggcgctctgcgcgggtggtgttgctcatgacatcggaaccgccctgcttttccgtcattcccatgccaatcaacaaaccgcgtttttgcccacctggcaataa

SEQ ID NO: 24906 - DNA, 147 bp, Escherichia coli
atgtatcagaggttactgaaggttgacccgctgaagtgcattctgtgcggaagtcagatgcgttttacggggctgaagcggggttaccgactggcagagctggtcctgatacatgagcgactggcacgacagcaggtgtgcggctga

SEQ ID NO: 24907 - DNA, 1125 bp, Escherichia coli
atgcggatgaaagaattaaataaattcagagtgatagacctcttttgtggggcaggtggattatcttatggttttcttcatggagagatgtctgactactttgaaagtatccttgctattgataataatgctgcagctataaatacctacaatgccaattttggtttgcatggagttcaggcaaatattgaggagtgggcatccagcaatactgttcctgaggctgatgtggtcataggtggccccccgtgtcagggattcagtttattgaataagaatcgttatggtgatcaccgaagagcattgtgggagccttatatggatgtcattgagcgttcaagggcttgtatgttcgtcatggaaaatgtccccggattgctgataagcgatgagtttgcggacattacgtttagagcgaaatccatgggctttattctgcttaatccaatggtgttgaatactgctgactatggagtacctcagacaagaaaacgaacgatagcaatcggtatcaaacgagaactcttcgatgtgcatagtattccggcgttcccgccagcaccaacgcatcgttcccctgataaggatgtcgctttgcctgaatgggtctgtacgcgtgatgcaattggtgacttacctgctcctgttggaactgatattcgtaatgaacttcctccgctgaacttacattttgggcgtaatcccacacctgtttctctggagcgatataaagcggttccaccaggaggtaaccgtttcgatttacagaaaaaaagacctgatataaccccggcgtgctggctaaaaaagaaatctggagggaccgatttgtttggacgtctgtggtgggacagaccttcagtaacgattcgtactgagtttttcaaaccggagaaagggcgatatttacatccggaagaggatcggccaataactcatcgtgaggcagcgagattaatgtcttttcctgataatttcatttttaccggttcaaaaactgagattgcaaagcagatcgggaatgctgttccaccgctatttgcagcaaaaatcgcacaatatgtgtatggagttttgcagggacggtataagaataacatcagtaagaatagtcaagcagcctga

SEQ ID NO: 24908 - DNA, 879 bp, Escherichia coli
atgaatggagatttggttgacagcatagttggttttgctgaagccagaaaggagtttcatgcccaattgttactgaatacgctcacaattaatactgccggagttgttagtaacgcagatagcagtaacaaaaacagtaaagctatagcaagagaaattgctcgcttcttgcaggctgaaacgattggtgaacgtgttgcagggcaaacatctggtaatcagtttgagagtatctgcgcagagtttatagaaaaaaccttttttaaactcagccacttacgccctggaaaatggaatgtacatcaggtttctggtagaaacagattagagatagctaaatatgaacaatatgcccatcttatagcattggatagtgctgcaaaaagtaatcctcagctagctgctgcactggggagtgattatacgatttcaccagatattattgttgaaagagaacctgaatgtgatcaagttatcaacagtcctgaattactggtggatgattctgttacccgcatgtcagctctcaggagttcgaatggtgggaaaccaatattacacgcaagtatttcctgcaaatggacaataagaagcgaccgggcccagaatgctcgttctgaggcattaaatcttattcgcaaccgtaagggaaatctccctcatgtaatggttgttactgctgagcctactccaagtcgtctggcgtctattgctcttggtactggtgatatagattgcgtgtatcattttgcgctttatgaacttatatcagcagttgaaatactggggctcagcgatgcagctgacatgctttccgtgatggttaatggtaaaagattaaaggatatttctgatcttcccttggatcttgcagtctga

SEQ ID NO: 24909 - DNA, 513 bp, Escherichia coli
atgtttttgggttccggttccaccaatattctgccgttatggaatactgacattgattcacggtctggcttaacgataaccagaccgagttccggtaccagaacaggtcgaagtaatacccgcacgttacctccagatgcgttgctgatatgtgcgggacggacgcggcgggcgttcggaataagggagcctgacggaaattatccagtgtcggaagtcaggactgaggcctttctgaaactggtatccacgtctgcggtaattctgaatcagccactcggcctgttcttcagtgcattggtcatgctggtaccagtcatatttgaatgcgtgagagcgccgtccgtgtctgctggcagggtcggcatcagaattgtggtgtttggtattgtgcgccatcggttgtctctgctggcgcagcaggtgccagttgttcaggctggcgtgtggattgtaaaccagaatgccaggaaaaaacaaaacccgcgaagcgggttagtaaaaatgtactga

SEQ ID NO: 24910 - DNA, 1533 bp, Escherichia coli
atggttaaggttgacgagccggatgatgacaccgcctgtctgatgctgcggggactgaaggctcgctatgcacagcaccacggcgtgcatatgctggacagcgccattcagaccgccgtgcgcctgtcgcgccgctatctgaccggacgccagctgccggacaaggcggttgatttgctggataccgccggggcaagagtccgcatgagccttgacaccctgccggaaccgttgacgcagcttcatgcgcgactggcggcactggatattgagcgggaagcgattgagcaggacagcgtattttatcccgaagccagcccggagcggctggcggaactgaccgatttgcgtgatgagctacaggcagaagccgggcatctggaagcgcagtatcagcaggaaaaggcactggcgcagcagattatgacgttgcgtcaggaaggaacagacagcactgaactgcaacagcaactgcgaacgcatcagggctttgcaccgctgctggcgctggatgtggacgcccgcgccgtcgctacggtggtggcggactggaccggcatcccgctctcatccctgctcagggacgagcagagcgatctgctcagtatggaacagagccttgaaaaccgcgtggtcgggcaacgcccggcgctctgcgccatcgcacagcggctgcgggcggctaaaaccggcctcacgccggagaacggcccacagggggtattcctgctgaccggccccagcggcaccggcaaaaccgaaactgcgctcacactggccgacaccctgtttggtggtgaaaaatcccttatcaccattaatctttcggaataccaggaaccgcataccgtttcccagttgaaaggttcgcctccgggctatgtcggctacggtcagggcggcgtacttaccgaagccgttcgcaaacgcccttacagcgtggtgctgctcgacgaagtggaaaaggcgcatcgcgacgtgatgaacctgttctatcaggtgttcgaccggggctttatgcgcgacggcgaagggcgggaaatcgacttccgcaacaccgtcattctgatgaccgccaatctgggcagcgaccacatcatgcagctgctggaggaaaaaccggacgccacggacgcagacctgtatgaactgctgtatccccttctgcgagaccattttcagcctgcactgatggcgcgttttcagacggtgatttaccgcccgctgggacaggaagcgatgcgcaccattgtggaaatgaaactggcgcaggtggtccgccgtcttcaccagcactacggactggaaacggaaatcaacgacagcctgtatgaccagcttaccgccgcctgcctgctgccggacaccggggcgcgcaatatcgacagcctgctgaaccagcagattttaccggtattaagccagcagttgctggcacagcaggccgtgcaccataagccaacccaactacagctcggctgggatgaggaagacgggattgtactggagttcactacggaagagatgcaataa

SEQ ID NO: 24911 - DNA, 2358 bp, Escherichia coli
atgggtattcagaatttcgaccattcacaccacaagctcaaaattcgcggcctgcaaagtccggtggacgtgctgacttttacaggccgcgaacagctcagcgccccgttccgctacgacattgagtttaccagtaccgataaagccatcgcgccggagtcggtactgatgcaggacagcgcattcagcctgacggcaccgccggtgcagggaatgccggtgcaggcccccctgcgcaccctgtacggggtcattaccggttttaaacatctctcctcgtcacgggacgaagcccgttacgaagtgcggctggagccgcgtatggcgctgctggcccgcagccgccagaatgccatttaccagaaccagacggtgccgcaaatcgtcgaaaaaatcctgcgcgagcggcaccagatgcgcggtcaggacttcgtgtttaacctcaaaagcgaatacccgtcccgtgaacaggtgatgcagtacggtgaggacgacctgacgtttatttcacgcctgctgtcggaagtgggtatctggttccgctttgccaccgacgcccggctgaaaattgaggttatcgagttttacgacgaccagagtggctatgagcgcgggctgacgttgccactgcgccatccttcagggctacacgacggagccacggaagcggtatgggggctgaacaccgcgtacagcgtggtggaaaaaagcgtcaccacgcgggactacaactaccgcaccgccacggcggagatgatgacagagcagcatgacgccaccgggggcgataacaccacctacggcgaagcctatcactacgccgacaacttcctgcaaaaaggcgataaagaggcagcggaaagcggcgcgttttacgcccgtatccgccacgaacgctacctgaatgaacaggctattctcaaaggtcagagcaccagttcactgctgatgccggggctggagataaaagttcagggcgacgacgcgcctgcggtgttccgcaagggcgtgctgattaccggcgtgacggccagcgcggcccgtgaccgcagctatgaactgacgttcacggcgataccctactcagaacgctacggctaccgcccggcgtttatcccccgcccggtcatggccggaacgctcccggcgcgggtcaccagcacggtgaagaacgatatctatgcccatatcgacaaggacgggcgctaccgggtcaaccttgactttgaccgcgatacgtggaaaccgggctatgagagcctgtgggtacgccagtcgcgcccgtatgcgggagacacctacggcctgcacctgccgctgctggcgggaacggaggtcagcatcgcctttgaggaaggcaacccggacaggccgtatatcgccggggtaaagcacgactcggcgcacaccgaccatgtgaccatccagaactacaagcgcaacgtgctgcgtaccccggcgaacaacaaaatccggctggatgacgaacgtggcaaagagcatatcaaggtcagtaccgagtacggcggcaagagccagctaaacctcggtcatctggtggacgccgggaaacagcagcgcggggaaggctttgaactgcgtactgatctgtggggtgcggtgcgggcaaagaaagggatttttatcagcgccgacgcgcaggacaaggcgcagggtcaggtgcgcgaaatggctccggcgatggcaatactggatggcgcacagtcacagatgaagtcgctgtccactgatgcgcagacggcgaatgccgatccggcagatctgtcatcacagatagcgctgttgcagcaaagtgtaaaagatctgacgcaggctgcgatcctgctaagcgcacccaaaggcgtggcgatcgccagcggagagcacctgcaactggcggcatcgaaaaacctgatcgcgaacgcaggaaatcacgctgatatcggtgttgtgaagaatatgtttatcggtgtgggtcaggcgctgagcgtgtttgtgcgcaaagcgggcatcaggctgtttgccaacaagggggcgatctcggtacaggcacagaacgatctgatggaactgttggcacagaaatcgatagtgatcaccagtacggaagatgagatcaagatcaccgcgaagaagaaaatcaccctaaacggcggtggcagctacatccggctggatgcctgcgggatagaagctggaacgccgggagaatataacgttaaggcgggatattatgggcgtaagccgaaggcgaagctgacaccggagttgatggcgtttccagtgattgagagcggggaatttaatgctaagttcctttttactgatgatgatggggtaatgactccaacttactga

SEQ ID NO: 24912 - DNA, 1506 bp, Escherichia coli
atgccttatctacttgaaatgaagaacattaccaaaaccttcggcagtgtgaaggcgattgataacgtcagcttgcggttgaatgctggcgaaatcgtctcactctgtggggaaaatgggtcaggtaaatcaacgctgatgaaagtgctgtgtggtatttatccccatggttcctacgaaggcgaaattatttttgcgggagaagagattcaggcgagtcacatccgcgataccgaacgcaaaggtatcgccattattcaccaggaattggcgctggtgaaagaactgaccgtgctggaaaatatcttcctgggtaacgaaataacccataatggcattatggattatgacctgatgacgctacgctgtcagaagctgctcgcacaggtcagtttatccatttcacctgatacccgcgttggcgatttaggacttgggcaacaacaactggttgaaattgccaaggcacttaataaacaggtgcgtttgttaattctcgatgagccgacagcctcattaactgagcaggaaacgttggttttactggatattattcgcgatctacaacagcacggtatcgcctgtatttatatttcgcacaaactcaacgaagtcaaagcgatttccgatacgatttgcgttattcgcgacggtcaacatattggtacgcgtgatgctgctggaatgagtgaagacgatattatcaccatgatggtcgggcgagagttaaccgcgctttaccctaatgaaccacataccaccggagatgaaatattacgtattgaacatctgacggcatggcatccggttaatcgtcatattaaacgagttaatgatgtctcgttttccctgaaacgtggcgaaatactgggtatcgccggactcgttggtgccggacgtaccgagactattcagtgcctgtttggtgtgtggcccggacaatgggaagggaaaatttatattgatggcaaacaggtagatattcgtaactgtcagcaagccatcgcccaggggattgcgatggtacccgaagacagaaagcgcgacggcatcgttccggtaatggcggttggtaaaaatattaccctcgccgcactcaaaaaatttaccggtggcattagccagcttgatgacgcggcagagcaaaaatgtattctggaatcaatccagcaactcaaagttaaaacgtcgtcccccgaccttgctattggacgtttgagcggcggcaatcaacaaaaagcgatcctcgctcgctgtctgttacttaacccgcgcattctcattcttgatgaacccaccaggggtatcgatattggcgcgaaatacgagatctacaaattaattaaccaactcgtccagcagggtattgccgttattgtcatctcttccgaattacctgaagtgctcggccttagcgatcgtgtactggtgatgcatgaagggaaactaaaagccaacctgataaatcataacctgactcaggagcaggtgatggagccgcattga

SEQ ID NO: 24913 - DNA, 717 bp, Escherichia coli
atgcaattggatgaacattcaagaaaaattgctgcccttgttgcgtataatgaaaagcaaataaaagaaataaacaggataattactctgcttaatgaaagagtgaatgacttaaatacctttacagatactcttgaacgtgaaggtaaagttgtatctggaatttcttattccttgagggatagtgtgtctcatgttgatttttatcttaataaaggaatggaagaagtatcctgtaaattacagaaatctgtctcagacacactaacatcattactccgtgaaaaattatctttcacacttaatgatgtaaggcaagagtggactgattttgaagagcaaacaagtaaagagataaaggaatcattaaagcagacgaccagagatgctgaagttgcgacaggtataattagaaaaacaatggagaagtatacagtaacaaggatagtcgaaaaggtacttgtgttgcttgtattatttttattgttaatgattgctcctggtttttatgctgaatatctcaaaatgaatatcggctctctaatggaagaacagaaaaaacatgaatctatgttaaaagagtggaaggaaaaagcaccattggcagagttctctaagtgtggagagtatagggacgtatgcgtgttagttgatgataaaagcggatattattccaatgaacaaaccccaaataaaaaatatgccatactgaaatag

SEQ ID NO: 24914 - DNA, 573 bp, Escherichia coli
atggaatattcaacattattttcatttgctatcgtaactttatctcaaactatatcaataggacctggtgttgcattggttataaacaacgccttttcacaaggacttaaatcatcaataaaaacaagtatatacataagagctggcgaagcaatcgtcatggtaatatctcttttcacgttatcttcaacatccagcatagaacaacacttttacattataaagatcttaggtggaagctatttaatatacataggggtaatgggtttaattaataaaaaaaacaaaaaaagcaaagtacaaaaacctttacttataccattattaaacccaaaggcgtatttattctttgcggcattaataccagcatttatagatgataatacaaatatcgcattaaatttctttatattgggtgttttgtttatatttatatcattcctgacagatattatttacatagctattagcttgacgataagggataaattaactccgtcattctcaaggtacataagtatatgtagctccatttttatattaggtacaggtatttattttatcttgacgtga

SEQ ID NO: 24915 - DNA, 1662 bp, Escherichia coli
atgatacctgtatggagcacagcctgcccggactgggcagagcgcctgaaaaaggggctgtcgattattccggatccgatttatccggacgaggccgcacatgccctggcgatttttaaacaactgcggattgtggatgcacctggtagcccgacgttcggggagtcctgtgcaccgtgggtgtttgacctggtggcggccctgtttggctcctacgatgcgcagaccggtgtacgccatatcaaggaagtttttatccttatccccaagaaaaactcgaagtccacgctggccgcggggatcatgatgacggcgctgttactgaactggcggcaggcggcgggttacacgattctggccccgactgtggaggtggcggccaacgccttcaaccctgcccgggatatggtacgacgtgacgatgatctggatgacctctgccaggtacagacccatatccggaccatcacccacagggtgacagacaccaccctgaaggtggtggcagccgatccgaatacggtgtccggtatcaagtccgtgggtacgctgattgatgagttgtggctgtttggcaagcagtgcaaggcggaggacatgttacgtgaagccataggcggccttgcctcccgcccggaagggtttgtggtgtatacgaccacccagttgaatgaaccgcccgccggggtgttcagacagaaactgcagtacgcccgggatgtgcgcgacggcaaaattcatgatccgcactttctgccggtgatatttgaacaccctcctgaaatggtggaaagcggggctcacctgctgatggaaaacctcgccatggtcaatccgaatctcggctattcagtggatgaggcctttctgtaccgggagtaccgtaaagcccgggaagccggtgaagagacattccgggggttcatgtcaaaacacgccaatgtggaaattggtcttgccctgcgctctgaccgctgggcgggggctgatttctgggaagagcagggccgttgtatcagcctggacgatatcctgcgtcgtgctgatgtggtgacggtggggattgacggcggagggctggatgatctgctggggatgtatgtgattgggcgtgaccgggagacccgcgaatggctgggctggggccatgcctgggcgcatgaaaccgcggtggtccgacggaagagcgaggcgtcccggtttcaggatcttgttgcctgtggagatatgaccattgtccggcgtgtcggggatgacacggcggaagtggcggaatatgtgcgtcgcattcatgaggctgagttactggaccatatcggtattgacccgtcaggggtggggcagattctggattcactggcggaagccgggatccccgacggaattgtggtggggataagccagggctggaaactgggcggggccattaaaaccaccgagcgcaaactggctgaaggggtgctggtgcatggtgaccagcccctgatggcctggtgtgtcggcaatgcccgggtggagcctaaaggtaacgccattcttatcaccaaacaggccagtggacggggaaaaattgacccgctgatggcgctgttcaatgcggtctccctgatgtcccttaacccggaaccgaaaaagaaagaatatgcggtttttttcatataa

SEQ ID NO: 24916 - DNA, 123 bp, Escherichia coli
atgaaaatcgaataccaggacgccgcaggaggtgaatcaatgagctggcctgatgcaatcgtaactctggggatggtattcgcagtagcgtttgttgtgtactcgatttgtcgatggggataa

SEQ ID NO: 24917 - DNA, 1545 bp, Escherichia coli
atggcgagctatcattgcactgtaaaaacaggtgcgaaaggaagcgccttaaatcactctgattacatatccagatccggcgattataagaaatacaaatcgcgggaagatctggagttttcttcatccggtaacatgccatcatgggcgaagaaaaatcctgcagagctatggaaagccgcagatgaatttgaacgaaaaaacgggactgcgtaccgtgaaattgagatcgcattaccgcgtgaactgacacgcgaacaacggatagaacttgttgaaaatttcgtgcaaaaggaacttggcgatcgccatgcataccagtacgcgatccacaatccgccaggtgcaatcgacggaaaggaacagccacacgcgcatatcatgttttgtgagcggattaatgatggtattgaacgcgatccgcagcaattttttaaacgtgccaacagcaaatcaccggaacggggaggagccaaaaaagcgagtacacctcagacaccacaagaacgaaaagccgcccttgttgcgctgcgttcccgctgggcagatgtgcaaaacaaacaccttgcgcgacatgggcatgagtcacgcgttgatcatcgttcattgaaagaacagggtatcaaccgaacgcctgaaattcattttggccctgttcacgtcgccaatctgaacgaggggcagatcgcggcaattcaggaacacagggcggcgacgcgtcagcaagaacgcacagaacgcaggccagcgccggagcgccaacaggaactggagcaaaaacaaaaaacaaaaatcaaggctgttcgtcgatctccagagttattggctcagtaccgcaaggttatgaaaacggtcattcagggagaggcaaggcttgctcgtttaggagatgccaatcccaatgcgctcaaagaacagaagctgcttcagaatgcgaaagctaaaaaagactctctttccgaatggagcaggcgaatatatgcaggagcacggtatttagacaaactggagcgtaatgttttttacgcacaacgggagctgcgagaggtacaggaacaacgcaatgctttgaatgggattcgtggcctgtttcggggggctgacaaaagggagattgatgcgcgtattctggagcaaaaaagtgtgctggaaaccgccgaacatgaaaggaatgaattcaaggacaagctacagcaagccgaatccgactggaacaaagaatacgctgcttttaagcgtaccgagggatataagtacgttggggatctggacaggtacagagaacgtgagattctggcagcggcatctttagagaacactaggcaaaaggttgccgaagaagtatcccttgtccgcggtcagatgttatctctggagcaagaattaaaaatatctggagatgaaaaatctcagcttcgccatgagttgcaggcagaaatagcgcaggaacggcagcaacaggaggaaaaagtactgcgtatacagcgatcctgggccaggggggcatcccgtagtaacgaacgtgatcaagatatggaacgttga

SEQ ID NO: 24918 - DNA, 279 bp, Escherichia coli
atgaaaaaaattattgcattacttttcgttgcaacctttgcaacttctgccagcgcagcgatgactcagacatgccaagactattataaagaaatagataatttcatggacaaaatgaaagaaatggggacacctgacgcacaaattaatgtaataaaacaacaatatgaacaatcaaaacaacaaatatcggcactacctgaatcaagtcaggatatggcctgtaaacaaggtttggaggcactaaaacaatcaatgtcagccgtcggtattaaataa

SEQ ID NO: 24919 - DNA, 1041 bp, Escherichia coli
atggctaatgcctggctcagattgtggcatgacatgccaaatgaccccaagtggcgaacgattgccagggtatcaggacagccaatcgcaacagtgatggcagtgtatatccaccttctggtgagcgcgtcacgaaatgtcacgacatgtcacggcgtgtcactacgtggtcacattgatgtcacgacggaagatttagcaagtgcgcttgatgtgacggaagacgtaattgattcaattttgcatgcaatgcaggggcgggttctggatggtgaccttatttccggatgggaaaaacgtcaggtgctgaaagaggacaatggtaacgtttcgcaaacggcaaaatccccggcagagcgcaagagagcgcagcgggagcgcgaaaagctgcggaaatatgatgctgattgtcacgatgagtcacgacgtgtcacgcatccgtcacgacaagtcacgacagataaagatacagatacagaattaaaccccacacataacgcgcgcatgcgcgagagtgctccaaccggtgagtcgcatggtgcgccgttgcagacagccgaacctgaatacctggacggcctgagcgaaccgatcgggaaattttcgatgactactgtctggcagccgtcgtcggattttcgacaacgggcagcagtgtggggtatggctctgcctgagccggaatttacacctgcagagcttgccgcattccgggattactggatggcggaggggaaggttttcacgcaggttcagtgggagcagaaatttgcccgccacgtgcagcacgtcagggcacaggtaaaaccagtcagcaagggggtaaaccatgcagcagcaccaggtggcaccgcatcacgggcagttcaggaaattcgggcagcacgtgagcagtgggaacgtgaaaacggatttatcagcgacggaaacggcctggaagctgtgggagcttatgggggaggtgtattcgaaccgctggacccagaagaacggggccgcaccttcgaagctctggattgcccagattggcgcgatgactga

SEQ ID NO: 24920 - DNA, 225 bp, Escherichia coli
gtgagcggaaaaagaatgactaacagagagcttgtcgatgccgcgattaagcttgctggtgatttttattcaatgatggggtacacgcatcgcccaggcttcaaatattgggagtctcctcacccgcaagagcaactggtatttcaaatggcctgccgtgcttttgaggttattcgcggttctgatgtgatggacgccgttgccgacttggaggatgaagagtga

SEQ ID NO: 24921 - DNA, 285 bp, Escherichia coli
atgcctttagcagccaaacttaccgacaaaggcacccggcacgacggttattacgagaccgtcatcaccgccgggtcatccaccgtttttatcgatggtctccccgcagcccgcctgggagatccgctgacgccgcatgctaaaccgaagcatccacctcatccccgaaaaatcgccagaggctcgtcaaccgtctttattgacggcctgcccgccgccagaaccggtgatgctattgactgcggcggcgtggttattggtggcggcacggtaaatataggctga

SEQ ID NO: 24922 - DNA, 1380 bp, Escherichia coli
atgagcaagaaatttacaaagactgttttgtctgcaactgtagcaggagttttgtttggggttagctttggggctatggcagacacgacaagaaaggatataagtgataactattatatcgagattaataatggaaataaccacggattaatcaaaaataaaaaaaatcatcaagtggtgattggaccatttgatattagaacaggatatattacaacattaaatagaagtgaggctgttgaggcgctgaaaaaacttcagcctggctctaatcctaacgtaatactgaattcgctaaggtattcagtatatactccagaattggctcctgataatattagcaatcttacagattcatctgttaacaagcttaaaactctaatggataaggttgcaggaacaactaatgaaaagggagaagttgttataaaaggaaaagttacatcaaaaaatgctgcgatatataattccactattaagagtggaggtgatacagatgtttatcttaaactagttgatacaagccctgaattggctaacgaatataaccgcattgtaaccaaaatggatgcaatgaatgatgatgttgagttacttaacaagactactgcacagacacaaaaatatactgagacaaaaatatccgagatttatgatgatgtgagaggtagtttgtctgcgacggagatgaaagctaacaaatacacagatcaaaaagccacagaaatttatgaagatgtaaaaggtggtttgactgcgacagaactaaaagctaacaaatacacagatcaaaaaacatccgaagtttcagggaaaatagcaaatctttctggtcgaactgatcgaattgatgcggctgttggcgcagttgataatagacttgaatcccgcaccactgttggtgtgaattccgatggcactctgacccgtgcagaaggggctgccgccactattgctgtgaacgacggcctggttcagttgtctggtcgtactgaccgtattgatgcagcagttggtgccattgatggccgtgtcacccgtaacacgcaatccattgagaaaaacagcaaggcgattgcagccaatacccgtacgctgcagcaacattcagcacgtctggacagccagcagcgccagattaatgaaaaccacaaggaaatgaaacgagcagcagcacagtctgcggccctgacaggtctgttccagccgtacagtgtgggtaaattcaacgccacggcagcggttggtggttacagcgaccagcaggcactggcggtgggtgtgggttaccgcttcaacgagcagaccgcagcgaaagcaggcgtggcattcagtgatggcgatgcctcctggaacgttggtgtgaacttcgagttttaa

SEQ ID NO: 24923 - DNA, 321 bp, Escherichia coli
atggaagcggcgaactacacgtttgagcacaatgggcgtaaatgggactacgggaagtcaacgcagacgcgtcttgagccgtcggtggcggcagcgaaagcggggaaactgccggagcagtttttctggacggatgcggacaataatgacgtaccgatggacgctgaaacactgattgctctgagtgctgctgcagagcaggcgatgttcaccaaagggatggaaatccacgtcagacagcgcacgatgaaaaaagagattgaagcgctggatgatgcggaagctatactggcgtataaggtcggcatggctgacaggtga

SEQ ID NO: 24924 - DNA, 393 bp, Escherichia coli
atgtccctccagtacatccaggcgaccgccattttccagaacgacgttatctgccatgccatttcccacgaagaaattccccagacggtttgtgccggtgacagttgcagcagtactggtgaccagtgcaccgcccgtgttctgggtgactgcagtggcttccccgccggcatgtaccctcagttcaccgttctgatttatggtggtgttaccgacagcaccacctgccttaacaacctgccagcccccctcgttaattaccgtgttcagcgcaagtccgtccctgtgcacatactggtaaccgccattcagtgtggtattcagggctcttccgtgtaccgactggtcaccacctgcgtaaatgagagtgtcacgggctatcccggaaaataa

SEQ ID NO: 24925 - DNA, 648 bp, Escherichia coli
atgcgtttttcctatcttttcccggaaaaactccagatagcccgcagcatcattgctcgcccgtccactggcttccacaaaagcagatttacccaccaggttgacgctgcgcacataaaaccagaaatcctttccgggcttaatgtgcggaccggagacactccactgactgccggtccccagataacgggcagaggtttccacctgtgcggcgtctgcaatttttgcctccgaaaaccagaactcaaactgcaccgtcgggtcatacaccgcaagacgcggtaccgccgttatctgaaaataccccggcgtcagttcaacaccggcaggcgctgccggtgcgttaatccggaacgtggtggtggccggttcgccctgctggccgtagctgttaatcgccctgaccgtcagggtgtattccccgggaggcaggccactgaaacggtgctccgtatcggcagtgatggcggtggtcagcaggcggctgttctcaccgcttccactggtcaggcgcagactgaagcgcacgcccttcaccacccgcggcgtgtcccatttcgccagcgccagatactggccgtcagccgcgctcacctccaccgtgaggtgctgcactgccggaggaatgacgctgttcagggtgcctga

SEQ ID NO: 24926 - DNA, 189 bp, Escherichia coli
atgaacgggcttatgcaggatacccggaagagactgaaggatttgcgtaaacagcgtgatgccatttatgccgacagtactctcagtctggcgcaacagtcggcgatggtgaaatcggttgagcgggatatgaagattgccgtggatcggtttaaccgcgagtacaacaaaaaagtgggggtggagtaa

SEQ ID NO: 24927 - DNA, 600 bp, Escherichia coli
atgcgtaaagtttgtgcagccattttgtccgcagccatctgtctggccgtatccggtgcgcctgcatgggcgtctgagcagcaggccacgctgagtgcggggtatcttcatgccctgacgaacactaccggtagtgatgatctgaacgggattaacgtgaaataccgttatgaatttacggacacgctggggctgattacgtcattcagttatgccaatgctgaaggtgagcaaaaaacgcactacaacgatacccgctggcatgaggattctgtgcgtaaccgctggttcagcgtgatggcggggccatctgtgcgcgtgaatgaatggttcagcgcttatgcgctggcaggagtgtcgtatgcccgggtgtcgtcttttgccggtgattatgtgaccctcacgtcagatgagggtaaaaagcaggagcacctgacccgttcggacagcggacgccgcagccataccgcactgacatacagtgcaggcgtgcagattaacccgacagaaaatatcgtggtcgacctggcttatgaagcctcaggacgtggtgactggcgtacggatgcgtttattgtcggcaccggataccggttctga

SEQ ID NO: 24928 - DNA, 807 bp, Escherichia coli
atgctgaaggtacagaaaacaaaaaatggcataccctatgttgccggtattggagcggggattgaggatactgatggccagcccctgagcaacatactgctgctggctgaccgtattgcgatgattaacccggaggacggcaacaccacgccgttatttgtggcgcaggggaatcagttgttcatgaacgatgtgttcctgaagcggctgtttgcggtgagtatcacctcgtccggcaatcccccgacgttttccctgacgccggagggcaggctgaccgcaagaaatgctgatatcagcggtaacgtgaatgcgaattccgggacgctcaacaacgtcacgattaacgagaactgtcgggttctgggaaaactgtccgcgaaccagattgaaggcgatctcgttaaaacagtgggcaaagctttcccccgggactcccgtgcaccggagcggtggccatcagggaccattaccgtcagggtttatgacgatcagccgtttgacaggcagattgttattccggcggtggcattcagtggcgctaagcataagagagagcatactgatatttactcctcatgccgtctgatagtgcggaaaaacggtgctgaaatttataaccgtaccgcgctggataatacgctgatttacagtggcgttattgatatgcctgccggtcacggtcacatgacgctggagttttcggtgtcagcatggctggtaaataactggtatcccacagcaagtatcagcgatttgctggttgtggtgatgaagaaagccactgcaggcatcacgattagctga

SEQ ID NO: 24929 - DNA, 486 bp, Escherichia coli
gtgaacggcggaacactggcaaatcatgacaaccagattgtcttcggtacgaccaacggaatgaccatcagtaccgggctggagtatgggccggataacgaggccaataccggcgggcaatgggtacaggatggcggaacagccaacaaaacgactgtcaccagtggtggtcttcagagagtgaaccccggtggaagtgtctcagacacggttatcagtgccggaggcggacagagccttcagggacgggcagtgaacaccacgctgaatggtggcgaacagtggatgcatgagggggcgatagccacaggaaccgtcattaatgataagggctggcaggtcgtcaagcccggtacagtggcaacggataccgttgttaataccggggcggaagggggaccggatgcagaaaacggtgataccgggcagtttgttcgcgggatgccgtacgcacaaccatcaataaaaacggtcgccagattgtga

SEQ ID NO: 24930 - DNA, 159 bp, Escherichia coli
atggaatttctcctcaccgcccttccataccgggccctgttcagtcttacctggttttttgttgtgttatatatcgtcagggaagagccacagtgccctgtctggttatatgacgtcatcaggggcatcaacctgctggtaatgactccaacttattga

SEQ ID NO: 24931 - DNA, 342 bp, Escherichia coli
atgttttctcttcccgcatttccccggcgtgccgctgccctggcaggtactaccgggatgatgcttcttgccattgtggctgtgccggttcaggccgccgaaaaggatgagctggcaacggccatgcgccagcttgaccaggtacgggcggcgcttgaccgtgccagaacggcatcccttcaggccacgcctcatgacgggcgttatttcttcgactacccgcgcgcacaggctgacattcagaccatgcaggcgggtattgaccgttatctcacgccgtcccgtgcccagccccgaaacggcagtgccgtgaccggtgaataccggcgggagcgtccctga

SEQ ID NO: 24932 - DNA, 243 bp, Escherichia coli
atggcgctgacgtcggcacagatcacggcctttaaggtggcatccggtgatgtggatctgaatgtggtgcatctgacatcggtgggaatgctggttgccgttctctttctctgggccgcctggggactgtcggatgcatggtccgggtggcgtaacggtgacgtcagggaatctgcgtttatctggtttaccgtccgtaccgcactgctgcttgtcagcagtatctggatgtttgcgggctga

SEQ ID NO: 24933 - DNA, 366 bp, Escherichia coli
atgtttaaaaacgcttttactttccgtcatctgcgtctggcgggaatgggactgattgcttttctgctgggcagtctgaccccggcactggccgatttgcccacaattgagccgccatcatccggtgggggtggtggtttttttaatcaactcaaaggctatatccaggatggcattgtgctgtttggtctggtagttgcagcggcggcctttgtgaaggtggcggaggctgccgttaccactttttctgaggtgcgtgacggcaagacgggctggggacagttcggggccattatcgtggtcggggtggtgctgctggttgcggttatctggctgctcggcaaatccgcgaacatcatcctgtaa

SEQ ID NO: 24934 - DNA, 366 bp, Escherichia coli
atggaaaccattcgttttctgcccgatcgtctgaatgccgaaccgacggtgttccggggattcaccacgccagagctgggtctggccgcactgagcggtgtctttctcggtcttctctggacactgccactgataccgctgttcggctgggtgattattcccaccggtgccctgctcactccactgcttctggtctggaccggcggcgtgtggatcacccggctgaaacggggcaaaccggataactggctctggcagcgtattgaagataaaaaagcggcgctgggtgtggggcgccctgcatttatcagggaagcacagggctggtccctgcgtcgttcccgcgtcaggggaggaaaaggatga

SEQ ID NO: 24935 - DNA, 1260 bp, Escherichia coli
atgagcggatttgcacaggggttacttgccggattcagcaccgttgaccaggccatgacccgtcgtaaggagcttggtttgcgagaagcacagcttgctcagcaacagaaaaataacgagcgcgattttgaatttgcgcagtcgcagtttgagcatcgaaaggaaaatgatcagcgtacatatgatcttaatgtcaaaaatgccgatcgtgaatatgcgctgaaagagagggaacacgccgcagcgcagaattaccggaatgcgtcacttggcatttctcagcagaggctgcaactggaaaaatacaaccagcgacggcttgagtataacgatatgattgcccacagccagccattaatgacagcgcttggaaaagcaattgatgctggcgatcaggaggctgcaatgcgtatttacgggcagttaccaaagggacatccattaactcttatgtcaagtgaaggctatgcagcgaaagcgggtcaggccgtgaacaacctgcaaaaaatctttgatgacaagccggacagggcgatcgcttcactcaataccccggaaagtcttgatgcgctttctggtgtgtttgccccggaactgcaacagcgtattggcatgcccgattcaaccgggaaaaagacgataaaagaggccaggattggcagtatcgtaccggcgcagcaggaagggtacgtacttattggccttgatctcacatacagcgatggctccaccgcgcataaacctgtaacagaatacggcagtgcacatcctgatgatcaaaccgtgctggcggtgcctgttgataaggctgttgagcttgtcagggatcgcagtaaattcgcggaaatttcgaaaaatttcggttatttcacgccgaagcaggaggggctttctctgaaagttcagaaagaagccagccaggtagcagcggaagcgatcaagaacggcgttaatgctcaggctgcgagggatgaatttttagctgcgcatggtttaccggaatatcagcagaaaattcagcaacagaaatttgaacagcttttacagaaggggcagacctgggcggagggcgatccggtcaaactggagtttgtcaaagcgactgccgccaatatgccagccttgctggaaccggggcgtgaaaaggagctggaaatttggtaccagaatcacctccgggataaaaaagccgaacaggaaaaagcgaagaattatagcgctgctgcatcagccgaagagatcagaggctggatgaagtaa

SEQ ID NO: 24936 - DNA, 141 bp, Escherichia coli; identical to SEQ ID NO: 13550

SEQ ID NO: 24937 - DNA, 402 bp, Escherichia coli
atggcacccgtttcaggtgagagaatggacgacacaattctccggtatatgcagcgtgttgtgagaaattcccgcaaccctgaatttatgaatgaagttaaagacgcctgccttaaaaagcaggcgttttgctttgaagcgccggatggttttctggtgctgcgttctgtgctcagtgacgatggtatcccttatgttctggtgttactgggcgtgtgtacggggagtaagagtgttgagcgttatctgccggaggtgaagacattaacccgcctggctggcggacgctgggccgaatttcatacggcaagacgaggatttatccggctgggaaaacgtctgggctttgagcgaatgccggatgatgaggatggcttcatggtgttcaggatagcagtctga

SEQ ID NO: 24938 - DNA, 657 bp, Escherichia coli
atgggcggaagtaaaggtggtggtgataccaaagtaaaaccaacagcagcgcaaatagcacaggaagaggtggcctggaaagggtggcaggattgcaaaaatattctccgtccggcagaagataacttcatgaaaaaggtcgatgaccttaacagtgagcagcagtacgaaaatatcgcaggcacaacaaatcttgggtatcagaaacagtttggtgaagcgcgaagggagctggcgggtaatcttgctcagtccggcgttgacccatccagtggtcgttttaatgcagtaatggatgcaaatcaaagcgaccaggtgatcgggcagattgacacgaccacacgggggcaggtatcgcaggcagataaatatattgccgggctacaggatgttgcggctctcggttccggtcagaaggcagatgcgttacagagttttaactcgctggcagacagcagtctggcaaaagctaaatcggacgcacaggctgcgtttacgaaacagcaggggcgagcctctcttgttggcgctggtttgggtgcggtaggtgcatatgcgatgcataaggctggtggtagcggaggaagtggcggtgctaaaacacctggcaccggcgctaatgccattcagcatcaggctcagaactggagactgtga

SEQ ID NO: 24939 - DNA, 447 bp, Escherichia coli
atggagtacggtaaatacgaaacacttgcgagatacggttataccggagcagcccgccctcagggggactggcagacatccgcagcgctgacccgccagcaatacgacgactggcgcaccagatatttaccccgtgtagcaaggctggctgaccttggcgagaacaacagcctgatgaatgcacagcttgcccgggtgggcggccttgccacttccagtctccgtacagcgcagatggcgcaggataaccagatggcacgatatggcgttaaccgacctgataatcccaacagtaatacgctggggttacgtaatgccctggcaattgctggcgcgaaaaatggtatccgtgaagcagagcaggatcgtcagatgaacatactgacgggggcttctgcacctgcaagacagcaactgagtgttggcggacaactggtgtcagcttaa

SEQ ID NO: 24940 - DNA, 1044 bp, Escherichia coli
atgagtaaacgtaaaaaatacaccggaaagcgcggcacgggctcactggctgatgcactgaaatcagcgccgtcactcagtgctttcacgtttgacggtccttatgaagcaagccgtcttgatcttcttgataacatgtcgtgcgccgataatggccgctactatgacacccccatggactggaatgccattgctcgcgcctcgcgtcgtgcatcatggcaccagtcggccctgtattttaagcgtaatgccctgaacggctgctttgttcctcatccgctactgtcccgccaggcgttttccgcgtttgcgctggactggttcgtgttcggtaatgcctatcttgaagtccgccgcaacaagttcggtgaacccattgcgcttcgtcctgcgctggcgaaatacacgcggcggggcagtgatctcgatacgtactggtacctcaatgatgatggttctgaatttgctttccgtaagggggctgtgtgccacgttctgaaccccgatatcaaccaggaaatctacgggatgccggagtatatcggtgggttgctgtcggtgagtctgtcgaactcagcggatacgttccgcaagctctactatgacaacggttcacatgccgggtgcattgtctatgttggtgccgcccaggcaaacgctgaaagcgtggaagccatcaagaaaacactcacggaatcccgtggcaagggggcgttccgcaatatccttctgcacgcgccaggtggcggcaaggatggtgtgcaaatactgccgttccagcaaatcaccgcgaaggacgaattccttaacatcaaggggagtgcccgtgacgatatccttgcggctcaccgtgtaccgcctcagctgatgggggcaatgcctgacgggaacgcggcgctcggtgacgttgagaaagcggcgagggtgtttttcatcaacgagctgcaacctgtcatggaggccatgaagcatgtcaatgaatggctgggaagcgaggtaatgcgctttaacccctatgcgttgcttcaggataacgccagctga

SEQ ID NO: 24941 - DNA, 675 bp, Escherichia coli
atgtgcgaatttgtccgtgatggtgaggcagccttcagtctgaatacgctcgtcgggtgcggtgttgatggctatgacgaatggccggactggaagccttttgctgtccgccctatgggggtgagggaagtctggctcgggtatgacgccaacggcagcagcgggaagggggactgcggggcgctgtcggtgtgcgtgccaccccttgttgccggtgggcgttttcgtacggtggaaacagtcagggttcagggtatggagtttgaacaacaagctgccctgattgaggagtacacgaagaaatataacgtgaaacatattggcattgatgttaccggcgggaacggggaaggggtttaccagatcgtgaaaaagttcttccccctggctgttccgtacaacttcaatatcgcgtccaaacgggctctggtcatgaagatgcttcaggtggtccgtgccggacgctgggagtatgaccgcagcgagcgcgacctggtacaggcctttgcatcggtgcgaaaaatacagacgcccggcggctatatcacctatgacactgaccgctcacgcggtgtcagtcatggtgatctcgcctgggcaaccatgcttgctgttatcaatgagccaatcggcgcagagcgtgaggataatcgtggctttgcaatggagttctga

SEQ ID NO: 24942 - DNA, 597 bp, Escherichia coli
atgacagacgacgagaagaagattcaaacgctggaacagcagctttcacaagcaagagcattacttagccatacgatggatacactccaagaggaacggtacttagcatcgctcagaaaaaaccgcgtaacaggtggttattacatgatgagcagagcagcagaaaaaaacttaagagccttgcaaaccgcaaatccagcagcagcactggtatttagtgtgatccgtgaaaacatgcaaattggaaccaatgccgtagccatcagtaacacggcgttctgcaagattattggtaaatcacgggctactgtgactagagcgatcaaacacttggctgatcacaactacgttcagattgtgaaggtcggcacgacaaacacttacgtggtcaatgagcaagtagcgtttgcaggcagccgtggtcagcggaaagcagtattttcggcaactgttgttgctcatgaatgtgagcaagacgaaggttgggagcaggtcaagaagctaaaagccatacctgtcatctgtgaggatgaaagacctgtcattggttgtgatgaccttccacctccagaccagcaagacctagagttgaactaa

SEQ ID NO: 24943 - DNA, 333 bp, Escherichia coli
ttgggtgagtggttaaggtcactgacccccacaaagcgaaaacaactcaccaggcagctgaaagatgcgccatctgacacaaaaaccgtgaaaaccggcggccccaccacgcccgatgacgtcatacatgtgcgtacagcattgccgctgactgacgtcaccaccaccgtaatcaagtcggcactgagcgcgacgggcgaggagctacacagtggcgcagcactttccgtacacagaggtgcacgcgttcgcctgcctgacgggcggattgtgcactgggatgagaaatcacgaagcctggtggcagcagatcaaccggaggtgaacccatga

SEQ ID NO: 24944 - DNA, 405 bp, Escherichia coli
atgacacgattccattgtgtactccagcgccatgatttcagcgccatcatgagtggacgcattcccgcactgacgctgagcggcgtcagtgttcgaccacagccaggcgacgaactggagatcacgatcgcaaaccccgatcgcaacacagataccgtcatgaccgacatcctgactgcaagaatcaacaccgacagaagcgcattcatcgttgccgtgcgccctcgtcgcgccatatcagagcctgaaccactgactcccgtaggaaaaatcatgcaggcataccacgaaaaacagaccagaaaactcaacgaagaactggcaagaacgctggccgtcgttaaccgaaaagcggcaattgtcagctatgtgcattcggccgccagcaggcaatcacgcaggtaa

SEQ ID NO: 24945 - DNA, 171 bp, Escherichia coli
atgaacgacatcaggaggatcagcgacaaagagcttacgaaaatgattgagtcggcgcagcagctgctttcacgacgaaatccggttgtggaagaaacatggtgggaaaatttactgacagcactgaccgaactccgcgaacgccggaacaacgaaggagccgccaaatga

SEQ ID NO: 24946 - DNA, 339 bp, Escherichia coli
atgaagacccccagaatgaccggaaaggtaatcattttacgctacctggaaacgcacgcacgcttcagcgcaccagagctggttgaaaaactgggcgtgaaaaggaccatcattaatcaggccgccggaaagatggtacgcgaagggctgctggttgtggacgggtacacggacaagataacgcattaccggaagccaacggaaaaggaacgactggagctggcgcaacgggcagaatggcaacaagagccgtccgtaattgaagcctgcaagcgcagcgaaatcatgaagcgaattctgtttatctacggcgctggcgaagagctgccagtcatctaa

SEQ ID NO: 24947 - DNA, 318 bp, Escherichia coli
atgccaacacaggttgcaacagagggacgactggcagcagacccgaacacaaggagaacaaccaaaggaaccaacgtcacaacggcacaactggcggtatcactaccctgccatggcgcagaacagccaaccacaatgtggctttaccttattgcattcgggaagcagcacgaagaactggcaaaacacagaaaaggcgatctgattctggtgcacggaaacttgcaggtaaacaggtatcaggacaagtacgggcaacagaaagagggctggcagttgctggcgcaaagcattatcagctcaagaaccgggcgatga

SEQ ID NO: 24948 - DNA, 675 bp, Escherichia coli
atgtgcgaatttgtccgtgatggtgaggcagccttcagcctgagtgcgctcaccggctgcggtgttgacggctatgacgaatggcctgactggaaaccttttgctgcccgccctatgggggtgagggaggtctggcttgggtatgacgccaacggcagcagcgggaagggggactgcggggcactgtcggtgtgcgtgccgccccttgttgccggtgggcgttttcgcacggtggaaactgtcagggttcaggggatggagtttgaacagcaggccgcactgattgaggaatacacccaaaaatataacgtgaaacatatcggcattgatgtgaccggcgggaacggggagggggtttatcagattgtgaaaaagtttttcccgatggccgtaccgtacaacttcaatatcgcctccaagcgggcactggtcatgaaaatgcttcaggtggtgcgtgccggacgctgggagtatgaccgcagtgaacgtgacctgatccaggcattcgcatcggtgcgaaaaatacagacacccggcggctatatcacctacgacaccgaccgctcccgtggcgtcagccatggtgacctcgcctgggcaaccatgcttgctgttatcaatgagccaattggtgcggagcgtgaggataatcgcggctttgcaatggagttctga

SEQ ID NO: 24949 - DNA, 1044 bp, Escherichia coli
atgagtaaacgcaaaaaatacaccggaaagcgggggcaggattcgctacacgatgcactgaaatcaacgcctgcactcagcgcattcacctttgatgggccctatgaagtcagccgcatggatctcctggataacatgtcatgtgcagataacgggcgctactttgatacccccatggactggaacgctatcgcccgtgcatcccgtcgtgcgtcctggcatcagtcggctttgtacttcaagcgcaacgccctgaacgggtgctttgttcctcaccctctgctgtcccgccaggcgttttcagcgtttgcgctcgactggtttgtgtttggtaatgcctatcttgaagtgcggcgtaacaggctgggggaaccactcctgcttcgcccggcactggcaaaatatacacgcaggggaagtgacctggatacctactggtatctcaacgacgacggtacggagttcagtttcaggaaagggactgtgtgccacgtgcttaatcctgatattaatcaggagatctacgggatgccggaatatatcggcgggttgctgtctgtcagcctgtcaaactcagcggatacattccgcaaactctactacgataacggctcgcatgccgggtgtattatctatgtaggcacatctcaggcgaatgcggaaagtgtcgaggccattaaaaaaacgcttacggattcccgtggtcgcggggcgtttaaaaacctgtttctacatgcaccgggtggtggcaaggatggtgtgcaaatactgccgttccagcagataaccgcaaaggatgaattcctgaacatcaaggggagcgcccgcgacgatatccttgctgcccatcgtgtaccacctcaactgatgggggcaatgcctgacgggaatgcggcgtttggtgacgttgaaaaagcggcgagagtgtttttcatcaacgagttgcaacctgtcatggaggccatgaagcatgtcaatgaatggcttggcgttgaggtgatgcgctttaacccctatgccctgcttctggataacgccagctga

SEQ ID NO: 24950 - DNA, 276 bp, Escherichia coli
atgaatcttggagaatatttgcatcattccggtataactcagaagcattttgctgaaattgttggggtaacccaagggatggtaagccatgtcattaccggacgggcgaaacttacgggggaaaaaattttacgctggtgcgaagcaacaggctggatagtaactccgcacgagattgatagcagtacttatcccaacccaaccgacggcttacctgtcgagtatcaggctaacacacaaccagaggcgggggggattcatgaaaatcaagcatga

SEQ ID NO: 24951 - DNA, 501 bp, Escherichia coli
atgaaaagaaaatccctgtcagagatcgacctgcaagccgcccagagactgaaagaaatctggacggcgaaaaaaaatcaactagggttaacccaagagcgtgcggcagaaattctgggattttcgacacagggagctgtaagccattatctaaatggtcagacacctttaaatcttgaggctgttatcaagttcgcagggttgctgcaagttcctcccgagtcaatcagaccagatatggccgagttgttacaaattgtaaggatgtatccccaagagtctggggaggacaatgttgtcactatatctgcagatatggaacaatcggaaaacgaacttccgtttaatatagaccccatggagcgggatttgctccagacgttcagggctttccccaaagaagataaagagaaaatgcttaaggaaatgaaggagaaaaaagaatcaattgaagaaatcgttgcgcgatggctagctgcgcaaaagggtcgtcgcgcctaa

SEQ ID NO: 24952 - DNA, 192 bp, Escherichia coli
atgagtacagccctttccccgataatttctgaatttgaaacagtcgaacaagaaaacagctataacgaatggttgcgagccaaagtggcagcaagcctctcagatccccgtcctgcaattccacatgacgaagtaatggctgaaatggaaaaccttattgctcaattagctgcaacgaacaggagtgagtaa

SEQ ID NO: 24953 - DNA, 291 bp, Escherichia coli
atgctgcccattttatggctaccttctgcacgtgatgatttacgtcagatcgtagcctatattgctaaggaaaaccctcccgctgcacgtagactaaaaatacgcattgaaacatcagttttgtcacttactgaacacccttatctgtacccaccgagcgaaagagttccaagtcttcgtgagatagtgactcatcctaactacataatactttaccgagtaacagcatctaacatcgagatcgtaaatgtagttcactcacgaagacagtatccaaacaaaacctgttaa

SEQ ID NO: 24954 - DNA, 291 bp, Escherichia coli
atgtcagaaataaaatcgctggtcactgctgaggcagtgaaggaagtcctgcgctctgaagaagtccggagcgcactgaaacagcaacttcggcagaaccttgaggcgcgtcttgatgcagaagtggatgccattctggatgaattgcttggtgcacagccggaaccatccccggaactgcttccggaaccacaggcggaagatgtcaccacggaaaatggtgatattcagccggagccaccggtgacggatatgacagacacacaacccgaaccgggcacaatgctgtaa

SEQ ID NO: 24955 - DNA, 291 bp, Escherichia coli; identical to SEQ ID NO: 24954

SEQ ID NO: 24956 - DNA, 936 bp, Escherichia coli
atgaacagttctctgtatcatggtgactgtctggagattatgccaacgttaccggaaggaagcattgaccttatcctcgttgatccaccctatggaaccattaaggggctaaacctgccttcatgggattcagggaaagcatcatgggatgaagcattacccccggtggagatattcttacagtgtgagcgtctgctgagggtaaacgggacactgattctgttcggtcaggagccgtacaccagcacgatgattactcaggcgctgaacaatctgccgttttcgtatcgcatggtgtggaaaaaaaatcattttgccaatccgctggtagccccaaaggcgccggtatcgctgttcgaggacattgttgtgttcagcaaaaaatatgatagtgagaaaaagcacccgctgagggaatacgtcagaagcattctttccttcaccggttaccggtcaggcaaggaggttaacaaggtgcttggacactgtcgggctgagcactttttcagggttaacaccacgcagttttccctctgctcacgggcaacgtacaacgaattaatcgaacgctttggcatcgaccggatgccggggttcatgacatatgaagcgatgtgtcagcttaatcatgcctacggtcaaaaggtgtttaatctccccgccgggagaaaataccgttcaaatgtgctggagtactcacgggaaaaagtgcgttttcaccccactcagaagccggtgcccttactggaagagctgattcagacgtacagtaaccccggcgatatggtcctggattttactatggggagtggttcaacaggtgttgcgtgtatccggacggggagatggtttaccggaatagaaaaggatgaccggtatttcgctgttgcaaaaaaacgcctgaaaaaagaaaacagtgaaatggtagtgatatga

SEQ ID NO: 24957 - DNA, 687 bp, Escherichia coli
atgagccagaaattaaaagtcgtcactattggtggcgggagcagctataccccggagttactggaaggatttattaagcgttatcacgaattgccggtcagcgaattatggctggtggatgtcgaaggtggtaaagcgaaactggatattatttttgatctctgccaacggatgattgataacgctggcgtcccgatgaagctttataaaacgctggatcgccgcgaagcattgaaagatgctgatttcgttactacccaactgcgcgttggccaattaccggcgcgggaactggatgaacgtattccattaagtcatggttatcttggtcaggaaactaacggcgcgggcggtctgtttaaaggtctgcgtaccattccggtgatttttgacatcgtaaaagatgtcgaagaactatgtccgaatgcatgggtgattaacttcactaacccggcgggaatggtcactgaagccgtttatcgtcataccggatttaaacgctttatcggcgtgtgtaatattccgatcggcatgaagatgtttattcgcgatgttctgatgctgaaagacagcgatgatttatctatcgatctgttcggcctcaaccatatggtgttcattaaggatgtgctggtaaatggcaaatcacgctttgccgaattgcttgatggtgtggcatccgggtaa

SEQ ID NO: 24958 - DNA, 318 bp, Escherichia coli
atggaagcggcgaactacacgtttgagcacaatgggcgtaaatgggactacggcaaacagacacaggcgcgtcttgagccgtcagtggctgccgcgaaagcaggaatactgccggagggttttttctggacggatgcggagaataacgacgtcccgatgacggcagaggcgctgatggcactcagtgaggcggcggagaaggcgatgttcaccaaagggatggaaattcacgtacggcagcggaacatgaagaaggcactggaagcgctgaacagtgcggatgagattctggcgtataaggtgggtcaggagtcgtaa

SEQ ID NO: 24959 - DNA, 369 bp, Escherichia coli; identical to SEQ ID NO: 11801

SEQ ID NO: 24960 - DNA, 153 bp, Escherichia coli
atgttccgtcacccggaaaacgagtacgactggctgagctcagacgccgctgtggatgaggccctgctcataaacgaatacacctttaccgaaggcggtctgcgcgccggcttacctgtcatcgttaaaccattcttaaccgattttctgtga

SEQ ID NO: 24961 - DNA, 777 bp, Escherichia coli
atgacattaaccgatatcaaagtgaaaaccgcaaaacccaaagacaaaccctataagcttgctgatggcggcggtatgtatctactgattaacactaatggttctaaatactggcgcatgaagtaccgctttgctggtaaagaaaagatgctttctattggcgtataccccgatgtaacgctagccgatgctcgcgagaaacgcagtgaagccaggaaactcctcgctgctggaggcgatccaggggaggcaaaaaaggaagaaaaaatcgcgcagcaaataagtctgaaaaatacgttcgaggctattgctcgcgaatggcaccagtcaaaagccgatcggtggtcattacgctatcgtgatgaaatcattgatacctttgaaaaagacatttttccctacattggcaagcgccctattgccgaaatcaaaccaatggagttactggaagcactgcgtaaaatggaaaaacgtggagctctggagaaaatgcgcaaggtccgccagcgctgtggtgaggtgttccgctatgcaattgttactggccgggcagactataacccagcccccgatcttgccagtgctttagctacaccgaaaaaagtacattttccctttcttactgctaatgaacttccccacttcctcaacgatctggcgggttataccggaagtataatcactaagacagctactcagatcattatgttaaccggcgtacgaacacaagaactgcgttttgcacgctggggtgatgctgccaacttactgatttag

SEQ ID NO: 24962 - DNA, 1020 bp, Escherichia coli
gtgacggcatttctgccggaaaatgtactgaccatcggaggtcaatttcagcatgcagagctccgtgatgactcagccacgggtaaaaaaacgacagaaacacagtctgtttcaattaaacagaaagctgtttttatagaaaatgaatatgcagcaacggattctctcgccctgactggaggactgcgtctcgataatcatgaaatctatggcagttactggaatccaagattgtacgctgtttataacctgaccgataatctcacactcaaaggggggatcgcaaaagcatttcgggctccttcaattcgtgaggtgagtcctggatttggaacactgacgcagggtggtgcctctattatatatggaaacagggacctgaaaccggagaccagtgtaaccgaagagatcggtattatttatagtaatgatagtggtttttcggcgagcgcgacgctgtttaatactgattttaaaaataagttgaccagttacgatataggtacaaaagatccagtcaccgggttaaacacttttatttatgataatgtaggtgaggcaaatatcagaggggtggagcttgcaactcagattcctgtgtatgataaatggcatgtatctgcaaactatacatttactgactctcgtcgaaaaagtgatgacgaaagtctcaatggcaagtcgctgaaaggggaacctctggaaagaactcccagacatgcagccaatgcaaaactggaatgggattacactcaggatattacattttattcatctctgaattatacgggaaaacaaatctgggcagcacaaagaaatggtgctaaggttccccgcgttcgtaatggattcacatctatggatattggtctaaattaccagattctgccagacatgctgattaattttgccgttcttaacgtcacagacagaaagagcgaggatatcgataccattgatggtaactggcaggtcgatgaaggacgccgttattgggctaatgtaagagtatccttctga

SEQ ID NO: 24963 - DNA, 879 bp, Escherichia coli
atggaaaatggcctcgagaaatataaacaggcttatcctaaagcgaataaagaagaattgaatatggttgtccaatacttatcggagaaaatatcataccctgtatattcaccgactcttaagttagatagtttaacttccgcatctcttcaagaaaatgatatattaagagttaagtctttagttgataaagttaaatctagtgtttctttagaaacaaaagatgcatacctttctgcaataaatagtggtggggatgcgcagactgtggctgctttagctaaaattgatcctgatgtaactaaggaatatgcacgtatttccggaaatatcgaccaactgaataaagacacaacttttgctatcgatgctaacggtaacattacccttgatgaaacaggctcagtggagcgagagtctgtaaaaaatgtagttgcagccattcaggcagatacaacaatttatcagaataaagatggcagctatacacttgaccagagcgcaccgggcaacgttcgtgtgaatgatgctgttgtcagcctcgacaacagaacccgcagtaacacccaggctatccagaatcactcccgccagctgcaggagcataacgcacgcctgaacagccagcagcgccagattcgtgaaaaccacgaagaaatgaaacgtgcggcagcacagagtgcggcgctgtccggtctgttccagccgtacagtgtgggtaaattcaacgtcacggcagccctgggtggttacagtgacaaacaggctgtggctgttggtgtgggttaccgcttcaacgagcagaccgcagccaaagcaggtattgcggccagcgacggtgatgtttcctacaacgtaggtgtgaacttcgagttttaa

SEQ ID NO: 24964 - DNA, 192 bp, Escherichia coli
atgaagccattcagcggctttttctttattaagatacagcaaagatgtatcaagctgatcctgcaaagcactccttttgtcctttccataggcactggcaattttgtttatctctgcaaatccatcgcctttcacatgggtatgaattgcaacaatgacaggattcccttttgtatcggtcgcctgaattaa

SEQ ID NO: 24965 - DNA, 885 bp, Escherichia coli
atggaacgcgtatatagaacagatcttaagttgctccgttattttcttgccgtagcggaagagttgcattttggtcgcgcagcagcgcgtttaaatatgtctcagcctccgctcagtattcatattaaagagctggaaaatcaactcggtacgcagctttttattcgccattcgcgcagcgtcgtactgacacacgcgggcaaaatcttgatggaagaatcgcgtcgattgctggtgaatgcaaataatatattggctcgggttgaacaaataggtcggggagaagcagggcggattgaactcggggttgtgggaacggcaatgtggggacggatgcgcccggttatgcggcgattccttagagaaaatcctaacgttgaagttctgtttcgcgaaaagatgccagcgatgcaaatggccttgctggaacgccgcgaacttgatgccgggatctggcgaatggcgacagaaccaccgactggttttaccagcttacggttgcatgaatcggcgtttctggtggcgatgcctgaagagcatcatctctcatcattttccaccgtcccgctggaagcgctacgtgacgagtatttcgttacaatgccgcccgtgtacactgactgggattttttgcagcgagtttgccagcaggtgggattttcaccggttgttattcgcgaagttaatgaaccgcaaacggtactcgccatggtcagtatgggtattggtatcacattgatagcggacagctacgcgcagatgaactggcccggtgtcatattccgtccgctcaaagaacgcatcccggcagacttatatattgtttatgaaacgcagcaggtgacgcccgcgctggttaaactgctggcggcgttggcgcagtag

SEQ ID NO: 24966 - DNA, 510 bp, Escherichia coli
ttgcccgactctacggatcaaatcgaggctctgaagattcgtgaaggcgatgcgaaagagattatcagcatcaaaaattcgatcgcggaaatgaaagatgctgaaattgaacgggcaaataaattgctctcgctgatctcttacgatcaggaaagcggttttattaaaaatatggcgattattgagtccaacaataatcagtatctggctgtggggatcatcaaactgtgtggtctggaagctgtggaagctgtggaagcggtgtttggtgttgatgaacgcaataaaatcgtcaggaaattgtgtcagcgaattgccgagaaatatgcgcaatgctgcgatatcgtgacatttaatgccgatctatatttactcctgtgccgggaaaatgtacagacgtttacccgtaagatagcgacggtaaacgattttgacagcagttttggctaccgcaatctgcgcatccataagtctgctatttgtgaacctttgcagggggaaaacgcctag

SEQ ID NO: 24967 - DNA, 486 bp, Escherichia coli
atgttctcagagtttattttctgtgatgatgcgaaactcaacgaaatagaagagaatatctggattgcgcgtaatattcgccatgcaatggaaattggcgaactattcctggtctatcaaccgattgttgatattaacacccgcaccattttgggcgcggaggcgttgtgccgttgggtgtctgcggagcgggggattatttcaccgctgaagttcattaccattgctgaagatatcgggtttatcaatgagctgggctatcaaattattaaaaccgcgatgggtgaattcagacattttagtcagcgtgcgtcgctgaaggatgatttcttactgcatattaatgtttcgccctggcagttaaacgaaccacactttcatgagcgttttactaccatcatgaaagaaaatggcctgaaggcgaacagcctttgtgttgagatcaccgaaaccgtgatcgagcgaattaatgaacatttctggtaa

SEQ ID NO: 24968 - DNA, 291 bp, Escherichia coli; identical to SEQ ID NO: 24954

SEQ ID NO: 24969 - DNA, 372 bp, Escherichia coli
atgaagtttaatgtagtaagttttgccgtcctttttggtggtgaagtagcgatccgccatcattgccataggcaccggacgttcaacaacttcgcgaatggtttcaccagtttcctggtccttgcgctctgcaatcgcccgcatggtgtccggtttgtcatcagtgaatacctgccagtaatccttatcgggattatcctgcaccagtttcaggaaggcgttacccacttcgtttttgcgattgcgaatcagcgattcgctcaaatcctgtatcgcctgagtggaaggagactgtgcgcgggatgcacgccccatggcctgcttactttcacgcccgccgatggtgaatcccttgcctgtacgtggcagtga

SEQ ID NO: 24970 - DNA, 924 bp, Escherichia coli
atgagcgccgcgcttcaatacttcgaagaaaatttacctcaccgcccctatcacacagatgatctcgctttcggccttcgcatctccggcaaagggcgtgcgcttcttgcgcggtacatccagcagaaccagcctcatgcgcagttctggctggtttttgacgttgaccgcgagggggcagcgattgactggagcgaccggaacgcccccgcgccgaacatcaccgttaaaaatcctgtgaacggacacgctcacctgctctatgcactcaatatcgccgtgagaaccgcgcctgatgcgtcggttaaggcgctgaaatatgccgcagcggttgaacgttcgctgtgtgagaaactttgtgctgatgtgaactacagcggactgatttgcaaaaatccgttccacctggaatggcaggtgatggagtggcgcgaggaagcctataccctcgatgaactggctgattatttgagcgcctcagcgcgtcgtagcatcgataaacattacgggatggggcgaaactgccacctgttcgaaatgacgcgcaaatgggcttacagggcgattcgtcagggctggccagcattctcacagtggcttgatgccgtgattcagcgtgtcgaaatgtacaacgcatcgcttcccgttccgctttctccggctgaatgtcgggctattggcaagagtattgcgaaatacacctaccgcaaattctctcctgaaggcttttccgcagtacaggctgctcgaggtcgtaagggcggtaatgcaaattcatcagaaaatcaggctattaaaggtcagaaatcaaagcgtgtagccgttgccacatcggcacgaactctgaagccgtgggtgacgttagggatcagtcgtgccacatactatcgaaaactaaaatgtgatccagatctcgcaaaatga

SEQ ID NO: 24971 - DNA, 936 bp, Escherichia coli
atgagcgccgcgcttcaatacttcgaagaaaatttaccccaccgtccctatcacacggatgatctcgctttcggccttcgtatctccggcaaagggcgcgcgcttcttgcacggtatatccagcagaaccagcctcatgcacagttctggctggtttttgacgttgaccgcgagggggctgctattgactggagcgaccggaacgctcccgcgccgaacatcaccgttaaaaatcctgtgaacggacacgctcacctgctctacgcactcaacatcgccgtgagaaccgcgcctgatgcctcggttaaggcgctgaaatatgccgcagcggttgaacgttcgctgtgtgagaaactttgtgcggatgtgaactacagcggcctgatttgcaaaaatccgttccacctggaatggctggtgatggagtggcgcgaggaagcctataccctcgatgaactggctgattatctcgatttgagcgcctcagagcgtcgtagcatcgataaacattacgggatggggcgaaactgccacctgttcgaaatgacgcgcaaatgggcttacagggcgattcgtcagggctggccggtattctcacagtggcttgatgctgtgattcagcgtgtcgaaatgtacaacgcatcgcttcccgttccgctttcaccggctgaatgtcgggctattggcaagagcattgcgaaatacacgcacaggaacttcacgccggaaactttcgcacagtatgtggctgatacgcacacgccagaaatacaggccaagagaggcaggaaaggtggcatcgctaaaggcgaagcctacgatgacaagcgttttatggcgctatgtatgctggagaatggatattctcagaaagctattgcggcgatgctgaatgtacatcgtaatacgatccgtaattgggcaatgcacaaatag

SEQ ID NO: 24972 - DNA, 1194 bp, Escherichia coli
atgtttgatgccatggtggaaaaataccgttctgacctggcgggagtatccggtcagtgcgctggtgcttctccttctctggtgccctggatttgtggtgacacgacgtactactggaaggagacgtattcagcgcaatacgatgccgtctatggcgcatacaaaaccaaagccggtaaaaatatcttctttgtgccgtttatgatggatgacaatggtcagaaagtcgggaccaatgaaccgtcagaagacccggatattccggctatcgggtattatggttccggtggacgaacggatgcgaagagctggacaacatccgatcgtaaaacccactttggttcatgggcgcgtcgcggaattatttccgaccgtctggcaacagccattcttctgcatgtgggcagagtggcagattttgtttccgggaaagtgacaaaagccgcggtttcttcaggcggaggcgtatcgcaaccagcacaggagagtggcgatactcagcctgaagccgttgtcccgacaaagatacagtcagtgctggcttatgatgtgaatgcggaaaatgccgctctggcttcgcagggctggacgctgacagatgtcaaaaacacgctggtcagtgacagtggttcaggtaaaaaagcccttcgtcttgaaaaaccagaaaatggtcttgcacagaaaaagacctggaaagtatcgcacgcaattgatgccggtaaggggaaggagctgttcgataacggcggtgaaatcacgctgcgctttaaaatccccgatgatgtatctctcaatgcttctgcaaatcaatattctgcgggtatttactggcgcggtagtggatggccgggagcggaatcagaggagggttatattgcggccttctatctgcagactgataaaacaaacatcaatgtgatgtatcatgcaaacaccacatcacagcggcttggtagttatggtccgttcgatcacgactggcacacgctgactttccgcttcccgggtggtggctcgctgaacgtcacgccggtgcttgataatgcagcaggaaaaccgtttacgctgaccagatggacgaatgcagcctttgaggccaacgcgctggcaattacggatattaccggaaatgcggcaacttaccctgtgctgattgaaagtcttactgttggtgtgaatgccgtagcagcataa

SEQ ID NO: 24973 - DNA, 369 bp, Escherichia coli
atgtcaaacatcaaaaaatacatcattgattacgactggaaagcatcaatagaaattgaaatcgaccatgacgtaatgacagaggaaaaacttcaccagattaataatttctggtcagactctgaataccgactcaataaacacggctctgtattaaatgctgtattaatcatgctggcgcaacatgctctgcttatagcaatttcaagcgacttaaatgcatatggtgttgtgtgtgagttcgactggaatgatggaaatggtcaggaaggatggcctccaatggatggtagcgaaggaataagaattaccgatatcgatacatcaggaatatttgattcagatgatatgactatcaaagccgcctga

SEQ ID NO: 24974 - DNA, 210 bp, Escherichia coli
atgtggatggagttcgacagggtatccccgctgggtgatgagcgcggggatatccgtaatgcacagatcgtgaaagcggttttcggggcacaggggatgaatgttgcactgaaggacgccatgctctgctggggcgaggatgaggataagccggaggtggatccgtttgcggcgctggaagacgcgctgagctttgcagcacagtcatga

SEQ ID NO: 24975 - DNA, 207 bp, Escherichia coli
atggaaaaaatagcaacgggtgcatcgtacagcacctcggcagcgggggcggggtactggttgcttcagatactggataatgtgacgccttcccactggactgcgattggtgtgctggggagtttatttttagggcttctgacgtacctgacgaacctgtatttcaagattaaagaagaccggcgcaaagctgcgcggggagagtaa

SEQ ID NO: 24976 - DNA, 381 bp, Escherichia coli
atgaagcgacctcatattgtgccgctctctgagcaggttattatgctatttaagcagcttgaaccaatctcaaaacatcatcccctagtctttatcggtagaaatgatccccgcaaaccaattagtaaggaaagcattaatcaagtaattgaattacttggatataagggaagactcacagggcacggtttcagacacaccatgagtacaattctgcatgaacaaggctttaactccgcctggattgaaatgcagttagctcatgtggataaaaattccatcaggggtacctataatcatgccctgtatctcgatggccgccgtgaaatgatgcaatggtacgctgattacattgattcactctccagccgggaaagttaa

SEQ ID NO: 24977 - DNA, 327 bp, Escherichia coli
atgaaaagaaatcttccgttaattattttgttgtcttctctggttatgggctgtacgcaacataaaacagatatgccccgacagttggttaaggcattaccacaatatccggcctatgcagcggcaaattatataaagggacgggttgatgtgaagtttgatattggtgctgatggtactgtcacccgaattgagtttatccgttcagagccgcaccatttgtttgatgagcaggttgtaaaggcgatggcaaaatggcgatttgagaaggacaggccgtgtaaaggcgtgaagaaaacgtttatctttagtccttctgcaccctga

SEQ ID NO: 24978 - DNA, 447 bp, Escherichia coli
atggaccgggatgatattcttgacagggttttatatggttattttcttgaacaactattctctgtagcgactggtcgtctcgataaacttttctcagtggtgagtattatcctcggttcatctgtcattggtggatttattcctgaagtttctggagttctcattgttgtgatagcaaccgttcaaacgatttacggattcggacaaaagtcaggtaacgcaatgagaaaatccgcagaatatctgcagctttatgatgatgcagaaaaatattccgattcggaattgaaaatgcagttaaagctcctggaaaaaacagatgataatatttggtcgtcgcttaaagatatcgcaatcttaaaaacccagatcaaaataggaatctccgtagaacaacaagagaaactgtctgcaaaatccaaattgatgcgattcctttgtggttag

SEQ ID NO: 24979 - DNA, 189 bp, Escherichia coli
atggttttggtcgaatgtttttctcaggtatatgtttcctggtattcggaatgtccgccctgtccgcaggcttaccagtacctgaacaattcttttgaaccaccatataaaacaccttcctgttgttggggatatccagattatacagatttcctgttattggggaatgacggaaaccacctcgcctga

SEQ ID NO: 24980 - DNA, 903 bp, Escherichia coli
gtgcagacggacacaaataatgacctgaacagcatgtgggcggtgaagctacagcagatgcaggatggtcgtcgctatattgccggtatcggtgccggtattgagaacacccctgacgggatgcagagccagatactgctggcagcggaccgtgtggcattcattaatccggagaatggtgataccacacccgcactggtcacgcaggggggacagacgtttatcaatgaggccctgataaaggttcttaccgcccccaccattaccagcggcggcaatcccccggcattctccctgacgccggacggcaggctgacggcccgtaatgccgatatcagcgggaatatcagtgccagttccggtacgctgaataacgtgacgattgcggaagactgcaccattaatggaacgatgagcgctgaccgaatcattggtgatatcgtcaagggatacacggttgatatggggcagggcgtaatgactcagaaccagctgacttttcagaaaatgattttgctgaaagacaacatgccgtttgatcgcaagcttatgcttatggcgtattcattttccagaggtgaattcatcatgaagataaatgacaaagttgtcgttcatgccaggtcaggcaaagtcaaaaccggggagcgggaggtccagatttccaaaaacgccagcagatatgagccggtatattctgatgttggcggaagtgcgtcaggctcatggagtattcctgccggacagggtgatgtgcgggttgaaattacattcaggtatgaagcaggtgtgcttttttacatgggtggttcaatacttcatgatacgagtcaaattcggatcccggacccggttctgttttacctgaaatcctatacagacgattttgataccgcatcgtga

SEQ ID NO: 24981 - DNA, 225 bp, Escherichia coli
atgaagaaattactggtaaccgtaaagccttttcagggaacaattctgttccgtattttgcagcgtggtcatgttcttgttgaaggttcgttcagtggtaaatgtacgcaattacactcccggacctttcaggtgaatgccacgaatgaagagctaaccgttgagtgtacgatgaataccgctaaatgccgcatggtatccgctgcattacagcgagtgtgttga

SEQ ID NO: 24982 - DNA, 225 bp, Escherichia coli; identical to SEQ ID NO: 24981

SEQ ID NO: 24983 - DNA, 570 bp, Escherichia coli
atgaaagcgtcaacggacaataacgacttccgcgcccggggttggggctggctgggttcactggaaaccggtctgcccttcagtatcactgacaacctgatgctggagccacaactgcagtatacctggcagggactttccctggatgacggtaaggacaacgccggttatgtgaagttcgggcatggcagtgcacaacatgtgcgtgccggtttccgtctgggcagccacaacgatatgacctttggcgaaggcacctcatcccgtgcccccctgcgtgacagtgcaaaacacagtgtgagtgaattaccggtgaactggtgggtacagccttctgttatccgcaccttcagctcccggggagatatgcgtgtggggacttccactgcaggcagcgggatgacgttctctccctcacagaatggcacatcactggacctgcaggccggactggaagcccgtgtccgggaaaatatcaccctgggcgttcaggccggttatgcccacagcgtcagcggcagcagcgctgaagggtataacggtcaggccacactgaatgtgaccttctga

SEQ ID NO: 24984 - DNA, 351 bp, Escherichia coli
atggggacagttattgccacgagtccaaggtgcggcgaagccgcccccaacgtcaaaatcctcgtccgtgctgttgtcggctttcgcttcttttctgaccagtttccactcgtccggatgggtgcagatggtgtagcgctcgccgagcgacggggcacaaattccgtaaatgcgctgcgggaattcgccgtagtcgttggcctcatctgcggtttcgtatgcggtgcggatcaggtacaggttgcgtggaatgagcacgccgccctgacggttgatgtaggtggcaaaacaccccacgtcagcggcggccagaatggcgtcaatgtcgtcatggtccaggcgcttcggtga

SEQ ID NO: 24985 - DNA, 537 bp, Escherichia coli
atgacggcacaccgcactggcacatgctggtattcaccgccccggacaatgaagaacgcatcattgaaatcatgcgtgacgcagcaatcaaatcagatcgcgcagaactggggaatgatatttctccgcgcttcaagtgcgaaaaaatcgacccggcaaaaggcacaccggcaagctacatcgcaacctatattggcaagaacctggacgccagcacctttcacgacaatgacccgaaaaccggcaaaccttacgccgataaagaatcgggaaaaaccatggcggaaaccgtggaaaacgccattgcctgggcgagtctccaccgcatccggcagttccagttcttcggtatcccgccccgccaggtatggcgtgaactccgccgccttgccggacaaatggagcgtaaccccgcatcaccgaagcgcctggaccatgacgacattgacgccattctggccgccgctgacgtggggtgttttgccacctacatcaaccgtcagggcggcgtgctcattccacgcaacctgtacctga

SEQ ID NO: 24986 - DNA, 132 bp, Escherichia coli
atgtcagacaaactcataatgctggcgaagggcctttgtgtaatcgtcggtatttcattttcactaatgctggttgctctttttctttccataacctggatggcgttgacttcggcagggctggtggggtga

SEQ ID NO: 24987 - DNA, 456 bp, Escherichia coli
atgagagagtcaaaggccgttcgtcgttctgtgctggcaagactcaaagcaatgcatggtattcagatcccccagactttacctgaggcgttgcgatttgcggcaaaactggcagaacagaaagcagtgctggaaaatcaactggcaatagcagcgccgaaggctgaatttgttgataactatgttgaagcatctggtctgatgggattccgggaagttgctaagttactcggtatcaaagaaaccgatttccggctgtttttgttggagaacggaataatgtatcgcctcgctggaaaaatgacgccttactcgcatcacctggatgcggggcggtttagcgtgaaaacgggcgaggcgggcaatggtcatgcttttacgcaggttaaattcaccccaaaaggtgttcagtggattgctggtctgcttgctgcatggagagctaccgcagcatga

SEQ ID NO: 24988 - DNA, 648 bp, Escherichia coli
atggtgaccggatatgatgcgaacagtggcagtggtgtatggacagagcagcagtggaatgcgtccggtggtaaaggcactgtgacggatgacagtggcaggaaggcgctgcgactggaaaaacagccgggtaaactgacctcctggaagatgttccgtactgttgcggtggaggaggcaaaaaatcttctcagtaagggaggtgaaattgccgtgcggtttaagatcccggagggtgtcgaactggttaacggtcagtttgtctttggtctgtactggccggtgtcgcagtgggcgtcaggcgcgacagcaaacagcatgctggcgtccttcttccttcagacggatgcatcaaatctgaatctgatgtaccacaagggggagtcgaatgcgcaactgggcacatttggggcatttgaccataactggcatacagttgttttccgctttgcgggaaataacagcgaaaaagtggtgccggtgattgatgatgcagagcagtctgcgtttgacctggtgatgtggacaaatgatggctttacagcagatacgctgacgctgacagatatcacgggggcaaaagcgacgtatccggtactgcttgatacggtcacagtcaaagttaacgaaagccgggcatcatcataa

SEQ ID NO: 24989 - DNA, 567 bp, Escherichia coli
gtgactgatgacggtggacggaaagcgctgcgactggaaaaacagcccggtaaactgacgtcctggaaaatgttccgtactgttgcagtggaggaggcaaaaaatcttctcagcaaggggggtgaaattgccgtacggttcaaaattccggatggaagcgagctggtgaacggacagtttgtctttggtctctactggccggtgtcgcagtgggcgtcaggcgcggcagcaaacagtatgctggcatcattcttccttcagacggatgcatcaaatctgaatcttatgcaccacaagggcacgtcgaatgcacaactgggtacatttggtgcgtttgaccataactggcatacggttgtgttccgctttgcgggaaataacagcgaaagagtcgttccggtgattgatggtacagagcagacggcgtttgaccttgtgatgtggacaaatgatggctttacagcagatacgctgacgctgacagatatcacgggggcaaaagcgacgtatccggtactgcttgatacggtcacagtcaaagttaacgaaagccgggcatcatcataa

SEQ ID NO: 24990 - DNA, 207 bp, Escherichia coli
atgcaatggcacatagcgccactctccagcccctctccggaggggctttcttgtgggcaaaaaaaaagcctgagtgggttcgggcaacagcatgagatatacatttttataatcgaatggattttaaccagaattcataaggctgcgcaactgcgcggtctttttcgaattgcgggctgtcgtctcccttctgccattgtcctgtaa

SEQ ID NO: 24991 - DNA, 378 bp, Escherichia coli
atgaaaacattacccgatacacacgtacgggaggtatcgcgctgcccgtctcctgtcaccatctggcagacactgctcacccgactgctggatctgcactacggcctcacgctgaatgacacaccgttcgctgatgaacgtgtgattgagcagcatattgaggcaggcatttcactgtgtgacgcggtgaactttctcgttgaaaaatacgcgctggtacgtaccgaccagtcgggattcagcgcctgtacccactctcagttaataaacagcatcgatatcctccgggctcgccgggcaacaggcctgatgacccgcgacaattacagaacggtaaataacattaccctggggaagcatccggaggcgaaacgatga

SEQ ID NO: 24992 - DNA, 282 bp, Escherichia coli
atgtacggtgaatctcacaacatgaattccgacgacggtgatgttgtgaacaaaacacaaaacttcgaagctgttctgcaatatcagttcgactttggtctgcgtccatccatcggttactcctattctaaagcactggacgtagcaggttacaaagattctgatcgtctgaactatattgaaatcggtacctggtattacttcaataagaatatgaacgtatataccgcttatcagatcaacctgcttgataagagtgattatgttctcgctcatgggtaa

SEQ ID NO: 24993 - DNA, 456 bp, Escherichia coli
gtgaaccctgacggaaaacttacccgtgcagaaggtgcgactaaaactatcgccgtcaatgatggtctcgttgctctgtctggcagaacagaccgtattgatgctgcagttggtagcgttgaccgccgggttactaaaaatacacaggctattcagtccaatactcgccagttgcaggagcataatgcacgcctgaacagtcagcagcgtcaaattcgtgagaatcacgaagagatgaagcgtgcagcagcacagagtgcagcgctggcggggcttttccagccgtacagtgtggggaaattcaacgccactgctgccctgggggggtacagtgataaacaggctgttgccgtgggtgttggttaccgtttcaacgagcagaccgcagcgaaagcgggtattgcagcgagtgatggcgatgtgtcctacaacatgggcgttaacttcgagttttaa

SEQ ID NO: 24994 - DNA, 255 bp, Escherichia coli
ttgtccgcgtttacgtcagaaattaatgcgattagcgcaaccattatcggtcagctggatacgaactttaaaattggtcgtcgtgcggcgttacgtgagatcgaggatgtgaaacacgatacgcgtgaagcggaagacgtgctggatgtggcggtggccattgccgaagcagacggcgaaatagagccggaagagcgcaaggtgctggaagagattgccggtgttctgggccttcgtctggagaatcatctgtga

SEQ ID NO: 24995 - DNA, 321 bp, Escherichia coli
atgattcagtgtgctcgcctggccttcggatttgctggcatctatgacaaggatgaagccgagcgtattgtcgaaaatactgcatatactacagaacgtcagccggaacgcgacatcaccccggttaacgaagaaaccatgtcggaaattaacgcccttcttacttccatggaaaaaacgtgggatgacgacctgttgccgctctgttcccagatttttcgccgcaacatttacacatcttcagaactaacacaggctgaagctgtgaaagttcttggattcctgaaacagaaagtcacagagcagaaggtagcagcatga

SEQ ID NO: 24996 - DNA, 297 bp, Escherichia coli
atggctgaaaatctcactaaaattacgccggtttccggtgtgaccattaaaccggaaaccctgaccctagaaaaagggaaggcaggcacacttactgtggctgtgttgccggataatgcgtctgatccttcattaagggtgtcgaccgtgcatcgtgcggtggccacagccacgttgaaggagaacacagtgacggtaaacgcacttgagaaaggaacaacgtcggtcgtggtcatgagtgataacggtaattttgtcgctctggcgacagtaaccgttaatgtccctgccgcgtaa

SEQ ID NO: 24997 - DNA, 150 bp, Escherichia coli
atggcgctggcgcataaacatgaatgctctgacatgctcatcggaaagcggctacagaaagcggaaggtgttgttgaaggcatgttgatgatgctggatgtaaagctggagatggatcggtatgttgagcgcgaatcagtgacggcataa

SEQ ID NO: 24998 - DNA, 147 bp, Escherichia coli
atgatggcggcgcaacagaaagcacagcacaagcagaatattggaacgggaattggtagcggtgctgctgtgggggctgccgttggtggccttcccggtgccgctattggtgcagtcatcggtggtcttgctggttcgttgttttaa

SEQ ID NO: 24999 - DNA, 189 bp, Escherichia coli
atgctgcagcagataatcagcgctagcagtcgtccgggtgacctgattgcagattttttcatggggtcgggttcgacagtgaaagcggcactggcgctcgggcgtcgtgcaactggcgttgagctggagactgaacgttttgagcagacggtcagggaagtacaggatttagtcagccagaacggatga

SEQ ID NO: 25000 - DNA, 189 bp, Escherichia coli
atgctgcagcagataatcagcgcgagcagtcgtccgggtgacctggttgcagatttcttcatggggtcgggttcgacagtcaaagcagcgatggcgctgggacgtcgtgcaactggtgttgagctggagactgaacgttttgagcagacggtcagggaagttcaggatttagtcagccagaacggatga

SEQ ID NO: 25001 - DNA, 156 bp, Escherichia coli
atgagtctgtcgctagttgtcgacctccgcctggggcttctcatccccccggtctatgcaatatacgaaaaaaaagctcgtactttcgtacgagctcttcttgtgcacagaaaacccccagctaggctgggggttccggaaagctttcagctttga

SEQ ID NO: 25002 - DNA, 141 bp, Escherichia coli
atgttcgggcatggcaagcgtatgaatatgccgtggtggggcggttttgatccacgcgcgtgggatgtggcaagcatgatggattttgctgtgccggtggtggcgtgtctgctggtctggcggttagttaatcgtgggtga

SEQ ID NO: 25003 - DNA, 498 bp, Escherichia coli
atgtcgatgcttgaagcacgttacttcgtggcaaagataagcgatgcacaggccgtgctctgcgatgaggagctggcgacactggaaaggctgatccggaaggttgatgatggccgcagagcaaatggcaagagctcgcttacttgcgttgttgtcgaagaagattggccgaactggcagcaaacggttgactctgtactttcacttgctgacgggaaagacaacgattggaccaatgccacaccagaacaaatcaaggccttttgggtcgatgactcagtttggaaaactctggatggccgggataaatggattgaagatctcgacctgctggtggacggttccccggtggcttctgagtgggaaccttttggcttggaatcagggcagtctgtcgtcatacgaggcggatggatagaagggaatgccttgagtgatgatggcgtaccgctagtgcaggcattcgtcgcttggaaacagggccaagacaaccactaa

SEQ ID NO: 25004 - DNA, 489 bp, Escherichia coli
ttgagtgcaattatcagcaagtgcggcatgtacagataccgtctggaaagggatgtgcaacccgaaggccttgtgttcggttattttggtgtaaacggctctacggccacggccaccgaggacgatcacacggtcagaaagtggatagggtttaccaaggtcaacggagggaggcgattcatagtcggtaatgcttttgcttttcgggcgaccgacgttcgagagctggctacggcggttgatcctgtcgggcctgaaaatgaaatccacttggaaaggattattcgggatgctgatgtcttggtgccctgctgggggagccgaactaagctgcctaagtctttgcatgttcatttggacaggcttttagagcagctcgttgcatctgggaagccggtattggcatttggcgtgactggttcgggggacccgaagcacccactaatgcttggatattcgacaaaacttgtgccctggggaggaaaataa

SEQ ID NO: 25005 - DNA, 336 bp, Escherichia coli
atgaaacatgtactgaatatcgcgctgatggctgttgttattcttggcctggctatgcttgaggccaccaactggggttacgcagtgctggctatcccggcagtgatttgggccaagtcggtgctcaaccttctgcacaaactgccggttctggctgctgctttttggattctggttgctgttttcgcgtggcaagcggcacttgttggtatcctgttctatggcgtacttgcgacccctaaagcgccagcaaacaccaatggcaagaaaagccgaaaagccaatctgatgggcacttacagctacgactttaaaaccggcgaatgctttagctaa

SEQ ID NO: 25006 - DNA, 471 bp, Escherichia coli
atgagtgatttatacgaaccgcttgagtttgtgttctgcggctttaggaaaggggacgctgggctatttatctcggtagccactttgcgcgatggtgttttaggccgtgagatgtatttctcaaagggaaaaagcaaaaggcgctgggttgtcggtggcatttactcaggggcctcgttttcggacaacggagcaaaaggtctggatgatgctcattacgttaaagcatgggaagtgcaaggcgacaagatagagtggcaagcaaaaagcgagcaagccgaagccttggcgcgaagcgagaaacttgaagccgacgataggaagcgcaatgaactcgaagagctgatgctacccatcaggaagcaatatggggcattaacaaagcgacgtgatagggcaggggccgcagctcttgaagaagctgtcctgagagcgctgagagcgcccatcaggaaggctgaggagaaataa

SEQ ID NO: 25007 - DNA, 372 bp, Escherichia coli
atgggcaaaaaagtacacatcatttgtggaaagtgcggcagtgacgagatgaactttgtcatcaatgaacactgtccagacgatccccagaatgttgccagtatgtcctgctcaaattgttgcgaactgacaggcatagccgagtggtcggaatttaatggacgtgagctgaaaggtgaagccgtcgccctatcaacaccggcaaacgtgaatgctcttctaggattgcttcgccaggcgatggacagcgttgagtatcgcctctatggcggggacatgtcattgagcggtaatgatgctgccgaactcatagacctccaggagcgagctgagaaggtcttgtctgttcttcggagtgatcagcatgagtga

SEQ ID NO: 25008 - DNA, 195 bp, Escherichia coli
atggacgaaaaaattacctacgaagaaatgcttgaacaactcgaccagaaaggcatccgcgtcaccaacggggcgagacggctttatgtcgcgttgaacaacggagtcaaagctgaggtgctgggtaactgcggtcccgccacaatcagcttggttgacgggatgattgttgtggaagagcagactctccactaa

SEQ ID NO: 25009 - DNA, 549 bp, Escherichia coli
atgaacaacctacccctactgctcgatgcaagagaagccattgactactaccaccagcatccaggcatgactgatgcagaaaaggcctatgtggtcgcgttcctaagcggagaggggcgttcaaacagtcagatcagagaggatctgggtattgagaaggtctatacggttacacacctgaaacgcgccggtacgctatcggaggaagagctaacactctggctcagaaatccacgcaagatcaccctggggcatgtgagggccgtggctaagttacctttcagcaagagagaaaagctcctgagggatctcctgcataccaggacaccggttcataaatttgaggcgatagcgaagggcaaagaagtggacagggatgcagacattaagcgcctggagaccctgatgagcgatgctacgggtaggcctatcaaagttcgctataaccccgcgaagcgctccggggaactgacgctgggattcttcacgctcgatgacctggatgacgtgtgcaaggctttggggtttgatccaagcgagcagatgtaa

SEQ ID NO: 25010 - DNA, 351 bp, Escherichia coli
atgtgggtcatcgagacaaccgacacctttgatgagtggttcgatgctctggatgataccgatagagcaaacgtgctggcttcgatgatggtgctgcgagatagaggccccatgctgtcgaggccatacgcggatactgttaacggttcatcctacagcaacatgaaagagcttcgggtccaaagcaaaggagatcctatcagagcgttctttgcgttcgatccaaagcgtaaggggattcttctctgcgccggtaacaagaccggggacgagaaaaggttttatgaagtaatgatcccaattgcagaccgtgagtttgcggcgcacttggataaattgaagaaggagtga

SEQ ID NO: 25011 - DNA, 303 bp, Escherichia coli
atggcaagaactcttgaccaaatgctggcaacagaaaagcctgaggttgttgccaaagcacagaaagcggccactgagatgttactgaacatccacttggcagagcttcgtgatcgcatgaaccttacccagggggaaattgctgcatctctgggtgtgagacagccgacagtctccgagatggaaaaacctggacgagatctcaagctgtcgtccattaagcggtacgttgaggcctccggtggcaagctacgcctcgatgttgaacttccggacggcacccactacggctttgccgtttaa

SEQ ID NO: 25012 - DNA, 294 bp, Escherichia coli
atgagattgtcgtcaactcaaaaagacgttttgttcattctatacgcaattgaggccggtggaaaagccgagcctgtaccaggtgtaaaaatactggagatgatcaattcagctcgccagagcggtattcatggaacgaacttccgaacgtcatgccacacgctggtggagaacggcctgttgaacaagtaccggaatgcttctctaaagctggcctttaggctgaccgacgatggcagggaacgtgcaggagagatataccgaaaacggctggaagaagagcaagagaagtaa

SEQ ID NO: 25013 - DNA, 273 bp, Escherichia coli
atgaacaaaagtgaactgattatgaaagtggccgaagacgctgacattagcaaagcaaaggccgaagctgcggtaaatgcgctgatcaactcagtgacagaggagcttaaagcgggtgggacagtagcgctcactgggtttggtactttccacgttaaggaacgcgcagcgcgaaccgggcggaatccccagactggagagaacatccagatcgcggcggccaacattcctgggttcaaagctggtaaggggttgaaagactccgtgaactag

SEQ ID NO: 25014 - DNA, 528 bp, Escherichia coli
atgaggttaggttttgtgaaaaatacgggggtttcagcgttcctggtagccatgctggtggtggcccctcaggtatgggcagaaacctttactgcgaaggttgtgggggtgtctgacggtgatacggtcaaggtcctgactgaacaaagctgtgactccgggaaagattgccggagcggcaaaatccagtaccgggtaaggctggcggaaatcgacaccccagagaagaaacaaccctacggctcaaaggcgaaacaggcgttgtccgatctggtgtttggtcgaatgattaaagtcgagcaaatcgacaaagaccgttatggccgtctggtcgccaacctttatgtcgatggcaaatgggtcaatgccgaaatggtccgttctgggagtgcgtgggtgtaccggcagtacgccaaaacaccggagctgttcaagctggaggccgaagccaaagccgataagcgaggtctctgggcattaccggaatcggagagaactcccccttgggagtggcgaagaaagcactaa

SEQ ID NO: 25015 - DNA, 189 bp, Escherichia coli
atgcgataccaggtatttaaaacgaaggaagggggccagccggtgtttacggcaccgtggtactggttggcctctgccattgctcactggtcatctcttaactgggatgcctgtcgaatcgtagacagcaaggtggatgaaacaaggctctgttgggccaaggctctaccggctgggaaaaaaaagtaa

SEQ ID NO: 25016 - DNA, 858 bp, Escherichia coli
atgcaaattcgtgactacatgacaaagttgtttgacgcatttggtgatgtggaggaagtcacccgagaaatgcttctggagcaggcggagctcattcatacgatcagcgataagtgtcagagcacaggcctgtttctggatagtcaggttcgtttcaaccagttcgttcaagagattgaggctgacgacaaggtagaggatcggttgcttcatgcttggtgctgggtaatggaccgaatagtgaaggctccaacatcctttcacatggatggggctgtgattttgacaatgcctctggtcgccagatacctgccaccggttgaacaggagccggaaaccatcgtggtgaatctcgatgaggactacaaggctcctgtaggcaaccaaacgctctgcgagctcgttatggaacggaggcattggccgcaaggtgcaacctgtgcgacccaagaagcggacgggggagtcctctactgggacgccccggttgatgtggtagaggaaggcagaaaggtcgccggtaagcacggcatgatggccgagatcggattgaaacatcaggttgatgcctggtatgcagatatggacgaaacacggctcgcaaccgattggaacaccgccgtcattacgcctcactgcttgctgctttcctatctggatgtgcttcaaaagaacaaagttccctttgatgaaggtgtgcagctcgctgccgaatgggtgaagcaacttggcggggaatttcgtgaagacactgaggaagcgccggaagctgaggcttcagtgctttccctggggagagccacggctcattgctttaaaccctatccggacacaaaaaatttctattacgaggcctaa

SEQ ID NO: 25017 - DNA, 228 bp, Escherichia coli
atgatcattgcaacgaagaacggctttctggtggccgcagaactaatcagggaagaggccgggtactggctactacagcctcgtgaccaaaagacgccggtcagggtgaataagcaggataacaataaacgcgctttcacgcatatgggagacgcccttcgctgggccggtgatcctgagcttgcaaagcaattcgatgccgagggggaagaacatgcaaattcgtga

SEQ ID NO: 25018 - DNA, 519 bp, Escherichia coli
atgacgacgaatactcaaaacgcgaacgccaaccaggttcggtctttacgcgacatgcttgtccccgccctgttgttctatgtggtgatgacggccatgtttgtgggtcttgacgcattcatggataaacccaccagcatgaacctgccatttatgccgttccttgtctcgatggtgagttttaccagtgacgcacgtcgagcgtgggactggcgaaacgggaccaaggttgtagctgtattgactgcggtagccatgctgttggcattcatctatcagctcgcggtcggagagatgaatctcttaggggttggtatatacccggccacagccatccttctgttggcaatctcctgggtgattcgcgctatcggaaagacagcacctttccagttcctggggagacacctggcgcggtttggtgcatcgaagtgggtccagcgtaccgccgcagtcattgtgctcgcgggaggccttgccatcactatctatgcctactggcttaaccacgggagctga

SEQ ID NO: 25019 - DNA, 447 bp, Escherichia coli
atgctaaaacgcggaattatcaatctcgctgctagttacatcattgttgatgccctactccggaatgcagcaatttggatctttggcttgtccttctccgttggtggcacttacgtcactggcgaggccagtacatgggtcgtttacctagccacttctggtgccatgacactctgttctgtcgtaacagcctacctgctcgtgacctatcaccgctgggggctgatgacggccagggtctggttgctattgagtgcctgcctaaacggctatgccgtctatttgagtagccacaacatccagttggtggtggcactgctttccagcctgtttattgctttgtggatgctcaagacccttgagcaaccagcagtgaaggggacgtacaaggtaatcgctgatcttcaccgtcagctatggggaatgttgaaggggcaaacacaatga

SEQ ID NO: 25020 - DNA, 360 bp, Escherichia coli
atggagttacaagaagcaaaagaggctctcgatagccttcatccacacaaggcctcagcgcctttgaggcttgtcatccaccagccaggtgggattggtggaacccctacagtgggggtgaaagctattcacgcaggctttgactgggacagcaacaccatcctgatctatccggaagagcagctcacccggttgacgccggatgaggtcgccgccatcacgaagtcagtatcgaaaggacagtcctggcattcatatcagcagttcaagaagtatcgggagcagttggccgaagccacggaagaaattaataggctcagggctgagctgggcaggtatcagaataacgggagggggtaa

SEQ ID NO: 25021 - DNA, 429 bp, Escherichia coli
atgatcaagattacaactaaattgggatgccttctggcggggctgcttgtcctgtcggcttgctcaagcgtccctcagccaaacaacgaatacgcgaaggccttggatgataccaaacaggtatgcgctgcctgtgccctggttggtaatgacctgctggttgccctcaacaagtcatgcgacaccccaatgacccccgagactcttacaagcgtcatgaacagtaacccgatgtttgccgccatgatggcaattaactccataggtggaaccgacttctatcaggtttaccgtgatgcggccatagacaccctgcggtgcaatgaaatggacagttggcctgatcggaccaaggtgcgtttccagcagcccgacatgcaaaaggcgctggccttgagggtttctgccagacagcagaaggcaaattaa

SEQ ID NO: 25022 - DNA, 861 bp, Escherichia coli
atgacagaacaaagtaccaaatcactacgtctcggggttgttgccgccattcttttggggctcgtaggaaccgggttcgggatctaccagttcgtgaaagagaaggatctggcgcaagagatcgccaacgtgaagtctacggtcaaccaggtgaaggatgccgaaggcgtcaccttcaaaagcaaggcagagtttgaagctgctgtggccgaaagcatcaacaagtttgtcgcgcagaaacaacaagccgacatcgatcagaagtatgcccagttcgaggcagcacctgagaaggtcgaagaaggcaaacacatctacggggaccttggtgctcggttcacgctggtggagttctccgatatggagtgcccattctgcaagcgattccacgacacacccaaacaaattgtggatgccagcaaaggcaatgtgaattggcagtggaagcacatgcctctcgatttccataacccggcagctcacaaggaagctctggccgctgaatgtattgctgagcagaagggcaaccgtggcttctgggtcttcgttaacgacattttccaccatacccaggggaatggtggcggtgttgctgacctggcctctgttgtcactggtgttggtgctgatctggatgcgttccgggagtgcctcggctcaggaaagtacgaagacaaggttgaagctgacatccagaaagccaagagctatggcgtcaacgggacaccagccacttttgtagtggacaaccataccggcaagagccagcttctcggcggcgctcaaccggcgcaagccatcatggccgtgatgcgaaaaatgatgattgagtcgcaacaagacgactccgcgaaccaataa

SEQ ID NO: 25023 - DNA, 960 bp, Escherichia coli
atggcagaaaacaaagagatcccctgggagaaagaactcattgagaagtacatgttcaccctgcataaagagcaggtgaaagaccggcgctggcggaccatgttgcgtgtgcttcgcgcatctggtttcgtgcttctcatgatcggcttcatcattttggcatctaatccgggtgggatgccgtggcaaagcgccaaggcaggagcccctcacaccgcgtatatcaacatccgtggtgaaattgctgctggcactctggccgatgctgatcaccttatcccgtccatccaagctgcattcgacaacccgaactcacaagctatcgtgcttcgcataaacagccctggcggtagcccggttcaagcaggacggatttatgacgaagtgaaggcgcagcgagcccttcatccggagaaaaaggtctacgccatcattgatgacatcggtgcctctggcggttactacatcgcctctgctgcggatgaaatctatgctgaccgcgccagccttgtcggttctatcggcgtcatcagctcggggtttggattcaccggcttgatggacaagctcggcatcgagcgccgggctatcacttccggagagcacaaagcgcttctcgacccattctcccctcttacctctgacatgaagaaattctgggagggcgttctatcgaaaacccaccagcagttcatcgaacgagtgaaggctgggcggggtgatcgactgaaagacgacccagaggtgttttctggattgctctggaacggggagcaggccaaagacattgggctgattgatggcctgggtagtttgaactccgtggcgcgagacgtcatccaccagagcaacttggtggactacacaccaaccgaagacatcatccggcgactgacccaacgagcgaagctcgaagccagttccttcgtgcaagaactcagcgctgtgaaagtttactga

SEQ ID NO: 25024 - DNA, 855 bp, Escherichia coli
atgggggtagtacgagttccctacctcttggctgagctgaaagaacgcggatgtgctgatgaatctgctctggcgcaggttatgcagcctggatgccgaattggagaggaagacctgcggaagttggccgcaaatttagggcttgaagtgtccgagctggcaccagcgccagagaacgcggccaacacccggttcaaagcaaagctgagaggaggtttggcctcctttctttttgagtacgacggctgtttccgacatgcagaaggctccagccatgcagaaatgttgggtatcgagcaagaagacgacataggtcttccgagtcgagctgctgacgccatgctcctggagaagacgctttaccaggtaatcgctcgggctaagtacatgctcggcaaaatcgacagcaagtttgtcaggtcagaacaagcaatcgagttccgtgagcaacttgctcctgggatcttcaaaccaggttacagaggtttccgattcaaggaggctgccgctggtgatttgcctactgtcatgattgacggtcggaagttcaactgcgttgccagcatagccagagcacatggacttgatccggtaacggtgcgtaggcgcattgcggacaccgggaaggccgcagacaaactctccaatgatgagtggaagctcatcctcgccaagaaaaaaggtaaagggaaacccttcacctatctggacaggacctacagcaacattgctcagttctgtcgtgagcatcagctcaacaccaaccttgtttaccagaaagtcaaagaccgggctgatagcgctgatgaagagttctggggactgataatcgaaacatgcaaaaggaaaaactaa

SEQ ID NO: 25025 - DNA, 294 bp, Escherichia coli
atggaaaaagtcaaaagcgtagatgccgtggagttcacggcagcagataagaaggcgatgacccatgcggcatacgcccagtgtttcttcattctggcccaagtgatggcattcccttccctgggggtggctggcgctatggttgctgctctgtgcggcatgatgccgtggttgaccaagttcgccaaagaggctccatcgaaagcctttggcatggtgatggcttcactctgccttgctcctgtgtacgggaaactctgtgagctggtggtccacgcgattcagggagcttga

SEQ ID NO: 25026 - DNA, 474 bp, Escherichia coli
gtggcccagcttaaacataaccgcttcgtcatgttggggtccttggtagcgacggtcgtagctgccgccaatggcttgagttttctcacccttatggctggtggaatgacccttctccagttcatggcttggaagcaacaagatgctgtccggagccggtttaaagctgcgaaggatgcgtttgaagcgttgaacgtcattgcgttcgacaagcactgggtaggttcaaccgcgacggtcgccaaagtgtcgaacatgatcactccgcccgaacgactggataagccctgggcggtgcaagttctggccgtgaccaaaggtgggacgtggttcgcggtggatctgcaagtgaccggcactgacaaggttcagatgcttagcctccaccagcttagtgaaaaggcggcaaagaccatgctggccttcgacctcgaagtgtatgagaaatttttcggaaaacctgatgttgcatga

SEQ ID NO: 25027 - DNA, 522 bp, Escherichia coli
atgaagccagttctctggatattcgtcctgatcatcgcccctttcgtcattgcgaaagtggaccaatggcgcaaacgcggcattggagacacctgggcgtggtggaaatcagagaacatgccttatgagctgcgctcggccactctgtttttgtccgaacaggacatatcaaccacacagccggtgcccatgcacggcagggttgatcaggtgtaccaaaccaagaatggggttctcattcccttggacaccaagctgcgccaggtaaaccacatctatgagtcggacattatccagctctcggtttaccgggtaattctgtcacacaagtacaaggcacccgttgccaagtacggctatgtccgaaccgttgttgagacagcggacggggatagagtccgttacatcaagacaaaccttctcagcgaaaaagaagtggtcaagctgtggcaccgctatcaatccatccgttctggtcaggtaaaaacctcctgttcctgtggcggaaagtttcacatgtga

SEQ ID NO: 25028 - DNA, 522 bp, Escherichia coli
gtggaatttgattacgacaagtcagtatcaaacgcacatcttgaggccgcaggctggggtatggatgcctttaaccactccaacccatttgagagtcatgtcatctatgtgcgtgactaccgcaacgatcacatccgcctgttcaccatcaagcaggctgacttcgacacgataaagctgccgcttcaccttacctccgacatgctggcttcggtgatcgctgagttcgtatcgaaggcagcaaaagggaagttgaatacgaaggagtccgacacgctggctcctgccttggttggctatgccaaatcaacagaaacctaccggagctggcggagagtttctggagcaacagagcgattgcatatggtcatcaatatctatgcgggttctgaattgctgagacctttcatcgctcgggctcctgagaccgtcctgacgacccaagagctactggtcttctcatcacaggttaagagcatggatgtatccaatcatccagagtggtttaggggccggaggtag

SEQ ID NO: 25029 - DNA, 609 bp, Escherichia coli
atgaaaacgataaagcggttcatcgtatgggtgaattacggtcttgagggttggagcattttcggatcgagcgatgactgggatgaagcggtatccatccgttcggaagcgatagacgaatgcaatattgacgaggaagacatcatcttggcagaaaacaaaaacgagctggtggtaaaacctgcggccaagcaaatgacggagtggcaccgggaactggaagccgtccttatgaccttggatgactgccagatggaatgtgacggtatgacatgggcagtaagccacctactcaatgaagcgggtgtacctcatgactgcatgtatggctttgtgcgaaacgaacagaccaaggacatcgtgacaccgcatttctgggttgtcctggatgatgggtggctggtggatctgaggctacgcatgtggctgggcgatcacgacaacattcctcacggggtattccatcccgataacgagccaggacttttctacaagggagacccggttcaaaaccataaagggatgagactgggcaaagccgtcctggacatcatgaccgacggaaaactttcacatgtgaaagttcctgaacgacaagacggagagtaa

SEQ ID NO: 25030 - DNA, 1116 bp, Escherichia coli
atgttgagacgagaaaaccaaggagatttgttcgatgaccaggtggtgttgccatcactggagtcggttcttaccggcatatcttccagtcagcgttgtgacgatagaacaacgtacttctccgctccggatgtggacctgagtttgtacgatcacatcattgtttgcctgtctggaggcaaagactcgattgctgcgtacttgcggctggtggacatgggtgttgataagtcaaaggtggagttctggcaccatgatgttgatggtcaggaaggcagttcgttgatggattgggccttcatgcgtgattactgtcgtcagctcggggaagaactgggtatcccaatgtacttctcgtggcttgagggcggctttgagggcgaaatgctcaaagacaatgcctatagccacccccatcgtgtagagacgcctgaggggcttctggtgctgcctagagaccataagcgctctaagcctggtacgcgccttcgtttccctcagcaatcgccatcactccaaacaaggtggtgctcatcagccttgaagatcgatgttggccgcagagctcttaataaccaggagcgcttcaaggggaagaagatccttttcatcactggtgagcgccgggaggaaagtgcaaacagatccaagtacaaccagcttgaggctcatgcctgtgacagaagatatgggaagactgcacggttagttgatgcctggaggcccgttcttcattggactgaggaggaggtatgggaagtaatcgagcgtcaccgcatcctggccccagtcccttatcgccttggctggagccggtcgtcgtgtatgacctgcatctacaactcacagcgtatctggtccacgatccgtcactactggcctgaacgagctgggaaaattgctcagtatgaacaaacctttggtgtgacggtatcaagaaaaaaaatcgacgtaatagatttaggttctgctgttgcgccgatacagattagtgatgttgaggcattggagcaggtatccagagaagattacacgctcccgatttttgtgccggaggggcagaagtgggttctccctggtggcgcatttggccgagaggcctgtggttctgattga

SEQ ID NO: 25031 - DNA, 435 bp, Escherichia coli
atgttggattttgtttttttggtgtttttggggttgggcatatctacggtgctggtgcgtcggtcttcccgtaaggggatggatcttgagctgacatggctccagtcgttgaaggtcgtgctggttcgtggagctgttgcattgggcctgggttttggcattggcaggcttgtattgatggggatgcagtatggtttcctgagtgagtctgtcctgagggaacatgcacttgtctccgtagcggtggttctgatctgtgggcttggttcgttcgttgcgtttcagtggatcatcgggaggatctctggaagatcgatcagcgtcgtttctgtgatcaaagctgtgatgtacgagtctggttactttgtgctgtcgatgcttatcttgttggtgatactcgtcctgttcggccttgcatacgagacttttttctaa

SEQ ID NO: 25032 - DNA, 282 bp, Escherichia coli
atgagatttgatatgtgggtacgttgcacgaaagcaggtcctgaacctctcgatatatgggaactctgcacgattgacgaagcagaacaaagattgacagatcaggacaaacctaaaaaagcagtcaaaatgactctaatagtccataaagtgatcacgcgcacacaaaaagaggccaaaagttatccacatttcctgtgcataaacggggttttggtatatgggaacgctgcacgatcatatgtgggtacgctgcacggtgcaaaaaacgaccaaaattga

SEQ ID NO: 25033 - DNA, 1065 bp, Escherichia coli
atgagcaagagaaccaaagacaaagacctggagaaactcgacgtaatcaaagactcaccgcaaatgagcctgtttgagatcattgaatctccggccaagaaagacgactactccaacaccatcgagatctacgatgcgctgccgaagtacatttgggaccaaaagcgtgagcatgaagatttatccaacgctgtagtgacacgacaatgcaccatcagaggccagcatttcacggtgaaggtgaagccagccatcatcgagaaggatgacggaagaaccgtgctgatctacgcgggacagcgagaggaaatccttgaggatgctctacgcaagctcgcagtgaacgggaaaggccatatcatcgagggcaaggctggagtcatgttcactctgtacgaactccagaaagagctctcgaagatgggtcacgggtacaacctgaacgaaatcaaggaagcaatccaggtttgtcgtggcgcaacactcgaatgtatcagtgatgacggtgaagccttcatcagctccagcttcttcccgatggtgggactgaccaccagaggtgagtttcgcaagaaaggcgggaacgccaggtgctatgtgcagttcaacccgctggtaaacgaatcgatcatgaatctgtcgtttcgtcagtacaactacaaaatcggaatgcaaatccgctcccctcttgcacggtacatctacaagcgaatgagccactactggactcaagcatcaccagattcgccgtacacgccatcgcttatcagcttcctgacccagagccctcgtgaattgagcccacggatgccggagaacgtcagagccatgaagctcgctctggaggccctcatcaaacaagaggtcataagcgactacgacgcgaaccagatcaaggatggccgcagagtcatcgacgtgcggtacgtcataaggcctcatgagaacttcgtgaagcaggtgatggcgtccaacaagcgtaagcagcagacagagctacgggccatcaagcacggcatgatcgaccacgacatcattgatgaaccccaacgtaaggggagatag

SEQ ID NO: 25034 - DNA, 288 bp, Escherichia coli
atgacagcatctgtagcggccactgaattggcgaaactggggaaatgtgaagcgatgatcaagaaagtcgccagccatcctcgccctgccctgtcaaagcgcccacaatcgccacaggggacagatagcacccttcggggtgagttcgctcatttccgatatgaagcggcagccctgcgttttatgagcggcactgcgggggctaagcgtcgcatctaccagctagtgttttcagcgacggtagcagcgggagcattgacaatgctggcggcatggaccaccagctag

SEQ ID NO: 25035 - DNA, 540 bp, Escherichia coli
gtgagtctaccaacagagcgatggctagatctgctagatccgaagctcgaagaagaacgatccgagataacagaggatctgctagaggcagagggacgagagtttgttgcagaggtacggagcaaactggatcacgccttagcggttcttgctgtcgaggcgcagcaggaagcggacatgtactggaacgcgcacaaatcagcgcgtgaagaagcgtcagaggacgaacaagggcgtgtcggtacacgggttcgcattctaggcgtatcactcgttgcagagtggtatcgcaacagatttgtcgaacaagttcccggacaaaagaaaagggttctatcgacacatatcaagaagggtcgcggtcatgcctacagcatgtcgcacttcaagaaagagcctgtctgggcacaagagttgatccagcaagttgaaaccaggtatgccgtgttaagacaacgcgccactgccttagcaaaaattcgccgggcgctaaacgagtacgagcgccagctaaacaagacacatagcgacgaggtgtga

SEQ ID NO: 25036 - DNA, 984 bp, Escherichia coli
atgagtcaatttgttctgggtttggatattggttactccaacctgaaaatggcaatggggtataaaggtgaggaagctcgcacagtcgtcatgccggtgggggcaggtccattggaactgatgccacaacagttaactggcggtgcagggacctgcattcaggttgtgattgatggagagaaatgggttgcaggcgtcgagcctgaccgattgcaaggatgggagcgtgagcttcacggtgactatccttcgaccaatccatacaaggctcttttctacgctgcactcctgatgtccgagcagaaggagatcgatgtgctggtgactggcctgcctgttagtcagtacatggacgtagagcgcagagaggcgttgaaatctcggcttgagggtgaacaccagatcacgccaaaacgatcggtagcggttaagtctgtcgtggttgtacctcaacctgccggtgcttacatggatgttgtaagttcaaccaaagatgaagacctcctggagattatccagggaggaaaaaccgttgtaattgaccctgggttcttttctgtagactgggtagctcttgaagagggagaggtccgctatcactcatctggcaccagcctcaaggcgatgtcggtgttgctacaggaaacggaccggctaattcaggaagaccacggcggtgcccctggcatcgaaaagatcgagaaagctattcgtgccggtaaggccgaaatcttcctctacggtgaaaaggtatcgatcaaagactacttcaagaaagcctcaaccaaagtcgctcaaaacgccttgatccctatgcggaagtcaatgcgtgaggacgggatggatgctgacgtagttctgctggctggcggcggtgccgaggcttaccaagatgcggccaaggagcttttccctaagagcaggatcgtactgcccaacgaatccgtggcatccaatgccaggggcttctggttctgcggctga

SEQ ID NO: 25037 - DNA, 294 bp, Escherichia coli
gtggctggtagcaaatgggatggaaaaatatctaatctgaacatatcggagcaagcctttccggagctctatcgtgaactgtcccagatgcagcataaggcgcgtagtgatcggctccgcgcccttgctctattgggtctttattctcttcgattttctggcaacattgggtcttttgagcaacagagttcagagagtcaacctgcacagcatcaaaattcgccagtgcagactgacgcaaaactgaactctcaacgtgattcacttaaaggaaaactgatgggctccgtatga

SEQ ID NO: 25038 - DNA, 420 bp, Escherichia coli
atgaaagaccacgaggagttctctacgctatcagcggctgaacgtagagagttaataatcgcagagttaaagcgtaaaagccgcattcgcaccctgttgcgaggactcccgttagatgaagttcgggagatcattgacagaatgaagggcgttctcaatgaactggaggaagagtacaaaaagcgagaagaagaagaaaaagaaaagcgagctcaggctgagcgaataatgagcgacatggaatcctgcggtgtggacatcggcttgctcaacgaaatgttcacgagcagatcagaacctgataatgctaaatattcaaaagacggagtttcgtggagtgggcaaggacgtcgcccggatgctttcaaggggttgggagctgtcgagctggagcgctaccgtatcccacagaagaagtaa

SEQ ID NO: 25039 - DNA, 552 bp, Escherichia coli
atgaacattggcaactctggtacattgggtcgctgggttacagctcgacacatggcccttgctgggtacatcacaaaaatcatcatgatcgagactggtctgacctacaaacaggtcagacggctttaccaggatctggagagggacggatatactctggaacgaaaatccagaactttccggggtggtgcgacactgattcatagtcacacatccaagatacaggcctctcttctaatgcagctctacttcaacattggtggagaagccgtgttgcggtctgtgaacatcaaagccttgaacaaggcatttagaatgtatcacgcaatccgcaaagaagtgcccggaatgaaaggtgctcggtgggctccgtttgatattactgatgcctggtgtcttgcttcggagctgagaagtggggacgcaatgctggaggtgtgcgacaactgcaagtgtacgtacttcacctctgttaatcaaagaacctgcgttgaatgtccgttctgcaaagaacaaggaaggcatggtggtggggagaaagagtgtgcttga

SEQ ID NO: 25040 - DNA, 609 bp, Escherichia coli
atgttggaactggatattattggtgcgtgggatgcaagagccgtcaacctcgatcaagaagaagctgatagaaacgtctacgagttcgatctgacattgtggaacctgctatccactctggcaaaagaacgtccagatgatgcggcctcacaattttctttgggcatggacaccgttcaaaagctgtcactggcaacaccttcccaattggaagctctggcctctggcgtgttgatctctttcaaactcgaaacagcagagcagaacatcatcacgcgactctctggcgactacgaccctgtagtttttatcaaccatagtgttgatgaatttgatgctgcctactggttgctatttaaccgcgtcgcatcgagagacccggagatggcaaaggaagttttcggggtttcgagagagcttgcggagctggtggctaaggcaacagacagccagttgcgccacatgtctggaacaacggttacgcattttacgcttcgttttgctccgagcatcattgaagaaattctcgatgacagccgggaagagttaacacacccggtattgaaaaaactgcaacagtctctacagggacgtgggaggtggagatga

SEQ ID NO: 25041 - DNA, 534 bp, Escherichia coli
atgaagaacaaagccaaggcgctagttctgtctgcggctctcctttcatcaacagcgaatgctattgacctgagcggaaccatcttcgacaaagcagcgaaagcatataacctcgaccctcttctagtgtattcggtcgcattggccgaatctgcatcagggagaggtaatggctctataagtccttggccttggacgcttcgcgttcctgggcttcctttctatgctaagtcggaagatcaggcaaaggctaagctcgctgagtttcagcagcagtacggtcgtgccattgatgtcgggtttatgcaagtgagcatccggtggaatggtcatagagtttcttctccagcagatcttctcgacccagagaccaacgtcatggttggggcagaggtgctatcagaagccattcagtcatctccaaatgacttggagcttggcgttggccgctatcacgcctgggaagacgaaatccgagccagaaactatggtagccgagtcttggctatctatcgcaaccttcgtgatttgtga

SEQ ID NO: 25042 - DNA, 273 bp, Escherichia coli
atggataaatgccaattgatagacatcccaagcgacccagagaagaaacgtgagtggatcaagtacaaactcaagatccaggggctttctctggccgcattgggcagaaaacacaaaacatctcggcaggtggtgtctacggcactctataagcccagtccacgctgggaacatgagatagctacagctttgggtgtgaagccgtctgagatttggccggagcggtacgacgaagaacacgaaatacccctcagacataaggaggcaagctga

SEQ ID NO: 25043 - DNA, 363 bp, Escherichia coli
atgaaacatgtggtcaatattcttctgctgggaatggtgcttctgggaatagccatgatggctgacacaccttggggacttggtgtggcgctggctcccttcggcgtttggggtgctcgtttcctatttctggttcacaaaagcctttgggctgctgttatcttttggggagggatcgcttacttccagtggcaagttgctttggttgtcggggctctgtttggactaacgtgctttatccgcgttgcgcggtcagcatataaagaggcaccacctacccggcgcagaaaaaaacaaactggtgggtttcaagattcctatgattttgaccagcgcttccatattggagctggagacgaataa

SEQ ID NO: 25044 - DNA, 3615 bp, Escherichia coli
atgggatctttttcaatccactctatcggtgactctgcttttctggagcaaatcctgattgcagtatcaatgatcaccggcaccggggatttcgagaagatggtcagtattggcctgcttcttggggtcttgatgatctgtattcagtccgtctttcagggcgcaaagcaaatcaacctccagcaagtgctggtaggttggattctatatgcctgtttcttcggcccaaccacaactgtgactatcgaggacgcttatacagggcaggttcgagtcgtcgccaatgtccctattggggtaggctttgctggaggtgtcatatccaacgtgggatacaccatcaccaatttgtttgaaactggatatggggtaatcgtacccaatgtcacggaaagccacttttccgaaacactgaaactgttgaatgacgtcagacggcgagcctatgacacaggagtttttactgcgcttaactcagcaaatggaggcggctatgttgacgtgaggcgttcctggaacaattacattcgggaatgcacgttaaccaaagtcgatctcaacctaatgtcccttgatgagttgatgaaccgttcaactgactcagctttgcgattcaactcacagctctacggaactaggttgtatttgtctacagcaaaccctgacggcgctgactacacatgtactgacggatgggtggctattagcactgcaaccgccaacctaagcagcccggttgttgttgatgctcttaacagcctactgggtattgacacgtcaactggagacaacgctctaacgaagctgaccgattcgcttcaagcgatgggtgccacaactacgtcatcaatcgactatctgaaagccgccgttctggagcccctctattatgaagccgcagcaggacgttatcaggacctccaggattatggctctgcattgatggtcaaccaggctattcagcaacggaacacacagtgggccgcagagcagtcgatgttcatgaccgtcgtccgaccaatgctgacgttctttgaaggctttatttatgctataaccccgatcattgcttttattatcgtgatgggcagcttcggcctccagttagccgggaaatatgtacaaaccatcctctggattcagctatggatgccagtcctctcaattataaacctgtttgttcataccgccgcgtcaaatgagatgtctagcctcagtgctggtggtctcaactccatgtacgctctttcctcaactggagatgttctgcaacactggattgcaaccggcggcatgttggctgcggccactccggtgatttccctgtttatcgtcacaggtagcacctacgccttcaccagcttggcatcgagaataagtggttctgaccacgttgacgaaaagatgcaaacgccagatctactcaagcaaggtccggttatgcaaagtcagccagcgtacaatcacaaccagttcagtggtgcgattgcaaacggcgcagaaagcatgatcagtaccttctcgcttggctccaccttggcatcaggcgtgagctccgcacaggcattacaaagtcagaaatcggaggctttccaaagcactcttggtcgaggtttttctgatggagtaagtcaggatcaagcctattcaagactctccaatgtcgggcgcaacgtttcgtcgcaaaacacagctcaaagccaattgatcaaccagcaagccaagaacttcatggataagttccaggtggatgatagccactctgatgctgtcaaaggtgcttttgccatgcaggctatgggcacactcgatgttgacgaagctgcgtccatgcttatgcctatggttggcaaggccagggcagcaatgaaggccgctgctggtgtgaaatcaaacagtacagccctagttcctgctggtggtaatggcgaatcaggcggcggcagtgatgtcctggacatcaaagcgcaagcgaagggagcaacagagtcatcaactcaagactcttcaagctggtcagcgagtgatgtgtcccagttcatgaagggtgtgagctattcgcaaaccgatagccaggcgttgacaaatcaattagcgcagggtttcagccgttctggaagcgagtcattcaagcaaacctggggcgatagcttatcccagaacctatccaagtccgcttctgaactggtgtctgcatcggacaccttcacaacaatgagtcagctccaaaaccaaatgggctccatgactaataccgactttaaaactctcggtggtgcagtagcacaaacccctgcggccatgaaccaactgaatgactatttccgaaatgccgcgccgcaatcggttaaagacgaggcggcttcactacagcaaagataccaagcctacggaatgtctcctcaagtggcccaggcagcagcgcgaatgacagcaatgaccaactccaaaaattacgaacagggtaaggagcttggcgggtatcaagccgcactacaggcgatcaataccgcgtccggtcgcaacggagcatttagtggtgatgcttacggaaataacggcattgaaggcccgaatgttcaaggcctaccaggtcaggttcaaggggctgtaggcagtggacctaacatcccaaccggattccgggagaatgtggctgggatggctggaactaatccggcatcagaagctgggcagttaccaacgaatagcccccttgttcaaaatgaacatgcagccggtacgtcagctcttcataaccaagcacagcaaacagagcgaaatgtatctgctcctgaactgaaaaaagcccaagataaccttatgaactcgcttccggaaatgtcttggagcgcttcggcgtggggagcgtgggacaactccagtgattggatgggccgcagagctgaacaagcaggtggagctctcattgctggtggtcaagctggcgctgatgcgttctcaagagcgatggatcaaatgagaacgatgacacctgaacaacgcgaccaattcatcgcggccactcaacgcggcgaccaggccgtgcaagaggagtttggctgggccggtgatgcgatggtcggtatggctaaacttggccgcaacgtcatgggagctgctgcaagcggctatgatgcagcgaaggagtggttaactggtaaatctgatctatcggaagccgctaaagggatgagcattgaggaacgcggcgcgttctatgcagcagcgctatcctctgccgcagaagctggtggtggagccgcgcagcagtttatgaaccagtacggtgatgagttcaaagaaacgatgcagtctatcgctcaaagccgttatgggctgactgaatcccaagccgctgtttatgccgaatcgtttgacacaaacgaaggtcgcatgaaccaggctgttcagaatctgaaaatggagtatgcagaacgtaacccggatggctcaccgatgatgcaaggaggtcagcctgttctttctcagcaaaacgaagagtttacggacaagctggtaaacgtattgcagaactcgacggaagctggagaccgttcaggtagctatttgactgccgtcagggggtacaacatagcaaatcaaaggttctaa

SEQ ID NO: 25045 - DNA, 1434 bp, Escherichia coli
atggtcacgcacaagacattaaaaaggagcctgcttgccctgagtgtggcggccagtctcgtcatggcaccgacaggggcgatagccgctaacggcctccaatcacagatggacaaactcttcaatgaaatgagcaacacaacaccacctggggtttatgaaagccaacgacgtggcgttttagctggtggccggttcactgcaaagacacgaatcttcgacgagaacctggtgagctttgcccctccatcatggaaagctggttgcggtggtgtagatctgttcggcggttcgctttccttcattaacgcggatcaaattgtccaactccttcgggctgtagcagccaacgccaagggctatgccttccagcttgcgctcgataacgttttcccggacggagcgaagtggatagagaacttccagaagaaagtgcaagcgctcaaccaacatctgggcaactcctgccagctcgctcaaggtttcgtgaacgacctaaccagcggcatggaccttaaacacaaaactgatgcttctataaccgcgacaacttccggcctgtatgaagacttcttcgggtccaagcaggaaaccagcggcaagagtcctctggaagaactgaaagccaacaaacctgacgaatacaacaagatgattggcaacatcgtctggaagcaactcaagagcaacaacgccaacacctggttccagtacggggataacacccttcttgaagcgatcatgtctttaaccggcacagtcatcattggtgatctggtaaacgacccgaactcaaccggcactggtgcgaaaacaacccctctgacgaccctaccaggtaacaagatcaccttgtcagacctgatttcaggcggttctgttgagatctattcctgtgattctgatacgaccaactgcctgagtgctggctccagcaataaaactgtcgtgctcaaaggtatcaagaaccagatcaccgatatgctgttaggaacaagctctacacctggtgtgatctacaaatacgcaacgaactctggaaccttaaccgacccagaaaaggcctttgtttctaacctccccggagggattggcaccattgttcgtaacttgtctgtcctttcacaggacggcgctaacctgttcgcaacagagtcatcaggagcgatagccctgaccatgatgtatagcttctcggaagagttcttccgcgcagctcgcattgcgatggctaacagcaaatcaccctacaagaaagaggcactagagcttctcgcgcaatcgcaacagcaaatccgtgctgaatacacaatcctgtcctctcaatacggcgatctggcaagccaaattgagaaatacaacaacctactggacaacatccgcaagcaaaaatacatgctggcaactttgtccaatcctcctagcacgaactaa

SEQ ID NO: 25046 - DNA, 1029 bp, Escherichia coli
gtgcgtgagactatgaaaaaatcacctttgaatttactgctccttgcagcgctcacgctgggggcatcacaccaggcttgggctcaagatggcacaagacctggtttttatgagcgaaaggaagagggttggttctggtacaaggaagagcccaaagaaccagagaaaaaacccgaaaagcccaaaccaaagcctgtggcagaagcgaagcctacacagcctaagcctgctgctccgcttccgagcggcccagaaatgttctcagcggaatggttccgggaaaacttacccaagtacaaagaccttgcttggaacaatcctaccgttgaaaacgtcaggacgtttctctacttgcaacgatttgcgatagatcgctctgaacaattttccgatgctacagagctggcggtcgtaggtgatcctttcttggatgaaattactcgacgtcctgctgccacgtttgcctcacaacaagttgatcgtgacgctggtaacgccaaaaacatgctactcaaaagcgtagccgaacgcgtagggatattcttcttctacaagtccgacgatgactacagtgacttgcaagcaccgctcatcaagatgttggaacaaggagaaggattctcgatcattcctgtatctatggacggcaaaccactccccagtgggcttttcccccattacaaaaccgatgaaggccatgccaaacaacttggtatcgtaactttccctgctgtttacctcgcatctccagacggtcagttcgctcctataggacaagggccaatgtctcttcctgagctgaatcacaggattttggtcgcagcaaaacgcaatggttgggtcacagacgaagagtttaaccgtacacgtccggtactcaacctggaaaacaacatagccgaacgcttggcctcaccagagctgggctctgacctcaaacagctatctcaagcgagcggtgataaagacaactttgtgccaccggaacaactcatgaagtacatccgggacaaattacaggagaactaa

SEQ ID NO: 25047 - DNA, 1512 bp, Escherichia coli
atgaaacaacttcctcctgacacaccagaacaatcactgatcactcagtacaaagggcctcgccttgtcgttaaggcctacgctggaacgggtaaaaccacgacactggtgaagtacgcccacaacaacctcgattcacgtatcctctacttggcatacaacagggctatccgcgacgaggcaagagaaaagtttcctgcaaacgtagactgcaaaacgtcccaccagcttgcctacgccactataggaaggggctaccagcacaaactctccggcaacctaaggctcaccgatattgcccaagcggtgaataccaagaactggacgtttgccaaagatattctcgatacgctcaacgcctttatgtgtagtgcagacatgcggattctttatacgcattttgctcgcgccgatacgggtaaagtgcttacgtccaaacaggagagataccaaatccaggtggtcgaaggtgctgagctcatatggaaacggatgacaaacgttcaagatccgttcccgaccgtacacgattgctacctcaaacagtatcagctcgggatgccgaatctgtctcgccggtacaccaccattctttttgatgaagcacaagacgctaaccccgtaacaagtagcatcgtcctacagcagaactgcaaggtaatcctggttggagatcgccaccagcagatctataggttcagaggcgcaaacaacgcccttgatagcaaagagctcatgaacgccgaccaactctatctcactcatagcttccgctttggccccaacgtttcgctggtggcaaacgcccttcttgaactcaaaggtgaaacacgacctgttgttggccggggaccagcagatcaggtactcatgtttttaccaggtgacgtgggccaccgcgcaatacttcaccgaaccgtcatgggggttatagagacggcgctctctgcgaccgaatccggagcgcaggtattctgggtcggtggaatcgacgcttaccagatcaatgagctccaggatttgtactggttttcgatggcagagccagaccgggtaaagaataagaaactgcttgatgagtatgaagactacttcgagtatcaagaagtagcgaaggcgaccaaagaccctgagatgatgagggctgtcaagatcatcaacagctacgatgaaatccctgaacgactcaccactctacgacgcaatacagtcaaagaagagtttggggctgacattacggtctcaacagctcatcggtgcaaagggttggagtgggactttgttcagctctatgacgactttccggatgtcctggacccagagctcgacccaatggcccgtgacgatgaaataaacctgctctacgttgcatccaccagagcgatgcgaatccttgcgttgaacagcgctgtcgagatggttatccgctacatcacccaaaaacgcatggtcgagaagcagatgaagatggccgcagaagcgacagaagttgaagaggacacgaccaaatag

SEQ ID NO: 25048 - DNA, 279 bp, Escherichia coli
atggcgcgaaaggctaaatattcagaagagtggcgacacagagctgcggctcttcaaaccaagattgaggaggctatgacactagccacctcatctattggcgactatcgctggttacaccgtctccatagttgggttacggaggtggctcaaggtaaagccccagactggtggacagatctggattgtgaagtatccctcccccgagaagaaaagcggatcagtacgttcctctcgacacaaaagaagcgcatcactctccagatgtgtttgtcgtag

SEQ ID NO: 25049 - DNA, 1041 bp, Escherichia coli
atggcaagaaaattggttgagtttgacgatgtagcggctgcggcccaaaagctcaaggacgccggtaaacgcccaacggtcatcgctatcagagacatcattggcaaggggagctttaccaccatttcaacgtatctcaaacagtggtcagaggaacactccctcgatgaagagctggtagaggtagtccttccagaatcggttatgagcgatgctgagctcttcctacagaagatctatacggtagccaaagcaagcgccgatgaacagcttgagcgcgagcgtgaactgctacgacagaaagaaattgagtaccaggaagatatgcagcaagccgtggacatggcaaatgatgccaccgaacgggctgagctactggaggaacaacttgaagctctcaccaacaaaaaatcagagctcgatgcggcccttggtaaggcagaaaactcgctatccctcaagtctgcggagctagaacgctcactggctgacattgataagctggaaaagcggatcgttgagttggagggcaagctggaggcgaaagccgcagatctgacccgagcacaggatcacctggagcaagctaaaagcgaaaatcgctctttgagccaaaaattggcaactacagagggtgagttggaggagcaaaaaggcaagagtatagagcagacagaaaagctccgggccgctcaggaacaaaaaacatcgttgaaagagcagctcgaaaatgtacaggccaaactggcccaatcacaggactcccttgccacagccaaagctcatggcgaatccgctgaacgagagtgccagcgcctatctggagaggtagaaaagctggacgccaaattatccagcgccgaagcagaagctcgcgctcttgttcaagacaaaggcatgatggctggtcagttgcaggaaaaagaccagcaggccaagagcctcgaacaaagactcaatgatgcactgaccaaaatttctgggttggagcaagagctcgctaaagctggtaagggagggaaaaagaaagaggaaaactga

SEQ ID NO: 25050 - DNA, 876 bp, Escherichia coli
atggctaaaaacttcatatcagaacaattctcggccatgtgccgcgacttaacgaacctgtcctctcttatcaaacgactaccgccacggtacgcaaaagttgcggccatccctcctaccggaaaaggaatggagaacgagcccgtcaacaagattgtcgtaactgaacaaactgggcgcgaagctcttgagctggcagcgcacagctacagagatcttcacatcaacccagactattcgcagaagtctgccaggcgcaccgtgggggtactctggttctccccttccaggattggtgtagctgacgaaattgcggcgacggttgaacgcatcaacgcggccaaagctggtatcgaggagttcattatctcgacgtaccccaccaggcaagagaggtttgaagcacttcgagcggactgccctggtgtcatgactctccacctttacagacaaattcggtgctataccaatggcgacatcgactctatccgcttcacctggcaacggaaggactccttgaagaagcccgtaaaagaggagcttttgcaacgcatcagagaggagctggagcgatctgggccagactatcaacttcccctggagcagcttatccagaagatcgccagcaccccggagccttatctccgggagcgaagggaagtaaaggttcaaccggtggcaaacgtcatggccgcaggggtactcaaaaccgttaccgcgccaatgcccctgatcgtgctccaggataaggatgttcagctcaaattgcttcgtaactttgacgcctcagaacaacgcaaaactcgatctgataaagcggcatcggaaatccttggcaccttcggtggagtcactatcgaatccttccctggatga

SEQ ID NO: 25051 - DNA, 492 bp, Escherichia coli
atgacagaacaatcctacggcgaaagtctcaaatttttctcagactggcagaaggaccccgcgaaacgcaccggcctgaatgtgcaacacacgctaaccagaggtgaatatcctacggtcagcatcgagattgcgccgatcagggcatcggggtccagcccagactggaaaagcaagatcacggtgcagctcactcgcggcgaactgacggcgttttgcagcgttctctttggtttgcgtagcaaggctgagggttcctatcacggcgacgcgaagaataagagctttgcggtttacaacaacggcaaggccggtgttgcgatcatccttagtgagcgaggaaaccagctccagaatttcatcaatgatgacgaccgaatggagctcgcagtcttcgcagttcgccagctttccaacgcatggaaagttaccccttctgatgccatcgcgctgctacgccaatcagcgtggatggaccgaaatttgtcctaa

SEQ ID NO: 25052 - DNA, 870 bp, Escherichia coli
atgaatgatgaagaactcgaacttgccagagccgaagccatgaaagccgataggtgcttttcaaaaggacggctcagggacgaatttaggatgaagcctaagccaggagtagagccagtttcgttctacaaaaacgggtatggtggccaatttggagtgtaccggatagcagattgccaaccaatgcggagaaggggttgttcaccggcatcacaaaagcaaataagggcgcaatccatcctttcggtcaaggcaagaatgcgtagcaacctggcaaaggcctctgtcatggcacaaaggtgggtcgctctggaacctctggttctcgataccgagacgaccggacttggtgaaagagaccaggtgatcgagctggctgttactgacatcagaggcgcggttctcctctgcaccagattacggccaaccgtggaaatagaccctcaggcaatgggtgttcatggcatcaccgagactgagctgtcgaatgagcctacgtggactcaagttgcgccagctctcgcccggcttttgtcgggccgtcatctggtgatatttaactccagtttcgacagtaggatgttgaggcaaacagccagtgcatttggagaccaactctcttggtggcaagagcagaactgtctgtgcgcgatgaagctggcggctgatgcctttggctcaaccaaccggcacggcacaatctcacttgcggatgccacctgcgaggcaggtgtgagctggaaaggtcgagcccattcagcagcgaccgacgctattgccaccgccgacttggtgacagagatagccaaagtccaacgtgacctcgtggtccagctccaggagcttcaaagcaaaggtaatttggaatga

SEQ ID NO: 25053 - DNA, 1011 bp, Escherichia coli
ttgcacgacacaaacaatgacaaggaagagctagtttcacatgcgaaagtaaatgttccggcagaacaaagcattcgcggtgaactgttgccgtcatcgagctcgctccggaacatccaggacaaccccgccgtcgcctatctggtgagcctcgggtcaaagcgaagcaggcagaccatgagctcattcctcaacattgtcgccaagatgatcgggtttcagaaccttcgtgactgtgcatggagctcaatgaggcggcaccacatattggcggtgctggaaatgctgggggatgcagggaaggctccggcaacgatcaacacctacctgtcagcgctcaaaggggtggctcttgaagcctggacgatgaagcaaattgatacggatagcttccagcacattaagcaagtccgttcagtacgtggatctcgacttcctaaagggcgggcacttgaacgccatgagattcgcagcctctttttcacatgtgaaagtgattcaagcgccaaagggcttcgggatgcggccattctcggggtgctcctcgggtgtggcttgcgccgctcggaaatcgttgcgctggacatgggaagcatgatctacaaggaccgcgctctcaaggttcttggcaagggcaacaaagagagaatggcgtatgtgcctggtggcgcatggaaaagactggataagtgggttgaagaggttcgaggaacgcatgaagggcctttattcccgaggatcaggcggtttgatgatgtgactggagagcggatgtcggatcaggccatctaccacatcttggagaccagaagagttgaagccggtctggagatgtttgcgccccatgacctgcgacgcacctttgcctcctcgatgctggataacggtgaggatattgtgaccgtgaaggacgcaatgggccactcaagcattgcaactacccagaaatatgacagacgcggcgatgagcgtttgaagagagcgagccaacgcctcgatatagcggattaa

SEQ ID NO: 25054 - DNA, 537 bp, Escherichia coli
atgcttagcaaaaaagtctttttcattagtcaagcggaggccgaaagactggagccggttcccggtgcggccatgatctccataactgacccagacaagtcccctgccgctctcggacagtgggggcagttgtaccgcgatagcttctatgacggcggctattctgagaacaccatccacacgatgaaggcagcgttccggatgaattacgcctcttacattgactcatcccaggctgaaaagctgtccaccttcctggatggattggttggtagcggtatcgatcagatcttcgttcattgctattacggagaatccagaagtggcgcggtagcgctgtacctccagaacaaacatggattcactccgaataagccgatcaccaagcccaaccgaacagtttacgaattgctgtgcaatccaaccaagtttgaaccactgatgcaaagctacgaaacgcaacatatggaggaggaactacctcttcacctcaaaatatgggattttcttctcgttgcggtcgggcttaggaggtaa

SEQ ID NO: 25055 - DNA, 288 bp, Escherichia coli
atgttaaacaaaaacaaatttgagaaagttttaaagagaatcctcgataagaactttgagcgctgctctatttgcaggaaaccattccctggaccgtgccatacttttgctggtttggattcggacaataaagttcagaacgtaggttcttgctgtcggaccagtattgtggacttgcggcatggaggtgtgtatacgaccgctcctgtagatactcaagaggggcaaagtcaggcgcgtgagctactcgcaacacatccttgtaaggggatgatgggacatgcttag

SEQ ID NO: 25056 - DNA, 282 bp, Escherichia coli
gtgatttttgatgtaagagcgacctttgaagtggcactccagacggacacccacctggtacttatcgatctggatcagggagcatcagttacgaacgatgctgatgcagtgatcgcctggttggccgcaaacctcgaaggtggaattggaaaacgtaaggtgtactaccgggacaccgatggacgctttgatgagctcaaggttaatgccggtgcttttgccggatttgcaccttgtagcgaaggccagcagaccaccttggctgggatgctcggccagtaa

SEQ ID NO: 25057 - DNA, 603 bp, Escherichia coli
atgtataagagccttgaagatctgatggcgggtatttacgagatggcagcgccagatggcatcatctgtaacgaggtttccaaattccttgcggccaaccaggtcaagccggaagacataagctctgggatctggtttttcctgtggctgaaatcagctcccaaggatgcgaagccaatccaaaaagaaatccccggatttggagttgttctcaacatgccgacttatggcggaacgctcaacgaagcaatcacagggttgatcgagaacgagtgccgtcaaatagagctcgctgagggacatccgagccttgaggcttgggttgaatcagtattagccggtcgagatgacggagaggaaaatgaagctgcggccaatatcgtggatctgcttaatgggtgtcacgacctactggatacagcaataatcaattacctttttaaggtgggaaaaatcaacgagcaagagattttgtcgctcatctattatggagagctatgtgaccactctcttgtcggtacgcctttttcaacgttacatatcccgagtgaaaataacgtccacgaacgtaacatcatccccattaaaaaaggagccagttag

SEQ ID NO: 25058 - DNA, 423 bp, Escherichia coli
gtgcaaattgaatttccagcgctgcttgtgagcagcaagaaaaggtcgctcttcgtagtggcatcagaatccgagttcgggaaatgtactattcagtctttgaggaacggttattttgagctgatggacatttatgattcggaaggtcgtcactacaaaatagacgaggttgcgagctacaagccgctaagtccattctggtactggcctgtagaaattgtgatgtatggttctcgactgtttaaggctaatttcaatgctgttcttatctctaatctggattgcaaggagttaaaatctgaactttgtgatttggctaaaaagtacagaagtaatttggattccggcgtcggaattgaaaagattatggaggaaatggagtctgccagaacaattaaagaattgataaaggtttttggctag

SEQ ID NO: 25059 - DNA, 4254 bp, Escherichia coli
atgagatcgagaccttcccttttactgatgcgaaacctgcggtcattggccgttgtggtgctcgcaactttgccatgcgttgcttttgcacaatggcgggttgtagccgtgagcaccgaagtagacaaaatgcgcttcaacaccatcatagacgcgcattccttcatgaagaattatcgctctggtgaggagcaagggaagggaacgccagttggggatgcgctttatccggttgccagttatggtgatggccgttatgtctccaggatctgttttaagtatctaggtgctactggcgattatgaccccactacctgcactggcgacccagctacggtctactggcgctcaacctatgttctgccgggtgagatggataaaacaccgttcctggacagggatctcggcttaccaacaacgaccatgtgtgtagggaaccctatccatcttggcaccggcaacaagttccaggctgaactggattatcaaagcggaggctccgaccctttcacattcaccagatactacaatagccaccttcctgatgaagagctcggcggctggcggcatacctactcgcggagcgtcgaggtcaacgcctcgaagtacggtgagaacatggttgtcctgcaccggccagaagggcaacaactcgcgttctacaactcgtcctctgtctgggtgccaacatggaaaaccgatgataccttgacgaaggatgctaccggctggcgctacactcaatctgacggggtagtcgaggcctatgatgaaaccggacgactgaccggcatcgagaagcccaacggcaatcacatcaccctgagctatctgaacggagagctatcctcgatcactgacggctttggccgcaccatccagttccagtatcaagatggccgcatggtcagtgtcaccgatcctgctggtggcagtattcagtaccagtacaacagcgctggcaagctggcggaagtgatctaccaggacaatacgagccgcagctatctctacgatgacccgaatgcaccgggtttgctctctgggctggtggacgagaacggcaaccgtttcgccacatggggatatgatactcaggggagagcggttctaagcgaacacgccgggggcgcagagaaaactcaggtaagctacaacgctgacggaagcgtctctgtcaccaatgccctcggccacgttcagcgatacacctacagtcgccacaatgggatgctcaagcctgatgtggttgagggtgcgccgtgtaccggctttgtgggcggcaaggaaacctacgtctacgacagcaaaggcctcgtctccagcattactgaccgcgctgggcagaagcgcacgttcacccataacgaccggggattggaaaccacccagatagaccaggacgggggtaaggttacgaccgactggcttccttccaagtcgctcccggcaaaaatcacagaaccaaccaggatcactgagctcacctacgacactcatctccgggtgataagccgcaaggtcactgatcgcagctcgggcgcttcccggacatggacctacacctatgcccctgttggtacaggaaagccgagcctgttggcctcggttgatggtccgcgcaccgacgtcagcgatgttacgacatttgactacgatgaccagggcaacctgatccggacaacgaacgcgctggggcaggtgacgcagtttggtgactacgacgcgaacggtcgcgccgggaccattcagggtgtcaatggtgtaacccaaaccctcacctatgacgccagaggaagacttgtcagctccactgggccagaaggaaccacggtctacaactatgatgctgtgggcctcctgagttcgctgaccaagccaaatggtgcaaccgtcagctatgagtacgacgctgcacatcggctggtggcggaaacagatgcacagggcaaccggcgcgagcttgagctcaatgacctcgggaacccagtagaagagcgactgctcgatgcgctgggccagacccgttggatagagcgccggatcttcaacgaaatcggctggctctccagtgtctccgacgcctatagcaatcagtcatcgttttcctacgatgtggtggcaaacctgatacaggagaccagtccctctggtaacacacactcctacaagtacgacggcttccatcaccggacacaaacgaccgatcccctcgggaaggtcacgcaggtgctctacaaggataccggcgatgtttaccgtgtctccgaccctcgttcgcgcctgacctactacagctacaacggctttggcgaagtgacccaggtccggagcccggacaccggcaccaccgacattacctatgacgaagccggtaacgtggcaacgcgcaaaacggccaaggggcaaaccacaagctacagctatgacgcgctgaaccggatcatcgaaacctccagcgatgtcgctggcgaatcgccaattctgtacgggtacgacgaagcaacctcaccatacggcataggccgcttgacctcagtcgatgatggcaacggtgtccggagatttggctacacccccgaaggatggctggcttacgaaacctgggaaacccacgggcagagcctgactacccagtaccaatacgatggtgcaggcctcgtcacgaagatcacgtatcccagtggccgtgaggtctcctacacccgtgactcagccggtgacgtcatcgaggtgacaacgacacaagcaggcaccacaacaaacctggcaagccagattgagcgagcgccctttggccccgtcaccagtatggtcagagggaacggcatttcagaaagccgcactctggatctcgattaccgtgtcaccggcatcgacgctgctagggtgcattcgctggtctatcggtacacgccagactcgttgatttcagccatagacgacaatctcagctcatcagtcaatcagtcactcggttatgacgcggttggccgcatcacctctgctgaggggatctatggcgttttgggctatggctatgacgccaccggcaacaggacctcgatcacgaccgatggcctgagccaaagctacaccatcaactacatgaacaactggttggtgaaggccgggcaaacctccagaagctatgacgccaatggcaacctgacgaagcagggggcggataccttcacctatgacagccagaaccggctggtggccgcaacggtcgcgggagtgactgtaagctacacatacaaccatctggatcagcgtgtaaccaagaccctaaacgggcatacccggctgctggtttacgacctggcaggaaacctcatcgaggagctggacgcggccactggagacgtgctggcggagtacatctggctcgatgggacacccttgggctttgttcagtcaggacagacctaccaagtccacgtcgatcacctgggcaccccgaaggcactgaccgacgtcagcggccaagtcgtttggaaggcgagctacagcccgttcggtaaggccagcatcatcatccaggggccaaccttcaacctgcgattcccaggacagtattacgacgcggagaccgggttccactacaactggcggcgttactacgacccagcgaccgggcggtacattaccagcgaccctcttggcctgatcgatggagtaaacacctacgggtatgtgcatggaaaccctatgtccaataccgacccgacgggtgaatttgcgtttgttggtgcaggtattggagctgggttggagctacttagccaactaatcgaaaataatgggagttggaaatgtgttagttggtcaaaagttggaatcgccggagcgattggggctataggtggcggctgggcgtcaggagttttcagacatgccagctccggtaaatcgtggttcaaattaagccaaaaatggagcaatgtctcacccagagtaaggaaagttcaaggggttccacgaggtaatgagcttcaccattgggctattcagagaaatggcaagtttggcaaatatgttcctgactcaataaaaaaccatccttggaacttgaagtccattccaagagatattcaccaaaacattcacggcaatggacctaccccatatagcgcatttggtcgttggtggcacgggacgcctgaatgggcaaaagtagctcaagcctctcctgttagtggtggtttagctgattcaataaatgatgagggatgcggttgtgcaaattga

SEQ ID NO: 25060 - DNA, 726 bp, Escherichia coli
atgatgacattgactaccgtctcgaagaaaacttcaaataattcagcccttgtattctggcgcgttggtacaaaacggaaaggcatccttgatgtccatattgattttgaccacgaagaagcggatcttttggctgagctcgtagccattcgctatctggcgctggacaaacaggttttttgcagagagccaggtgctggtgctggttacaagctggtggtatccaaaggtgcaatcaagaagctggcgctgggcaaatccaccaaggcttttgctttcaagtttgcggcttgcctcactgggcgtttaaagggcgctactattgaagtctcgcagagcatggagtttatggatgagccgggagagggcaacattgagctcctcgatgtggacaagcaagcctatacccagacccatgacgaaatatctacacctgccattggccccgtcctggttactcaacatgccatcgatcagtatcaggcccggataacctctggagaccctaaaaaaccgtgggcctcacttgttggccgcctccagcatccagagttacaggttcagccctttgacgagaaagtggctcgccataaagccagaaagtatggccgcgtagataacgtggaagtctggggccatagagattccaagttcaagtacctgatggtgatcaacgacgacaaccaaaaacgtgttcttgtcacagtgtttgagcgaaatgagtaa

SEQ ID NO: 25061 - DNA, 1758 bp, Escherichia coli
gtggaagtcagcaagaatggcatcaggctgggtgactaccacgcgaaagtcatgtcagcgaaaaagctgcctgacgttttctactttggtgatgcgttgacctatgccggggatctcagcggcggcaattccagcatcaaagaaaactacatggtcgtgaccaatgtttttttccctgaggcagaaagcacgaaaaacactctggagcgcaaacgccagttcactgtaaaccaagcctacgggccgatgctcaaattcgtgccggtgctggcggacaagaaggagagcttcgacactctctatgagtccatgaaagagggggctaagccagtcaagatcacctactcggtggttttatttgctccaaccaaagaacgtgttgaagcggcggcgatggccgcacgaaacatctggcgtgaatctcggttcgagctgatggaggacaagttcgttgctctgccgatgttcctcaactgcctgccattctgtaccgaccgggatgcagtgcgagacctattccgctacaagaccatgacaaccgagcaggctgctgtggtcctgccggtgtttggggaatggaaggggaccgggacctatcatgcagcgctgatttcccgcaacggccagctcatgagtctgtctcttcacgacagtaataccaacaagaacctggtgatcgcagccgaatccggctcgggtaaatcgttccttaccaacgaactgattttttcctacttgtccgagggggctcaggtctgggttattgatgccggtaagtcctaccagaagttgtcggaaatgctcaatggcgacttcgttcactttgaagaaggaacgcacgtctgcctcaacccgtttgagctcatacagaactacgaggacgaagaagacgcgatagtcagcctcgtttgtgcgatggcttcggctaagggcttgctggatgaatggcaaatctctgcgttgaaacaggtcctttctcgcctgtgggaagagaaaggtaaagagatgaaggttgacgacatcgctgagcgctgcctggaagaagaaaatgaccagcgcctcaaggatattggtcagcagctctacgcctttacgtcgcagggcagctacgggaaatacttctctcgcaagaacaacgtcagcttccagaaccagttcactgtactggagctcgatgaactgcaagggcgtaagcacttgcgtcaggttgtactactccagcttatttaccagatccagcaagaagtattcctgggtgaacgtaaccgcaagaaagtcgtcatcgtggatgaggcctgggacctgctcaaagagggcgaggtctcggtcttcatggaacatgcctaccgcaaattccgtaagtacggtggctccgttgtcattgcaacgcagtccatcaacgacctctatgagaacgcagtgggccgcgccatcgcggagaactcggccagcatgtacttgctcggccaaaccgaagaaaccgtggaatctgttaaacgtagcggtcgtctgaccctttcagagggcgggttccacaccctcaaaacggtacacaccatccaaggcgtgtactcagaaatctttatcaaatcgaagagcggtatgggcgtcggtcgcttgatagtgggcgacttccagaagctactttattcgaccgatccggtggacgttaacgccatcgaccagtttgtgaaacaaggcatgagcatacctgaggcaatcaaggccgtaatgcgaagccgtcggcaggctgcataa

SEQ ID NO: 25062 - DNA, 318 bp, Escherichia coli
atggacattaaatcaatcgcaatcgccgccattctcggtgccgctggtggcttcggcggtagctactacgtgatgagcgaacaaacggcaagcatccatcagcgtttgaatcaaaccccgccagtggtcgtggttgacttcgctaaagtggcgtcggcgtatcccgctggtgcctctcaggaggaagttgaaaggctgatggtcaagaccaatgacgcaattttgaagttgaaagacgcaggttatttggtccttgacgcaagtgctgtcgtcggggctccaagtgacgtgtacctccctgatgaggtgctgaaatga

SEQ ID NO: 25063 - DNA, 531 bp, Escherichia coli
atgaattttccactcaagaagtatttcgtcaaaaaggaatcctggaagcgcttcggggttaaggcaggtgtgacactagtggttctttgggctgctggtgcggcctttgccagccgctaccgtattggcattgatccacaacaggagaagtgcctgccgggttacaccttcttcctcattgatctgaacgaccaaactctggagaggggagcggtttacgccttccaagccaagaacatgcagcctttctacaaggacgggactcgcatggtcaaaatcctcaccggtatgccgggggataaagtcgagatcaacgataagtggaagatcaccgtcaatggtgatgtcgtcggagaggggctccagctcgcagggaaactacatctgccagagagccacttttacggcaagaccacgctgaaagagaacaactactggtttatgggcaaaagcccattcagcttcgactcacgttactgggggactgtgaaaaatgatcagatcattggccgcgcatatcccctgttctaa

SEQ ID NO: 25064 - DNA, 1266 bp, Escherichia coli
atgatcagatcattggccgcgcatatcccctgttctaagagcgttctggtggcgttgatgttctctgtggctggcggggcatacgctcaagagtctccgctcacagagcaggataaggcgcttattgagcaaggaaagcaaattgcccaaaaggcccagaagatggaaatgccatctctgttgcaaaaccaacacatggacgaggctcaggccgaagccaaggcatttttcaagcagctccaaactactaacccaacgctcaaggagatgcaccggaaacaggctgaaaagggtatctactctgaccatcggatactggttttcgcctcgttgtctcttggcgaacaggggttagatgacgtcctaacggcggtgtcaggccagcctgattctgtaattgtgttccgtggcatcccggaaggaatgaacttggggcagggagttaaagctattcaggcgctcgcggccaaaaaagacccagtgccgaacatcatcatcaaccctacgttgttcaaaacgtacaacatcacagccgttcccacgattgtgatgctggaggatgagccgctgcctggcgaacaaccaaacgtcgtcgcccaggtctccgggttgtccgacccggtatggttggctcgggaagtggataacggagaaaaaggcgatctcggcgttaaggggccggtggagaaaatcagtgagccagaccttattgatgttgccaagaaacgccttgccaatatcgactgggaagagaagaagaaacaggctatagagcgcttctggaccaagcagaatttcaatgagctgccaagagcgccaaaatctcgaacacgagaaattgaccctagcgtcatgatcaccagtgacatcagcactccggatggcactgtgttcgctcacgcgggtgacgtgatcaacccattgtgcgatccgaaggaagtttgcaagcctggaacgcggccatttacccaagcggtcgtagttttcgacccgctggacaaaaagcaaatggaactactcgccaagaagctgcctgaaatcaagctggagcctggcgtacaacggatcacctatatcgccacagagttcgacaaagacaaaggctgggattcctacaagagtgtcaccgacaactttgacgcgccggtatatctgctgacgccagatctgattacccggttcgagctggagcacacaccgagcgtcattactgccagaggcaagaagtttgttgtccgcgaacttgctgaggagggcggtgaatga

SEQ ID NO: 25065 - DNA, 672 bp, Escherichia coli
atgatttttgccccggctttccaaccaattaaagacgtcggcacaggttcgtttgtcgctgctgaggtactggctcgttggtacgacgaaggccgggttcttacaccatcctctctgtcatctcctccttattggggactggtggatatggagatggcacggttcattcaggacaaccttcattattgcttggatctgtacccggctctctttctgaatgtctccgaacaaactttgcaatcagacgtcatcttcaaggcgtggtgtagggttgtccgcgacattgctaaaaatcactcatcacggcttgtcatcgagattacagagggcattcaggacgcctctctcgcatcgagatgggaggctctgaccgaaataggggttgagctggcgctggatgactatggagacaaaaactcttctctggatcgcctgagccgttatgactggcactattgcaagtttgacgcgagaagactgcggtcgcttgaagactacccggccatcctccactgccgccgaaaaggcatacagctcattgctgagcaggtggagagcttcccattgggggagagcgccaaattacttggactgtcatggcaacaaggtttctatcacgggaagcctgctgtcatggagaaaaatttgaattacgtaaaggccttaccatga

SEQ ID NO: 25066 - DNA, 1008 bp, Escherichia coli
atgatgcaaaaaattctacggatcatggccgttagcgcggtcttttgggttggttcggtatcggctgaccctgggtgccagaatgcggaagtgatcggcggaaaactgattactgacatctgctggagctgtattttccctatcaaagtagcaggggttcctataagtggtggaggcggatcattcccgagtgaagccgtaagcaaccctctgtgtatgtgcgaggataatctaggggtccctcggcctggagtcaccacttctatgtgggagccagcacggctcgttgaatttcagagagtgcctggctgctcatcagtcttgaatggtgtcaggttcccgtttgataggactaaccaagggcatcatggcatgggagacatggatggtggtgatggttcttttatgcactatcactactatgcgtttcctctgttggtgatgctcgatttatttattaagcagacctgtaatgctgatgggtatatggatctcgacatcatgtacatgtcggagctcgacccgacctggaacaatgatgagctcgctttttttaccaatccagaggcggcggcagtagcaaacccaattgcggcggctgcgtgtactgctgatgctgtctcatcaaccgctggaaaacctttaaaacagcttttctggtgtgctggttcatggggcaccctgtatccatttagtggcaaccagaatggtggaaaaggtgttatccgcgatagcagtcttcttagcacaagggttctggctgctttgcatcgccgggggttagcgtggaagacaatgggttctgaggctatgtgtagaggcgttattagcccaacactacccaaaacgcagtacaaattcacgctattgcatccggttccagagacaaactcatctcacgtaattggcgaatccactcttacgtggggtctggcgcgaactataccggcaattgggcaagaccctatttacaccatctggcgatggaatgattgctgtaacaattga

SEQ ID NO: 25067 - DNA, 2796 bp, Escherichia coli
atgcgaagtcataattactttatgaaagctgtggcctcgctgttgacagtaaccatgtctgcgctgccgatacattcctacgctaacggtagccaagaccaggacatcacagcggtgggtaaagaggcccaggctttcggacaaaacctctcaaactcattcaagtcgagctcggggactgtgcaagatggcacaatctctatgccgacgttgaaagacggtcaattccaaatgaacggggggagtcagattaatgtcaatgatctattccccggaacgagcgggaccaacaataaacctgatagttattacttccctgatgccaataaacctgatgtgggcggtctgcaaggcatttacgactctggcgatgacatggacagcgtggggaataatgcaaaagggtcgctgtggagtgatgccaatagtgctaatccatcaatctctggtgcggcatacaaggttcttctcgatgcctctaatcgatcacgccctgatttcagtaatgacccggtactaaatctaagcaaaaagacctatgaggatatggacctcatcgcaggtggctttggggattgttctgccgaaacaaccatcaatcagaatactatcaacgcccacattccagagtatgaacggtgtcagcgtgttgtagatcaaagcgcggactgtgaggttgtccatgactacgacgcctctgtggtgaagcactatgatggtccatataacctcaaatcttgtggagaaggctgtactgagttgtggattggtcgagtgggggacaactactggagtggtaactgcaagatttatgaggagtacacgcgggtccaagtcagcaatccagatgccatagtgtctgcaacgcttgaatacgccaagtgggatgactacatgcaagtgtgggtcggtaagtccggccaagagactaaagtgtggtctggcccagatggcaacttccctccagaaacagccggtagatgtgagctctccacgagttgggagcgaaaccctaatgttgatgtcactccctattttaagaacgtgaaagatggtgatgttgttacgtttaagatccgcgtttcagtaagtggcgaaggtgagggttttggccgcataaaactccgctatgacccatcgaaagccattaccaaggatgagtgggctccacagagctgcatggattcagccaaaggggtggtagatggttttgcggaaggcgagatcacatgtatagatgacccgactgatgctactggctgcacagtcatcaatgggatcaaagtttgcgaatctcaactcaagccgtcacctttgcctggtattccaaaactatgcaaaaaggttcgagttaaagctgactatgacttctataaggggcaaatggactgctggacagaccctcaaggtgaaacgcactgtccggtaaacacgggcgggaatctcgatagctgtcagaaatatgaagaaaaccctcagtgcggcttcatcagttccaaatgtgttgatggtgctcagggaagttctggtacgtgctacgtccacgaggatacttatgactgtggtacagatgtttctgttccgaccttggaaaaggaaactgagtaccagtgcggtgggcctatacgctgcatgggagatgactgccttgatttgaccaaaacacaaagcactgattttgctcgcgctactgcgttgctcaatgcagcccaattcatgacgcaggatatgagctgcacaggccaagatggggatgacaatcctaccggggatgaaaacgttatttgctctgcttttgcaggggaagctggcgaatgcaagatagctgttgggggagtttctgattgctgtgaaaagccaaccaatatatctcttgccgattatctgaacctaataatggccgttccaaagctcgatggcgcagtgatggggctgactgatggtaatgcgcttaaaggtgcttatcaggtacttagggaacctgcccttcaagggtggacagaagtcacaaaaccgttcacaagttatatagagaacgtttcaggtgctgttgattcgttcttccagcctgtagagcagtttgttgatcaactcattgaccagctcaaagagcaagtcaaagaagtgatgatggatgtcatgaaatcagcaggccaagatgcagcaacagagcaggcggctgccgcagcatctgaacaagctgccgaagcaatgatggagactgcgacaacatggcttagcactgccatgacgatatataccgtctatgtcgttgcgatggtgatgatccagatgatttataagtgcgaggaagaagagttcactatgaacgcaaaaagagcgctcaagaattgcacctatgtaggctcttattgtaaatctaaggtgttgggcgcttgtattgaaaaaagagaagcgtattgctgcttcaattctccgctctctcgtattatacaagaacaggttcgccctcaattggggcagaactttggagaccccaaaaatcctcagtgtgaagggattccactagataaaattgccgaaattgattggagcaaaattaatttggatgagtggcttgggatattacagcagaacggtaaattccctgatccggcctcaataaatctcgactcgctgactggagcagggaatgacttcaatattgacgggacgcggaagaatgctcaggaaagggcgttggagcggttggaagggattgatattgacgcgaagcgaaaagaggcgacaaacagcatagaccctcaaacaggcgcgccaactggtggtggataa

SEQ ID NO: 25068 - DNA, 861 bp, Escherichia coli
atgaaaaaggctttaatcaccaccgtggctctggctgtagcagctctatctggctgtgcatccaccagcagttacgaacccacagcgtacaaaaccaatcacagtcgcgcttacaacatcgcggaggccggtggcctggtaacaggcatccaagacgcttctgttccgcgtgacaagctggagcgtctgaccgacaccaaaacgtttggggcagcctacgtgctgtctggctacatgtcccctcagctcggaatgaccgactggcaaggtggcttggtcaaccttgcgaactgggctatcggccccaaacagcatggcgctcgcaatagcttgatcgcttggatgcctgctaacgaagcagtttcaccggcagacgctcaggccaaatttctttcacatgtgaaagtttccattgagtcagcgctgactgatttgggtgccaatttcacgcttctgtatgacaaagacggtcgcctaacctatcagttctacaagaatgaatggggttgcccgacgtgggtgaacggacaaagtaaggtagctgacatgtgttccgttaaggtgaaaatcgtggagcctcgcctagggtcagctcctaattttgtctctggcgttcaaggtacagcgtatgccttcacatcaggccatgagaccgcatacaactttgtgaatgtcggtaatggggcagcaagccatgctcctcagcaagcgatctacgcagctattagcaaacagctaccagcttgggcctacctctaccttgctccaaaatcggttgagctggataatggcgaaaaagttgctttcccttaccttcttgatcagggaaaagcagagttatttgtttacccagaagcgtaa

SEQ ID NO: 25069 - DNA, 642 bp, Escherichia coli
atggcagaagcacaagtagcactggacacaaacaacgaccgcagcaaccactactctcgccctgttttcaagcaagttctgaaagtaaacagcctccaagctcagcgcgtcatggaacgcagctttgagcgagtttccaactccctgttctccatcgacgtgatccttcgcatcatcggtgagcaggacgaaatcgaccaggttgaaaccgtcatcctggaacacatttccaaggtctccgaagacctggacaaagctaccgcccagctcaacaagctgatggaagacaacggcatcgacatgatgcccggctacaccaacccgaatgaatacaccatcgagatcaactctcctcaggttgctcagtttgcacacctgatccgcaaactggataccctgatggggatcgttgacactctctggctgaacaccgtactgaccagcaagcagcgcaccgacgccacttaccaatggcagcaacgcctcatcaagctggccggtcgaatcatcggcatcgagaaacgggctcgcatttccgcccacagcaaaggcaaagaaggtgaagtggccgaagccgctccggaatctgcaaccggcgacaaggaaatcgcagacgaagccgagaaaacaaaagcagcataa

SEQ ID NO: 25070 - DNA, 321 bp, Escherichia coli
atgcacatcatcactttcattgtagttctgcttgcatctctgggcgcactgtacgtaggcgcgaaggcatttgctttttccttcatcgttctcgctaaagtgttccagcgtatcggtttgttcctttggaacaaattcgcagttcctgcaatgcggtctgtacaggccgtcatcaaagaacgtgctgccaaggctgaacaagccaaagcagtcgttgaacctgaggtaactcaagttcaagaagtcgctaaacaagaacctgactgggattatctcgaaatcccgacttaccttcgtaagggcaaggaacttgtttggtaa

SEQ ID NO: 25071 - DNA, 186 bp, Escherichia coli
atgcaacagaatcttcatgtttacgacgatcacgcaggcatcatctatctggctgatggacgcgaggtgaaatttgatccgaaactgtattccagctcctaccaggcgcacagtgaagcagtgaagtgggccaaagaaaccggggtcattggtcaaaacgacgatgtggtgatgttcgtccattga

SEQ ID NO: 25072 - DNA, 969 bp, Escherichia coli
atgtctcaatactctcaattctcagtaagcaaggttttcggtatgcccagcattccggagaaggtaacggccatcggctacgctgacggttcaaaccctttcatccctgccactgataccaactacgttttccgcaaagagtttctgcgagaggtcttggcctatctcaaagagcctggcggtgacgcattgttcgtaaccggccctaccgggtctggcaaaacctcaggtatcaccgagatcgctggtcgtctcaactggcctgttcagcaaatcactgcccacgggcggatggagctgacagatctgattggacatcacgctctggtcgcggaaaagcctggtcaaccacctgtcatgaagttcatgtatggacctctggcagtcgctatgcgtgaaggtcatctgctcctcatcaacgaggtggatttggccgaccctgccgagctggctggtctcaacgatgtccttgaagggcgtccccttgtgatcgctcagaatggcggggaaatcatcaagccgcacccgatgtttcgtgtggtcgttactggtaactctacggggtccggtgatgcttctggtttgtaccagggggtgatgatgcagaacctcgcagctatggatcgctatcgtttcaccaaagtagggtatgcggatgaggaagctgaactcagcattcttggccgtgctactccgaaacttccggaaaatgtgcggaagggaatggttcggattgctaatcaggtccgcaaactgtttcttggcgaaaacggtgaagatggtcagatcagcgtcaccatgtccactcggacgttggtgcgttgggcgaaactgtctctagcgttccgtggtgccccaaatgctcttgaatacgccttggatcaagctctgcttatccgtgcggccaaagaggagcgtgaagccatcctgcgtgttgcgaaggatgtgttcggggaccaatggcgctaa

SEQ ID NO: 25073 - DNA, 909 bp, Escherichia coli
atgaagaaaaatgactgtttgtgccgtcgttacactgctaaagagtggggcaatgacgaaaccacaatagaagtcttcattggctacaagttgctccgggagcccagctcctcggagccaggccaattcacgatggtcgagctacgccgaaccgtcactgatgggaaagctgaaaattggtctgagacaaagctcgaaggaccttttgaagctaacggcccagacacgatcccaatgtcctacaaggacaaagaaagccagtatgtgtcacagtttctcagccaggggtacacctttctggatgaggtgctggtaaacgcagagacacagacggtgctggaaggggggaatgtttcagccggacaaacagccagcttgggatctctcaactggctgttatctccgccctctgagttacctccaggtgacataaacctcttcaaaggttttgttgctggggtttttgccaaaggagccggtttaatcggctttgaggttgctcggagcgaaggctcaaatgacttgctacccagtgtgctgatgcgtactgacagcggttatgagcttggggttagcactggactaggcgaaaacactatccatccagctacgctggaaggcgctggtgaactccgcccggaacatggtcacaaacccctgctgatgttggtttacctgcaacagcgtttcgcggatgacttttcaaacgtagagaagccgctggtggcattctgtgatgaacagggtgataccttcgactacgagcgttttgattcactaaaacccctcattgaacggtttggtttcagctacgacgaagtaagagcagatgcagaaaggcttggccttgtatctgagctgattcgcctggcagagatcgacgccgaacaagaggatcactttttttaa

SEQ ID NO: 25074 - DNA, 528 bp, Escherichia coli
atgtctaaaggcgtcaacaaagtaattctggtcggtaatctcggttctgacccggaaattcgctacatgccaagcggcactgccgttgccaacttcaacgttgcaacaacggatacgtggcgcgataagcagtctggcgagcaaagagagcatactgagtggcaccgtattgtgcttaaaggtcgtttggcggaagtcgctggtgagtacctgaaaaagggctcccaagtctatctcgaagggagcaaccgcacccggaagtggactgacagccaacaaatcgagcgctacaccaccgaagtacactgcgttgaaatgcagatgcttggtggtcgtggaaatgcacctcaggacaactctcaacgtgcagcgccccaaaaagggcaacgtacaggagccggtacgcaatctgctcctgtgcagcaatcagcaccgcaaggtggtatgggcggaggctatggtcccgctcctgatggctgggatgatgacatcccgttcatgcggctgcaccacttggctggcgggtaa

SEQ ID NO: 25075 - DNA, 990 bp, Escherichia coli
atgtctgataacaaatctcttgtaacccgtatcgcaagccggtttggcgtggacacccgaaagttctatgaaactttgaaggcgaccgcattcaagcagcgagatggaagtgccccgaccgatgagcagatgatgacgctcctgatcgtggctgaacagtacggtttgaaccctttcactcgggaaatctatgcgtttcctgacaagcaaaatgggatcattccggtagtaggtgttgatggttggagccgcatcatcaacgagcatccccagtatgatggcgtcgagttcgtgtattcggacaagatggtcagaatgcagggggcgaaagttgactgccctgagtggattgaatgcgtgatttaccgtaaggacagatctcgccctatccgcatcaaggagttcattgatgaggtgtaccgtgaaccgtttcagggtcaaggtcgcaatggtgcttacactgttgatggcccctggcaaacgcacaccaagcgtcaactccggcacaagtcgctgatccagtgttctcgtgtcgcatttggtttctctggtatttatgaccaggatgaagctgaacgcatccgtgaaatggagcaggcatcggccattaacccggctattgccaatctcccttcaccatctcaagttcaaagccaagagcctttggctattgagcacaaagagcttgacccgatcctaaccaaactcgcaaatcgcgccattgctgaaaacgcatggtctgcggcgcatgagtatgtgaagggacggtatgaaggttcggaactgcaatatgcgactcaattccttcgtgacaaggagatggatcaaatggagcctccgaaacctgactaccaggaagcgcacgagcaagagtccgccgctggtggttctgcaaatgctgaacctggtgccgaagaaatgccgcctttgagtgacgaggacatgatccctgttacagaagaggagggcgcggaaggcagttactactaa

SEQ ID NO: 25076 - DNA, 1011 bp, Escherichia coli
atgaaaatagtcaacctatcgcaacgcgaggaagattggcttgattggcggcgtcaaggtgtaacagccactgacgccgctatcctgctcaatcggtctccgtacaaaacacgatggagactgtgggccgagaagactgggtatgcgcgtgaagtcgatctgagtcttaatccgctggttcgccgggggatagaaaacgaagatgctgcaagacgcgctttcgaggagaagtatgatgacatgctgctccccgcctgtgtcgaatcggttcaatacccgctcatgagggcctccctggatggcctgagagataacggggagcccgtcgagctgaaaagcccgagtgcgactgtctgggaagatgtttgtgctgagaaagcaaacagcaaggcataccagctttattacccgcaggtgcaacaccagctcctggtaacgggggccaagcaaggctggttagtcttctactttgaaggtcagattcaggagtttccaatactccgagacgaagccatgattcaagaaatcttggccgaggctaaaaagttctggcaacaggtagtagacaagaaggagcccgacaaagatccagagagagacctgtacataccgcaaggtgaagaggtcaaccgttggattgctgctgctgaggaataccgcctctatgatgcagagattcaggagctgaaacagcgactgtctgagcttcaagaaaggcaaaagcctcatctcgacaccatgaagtccctcatgggggaatacttccatgccgactactgcggtgtgatggtaacgagatacaaagcggctggccgggtagactacaaaaagctgttggctgataaggcgtcaggcgtgaagcctgaggatgttgaccagtacagagagaagtcatcagagcggtgccgtgtaacggttactggctctgtgaagccacggtacattgttgatgaggacgtgcttgctcctcttgatgatttgccggaagaagtagagacgttctactggtga

SEQ ID NO: 25077 - DNA, 1278 bp, Escherichia coli
atgactaaagtgaaccatctacaaagcctctgtgttatccacgtagactttgacatctggagtggacaaacccgtttgtctgcatctgatctcaagctgggcgagggtggtgaaattccacctgagaaagtagctcaactgggaagtaagaagatctgtgatccggctaagctgaaaggctttcatcgcctgaaaacagaaactcgtcgcctcctgctgaaattcggtatgccgttcatgaacggatttgccgtacccgtcagcaagaccgatgaaatctgtaacaagctgaatgacatcaactttcagtttaaccaactgaaacaggatttcatcaaaggttacaacaaagccgtggatgaatggtgtcaggagaaccctgagtatgaacgagctatccgtgccggagcccttccaaaggaaacggtcgaggagcggattggctttgagtaccaggtgttcatgatccagcctgtgaacgaagatgaggccaacgccaaacgccttaaccgcaaggttgagcgcctgggtgacgatctcatctccgaagtggttcaggaagcgaataagttctatatggaacgtttggccggtcgagaccaatgtgcggtcactactcggcagacactccgtaacatccgcgacaaggtggatgggcttagcttcctgaacagcgcttttaaccctctggtcaagctgctcgaccaaaccctccggggatacgagcaacatgccgatggccgaaacatcgttgcgcctttcttttatcaggtcgtggccgcagtgctgatcatgagcgagagggaccgcatcgagcagtatgccaatggctcgattactgtagagggcatggctaatgacattggcggttcgggagcccagatgggggaccgttctaaagatgaaaaggccgaacagaaaagcgataaagccggtgagcttatccctgcaacagagggtggcgaaaccaagcagcaacaggtaggtggtactgaatctgttcaatcagaacagactaacagcggtggtaactctgttgacctggatgaagacatcgacaacttcttcaagagttttgcagaacgaggcgagggtgaatcggaagatgaatccaatgccggtgatgtggttcgagaagagcgtgttgatgttgaggatgagctggttttgcctgaggaaactccggtagagcaagagcctgtccaagaggagacgacagaggagcctctcaaccaggagctgcctaaaactgacgacgatggcgactatttcttctaa

SEQ ID NO: 25078 - DNA, 1797 bp, Escherichia coli
atgtccaaaaaacgcaccatttacagcgctctaccaatcgtggccgcagcctatggtgaaaaactcggtgtcaaagtcgccatcggtaacgatgacgcatacaccgatggtaagaccatcgtggttccgaatatccccgacgactatcctcacatggatgctgtctgggggtatttggcccatgaagcagcccatgtccggtttacggactttggtgttgagcgccgcagaggtcttcatgctgagttgtccaacgttttggaggactgccgcatagaacgggccatgatggaactcttccccggtacgtcgcagaccctgaatgaggttgctcgctatatggctcaagctggtcattacgagcacgtcacagacaaagaggcccctgcctccattctgacagggttttgtttgtactggttgcaaaccaaggctgtagggcaatccgtccttcaaccctatctcgattcggctacccccgtattcgagcgcgtgttccctcagggtgttgttgttcggctgaacgctttactgcgtaaggctgtgaacactaagtcaaccgcagaggtgacatccttggccgaccaaatcatcaagatgatcgaggaggaaaaggagaaagaagagcaaaagccccagaatggtcaggatggtaacaaccagcagaatgctggtggcaaccaacctcagaacagtcagggcggaagtggtaacgatcaaaaccaagggcctgatgccaatggtggtgatcagcaaggtaaagaccagaagcaagacgatgctaacgggaaatctgatccgaaaggacagggcgaccaaggcaagtcggatactgatggtggcagcaaggcaggacaaagccaggctggtggcaattctgacgcggcgaaacaagacgcggccaaaatgctccagcaggttctgaatgccggtgccggtgatttgcgtggtgacgcgcatgatgcacttaaagccgagctcaaccgggtggctcaagataagggggacagtagctatatgactgttcgctctgctgtgaacacccaggacaaccctgctgttggcaaaagcctggtaggggatgtgaagagcaccacttcaaagataagaacgcagctctacggattggtccaggccagccagcgagttgctcaccgtaaccaacgatcagggaagcgtgtggatgctcggaaactacatcgtgtagtgacgggtgatacccgcgtattcctcaagccagaagccaagaaacgccctaatacggcggttcacatcctggttgatatgagctcctcgatggcctacaaggccgccaatggaaaggagcgtcaagacattgcgcgggaagcgtccttggctatttcgatggctctggaagcaatacccggcgtaaacccggcagtcaccttttttggtggcaaccggaaccagccagtgttcagtgtcgtgaagcatggagatacggttcagaatcgggccggtcggtttgggttcaaagcaactggcggtacgcctatggcggaagctatgtggtatgcagcttttgaactcaccaagacccgtgaagagcgaaaaatgttgatcgtagtgactgacgggcagcctcaaagcgccccggcatgtcgctcagtgattgacctctgtgaacgaagcgatgttgaggtgatcggcataggggtagagactaccgcagtgtcaggactgttccaaaagaacattgtcattgatgatgcggcagctctgcaacgcacactgtttaagttgatggagcggtcattgactgcttttgcagcttaa

SEQ ID NO: 25079 - DNA, 336 bp, Escherichia coli
atgaaccaattccattcatctttggatttgtatcatcggaacaaaggtagaagggctacagtgccggagacgccttttttactgcttgctaagcgcattcctccgatgtactggagactgttccagggtgttactttggatagtcgtatgggatacacaggcaggcggcagttccaccgtcttgggcaagcaatcgactgggcaaagtcatcagttggcgattcctggtcaaataagcgctttcacaagccggtaggcctcgatgtattgctggcctgtactgcgagtaaggtgcctgaacatctggtcgaagaactgaaaagacggggcagttga

SEQ ID NO: 25080 - DNA, 540 bp, Escherichia coli
atgtctcatctgaacaatctcaaatccgtaatgatctctctcgccgccgaacataagctgcctgaaatctaccaggatgacatcactaccgatgtggagtctctggatcgattcgatggtttacgtctggtctggctgttgcggtcttgcggcagcgtattggtgccagcggaagttggcgttaatccgatctatatcacccattggttgtggtctaaccacggtcaacaggtggttccattctctgtggatacccgcacggggttgattgaaaaaatcgacttcgagcaagctgaaaagctgatcatgcagatgccttgcaacctctcttcattgcagaacaaggaatacttggttgaccaggtaaaccgagtattgcaacgaggttgtgaaatgcgtatctggggtatcttcgagtctccaagctcggtggaatccgttggtggttggaaagagtggcagagctatttcagctctactgggaatcgactgatggccgatttcgttggtaaagccattcgattcaccaaccctcgataa

SEQ ID NO: 25081 - DNA, 501 bp, Escherichia coli
atgaaaaacctatcagctttggaagcagttcttgactacgacaaaccttctcgacgttttcttgatgagctcaacgaaaaccagatgaaggatttgtccggggaaatcttcgccaagctctactggagcaagcgtaatccccagtggtacgagaaagacaccaatcggctgtttgcacgacttcgttgggttcagcgcatcatcaagaagcgcttgaaaaccggcaaggttaaacctgaactgacagaaaatggttcagtgatggagcgcttcaacttcccttatggtgacactctcgatttcttccatcggtacttgcgacatcccaaatgggaggttgtgtatcaagaatcggggtgcagtgccttttggaaaaatgaagcaacgcttgagctatgcacctactgcgaaggtgatgtggtcatgatgaaggctcctgatgaagcaaccttctttcgtgattgcaatcgccttagctggtggtatgcagataacgcttga

SEQ ID NO: 25082 - DNA, 885 bp, Escherichia coli
atgttcaaatcatcagtatgctcctacgaaaacagggggccttacggaaacaacaagtaccgaggcaactgctcgggctttatcgttaaagacttcattgagtcttacatgagaaagccgaacgggctggtggcagacccaagtgttgggggtggctctagcatcgacgttgccaatgaacttggtgtccgtttcaaagggacagacttgcatcaggggttcaacctgttgcgggatgacttcctttcgttcctcggagagcctgcacacctgatctggtggcaccctccttactgggacatgatccagtattcaggtaagcagtggggcgagcccaacaaatgggatatgagccgcatgaatttgcctgagttcgttgaagcccttgagctggccgttatgaatattcatgacgcctgtgagcgaggagggcattacggaatcctcatgggaaacctgaggcgcgatggggattatttcaacctgtccagccttgtggaacgtatcgcacctgggaagctggtggatgagatcatcaaaacacagcacaactgtgtgagtgaccgaactcagtattccgggaagctggtgcgtatcgcccatgaaaagctgttggtgtttcgtcgtaacgacgttgcctcatcgctctgtcttcttgctgccgtacaccgtcgagcaaccaatatggtttcgactacgtggaaagctgcaatacgccgaaccctacaggggaaaacgttgaagctggagcagatttacaaagagattgaaccctacgcaaagcatcgagagaacaaccactggcaagcaaaggtcaggcaagttcttcaagatgccaggttctttattcgcatcgaggtaggtgtctatgcacttgctgagtag

SEQ ID NO: 25083 - DNA, 225 bp, Escherichia coli
atgaacgtacaacttcaagccagcaacaatgtgctgttggcgcaaatcgaaagcaaaggcctcactgttgaaacgcattgtcgcagtggcttttgtggcatgtgccgggttcgtctactcgaaggtcaagtggcttatgacgagacgcccatcgcatttgtcaaagaaggggaagtgttggtttgctgcgctaaagcaaaaaccgatgtgaccttggaaatttaa

SEQ ID NO: 25084 - DNA, 390 bp, Escherichia coli
atgtctatcaataccaaagttgaacaaatcgcatacggtcatgctaccgctctagtgctcagtgaactgggccaacaagagaattggtgcaaggcttatgagtatttgtctgagtgtgtagaacggggagacgaacctgaggatctggtcgtttggcaaccgtttgagcactgggaatggaaagacattctggagcagatcgagagcgaagccgagtctctgctttcgactattaagtcggttttaggcttggcccacaaaggcatcattcagtcagcaattgactgctctctggattcggacatgacccagcttgacctgattggaatggtcgagctcggaagtgaaatcgaagatggggagtgtgctggaggtggctatgcagcttaa

SEQ ID NO: 25085 - DNA, 453 bp, Escherichia coli
atgcagcttaaccgatacacggccagggagtctgacaaaagtcggatacttcggaccataggctggtgcaagcgcaaccaccttacacttgccggtcttccatacgaggacaatcttgcaggaagtgatgggatcagcatagagatcatcactcctcctggtatgtcgcgggaaatgttggagcaagccgtcagagaggggtattcagagcgagatgtcgtaaggcatcgcattctggagtgccctgtcggttggttcatggaagctgatggcaaggcatttgatcatgaagtgttccacgattacgtggtggctcatggttatggcgaaccttccagcgaagcctatgagctggcggagcggtggttctggcagggcaacgattatgcgttgatagctgcggaaatagttgctcgtgatctttgtgttcgtgatgacgaagatgaggactga

SEQ ID NO: 25086 - DNA, 276 bp, Escherichia coli
atggatgctgtagcgcatatagcagcagataaccttgtaccggcatgtggaggtgcagagaagccgtttaccgttagtggtagacagtggctttactgctatcacccagccagtgggaggcactgctacttagacctcgataatgaccgtccagtctggcatcgaggatttcatcctgcttttcatcctgagcttgagttcgctgatgaagctgagttgcttcgaccagttgagcgaaagcctgaccatgaagagctggaggatttttacttttaa

SEQ ID NO: 25087 - DNA, 192 bp, Escherichia coli
atgaaagatcacagtcaaacgattgtgttccctgggaacaatgttgaatcacttgctgaggctaacgccatgttgagcgctgtgtcggaagatgcacgtaaagccagcaatacggaagacaaacgtgaccttgaatcgcttcaaggctggctggaagagaacatcaattctcaactggcaggcgtgaagtaa

SEQ ID NO: 25088 - DNA, 354 bp, Escherichia coli
atgaatgcagtgaagatgatccagaaggaaaaccagcttgagctgccgcttttcttcctggatgaagagccgaagaccgcagaagtcattccatttgagccaaagcctgaatggactgatgatgaggtaaggcagttacgtgatgggcttttatggcatagccttagagtccttgctgatggtcgagctggaagtgaaatcaagcaggaaacgatggcttgggtgatgtccgatgaggtacatccattctcatttgtggtctgctgcgatgaagcaggttacgatccatctggagtaagggaaggcgtgaagtctatcctaaaccgcttagcgcgggttaaagcggggggttaa

SEQ ID NO: 25089 - DNA, 345 bp, Escherichia coli
atgactactcttgccagctttgcgaatccgatttctgttattcaacgctcaccaaccagtggggtgtttggcacaaatcagttcgtaggagacaaagagggatttgtacaaaaggtgctcggaaagtggtactgcaatccagggaataccattcccgttgagagcatgtcccaccttgagcaggcggagaaactgtatgacttctatgtcaagtatctccaagtgaaagaaaagatctctgtgaaccttggccgggtgctgcataagctgtacagcactggttctatcaaggaagcagagatcgtgcttgaagcaataaaggctcaggctggcgtaacagcttga

SEQ ID NO: 25090 - DNA, 303 bp, Escherichia coli
atggaaaaacataacctcaaatccggattcagcatctatttcgctgacgtccatttcgagaaacaagtctacgcattcggctcaggacttggcttcacctctgtgatttacgcctactcgctgggccgagatccggaagaagctgagaagctggcgcttgaaaagtacgactctgacgaaacgaaggtgaagaaggtgcatgtcaatctggctcgcagccaggacatcaaccgctacaccttccctgaacaaatggctggctttgctaatgccattcagtctcacggcatcgctgtgaactga

SEQ ID NO: 25091 - DNA, 1626 bp, Escherichia coli
atggctactatcgtaaacaccaagttaggagaacatcgaggcaagaagcgcgtctggctggaaggccaaaagctactgcgtgaaggttactatcctggcatgaagtatgatctggagctgaaagattcccaggttgtgcttcgcgtcaaagaggagggtaagttcaccatcagtaagcgtgagcgcaatggccgggtgtctccaatcatcgatctgaccgtgcaggagcttgctaccgtttttgacggtgtagagatgctccgcgtgttcatccgtaacggcgcaattgtgatctctgctcaccatcaacaagagcgagtgatcgagcgcgtcaaccggcttatcagtaagctggagaatggagaatcgctttcggtatgcagcctctttcatgggggtggtgtgcttgataaagcgattcacgccggttttcacaaggcgggaattgccagtgccatatctgtggccgtggagatggaagggaaatatctcgattcgtctttggcaaataacccggagctttggaacgaagattctattgttatcgaatcgccaatccaggctgtgaatctcagcaaacgcccaccacaggtggatgttttgatggggggcataccgtgtaccggcgcgtcaaagtcaggtcgcagtaagaacaagttggagtttgccgaatcgcatgaggcggcaggtgccatgttcttcaacttcctgcaattcgtagaagcgctaaacccagccgttgtgctgattgagaacgtgcctgagtaccagaacaccgcttcgatggaagtgattcgttcggtgctctcttcgttgggttactccctacaagagcgcattctcgacggcaatgagtttggggttattgagcgccgcaagcgtctttgtgttgttgcgctttcccacgggatcgacgggtttgaacttgagaaggttcagcctgttcgcaccaaggaaagtcgcatacaggacatcctggagccagttccgctcgattctgaacgttggaagtcatttgactatctggctgagaaggagttgagagacaaagctgctggcaaggggttctctcgccagcttctgactggcgacgatgagttttgcggcaccataggtaaggactatgcaaaatgcagaagtaccgaacctttcattgttcatccagaacagccggagttgtctcgcatctttacaccgacagaacattgtcgagtgaaagggataccagaggaactcatccaaggtctgtcggacactattgcccaccagattctcgggcaatcggtagtctttcccgcgttcgaggctttagccctcgcattagggaacagcctgtggagctgggttggaatgatgccaatcatggtcgaagtcgtggatgaatcacagccggtgatcggtggtgaagacttccattgggcaacggcattggttgacgcaaagggcactctcaagctgtcaccggcagcgaaaaaacaggggatgcccttcaacattatggatggtcaattggctgtctattcacctaacggaactaaaaagagctgcggccatgagccttgcgaatatctcccggtaatgatgtccggagacgcaatcatggtcacttcatctttggttcattag

SEQ ID NO: 25092 - DNA, 432 bp, Escherichia coli
atgaaaatcgaaactgttgtgcctttacctcccgaggattcaggccttcaacactgcattgccaggttccataaccgcaacatggattccaagcgaaaagacaagacccgttttttcaggagggagccggttatgatcgtaaacccagagaccaaagcaaaggttctccggtatgcgatgggcaaccctgggaatttatccatcacaaagctggcggtcgcgctggattacgatgcggtagatgctctgggtgttcgttttaaagacactgtaaatcttgaggttcgcagagccaggcgctgggaagtctggcagtggttctggaaccatccggatcaaagtgtccaactgtcaatcaaattgggcgtggttggcgctgtgttgggagtcatgggcttcctgactggcgtagctccgtacctcttgggataa

SEQ ID NO: 25093 - DNA, 555 bp, Escherichia coli
atgaacacattagaacaacttgtaaatcagagagtgcttgaggaaggtctgaaaaaggcgaagccattggccgcgcaaatggggcttgaatctgtacctgatgagatgcttgaaatgatctgcccaaacttgaactactctgggcagtttacgccagctctgtacgcgagatttcaaagcgtaaagcgattactgaaagagttgtcggaacaaacctcacctaagcacgggcatattgtgaagtttaccaaccaatatgggagctacgatgagtcagctttgctgttcaaagaaggcgacgtcagaaaccagaacttggttgcttgtgtgggcgggaagacgataaatctcggagagctagagcttcgagattatgggctcaatatgcacatcggttgcggtggaccatttgagccgatctcagaagcgcagattcagtccttgtctgagtttgacttctatgagacgacctacagattctggggccagaatccatgtggaaacgggatgatagacatcaccgtccctatgaaacgttggttcttgactgtgtag

SEQ ID NO: 25094 - DNA, 387 bp, Escherichia coli
atgtctaaaaacgtcaacgatgttttttcaaaccgaacttctttggaatgtactgtgaatgcagcgctggatcgtcgtatcggtctgcgtgtcgggttccctcattacagagaaggagcaaacggtgtggtttgtgagatcgaagcagagtacccattgctcaacactcattcgagtgttgcatggcccctgctcgatgaactcaacagttacaccatccaaaaaaaccaatcgctcattgatcacattgataatgcggtcgctgaactgttgaaacacaaggctcgtctacagcttgatattcaaaagctgcaagacggtgacattgatctggtgaaacaggccaagcagcaatacgaagacaaccagatgtcgagtagcagctag

SEQ ID NO: 25095 - DNA, 2454 bp, Escherichia coli
atgcaacaaacattaaactttgatctatcagaacaacccatcccagtgcttttgcgtggggataagtgggattctgtttggtcagaactgactgataacgaggatttgaacttcgttgatgccagtagaggaaccagtctgtcatcgttgatcacgtcatcggttgagtccattcacacggccttaattgatgggtggaccatgatgatcggctattccagtggtaaagattctgaaacggtcttgcacctgttcctgatggccctgatccgggctgtaaggagtggggcgaccatcagccagcaccacttcatcttgcacactgacacactgatcgaaagcccagaggtaaggtggctggcggatcagaaactggccgagctggagcgtttcattgcgaaggaaaaccttcctctgaccatcgttctagcaaagcctgggatctcgcagagttggacgggccgaatccttactgggagggggttgcctacgttttccaactccacggcccgccagtgtagccaggatttaaaaatcacctctgccaaaagagcgaaggcagcttatatgcgagagcttcccaaagaggttcgacagaaagtctgccttttgctgggcagtcgtgatgctgaaagcactattcgtgcggccaacattgcaaaacagcgaggaagctcagatcgcgtcattaagacgaaagatgggggtgagctgtatgtggtgaaaaactggttggcgagtgatgtctgggagttcttactatccgctggcatgggctcagcatatcctctgccaagttacttggagagcaatgtcactacggcagagctttacaaggcggcaacaggggagtgcgtgtggtcggcaacagagaagaaggccagtgacgcctgtggcgctcgcttcggttgctgggcttgccaggctgttgggttggataagtcaatggagacgttgcttgccacggaccctgaaaggcatggctatatgtcggggctgaaccgcatccagcgctacttggcaaaacgccggtacgcatgggaagaccgccatcccgtaggtcgaacgatttacgagggcggatacatcaaaatacagccggacgtttacagtcctgttttcctagaacgattgcttcatgtctgttgcagcatggactacatggagcaaaagagagctgatgagctggcatacaagctggctactggtcaagcagaggataacgactggaaccgtcgaatggcagagccacaattccggatcatatcggaagaggctttagtccatatcgacttcatgtgggccttccatcatttcaatgataagcctttccatgccctggagatttaccacagggtttggtcgatgggtgatctggacttgctggaagacgagccgcagtgtgaaaccgttcctcagtcaccaattccgaagccattgtggttgaaggttggtcgctggggcgatggttcgctttctgatggcttggccgatccgttagcggaaatggcttactttgacggcggggatgacccgttggcagcgcaagtgatcaataccgcagacggaaagagaagggtggtttgcttcgcagaagatgatgaagtgaaagtcgatcccgactccgctgcgttcatcatctggaacgaatacccgcgactaagggagtctgtactaaagggacattatacgcccggtagtgcagcgcagttctaccttcggttcggagcaatccagcttgcgaaaggaaaaggcgctttgtatcaccgtatgatgcaaagaggtcaaacctaccaccagatgggccttacagggctacagacgatggaaggaatccaacagcgcaaggatgtcaaagtgcttagcgatgctaagtacaaagatctggtgaagcgaaaaatcaagggaagactggcaacggtacgctggtgggtcaacttgcacttaacgttcaagtaccatctgcaccaccgtactccgacggggttgttcatcgagaagcaacttgaccaggaagcaatggaagaacagaaacggcatcaggagcgatggtttaactacgtgactgacgcgatgctttgttactccagcgcattctgtatgagcgtcatggaagggcgagaggggagcggaaacgccaacattcgtcgttacatggccgcgaccagaaggaaggcttatacggccctctgcgagctcttggacaatactgacgcccagtggatgaatgatgtggtccagagtgccgtagggcagtatgaggcgatacaggcagccctaaccgaaggttccgcgcttgctatctatctcgactggatcaacctactgtcaaaacgccatccagcctctttggagcgacatgtcagaacgatgatcaaggcggttcaacgcttacatcgccgcgacgacacagagttgcaaagaggacagcaaggcttgtccttggccgcataa

SEQ ID NO: 25096 - DNA, 204 bp, Escherichia coli
atgagcctagacaagttaagtcggctggtggaccaacaacgaaagatccaggatgaaatcgacaatgaaatcattctggccgtcaaagaggtgttggctacaaactcagtcggtttagcccgtgagcttgttgggggtgtcccgcaagatcatccattccatccgtttttactcgctatagctaagcagcttgacccgagataa

SEQ ID NO: 25097 - DNA, 606 bp, Escherichia coli
atgtctaattcaaatttcggctttctagctctggccttgcgccaacgcctgatcaaacgctggtcactgatgcactctgttcaaccggagtctgtgttggaacacagcgctgttgttaccctgctttcctacctggctggcaatattgccattcagcaagggaagtcggtggatctggcagtcatgcttgctcatgcttcgttgcatgatgcagccgaggttctctgttcggatgttgtaacaccggtcaagaaagcaaacgctgttttgcagcgtgagtttgaacgactggaaaaggccgcagaggacaaactcatccagactcttcccgaagaactccaggatgcagtcgccatagccttcgctcccggtggctatgaacaatcactggttaaggcctgtgatacctactccgcttacatcaagtgcaaacttgaggtggccgcaggtaatggccttgagttccaggatgctctcagcaaaatggaacgtgttgttgctcaggtgaaatcggacttcccggaaatcgacgctctggacaaatggtttggtaacggactcggccattcagtagataaactgctggcagggggtaacgatgactaa

SEQ ID NO: 25098 - DNA, 270 bp, Escherichia coli
atgactaatccaatccctggcgacatcaagattaaggactttggccgcgaccggaaattccgttcggttgatgagcttcaaagcactttgtcagaacagtacaaaggtcagcatgtcagcatcgtttaccctgcaaagcccagcggtttactccgcacggtttttgtcagtgtcgatgatgctggtggcgtgaatcgaacctatggggaccagtctcctgtcgatttttctgccatcaaagatgacctgtatgtaccaagtgacctgtag

SEQ ID NO: 25099 - DNA, 219 bp, Escherichia coli
atggtggtgatcatcgtaaacacaggacactatgagtttatcggccttggtgagacccacggacaagccacagaagggcttttgaaacgctgggacgaacactgcgaacgtaatccggatgctgagtctggttacatgcaggagctgatagaagaaggaagcgcacaagttgtcgagatggagcccggctccgccgtaatttacggacttgacggctaa

SEQ ID NO: 25100 - DNA, 558 bp, Escherichia coli
atgtctaactttgaacaagctctggagcgtactgacggtaaaacactgattctcagcaatgggagtaagtgggcaggccaagacccggacagtattcagactttactggatgtcctgggtgacaacgttcttgacccgatgtttgagcagtatcactgttatcgcccatacccgtttgaaccaatggtgaggacggggcgaaatggcgaaatgttccagccttggcttggggcagcctgcttctttgggaacttcctgactgtctctcatgttttcaacatcatcacgaaagatgacggtgttgttgaggccttaacagaggcgatccggaagaatatggcgactgaacagtaccagcagaatgcctatgagcgttatgccggttggttctacgctgaaaccagcgaagggttaaggctagtctctccaagtgaggctgccgacatccgagctggcgcagtttcaaagctgcgttacccaagaaacttcgaggttatgaaaactgcggttctcaaaggtcctcgatttgatactgaattaagccgcaaggcttcttaa

SEQ ID NO: 25101 - DNA, 852 bp, Escherichia coli
atgattaaacagcattttcaaaacgaactggttaagtgtggatacccggatgatctgacgattgagtacagtctcggatactgccagggggatggcgtagccttctacggggatttgagcgttgatgacgtcaaagctctcatgaatcgcctattcagcactgagcccggccaagtggatgctgtcagccgcgtgaagaacctgatggcacagaaagacattgagaatatgctttctgtcctccgcgaatatggttcctgtgacctgtccattactcggaatagtcacgggcatcactacagccattggaactgcatgaacatcgacgacaacgtggacttcacagggatcttccctgatgatgattccatgattggcaccggcattgaagggattaaccaggatatggtcgagcgctggcaagacctctgggaacgctttgtgctggagctggcggatgatgtaaaaagtctttccaagaagctcgaagcggacgggtactcgctgatcgaggcctctccatgcgaagatgaagtggtttgggaacgggccactgaaaactacctggtgcgtgttactgaactccctgagcgggatttcgatatgggccactgggatgacgaagtaagagaccaaacaatttgttctatcctggaagggaaagagcgagtgcttggcctacgtgttgaggtactctctcgtgaaaacgagattgtcctgggtgaagagagtctgcacggcttgaccgttgccagtgatgacaagagctacgctggctacagacgagaacttctccggggagctatccagcaaaccagggactttttctctcgccacctcaaagcggcataa

SEQ ID NO: 25102 - DNA, 147 bp, Escherichia coli
atgaacaaattccaagactttaagttggtttatcgtcaaggtggtcgtcgcttagagcgtgtctttacggacactctttacgcgaatgtgaagcgtgtcgctgactcgtttcctccgaccgttctttggcgcattcagccagcgtaa

SEQ ID NO: 25103 - DNA, 387 bp, Escherichia coli
atgaaccaagtagctaaattggacctcgcccaaatccgtcaacaagccatcaatgatggtctgctggtggaccaatcttccatcggtaaacaagctggtttcctgaccaatgtggcagtgaccccggcaattgtcgatggagtatttggtgcagatggtaagcactcggtagaagacttccttttcatgtttttgcagctttgtgttgctcaaacaaaggtcgcttttaccgacaacaagaattggggaaagattcgtctttattaccccatgcccactgtagatggctttttcaaacccactgaggttgtgattaagtcagatcctgtaaccgcagatgtcacaatcatgatggcctcggaagagggcgctcatttgtgcttgtga

SEQ ID NO: 25104 - DNA, 1728 bp, Escherichia coli
atgtcttactacaaagctgacaccgttcgtgaagctgcaaacggaaactggctattcatcctggcggccctagcgccccatcttgaaccagctctccgtaaacctggtcgtcatgtttcttgtcctatccacggcgggaaagatggcttccgactgttcaaggatgcccacctgactggtggcggcgtatgcaatacatgcggtgccaatcatgatggttttgagctgctgatgtggctcaataactgggactttaaacagtgcctgagcgaggttggtgattatctgggcgttgagaaagagcaaccccagtatcaacaagccgctgcaccgacacgagctcctgtccaggccaaagcgcctgttcagcaagagcctatgaaggtgaataacaaggttctcgattccaagaatcgtaaaaaatccattgccggtactctgattgcccacggtaaagctccttatgagcataacgaagacaacgagctcagctactttgccttcatccgtgacaagagcggtttggaacgcaccatctggggcgtggatcttgaaagagccattggtgaaagtgaagccaagtatggggatgagatcgtcatgacaaacctcgggcgcgagcctgtaactgtcgtcgttgaagttaaggacgagcaggggaatgttgtgagagaacaacctatgcaaacgcatcgcaacacctggctggtggaacgtcgcggcgctacggtaacgcagttccgcgctcgctcgaacggtggtgttgagccggtgagtcaccatgttgagtcggcccctgtggtcaaccgcaaggtagaaactccggcaccgcaagtacaacctgcggccacacaaccggaagagcaaagcagcgaaaataagccgaaagttgttccgatgtttcgtgaacaacctaagccttggttgcttgagctccaagaagaaatggagaagagaatggagcgcgaacgcgcttacagtgctcgtctccgtgagaaaatcgagaaggtatggaacgagtgtttgccgttctccagtcatgtgactgagccaatgcgtctgtacttcaaaaaccgcgagctgctgttcaaagttgatgaagtagaaaaaacagactgtctgcggttcaatccggctatggcctactacgacgaagatggcaatgaagttgggaaattcccggctatcgtctgcgctatccgagatgtggaaggcaacctggtaacgctccaccgcacctatctcacccaaaacggtaaaaaagccaaggtcggcaacgccaaaaagatgatgcccattcctgacggtttggatgtcaatggcgcggccatccgcctcggtgaaccgactgagggtatcctgggtgttgcagaagggctggaaacagctctgtcagcttatcgagtcactcaaatcccggtttggtcaacggtcaatgccaccctaatggagtccttcgaggttccagaaggtgttcacaccgtactgatctgggctgacaaagataagtctgtgactggggagaagtcagcgaacgtgctgaaagccaagctggagaagcgcggcattcgtgtgtacgtcctgctgcctaagctcccgatcccgcccagagcgaaagggattgactggaacgatgtcctgatgagtcagggaagcctcggtttcccgaatgctcgctacctgcgcgatttcattgcgagaaggagagctgagtatggccgtcattga

SEQ ID NO: 25105 - DNA, 279 bp, Escherichia coli
atggccgtcattgatgtctcgaaggttgatacaacgcctggtaacgacgcggtgtgccccttctctccccctgaggggtgggagggggactctgcggcctacgttgagcttatgcggtctcggtatcgtcatctgatgcacggccagagaatgatggtgacagcctccttcgcaagaagggagcctatccaagttactggcccgtttgctgatgaagcgacgaagatcattaactcaatgaagatgaacaaggcgaagccaacagctttgtctgcctaa

SEQ ID NO: 25106 - DNA, 384 bp, Escherichia coli
atgaacgcaaatcagttggcgaatgcctcaagtaaaaacaacgcactcttcctcttcctggggttgatggtggtagccttcctgctcgtgccggatcaggcccacgctggtactggtggtacagcgtttgacgacgtatgggtaactctcaaggattggacccaaggtactttgggtcgaatcgttgcgggtgcgatgatcctggtcggtgttgttggtggtatcgctcgccagagcctcatggctttcgctatgggtatcggtggcggtatgggcctgtacaactccccgaccgtagtggaatccatcatgtctgctactctggaacatgcagagaaggtcatcccggctgttgtgcaactcagcaatggcctgggggtgtaa

SEQ ID NO: 25107 - DNA, 579 bp, Escherichia coli
atgaaaaatttgaacattttgaccagaaagggcagttccagaggcgaggctcaaaaggaacaggcagtaagatccgcaaagatgttgggggtgggtgcagcgctacttattttgtcgggctgttcgacgttcaacatcggcaaggatgagtatagctgtccgggaatgccgaatggtgttcagtgtatgtcagcgcgagacgtttacgccgcaaccaatgacggaaatgtcccgcgtccaatgaaaccagaggaagtcgaggccaaagcggaagcggatggcgaaggttcctcaaacgtttcagcgaactcatctagctccggagacccggtgattgacaactatgtcgcaccgcgtcttccggatcgcccgattccaattcgtacaccagcacaggttatgcggatttgggtagctccctgggaggacaccaatggtgatctcatcgtgacagggtatgtctataccgaaatcgaaccgcgcaggtgggtgattggggatggcacaccgcaaagtgagccagttttgagaccgctgcaaacggtacaacacgaaccgaagtctgaaacaaccaaatag

SEQ ID NO: 25108 - DNA, 1317 bp, Escherichia coli
atgattaagcgattttggacacagttagaccccaacaagaagcgttgggtgtctatcgctggcggcgtcttcgttctttttgcggtcgtgacaatgttctctggtgaacccaagaaagaagagaagcgcggtcgccaagaaaccatcaagcacgttctcacagacaaaaacacccgtgagatcgggatagattcgttgtctgccgatgtgaagatggtgtctcgtgaaaactccgacctgaaaaaggagctggaacgagtcaagaaagagctggaggaaaccaaaaccactgccgggaaatccagtgatgttggccgtgagatgacccgccttcgtcaagatttggaccgcctgacccagaagaacatggaattggctaagaaagtcgaaaccggcgctgctggtggaaaaacatcctcttcatcagaggatgccagagccgatgttaatggtgcatctggtggtgatggtcagttcatggagaaaaagctcgactacaaagatcctgcatccttttttcgggacgcaccgcttcctgactcgaagggtggggctcctgcaactggcaagggagacggtcgtgatgcaactaaaccaggcatccaaatagtgagctactcgcagaaagcgccagaagttgaagagaaggacaacaaggatgatgagtctatctacctaccttctggctccatcctgacaggggtgctcatcaacggtatggacgcaccaacatctcaaggtgctcgtcgagatccgttcccttcgaccctcaggattcagaaagaggctattttgcctaaccgcttccgtgcggatgttcgtgagtgcttcctgattgtttcaggctatggagatctcagttcagagcgagcgtacctgcgtggcgagaccttctcgtgcgttcgggatgatgggggtgtcatagaagcgaagctggattcctatgcagtgggtgaagacggtaaggccggtgtccgtggtcgcgtcgtatcgaagcaggggcaaatcatcgccaagagcttgatggcaggcttccttggtggcgtttccgaagcctttgacgtcaatcctgtgccggtcgttagcactaaccctggctcaaatacccagtaccagtctgtgttctccgaccagatgttgcagggagcagcagtgaagggggccagtaaggcgctagatcgcatcgctcagttctatatcgacatggccgaaggcatcttccctgttatcgaggtcgatgctggccgtcaggtagacatcatcgtgaccaaaggaaccaagctacaaattcgttccaccgggggaaccaagaaatga

SEQ ID NO: 25109 - DNA, 918 bp, Escherichia coli
atgaagaacaacgctaaactttcgctcctggcgctgtccttggcgcttggaacttcaatggcctatgcctcggatgacattcctgttgtcccggccagtgttatgaaaaaggatgttcctgcccctgtgacgtcaggacaaagctcccatgaggttgtgggcagcatgaatgaaaaccccttactgacgatgaagccgggggttaaccagatcatcccgatagccgttggtcatccgaaccgaatcgtcacgcctttcagcaatcctgagatcgtttcaacatctctgaccggggcgacggataacggccagtgtggtgaggtctgcatcaaagagaatgtggtctatgtcgccacggataagcagtatccggtgactatgttcattactgaaaaaggctcggaagcccaagctctcagcctgacgatggttccccgtcgtattccgcccagagaagtctttctcaagctcgatggtggtgtaggtatcactggtgcttttgccaataccaaggctgagacctgggaacagagccagccttatgtcgaaaccatccggtcggtattccgcaagattgctcttggtgaagtccctcaaggttacacgttgaaccgcatccctgctggtgctgcggtgccgagctgcgctcatcctggggtaaaggtggatttcagcaaggggcaatacatgatgggccaccaccttaacgtgttcatcggtgtcgccctgaacgtctctgatcagcctattgagttcaaagaggcgttgtgtgggagctgggatgtggctgcggtgactacgtggccgcttaacgtgcttgagcccggccagaagacggagatctatgtggcgaagaagcagaagcgtggtctcgcaccaacgtctaagcgtccatcgctgctgggaggtgcccaatga

SEQ ID NO: 25110 - DNA, 627 bp, Escherichia coli
ttgaacctgaaaaagtatctcaagacctgggaagggacccaaacagaaaataagtgggggcgaatcttccagggtggtcttattgctatcgttttcctgctggtggtccaagtattcagcaaggaaaccatcgtcactatccagcctttcacgctcacggaagaagcctgggtgacgaaaagtaacgcctctcagtcctataaagaggcttggggtttcgcttttgctcagctccttggcaatgtgacgccaggaaccgttgactttgtgaaagaacggatcaccccgcttctctccccgagcatctatcaggacgtgattgatgccatcgaaattcaagctcaacagatcaagaacgaccgcgtaaccatgcggtttgagccgcgttttgttgagtacgagcccaagagcgacaaggtgtttgtctacggatattcctacgtcaaaggggcttcttctaacgaagagcgtagcgaacgctcctacgagttcgccatcaagatttcaaactacgcgcccgtgctggactacatcgacacctatgtaggaaagccacgcaccaaaactgttttggagcaactccagcgcaaagaagaaaaccggagaaagcatgaagaacaacgctaa

SEQ ID NO: 25111 - DNA, 282 bp, Escherichia coli
atgaagcctgtaaagataccgcgccgggtcgatgagcccccgcatctgctgttgtggagcgcagatgagttggccccgatgcttttggggctaacgataggggtcatcatcggtaaggctctgatctgctttctgggggggttacttgtaaccaacctttatcgccgattcagggataaccatccggatggatacctgctccacatgatctactgggccgggttcatcatgaccaaggccaaatctctcaagaacccgtttgtccggaggtatttgccttga

SEQ ID NO: 25112 - DNA, 366 bp, Escherichia coli
gtgaaccttaataaacaatttttctggtttttgatgaacgcggtgctgatgtgcatcttcatcgttccagtggccgtcgcgttttggctgtctgcttttgcggcaggttttgactggagtcagtgggttaagttggctgctgatacggccaacagagctgcaagtgacccggccaaggctctgggcacggttcagacctactggggcattctcagcttcttcctgctggcggcgtacagtctgatgttcaagtttaaagccaatgctaacaaggaagtgaaaactctggaggtggcccgaccagccaatgaagttagcgttgcggcttcggaaaaacattcggaagcggttcctcaaaatcaataa

SEQ ID NO: 25113 - DNA, 144 bp, Escherichia coli
atgtccgcacaagctcacgtcagagaaagcgaaagctcatctggttcattcatctcctggcagttccttgtctggcaggtgatgttcgttataggtgttgttgcagggatgaacctggaacacgcattcaattttctaggttaa

SEQ ID NO: 25114 - DNA, 663 bp, Escherichia coli
atgcgtaagagagatttcttttttggagaggtgtatgaggggagtggaggagccactctacgactgagtgatatggaaccattggcaagaaaagtgtcggcagagttcttcactgcacaactgaaccgtatactgaaagagcatgacggtcagttgacgctcagcgatggaacgtcgtaccccagcttttggagcttcatcgacaaggttgatccagagcaggttggtttcgtggagatctacgctcggcaggatgttaacgataatgttgaagcgacactggcgtgtgacatcgttttggtaaatggtgtgatcaccgttaaacctcactggtgtgcttacaaagacatcagggctgacgaagtgatttccaccttactggtgcctttgcatttgaaggctctccagggtaaggcttacattcgctgggatgatggtgaaaccgaacctctgttacaaaacgacgactatcaggctgaacttgaaaatgtgtttagtgtttccaagtacccatcagccatgagctggggcgatacagcagaccagaaggttaagcagtacaagatggaccttgagtgcgccacagatgttggtcgtcgaggtgtctcatcagagcaagcatgggatgcttatcgagaactccgttacaatagaacagtgtga

SEQ ID NO: 25115 - DNA, 378 bp, Escherichia coli
atgaaagtaactaatagactccaactgctggcactggggctgtgtatagccggtactgccatcgcggctcctgatgtgctcaatgacgacgcaaagctcaagaaccttgagaaggtgtgtcccgactgtcagatggtggcaaaagatgtactcaatctgcgggttgaaaactgccagctcaaagacacttccagtgcaatgatgattggcaccatgcaaaatgaccctatgttttcgtttatgctggctgtacacacagcggcaggctcggaggcatacaaaacggtagttggtgccgctggcaaccatgttgactgtgaaaacccgttgaactggatcaagctgacccagcaagcgattaaaggtggcaaagtctaa

SEQ ID NO: 25116 - DNA, 447 bp, Escherichia coli
atgagctactccgttataaatcaagatggggtgcatctgtgcgacatcccattgaacgtctaccaggtgatacgtcgccaatccttgtctgcgttgtggctttactgggcgcagagcttgaatttggtgaaggtgctcattgcttgcgtcggaaagatgatctttgtgatgccggtaatgtggttctgggtgctggtggtgtgccgcttggttgaaccagaacgtatctcagacgtgtcaggacttatctctccggacgtgatcgggtgggccgctggtgcggccatcaccctcattatcttttccgtatttacacgcccagcgttgtacggataccacaactttttcaagcagcatatttgctcaagagtaaagcaagtaacgccggaactcagaacagtcactgggccactgttcttttaccgaaacgaaattggaacgatatag

SEQ ID NO: 25117 - DNA, 630 bp, Escherichia coli
atgaagaagccgtggttgctggtcgcatggctgctggttattgagttgctggcaatattgctgctgatccctggcgactggacagacagagccatcaaaagggaatccgagctggtggaacagagtcttggtgtcgaagcaagagactggatacagaacaaagcatctacctggttcaggtcgagcgttattgattcaggattctatgaggggatgtaccaaacgctgatcccatcagaagaggagcgccagaagtccaaggggatgcaggacatgggcaagggctggtttgtgtgggtcaaaggccgcatggaagcctttgtcaacgtcatttaccagttctacacaaggttggcactgttagccgcgtgggctccctatatgctgatcctgttcgtacctgcggtatatgacgggatgatgacatggcgaattaagcggaccaacttcgattatgcgagtccggttctccatcgttacagcgttcgcggaacgatgtacctgatggccggattgttcatcgcgttcttcatccccatagcgctcgatccggttgtcatcccgatgacaatgatgacgtgctgtgtcctggttggcctgacgttcggcaacctccagaaacgggtatag

SEQ ID NO: 25118 - DNA, 546 bp, Escherichia coli
atggtcgatgtgaaccctttcgacagggttatgaatgaattgaaaagtcgtggccgcaagaacgctcacatcctgagcatcctccaattcgactggcctgcatcggaggccatcatcgagaagctgagctgctacatcacagacgggattaaggctaatcaggagcctgtgatttacccgatcattgaagaagctctgcatcgctacagccagctcgtgtttcatgagcagagagagaaatatgaagacccggccagaattggggcatttctggaaaccctgatcaccgaaacctgccgggcgttggaagtgcaaattgtcgatagtggcggtgattcatggtctgtcgattcaggagagtcgttctcactgtggctttcttcccatccaggagaactatccattaacccgcagccccatgaggatgagacctctttgcgtggcttgctgtatgagctcatcacctgtgagagcgtgaaaactgttttaaggagaaccgactatgaagaagccgtggttgctggtcgcatggctgctggttattga

SEQ ID NO: 25119 - DNA, 1866 bp, Escherichia coli
atgacaatgagttatgacccgctcgcctacgagatgccgtggcggcccaactatgaaaaaaatgctgtagcaggctggcttgccgcctccggcgcggctttggccgtagagcaagtcagcacgatgcctccggagcccttctattggatgacggggatctgtggcgtgatggcgatggctcgtttgccaaaggctatcaaacttcacctgctccaaaagcatttgaaggggcgtgatctggagtttatttctattgcggagctccaaaagtacatcaaggacacgccggacgatatgtggcttggtagtgggttcctgtgggaaaaccgccatgcccagcgcgtgtttgagatcctgaaacgcgactggacttccatcgtagggagagagtccacggtcaaaaaggttgtccggaagatacagggtaagaaaaaggagctgccaatcggccagccctggattcacggggtagaacccaaagaagagaagctgatgcagccactcaagcacactgaggggcattcgctgatcgttgggaccaccggctcgggcaagacccgtatgttcgacatcctgatttcacaggccattctgcgtggggaagccgtgatcatcatagacccgaaaggggataaggagatgcgggacaatgcacgacgtgcctgtgaagctatggggcagccggaaagattcgtctcatttcatccagcattcccggaagagtcggtgcgtatcgaccctctgcgtaacttcacccgcgtgactgaaattgcaagtcgtttggcagcgttgatcccgtccgaagcaggggccgacccgttcaaatcatttggatggcaggcactgaacaacatcgctcagggcttggtcatcactcatgatcgtcccaacctgacaaagctccgccgattccttgaaggtggcgctgctggcttggtcatcaaggccgttcaggcttactcagagcgagttatgcccgactgggaggcagaagcagcggcttatttggagaaagtcaaaaacggttcgcgtgagaagatcgctttcgcgttgatgaagttctactacgacatcatccaacctgagcacccaaactctgatctggaaggcttgctgtcgatgttccagcacgaccaaacccacttctccaagatggtggcgaacctcctgccgatcatgaatatgctgacgtccggggagctaggccctctgctgtctccagactcatctgatctgagcgacgaacgccagatcactgattccgcaaaaatcatcaacaacgctcaagttgcttatctggggctcgactccctgaccgacaacatggttggtagtgctatggggtccatcttcctgtcagacctgacagcggttgccggtgacagatacaactacggcgtcaacaacagacccgtaaatatctttgttgatgaggctgctgaggtgatcaacgacccgttcatccagctcctgaacaaaggtcgcggtgcgaaacttcgtcttttcgttgcaactcagacttttgctgacttcgcagctcgactgggtagcaaagacaaagcgctccaagtgttggggaacatcaacaacacgtttgctctgcgtatcgtcgatggtgaaacacaggagtatatcgcagataacttgccgaagacccggctcaagtacgtcatgcggactcaaggccagaactcggatggcaaggagcccattatgcacggaggcaaccaaggcgagcgtttgatggaggaggaagctgatctgttcccagcccagttattgggaatgcttccgaacctggaatacatagccaaaatttcaggcggaacaatcgtaaaaggccgtctgcccatattgacccagtaa

SEQ ID NO: 25120 - DNA, 2973 bp, Escherichia coli
atgctgaaagcccttaacaagttatttggtgggcgaagtggagtgatcgagaccgcgccgagcgtcagagtgttgccgcttaaagacgtggaagatgaagaaatccctcgatacccaccttttgccaagggcctgccagtggccccactagacaagatactggcaacccaagctgaactgattgagaaagtgcggaactctctcggtttcactgtggacgacttcaaccggcttgttttgccggtgatccagcggtatgccgcgtttgttcacctgttgccagcttccgaatcacaccaccaccgtggcgctggtggtctgttccgacatgggcttgaagtggccttctgggcagctcaggcatctgagtcagttatcttttccatcgaggggacgcctcgtgaacgccgtgacaatgagccgcgttggagactggcgagctgtttctccgggctgctgcatgatgtgggtaaaccgctctcggatgtgtccattacggacaaagacgggtcaatcacatggaacccgtattcggagtcacttcatgactgggcacaccgtcacgaaatcgaccgttactttatccggtggcgcgacaagcgacacaaaagacatgagcaattctcgctgctggcggtggatcgaattattccggctgagactcgggagtttctgtccaagtctggcccgtccatcatggaagcgatgctggaagctatctcaggaaccagcgtcaatcagcctgtgaccaagctgatgcttcgcgctgaccaagagagcgtctcacgggaccttcgccagagtcgtctcgatgtggacgagttctcctatggtgtgcctgtcgagcggtacgtgttcgatgccatccgccgcctggttaaaaccggaaaatggaaggtcaatgagccaggcgcgaaagtctggcacctcaaccaaggtgtattcattgcctggaaacagcttggggacctttatgacttgatcagccacgacaagatccccggtattccacgagaccctgacacactggccgacattctcatcgaacgtggttttgctgtaccaaacacggtgcaggagaagggtgaacgtgcgtactaccgctactgggaagttttgcctgagatgctccaggaggcggcgggatcggtgaagatcttgatgctccgactcgaatcaaacgacctggtgtttacgactgagcctcctgcggctgttgctgcggaagttgttggtgatgttgaggacgctgagattgagttcgttgatcctgaggaagtcgatgacgaccaagaggaagatgtgtcagctctgaacgatgacatgttggccgcagagcaggaagcagagaaagctctagctggtcttggctttggtgatgcgatggagatgctgaaaagcacctcagatgctgtcgaggagaaaccagagcaaaaagatgctggatcaacggaatcatctaagcctgacgctggcaagaagggtaagccgcagagcaaaccgggcaaagcaaaaccgaagagtgatacagagaaacaaccccacaaaccagaggcaaaagaggatttgtcccctcaggacattgccaaaaacgcaccacctttggcaaacgacaatccgttacaagcactcaaggatgttgggggtggactgggggacatcgactttccgtttgacgcattcagcgcatcggcagagacagccagcactgacgcaacaaactcagaaatcccagatgtggcaatgcccggaaagcaagagaagcagccaaaacaggacttcgttccacaagaacaaaactccctgcagggcgatgactttccaatgttcggtagttctgatgaaccgccatcatgggcgattgagccgctccctatgctgactgacgcaccagaacaaacaacaccagcgccagcaatgccacctacggacaaacctaatctgcatgagaaagacgcaaagaccttactcgttgagatgttagccgggtacggagaagcatcggcgttgcttgaacaagcgatcatgcctgttttggaaggtaaaacgacgctgggcgaagtcctatgcctgatgaagggtcaagccgtcattttgtacccggatggcgctcggtcgctgggtgcgccgtcagaggttctctcgaagctgtcccacgccaacgcgattgttccagacccgattatgccaggtcgcaaagttcgtgatttcagcggagtgaaggcaattgtactggcggagcagctttcagatgcagtcgtagcggccattaaggatgccgaggcgtcaatggggggataccaggatgcctttgagctcgtctctccccctggcttggatgcaagcaagaataagtctgcaccgaaacaacaaagccgaaaaaaggcgcagcagcagaagcctgaggttaacgccggtaaaccctcgcctgaacaaaaggcgaaaggtaaggactcccagccacagcagaaggagaagaaggtcgatgttacttctccggttgaagagccgcagcgccagccggtccaagaaaaacagaacgtggctcgccttcctaagcgggaggttcaaccagtggctcctgagcccaaagttgagcgtgagaaggaattgggacacgtcgaggtgcgagaaagggaagagccagaggttagggagtttgagccgcctaaggcgaaaacaaacccgaaagacatcaacgcggaagatttcttgccgtctggtgttacgcctcagaaagcactccagatgctcaaggacatgatccaaaaacgctcgggcagatggctcgtgacacctgtcctggaagaggatggctgcttagtaaccagtgacaaagccttcgacatgattgccggtgaaaacatcggcatcagcaaacacatcctctgcgggatgctgagccgggcacagagacggcctttgctcaagaaacgtcagggaaaactgtatttagaggtaaatgaaacatga

SEQ ID NO: 25121 - DNA, 618 bp, Escherichia coli
atgagacaactgatagcaattctgggagtggcaattctggccgggtgtgcctctaacgcccccgagcaaaagcctcagccccagactgcccctgccgaaaatgacaaacctgcccgagttagccgggaactgtcgatggcatgggacaacatggggcgcggtggtgctgcattacgtcaacctggttatatccatgtgctgggcgacggtaatgtcagcgcaacgatgaacaaggtcaaagatgactccgctggttcagataaaactccagcagggatcaaacagcacggggatgtcaacgaagccatcaataccttcaagtccatgaataaaggcaaaggctactcgctgtacgagttgtcacgctgggaacgctattgcgatggtggcaaaggtatggacgagcacgattggcgctttgtggaagccgagggaaccacaaacatccccaaggacgttgtaaccggctgcataccacctacccacacctataaagattatctgaatgcctggacgcacttttgcaccagtcaggctgtaactgacgcagatcgccgcattgtgcgcgagtccgtgcgtccctattcagtggtgaacccatgcaaagctctgaaataa

SEQ ID NO: 25122 - DNA, 2193 bp, Escherichia coli
atggacctttatatctgcgagaagccttctcaggcaaaagatttggctggcgtaatgaaggcctcccaacgaggtgatggatttctccatgatggaggaaaccgcgttattacgtgggcgttcggccacctgctggaattgtatatgccagacgattatgacgaacgctacaagtcatggtcactggagaccctccctattgcaccagagtcatggcggtacaacgttcgcaagagtgcgttcaaacagtacaaaattgttgagggactggtcaaaaaggcgagcaccatctacatctcaacggactacgaccgagaaggtgaggctatcgcccgttcgcttctggatcgattccgctactctggccctattcgccgagtttgtttgacggctctcgatgagtcaagcatcaagaaagcgctgaacaacgtaaaggatggcaaggatacggtctcactctactacgccgcattggcacggcaacgcgctgactggttggtaggcatgaacgtgagccgcctctacacagtgctggcccgagatgtcggcttcaaccacactcttcacgttggcagggttatcaccccaaccgtcgctcttgtttgtcaacgggaccgagagatcgccggtttcaccccctcaccatactggactctgggtgtgaacgtgtccgtacagaatggacagtttgccgcccaatggataccaccagaagagtgcagtgacgagcaaggccggtgcgtcaataaggcctatgccgagcaggtagcctcccaggtcaatggtgccaatgctgttatcagcaaagcagaaaccaaaccaggtaaagagtcagcccccctccccttcgatctaacgtcgctgcaacaatacgcgagcaaacgatggggatacacagctcagcaggtactggatgcagctcaagctctgtacgagacgcacaaagcgaccacctaccctcgtactgacagtcgttatctacccgagagccaaaaggaagacattccggacattctccaggcgctcattttgtccgatcagaacgtctctgggctggtggctggcgcagatcctcatcgcaaggccagggtattcaatgacgccaaagtgaccgcgcaccacgcgatcattccaacaccggccagaacagacatcagtgccatgtctgagatcgagttcaatctttacgacgccatccgtcgtttctacatcgcgcagttctacagcgagttcgagttcaccaaaacctccatcgaggtgcagtgtgggcgtcacctctttgcgtccgctggtaagacacctaccaaacaaggctggaaggttttgtttgcttctgatagtgaaagcagtcccaaggacgagggggaagacaccgacgcgccggttgaacaagagaagctccccagggttagccagggcgaacctgccttgctgaatggggccgagctggcaaacaaaatgacgcggccagcaccgcacttcaccgaagccacattgcttgccgcgatggagaacattgcccggttcgtgactgaggagaagttcaaacaaatcctcaaagacacagccggtttaggcactccagcaacacgcgcaagcatcatccagggcgctgttgataaaggctacttcaagcgtcagaaaaaggtactgcttgcaactgataaggctcatgcgcttatagcagtgcttccaccagccatcaaatcacccggcatgactgcggcttgggagcaggagcttgagaaagttgcctccggctccgggaacatgtctgtcttcatgaagcagatttccacctggatctgccaaatggttgagcagctcaaagtggccgcaccggttctgaccaaagaaggtggcgcgatggctaaagccttcgagggcgcgaagcctccttcacacgaatgcttcaactgcggtggagagatgcaccggatcaaagggaagaacggttttttctggggctgccagaacgaggcttgcaagaagacgttcccagacaaccgagggaaacccgagaaacgtatcgcggcggaggattgtccagactgcccagattgcggtagcccgatgcgtctcaggaaaggaaaagcccctggcaagaaacgagcctctaagttctggggctgcacagcgtatcccgattgcaaaggcactatgcccttcaaaaagtcggactttatggattga

SEQ ID NO: 25123 - DNA, 489 bp, Escherichia coli
atgtttggaaaaatcattttaactgcgatgctcacaaccagctctgccactgccgaagatgccgggaagaacatcgcctcaggcttggcaactgcatctacccgccaaataggtcaggccatcatgccaactctagctatcggctcggccattgcaaaaagcgcaggaaaaggcatggtgttaggtttcgctgagacatctgccagctatatttcccacgatgacctgagcgccactcgaagctatcaaaaccctgaggctgttgatatggcaaaaggcctggggaccttgaaagacgtccctgatttcctctacgtcattacagacgtaaatgccaacatggctgacaaatgcaagcgcgtctgggagcctcaatcactggctttaagccaattgattgttgagctggtggcactgcgtaagacgaacaacaaaggtagctacgaacaagcgctatcccacctcgattgttcaatattcacaaactaa

SEQ ID NO: 25124 - DNA, 300 bp, Escherichia coli
atgagctatcaggtggtgattatgaaaaagagaatacttcatctgcccgtaaaaaagatttacttcgatcagatcaaatctggagaaaaaccagatgaatatcgcctcgtcacagactactggataaaaagactagaggggcgcgagtatgatgaagtccatgttaagtgtggctacccaaaggctggagatatgtccaggatagagattcgtccttggcgtggcttctcaaggaacgtcataacgcacccgcactttggagattatccggttgaagtattcgccatccatgtgaattga

SEQ ID NO: 25125 - DNA, 618 bp, Escherichia coli
atgttttttgataacaaagtagaatctcactcgctcgtaatgggagccagcgggaagggcaaatcggtcttgtccgaacaagtgcggaaaaacgcgaggctgcgcggtgatctgctggtggatactgagatgtaccgtgaaggtcgagggttgaaaccatacgagcatgagtacgctcgtcgcttagttctggggctaagtggaccgttgccgcgtgaactgcgtgggaagccggtgacggttatctctgatgtgtccagaccaaaaaaggtaaagcgtcagccaaagcaatttgttaagaccgtaaatggcgtcacccttgaacgccaattggtggcagatgcaagagaccagttggaaatgcaaacaggcgtctggctcaaacaacctcagctcatcgagctgatggaagagtcgggcatagacgaaactctagccgattttggtgaggctgaaacacagatccgagaaatgctggcggatgcgttggcgatgaaactggtagggcgctcatggcccaagtgtggagccctctataacgcggcagaaaagtccgacgttaacttttcctccgagcttgatgctgcggcaaaagaagctggatacatggttcgctga

SEQ ID NO: 25126 - DNA, 657 bp, Escherichia coli
atggcagtcatttactacggcgagggaacccatgacgccggtttcgtcgggttccgtgtcgcacgaacagttggggtggcggatgattaccggcaggaatacttctccttgagagagtattcctacgcaacagctcaccggctggcctacagcttggaccgaaagtgggaagctgaggcagaagaggtgaagcgtcagaataagacttgtaagcggcgacgcaactccgggccaaatatcattgctgaggggctgagggcttatatcagtatcgagaaccggagccggatgggggtgaagagaacctacttcgcaccttgttttctcgtcacaaagccaggctacggcaatggggatattgttttcaggatttccactcatggctacgcagaagcctacgaaaaggcggtggaaaaatattgtgagatccatgatttgacggatgagcagtatgttgagttgcttgaccgtatgccgagtacagaggtgttcactggatacctgctgaatgctcttttaatacgcggtcatcgcgccacaaaagctgaaatactgagtaagctgggggctgcgaagaatgaagatgacatcaccaatagcaaagggaaaagcggccacaacagagtgcgttgcccagagtatcggtgggcgcaataa

SEQ ID NO: 25127 - DNA, 1428 bp, Escherichia coli
atgttaccgatcgtctccccctccgtagtaaccaaacaacttgcgttcaatcgagtaggcgataaacgcaaggttagggtttcgtccaactttttggatgttatggggttcaagccaggtatgggcatcgccgttgagccaggggaggggatgggcggtttttcggtgatcccagcgaccgatgaactacagacacaccaggtttatcagcgccggtatcaaccaaagagtcgctccaacaacccgctggaaaccgttattgagttttctggacaagggctcatagataagtgcttccctcgctatacagagcgtttccacgtcgaaatgcgaaaaggtcgagtagtcttcactcccgtcgcaaacagagcctttgccattgctgatcggttcagaaaaaccagccctttccgtgcctttgtggcattgactggcggggtagacattcatgttatggaatcgcttggctggaaggctgagattgttttggaacatcgtccagttgaagccagagacagagcatccgggcggaacctgagtgaagtacatgcgctcaatacgctggtgaacagctccccgcgtatcctgctgaatgaagacattcatcacctggagctggatcgccttggagccttgctggcggagtgcccaccaattggtttggcccattactcgttggggtgtgatgaccactcaaacgccaaaagtccaagggacaaagagcgttctcttgaagatctctccaccatgctcgacatggtttacccggcactaaaacagatcgaggtcgtgaaccctgccgtcgtgctggtggaaaacgtcccgaacttcaaagcatccggagccggggcgatgatgggaacgacactgcggcggatggggtacttcctcactgagatggtcttgaacggtctggatttcggcgcgtaccaggggcgagaacgctattacatggtggcgtcggtcttccctgggttcgttccaccgaaacctgagcagagagctggtggacgattgtggccggtgatcgagaagcacctcggggattgtgcagacgtcacagcgttgaagtcaattcaggccagagagtcaacttctcgcaggatgcctgcgttcttgacgagagaaagcaccagttgcccgaccatcctcaagtctcaggatcgtggggtaaaggatgcagtgtacatccaagacggtggccgcatttacaagccatcggtcgatctggttcaggagttgatgtcgatacctgatagctttgatatttcgtggatggcaaaagaacaagcgacagaaacacttgggcagagtgtggattacagattgcattcagcggtcatggccgcagttcgggatcacctgaatgtgaattgcggtcgccataccgtggtgcagcacggtatcagaagtaaggaaggtaaataa

SEQ ID NO: 25128 - DNA, 501 bp, Escherichia coli
atgaaagcccaggcatacccaccatcagtcattcgtaaaggcgctgtgttgtacgcagccctttattacatctctgatgatgataaagcaaaggtcgaggttacagagtggatagttcgctctattcagaaacgacgcaactcaaccagcgatcaacgctatgtcaatcttgcccaaaagttagatgggattacgtgggggaaaaggtcacggaagaatggggactttggttggttgccatctataccgagctggtgcttgaagcagttccgggaaggtggcgaattgccttttggcgtttatacgacgcgactggccgctctcaagtttgcgaaagtcagcttgcaggaagaggtccaatattgcgaggccgagctgaaaaaggctcagacagaagaggatactcaggaactccaagaggagctggcggagaaccagagacttctgaaagctgctggagcaatggtgaagcgcgagcaaaacaagaagaaaagaggttga

SEQ ID NO: 25129 - DNA, 312 bp, Escherichia coli
gtgacagaacaaaccaataagaaattgatgctggatgagtctccagatatgcccctgcaattcaagtggagaaagtttggtggtgcgatttttactgccacgcaaacaatggagcacgtcaaggaaggacgtaagctcgggccgactccagcagggatgctacctcaagaagtgtggctgaaccgcctgatcgctatggaagaaaccctgccacgagggaagttttttgacagattccgccgccgcgacaaaaacgagcagtatgacttggccgccgatcatctccgtcttgtcggaaagaaaaagcgatag

SEQ ID NO: 25130 - DNA, 507 bp, Escherichia coli
atgattgacctgacatgccgcctttgtgctggttccggtgtttatgacttttccccttccaaagaaacctgcggtatgtgccaagggcatgggaaatttgttgacgccaaagcaatgctggtggctgccatcgagctggcaaagaagcaacgcgagcctgtcattgaagtggtaatggggttggtgctccagggtgtggatgttagagggaaggagcctggagagcggttcaaggctgctcaggcctttaacgccccagggcacaacctattacgatacgggtgggatgcttgggagctctatgccctccatgagggtgtaagtccagaacttgcatcgcttggccgaagtgtgatgcgcgagtggcatagccattcatggggccggttcagtggagaggtaggctttaacgccgccgagatcatgatcaaacaggccaaagacaacccagaaaaagcagaagagcgctgggcgttcctgcttagtgaagaatggatggtggagtaa

SEQ ID NO: 25131 - DNA, 675 bp, Escherichia coli
atggacgagaacaagctcaacattgaaacggtcgatgggcacaacgagctggtagtcagctttttgtccagaatggtaagcctgagtgacgaggaaaagcagacagtattgtcctgccttccggacaccggcaaacaaacaatcacccagctctatgaggcgctgcgttctcaagggcaccaggatcttgcagagaaagtcgaaccatacctccagcagggggtgtttgggccgatcttcgataacgccaagtccaaggtgttcgttcgggacgaagcgccttttttcctcatggatgaaaatcctttgaactgggatgacgctaaagcattcaatcgcctacgtatgagtacgacctgtgttcttggccgtggcggctggactatcggtgagcgctttgatgaccgctttgataccgaggtgggcggaacacagcttatcgtcactcagtcactcaacgaaaaaggtgagattgaaggaggacttcctacctcgatgtcgctgaatgactttgctgagttccctaaacagccaaggcctcctcaaatagtcgattaccaggaagacaagcgatacacgcttgaggaagcggaagctatccctgagctcgcaccagtggttcagcgtctgaaagagcgcatcgaagagtatgaggagagaagagcccatgattga

SEQ ID NO: 25132 - DNA, 282 bp, Escherichia coli
atgagtaagcgatatgcggtagtgccgcatccgaaactgaaacgagagtacaaaggtcggctggtcagaactactcgggtactaaaaaacggctgggggttgatccctctaggggctgtggcaacggtcacgcatcagtctcccaagggatcagaactgacctttgaaccatgcgactgctgcggcctgaaagccattatcagtcatgtaagcatggactccattgaatttatcgaaccgattactgaggaagaagatggacgagaacaagctcaacattga

SEQ ID NO: 25133 - DNA, 378 bp, Escherichia coli
atgccaaagcaagcaaatcatctccgtttgaagaaaccttgcgccaactgtccattccggaaggagggcgctatcgagctggcccctgggcgattagaaggcatcatcaacgacatcgttgaaaacgacatgacgacgtttcattgccacaagaccgtgcactcaaagtcaggtggtgaatgggatgaagagggtaactatgcaccttcgggacaagagtcgatgtgtgccggtgctgcggcttacttgatgaaaataggcaggccgacagtggctatgcgaattgcctttgcgtttggtgatgcaaaggtgtccgactgggacgaagctcaagagctggttgtcgagcctttggtacaaggggaccgaaatgagtaa

SEQ ID NO: 25134 - DNA, 144 bp, Escherichia coli
atgctgcaaggcaatactaacacgaataagcgcatcccgctcgcggcgttcatgaaatggccgctggcgaaacgtcaggacttcatcgaccgggaaatgtccggttgccccgactttatcaagacgtctttgcttcggcattaa

SEQ ID NO: 25135 - DNA, 636 bp, Escherichia coli
atgtcaccagaaacacagcaacttacatccaaggctttatctctcatcgagcagtcccgatacagaatgggcacatctcggtttgttgaggcctttattgaccagtgggcatacttgcagactggcctatacccagccaaggaggagatcccggaagaacttcagccggtcgccttcgagctctctcacgtcctgtctgccgccattaagcgcgaccccaccagcgatgttttgggttacgtcctaagcatgtctggcttccacaagaagggcaccaattacttccccactcctccagagattggccgcttgatgtcactcattgttggctcacagtcttcggcagacttttatgagccctgctgtggttctggcatcaacgccattcactggatggaaaacctgatcgagaaccacggtcccgaagcattgagagaagcctcaatctacctggaagacatcgatccgttgatggtgaagtgctgcatgatccagctattccattatttcgagtcccgcaataccactcccaaaacgctgagtatcgtcggcatagacacccttagcagacgaaccaagaacatcgcctactacgccgaaaaacctccagcaaccgccgctaccgtggcagcataa

SEQ ID NO: 25136 - DNA, 273 bp, Escherichia coli
atgaagatctcacaggacatgaaaagaaaatttgctttggtgaatgccctgtctaaaacggagaagccaagtctccaagaccttcacaaggcaacaaatattcctgaatcaacgatcaagagacagttgtctgccctgcgtgatgagttcggaatgaatatcttgttcgtcagggagtctaccggcgaacgaggtgccaccggctactacatgctgacagactgggggatcttagacaggtcttcgttcttgaaccggtacggaaaactgtaa

SEQ ID NO: 25137 - DNA, 1182 bp, Escherichia coli
atggcattgaacaatttaaaaggcctgtccgaacttgctaaagccgccaaaggcaagaaaggcaaagaggttcttaccgtacctgttgacgacgttgtatccaaggtccaggttcgtaagcgcttccgtaacattgaagagctggcggcaaccttgctgaccgaagggcagcagtctccgatcatcgtgttcccgaagaacgaagaaggcaagttcgtcatccaaaaaggggagcggcgttggagagcgtgtaaacacgctggtatcgagaccattgacttggtggtgaatgataaggtccagaacaacttggacgagactgctggtgagctgatcgaaaacatccagcgggatgacttgactccggtagagattgccgaggcgttaaacctgtttattgaagaaggttggaagcaaaaggatattgctgatcggctcggtaagaatatcactttcgtatctacgcatctgtcgttgctcaagctacctgactgtgtgcgtgagttatacgataatgaagtatgttctgatacagagaccttgaataaccttcgtctcttgttcgatctgaatgaagaaagatgtcgcgccgtctgcgcggtggctatgtctgacgggattactcgtaaacaaagccgtgagctgctgaatgatgccaaacgtatcaaagacgaaatggaaaaaggcccactgactggctcccaccagaatgatgagcttggcgctggcaacaccgacgagcaatccctcaactcgggtggggatggtacgtcggaacaaaccgggaatgacgacctgaaccttgcccaggaggaactggaagggggtaaaaattccaatggtcaggacgatgatgacgaagaccctttgcgtgatgaagagggtgagcacaaagatcctgtcaagcagccagataacagcggcaaggacaaagatgaagaaggcggtgatgctcttcctcctctgccgaaggacaaggaatggaagaacgtccgggctgacagtttgatttttgctgtcaacgttaacctggatggcgagaccaaacgtggagtcatcatgaccgaccgtgttgctctggttccgtctactgtctgggttaaaacgctcgatggcgaaggcaaggaaaagcatgttcatgtgcctgtgtcagacattgaactcctgagtgtcgaaggctaa

SEQ ID NO: 25138 - DNA, 786 bp, Escherichia coli
atggcaaaagtaatcagcttcgccaaccagaaaggcggagtgggtaagagtaccctctgtatccagcaggccttttatctggcgttacagaagaaaaagaaagtgctggtcttggatatggatggtcaggggaacacgtcctctcgactggcccccagacgagagcttgaggatggtgactacgagcccatcctcacaggaaccaaaaccgcagagctgttcgcttacgagctggacggcattgaggtcatgcactgcccttgcggtgcagacctcattcatacgccgaaaaacgacccggatctgtttgagatggaggctgtgcctcttgaccaggccatgaatccggctcgccatttggctgagctgtttgagaactacgactacgtgctgattgattgtccgcctagcctcggcagaaagctggtggcagcgttggtgatgtctacccatgtggcatgtccagtaaagctctctggcttcgctgtggacggcgtagaaggtctcctgaacacgattattggtgtgcgcgaggcgtacaaccaagatttggagatcctgggcatcgtgatcaacgacatggaccgctctgtcaatcacgacaaagccctcaagtcgctggagaacacagttccggatctgttgtttgagaacaaaattatgcaccggcctccgctcgatacggcgacgactgatggcatccctgtctgggagcttcgctatggacatgtcgcggccaaagaagttgaggcggtgttggaagaactattagagaaggtgggctaa

SEQ ID NO: 25139 - DNA, 312 bp, Escherichia coli
atggacgctaaagaactgaaccacatgatagctgaggcctacagccgggatttgcaaaagcctgagctggtatcgttcaaagaggtgagtcgctgggggcgtaagtacggtttccccgtcgtatgcactctggccgatgaaagtgaagaaaagcagatccactgggctgccagtttgctcattcaagtagccggtacttggccgcgagaagatatgccggaattgctcacaccggaacggggctccgcgctgttcaacgatgcgatgcagttattggcgaatgggcttggagcagcaaatcaattgcgctga

SEQ ID NO: 25140 - DNA, 135 bp, Escherichia coli
atgccatacatatgttctatcattttggtgttgaactcgtttgatgtccgaattggtaaagaagatattttgtttaaaaaaggaagtgctgttctcattgattacaatttaaaagatttttttcatcaaatatag

SEQ ID NO: 25141 - DNA, 708 bp, Escherichia coli
atgatcgtaaccatcaaaaagaaactcgaagaaacgttgatcccggagcacttgcgagctgccgggattattcctgtcctggcctatgacgaagacgatcatgtcttccttatggatgatcacagtgcaggctttggtttcatgtgtgagcccctgtgtggtgccgatgaaaaagttcaggagcgaatgaacggtttcctgaatcaggagttcccgtcgaagactacgctccagtttgtcctgttccgctccccggacatcaatcaggagatgtaccggatgatgggtttgcgtgatggcttccgtcacgagctgctgacatctgttatcaaggaacggattaacttcctccagcaccacacgacagatcgcatatttgccaagaccaacaaaggtatctacgacaatggcttgatccaagacctcaagctgttcgttacgtgcaaagtccccatcaagaacaataacccgactgaaagcgaactccagcagctcgcacagcttcgcacgaaggtcgaatcatcgcttcaaaccgttggtctgcgtcctcgcacaatgacggcggtgaactacatccggatcatgagcaccatcctgaattgggggccagatgcttcatggcgacatgactctgtggattgggagatggataagcccatctgcgagcaaatcttcgattacggcaccgacgtggaagtcagctcatag

SEQ ID NO: 25142 - DNA, 708 bp, Escherichia coli
atgcggacaaaattacttggggcgctgatggtgttcgggattattaccggcacggctcatgcgtcatcgaaattggaaatcaccgatcccagagcggcgaagatagaggacattgtagagctacccatcaaaggggttcgagccgtccaaagtgatgggcagatcatgttcctctctgaaaacggacgatttgttatttcaggacaaatctacgacctgtggagcaagaagcccctcaacacgatgtcccaaatgagggatgtagcggagcgtatccacttcaagagcatgggcatggatgtggacacgctgaacactgtgtcgatggggcgtggtgacaaagaggtggtggtctttgttgatcctaggtgcgcggtttgccatcagctcatgggtgatgccaaatcgctggtggatgattacacctttaaatttatcgtgattccagctctgggtgctgagtccaaccgcctggcaaaaaacttgtactgcgcgaaagacaaaacccacgcgcttgatgcgctgatgaacaacaccctgggttcccttccttcaaaagaaacctgcgaccccggccaatacgaccaaacgctgctgacagctcatttcattgggattgagggcgttccgttcgttgttgctccggatggtcgtgtcagcaaaggacgtccgaagaacctgaaatcatggttggagagtgctgaatga

SEQ ID NO: 25143 - DNA, 5487 bp, Escherichia coli
atgatcaatttcaagcctaaaattccggcgatgcttggggctctggcggttcttaccgctggtgctgctcatgcagagctgctggaatacacctttaaggctccagatggtacgcaacggtctctgactccgaatgccaactatgccaacccaacgggcaatatctcgtttgccttgagtgccggtatcgaccgaaaggtaaagatttcggtgcttcggtcggatggaacagtggtttcgacagcgaccagccaccttcttggggctactgatcgcatcacagtgggtggaaaatcctactatggtgcggaacttcaactaccagctccagttggtggggcatacactatcagggcggaaattcttgcctctgatggttctacagtacagacggatgaataccctcttactgtcgatgtgacgccgccaacctactcttcgcttgccccggtttatagtaactatgggcaggttactagcggtgatgtttggaaactgggtctaggtggctctgaggataatgcctttttgctgtcaggaatctctgatgagtcacccatcaaaggcgtcaaagcaaagctgtatcgtcaagacggttcactctacaaagatgtatccgtgaactacgatgacgctaacggacaagctagacagtctttccaatctggctttttcccagcctctgacttggatgaagtgtttacacttcagtttgagataagcgatagcgctggaaatagctatctttcacctcgtcaaaaagtgatgtttgatagcataaccaatgctccgtctgcaccttttggtgtttatgacccttcaagtacaaacaacttaggccctggattaaccggatttgttgcttacactgagggcatgacagttaaaactaacccaatcaagttagcttggcgtgttccgcgtgataactggcatgagtatagagaaggtgggataaatatgaccaatgccttgggagagatgtccaaggtaggagaagatgccagctatgtttatctcgtcacaaccgcaccttatggcaataccgacggcaattattggcgttgggtgaacttcggccagtgggggggaggcggtattgcttataacctcacactctctccatcagcgcctaaaagtcccagacttttgggtgtggactacaattacagtgatataggatggtctagtttttaccgctactgggtgaacaattctgttcttcctgtcactgttagtagtatccgtgtcaaagttgaaccaaggccttacgttcaaactgccgttcacaggggaagctgtgaaattcctgttggtcaagatagctgcgtgattgcaaatagcttcacaatggctaaaggcacaacagggtacgtccacgataatgcgacagttttcaatccggataaatctcttcgctcgaatcctctttgggcagaggttaactggaacgatcagcactaccctcagctaagtcagcagttcgatcaaaatagcaaggtatttaccttattcgttaaccagccaggacgaggcgcttactttgataggctgcgtctgcgaagtgcatggattgaagatagcaaaggcaacaagctgtctccaactggtgggttaatagccaacaactgggagaactacacttaccagtgggatcttaaaactctccctgaggggcaatacagtcttgttgccgcagcagaggagatgcacgggcctttaacgcgacaaccaatgttccagataacgtctgatagaacgccaccaaccatgacactcagtgtggcagatggagcagctatccagactctagatgatgttgttattaccttggctgatgctatcgacccttcacctaaattgacctctattgcccttgtaggggggcctgccaatgacaaggtgcagttgtcttggcgtgaggagtcgaaaggtcgattccgccttgagtacccggtaatgttcccttctttgaaggaaggggaatcttacacgctgactgtttccggtgaggatgcacaaggcaatgcggttcaaaaggctgttggcttcgagtacaaacctcgtcaggtaatgctggcggatgggatggatggcaaggtcatggtccccgctgtcactcatgaatttgttcatgcagatggcaaacggatcatcgaaaccaagccgctgacgctcagtgatggtgctgtcgtgacaggttcatacgacgtgtttgcgaccctacgttctgatgcgaaagtaccgctggtggttaatggggtgcgtatcgagccaggccagacaatggggatcatgagccaacatgatttcggtgcgtcaggtggtcgtttgagcattccggttaaacctgctgttcctgatgtggtcggctcttccagccttcttgtcatgacctccgcgccgaactcacccatcttggttgtggacatcaatacctggaaagggacggctaagctctctgctgaatcatggacaattcgccaggtcattgacccagtgaaaatctatgccctgccagagtcgggtgtgccttgccggttcaccacgaaagaggatgtggctatggccgcagacccaattcgtgacccggtgtgtttgctccagtgggacagaactccagatgaggctgaacaaactacgcaggacaacaacgggatgaaagttgctgggctggtggggcaggctgtgagcattggtgaacaacctgtcgaatacagcctgtacctgttcagtggtgacggttccaaggtaaaagttgggtctggctctcagaacctgacggtaactactgcctatggctctgttggctacaccccgattgatgacattgctcaggtgaatcgcgtcattgaagattttgatgtgaacttcaagcagagcaaggggccagactgttctataaccctcagcgcagaccgtgcgaaaaaagaggccgcgaacaaggctgttggtagtgcaagccgtgcctgtctgttcgagtggcagcagatccccgatggattggtccaagacccgttatcggaatcaccttcgctctctggttcattggcctccaacggcgttcatccactggggtggcgggtaagtattttcacccgtaacggcactagggtgacgttgaacgacgagactttcaatgtcgaagcggttgacccaccagctccgaccgttgaactagcctccgactacaacttcaaagacaacatctacttggtgccgatgacaggtaactacctgggtgatgccattatcaactctgaacgagctgatctggatattgccatatcgcgcaactcggatgttcttgagtctgagaccttcactccgggatggggtgccaccaataaggtgtatcgccgcatcaataccgatgagcgagcgttgtgggaggagaccacctacaaggtgaacgcggcctacaacaaggtgcctgatgtgaagactgaggttgtctaccgggctatctctgcaccttctgacagtatccgtcctatcgttgaagttaaaggtgataccgcgattgacacccaggcattgccggttagggttctcatccgtgatcagtacaaacctgatggtgactatgacgctaacacgatgggggtgtggaaagtacgcctgatccagcaaaaggcctacaacgagacggttgcgctcactgattatgcggaagcatcgaacggtgaagctcagttctcagtagacctgtctggtgtggatacttcctccgtccgtatcgctgctgaggctgttctggaaagccctgttgagggttacaaccgcacagagttgtctatcagacctgccttcttgacagtgcttcgcggtggtgccatcggtgctggcgtggaggctcgcaagttgtctggtgaagctccgttcactgctgtgttcaagctatctttggacgaccgtcaggatctccgggctaccggccaggttgtgtgggaaaccagtaaggacgacggtaaaacctgggagcagttcatcccagaagatcgatacaagtatcagcttgtgaagaccttcgacaagggggagtaccaggttcgggccaaggtggtgaacgtcaactcaggtgcggaaaagtacaccgaagcggtcagtgttgtcgcttacgacaaacctgatattgctgttatcggcccgaccacgttgtttgtcggaagtgaaggcaagtacacagcgaacctgacgttgaacgatgagccaatctccggtggcaatgccattgttgagtggtctactgacggtggcaaaacctacgcgcagacaggggatagcatcacgctttcgagcgatgaagaaacccgataccgcctgtgggctcgtgtgcgctctgccacggcaccggctgatgacggctatgcctatgaagttgcgaaaacggcggttgacttccgagcagtgaaggcacctcgtccttacgtgacagggccgcgagttattgagaccggtaagaagtatgtgttcaaagccgaaaccagcctgccttaccgtgggatggacgtgaagctgaacgggttcttcacgctgcctgatggctcgattgtgcagggtgatactgctgagtacgaaccctctgacactgacctcaatcaggctactgtagaaacgaagtacaccacctggatcgaaggataccgagatcagggtgcagaggcttcgcatagcctacgctcccgcgtttggcagtatgtatggccgagcttcggaatgcaggttaggaagaacgcagacgtggctcctgcgacgatcaccgcgtcagtgcggccaattgccttcaacggcaagctggaagagccgacctacgagtgggagttgccggaaggcgctgtgattcaggatcagcggcaggatattgtccggtcctttgtgatcaatgagccgggtgattacaacatcaaggtcactgtccgtgatgctcgcggccatgagaccgtgatcgagcaaccgctcaagatcggccaggcagcgccctatgccattgacctgcaatactctggctcgaacaaatacgagcgtgagcctctggatgtgctgttgcgaccgtacatttctggcggccacccacgcgaccgtatttcgactcgtgtttattcggtagatggtacaccgttggaaagcagtggttactacggcagagcaactctgggcgctggtgagcacagcatcaagctgaaaataacctcagaaatggggcatgaagctgagggcgaggtgaacatcaatgttgcagagaacaagttgcctgcatgtagcctgagctcacgagagaccgttgggtcgtggatcgtctatgcgaactgcgaagataccgatggccgcatgaagtcctacgaatggaccattgccggtgagttgcagagcatcagctctgatcgagtgactatcagcaagggcacctatgaaacgatgccgaccatctctctggttggggtcgatgactctgggggcaaatccgaagctgttaccatgaactaa

SEQ ID NO: 25144 - DNA, 222 bp, Escherichia coli
atgggtgcatgctgtctgtctgctgattgcagtaaaattagtgggatgacgccacaactcataaaaaaaggtttaattggcggactggagtgcgtctcgctaataaaactgtataaatccgcgatcaccagatgcggtttccattgcaaaatatgctcttttgctaacaggagattattgattcctgataccagaaatgaggagctgaacctgccagaatga

SEQ ID NO: 25145 - DNA, 225 bp, Escherichia coli
atgcctcatgtggcggccaggacggccagccgggatcgggatactggtcgttaccagagccaccgacccgagcaaacccttctctatcagatcgttgacgagtattacccggcattcgctgcgcttatggcagagcagggaaaggaattgccgggctatgtgcaacgggaatttgaagaatttctccaaagcccgcgacgcagcgccggcaggcagagcaagtag

SEQ ID NO: 25146 - DNA, 306 bp, Escherichia coli
atgcggcgcactaaccatcgaaacctcgtgaatgtcggtatcctgtctggcaggataccgctcatttcccttgttcagttcatcgccgtcgccgagcatctgaattttcggcatgcggccaaggcacttggtatcagccagtcgagcgtcagcgcgcgtgtgaaagcgctggaggataaccttggtgtcctgctatttgagcgccatgcgcggggcgttcggctaacagacgcaggcaggcacttcatggagcgtgtcacggcgggtgtcgatcaactcgatcacgcagtgaagaccgcggagtga

SEQ ID NO: 25147 - DNA, 1215 bp, Escherichia coli
atgaccaccacacgccccgcgtgggcctatacgctgccggcagcactgctgctgatggctcctttcgacatcctcgcttcactggcgatggatatttatctccctgtcgttccagcgatgcccggcatcctgaacacgacgcccgctatgatccaactcacgttgagcctctatatggtgatgctcggcgtgggccaggtgatttttggtccgctctcagacagaatcgggcgacggccaattctacttgcgggcgcaacggctttcgtcattgcgtctctgggagcagcttggtcttcaactgcaccggcctttgtcgctttccgtctacttcaagcagtgggcgcgtcggccatgctggtggcgacgttcgcgacggttcgcgacgtttatgccaaccgtcctgagggtgtcgtcatctacggccttttcagttcgatgctggcgttcgtgcctgcgctcggccctatcgccggagcattgatcggcgagttcttgggatggcaggcgatattcattactttggctatactggcgatgctcgcactcctaaatgcgggtttcaggtggcacgaaacccgccctctggatcaagtcaagacgcgccgatctgtcttgccgatcttcgcgagtccggctttttgggtttacactgtcggctttagcgccggtatgggcaccttcttcgtcttcttctcgacggctccccgtgtgctcataggccaagcggaatattccgagatcggattcagctttgccttcgccactgtcgcgcttgtaatgatcgtgacaacccgtttcgcgaagtcctttgtcgccagatggggcatcgcaggatgcgtggcgcgtgggatggcgttgcttgtttgcggagcggtcctgttggggatcggcgaactttacggctcgccgtcattcctcaccttcatcctaccgatgtgggttgtcgcggtcggtattgtcttcacggtgtccgttaccgcgaacggcgctttggcagagttcgacgacatcgcgggatcagcggtcgcgttctacttctgcgttcaaagcctgatagtcagcattgtcgggacattggcggtggcacttttaaacggtgacacagcgtggcccgtgatctgttacgccacggcgatggcggtactggtttcgttggggctggtgctccttcggctccgtggggctgccaccgagaagtcgccagtcgtctaa

SEQ ID NO: 25148 - DNA, 822 bp, Escherichia coli
gtgggaaagaggagggtaaattttcagcgttgctggctccccgtcagccggattgggttgcatcgcaggggtgtcgaaagagtcaactgcggtccaaagctgttggacttgggtgaaaagggcgtttattcttcctatacgtgccgcgttccaggcggcgactatgagggctatgtcgatgcccatgtgcgccggctggaggcgctacgccgggccggtatcgtcgagcggatcgacgccgaccaatggcgcatccccgatgatctggtcagccgtgccgccgcccatgacgccggccgagacagtcaggccagcgttcgcgtcctttccccggtcgatctgaacaaacagatcggatcggacggcgcgacctggctggaccggcggctgatccacggcgagacggccgaccttgcgccaaccggcttcgggcaacaagtccgcgaagccatggaccagcgccgcgagcaccatatcgaacagggcgacgccacccgcagccgggacagccgcgtcttctaccggcgcaaccttctcgccatcctgcgggagcgcgaggtagccggcgtcggatcggatatggctttgagtaagggcctgccgttccgcgccgccacggacggcgagagcgtcagcggcaagtttaccggaaccgtgcatctatcgagcggcaagttcgccgtggtcgagaaatcccatgagttcacccttgtcccgtggcggccgatcatcgaccgccaactcggccgcgaggttatgggcatcgtgcagggcgggtcggtgtcgtggcagttagggcggcagagggggctggaacgctga

SEQ ID NO: 25149 - DNA, 1494 bp, Escherichia coli; identical to SEQ ID NO: 13713

SEQ ID NO: 25150 - DNA, 699 bp, Escherichia coli; identical to SEQ ID NO: 10341

SEQ ID NO: 25151 - DNA, 2973 bp, Escherichia coli
ttgcaacagtgccgattcaccggtgaaccggatgagcttcagctggcacgatattttcaccttgatgaagcagacaaggaatttatcggaaaaagcagaggtgatcacaaccgtctgggcattgccctgcaaattggatgtgtccgttttctgggcaccttcctcaccgatatgaatcatattccttccggcgtccggcattttaccgccagacagctcgggattcgtgatatcaccgttcttgcagaatacggtcagagggaaaatacccgccgtgagcatgcagcgctgatacgtcagcactatcagtatcgtgaatttgcctggccctggacatttcgccttacccgtcttttatatacccggagctggataagcaacgaacgtcctggcctgcttttcgatctggcgacagggtggcttatgcaacatcgtattattctccccggagccactacgctgacccggttgatttcagaggtaagggaaaaggcgacgttgcgcctgtggaacaaactggcactgataccgtcagccgaacagcgttcacagctggagatgctgctggggccaactgattgcagccgcctgtctttactggaatcactgaaaaagggccctgtgaccatcagtggtccggcgtttaatgaagcaattgaacgctggaaaactctgaacgattttggcctgcatgctgaaaacctgagtacactcccggctgtgcgcctgaaaaatctcgcacgttatgctggtatgacttcggtgttcaatattgccaggatgtcaccgcagaaaaggatggcggttctggttgcctttgtccttgcatgggaaacgctggcgctggatgatgcattggacgttctggacgccatgctggccgttatcatccgtgacgccagaaagattgggcagaaaaaacggctccgctcgctgaaggatctggataaatctgcattggcgctcgccagcgcatgttcgtacctgctgaaagaagaaacaccggacgaatcgattcgtgctgaggtgttcagctacatcccaaggcaaaagctggctgaaatcatcacgcttgtccgtgaaattgcccggccctcagacgataattttcatgaagaaatggtggagcagtacgggcgcgttcgtcgtttcctgccccatctgctgaataccgttaaattttcatccgcacctgccggggttaccactctgaatgcctgtgactacctcagccgggagttcagctcacggcggcagttttttgacgacgcaccaacggaaattatcagtcggtcatggaaacggctggtgattaacaaggaaaaacatatcacccgcaggggatacacgctctgctttctcagtaaactgcaggatagtctgaggcggagggatgtctacgttaccggcagtaaccggtggggagatcctcgtgcaagattactacagggtgctgactggcaggcaaaccggattaaggtttatcgttctttggggcacccgacagacccgcaggaagcaataaaatctctgggtcatcagcttgatagtcgttacagacaggttgctgcacgtctttgcgaaaatgaggctgtcgaactcgatgtttctggcccgaagccccggttgacaatttctcccctcgccagtcttgatgagccggacagtctgaaacgactgagcaaaatgatcagtgatctactccctccggtggatttaacggagttgctgctcgaaattaacgcccataccggatttgctgatgagtttttccatgctagtgaagccagtgccagagttgatgatctgcccgtcagcatcagcgccgtgctgatggctgaagcctgcaatatcggtctggaaccactgatcagatcaaatgttcctgcactgacccgacaccggctgaactggacaaaagcgaactatctgcgggctgaaactatcaccagcgctaatgccagactggttgattttcaggcaacgctgccactggcacagatatggggtggaggagaagtggcatctgcagatggaatgcgctttgttacgccagtcagaacaatcaatgccggaccgaaccgcaaatactttggtaataacagagggatcacctggtacaactttgtgtccgatcagtattccggctttcatggcatcgttataccggggacgctgagggactctatctttgtgctggaaggtcttctggaacaggagaccgggctgaatccaaccgaaattatgaccgatacagcaggtgccagcgaacttgtctttggccttttctggctgctgggataccagttttctccacgcctggctgatgccggtgcttcggttttctggcgaatggaccatgatgccgactatggcgtgctgaatgatattgccagagggcaatcagatccccgaaaaatagtccttcagtgggacgaaatgatccggaccgctggctccctgaagctgggcaaagtacaggtttcagtgctggtccgttcattgctgaaaagtgaacgtccttccggactgactcaggcaatcattgaagtggggcgcatcaacaaaacgctgtatctgcttaattatattgatgatgaagattaccgccggcgcattctgacccagcttaatcggggagaaagtcgccatgccgttgccagagccatctgtcacggtcaaaaaggtgagataagaaaacgatataccgacggtcaggaagatcaactgggcacactggggctggtcactaacgccgtcgtgttatggaacactatttatatgcaggcagccctggatcatctccgggcgcagggtgaaacactgaatgatgaagatatcgcacgcctctccccgctttgccacggacatatcaatatgctcggccattattccttcacgctggcagaactggtgaccaaaggacatctgagaccattaaaagaggcgtcagaggcagaaaacgttgcttaa

SEQ ID NO: 25152 - DNA, 276 bp, Escherichia coli
atgaaaaaactgtttgcctctctcgccatcgctgccgttgttgcccccgtgtgggccgccacccagaccgtcacgctgtccgtaccgggcatgacctgctccgcttgtccgatcaccgttaagaaggcgatttccaaggtcgaaggcgtcagcaaagttaacgtgaccttcgagacacgcgaagcggttgtcaccttcgatgatgccaagaccagcgtgcagaagctgaccaaggccaccgaagacgcgggctatccgtccagcgtcaagaagtga

SEQ ID NO: 25153 - DNA, 1686 bp, Escherichia coli
atgacccatctaaaaatcaccggcatgacctgcgactcgtgcgcggcgcacgtcaaggaagcgctggaaaaagtacccggcgtccaatctgccatagtgtcctatgccaagggcgcggcccagctcgcccttgatccaggcacagcgccggacgcactgaccgccgccgtggctggcctgggctacaaagcgatgctcgccgatgccccgccgaccgacaaccgcactgggctgttcgacaaggtgcgcggctggatgggtgccgccgacaagggcagcggcggcgagcgcccgttgcaagtcgccgtgatcggcagcggtggagccgcgatggcggcagcactgaaggccgtcgagcaaggcgcgcaggtcacgctgattgagcgcggcaccatcggcggcacctgcgtcaacgtcggttgtgtgccgtccaagatcatgatccgcgccgcccacatcgcccatctgcgccgggaaagcccattcgacggcggcatgccacccacaccgccgacgatcttgcgcgagcggctgctggcccagcagcaggcccgtgtcgaagaactccgtcatgccaagtacgaaggcatcctggacggcaattcagccatcaccgttctgcacggtgaagcgcgtttcaaggacgaccagagccttatcgttagtttgaacgagggtggtgagcgcgtcgtgatgttcgaccgctgcctggtcgccacgggtgccagtccggccatgccgccgattccgggcctgaaagagtcaccctactggacttcgaccgaggccttggtcagcgacaccattcccgaacgcctagccgtgatcggctcgtcggtggtcgcgctggaactggcgcaagccttcgcccggctgggcagccaggtcacgatcctagctcgcaacacgctgttcttccgcgacgacccgtccatcggcgaggccgtcacagcggccttccgtgccgaagggatcaaggtactggaacacacgcaagccagccaggtcgcgcatgtgaacggcgaattcgtgctgaccacgggacacggtgaagtacgtgccgacaagctgctggtcgctaccggacggacaccgaacacgcgcagcctggcactcgacgcggcgggagtcaccgtcaatgcgcagggtgccatcgtcatcgacaagggcatgcgcaccagcacgccacacatttacgcggccggcgactgcacggaccagccacaattcgtctatgtggcggcagcggccggcacccgtgccgcgatcaacatgaccggaggggatgctgccatcaatctaaccgcgatgccggccgtggtgttcaccgatccgcaagtagcaaccgtgggctacagcgaagcggaagcgcatcacgacgggatcgaaaccgacagtcgcacgctcacgctcgacaacgtgccgcgtgcgcttgccaacttcgacacacgcggctttatcaagctggtcatcgaggaaggtagcggacggctcatcggcgtgcaggtcgtcgccccggaagccggcgaattgatccagacggctgttctcgccattcgcaaccgcatgacggtgcaggaactggccgaccagttgttcccctacctgacgatggtcgaggggctgaagctcgcggcgcagaccttcaccaaggatgtcaaacaattgtcctgctgcgcaggatga

SEQ ID NO: 25154 - DNA, 639 bp, Escherichia coli
atgaagctcgccccatatattttagaacgtctcacttcggtcaatcgtaccaatggtactgcggatctcttggtcccgctactgcgggaactcgccaaggggcgtccggtttcacgaacgacacttgccgggattctcgactggcccgctgagcgagtggccgccgtactcgaacaggccaccagtaccgaatatgacaaagatgggaacatcatcggctacggcctcaccttgcgcgagacttcgtatgtctttgaaattgacgaccgccgtctgtatgcctggtgcgcgctggacaccttgatatttccggcgctgatcggccgtacagctcgcgtctcatcgcattgcgctgcaaccggagcacccgtttcactcacggtttcacccagcgagatacaggctgtcgaacctgccggcatggcggtgtccttggtattgccgcaggaagcagccgacgttcgtcagtccttctgttgccatgtacatttctttgcatctgtcccgacggcggaagactgggcctccaagcatcaaggattggaaggattggcgatcgtcagtgtccacgaggctttcggcttgggccaggagtttaatcgacatctgttgcagaccatgtcatctaggacaccgtga

SEQ ID NO: 25155 - DNA, 366 bp, Escherichia coli
atgaacgcctacacggtgtcccggctggcccttgatgccggggtgagcgtgcatatcgtgcgcgactacctgctgcgcggattgctgcggccagtcgcctgcaccacgggtggctacggcctgttcgatgacgccgccttgcagcgactgtgcttcgtgcgggccgccttcgaggcgggcatcggcctcggcgcattggcgcggctgtgccgggcgctggatgcggcgaactgcgatgaaactgccgcgcagcttgctgtgctgcgtcagttcgtcgaacgccggcgcgaagcgttggccaatctggaagtgcagttggccgccatgccgaccgcgccggcacagcatgcggagagtttgccatga

SEQ ID NO: 25156 - DNA, 237 bp, Escherichia coli
atgaacagccccgagcgcatgccggccgagacacacaagccgttcaccggctacctgtggggtgcgctggcggtgctcacctgtccctgtcatttgccgattctcgccattgtgctggccggcacgacggccggcgcgttcatcggcgagcactggggtattgcagccctcacgctgaccggcttgtttgtcctgtctgtgacgcggctgctgcgggccttcagaggtcgatcatga

SEQ ID NO: 25157 - DNA, 990 bp, Escherichia coli
atgagcgcttcccagccaattgaatggacagtggcgcaactggcgcaggcggtcgagcgcgggcagcttgagctgcactaccagccgattgtcgatttgcgcagtgagcagattgtcggcgcggaagccctgttgcgctggcgtcatccgacgctcggactgttgccgccgggccagttcctgcccgtgatcgaatcgtccggcctgatgccggaaatcggcgcatgggtgctgggcgcagcctgccgtcaaatgcgcgactggcgggtgctggcatggcaaccgttccggctggccgtcaatgtttcggcgagccaagtggggccagatttcgacaagtgggtaaagggcgtgctggccgatgccgggttgcccgccgcgtatcttgaaattgagctgaccgaatcggttgcgttcggtgatccggcgatcttccccgccctggaagctttgcgacagatcggtgtgcgcttcgccgccgacgacttcggcaccggctattcctgcctgcaacacctgaaatgctgccccatcagcacgctcaagatcgaccaatcgtttgtcgccggactcgccaacgaccaccgcgaccagaccatcgtgcgcaccgtgattcagcttgcgcatgggcttggcatggaagtagtggccgaaggcgtggaaacatcggcgagtcttgatttgttgcgacaagcggactgcgacacaggacaaggcttcctgttcgccaagccgatgccggcggcggcattcgccgtcttcgtcagtcaatggaggggtgccaccatgaatgcaaatgatccgactgccaccagttgctgcgtgtgctgcaaggaaatcccgctcgatgccgccttcaccccggaaggcgcggaatacgtcgagcacttctgcgggctggagtgctatcagcgcttccaggcgcgcgccaagaccgggagcgaaaccgatgccgatccgaacgcctgcgactcatcactgtcagactga

SEQ ID NO: 25158 - DNA, 456 bp, Escherichia coli
gtgaacctctcacaagacggcatcaaattacatcgcggcaacttcaccgctatcggtcggcagatccagccttatctggaggacggcaaatgctttcgcatggtgcttaaaccgtggcgcgagagacgcagtctttcccagaatgcactcagccacatgtggtacagcgaaatcagtgaatacctcatcagcaggggtaaaacgttcgccactccagcttgggtaaaagatgctctcaaacacacatatctcggttatgaaaccaaagacctggttgatgtcgtaaccggtgatatcaccactatccagtcgttacgccatacctccgatcttgataccggagagatgtatgtcttcctgtgtaaggttgaagcctgggcgatgaatattggctgccacctgactattccgcagagctgcgagttccagctgctgcgtgataagcaggaggcgtaa

SEQ ID NO: 25159 - DNA, 171 bp, Escherichia coli
atggctacaccgcttattcgtgtcatgaacggacacatctacagagtatcaaatcgtcgtaagcgtaagcctgagctgaagccatccgaaataccaacactgctcggatataccgccagcctggttgataaaaaatggttgcgactggcagcaaggaggaatcatggctga

SEQ ID NO: 25160 - DNA, 2973 bp, Escherichia coli
atgccacgccgctcaatcctgtccgccaccgagcgcgaaagcctgctggcactgccagatgccaaagacgaactgatacggcactacacgttcaacgaaaccgacctgtcggtgatccgtcagcgtcgcggcgccgcgaatcgattgggcttcgctgtgcagctttgctacttgcgattccctggcacctttttgggcgtcgatgagcctccgtttccgcccctgttgcgcatggtggccgcgcaactcaagatgccagtggaaagttggagcgagtacggccagcgcgaacagacacggcgggagcacttggtcgagctgcaaacggtttttgggttcaagcccttcaccatgagccactatcggcaagccgtgcatacattgaccgagctggccttgcagaccgacaaaggcatcgtgctggcgagcgcacttgtcgagaatctgcggcggcagagcattatcctgcccgccatgaatgccatcgagcgcgcaagcgccgaggccatcacccgtgccaaccgacgcatttacgcggcgctgaccgattctttgttatcaccccaccgtcagcgcctggacgaacttctcaagcgcaaggacggcagtaaagtgacgtggctggcatggctgcgccagtcgcctgccaaaccgaactctcgccacatgctcgaacatattgagcgcctgaaatcctggcaagcacttgatctgcccgcaggcatcgagcggcaggttcaccagaaccgcctgctcaaaatcgctcgtgaaggtggccagatgacgcctgctgatctggcaaagttcgaggtgcaacgacgctatgccacgctggtagcgctggccatcgaaggcatggccaccgtcaccgatgaaatcatcgaccttcacgatcgcatcatcggcaagctgttcaacgcggccaagaacaagcatcagcagcagttccaggcttccggcaaggcgatcaacgacaaggtgcggatgtatgggcgcatcggtcaagcgttgattgaggccaagcaaagcggcagcgatccgttcgccgccatcgaggccgttatgccctgggacaccttcgccgccagcgtcaccgaagcgcaaacattggcgcggcctgccgactttgatttcctgcaccacatcggtgaaagctatgccacgctacgccgctacgcgccgcagttcctgggcgtgctcaaattgcgggctgcgcccgccgccaagggtgtgctcgatgccatcgacatgctgcgcggcatgaacagcgacagcgcgcgcaaggtgcccgccgatgcgccaaccgcattcatcaagccgcgctgggcaaagctggttctgaccgacgacggcatcgaccggcgttactacgagttatgcgccctgtcggagctgaagaacgcgctgcgctccggtgatgtctgggtgcagggttctcgccagttcaaggacttcgacgaatacctggtgccggtcgagaagttcgccactttgaagctggccagcgaattgccgctggcagtggccaccgactgcgaccaatacctgcatgaccggttggaattgttggaggcgcaactcgccacagtcaaccgcatggctgcggccaacgacttaccggatgccatcatcaccaccgcgtcaggcctgaagatcacgccgctggacgcggcagtaccagacgccgcgcaagccatgatcgaccagacagctatgctgctgccgcacctcaaaatcaccgagttgctgatggaggtcgatgaatggacgggcttcacccgccacttcacacacctgaagaccagcgacacggccaaggacaaaaccttgctgttgacgacgatcctggccgacgcgatcaacctgggtctgaccaaaatggccgagtcctgccctggcaccacctacgccaagctgtcttggctgcaagcctggcacatccgcgatgaaacctattcgacggcgctggccgagctggtgaatgcgcagtttcggcaacccttcgccggcaactggggtgacggcaccacgtcatcgtcggacggccagaacttcagaaccggcagcaaagcagaaagcactggtcatatcaacccgaagtatggaagcagtccaggacggactttctacacccatatctccgaccagtacgcgcccttcagtgccaaggtggtcaacgtgggcattcgtgattcaacttacgtgcttgatggcctgctgtaccacgagtcggacttgcgcatcgaggaacactacaccgacacggcaggcttcaccgatcacgtgtttggcttgatgcatttgctgggatttcgcttcgcgccgcgtatccgtgacttgggcgaaaccaagctattcatccccaagggcgatgccgcctatgacgcgctcaagccgatgattagcagcgacaggctgaacatcaagcaaatacgcgcccattgggatgaaattctgcggctggccacctccatcaagcaaggcacggtaacggcttcgctgatgctgcgcaaactcggcagctacccgcgccagaacggcttggccgtggcgttgcgcgagctggggcgcatcgagcgcacgctgttcattttggattggctgcaaagcgtggagctgcgccgccgcgtccatgcggggctgaataagggcgaggcgcgcaacgcgctggccagggcggtcttcttctaccgattgggtgaaatccgcgaccgcagttttgagcagcagcgctaccgggccagcggcctcaatctggtgacggcggccatcgtgttgtggaacacggtatatctggagcgtgccaccagtgctttgcgtggcaacggcacggcgctggacgacacattgttgcaatatctgtcgccgctggggtgggagcacatcaacctgaccggcgattacctatggcgcagcagcgccaaggtcggtgcggggaagtttaggccattgcgaccgctgcaaccggcttag

SEQ ID NO: 25161 - DNA, 558 bp, Escherichia coli
ttgcaaggtcaacgcatcggctatgtccgcgtcagcagcttcgaccagaacccggaacggcaattggagggtgttcaggtggcgcgggtgttcaccgacaaggcttctggcaaggacacccagcgtcccgagctggaaaggctgctggccttcgtccgcgagggcgacaccgtggtggtgcatagcatggacaggctggcacgcaaccttgatgacctgcgccgcatcgtccaagggctgacacaacggggcgtgcgcatggagttcgtcaaagaagggctgaagttcaccggcgaggactcaccgatggccaatctgatgctgtcggtcatgggagccttcgctgagttcgagcgcgccctgatccgcgaacgtcagcgcgagggaatcgtgctggccaagcagcgcggtgcctaccggggacgaaagaaatcgctgaacagcgaacaaattgccgagttgaaacggcgagttgcggcaggcgaccaaaaaaccttggtggcccgtgacttcggcatcagccgcgaaaccttgtaccagtacctgcgggaagactga

SEQ ID NO: 25162 - DNA, 1896 bp, Escherichia coli
atgcggacactgacgctcgaccgtgaaatcacgctgccagcctccggcaccacgctgataagcctggttgacgggcaggggagtccggtcagcgtggaggttcagtccgtcaccgacggcgtgaaggtaaaagtgagccgggttcctgacggtgttgctgaatacagcgtgtgggggcttaagctgccgacgctgcgccagcgcctgttccgctgcgtgagtatccgtgagaacgacgacggcacgtatgccatcaccgccgtgcagcatgtaccggagaaagaggccatcgtggataacggggcgcactttgacggcgaccagagcggcacggtgaatggtgtcacgccgccagcagtgcagcacctgaccgcagaagtcaccgcagacagcggggaataccaggtgctggcgcgctgggatacgccgaaggtggtgaagggtgtgagctttatgcttcgcctgaccgtggcagcggatgacggcagtgagcggctggtcagcacggcccggacgacggaaaccacataccgattcacgcaactggcgctgggaaactacaggctgacagtccgggcggtaaatgcgtggggacagcagggcgatccggcgtcggtatcgttccggattgcagcaccgtcagcgccgtcgcggattgagctgactccgggctattttcagatcaccgccacgccgcatcttgccgtttatgatccgacggtacagtttgagttctggttctcggaaaagcagattgcggatatcaggcaggttgaaaccacagcccgctatcttggcacggcgctgtactggatagctgccagtatcaatatcaggccgggccatgattattatttttacgttcgcagtgtgaacaccgttggcaaatcggcattcgtggaggctgtcggtcgggcgagcgatgatgcggaaggttacctggattttttcaaaggccagataactgaatcccatctcggcaaggagctgctggaaaaagtcgacctgacagaggataacgccagcagactggaggagttttcgaaagagtggaaagacgccaacgataaatggaatgccatgtggggcgtcaaaattgagcagaccgaagacggcaggcattatgtcgcggggcttggcctcagcatggaggatacagaggaaggcaaactgagccagttcctggttgccgctaaccgtatcgcgtttattgacccggcaaacgggaatgaaacgccgatgtttgtggcgcagggcaaccagatattcatgaacgaagtgttcctgaagtatctgacggctcccaccattaccagcggcggcaatcctccggtattttccctgacaccggacgggcggctgacggcgaaaaatgccgatatcagcggtaacgtgaatgcgaactccgggacgctcaataatgtcacgattaaccagaactgtcggattctgggaaaactgtctgccaaccagattgaaggtgatattgtcaaaacggtgggaaaagcctttccgagaaatggcagttatgccagcggtacaataacggtcactgtgtacgatgatcaggcttttgaccgtcagatagtaatcccacccgttctgtttcgcggtggtaagcatgaaaacttcaacagcaacaaccaacagtcatactggtattcaacctgtaagctgcaggtgctgaagaacggacaggaaatctttcagcaacccgcgacggatgtcagcagggtattttcatccgtcattgatatgcctgccggacacggtcatgtcaccctgactttcaatgtttcttcatatggtgctaataactggacgccaacgaccagtatcagcgaccttcttgttgtcgtgatgaagaaatcaacagccggtatcagtatcagttga

SEQ ID NO: 25163 - DNA, 498 bp, Escherichia coli; identical to SEQ ID NO: 18937

SEQ ID NO: 25164 - DNA, 570 bp, Escherichia coli
atgacttcacgagatcaggggaatgattctgaaccatctaataaaacgatacaatttaaggaaaaaatccataatggtatccatacagaatacatcacagatcaaaaacacagtaataataaagatcgtgaaaaaaaataccgcgatggagacaaaataaatggaccgcaggcccattcattagacattactaacgaaagaaggtttgctgataacagaaccatgtttactcaacatatcgaaaagcaaaggaatgttcatacgctcaatcagaatgatataaataattctgctaataatgccaatgcgcgcgaaaatgaattgacatatcagtttcagcgttggggacaaaatcatacagtccggattctggaaagtagtgaagggatacgactaaaaccatcagacacacttgtctccgacagactccatgaagcccaacacaatgatgttacagcacaacgctgggtattgactgagcaagatgaacgacaagggcaacgacatcagcctcatgatgagcaagaaaatgaaggtaaattcgaaaacgatcagaaggacgaaagttaa

SEQ ID NO: 25165 - DNA, 588 bp, Escherichia coli
gtgtttttaggatcattctatgttgataggatcttaagtttttcttcattcccatcaattcttctcatcacaacgttatttcgtttggcgctggcgatcagtaccagccgacttatacttcttgaggcggacgccggagaaattataacgagttttggtgaattcgttattggagatagcctggtagttggttttgttattttctccattgttactattgttcagtttatcgtgattactaaaggttcggaacgtgtggctgaagttgctgcccgcttttcgcttgacggtatgccaggtaaacaaatgagtattgacgccgatctacgcgccgggatcattgatgccgatttagcaaaagaacgtcgtagcgtattagaacgagagagtcagctgtatggttcctttgatggtgcgatgaaatttatcaaaggtgatgctattgcaaacattattattatctttgttaatattatcggtgggctatcagtaggagtaggccaaaatggaatggatttctcgacagcgttcaccattactatttacgatgacaggtttcttgatcaaagtcgaaaccacttcatctga

SEQ ID NO: 25166 - DNA, 489 bp, Escherichia coli
gtgcagagtgatttgccgtggtggctggtctgccggggggcgattcataagttccgctgtgtgccgcatcttaccgggcggctctttgagcacggggtgacggactgttacacgctgttccgggatgcttaccatctggcggggattgagatgccggattttcatcgtgaggatgactggtggcgtcacggtcagaatctctatctggataatctggaggccacagggctgtatcaggtgccgctgtcagcggcgcagccgggcgatgtgctgctgtgctgttttggttcatctgtgccgaatcatgccgccatttactgtggtgacggcgagctgctgcaccatattcctgaacaactgagcaaacgagagaggtataccgacaaatggcagcgacgcacacactccctctggcgtcaccgggcatggcacgcatctgcctttacggggatttacaacgatttggccgccgcatcgaccttcgtgtga

SEQ ID NO: 25167 - DNA, 198 bp, Escherichia coli
atggatttaaacactgctgcaaacgcacttcgagaactgggccacccgacacgtctcagcatataccgggagctggtcagggcgggtcatgaaggcctgccggttggcgaactgcagaagcaccttgagattcctgcctccacgctcagccatcatctttcagcgctgatatccgctggacggcactgttgcaaatag

SEQ ID NO: 25168 - DNA, 255 bp, Escherichia coli
ttgaactggtcgaaaggtcttaaaaagttggttagtaaagcagaagaaaaaaccgaccaagaaatcgttgatgaaactgataacgtggcagagctacttttcaaactagatattgaaatatgggatgcagtcagaaaacaaaaaaaacagggcgaattactggttgctgttgcagaagatcagacactcaaaaaaccgatggaattaatacggcaatgtttagttgatcaaggttctttgaaaatccaaatatga

SEQ ID NO: 25169 - DNA, 177 bp, Escherichia coli
atgccggatcgccgtagccgtgacctggataatctgcaaaaagccgcttttgacgcactcactaaagcaggtttctggctggatgatgctcaggtcgttgattaccgcgttgtgaagatgcctgttaccaaaggtgggaggctggaactgaccatcaccgaaatggggaatgaatga

SEQ ID NO: 25170 - DNA, 549 bp, Escherichia coli; identical to SEQ ID NO: 10880

SEQ ID NO: 25171 - DNA, 1215 bp, Escherichia coli
atgcttacggataccaggttaaggactattgccaacaagccatatgacggcccaggcgagatagctgatcgtgatggcctgtcagccaggataagcccaaaagggaaaattacctttcagtaccgttacagattcaacggtaagccagtgcgaatgaagatcggcgagtacgggaaaatgagtctgaaagacgcccgctacgcggtggctgaatacagggagttgcttacgaaagggaagaatccggcactgtgcgtaaagcaggccatagcctttgagcagggcaagcgatctatatccgacgtagtggaagactacctatccctgccgaacgtcattaagctggtggcgtataaagaagtaaaaagcgcattgatgcgccacgtagtcaacaagtacggcgactacatagctgacgacgtaacgacaaaacagtggatggatatatttggcgagatcacgaaggcggggcacgccgttacggcgggtttgatattaaagcgaatgaaaatcatcgttaacagcgcaatcaggcgcgggataatgactaacacagcgataaacaatatccgtgtcgctgacgttggcgagcattatgcggtgggtgaacgttatttatcatgcgaggagataggtcacttctggcgcactgtagacagttcgcagatctatccgcagaacaaaatagccttaaagctattattgctaacagggtgtagggttggtgaattgcagaaaatgagaagggaacacctcgacctggataacggtgtgtggaccgttccggcggcggtggcgaagacaagaagtgaaatcaggcggggattatctgacttgtcgataaaaatgctcagggaggttttaacctcccatgagtatgattatgtattcccgccagtgattaacggcggcaacaggccagtaaacgtatcagtgataaaagtagctgcaatattcgtgcgtaaaaggatgggcggtaaatcatggtcctgtcacgacctccgcaggacgtgccggacacacctttcagctataggtgttccggtacatattgcagaaaagatcttaggccattcattaaggggaatactggcggtgtacgacaaatatgattatcttgatgaacaaaaggaggcactaaataagtttgctgattatgtgttatctttggctgacgttaaaccaatccgatcaaagaactgcattacgtcctga

SEQ ID NO: 25172 - DNA, 231 bp, Escherichia coli
atggataaaaccgggacaatccttcttagtcgccctgccatctgccggatgcttgggggaattagcaggggaacgttttacttatggcgtaaaaaatgggaacggaacggaactccgttccccgacccggttgacgtacttgggaccgggcgtggcgttatgtaccgctatcaggacgtaatgcagttctttgatcggattggtttaacgtcagccaaagataacacataa

SEQ ID NO: 25173 - DNA, 648 bp, Escherichia coli
atgaataaacttaaagcaattggcataattcgacatcgtgtagatccggacttttacccttcttttgaggttgctacataccgcagcgaataccaatatggatcatctttccttttgggcgttcgcgctgatactggcggcacttattcagtaatggcggcttcatgggtttttgaagaatataaaaacattgatgatgatggcatgaataaagaaagtgaaatcattgacgagttaatcgaagatgagcgccatgattgtgataaaccaaaagtcgaggaatggcagccaggggaaagaccgccgttagatgtatggctcgaattttacccaggtgactttgcgcctgtatactgcgtagccaaatatatttttactggcgatgaaatagggatatttgttagaaggactggaaaatgtgaagaaacagcaagatggaaccgttttaggtatcgccgctggatagatccgaaagaaaaagcactggcgcaaattgcgtttgcactggctactaaggttattggtgaagacgcagcaggagaaataaatttcaatcgtgataatgattattcgcgtgattatcgcaacatggcgcaagctattatagacggatgtatcggacacgttgaatacacgggggataaataa

SEQ ID NO: 25174 - DNA, 177 bp, Escherichia coli
atggtgagttattacaaagctaaggttactggtatcctgtacaaaatagaaaaccatacagtttattattttagtagaccagcaaatgagtggcgcgaatgtttttctaagtttaaatctgaaatagaaaacaaccctgaatattatatcaaggttgacaatgtaactgtggcgtaa

SEQ ID NO: 25175 - DNA, 198 bp, Escherichia coli
atggataaagaacttgatttaactgttgaagacctgagcacgattgcggaatacatgcgcggagatgatcctgatcgccctgtcgtcattgatatgaaaaaacttaaaaacgattttatgtctagttcaagactaatttctttatgggcgatcatgtatgcgcgggcgcaatggaaaaatagtaatggtgtatcatga

SEQ ID NO: 25176 - DNA, 207 bp, Escherichia coli
atgagacgggtaatcttttattcagttgaaacattcattgatgaatcacatttccgtttcccgtgcgattctcgcggcgcgatggtttatacacctccacttatgcgcaagtacagacacgtaaaatttaaacgggtttttgttccaattcgtgaagcgttacaggcgctgcgcggtgaattacgaaacacaatgcgcattgtgtga

SEQ ID NO: 25177 - DNA, 234 bp, Escherichia coli
atgaaattaaccaaaactgagcgtaaagtttacgatctgctggctgtgcattgccggacgggaggttatcaaatatcacttatcatgcttgctgacaggttgggagtgagtcggcaaagtgttaagctagcgatccgatctctggaacaggccggagtaatagccatttgcaggagtaaattgcatggacgccaacaagctaacgtttatgtcatcttaaaaatcaaaaaatag

SEQ ID NO: 25178 - DNA, 252 bp, Escherichia coli
atgacagccacaacattaagcgaaaataacgagagaggttttcagaggactgcggaaagcctcgacgataatgatgtattcgttgaattcggcggcagtagctatgaattcgaaacatcggctggatgggttgataaatggcctttcccaacgcgacaggaattgagcgatcgcaaatcatttggcgaagatgcagaacgcctggcgaataataaatggctggataaattaattgcggaggctgacaaatga

SEQ ID NO: 25179 - DNA, 123 bp, Escherichia coli
atgaaggtcgggaaagatattgtgacagtagcgttttgcgttatttgcttcctgtttgcagttgtgttttgtggcgcacttgcggcggtgattagctttattggtaagggggtgatgttatga

SEQ ID NO: 25180 - DNA, 273 bp, Escherichia coli
atgactctgtgggatgcaaaagaaggtgatctcgttgtcttgccagcatatcgtagtgatctcgggctggtcgtactgaataaaacatgtagcgacattcaacgcccgatcctggttagatacttagacggcacgatgatcgaaccgcgtttcttcgacaaagttgaactgaaggcccgcaatgttcgcgttaagcctttccgggcttatgttgaaaatcactggcgtaaattgttcgccggactgaatgggatgttcggcgtatggctataa

SEQ ID NO: 25181 - DNA, 192 bp, Escherichia coli
atggctataaaattagtgaaggttaaacacctgaaaggcggtgaaaaattaatgtcatggtggggacatgaatttattgctactgcctttcatttcggcccgggtggtcaagtaacaatatttgatgaagattacgacgaggtggggcaatggcatcttgagcaatatgtcgaggtgttaaatgaaaattaa

SEQ ID NO: 25182 - DNA, 621 bp, Escherichia coli
atgaacaatatcaaaacggcttattcactcggcagcgaaggcatgttaattactcgctacacagaagacgcgagctttcacgaagtggtaactaaggactatcacgaagtattaaaagatatgaacgcaggcgcgtatgacggtgatttaaacctggcgctacaggttgttgacattgtgatggatgcgtcaatccgcgattacgtgtctctaaatatggaagaaaaaacatcggtagcgcgttatgtgttctgcctcactttcgtaagacgcatggaggaggaattcggacgtgtaccagtgccggaagaactggacccgcttgcgtatggtagtgcggtaatggtcccgctgggcgacggggtgatgggtagtgcttcattgcatacaatccgtgaactgatgcgagatagccttgaagctggagtgcttaagaaagcggtagaagaagggcgcgacgcggaagaagtgaaaaaattcatgcctgttatttatggtgatatggtcggcgataatatgcgggctaatgattttggcgtccagtgtgttctggcgatgctgaatgatgccagaaaacgtgcacagccaatgccgaaacaggaaaaacgtgtactacattaa

SEQ ID NO: 25183 - DNA, 219 bp, Escherichia coli
atggagcgcgaattgatgctctactgtgtagaaggtggtgtaggtcacgatgcctacgtcgccgggaaaagctatccagccgatgaagtgctttttaatatgcacttgagagaaaacgaataccagatatccgtgtggaagcggtgcgttgatggtgttgaagttgttagccttgaaagatatttaggtaaattcgactacggattaatggaggcttga

SEQ ID NO: 25184 - DNA, 195 bp, Escherichia coli
atgaaacaagttggagggtacaagttaccggataacgcaaaacttgcaggtataggttttagtggttgtttttattataacaacattggtgatatttatatcgttagatatatagatggcgaacaacattttcgcaaactgccagatgttgaattaaacaaacttataagagaggtatcattacatgcggtttaa

SEQ ID NO: 25185 - DNA, 204 bp, Escherichia coli
atgcggtttaaaaattacagagaatggaaaattccagcagaagcaacaaaggcggcacctggtgatttttctggtgtttacttctatatggatggcaaatggtatttcggcagcaggcctgaacactattaccaggaaatatgcaagcctcacgtgtgggatattaaggagcgcgtgagagacggagtaattgaggacgtttaa

SEQ ID NO: 25186 - DNA, 237 bp, Escherichia coli
atgttcaagagctttttaaactggttgggagcgtggcttttagccacgctttttgttttcctggcggcagcggctgttatcgtcgttattatgctgggggcgatttttattacgtggtcgctgcctgaatttaacgacattgggaatattctttttgccgcccgcgctttattggcggttagcgcatttgtcgggttttgctggactgccgcgccagattgggatgatccgttttag

SEQ ID NO: 25187 - DNA, 492 bp, Escherichia coli
atgactaaggcagcagatttattaagacttgcagcggaaaccatagagcaaagaggtaagcaaaacggctacgacaaaaaagaggaaaaatcagcgccaaaaatagccactatttacaacgctaagaagggagataatttaaccccgcttgatgtatgggatctgctaatttgcctcaaggaggcgcgtttagaggccattttaagcaataaatcagatccgacagacacgctaattgatctgattagctataacgcgctaaaagcagagcaaatattaacggagcgggaggaagcgcaaagaaagaaacatgctgtttttgatataccgttaagtggtggccttaaaaacagcaaaatatccggtagcctgattgccagcggtgaggtaacgctaaatggcagcattataaacaggcttgatggtaagtgtgataatgaatcactactacgcgcggcggggtatcataaaaatgaaaagggtgacaattga

SEQ ID NO: 25188 - DNA, 177 bp, Escherichia coli
atgtcttttgagaattaccaatggcatgacgactatgaacgggaaagtgtcatgcgtgcaatgtgcagtgtatgcagcacgaagaagggagaatgtaacgagtgcaacgaatgcgtagatcgcttgctaagggccggacacgccgaaaggctgaacgaaacagagaatcaagaataa

SEQ ID NO: 25189 - DNA, 402 bp, Escherichia coli
atgaatgaatatacttttagcctgccttacccgccatcgaataaccgctattaccgacattcgcgtggttttcactatatcagcaaggtagggaaagaataccgtgaacgagtaagagacatcatcgaattattaaatttaaacatcaacatatcttgccgactggcaatcatcatttatgccgcaccgccggataacaggaccagggatctcgataatatcccaaaatgcctatttgacagccttacatattccgaattctggaaagacgacggtcagatcgattctataaaaattgttcgctgccgtaaggtaaaaggcgggcgattgtttatcaaggtgcgcgaacgcggagacctgctacctgatattaacgaatacgcaactaatatgtggtggtaa

SEQ ID NO: 25190 - DNA, 729 bp, Escherichia coli
atgaatttagaatccattctaaaattccactttcccaaatcaccgcgattgtcagacgaaagcaggggaacatcacctgatgcacttaatacgacggatgcgcttaccgccgctggtatggcgcaatcgcgcgtagcgcttggttacagcgcttttttggggaagatggaactatcgcaaactgaaaaacacagggccgtagttttgcttacagagcgtttaagagctatggcaaaagattacgaatacgttatggagttggacgatgagcgacgcaatgatcttattattcttgttgccgttttcgcgtttcgggattactgccagagtgcggcgaccgaaaaggtttgccctaaatgcggtggaaacgggcttttaccgcatccatgctgcgaatacacatcaacggtttgttcgcggtgcaacgggaaaggctacgttaaaaaccattgccagcggtgcaaagggcgcggcgagataccggataaagcagccagtgaagcagcggaaatgccagttttcaaaacgtgccagcattgtggcgggcgcgggtactcgcgtttcccggtagatcttgtccgacaggcggttaatcagcttgttttcccggtaagccgatcaacatggtggaagaaatacagggttttctatgaggacgccatagcggagctattcgaagaagaagcccgcgcggaaagcgaaattaaacgagtgacacggggtgaataa

SEQ ID NO: 25191 - DNA, 276 bp, Escherichia coli
atgatgaagcctaaattaaaagaacatgtttaccgccagttggttaacgagttggctgacacggcccgccattacgccggaacacaacagctacgcggtcggctatcttcggttgttaaccgttatattgatgctggatgccatcgcaaaggtgaaattacgatggacgaggcaatcaagcgccggacggctgaatggtcagtgagtaataccggattaaccggatacattgaaggctataacgactgtttacaggatcatggcgatggcaagtaa

SEQ ID NO: 25192 - DNA, 309 bp, Escherichia coli
atggcaagtaaagatctacatttaaacctgaaaggagaatacttttacgccatccgggcgggaaagaaggtggaggaataccgactttataatgactattggcgtaaacgcctgaaagggcgggaatatgaacgcctgataatcaagctggggtatccagccagccacgaaacacaccggatcataaacctgccttatttcgggtatgaagtgaaaactatcacacatccattgttcggccctgatcctgttaaggtattcgcaattaaatgtgatgtgaattggatgttaaggtggggtgagcaatga

SEQ ID NO: 25193 - DNA, 216 bp, Escherichia coli
atgaaaaaagctggcctatcaattagccgtgtattgtgcggtgacgaaaacgagatccgcatagaaattaaatttagcacaggtaaagagataatcctttacacgacacctgaaaacctgacgctggcgcttactggtaaatctgaaacgccgtgcgacgtccggttgcgcaatattgaaattaaggaattaaggaaggtgaaagatgaaaagtag

SEQ ID NO: 25194 - DNA, 189 bp, Escherichia coli
atgaaaagtagaatgaaacgcatggtaagagcttacgataaggctttaatggtttttgatgatttgcgacgcaataagcgtgagcgtcgtaaatgggcgcgtttattcgcgaaagaatggcacgaagacgatgcgacaatcgactgtcaaaaagacgctgacgataacgtttattatatgatgtggtga

SEQ ID NO: 25195 - DNA, 279 bp, Escherichia coli
atgttaaacgatatcctcgacaaaggattaataatggaggttgacgagcttacaatcaaaattaattatgaaggtgaagaatatcaaatttgggtgggtaatagatggtattcatacggtcatatttattcaattggtggtaagttcattaaaagaaaccaggaattcagaccgcgcttccgcacaatgcgccgactacataacctgcatatgaagctatttgaagaccaggaagcacgggaactattcaagatctacggagataaatcatggagctaa

SEQ ID NO: 25196 - DNA, 294 bp, Escherichia coli
atgagaacgaagaaagtggcagatcagaaagcgttagttatcgctacaacggacgtatcgttattcacgaagggcgaagaaatagatcttaaattgcttttcggtatgtttgagccacacgaaaagccgtggtttgttcatgaagacaaacaaggcaatatgcgcgtagtagtgccggacaaaaacagcgacatattttttgctattccagacccgttgcatgacggagaaatgctggcggtattgcttatcgctgatgctgttacttacaagggaaagaaatatgaaagttaa

SEQ ID NO: 25197 - DNA, 213 bp, Escherichia coli
atgcaagttaaatgctcatactcaagcaatgacagtgttttcacgattgggagtatttatgacgttcacatcgtttatggcaatgaagcacacacaatgagtaattgccttgccttgattgataatcatgacgaaatatgggtattcaggccgagctatgaaggcggtgaaatatccggtgtaggttttgctgccagctttgaacgttattaa

SEQ ID NO: 25198 - DNA, 258 bp, Escherichia coli
atgaaacatttatattttgaggtattgcagacgcgcgaccgcaatatttttgaagaagggaagatctattgcggcgttcaactccacggcgcaccgggcggtgatggtgcaatggcgataactggcgatgatgataaagtttatttcgcttatgttagccatatcaataacgccgctggtttgtatatttatcgcatagtgcatgatttccgtgagatcgcggagttttgcgcccgcgaaggcagtaaaccggaataa

SEQ ID NO: 25199 - DNA, 273 bp, Escherichia coli
atgaaacgctggattaacgaagaaacaaaagcccgcttcaatgcaatttgggatctgattgaaaaagaggacggcgtttctagtccctacctgaacaatcttgagttccactatgtagaagcgatgaacgcagagcatgaccaccaaggcggtgctgatgaattcgccaaaaaatacggcttcgatgatgcaaaccatatgattaacaacgtggtgatgcaggcagaggaagactacgaatgcaaatcacttgaattcgcacgtatggcataa

SEQ ID NO: 25200 - DNA, 324 bp, Escherichia coli
atgtctaaatttatcagtgttaaagttttccgtggatcttttccagaagataaagaaattggacaattcgcaggtaaacgcggcgcatgtttccgtgtggctactgaagacgacgcgcacgttaaatgcttccacgtatctgaaccgccttttgacgcagaccatcctgaagacctggatagaattaaaagcctagtttttgcctatctgatgttccagggtatcgctgatatggaagtggaattgcttggcgctgaactggttgcagaatacaaaatgactgaagcagaaaacagaggggttgaaattgagcgcatcaaataa

SEQ ID NO: 25201 - DNA, 198 bp, Escherichia coli
atgattgaatgtcttattattgcggtagttctcctttaccttgctggtgtagttttaatgggcgctcttcagaaagctgtaggtagtgacggcgttatttggtttgagttggttttctggcctttcattacaatatacgctttcgctgatgctatgcgcatcaacatcatgcgggccattaaggagcgcaagaaatga

SEQ ID NO: 25202 - DNA, 471 bp, Escherichia coli
atggacaaggtgaagacgttaatcatcgccgttgttgtttgcattattgccgggctgaccgccgtaacgtgttattaccagggtgaggcggcaaggttacaggaagaagtcacggtgacgaaaggcgcactaaaaacagcaagtaacactatccagcagatgaaggagcgaaacgccgaactgtcaaaacttgataagaggtatcacgatgagattaaagctatcagatctgacattgccgatctgcgcactggcattgataacggcactatcaggctgcgcatcaacgcaatgcccgtgcgagtgtctgaccccgccggaaccgtccgcgccattgatggagccacctgtagactcactcccgacgctgaatcggcttatctatccctcagagaacaactaaaaacgaaagacgctcagatcactgggcttcaggactacatcaaaactcagtgcttacgcaaagaataa

SEQ ID NO: 25203 - DNA, 558 bp, Escherichia coli
atggctaaggctaaaggcattaagttgcctcaattcaaagttccgctctttgagcatacaacagttttcttctgcccgacccgcgacatgttttatgaattttgcgaaagggccggaataccaatcgaacctgatttcgaactgttaggaggattaacgcttacttgtactggtgagaaaggcggtaatttctatgtgatcgcagtattcgacaatgagttaggaacactggtacatgaagcggcccacgctacattccacgttctaagtgatgttggcgtcgtggcgaccactgatccaactcatccggcgaacgagacttacgcttacatggtaggccgcatctttgacgcattcttcccaatcctggctgaatcaaacgaagcacaggttgcagcaatgcaggcagaagaagtaaccgaacgtcttagcgcacaagaggcaagggatattgctaatgaggcaaaagacaagcaaaaaccagctaagaaaggcaaacgtaagccgaaagcaaaagaagcgcttataccgcgtgttatgagctttaaacgggggtga

SEQ ID NO: 25204 - DNA, 372 bp, Escherichia coli
atgtctcgttttcgtcgtgtaaatattgatggtaaatccattaccgaaacccgcctcgctggtgctgaattaaaaccaggtgaactggtaaaactggaaggcggtaaattcgtaaaagcgaccacagcagaaggccgcctgtatatcgttaaccctgcattccatgaaggcaaaaccattgctgatgcaatcgcagaaggtgaaaccgtcgtagccgactacgtggaagaaggtcgcgagtttgcaatgcgagttgaagcagcaacctacacgaaagaccaggccatcaagctgggtgaagtaaccgttgcatactgccaggaagatgtaaccctggacgcagaagactttattcgcgttcgcgtcgcttaa

SEQ ID NO: 25205 - DNA, 1053 bp, Escherichia coli
atgtactttacaaaacaaaatttagccacaaacagccggatgcaggcgcactggaacgaactgtgggcgcaacgcaacatcttcaacgatcagcatgacgctatgattgcagcaaacaaggcaaacatgaccgctgaaatgttggcctgtaacgccgtcggcggcttcgcaagagaattctggaaagaaattgataaccagatcatcgaactgaacaccgaagaaatcggtattgagatcgtaaacgacctgatgggtgtgcagaccgtattaccaatcggtaaaacgctgaaaatgtacaacgtatctggcgacatcaacgatgaggtcgtaatgtctatggatggtcaagcgccgcacggctttgatcacaccgaatacggcagcgatggcgacccgatcccgatgttcgccgctggttatggtgtcaactggcgtctggcacagggtctgaacactgtaggcattgaccttgccctggatagccagcgccttaaactaaaaaaattcaacaaagcccgcgttaaattctatctgaacggtaacgacaacatcgtggtagacggacataaagctatgggtattaaaaaccataaaaatactcaacagcttaccctgaccactgaccttactaccgcagatttcgaggcgctgatcgacttcttcaccattggtgaattcggtgtactggcccgcaataacttcgttgcaaaatacgatattatgtgggtatctcctgaaatcatggctaacctggcacgtccgcacatcgttaacggtgctgtggttggtagcgtactgcaaacggttatgccgttcgccccggttggtgaaattcgtcagaccttcgcactgaaaggcaatgaaattattgcttatcagcgccgccgcgacgtcatttcccctctgattggtatgactactggtgtagttcctctgccgcgctttatgccaactgataactacaatttccgcatcatgtcagccgaaggtttacagatcacctgtgacatgctgggccgttccggtgtagtttacggtaaaaaatcttaa

SEQ ID NO: 25206 - DNA, 465 bp, Escherichia coli
atgcctatcaggggagttaaacgcgtccgtgagagattaaagcaggagctaaaggaaatcaccgataaaaagacgcacgaagttttatggcgcgtcggtatgctggctggtggctttgcggcgaacatgaccccggtcgatacgggttttttaattaacagtcaattccagtacataggaaagacggcagatggcttacaattacgcctaggatatacggcccgctatgctgaatgggtgcacaatatgccaggtacattaaagggccagcctcgcgaacatttcggcaaaactaataacctgtctgaattcggccctaaacaggtaattgaattcggcggcggtactggtaagggtaaatattgggacccaaacgcggagccggaattcttgcgcaaggcattcgaagaccctaaccacgctgatgatatttacaaagaaattgtagaaggttacaaggtatga

SEQ ID NO: 25207 - DNA, 678 bp, Escherichia coli
atgattcatgttcggaccgggcaatttgcggcggtggtagacggtaggcggtatgtgtttaatccctgcttcgccgcgatggcaaaaataggcagtgacagagaactggtcgaatatttcgcaacaatccacggcggcaaatatccatcacgcttgccagcagacccagacttacgcaatcgcattctggcgcggtgttatggtgaaatagtgcagacatcaatgcacatcctgaaatgttgctcagacgatgaaataggcccgttattgggcgagtgtaggtttactccttcgggcaagttgcgactaaaaccaggcttgatgcctactgacgacgttatcacgctggcgcagcattgcgtgtaccacggcttaatcggtgatgggccggaagaagatgccggagaaatcccggaaggggaatataagccgacttttaacgtccttgaattcgtctattctgccgttgctcacctgggcttgtcagaatcggaagcatggaatatgacaatgaccggatatagggccactgtacgcgctaaaacgccgccagacgaaagaagcgaaagaagtaagccaaacgttcacataaataaacgtgcttatgacgagcaaatggaggccgctaaaaaggcgctaaaaagaatggaaaatcgcaagcaagaaaaagcccgatag

SEQ ID NO: 25208 - DNA, 414 bp, Escherichia coli
atgaaacggttagcaaaaatggtacttgctgtgattgctgcactggcatttaacgcgaacgctaacgaggccataaacattaactgtgaagaagtggcaaaccatgtagccgcatatcacgacatgatcaaaaaagaaccagccgcacccacaattctttttaaggcaattgataaaaattttgaaggtaaaccagtttatgctcgttggtttaattatggccttgtaaacgaggctgctgtaagcgtagtctttgaaaacaacagcgaaataaaaaacaggatagctaacgagtgtaaagcaaataaagttgctttcgctgaaagaatttttaatgaaggcggcgctggcgcaaaaaatcacgcaattgtcgatttaggtaacggttttattgatattgttagaatcaaataa

SEQ ID NO: 25209 - DNA, 255 bp, Escherichia coli
atgaaactggtaactatcgaaaaaaacctgaaagcacaaaagaatgcacaggaacgggtaatcaagaaaggcaagaagttgcttaacgccttcctgaaaaaagaagcccgccccaaaaaattacgtgatggttatggctttaaattcgatatcaatcctgactggcggctgttcagtgaagatttgaatatttggttaattatcgatcacctggaatacaaccgtcattgcggagtgaaaggcgctcataagtga

SEQ ID NO: 25210 - DNA, 351 bp, Escherichia coli
atgcaaaaatacagattagaggtgttcactgataaatgcgaatgggagcgcatagggttattcgatacatacaacgccgcgcgtgatgatggtcgtgaattgctgcgttgttggtctagtgcgcgtgattttgtggttgttccggtgcaaataccagatgaggtggaagatatgaacccgaaagatattaatgttaacttcaatgttaattttgccaactctatggatcaggcttgtcctggtgaaatacacgcaaaaggtttcccggcagatgatccgcaagcaaaacgtgaatacgaaaaagcggcaaaagatttctgtatcgacaacctgggagcgttcggcaaataa

SEQ ID NO: 25211 - DNA, 180 bp, Escherichia coli
atggcgcgatgcagcaatggcggcggtaagttatggaggcttacggttttcatgactggaaatgaaaacataacgtctgatttcgataatcctgatgatgctatagatacggcttttgaacttatggagaaagatagccgcattatcggctaccggatcaggccaataaatgaagggtag

SEQ ID NO: 25212 - DNA, 4584 bp, Escherichia coli
atgagtagcggcggcggtaaagcaaaaacaccgactttaattaacgataatctataccataaacaattttatcgtgtacttgatattatttcggaaggtccgatttatggacctgtaaatacaaaagcgccattaaatagcgtgatgcttaatgatacgcctgttacagacgcgaacggcaatacaagtgtcccgggtgttagcgtggcgtggcgtaacggcacgttagatcaatcacctattaacggttttaacgccattgagtcaaccgttattgttaacgcacaggttaaacatgacacaccaataatcaggacggtatcagatcctaacgttacgcgcgttcgcctgaacatcggcgtcgattcacttgtacaatctgacgagcaaagcaatcaacataacacatcggttatgatgatgattgacgtcaagccttcatcttcttctacatggacgcttgttaaagacgtaactataggcccgggcaagatcagcggagaatatcttgaagcgcatattatcaatgcaccagatgaaaagccatttgatattcgtgttcgccgtgtaacagccgatagcacaggcgatctattgcggaatgatacgagatggagtagttacagcgaaataatcgacgataatttgtcttatcctcacaccgctgtagctggcgctgtgattgatcatgatcagtacactgacacgcctactcgcacttatcacctgcgcgggctgattgttgatgttcctgataactataacccggaaacgcgcacttattccggtttatggcttggcggattcaaacaggcatacagtaataaccccgcctggatattccgctatctggttaaaaacaagcgtttcggccttgcccgtcatgctggctatattgacgttgacgacggcgcattatatacgctttctcaatactgcgatcagctggtcgatgatggttatggcggccttgagcctcgcatgacgcttaatgcttacattacggagcagatgagcgcccgcgacttactggacaatatcgccgggatgttccgaggcatcgcgttatgggacgggcaacgcctcacagtgatgattgatgcaccacaagacccgatcgccaccattacaaacgcaaacgtcgttgacggggcgttcactcgatcgagtatctcccgcgcggaatgctacaacgccgtgattgtgtcctggactgaccctgaaaacggctgggagcaatcaaaagagtatgtagcagatgatgatctaattgcccgtgatggttataacgaaaccacgctagaggcgttcgggtgcacttcacgcgggcaagcgcaccgcgctggcaaatggctgatagaaacagcaaaacgcgagccgtcaaaattcacatttaaaatggcccgtgacgctattcactttacgccaggggatattatcgagatcctggacaataaccgcgcaggcgctcgcttaggtggtcgcatcgttgcgaacaatggcagagtagtaactgtagacaaggtcgacgctaaatatatctccgctggcgataccattagcctgcttgatagcgatggtaaatttaaaaaacatcagatcaccggagttaacgggaacaaaatcacactggcagcggccccggcatggattcgcaacggcactgtttttgctgtatccactgaatccgcaaaaccagttttgtgtcggatcaccagtgtagccgaaaccgaaaataatagcgtgtataccatcgaagcagcgcaacatgacccgaacaaacaagcggtagttgatgagggagcaatatttgaaatcaacaatgacacgcttaatcatttccgtgttccgaacatcgaaaacctgaaagtcataaacattgcgtcagagacggttcaatgccgcgctacatgggaaacacagacaacaacgcatcgcatgacctttgagatccgcatatataacgccgatggtgcggttgttaaaagctacgaaacaacgaaatacagttatgatttttatggcatcgacgctggcgcgtattcgttaggcgttcgcggaagaaatgacactggcatgaagggtgcagaaagcatagtagatcttgttatcggtgcgcccgcctcgccaataggcgttaactgggttccaggtgtatttcaggctacagtgtacccgataagcaagacaacgctaacaactgatacagcgtatgaattctactatgcaggggaaaaccagattacggatcctgcaaaaataaccacgtctgcgcagtttaccgggcgcgggtatcagtggacgtttggcggcatgaatacaggccatacttattacgtttatgtgcgcacgcgtaacgcttttggcgtgtctgactttgtggaagcatcaggtaagccgacagaaaattttgatgaaattagcgattacgtcaccaaagacgtgatgaattcagaacaatttaagggaatggtaagtgatattaaggatcttggtgatcgcactgatattatagaaagcgcaaccgccgaccttaaaacagctaccgccgaccttaaaacagctacagatggccttaaagctgatacagatacacttaaaaaagacaccgaagccctttataaaaaagtcgaagaaaacgccgacgaaataggcaaacatgaggtaagaatagactcattagaggtatcaaacgaaaacgttaataacgaactggcacagacaaaagcaagtctacaaaacgcttcgcttgctctgatcaacaactcgcttgctcaaactaacacgcgggttactcttaccgctcaatataagaaaggccgcaacgaaacaaaggcacagattgaccgcatcgacaacgttatcgcagaggagaaaaaatcgacagcggaatcactggaaaccatcacagccgaaataagcgcgatggactcaaacaccaaaggtgaaatagcacgcgtagacaaagcgatagcaacagaaacacaggcgagaacagaggctataagcaacgttaacgccagtatcagcagcctggaaaacaaaactaatgcgagcgtttctcgtctcgataaagcaatatcagatgaaacgcaggcaagaagcgatgcaataacagaggttaaagctgatttaacaacgcttgaaaataacacaaatgccagtgttagccgcctggatcaagctatcgctgacgaatcaagcgcgcgcgctcaggcaatatcaggtatcagtgcggagcttggtcttgttgaaaataaggttgataaaaacaacgacgaaatagaacaggcgaaagcaagtctgcaaaacgcctcgcttgcacttatcaacaactcaatagcgcaaagcaaggcgagcactgttattgaggcgaagtacaggaaaggccagataaaaacaaaagcggaaatagcaaggatcgacacagcaatagcggacgaaacccaggcccgcgcggaggctatatcatcacttgaagccaatattaatgaaaacatttcagcaaaaataacagatatatcaacggcgctcgcaactcacgaggcatcaagtgctgaaaaatttgtccaaatatcggcatctttcgacgatgtaaactcaagcatcacggaatggtcgcgggctatggcaacggcagacgaggcattgtcaaccagaatcgaccagttgaaagtaactattaacggaaacacaacggcgatagaaacgacatcaaaagcactgactgacttcaaaggtaacgttgatgcgtcatattcaattaagattgccactgataaaaacggcatgaaatacgctacaggaatgtcgctcggccttactggtagcgggactaacgttcaatcgcagtgtattttcctcgttgaccgtttcgtgcttatgactgcggcaggtggctcctatcagaccccgttctatgttactaacggtgcttgctacatccgtgatgcgtggatcagagacgcatcaatcactaccgcgaagattgcgcagcaaattcaatcaaccaactataaagctggttctgctggctggatgctaaataaaaacggcaatgcggagttcaacaacgtcactgtacgcggtacggtgtacgcaacatctggtaaattcactggtgagattcaggccacaagcgggaagtttaaaggtacagtagaggcaaagtcatttatcggtgacgttgctaacatgggggttggtccagatcgagtacttgggcataacggaagttatagcgcaaccatcacatataaagacagcacggataatgcattgacgaaatcagttatgcttatggcgactatttcattaatgtctggtgaatatagatccacttataacgtaacgtttagttgcggaggtaaaaacaaaacaatttcatattacgtaccttatggtggatgcacattaacagtgcaatgcgctttttctggtttaaaagcatcagatattatcgggaaaatatattgtcctcaaacatcatcatctgaaggatacgcatattgtaccgcgttgtattctccaacaatgatagtagcaagaggcaccggatcatttagcacatcaacgacagcataa

SEQ ID NO: 25213 - DNA, 1788 bp, Escherichia coli
atgatttacacaacaggcacgatagccgttagcggaaaaacagttactggagctggcactgaattcaatgccgcattatctatgattagagtgggttgcacccttattgccattagcaatccggtgcagattttctcaatcacagaggtaaaaagcgcgacaagtttgtcagtaactccggcggcaagcccggcaattccggctggaactaaatatagcatcctgctttcagattcgatctctgtggatggccttgctcaggatgttgccgaaacactgcgttactatcagggcaaagaatcagaaatagctgacgccgttgaattttttagcgacaacaaagatgttatttcagcctcgaaattagcatcagaatcagctaccactgcaaccaacgcggcaacaacagcgacaaccgccgccgattcagctaagacatacagagacgaggcccacgaatacgccaatcagacggcacagccttacgcgtatgttttgcagccgctgccggacgtatggataccgtttaacgattctctggatataatcactggctacggctcaggcacgaaaaaagtaaccattgatggtgaagaaaaaacaatatcatcagataaggttgtttctttctcccgcgcaagtacagctacttacattaacaaatcaggagttttaaccgtagctgatattaacgagccacgtttcgaacgcgaaggattattaatcgaaggtgctcgcacaaacttccttatcaacggtagcgtccctgcaagttggggccgatcaactaatgtcaccgctacagcagaaactgacagctacggtttcctgtacggaaaattcgtgatcgacgacagtgcagttggcggcactggtggttgcaacatggcgtcagtgatcactgctaacgttatcgacactactcagcacgatgaacagtacgtcaccgcttcttgtcgttttcgttcgtcaaacgacgtccggttgcgtatccgttttgctggtggtgaagacacttccagtctggcattcctgtgtgatgcgtatatcaaactaagcgacatgtctgtaacgaagacaggcggcgatgcagacaaactcactgttagcgtaacaacggacagcatcaccggatggaatcgcgcagtggtgacgtataaatcaaccgtaacgctggttaccgcgcaaattcagtttgctccggttagcgcgttcgtgtccggcgactacatggaactggcaactcctcaagtcgaacttggtacgaatgcatcatcgtatattagctcaggttcaactccttctacccgtgcgagcgatatggtaagtattacgactaaaaacaaccttgcgcgtcctccgttcagtttcctgctcgaacttcacaaggactggttcagagcgcctaactccacgccgcgtgtttgggatattgccaacgctaagaatgggcagtcagttatcgctgcggttaaccgtggtagcgatcagtattacatgtctctatccaaaagcgacggtgcttacatcaattctgccgctggtgttaagttaactgataacgccactattggcgcggtggttaaaggcgatggaacattccatgtgatcatgaacggtgcacctgctagtgatgcgacttgtatctacggtggtgtgacacaggacaaaaagatccgctttggtggtcagacatccgatggaacgcgccacttgttcggacatatcagaaattttcgtatttggcacaaagcattaactgattctcaattaagcgaaattgtttaa

SEQ ID NO: 25214 - DNA, 684 bp, Escherichia coli
gtggacgatgatctaaaaaataaagtcatttatcccataaatgaacttaaagaattgggcaatgcttatctaccactcgatacacatttaagtgattctggctcattaaaagttttagagttattgcttaaatctgttggtatcaatgcaactgatactgttaaacatatttcatcttgtatcaataaaaaacaaaaatgggctggtgatttaggggggaagttgacgcctaagatgtatcaggaaggtatgattttgaatccggattggcgttatgaacaatttaagagtccgggtggttttaatgatggaatggttgatattattattagtcccgatgcgctactaaatgaaaccattttattgttcggggattctttctttagaatgatgctaaaacatttcagtgcaatttttaaaaaagtaatatgtttacgaactcgattttatcataaagaaatgatcgagttggtcaagccaggttatatatttacaggcaatgctgaaagatatttatctaatgttacttctgataaagaagctcatgcattctcgttatattcatatcttaggaatgaagccccggctgagcgtgataataatttcattagagcttttagagcttttacatctcctgaatctgatttttcgaaaaattatttcttatcaaaagatgtaaagtaa

SEQ ID NO: 25215 - DNA, 1266 bp, Escherichia coli
atgtccgcctatgagaaagcaacaaatataagatggagaatattttttgtacttttccttcttgttgttgtcagtatgattgatcgagcctcaatatctatagctatgcctactattgctaaagatctgggattaagcgatacgatgcaaggactaatcttgagtggttttttctggacttatgcatgcatgcaaataccgggtggatttttagccgataaatttggggcaagaattatattagcatgctcggcaatactttggggaactgcagaagcactattagggttatgcccaacaggctttgccttacttgctgctaatctattgcttggtgcaagtgaagcacctgtatttccttctggagccagactgaatgcaatctggcttaacaaaaatgaaagagctcggggagcaacactaatggatgcaggagggccatttggtgctgcaattggaggaatattagtagctgaaatgatgttatattttacatcatggcggattaccttcattatttgtggcatcgcagctataactctggggctaatcgcatactgggttattcgcgacaggcctgaagattcgccaagagtgaataacaaagaactgggaatcattaatctcgatcgtgttgtacaagatacagtagaagaaaataatgatcccttattaaaagtgattccactacgttccttcatcggcatgcttctaggccgttgttcatgggctatgtgtttctttggtttattaacatgggggccgggatatcttacacgagcattaaacctggatttaaaagccgttgggtttgccacaatgatcgttttctgtgcaggtggttgtggtagcctttgtggaggatggctcgcagataaacttgcaagtaaagggttcggacaggctagatcatgtaaatttctattaacagtgtcaggtatctgcacgcttatatcatttgctttattaccaagtattcctgacgtaaaaacatcgattattttactgtcctgcgctgcatttgttttaatgtggggaagtatgtactggacattccctcctttactggcaccccgttctcgcgtagctaccgtcggaggaatgatgaatatggcgggaagtgttgggggcatttgcattcctttattagtaggacttattttagatgtaacaaattcattcaatcctgtactctatttctttgctggttgcgcagtgatatttattttaatgacaaacattattgatttacgacacgtgcgatag

SEQ ID NO: 25216 - DNA, 957 bp, Escherichia coli
atgaacattaagccactaaatttatatgatggtcctgtaatcgatgctcatcatcatttctgggatccgataaaaaacgatcatccttggttgaaaccggatgttttaattccttttagatatggtgattatacagccattaagagaaaatattatccagaagattattttgcagatgtaggtgatattaatattgttgaaacatgttatatggaaactgaatggaatccaacggatccatgtggtgaaagcgatttcattacatcagtggcaaaaatgacaggttatccaaatgctgttgtcggtcaggcttggttaaaccatgatgatatagattctgtattaaaaatgcagagctcatataagctaatgcgaagcatcagacataaacctgaaggcccggataaaccagaagatgttggacagtataccacactgatgagtgatgaaaaatggcgatatggctattcgttactttcgaaatataatttaatgtttgaccttcagacccagtggtggaacctgcatgaagcagtaaaacttgcaaatgattttccagatacagtcataatacttaaccatacaggacttcctgcacaacgatctgctgaagggcttgccggttggcattcagcaatggcttctttagctgagtgtcaaaatgttatggtcaaaatttcgggaataggtttaaaaggaatcccatggacaatggagaataatttatggattatatctgaaaccttatcaatgtttggtcctgacagggtaatgtttgcaagcaatttccccgtagatagcctttgtggcagctttactaatatattccatggttttatgacagtgtgtgaaatgaaaggatattcgcatgccgctcagcggaagatgtttcatgacaattgtaagagaatttatcgaacaatcccaccacataaattgaaagaaaagcatagctaa

SEQ ID NO: 25217 - DNA, 282 bp, Escherichia coli
atgtttgatctaaaaatcattttcatatccatctttggcggagtgcattcgtttctgaatggggttcgtgaaaaacgttacgaagcatcatgcaggcaattgctggccgagtgtcttgctgccgtacttgcaggctttataggcatgtgtttcgcggaatataagggtatggatgaaagtcttcagaattgcgtgactcttatttgcagcatcaataacaggctcatttttgaaaggttacaaaggcttatcgattcgtacctcaatagaaatgcctcttaa

SEQ ID NO: 25218 - DNA, 1308 bp, Escherichia coli
atgagcgaatatgttgagttagcatacgctgccgctacaagcaggctttgtctatttaccgggactggcttttcaaaggcagtctcgaacggcgaagctccaacgtggaaagaactattaaaaaaagtttgcagcaaagttcacaacgccaaacagttggaagacacgttattccctgatgataaaccaccagcattgagccttgaagaagccgcacaaatactatctttgaagctcaatattgagggtaagtcgatttatgatgaaattgttgagatcatatctccaattcaacttggagaagatatatcaaatataaaagatttttttcaaaaaaattcattccgtgtcattacaacaaattatgacaagttagctgaatgcttaactggagatgaggaagtacagtctattaccccgggcttacctattcctaaatactcatctaaagttaaaatatatcatgtccatggttctattgattcaccaaaaaacatggttgttacttcagaagactacttcaggtttataaactctgacacctatttttcacaaaaacttagtacgatactacatgaaaatacagttgtgatattaggatattctttaagtgatacaaaccttaaggcaattataaatagttataagacattttctaaagataatgcactgtgctctaatatattcttcatatctcatggcgaagtaagtcaagacatgaaggactattacttttattgttttggaataagggtaattgacaatacggaaatagatgatttctttcatcgactgagcagtaagatactgctcatagaagatataatggagagagctcgtgaaaacattagaaaagttattgtaggttctcatacatataagaatgaatatattagattagaagactcattttatcagataatttcttcaattatatctgaaggtttggattggagtgacagcagagttgttgaattttttaagaggataatagaacaaaaaagaaatttaacaagagagagcggcgcttgggagcaatatgaacaacttgcaaaatggcttatatattttggaagtatcatagaaattgctggcactaaatatgaaaaggcatatttagaagcagtcgaatactcaatgtccaatatgagcaaagaaagacggttaggttattcgtggcatgcttatagagcttgggaaacgcgatggtctacaatcattgcttcaaatcgattaattataaaaaaacacatcgaggaacttggcgtactggatgacgccagttctatagtgaaaaatatagtgtaa

SEQ ID NO: 25219 - DNA, 138 bp, Escherichia coli
atgactgctttttttcagttcctgagtgcatttttagatgcgcctgttattagccagattctggcgatcatcctcatcatcgttttgattttgcttttaaggtcagtaaaaaatggaattatgcactggcttacttaa

SEQ ID NO: 25220 - DNA, 363 bp, Escherichia coli
atgagagttgcagatcacatcaaacaccttgaaagaattatcgaaaacggtgaactcttaagagatcagatgagacgcacggcagaagtcagagaggcgataatccgcagtcaggctggtaaattaaagcaattatcagagattaacgcgctatacaagaacagacgtaaccgggcggcgctgcggcttcagaaagcacgtaatgaaattaaattggtggaggcaaaactgaaaaaacagattcagcgttacgatcagcaagatgctttttatgccgccatcaaggcggctgctaatgaaataggcatctggaagttgctggtggagaaagcaaagacgaagttaaatgccaacgaaagctga

SEQ ID NO: 25221 - DNA, 132 bp, Escherichia coli
atgtcaaaaatgcccaaaatagatgtttttattttctcagcaattgttggctttggttttactgctggagtgcagttttgtattgcgtggggaaaaattatcaactacctatggagttgttttattcagtga

SEQ ID NO: 25222 - DNA, 474 bp, Escherichia coli
ttgtacgcctcatacatttgcaatccagtagcagcaccttgtgttgtaccggtgagcgcagtaacacgccctctggacgtaattgttggtatcgaaatgtccacagaaccatcaaatttaacaccgttgatgtttcttgccgtcgcaagttttgtcgcggtagcagcattccccgtggtgttctggttacctgttgtatttacacctggaagattgatattggccgagccatcaaatgccacaccgccaatcgagcgtgctgttttcaatttcgtcgcggtgtcggcgttccccgtcagcgccccggtgatcccgccgttgaaagtctggcgtgcactccatgtgttagccgtgctcaacagggggatcttttcaccgcttgtgccgagttctcttaaaccaaggtattggataacagcaaggacgcttgttttggccagaatatcgcgaccgactgacgttaagtcagtctga

SEQ ID NO: 25223 - DNA, 450 bp, Escherichia coli
atgaccactattaccagagaaagctcgaagattaaatcattcatcaatggcttcctgagcgacccggcgcacgataatcaatctttagacagtctgcttgctgatgtgtttcgtatcgcactggcatcgttggaagcagagccagttgcgtggcgatattgctacgtgaaaaaaggcgttacggactctcagggggagtcgtgggttggtgactggaaatatgtaccgacaaaagaggattgcaacgacagaccgaactatgaaattcaggcgttattcacggctcagcctgtgccactgacacaagaaggattgattaaagcagtgcgtttctatgaacaggtaaagcgcgagaatccgccagtcgaaaccggagcatggaaagacgctgttgactgggtgctcaaagaggcttgccaggctgtaaacattggtactaaaggagattga

SEQ ID NO: 25224 - DNA, 714 bp, Escherichia coli
gtgagtgaaatcaattatcaggtactgcgtgaagcagctgagagcgccagtaaaattaactggacaggccttgaagatgatttgaacgctgatggatatatgcgcacactgacgcggtatatccaatgccattcaccgattattacgctatctctgttggatgagcgaaatgcattgaacgaacgcatagccgaactggaggctaatttagcggcgatgactgaagaccaccagagagcgattgagtcaattaagcaggctgatgcggctgttaagttggcacatgagaagttttcggcgctggcagcggagaatgcggggcttaaggccttcaaaaccgccgtttatcagcagatgggcgtcggatgtgatgctcctgaattctccattacgacaggtttgagtaacttacgtcgttttgctgacacactccacgccattgaacgtgagttctttaccaaagagctacctgatgaagagcacgaaggcgaaacattcaatgaatgtccacttagctggggaatgagcgtcgaacagtacgtttccgagtttcgcaaatgcctggctgaagtgcgggcgcagggattggagatgtttgcacagaaatgtaactcaaaatccgaacagtcgcttgcatctgatatacgcgataactggaaactactcggtgagcatgcgactgactttgccgcagagcttcgcaaaggagagtga

SEQ ID NO: 25225 - DNA, 288 bp, Escherichia coli
gtgaagagttttatttttgttttatgttttgccttttctgctgcggtttatgcccaggaagatagcatttctgttattaactcatcagcggagcttgcatgtaaaaataatcccgatgctgcatcaaaagagtcatgcaaagagctgctcctttcgacggctgcttttgcttctgaaaatgcaaaattttattcagccttttgtcgcggctatgttaaggacgaagataaagaaaaatgtgatgatgccggtaagttagttaggtatttccaatctcttaatcagtaa

SEQ ID NO: 25226 - DNA, 597 bp, Escherichia coli
atgaaaacacgaggcgaacgactgaaagcacgccgtttagagatgaagctgacgttgcgagaagttgctgaggctgtcgatatctctatagcaggcgtccaaaacttagaacgtggcgacgtaatgccgtcactggagataggtattgccctggctaagtgcttacgcaagccagtgcattgggtgctatatgggacagaatatgatcctgatcgcattcctgttattggcacaactgaaaatgggccggatgaagagtggaagccgggacaggttccaaatactgagcgattcctgccattcatcagccagcgcaatactgtgtatgcgttaactatcagcaatcttacgcagggaaactatcagccaggcgattttctcctggtcgattctgcgctggaactggtccccggcgaggatgttctggttcgtgatactgcaggaaatatcactatccagcgcctggcccgttttgatgatgaaaattactatctggatggaacaaactcacaacgcgccatcttcaggaaaagcgatcttgaatttgttcaccaaatagtcggaacgatcaaatcattcatggttgagggtagatga

SEQ ID NO: 25227 - DNA, 711 bp, Escherichia coli
gtggagcttgagtatatacgcagctgcgtctctacggcattggctgatgttcattatcgccagcgtggcattctggaggtccagcttgagcagatgcgtctcggtaggtcaggacggtttaacaataaaccagtccggtcaatcagtgtgggggatgataactcatacgaagtgtccgttcctgctgagccggttagattccaccatgggaaaacatttaaacaatcatcaatgttgctcactgatattgattttcagagcgccagctggcgcagggctattggtcagttgaataacgaggaatcagcctggctttattattgctacggatgcaagcctgattacaacaatgatgtgattgtttgtcagtggttatggcttgattttctggttgctcattcggggggcggcttaaaaaaaatgaaggcctccacgaaaaaagccatgcggaaattgatttattacgcggcacagcaggttaaatcagaacttacgtgtgctgaggcagttgatgagagagaacaggacaggcatctgagttttctactgaatatatctattgatagctggagacaagattataaagaacgctggcttttaattaagtcgcgatgtctgagcttaaatcgaactgcattattaaatgcggcggagaagcgcagtgaaatcatcaaacgccatcgggcaggaagtgccattctgcctttgtaa

SEQ ID NO: 25228 - DNA, 714 bp, Escherichia coli; identical to SEQ ID NO: 25224

SEQ ID NO: 25229 - DNA, 450 bp, Escherichia coli; identical to SEQ ID NO: 25223

SEQ ID NO: 25230 - DNA, 414 bp, Escherichia coli
atgagcacttttaccgacaaagaactgattaaagaaatcaaagagcgcataggcagcttggacgtgcgagacaatattgagcgccgggcttatgaaatagcgttagcctcgctggaagcagaaccggtggcatggctgcatttagacaatggcttaggtattccggcaataacccggagtaagaacattgctgacagttggttatcaaagggctggtatgttcagtcactatatgtagcccagccactgccggtggtgccggatgataatcgtattcagttttctgtttcacttcctgcagcgtttggtggagataaatattttattgatggtgtatttcaacctttgagatatgagcgtgactgtgaaagggcggttgtggccgctggcggtgtagttaattgggttaagtaa

SEQ ID NO: 25231 - DNA, 1272 bp, Escherichia coli
atgaccctgccctctgaaaaaccagccacagatgtggctgcgcagtgcttcctgaatgcactgattcgtgaaaccacagactggaaactgacagaatacccgccagacgaattgctcatcccgctggatgagcagaaatcgctccatttcagagtggcttatttctccccaacccagcatcaccgctttgcatttcctgcacgtctggtcacggcatcaggcagttatcctgtcgactttaccactctctcccggcttattattgataagctacgccatcaactgtttctgcccgttcccctctgcgaaactttccaccagcgcgtgctggaaagccatgtccatacgcaacaggcaattgatgcccgtcatgactgggccgctctgcgtgaaaaagcgttgaattttggcgaggctgagcaggcgctgctgacaggacacgctttccaccctgcgcctaagtctcatgaaccgtttaaccggcgggaggctgaacgctacctgcctgatatggcaccccacttcccactgcggtggttttcggtggataaaacgcaaatcgccggtgaaagtttgcatctcaaccttcaacagcggctgacgcgatttgccgcagagaatgcgcctcagttactcaacgaattaagtgacaaccaatggctgttcccgttgcacccgtggcagggggaatatcttttgcagcaggggtggtgccaggcacttgttgctaaagggctgattaaagacttaggtgaggccggcacgtcgtggctgccgaccacctcttcccgttccctctactgtgccaccagccgcgatatgatcaagttctccctgagcgtacggctgaccaactccatccgtactctgtccgtgaaagaagtgaagcgtgggatgcgcctggcacgcctggctcaaaccgacggctggcagatgctacaggtccgcttcccgactttccgggtaatgcaggaggatggctgggccgggctgctcgatcttaacggcaacatcatgcaggaaagtctgtttgccctgcgtgaaaatctgctggtggatcagccgaaaagccagactaacgtactggtctccctgactcaggccgcacctgatggcggtgattcgctgctggtttcggcggtaaaacgcctgagcgatcgcctcggtatcactgtgcaacaggccgcccatgcatgggtcgatgcatactgtcagcaagtgctaaagccgctgtttacggctgaagcggattacggcctggtgcttgattag

SEQ ID NO: 25232 - DNA, 1167 bp, Escherichia coli; identical to SEQ ID NO: 14593

SEQ ID NO: 25233 - DNA, 966 bp, Escherichia coli; identical to SEQ ID NO: 14592

SEQ ID NO: 25234 - DNA, 465 bp, Escherichia coli
gtgctgctggcgcatcagcaaaatattcttgtccagatgcttggggatctgccggtcggatttatttaccgtgactgtcagggcagcgcttttatgcctcacgcgacagactggctcgattctattggcgaggcgcaggcggaaaatattttcacccatgagcagttgctgcgctatttcccttattacctgctggttaactccacttttgctgtgaccgctgcgctgggggctgccgggctggacagcgaatcgaatctgatggctcgtgtacgagcatcgctggctgaagtgcgtgatcaggtgactcataaaacctgtctcaactacgtgctggaaagtccgtactggaacgtaaaaggtaactttttctgttatctgaacgatcataacgagaacaccattgttgacccttcggtgatctatttcgatttcgctaacccgctgcaggctcaggaggtctga

SEQ ID NO: 25235 - DNA, 822 bp, Escherichia coli
atgacttcagaacaacaactggcagaccactggcttaagcgaaacgaaacgttaaacgcctttattttatttgaaggtggagcgctctctcaggaaatgcttcagatcatgatggatcattataaataccgacgaatttccctgtatcaactgcccgatattaaaaaggtagcagcttacggtccctggttggtttgcattgaaagtgaaaaggatctggcgatggtgcttgtcgggaaactacctgtcgcaggcatagttttttcagagctgccgctggagcaactagcctcccggcttgctgtggggtgtatggcaaaaacgccggatggtcgtgaagttctgctgaggtactacacgccccgagtgctgaaacaactggctgcccggcctgatatggagtggcatccggtgatgttctctcagatagaatcatggtggatgcaggaagatacacggtggcaactgctgaacataccgtattctgaggcagataatggtgatgagacagtggaaatcataacgcttgatgaaccgctctggcagaaaatagcggatcggggagatgtatctgcgcttttaagagagtggcacaccatgaaaacgagtgagcacttcccgccctgtattcagcgaaatatggtggagaaggcattgaataaggcacaagcggttggactgacaaagccactggatcagaaaatttatgcgttgagctatctgaatggaaagaaagcgtatcttgagtcagccgaatttcaggccatgctggaaaaggtgaaacgaaatgaaatttcgttgtctgaccttagtcgccagtga

SEQ ID NO: 25236 - DNA, 330 bp, Escherichia coli
atgaaaaccttccgctggaaagtgaaacccgggatggatgtggcttcggccccttccgtaagaaaggtgcgctttggtgatggctattcccagcgtgcgcctgccgggctgaatgccaacctgaaaacgtacagcgtgacgctttctgtcccccgtgaggaggccacggtactggagtcgtttctggaagagcacgggggctggaaatcctttctgtggacgccgccttatgagtggcggcagataaaggtgacctgcgcaaaatggtcgtcgcgggtcagtatgctgcgtgttgagttcagcgcagagtttgaacaggtggtgaactga

SEQ ID NO: 25237 - DNA, 2562 bp, Escherichia coli
atggctgaaccggtaggcgatctggtcgttgatttaagtctggatgcggccagatttgacgagcagatggccagagtcaggcgtcatttttccggtacggaaagtgatgcgaaaaaaacagcggcagtcgttgaacagtctctgagccgacaggcgctggctgcacagaaagcggggatttccgtcgggcagtataaagctgccatgcgtatgctgcctgcgcagttcaccgacgtggccacgcagcttgcaggcgggcaaagtccgtggctgatcctgctgcaacagggtggtcaggtgaaggactccttcggcgggatgatccccatgttcagggggcttgccggtgcgatcaccctgccgatggtcggggccacctcgctggcggtggcgaccggtgcgctggcgtatgcctggtatcagggcaactcaaccctgtccgatttcaacaaaacgctggtcctttccggcaatcaggcgggactgacggcagatcgtatgctggtcctgtccagagccgggcaggcggcagggctgacgtttaaccagaccagcgagtcactcagcgcactggttaaggcgggggtaagcggtgaggctcagattgcgtccatcagccagagtgtggcgcgtttctcctctgcatccggcgtggaggtggacaaggtcgctgaagccttcgggaagctgaccacagacccgacgtcggggctgacggcgatggcacgccagttccataacgtgacggcggagcagattgcgtatgttgctcagttgcagcgttccggcgatgaagccggggcattgcaggcagcgaacgaggccgcaacgaaagggtttgatgaccagacccgccgcctgaaagagaacatgggcacgctggagacctgggcagacaggactgcgcgggcattcaaatccatgtgggatgcggtgctggatattggtcgtcctgataccgcgcaggagatgctgattaaggcagaggctgcgtttaagaaagcagacgacatctggaatctgcgcaaggatgattattttgttaacgatgaagcgcgggcgcgttactgggatgatcgtgaaaaggcccgtcttgcgcttgaagccgcccgaaagaaggctgagcagcagactcaacaggacaaaaatgcgcagcagcagagcgataccgaagcgtcacggctgaaatataccgaagaggcgcagaaggcttacgaacgcctgcagacgccgctggagaaatataccgcccgtcaggaagaactgaacaaggcactgaaggacgggaaaatcctgcaggcggattacaacacgctgatggcggcggcgaaaaaggattatgaagcgacgctgaaaaagccgaagcagtccggcgtgaaggtgtctgcgggcgatcgtcaggaagacagtgctcatgctgccctgctgacgcttcaggcagaactccggacgctggagaagcatgccggagcgaatgagaaaatcagccagcagcgccgggatttgtggaaggcggagaatcagttcgcggtactggaggaggcggcgcaacgtcgccagctgtctgcacaggagaaatccctgctggcgcataaagatgagacgctggagtacaaacgccagctggctgcacttggcgataaggtcacgtatcaggagcacctgaatgcgctggcgcagcaggcggataaattcgcacagcagcaacgggcaaaacgggccgccattgatgcgaaaagccgggggctgactgaccggcaggcagcgcgggaagccactgaacagcgcctgaaggaacagtatggcgataatccgctggcgctgaataacgtcatgtcagagcagaaaaagacctgggcggctgaagaccagcttcgcgggagctggatggcaggcctgaagtccggctggagtgagtgggaagagagcgccacggacagtatgtctcaggttaaaagtgctgccacgcagacctttgatggtattgcacagaatatggcggcgatgctgaccggcagtgaacagaactggcgcagcttcacccgttccgtgctgtccatgatgacagaaattctgcttaagcaggcaatggtggggattgtcgggagtatcggcagcgccattggcggtgctgccagtggtggagcatcagcgtcaggcggtacagccattcaggccgctgcggcgaaattccattttgcgaccgggggatttacgggaaccggcggcaaatatgagccagcggggattgttcaccgtggtgagtttgtcttcacgaaggaggcaaccagccggattggcgtggggaatctctaccggctgatgcgcggctatgccaccggcggttatgtcggtggcaccggaagtccggcgcaaatgcggcgttcagagggtatcaggtttgagcagaacaacaacgtggtgattcagaacgacggtacgaatggtctgccaggtccacagatgatgaaggcggtgtatgacatggcccgcaagggtgcccgtgatgaaatccaggcacagatgcgcgatggtggtctgttctccggaggtggacgatga

SEQ ID NO: 25238 - DNA, 603 bp, Escherichia coli; identical to SEQ ID NO: 7227

SEQ ID NO: 25239 - DNA, 546 bp, Escherichia coli
atgattaattttaaaaagttcacatcctacactccagatgaagataagtcagagcttgttgaagctggagttgtatttttacgtgatgaaaacggtaatgactggtatgaatgtcagaaattttttcatgagaatacgataaagatagtttatgacagcgataatatcgtcgtgagtatttcaaacgatgtttcaacactctggcctgtgggggcatctgtagcagaaatagaaactctgcctgatggagtagatattgatgggaactggatatttgacggagaaaatgtggttgaaagagtaagaaccgcagatgagttaaaaaccatggcggaatcaagacgcactgagcgacttaacagcgcacgtcaacagctcgtgattagccagacaaaattactacgcggcagaatattatctgaagatgaacagtcagctcttgacgcctggctggactatatagatgcagttaatgcattagatttcaacacaataacagataaagccactttcaatgcgatcgcctggcctactgagccagtttaa

SEQ ID NO: 25240 - DNA, 516 bp, Escherichia coli
atgaataattttaaaaacttctcttcctacacgccgggagaagataaaagagagcttattgatgctggagttttattccttcaggatgaaaacggtaatgactggtatgaatgtcaaaagttgttttcagaatctacaagaatagttgcatatgatagtaacgatatagttgtcagcattacagatgacgcctcaaccctttggcccataggattatctgtagcagaagtggaaagcttacctgaagatgtagatatcaacggcagttgggtgtttagagataactccgttgttaaacgcatatattctgatacagaattacaacagcaagctgaatcaaaaaaggcagccttgctttcacacgccgaatcagtaatcgcaactcttgagcgggcagttaaattgaatatggcaactgatgaggaacgagaaaaactggaagcgtgggagcgttatagcgtgttggtttatcgtgtagatacagctaaaccagaatggcctgaagaaccggagtga

SEQ ID NO: 25241 - DNA, 501 bp, Escherichia coli
atgaataacacagacacattagaaaaaataatcagacaccaaaaaaacaaagaccccgcatatccctttcgggagcatttgttgatgcaactctgtattcgcacaaataaaagaatgcaggataatatatctgaatttctgggggtgtatggaataaatcactcagtatatatggttctcaccacattattcgcagcggagagtcattgtctgtcaccttcagagataagccagaaacttcagtttaccagaactaatattacccgcattacagattttttagaaaaagccggatatgtaaaaaggatggatagcagggaggatcgccgtgctaaaaaaatcagtctgacatctgaaggtatgttttttattcagaggctcactcttgcacaaagcatgtatctgaaagaaatctggggttatctgacccatgatgaacaggaactgtttgaagtcattaataaaaaattactggcgcatcttgatgatgtcagctcataa

SEQ ID NO: 25242 - DNA, 189 bp, Escherichia coli
atgactgcagaacaagtcaaagctctcttccgccagcgcgggatcactttcacccgctgggcagaagaaaacggctacaaccgcaatgaggtataccgcgttctcaatgggcagaccaaagcccgttacggtaaatcccatgaaatcgccgtgaagttggggctgaaatcaacagctcaggcagcctga

SEQ ID NO: 25243 - DNA, 912 bp, Escherichia coli
atgggacgtaccaaatcaccaatgtccactgatctgaatgctgaggtgccgctgtctgatgatctcaacatcagtcttaataccatggcacaacaccgcgtggagatcatgcagcagttcggcgatggtctgccttatgaacgtgatcgcattgttcacgaagcacgcttttatatggcacaaagtgctgaggccatgctagaggcaggtaaacgactgataatactgaaagaaaatgaaccatatggtgatttcataaatattgtcgagtctgaattatcaatgtcaaagcgtactgcacaggtaatgatgcaggcatcaataaaatatttatcaccacaacttgagtcaaaagcgcagacgtttgcgcttttaggaaaagccaaattattcgagttaatgacggaagacgatgaaaaccttgccgaactggctgatggtggcactgttgccggcctgacgcttgacgacgttgatcgcatgtcagtacgcgaacttcgccaggccctgcgcgaagcgcgcgaaaccaacgcagcacaacagcgcgtactcgccgataaaaatgaaaaaattgattctctctctaccagactggaaaagaaatcccgtattcagccgcctgagcctgatgaggaggttaagaagctgcgggcggaagtgacagcattagcggttgaggcggaatctgctatcgccgtccgactgtccagcgcttttgagacactgtgcgcatattgtgctgaaaacatgattgatactcccagagacttcatggcaggcctggtctgtcaactggaaagcacagcgcgtagcctgcgctccacatttgacctgccggacgagccaacaggcaatgcagcgccttcatggctgactgagccgacgccacagattaacgggctggaggcataa

SEQ ID NO: 25244 - DNA, 576 bp, Escherichia coli
atggatgttcacggcatcacacattccgacattgctatgagtgatattgatgaaaccatcagtcattactggccgacaggcagtctccgtccaccgcgctacatgctgggcctgatgaacatcatccgcgaggcatttggtgttaactccatcattcaccccggcacgcatcagtctgtggggttctacggcaaccgggaacgtgcggcactggctgcatacacctgggaagtgctggcccgtcagctgaaaaaggcgcgtcagcagtatatcagtgcacagaacaaaagaataaaaaccgccacccgcaccagccgtggagaccagtttgccgaaggctgggtgctggccgttatcagtgaaatacagtccttcgccctgaccgatgacgaacgtgaactgatgcagcagtggctggaacataaatacccgcagacgcaaaccaccagggcgcgtaaaccgggaagaagccgcaatggcgacgcctcgcgctatgcggggtttcgtgaagggcagaacgtcagactgcaccgcccggtcagtgggcaggaacaacagaaactggaggccagatga

SEQ ID NO: 25245 - DNA, 273 bp, Escherichia coli
atgcagcatgtccctgaaggcgtgattcaggcaccagaatcacccgacgccccagaggcgctgccggggtgtcgttccatttctgatgatgacctgtgcgcctggtgtacccgtctgctttaccgtcccggagaaatcagtctgtgcagactgagtatacaggcaatggcatctggccatccgtctgtgaccggaacggttacgcgtacggctgtccggaatttcagccgaatatcattcatccctgatattaccgggtctcacggtcagtga

SEQ ID NO: 25246 - DNA, 228 bp, Escherichia coli
atgacactgtcgggctataacggtggtctgggctgggtacagcgggacaggcggcttgcatcacaaaaagggctggacagcacccgctggtttggtcatgtcgccacggtgaatgccggacgcagcactgccagctggcgggagaaccgtcattatccccagcgcatcctgttcacgctggccccgcgttatctctcatggggaggggcaagctgtgtgggtacgtaa

SEQ ID NO: 25247 - DNA, 231 bp, Escherichia coli
atgacactgtcgggctataacggtggtctgggctgggtacaacgggacaggcggcttgcatcacagaaaggtctggacagcacccgctggttcggacatgtcgccacggtgaatgccggacgcaatgcggccagctggcgggagaaccgccattatccgcagcgcatcctgcgcgaactggcaccgcgatatctcacatggggaggcagcagttgtgtggcatctggttaa

SEQ ID NO: 25248 - DNA, 2160 bp, Escherichia coli
atgaatgacgttacagttgttacatcggttacttacccatcacccgagtcgttggctctggtgtctgatgtgcaataccacgaaccatatctgtcagccgctctaaaccgaaaattcaggggaattgttgacccgggattttatgctggtttcttgcctaagcctggcggtgggatgaacctgttaatcacctcagtggatggagataaaaccgctggcgcagcgtcagtggatattggtgaattctaccaggtaactattcagcatcgtaaggatatctctcttgcacttaacgcaggcaagaaatatgcaattgtgctgaagggaagataccttcttggagaagatacctatcaggtgaataccgcgtcacatattcatgcagctgaatttgttgccagaacctataccgattcatatcagttaggtgatggggaactgctggtttgtacggtgaatatccctgctggcgtatctaccattactcaagagatgattgatacatccgagcgtatcaaccgcacgatcggcattgatatttcagactctgtaaccagtaccagaagtgatgttgctgcgagttcgctggcagttaaaaaagcctacgatctggcgaaaagcaagtatacggcgcaggatgcaagcacaacgcaaaagggattagttcagctcagtagtgccactaacagcacgtctgaagtgctggccgccacaccgaaagctgtcaaggctgcatatgacctggctaacgggaagtatacagcccaggatgcaaccacggctcaaaaagggatagttcagctcagtagcgacaccaacagcacttctgaaacattagctgcaactccaaaagcggttaaagctgcatacgatctagcagccggaaaggcaccatccagtcatacacatccctggaatcagatcactggtgtaccaacagcttcattgacagcgaaaggcatcactcagctcagtagtgccactaacagcacgtctgaagtgctggccgccacaccgaaagctgtcaaggctgcatatgacctggctaacgggaagtatacagcccaggatgcaaccacggctcaaaaagggatagttcagctcagtagcgacaccaacagcacttctgaaacattagctgcaactccaaaagcggttaaagctgcatacgatctagcagccggaaaggcaccatccagtcatacacatccctggaatcagatcactggtgtaccaacagcttcattgacagcgaaaggcatcactcagctcagtagtgccactaacagcacgtctgaagtgctggccgccacaccgaaagctgtcaaggctgcatacgacctggctaacgggaagtatacagcccaggatgcaaccacgacacaaaaagggatagttcagctcagtagtgctaccaatagcacgtccgaagtgctggccgccacaccgaaagctgtcaaggctgcatatgatttggctaatggaaagcaagcggcagacgctacgctcactgctctagcggcactagctacagcagcagataaactcccttatttcacaggtgttgatcgtgccgcgttaactgcattgacaagtgttggacgcgccattcttggtaagaccagtattcagagcgttcttgattaccttggtttaggggaaggctcggcactgcccgttggtgtacctgttccatggcccttagaaacaccgccaacggggtggctgaaatgtaacggagcagcattttcttctgaaaagtacccaaatctggcaaaggcttaccccgccaataaattaccggatttacgcggtgaatttatccgtggctgggatgatgggcgtggtgtggatgcggggagagcaatattatcagctcagggcgatgccatacgtaatatctatggtgagttcagaactgtaaatactgaaaattattcaatatgggaaggaatgagcacgtttaagggggctgtggtgcctttaaatccctccacaaacaatagttatttctccttagtcaaaagtatggtgactgaaagggcagacggcgctgtttacccaaaagtgatcggccttgatgcttcaaaaattgttccaacagcaaatgaaaatcgcccacgcaacattgcgtttaattacatcgtaagggcggcataa

SEQ ID NO: 25249 - DNA, 1185 bp, Escherichia coli
atgacggtgaataaagtgaaggatattaaaaaacttgcacttggctcagtaagcgatctctataatagagattcaaatattacctggcgtgataatttaagtaaaatcaaaatgccaggatatacatcggcaagtgatttattaaaatcagaatatgcttctaataatttggttagacagttggcagaactgcaaaaaaacgcaatcattccatcgtatagagaacatatggcaaacttgcaagaacagttaagaatagggcggctagctcaagaacaaatagcaagattgaatttgcaatcgttacttagtgattctgttaaaaaacagcttgcgaacatgacgagcttgagaagaataaatagcaagcatcgtgaatttcttgaaattctacagaaacaggccaaggtttatcccccgcatgatgcaaataaatacattcaaatgctaaggaagcaggcagaaattgctatgccgttacgaaaccagttcgagatgcttaataagcaagctggtttaaataacatgcaagcaatacttaatgaattgcgacaaaatgtaagtcataagatagatttaaacaatgaaataaaagaatcattaaaacaatataccctagcgcaaaaggcttcattacatcaaataatggagcaaagtctttcatcaattgcacaggcttatgtcgaaggtgctattgaaacatctcacaacgaaagtgatgttcaagacaaaggattaaataaatccagttcgacgttcattgattcatttaagtcgctccctcacccgcttcagtttattattatgtggcttttaacagaagtggtgcttggcgctattgctgattatgcaaaagaacaaatcttatcgcaaatacacaagacagaatcatattctgtatccctatatgaggatgcaccaatatcaaaacaaaaattaattaaagaaaacacagaaattaagtgggaagatctcaatggttttaggtttataactggtgataacgtaagattacatgtcagtccttctttaaatagtgaagtgattgaatgcattggcaaaaacacaattgttgctattttagataagaaagatcgtcaatggctttacgtgcaggttaaatcaggggatgagtttattactggttggattacacgaacatacacaaagcctcttaaggcttga

SEQ ID NO: 25250 - DNA, 507 bp, Escherichia coli
atgaaattatataagtcattgtatagctttttattaatgtcctcttttctgccattatcagcaatggcaggttctaccgtttggacggtaggaggtgagcaagggtggagagaaatctctgcaaccaatgacgatggttatacaattaacttttcttgtgatgctggagcaagggaaggttccgaagatcatatagctggaagaaatttgtatgtaagtggagggaaagagaatgctgatttttctacacgcgacacaatttctcgtaaagctgatgtaattaccttaattgttggttcggatagctttaatattggtacgcaaaacactgctccaaatcgtagggaatggtattctttttggaagtcagcgtcagccacaaaagaaaaaaacatggatgtatatatcggatcgcgtcgaattacatcattctctcttgatggaatttcaagtatttacaaggaagctaaaaatgatggatgtttaaagcaagatgacggtgaataa

SEQ ID NO: 25251 - DNA, 606 bp, Escherichia coli
atgaaaggcgaagtgaaagagcgcggcatgatttttaacgatgagatggtccgggcaattcttggcgggaataaaacacagactcgcaggattgttgaagaaaaattctatggacgggcagtggccgcagagttgcttgccaagcattgtccatatggtcaaccgggcgatcgtatttgggttcgcgaaacctaccgggtacatggcaaagcgacggacgtcgcaacgctggtttatcgcgcaagcgtgcgtaactcctggacagaacaaacgcaccgggttccggtcgaggtttgtaataaaccagtatcagaaaagtggacgccatcaattcacatgccgcgctgggcatcgcgcattcttctggaaattaccaacgtgcgcgttgagcggttgaacgatatcagcgaatgcgatgcaagggatgagggcgttccgcctgctggaagtttgcttcctgatcacccgggaacattccttactcccaagggggatttcgcaatggccaaggttgcgttccagcgcctgtgggaatccatctacggcgaagaaagctggagtgctaatccctgggtttgggtaatcgagtttgagcgtattcagtag

SEQ ID NO: 25252 - DNA, 675 bp, Escherichia coli
atggcgcaaaaagaaatgactactctaacgacagcatacttacagcaattggtattttttgcaggcgaggctacttgtcatcctgacgcaaactatttattggaatttgagaggttagcgtcacccggtatcgttctggaactggcccaacaggtgctggccttgagacaaaaagagcaacatgaaagtaatacgtgtagattgaattttgagcagtggctggaacagcaacgcggaaaaatcgatgtggactgtggttgtgtgtccactgaaacattcatgcactggctgcgggtagcttacgaggctggcaactatccggatattccggatagttcggtgccagcgccaggaaagggcgtcaccggtgaacgtatccgcattaagccgcatgtttatcgcgaactggttaaccgtctccacgatacagcgatcaagtgtgctggcacccagcaattacgagaaagaattagccgtgttttgggcgacgttattacgccatatcatcataaacaagccgagaaaagcggtctggaaaggtgtcatcttgaggcagcattaaacattaagccggggcatacgcttggcattattgatgcactgttggttcataagatggccagggctttattgtcgttggtggacgctggtgatacaagcgagggtgaagtatga

SEQ ID NO: 25253 - DNA, 1269 bp, Escherichia coli
ttggcctcgctggtcgttatcctgcaagctatcactttattggctacggtgattagtagccgttctggtggttgtgatggtggtatgaaaaaagttattttatctttggctctgggcacgtttggtttggggatggccgaatttggcattatgggcgtgctcacggagctggcgcataacgtaggaatttcaattcctgctgccgggcatatgatctcgtattatgcgctgggggtggtggtcggtgcgccaatcatcgcactcttttccagccgctactcactcaaacatatcttattgtttctggtggcgttgtgcgtcattggcaacgccatgttcacgctctcttcgtcttacctgatgctcgccattggtcggctggtttccggctttccgcatggtgcattttttggcgtcggcgcgatcgtgttatcgaaaattatcaaacccggcaaagtcaccgccgccgtggcggggatggtttccgggatgacagtcgccaatttgctgggcattccgctgggaacgtatttaagtcaggaatttagctggcgttacacctttttattgatcgctgtttttaatattgcggtgatggcatcggtctatttttgggtgccggatattcgcgacgaggcgaaagggaagctacgcgaacaatttcactttttgcgcagcccggccccgtggttaattttcgccgccaccatgtttggcaacgcaggtgtatttgcctggttcagctacgtaaagccatacatgatgtttatttccggtttttcggaaacggcgatgacttttattatgatgttagttgggctagggatggtgctggggaatgtgctaagtggccggatttcaggacgttattcaccactgcgcattgcggcagtaactgactttattattgtgctggcactgctgatgctctttttcttcggcggcatgaaaacaacgtcgcttatttttgcatttttttgttgcgcgggattatttgccctttcagcaccactgcaaatattgttactgcaaaatgccaaaggcggagagttattaggtgccgcaggtgggcaaatagcgtttaacctcggtagcgccgtcggcgcatattgcggtggtatgatgctgacgctggggctggcatataattacgtggcgctacctgccgccctgctttcgtttgctgcgatgtcgtcgttgctgctgtatggtcgctataagcgccagcaagcggcggatagtccggtgctggcgaaaccagtggggtag

SEQ ID NO: 25254 - DNA, 1383 bp, Escherichia coli
atggagatgtattttaaaagaatgaaagatgagtggaccgggcttgtcgaacaagcagatccgctcattcgtgctaaagccgcggaaattgccgttgcgcatgcccattatctgagtattgagttttaccgaattgtccgtatcgacccgcatgccgaagaattcttgagtaatgaacaagttgagcggcagttgaaaagtgcgatggaacgctggattattaacgtgctttctgcccaggttgacgatgtcgaaaggctaatacaaatccagcataccgtcgcggaagtgcatgcccgcataggaattccggtagaaattgtcgagatggggtttcgggtgctgaaaaaaatcctctatccagtcatcttctcttcggattattccgccgcagaaaaacttcaggtctaccatttctctattaacagtattgatatcgctatggaagtgatgacccgcgcgtttacctttagtgacagtagtgcctcaaaggaagatgaaaactatcgtatcttctcgttactggaaaatgccgaagaagaaaaagagcggcaaatagcctcattactttcatgggaaatagatattatctataaagtcctgctggattctgatttaggcagtagtttgcctttaagccaggctgattttggcctgtggtttaaccataaaggtcgacattattttagcggcatagccgaagtgggccatatctcccgtctgattcaggatttcgacggtattttcaatcaaaccatgcgtaacaccaggaatttgaataacagaagtttacgggtaaaatttttattacagataagaaataccgtatcgcaaattattaccttgctgcgtgaattgtttgaagaagtatcgcgccacgaagtcggtatggatgtactgacgaaattacttaaccgccgtttcctgccgacgatcttcaaacgcgaaattgcccatgccaaccggaccggtacaccgctgtcagtgctgattattgacgttgataaattcaaagagattaacgatacgtggggtcataacactggcgatgaaattctgcgtaaaatctctcaggccttttatgacaacgtccgcagtagtgattatgttttccgctacgggggcgatgaatttatcattgttttgactgaagcttcggaaaacgaaacgttacgtaccgcagaacgtattcgcagtcgggtggagaaaaccaaactgaaagccgcaaacggcgaagatattgccctctcactttccatcggtgccgccatgtttaatggtcatcctgactatgagcgcctcattcaaatagccgatgaagctctgtatatcgccaaaagacgaggtagaaaccgtgttgaactctggaaagccagtctttag

SEQ ID NO: 25255 - DNA, 1737 bp, Escherichia coli
atgggttcccacctgatgcaaaggctgaatgcctttgccgatgcattttccttttttctgttatggctgcaaaacagccctgtcatattatccctgctcgcaggtcttacattaccttttatattccaccttccccgcgaggaaagaaagaacgccccgttctggttaaagtcggtggcgtgtgtgtccattttcttttttatattcggcaccatatcaccgctaactattcaggggctgagctacttttttaagtctctcgacaacaacatactgtttagagttccgttatggatcatgaccataatatttacggcggcaggattaatatttcatattgcagcccgacgacttttagcaggagaaattgacaacctaaaacatcgaatgattaagaaaagcaagctagagagaaataccagaacagatgtacggaaagtaaaagagctattacccgacagcatagaatacaatccactcgattacattgatttaaagaaaggcgtttttattggcttaaacaaagatgaccagccgcaatacataaccataaaagaatttaaaacccaacacgcagcaattatcggtacaacaggttccgggaaaggcgtaactgcgaccgtcctactttatcaggctattcttttaggtgaggctgtttttgtagaagatccaaaagatgatgaatgggcaccacacgtacttagggaagcatgtaaaaaagcaggcaagaaattcacacttataaatttaaacaagctcaatttccagcttgatttactggctgatatctctcatgaacaactggaggaattatttaacgctggctttagcctggctaaaaaaggggaggcttcagatttttatcgcatctctgaccgtcgcgcagccagaaatacatctgcaatttatgaaaaaggaatgacacttcgtgatttatttaacactgactttgttcagtcattacgtgaagatgttcccgcattttgtggcgagctggaagaaattgctttagttaactcaattaatgccaccaaaggattttcattaaaagaggtttttgatgaaggtggttgttgctacattattggttcaacgcgcaatcaaaagataatttccgcacaaagaatgattctgacccggctgatacaaatagcagagaccagggacagaataaacagcaccccgcgtactgttgctattttcctcgacgagttgaaatatcatctttctcgccctgctcttgaaggacttggaacggcgcgagataaaggcgtgcatatattcatggcttttcaggcgatagacgatctgcgtgactgcccgtctgatttaaatggtgattcagttattggcgctatcattgaaaacgccaaattcaaattaatttataaaatccaaaaccccgaaacagcagaatgggcggcaaaaatgacaggctctatcctagttgatgatgaaatgaggaaagtacggactgatttgtcattaacggagaaagtggatacagaccgaatgataagacaggcagaaagttactatgttgacagtaatatgtttttaaatctccctgaaaaagttggttttgtatttacgtcaaccgaactaccaagagctacaaagatgtttcaggttcaggtcaaaaaagaaaatatcgaacttctttcatttgagtataaacaagccacaccagaaaaaaatgaaagtcaggaacataagccatcaatcaatctgtga

SEQ ID NO: 25256 - DNA, 756 bp, Escherichia coli
atgcttattcataacgttgcagaaaggaaagaagcagcgaacagaaaaatgcttgcattgctgacattccttaaagaagaaacatactccgattttaaaacgctgaaaaaagttgttgggttcaagggtaaaagtcaccgcccaacgtatgcgctactgaataaagcggttgcattggggtttctgataaaacatgaatacccggtaatagccggaaaaaaatcactatggggtatcaccatgcaagggctggcgatggtggttaaacctgatgataaagtattccccggttattttgagccgggaaaactcaaatactggacgctggaacaccggctcctgaatcatcgggtcagaattgcactggaagagaaaggcgggcaaggctggcttaatggtgatcggggggagtttattgcacgttatccaggagttcgccatcgtcctgacgggattatcacgttagatagcggcgcaatcgtcgccgtcgaaactgagcgctcaatgaaaacccgcgcacgctatatcaacatcattaacagccatctggcggccagcgatgccggacgctggcactacgctatgtatgtcatgccggatgacaaaaccaaaacatcgttaatccggctgtttgaatccatcaaaacggtcatgaggaacaacgttccggtgccgttcgacgcgaagaaccgcgaaatgtttcttttccgcaccattgatgaactggagcaagcagccgccagcggcggccagtga

SEQ ID NO: 25257 - DNA, 474 bp, Escherichia coli
atgaaatgccgatctcgtttgcttgtgtttctgcccctgctttttcccgcgctttgcctggctgacttttctggccgtgttgttcgggtcgtcgatggtgatactgtccaggtactcaccgatggcaaaatggtgaaagttcgccttaacggtatcgatgccccggaatcggggcaaccgttcggccagcgctcgaagcagaacctgttaaagctggccgtccagaaacaaacggaggtcatagccaacaatacagatcgctatggccgctggctgggaacattgatgattgacggtatcgatatcaacgcagaacaggttaaagcgggtatggcgtgggcttatcgctatcatggccttgccagtgacgaaacaatgctacgccttgaagaagaagccagacggcatagaatcgggctgtggtcgtcatctgatccagtggagccgtggaagtggcgcaaacagaataaatag

SEQ ID NO: 25258 - DNA, 342 bp, Escherichia coli
atgatattcgctaaatttcagtcgctgacccataagatagacactatggttattcgtgacattaaacgagagatgccgttgaaatactggtcattcaaagtggcggaatggatcgccagaatcggaacgattggttttgtactcacttttatcacgtattttggattcggcctcatgatgcagtattacggccaaaacctgccggaatcgtttactgagggatgcgctcaagccatcgttgcattgatagctattgccctggtcggtttcctggtcagaggcgggttgtacgtcgatctggaaaaaagaatcctggataagtggcagggctacgttcagtga

SEQ ID NO: 25259 - DNA, 234 bp, Escherichia coli
atggcgaacgtcccagcaaaaccgcgcaataccaaaggtgagccgccaagccaggcggacacggaacacggctttaatcctacccggaaaagtgctgatggccgtaaggcacagcttaacttatacattgatatggagctgaaacgtgagttccgctccattgctgcggccaacgatatgaaacatggggagctgttcgaggcgtaccaggaattctggaaaaaacatcattaa

SEQ ID NO: 25260 - DNA, 648 bp, Escherichia coli
atgaccgctgttatcgcgctggctaacgggaaaggtggggtgaaaaagtcctcgatgtcacgggctatcgccaccgagtatacaaaggcaggatggggggttcttgggctggatatggatatcgatcaggggtcttttctggactgggggcaacgtaggttgcggaatggttttgaacctccggtgacaattcagggatgcgggacggtttcacaggcgaagaaacagattgaatccgggcaatgggatttgattgtcatcgacagtgcggcgtatgcgacgaaatcgttactcagcctgattgatattgtcgatttgctggtactgccgacagggtttagcgtagatgatctacgaacgaccgttacgaccgtaaacgcgctgcgtaacaaaggacattcgacagacaaaatggcggtggtgtttgcgggggtaagtgaaagtgagagtgaatatcgtgcggcgctggaatacctgcaaccctgcggcgttcccgtcattcagggcgctattccttttctgacatcgttcagccaggcgcaggataaagggcttgctcttacggagtcgcctttccctggcccacggcaaaaagctgatgatgttgtgcagggtgtgatcgaccgactgacaacgcttacgcagtaa

SEQ ID NO: 25261 - DNA, 783 bp, Escherichia coli
atgtccgatatcaaacccgcaattaaggcatacagtgagcttcaacaggcttatgactggttcaatctttccctctttgataaggctctgccggatctgctgattacgttacagcgcggtcgtaacacctttggttatttcgcgcctgaacgcttcacaggggaatccagcgtatcggagctggcgatgaatcccgattacttcggtggccgttcgctggccgataccctgtcaacactggtgcatgaaatggtgcacgtgtggcagcattacgcccccgttaaaaaatgccggggcggctatcatgatcgtgtatggggcgcgaagatggaggaagtcgggcttatgccatcaaataccggcttacctggcgggaaaaagaacgggcagcagatgacgcactacattatccgtggtggccgctttcagaaagccgtgtatgacctgcttaaaaatggcttctctatctcttggtatgaccgctggtctgacggagcaatcgttacctcaaagattaacagcgatatcctcgatgactggctggccgtcaccgatgaaaacgatactgaccttatcaatcggctatcactgaccgtcagcaaatcccgcccggaactcattccagacgatgacgatctcagcgtcatgatcaaaccgccagtaaagggtactggcacccgcatgaaatttacctgcccggaatgtgggctgaacgcatgggcgaaaccctccgctgtattgctttgcggtgagtgtcggtgtgagcttacggcggcagaataa

SEQ ID NO: 25262 - DNA, 714 bp, Escherichia coli
gtgcgggcgggtgtgactgataagagtctctctctcaaatcacctgcttcacctacgggcatcgcaaagcaaagcccctgttataacgttgcctcgcgcaagcgtcgccggttcctcaatcggtggattaagtcgctggcgaccgaagccgggcgcatcaaaatcaaaaacgaacttcggcgccgcatccggcacaacaagtattgggtcaacgaggccaataaatacggtatcgaaacactctgcgagctgatgctggccatctttgacgatctggatttaagagactggcaaacccggcataacctggagacgctttctgatcgcgcaggtttgtctactcgcagtgatgccggaaataaatctgtctcccgtgcgagtaacggatgcgatcgcctggtctggctggatgcgattatcacagagaaagcagccttcaatccttatgacgcccgttgtgcctgtaagcacattgaggtaacagaggatttctttgccattctcggcgttccgctgaaacaggtctaccgggaacgcgccaggctacttaaggccgacccgaatgaaatcatatcatccggggatgtgcggttaatcgcaatcagggttgaaaactggacgcgcaaggccgcagccggattagccaggatgaaagcgaggcgtgacgctgctcgccagcgcaaacaggaatactactcaccaacctttgcctga

SEQ ID NO: 25263 - DNA, 369 bp, Escherichia coli
atggtgcctaagagactgaaagaagccaggatggaggcaggattatcgcaggcaaaattatcccagcttctcagcgtggaagaaggggttaatacacgctctagattttcgagctacgaggtagggagaacggaaccgccgtttagtctggttaaaaaaattgcggaattactcgactatccagcgaattatttttacaccgaggatgatgattttgctaaagctgttttgcaatttcaccgagagcgcaccgatccagagtcaaatccgcattacaattcggtagtaatagaagcaagaaaattatcatcaaagctcgataaggtgagaaaaaccgtagcccagttgaacgaatacctgaaagagtga

SEQ ID NO: 25264 - DNA, 456 bp, Escherichia coli
atgtatgaatggtacgttttatactgcaacaatcaggatgttgaacgcatcacccgaagagtcgagggactggatgtcgaggtgttttgcccccgctatatcaaagtaacgccacgtaaggattgccgggcggtacgtcaggaagagaaggtgttgtttcctaattatcttttcctctgctttgacgtcaacataacgcatacatcgacaatcacatccattccgggcgcgcatggttttgtcagcttcggttcaacaccctgcaccgtccccaaatcagtgataacagcgattgaatgcgcccgtctgatggcgctcaatcctgatgaagatgctatcgagtgccgaaatattgccccggatttgctggcaaaaattcaagaactctctctgataaggtctccgctccaacgccaggtagccttttcaaaactactccagaaccaataccactaa

SEQ ID NO: 25265 - DNA, 216 bp, Escherichia coli
atgccgaaaagcgtaccaggcaaatcaagcacggctgttatttacatcgggcaaaagcgctatcaggagttagcaaagcaagcccgtgaaatcagctacctatctgaatcaaatatccggtcaagcacctttctccagttcctaatggatgaatttggtgagcaagcccgtactgagctgctccggcagctactcgcagagaaacagaaggagtaa

SEQ ID NO: 25266 - DNA, 219 bp, Escherichia coli
atgagaaaacccacctataacgtgtacgtcacgcaggaaacccagcccgacgagaacggcgaaaaaaatacgtactggacgaaagtcggtgcggccttcgcacacaacggcaagccggggctgaacatcatgatcacgcccggtatttccgtttccggcaagctggtactcctcgaacctaaagatgacgcagcgccgcaggctgcccctgtgaattaa

SEQ ID NO: 25267 - DNA, 264 bp, Escherichia coli
atggtggttgagcatgcccatggcctccgtcagcgccgagggcccaatgccaaaagctctctccacaaggcgcacctcgcccctgatgccgggctgcaggcaccaggggcgagcctgtcctttgcgcagggctcgcatgacttcgaatcccttgatcgtggcataggccgtggggatcgatttgaaaccgcgcaccggcttgatcagtatcttgagctttccgtgatcggcctcgatcacgttattgggcactgttgcaaatag

SEQ ID NO: 25268 - DNA, 603 bp, Escherichia coli
atgaaacaacagtatcagacccgctacgaatggctccacgaaagctaccagaaatggctgaccggcttcacccggcacgccgtatcctggggcgtgtgtcatccgaatatctactacttccataatctgacgcccggttgggtgtcattcaatggtgaaaaaccggagattgccatcgtaccccagagcctgcaccggctgatttatggccctgacaaacgggccacaccgcccctggatgatgatctgatagtgaatttatgcaccagtgaacatctgctggttcatcatccgatgctggaaggcattctcctgtctgaatgtgaacgtctgaggcagcgttctctggcaaataaactgatcagcctcttccgtcagtttggtggcacggagttgcgcctcaaactggtctggctttgctggcttgatttaatgaccggaaactgccttgacgactggacggagaatctgaaacggaaatcagaaaaagagctggaggaatggatcatcaaccgtcagaagcagagcgcagcactgacggatctgatggatcagtacgtgctcctgtcataccgcacaacggttgacgataagcgcacctga

SEQ ID NO: 25269 - DNA, 738 bp, Escherichia coli
gtggcgctgccctttgctgctgacgcctgtctggtcgcctcatcttttgaagcagacgcagatgatgccgatgacgccgccgaactggcggacgatgcggcagccgtttttgaggattctgcgctggtttccgacgctttcgcgttcgtctcggatgtcttcgctgcggaagcagacctcgctgctgcgctggcctgttcagtggcttcgccagccttcgttgtggctgttgaagcggacgatgcggcgctttctgccgattttccggcagcggtggcactggctgaggcctgcccggcacttgttgacgcggcactggcagacgacgcagccgctgtttttgagcctgccgcagctgaggcgctctgtcccgctgccgtctcagaagacctggcgttcgtctcggacgtttttgccgccttcgcggaatttgctgccgccgttgccgaggaagctgcgctactggcgctcgaggatgcgttcgtttctgatgattttgccgcctcttttgaagccgacgcatcccgggctgaggtggcagcttctgacgctttcgtggtcgcggtggatgcagaagtggcggctgattgttgtgacgctgcagcattcgtttctgacgttttcgcggcagcggcactggtagctgccgcgctttttgaggactctgcagcggcagcacttttttccgcttcagtggcctttgttgatgccgttcctgcgctggaagacgctgactga

SEQ ID NO: 25270 - DNA, 297 bp, Escherichia coli; identical to SEQ ID NO: 14056

SEQ ID NO: 25271 - DNA, 780 bp, Escherichia coli; identical to SEQ ID NO: 6153

SEQ ID NO: 25272 - DNA, 384 bp, Escherichia coli
atggctaaggtgaacctgtatatcagcaatgatgcctatgaaaaaataaattcgattattgagaagcgtcgacaggaaggggcaagggaaaaagatgtcagtttttcagcaacagcttcaatgcttcttgaactggggcttcgtgtatatgaggctcagatggagcgtaaagagtctgcatttaatcagactgagtttaataaattgcttcttgaatgcgttgtaaaaacacaatcatcagtagcgaaaattttgggtattgagtctctcagtcctcatgtctccggaaatccaaagtttgaatatgccaatatggttgaagatatcagggagaaggtatcatctgagatggaacgattttttccaaaaaatgatgatgaataa

SEQ ID NO: 25273 - DNA, 159 bp, Escherichia coli
atgaaactaccacgcagctctcttgtctggtgtgtgttgatcgtgtgtctcacactgttgatattcacttatctgacacgaaaatcgctgtgcgagattcgttacagagacggacacagggaggtggcggctttcatggcttacgaatccggtaagtag

SEQ ID NO: 25274 - DNA, 606 bp, Escherichia coli
atgtgcctctccgtgtaccgtctggtcaccgccggcgtaaatgagggtgtcccgtgccatccccgaagaccagataacctgccggccatttttattgatggtggtggattcagccgtccctccgaccatctgaccgctggacacattttcagactccggaccaccttctgcaccggtgttgacgatggttccggttgcctgcccgccatgtttaatggtctggtagccagactggttaatcaccgttccggatgcactgccgcctgcatgtatccattgttcaccaccgttaaggacagtaccgtaagcctgcccgcgcagattctgtcctccaccggcactgataaccgtatccgtggcactgccacctgccatgacatcctgcagaccgtttgcggtgaccgtggtgtttctggcagtgccaccccgggctatctgctgaccgccggtgttgtcatcagagtccggccccagctcaagcccggtactgacagtcacgccatcagctgttccggatacaaactggttgtcatggtttaccagtgttccgccattcactgtttcacccgggtgcacaacgatgtcagcagccagcaccgggagtga

SEQ ID NO: 25275 - DNA, 225 bp, Escherichia coli
atgaaaaagattatattacttacaatcatatcaagtatcgtctctctggctgggtgcaaagaagaagccaaaacgacaaagtggtatcgtgaccacccagatgaattgaaagttgtttatgataaatgccagaaaacagggagtgcatcagaaaattgtaaaaacgccaatgaagctcactggcaaatacagcagctaaatgctccagaagtagactttaattag

SEQ ID NO: 25276 - DNA, 672 bp, Escherichia coli
atggcagcgacgcacacactccctctggcgtcaccgggcatggcacgcatctgcctttacggggatttgcaacgatttggtcgccgcatcgaccttcgtgtgaaaacgggggctgaagccatccgggcactggccacacagctcccggcgtttcgtcagaaactgagcgacggctggtatcaggtacggattgccgggcgggacgtcagcacgtccgggttaacggcgcagttacatgagactctgcctgatggcgctgtgattcatattgttcccagagtcgccggggccaagtcaggtggcgtattccaggttgtcctgggggctgccgccattgccggatcattctttaccgccggagccacccttgcagcatggggggcagccattggggccggtggtatgaccggcatcctgttttctctcggtgccagtatggtgctcggtggtgtggcgcagatgctggcaccgaaagccagaactccccgtacacagacaacggataacggcaaacagaacacctatttctcctcactggataacatggttgcccagggcaatgttctgccggttctgtacggtgaaatgcgcgtggggtcgcgggtggtctctcaggagatcagcacggcagacgaaggggatggtggtcaggttgtggtgattggtcgctga

SEQ ID NO: 25277 - DNA, 951 bp, Escherichia coli
atgtttacattccaggctgatttgtgctggtttactgtacgctccgctgccaaacacattcaggcagagcgtccatgccagcagtgccagggatttgtccggttgctgcatcagtgctgcctggactgccagcgtgcgttcggaagacattttcgtcagcagtggcagactgatttcctccacgggcgctttctcctgcacctgttccgtgcggtcagcgtcgtcagccgcatcatcctcgctgcgcaactgcacaccacgctggacacacacgttgccataacgccaggacaccaccacaccgcttccggcacgcatctccggcgtccacgccctgaccttcgccatgcagcgcatcagcttcatttctgcttccagcaggtcagattcctcacactggttttccagcgcgtcgtaacgcgtcatcagttcgttcagacgttcttcttccgcctccgtcagcaccgcttccggctccggcagacagcggtatgttccggcatcctcacggcactcaccgacaggctccatgcgtccggcgcaccatccccagccttcggcttcccgaaggtgttcagcaacagcctggagtttttccagcagggcggcatcgagcgccacgcagtccacatagccaccctcgtcgtcgctgaacaggtcagtgcgcagttcatctggcgagaaggcatcagcccccacgaagcggaatttactgttccctgccaccgccacttcactttcggtcaccagacgacgaatggtctgtacttccggtttaccgccccatcccgactgacaggcggcttcaaacacctgcacctgacgcgcggtgtcgttctccagcgccagcgcctgacagtgctcggtggtgatgaggtcttctgccagcgcatcgaggatgacaggcgcaaggtcagccagtttcagcattcgctgaacgtggcggggtga

SEQ ID NO: 25278 - DNA, 213 bp, Escherichia coli; identical to SEQ ID NO: 6096

SEQ ID NO: 25279 - DNA, 192 bp, Escherichia coli
atgttgctcccacacgccgttgatttttgtgtacagttcacctggacggttgacggcgatttccgtcaggccgggaagctccagaaagtcgccaaagaaacgttgtttatagcggtcgagggaaatattcttagcggtcatttttcaaccttagtgtatagatgttggaaaaatcaatatcctcgcctgtga

SEQ ID NO: 25280 - DNA, 246 bp, Escherichia coli
atggttggcatgatccccgatattgccgcatgggcatccaacagcgcaggtaaaaaagaccgcaatacggactatacggaaaacagtcgccaggctatggcagatatggctcgtaccactctggaaaacagcatcaatattcccccaacgctccataagaatcagggcgagatcatcaatctgatcacaggcgaggatattgatttttccaacatctatacactaaggttgaaaaatgaccgctaa

SEQ ID NO: 25281 - DNA, 192 bp, Escherichia coli
gtgctgctcccatacgccgttgattttggtatacagctcacctggacggttgacggcgatctccgtcaggccgggaagctccagaaagtcgccaaagaaacgctgtttatagcggtcgagggaaatattcttagcggtcatttttcaacctcagtgtataaatgttggaaaaatcaatatcctcgcctgtga

SEQ ID NO: 25282 - DNA, 246 bp, Escherichia coli
atggtcggcatgatccccgatattggcgcatgggcatccaacagcgcgggtaaaaaagaccgcaatacggactatacggaaaacagccgccaggctatggctgatatggcacgtaccacgctggagaacagcatcaatattcccccaacgctctataagaatcagggagaaatcatcaacctgatcacaggcgaggatattgatttttccaacatttatacactgaggttgaaaaatgaccgctaa

SEQ ID NO: 25283 - DNA, 159 bp, Escherichia coli; identical to SEQ ID NO: 6188

SEQ ID NO: 25284 - DNA, 216 bp, Escherichia coli; identical to SEQ ID NO: 5123

SEQ ID NO: 25285 - DNA, 126 bp, Escherichia coli; identical to SEQ ID NO: 11032

SEQ ID NO: 25286 - DNA, 159 bp, Escherichia coli
atgaaactaccacgaagttcccttgtctggtgtgtgttgatcgtgtgtctcacactgttgatattcacttatctgacacgaaaatcgctgtgcgagattcgttacagagacggacacagggaggtggcggctttcatggcttacgaatccggtaagtag

SEQ ID NO: 25287 - DNA, 246 bp, Escherichia coli
atgcaactggtcaccgcattctgggcaacgctggcacttatgtatatgtcgtttgcggcaggcaccgggaaatatccgatgtggcccggaaaaatgaaatgtgtccgggtgggaaccgcagatgaacatctgaaggaagtttatacggaagatacttctctgtcggaaaaaatcaggaaatgccatgtttatttccctgatgacagggcaaacagaaacaacggagataaaaatgaacatgcgtaa

SEQ ID NO: 25288 - DNA, 147 bp, Escherichia coli
atggctcgtagtgaggaaggcacctttaaaccgggttcgtctgttttaactattcccccgtccccgtatgtagccagtattccagggtttactccttcccgtgcacttcccgcggcaagtccgtccccggtccataattccatatag

SEQ ID NO: 25289 - DNA, 228 bp, Escherichia coli
atgatcatttgcgggtgcatggcccgtctgaaaaataacaacagcgatttgcatgatttgttagtggactattatgtcggcggcatgacttttatggcgcttgcgcgtaagcatggtagatctgattgttggattggcaggatgctccaaaaagctgagggcgtagtggagggcatgctgatggtgttggatctcagattggagatggatgctgattgtttgagataa

SEQ ID NO: 25290 - DNA, 258 bp, Escherichia coli
gtgaccgtggtgttccaggacggcttccagctgaaaaccgtggaggaaatggcgctggagcagtcacagagtacagcggaagagggtaacccggaaagccctgtgccgaatcctccctcggcagaaagccacctgaacggttttaacaccgaccagatgctgaaacagctgggcaatctgaatccgcagcagtttatgtccggagacaagaacccgctgggcggggatgccggcaaggagggcggaaatggcgggtga

SEQ ID NO: 25291 - DNA, 255 bp, Escherichia coli
atgcaggatggcgtccggattgcccgtgataatcctgacagcggtgtggtggtgagaattgccggtgaaggtcgtccgtggaatcccggtgccatcaccggtggccgcgtgtggggggatatcccggataacagcgtccagccgggggccggaaatggcgaaccggtcacggcagaggtactggcacagcggcaggctgaagaggccatccgccgtgaaacggaacgcggcactgttgcaaatagtcggtggtga

SEQ ID NO: 25292 - DNA, 222 bp, Escherichia coli
atgaaaatcttcacccgtggtgaagccatgcgtattcaccaacaacatccggcatcccgtctttttcctttctgtaccggcaaataccgctggcacggcagtgctgaggcgtataccggtcgtgaagtgcaggatattcccggtgtgctggccgtgtttgctgaacgccgtaaggacagttttggcccgtatgtccggctgatgaacgtcactctgaactga

SEQ ID NO: 25293 - DNA, 255 bp, Escherichia coli
atgatagttagaaactatcataagattatttttgatcgttttaaacgatatgacgggacgctaaaagaattgaatcctatcaattggttaagcggtggttttgttgtgccatatctgtctgaacacgcagaaacactacagctagccagaaaagcatcaacacataacagtatttttgattatcaggatggatacgcagatgaagaagattttactcgttgctggcgcaggtctggcactggcgggatgtggtga

SEQ ID NO: 25294 - DNA, 237 bp, Escherichia coli
atgtcccaaaaagaagtacctatctatattcctgctgggctagagtgtgttactgcaaacaatcttgcctgtttacgtttccactatcatttagccaataatgcaaaacttcctgaggctggcgagctattcactggtttaactcttgagcaagcaaaagacctcgttgcattcttgcaggaatatattgttaaagctgaactggtcgaggctgtaatgccgaatcgtagacactga

SEQ ID NO: 25295 - DNA, 189 bp, Escherichia coli
atgaataagcaacagcaaaacagcgaacctcatcacatgaggtttcgccgtaggtactttgagaatggtcgctacgcaggaaaagctaaatcagtgtctacgattcggcattacagcctcgaccagttcagctttaacaatatattcctgcaagaatgcaacgaggtcttttgcttgctcaagagttaa

SEQ ID NO: 25296 - DNA, 207 bp, Escherichia coli
atgaccagcaatatcattagcgccattttgagccttgtgtacctggaagtgggagtaatagcgatttatctgcttagcaagctaacaggacaaaaagaacgctttattgttctcaacgttcattacctcgccgcttatgtcagaggtctttttccgatcaccattggcgcggtgctagtagcgtttgttatttggctcatcggatag

SEQ ID NO: 25297 - DNA, 495 bp, Escherichia coli
atggcacgtcaattttttttaactcctgcaactaaacgccctcgttctttacgtcaaattttggccgaattatttagcggtcgccttctgtcacgtcttgatgaattggaaactaccgttctggtgctgaaggcacgtttagataagcaagcgtcagttgttgcgaacgtgggggcgattgtaacctccagttcttcatgtgaagcgaaaaatgcacggcctttagtgaaggagaaaaacaacaaggaccgttcggatggaaaattttcaaagaaagaggctgaaaccaatggcctacgttctcattatagtttcactggcgacggtagccgttccagccggtcagagccttttgatgccggattcatccatcaccacaccttcgtcgacgacaattaccaccactccagtggagcgtcctgtcactctggatgggatggcggtggatgcgatacctcaagttcatccagttactcaggatcatgctgtgactaa

SEQ ID NO: 25298 - DNA, 1059 bp, Escherichia coli
atgcgcatgaatagacttccaggatatggccttcccgaactggctttttggcctcagcctaaatatgaacggaataaatggtcgatgttctgtctgaaactccgtaatgatggaacccttgcttggtatcggcgatatgttgatcgtggtatgccaaaccacgctgttgatgacgactacgataactatcctgaagcaagaaaagcggcattagagctgaataaaaacgtgagctttgacattgaaaaacttcctctatctatgtttcaaaagaagtcattgcgtttgaaagttgacaaagcactcaaagccaaatcacgtctcatggatgaagagtatataatgctcaacgaagcaattaaggcacacgccaacgatccgcgagtgacattaaatgagttaataattaacccagattacgaaactttgcgtcaacccctttttgacgtgctaagcgagatgccttacttacattttgtttttcttcccaaattccaagtttcacttcaactcgttgctcctaacacttgggaatgttcatataacaacaaagctaagacagcgaagatctgctaccaagaacgcatagccagaggttttggtttatcaggtgctgcacattggggaaaaacaaaagcgactattcgctcaatgcttctgccgcgtgctaaccggttactgcaactcgccagcgtaaaaagaatgctggatgaagctctcaggaatgggcaaaaggtactggttgttggcaactttgttttctggtttgaggacaaaaatcaggtaggttggagtgttaaagttgctagcgaaagcgaaaccacctcaagaggcaatacgctctggaaagaaggaactatcatttcaaaaaatcacggtcgaattgtcgtgctgccgtatacaaaagaaaacggtaaacatgtaaaaggttataccaagaatgcccctaacgacggcaatgcaattccgagacataaggatgagtatgttgagttgccctttgaaattttggatggtgacttgatgttcagtctgttcggtgagcttaactacgaatag

SEQ ID NO: 25299 - DNA, 993 bp, Escherichia coli
atggaattagtcatatccttattacaaaagggattattagaaaaggcattagaccttgccatttctgaatcattcttcaatgcaagatcacctgatgatataaagaaagctttaaaaataggctatgacatcaatgctgttaacagtaacggcaacaatgccatttttgcctgcagaaccctggaagccatggatttcctgctcagttatggaattaatatacaccatatcaacggacatgggcaaaatgcgctctttcatcaaaaaaatccagaaatactgaagaaactgattgaactgggtttagacacctcgcatacggatactaatggctacacatgcatttttgaacattacaggaatgctgaaggattgacagaattaattaatgctggttgtgatataaatcacatcgataaaaaaggaatgaatattctcttcatgcccctttccccggaagttttatccgtagcaatagatgctggatgcaatgtcaatcaaattgatcattcagggaaaggatttattgaaaatgtatatgattatgaattacatgatatcattctctcgcatattgataaatttgacagaagaacgctgcatgtagatttttgtgatctcgactcagcctttttcttgtattacctttctgaacatggattcaaaatagaacttaataaagaccatttcaccattaacagttacattggtgattataaagaaatcttatccatacttgatttcatcagtgaaattcatgatattcacttctataaatataaaggcggccctctctataaagatatcaacaagcgaattgtaaagtggatgataagaaataatctcttggttgatttatcaaaaataaataaacacaaggattatgaagaaattaattcatacaaaatccgtcgagaacagaaagaaatctccaggcatttaaaacctgctaaaagtatatctgcaacagtcaaaaacggcggaagattgtga

SEQ ID NO: 25300 - DNA, 243 bp, Escherichia coli
gtggcttctgtttctatcagctgtccctcctgttcagctactgacgggatggtgcgtaacggtaaaagtactgccggacatcagcgctatctctgctctcactgccgtaaaacatggcaactgcagttcacttacaccgcttctcaacccggtacgcaccagaaaatcattgatatggccatgaatggcgttggcctcaacacgattttacgtcacttaaaaaactcaggccgcagtgggtaa

SEQ ID NO: 25301 - DNA, 897 bp, Escherichia coli
atgattcagatacgttttggcgataattttatttacctggaaactaataagttaattccatctaaggaattattagaaaacgtaaagcgaagccataaatatcatcaaatagttacctctatcgaaagcttaggtattattgaaccaataatagtattctatgacaaagataaagatgtcactaagatacttgatggccatttaagggttgaggctttaaaagacttaggtatagaaaaagctccatgtatactttcgagcatagatgatgctttcactcctaacaaacaagtgaatcatataaatgtagttgaagaacatagaatgataattaagtctctggcaaaagtatcaattgaaaaacttagtgctgctttgggcatatctgttgatgccataaaagataaagcgaatgtgatgaacggcatagatccaagtgtaattgcgaaactttctgataaacctatacctaaggctacatttgacgttttgaggaaaatgaagccaattcgccaaattgaagcagtcggtacaatgattaattttgataattatagtaaaaaatttgcaatgagcatcttggatgcaacaccggcatcgatgatagtaaataaagggaaaaacactccctataaaaaggatataaaaaaaaccatacttcgtctggaacaagaaatggcaacaacttcggaagaaacgaaaaagcttcaaaccgagtatggttcagatatgttgaaattcgttataatccagtcatatattaataaattacttggcaattctaaagttcttcattggttcttagaaaacgaggttgattatcttaatgagttaaaaagaatttctagaataaattctttggatgataagactcttactgaaaacagcaagtcatag

SEQ ID NO: 25302 - DNA, 897 bp, Escherichia coli; identical to SEQ ID NO: 20850

SEQ ID NO: 25303 - DNA, 558 bp, Escherichia coli
atgcgaatttttggttatgcgcgggtctcaaccagccagcagtccctcgatattcagatcagagcgctcaaagatgcaggggtaaaagctaaccgcatctttaccgacaaggcatccggcagttcaacagatcgggaagggctggatttgctgaggatgaaggtggaggaaggtgatgtcattctggtgaagaagctcgaccgtcttggccgcgacaccgccgacatgatccaactgataaaagagtttgatgctcagggtgtagcggttcggtttattgacgacgggatcagtaccgacggtgatatggggcaaatggtggtcaccatcctgtcggctgtggcacaggctgaacgccggaggatcctagagcgcacgaatgagggccgacaggaagcaaagctgaaaggaatcaaatttggccgcaggcgtaccgtggacaggaacgtcgtgctgacgcttcatcagaagggcactggtgcaacggaaattgctcatcagctcagtattgcccgctccacggtttataaaattcttgaagacgaaagggcctcgtga

SEQ ID NO: 25304 - DNA, 861 bp, Escherichia coli
atgagtattcaacatttccgtgtcgcccttattcccttttttgcggcattttgccttcctgtttttgctcacccagaaacgctggtgaaagtaaaagatgctgaagatcagttgggtgcacgagtgggttacatcgaactggatctcaacagcggtaagatccttgagagttttcgccccgaagaacgttttccaatgatgagcacttttaaagttctgctatgtggcgcggtattatcccgtgttgacgccgggcaagagcaactcggtcgccgcatacactattctcagaatgacttggttgagtactcaccagtcacagaaaagcatcttacggatggcatgacagtaagagaattatgcagtgctgccataaccatgagtgataacactgcggccaacttacttctgacaacgatcggaggaccgaaggagctaaccgcttttttgcacaacatgggggatcatgtaactcgccttgatcgttgggaaccggagctgaatgaagccataccaaacgacgagcgtgacaccacgatgcctgcagcaatggcaacaacgttgcgcaaactattaactggcgaactacttactctagcttcccggcaacaattaatagactggatggaggcggataaagttgcaggaccacttctgcgctcggcccttccggctggctggtttattgctgataaatctggagccggtgagcgtgggtctcgcggtatcattgcagcactggggccagatggtaagccctcccgtatcgtagttatctacacgacggggagtcaggcaactatggatgaacgaaatagacagatcgctgagataggtgcctcactgattaagcattggtaa

SEQ ID NO: 25305 - DNA, 1053 bp, Escherichia coli; identical to SEQ ID NO: 7184

SEQ ID NO: 25306 - DNA, 1254 bp, Escherichia coli
atgagtcatggtaatttcaaaataaaaagaatagcagcgacttcgattttgtgtttttctgttctgtattcaaatacagcttttgctgtctggcccgtcacggaagaagtattgacaccttacgtaatgggggcatcccctcaatctatggggaatggaatgattgagacattagtctcaatgaatgacaaacttgcgcaggctaatataacggctaatgaaaatcaaaagaactctgttataagcaatgcaaaccaagctattcaggagcaaagaatgcaaaatatccttaagcgaattcctgatgctaatgcttgtgaggaagctacagcagcaggaggtagagggtcggcaggatcaaacacaagctcagctaaagcagctttagctgaaaatagtgtgaaaatgtttacgggagcaagcaccggtataaatgaggctaaaaataacgtgatggggcgagtctcaattgaagtctgttctgacgaggatgtgaaatacaacagaggtggatgtagtgctattggtgcatatgctgataaagataaatctgctacctcactcaccacaccaccgctatccatatctgatgctcaggggaataaagtttcaaaccaatcatatgacgttaaacagatgaaagtggctgacgctgctaagcgaaatctgattggtaatttaccgctacagcagttaaatgacaggaatcttgaagatacgaaagaaggacgcgaatacctgtcagcattctcaagttttgttgccagaagcacagcgggaactaatgctgttgattctattctggcaataaagaaatctggtgatgtatcagtaaactcaaggggggtaaatatcggctcaggactgggtgctacagcaggagcaagtcaggcatggactgatgcgtctgtgaaaaccaagtattcgacattgttccccggagcagagttcccgtctaaaccttcggaatgggaaatgttgagatatgagatctattctcgttatgcggatactactggtgctgatgcatggcaggtcaagatcagcagtacagatgaaaaagaaaccgcacatgagcaggcaagaatgcaggccattgatttaagattacagatgcttcaaatagaaagaacagaagacaccaatattttattagcagccctattaggacagcaactacaacctgtcgataaggtgatgttgaataatctgaaaatcaatgccacaaaatcaacgcaggcagcaactaactaa

SEQ ID NO: 25307 - DNA, 558 bp, Escherichia coli
atgaaaaacaaatctgagaaaaaagcgaagagaagaaaaggatggataaaagatcttactgaatatgaacgatcaattttcgttaacatgctgaatgaagcagcaatggttaaaagaatatgggtgactaaaaaagaaaaacatgaagttatatatagatttcgtgatgttgtccttgctataagagaagcaaataaaaccatcgcggataaaggtaatgttgtatcagaacaaaaaatagtaaatgaagttgatggagcaacatctgatgttgttaaagttaaaaaagaaaggaaaccacgagtcaggcatatcgataattatggtcgtttgagaagagtatcattatcagaaagaaagttcataaataatgcagtatcggaatcaacgaaagcaaaagagtcaatactgactgctgaagaacgaaggaaagagtcgtgtgttgcccgcgaacaaatatgttcccagcgtaaagctaatcagattgaaagtgaaagaactaaagcaagacatgctgcagtatttgaatggaaacgccctgattcttttcgtcgctaa

SEQ ID NO: 25308 - DNA, 1251 bp, Escherichia coli
atgtcaataaagaaaacactcataaaaaaaacgcaagacatttatttttctagatatagtatttatgacaagctaataatgaggttactcatttttataggtgaagataatgtggtgaagttacaagattctaggtttatacgtaaagttcattttttacattttattaactctttgctgtttataaagataaaaaaaacgaatgataatgtagggatggtaccttttcacttattcaataaagtaaaatcacgttacattcattactcaattgctgattggttactaagacatcgtaactatagcaatattacagaaaaacattttatttcggctcattacagaaataaagaaataactattaatcttaggtattctgattttatttcacaaaaatatggctataaatcagagaggcttaaaagaataatatcacgactttgctctgatgtatcattgagaaatttaaataaaggtcaaaaattacgcttggcaataatgttatatcaaaaaaataaggatgctaaagctaatgaaattattaagcaaatagggaagaggtttttgttgaaatatacaagcagtccttatgtttttaacaagattaaaaagaataaaatttttaatgatccatatatacaaagaggaagtgagcaatattctcacatcttaaaatcacgaaatgagtttataaaattaattagaaattccgctggtagtttctgtattgttgggaatgcaccaacagaaataaatactggtcatggagcgttgattgattctaaaaaaatagtgattagaataaacaattatacactggactatccggatgattatggtacaaagcaggatatatgggttagagtggcaaataaagaagtaagcaataaaaatctcaaaaacaatagacttgttatttttgcggcgaataatttcacaataaaaagaagagatgcaaacaaatattttcttgcaccacaattattggaaatggaatatacagttataccaaatcatgtgtacaaatcacttataaaaaaactagatggtctaccaagtacaggattagcagttgcctattgggtctactctatagttggtaaaatacccaaagaatgcttgttcggttttactcatttccataacaataaagattttcatactcattattttgttgatgagaatgaagtgggaacccacctgcatgaatgggataaagaaagaatgatttttgaacaaattacaaagtga

SEQ ID NO: 25309 - DNA, 582 bp, Escherichia coli
  misc_feature (567)..(576): n is a, c, g, or t
atgaaagtaggatttataatctggaatccattccagttgattcaattcaaatctattgcattaaaattagaaaaaccaactatttttattattagaaaaaacaataaccttaccttgtttcctaatgagttaattaataacaaatcatggagtatagtgtatattgagccccatgatgttcccgttatcgatgggactcatgatatcttactttttcagtcagctttccctggtattgagaaaattaaaaatagtaaattagtctcaatacaatatggtttagcaaaggagcgccataattatggtgaatggcgttctcttgctgacatgaatttaatgtatggtgactattcatctaatattgtgtctcactatgcgccatcttatcctgttggaaatccaaagtttgataattggttagagtacaaacaacaatactcaaatagagaagagctttataaagaattaaaattagatataaccaaaaaaacattgctttacatgcctacttggggggagttgggttcatattttgaacttctagatacaatatctcggttacaatcnnnnnnnnnntattaa

SEQ ID NO: 25310 - DNA, 1161 bp, Escherichia coli
  misc_feature (1146)..(1155): n is a, c, g, or t
atgacttcagataataaaaatattgatttacaattaaatataaatgagcatggagtttctcataaactgattaaaaaaacgtctaataaattgctcgtctttttttcaggtacagataaaaaagatggccgctttgatttttggaaatcagcagatgaactgccatataacattttgttaattaacaatggtaaaaatgaatggtaccaagatagtattccagggtttagttcttcaatatcagaaacaatagaaaaaataaaatatatttctgaaaaactaggttgtgacgagattataacaataggcgtcagtatgggaggatatgcagcttcattatttggcgctcttctggattgtcgtgtgttagcctttagctttgacactgtactaaaatatcccttgagccgtagtgctaaaagaattcctaaaaagacaaaaattatatataagaatctacgccctattataaaaaattctaaatgtagaattacagcattaagtggggaaatggattttcctgatttactttcattgagtaggatttcagatcttaaaaatgttaaagcgtattccgttcgaggagtaacacatggtgtagggcggtttatagataaaagatatggaattcctaatataataaccttttttgtggaaaataatacacttcccgaaattaaagagattaataatctttgccataataaaatcttatcaaaaaatatattcctgtcttaccaagcatttgttaacaaagatttttccactgctcaatctttaatcagagaggctttgttggctgaaccattacttgaacctgctatatttatttctgctttagtaaatatggaactcaagaactatactttagctgtagagcagtttgcttttattgtcggtatttcgccacattttacaacagctaaatataatttggcaaagtcattaaggatgtcaaaaaaatatgatcaggcaatacaacatttctatgaatatatatctttaatgccttcatccgctggctcatattataatttatctctaatatatgaaagaaaagggttattggaagatgcaaaaaaaatggcccaaatggcatatagtctatcccctgaaagtgaaacatataaaaaaaggtatgatacnnnnnnnnnngtatga

SEQ ID NO: 25311 - DNA, 147 bp, Escherichia coli; identical to SEQ ID NO: 8534

SEQ ID NO: 25312 - DNA, 222 bp, Escherichia coli
atgaagaatgaaatactggaatttctgaacaggcatgatggagggaaaacggcagaaattgcagaggcgctggcggtaacggattaccaggcccgctattacctgttattactggaaaaagcaggtatggttcagcgctcaccattaagacggggcatggcaacatactggtttctgaaaggagagaagcaggcggggcagagctgttcttccacaacttaa

SEQ ID NO: 25313 - DNA, 291 bp, Escherichia coli; identical to SEQ ID NO: 15774

SEQ ID NO: 25314 - DNA, 615 bp, Escherichia coli
ttgtctgctgaagtctttgcatttgtttcagaggtttttgctgcagaagcagacctcgctgctgcagtggcttgctcagtggctttgccagccttcgttgtggctgttgaagcggatgatgcggcgctttctgccgattttccggcggcggtggcactggctgaggcctgcccggcacttgttgacgcggcactggcagataatgcagccgctgtttttgaacctgccgcagctgaggcgctctgtcccgctgctgtttcagaagacttagcgttcgtctcggacgtttttgccgccttcgcggaatttcctgccgccgttgccgaggaagctgcactactggcacttgatgatgcattcgtttctgaagatttcgctgcctcttttgaggccgccgcaccccgtgccgaggtggcagcttctgacgccttcatggtcgctgtggatgcagaagtggctgccgatttttgtgatgctgcggcattcgtttctgacgttttcgcggcactggcgctggtagctgccgcgctttttgatgactctgcagcagcagcactttttgctgcttcacgggcctttgtcgatgccgttcctgcgctggaagacgctgactga

SEQ ID NO: 25315 - DNA, 516 bp, Escherichia coli
gtggctgttgaagcggacgatgcggcgctttctgccgattttccggcagcggtggcactggctgaggcctgcccggcacttgttgacgcggcactggcagacgacgcagccgctgtttttgagcctgccgcagctgaggcgctctgtcccgctgccgtctcagaagacctggcgttcgtctcggacgtttttgccgccttcgcggaatttgctgccgccgttgccgaggaagctgcgctactggcgctcgaggatgcgttcgtttctgatgattttgccgcctcttttgaagccgacgcatcccgggctgaggtggcagcttctgacgctttcgtggtcgcggtggatgcagaagtggcggctgattgttgtgacgctgcagcattcgtttctgacgttttcgcggcagcggcactggtagctgccgcgctttttgaggactctgcagcggcagcacttttttccgcttcagtggcctttgttgatgccgttcctgcgctggaagacgctgactga

SEQ ID NO: 25316 - DNA, 672 bp, Escherichia coli
atggcagcgacgcacacactccctctggcgtcaccgggcatggcacgcatctgcctttacggggatttgcaacgatttggccgccgcatcgatcttcgtgtgaaaacgggggctgaagctatccgggcgctggccacacagctcccggcgtttcgtcagaaactgagcgacggctggtatcaggtacggattgccgggcgggacgtcagcacgtccgggttaacggcgcagttacatgagactctgcctgatggcgctgtgattcatattgttcccagagtcgccggggccaagtcaggtggcgtattccaggttgtcctgggggctgccgccattgccggatcattctttaccgccggagccacccttgcagcatggggggcagccattggggccggtggtatgaccggcatcctgttttctctcggtgccagtatggtgctcggtggtgtggcgcagatgctggcaccgaaagccagaactccccgtacacagacaacggataacggcaaacagaacacctatttctcctcactggataacatggttgcccagggcaatgttctgccggttctgtacggtgaaatgcgcgtggggtcacgcgtggtttctcaggagatcagcacggcagacgaaggggatggtggtcaggttgtggtgattggtcgctga

SEQ ID NO: 25317 - DNA, 894 bp, Escherichia coli
atgatgaaaattgatgattcagccatgcgctcattatatcaaaaaatcgcagaaccattaaatgctgatatatttttgcatacatgggataagatccaagtttggagcggagaggctcgtaagtctggattttggcaacggcaattcaagcttcctgataataaaatacctcatccattaagagacattgataaatttaaagagaaattccctcgtacaggtaatttgcttctaagtacaattactgatgatattaatgttcacttttccgctacacaccctttaataaaaatgagtgtcattgaaaatgaagatgtcgctcttcataattggttaaataataaatcatttatgagcagggggaactataatcagtttaaaatgtattatggcattaaacgagtatttgaactattaaaagaatatgaagaaaataatggctttaaatatgatgtcattataagaactcgcccagatatgtttattacgaaagagttcgatatagaacgacttaaccaagctaaagaaaatagcattgtcgttaattgtggaagtgtgggacccaatgatggtattttttatgcgctcaggcaggattatgaaaagatagtatcaatatgggatgagatgctacagtcagaaagtttgagtcctttcttaaattttgaaaagtatgattcgcatgttcttttgtatgcatggctatgccataaaaatatagagatgataaatatagatgatatattttatgacttggcaatcatatcaacttcggctaaaatccctgggctcagacaagcccttgaagaggatcttattaattttgataaaaacttaaaggagcagaagcaatatactgatttattcaattttttattgagtcgctctaagtga

SEQ ID NO: 25318 - DNA, 360 bp, Escherichia coli
gtgctcggtgtctttgataaggtcactgataatatggaggcgatgaaagaaattcatcttaacagtgacgagcaacatttatttggcagagctgcactgatggtcaggtatgaagatgaaaataaaacgccagtgacgcctgaacaaataattactccccgtcgtcgggaagataaacagaacgatctctggacaacctgtcagcgggttcaggagaatatgataaaaggtggattgtcggggcgaagtgcctccggtaaaaataccaggacaagagccattacaggtattgatggtgatatccgaatcaacaaggcgttatgggtgattgccgaacagttcagaaagtggaagtcatga

SEQ ID NO: 25319 - DNA, 366 bp, Escherichia coli; identical to SEQ ID NO: 19611

SEQ ID NO: 25320 - DNA, 366 bp, Escherichia coli
gtggcttccgcacgccgcagtcgtgtggaatgggaaaacagacagcgcaagaagcagggactggatgcactgggtatggatgagctgatagcgaaagcctggcgttttgtgcgtgagcgtttccgcagttaccagacagagcttaagtcccgtggaataaaacgtgcccgtgcgcgtcgtgatgcgaacagggaacgtcaggatatcgtcaccctggtgaaacggcagctgacgcgtgaaatctcggaagggcgcttcactgctaatggtgaggcggtaaaacgcgaagtggagcgtcgtgtgaaggagcgcatgattctgtcacgtaaccgtaattacagccggctggccacagcttccccctga

SEQ ID NO: 25321 - DNA, 420 bp, Escherichia coli
atgttacagatagtcggcgcgctgattctgctgatcgcaggatttgccattcttcgccttttgttcagagcattaaccagcacagcgtctgcgctggcagggttcatattgctgtgtctgttcggtccggctttactggctggctatatcactgaacgcataacccggttattccatattcgctggctggcaggcgtatttctgacgattgccggaatgatcatcagcttcatgtggggacttgatggtaaacatatcgcactggaggctcatacttttgactctgtaaaatttattctgaccaccgctctcgccgctggtctgctggctcttcccgtgcagataagaaccattcagcagagcgggctcacacctgaagatatcagcaaggaaattaaggtgatgctgccaacttactga

SEQ ID NO: 25322 - DNA, 408 bp, Escherichia coli; identical to SEQ ID NO: 23131

SEQ ID NO: 25323 - DNA, 432 bp, Escherichia coli
atgacggcggagcagcgccttgccgaacgtcagttgaaaacgaaaccgctgctgaaatccctggaaagctggctgcgtgaaaagatgaaaaccctgtcgcgacactcagaactggcgaaagcgttcgcatacgccctgaaccagtggccggcgctgacgtactatgcagatgatggctgggctgaggcggacaataacatcgctgaaaatgcgttgcggatggtcagtctgggccgcaaaaactacctgttcttcggttcggatcatggaggagagcggggagcgctgctgtacagcctgatcgggacgtgcaaactgaacggagtggagccagaaagctacctccgctatgtccttgacgtcatagccgactggccgataaaccgggtcggcgaattgctcccttggcgcgtagcactgccgactgaataa

SEQ ID NO: 25324 - DNA, 234 bp, Escherichia coli; identical to SEQ ID NO: 10186

SEQ ID NO: 25325 - DNA, 132 bp, Escherichia coli
atgtttaccctccccctcaaaaacttcaagatatccatcacaattattaataaagtcaggtttggtgtaatcatgtctaatagtatctatattgaatatatatataccatcagtataattaatatcttttaa

SEQ ID NO: 25326 - DNA, 198 bp, Escherichia coli
gtgcgcctgtttaatcctgttactttgactgaagtaatccccggtcttcatgacgtgaccggggctgttgaattaccagaagataactggttttttactgcatctgaaatccctgaaggaatggaaatatctgttaacgagaagggagaacccattctgattgagattaaaccgtctcaggaggaactggccagatga

SEQ ID NO: 25327 - DNA, 207 bp, Escherichia coli; identical to SEQ ID NO: 5049

SEQ ID NO: 25328 - DNA, 663 bp, Escherichia coli
atggaaaaaactcaggattgtgtagttattccacttgatgctgactggagtgacatcggttcatggacatcactttgggaaatatcagagaaagatgaacatgaaaacgtatcgcatggcgatgtaattaactataacagcaggaacaactacatttactctgaaggttcactgatcagcactgtaggagttaataaccttattatagttcaaactaaagatgcgctcctggtagcacagcaagacaacgtacaagacataaagaagattgtcgaaattcttaaaaagcaaaaacgtagcgaacatatatcccatcgcgaagtctatcgtccttggggacgttatgattctgtagaacgtggcgaccgttatcaggtaaagcgtattaccgttaagcctggtgaatgtctctcaacacaaatgcatcatcatcgagctgagcattgggtggttgtcgctggtactgcaaaggtgacttgcggcgaacgcacttttttcgtcactgaaaatgagtcaactttcataccaattggcacagttcataccttggaaaatccaggaaagataccattagaagtaattgagattcagtcgggtgtatatctaggtgatgatgatattgtgcgcctaagtgataaatatggtcgtgttgaggataaataa

SEQ ID NO: 25329 - DNA, 168 bp, Escherichia coli
atgattaaagcggaacatgctggcgatacatgttctgccttttcggatgtagtgaactttgttgtgggtagaacgcaggattttgcagggagtgccgtggtggtcgacgtaccaggtgttaggaaaaatgattctgaacatttttacacctcagttggacgatgttga

SEQ ID NO: 25330 - DNA, 462 bp, Escherichia coli
atgtctttggcacttcatggaaaatatgaacttgaacttgctgctcaaaaagcattagagcttttacattatgtatcagacataaccaatgtcgatggaaaaattttagctattatgggactgataactggtctgtctggacaagcaaaagtatctcatatcttatttgaacaggctaagatacacacaactgatatagcctctctctactactatagagcacttgtcaattttcataatgaaagaattgaagaggcaaggatttgtatagacaaatcactacaactcgaacccagaagacgaaaagcagttgtgataaaagagtgtgtagatatgtatgtgcctaacccgctcaaaagcaacatgaaactctactataaagaaacttcgagtgaaagccatcgagttataattgacaacattttgaaactaaagcaactgacgagaatttgtatgcgataa

SEQ ID NO: 25331 - DNA, 504 bp, Escherichia coli
  misc_feature (452)..(461): n is a, c, g, or t
gtgcaaaacatttcgaataaaaaaatcgatggcctttatacctatccgatggctgcgacaaatttttgtaatgatcacatatcgcaaaattcattcttgagaagattcaagccagattatttcgttacaggaagaataaaccagaataacgcggtgaaaactttatacattgaactgatcgacgctaaaaatcttttcctcatcgccagtaatcatcttcctgttgatgaactaaataacacatcacaatttattatagataatatccttcaaacggtacataatccagagcgatctgtaagattagctaaatcagatcaaggttacaagaatcattatttatcagatgaactgttggctggtaagaaagaactttacgagtttacatctgaaagcatttacagggctatgactatatttgatggattacaaaataaaagtgatatacagannnnnnnnnntagcggaatgccatatgtctttggcacttcatggaaaatatga

SEQ ID NO: 25332 - DNA, 405 bp, Escherichia coli
atgaaatcattaaccgcagtgcgtaaaaaaagccctaattatcccgttgagttcaaaatcaaaatggttgaactctcgcatcgaccagagatctccgtagcgcaactcgctcgtgagcatgggatcaacgataatttgctgttcaagtggcgccagtactggcgcgaaggaaaactacgtcctccttcaacaacagaaaacaacgtgcctgagctgctcccgataacacttgatgccgaagatgttgtccctacaacctccccccggtcacaacctgtagctgctgcgacacctgaatcactcaatatcagctgtgaagtgacgttccggcacggatcactccgtctgaatggtgccatcagcgaaaatatcctgaacctgctgatacgggagctcaaacgttga

SEQ ID NO: 25333 - DNA, 396 bp, Escherichia coli
atgaaacatactgaactccgtgcagccgtactggatgcactggagaagcatgacaccggggcgacgctttttgatggtcgccccgctgtttttgatgaggcggattttccggcaattgccgtttatctcatcggcgctgaatacacgggcgaagagctggacagtgatacctggcaggcggagctgcatattgaagttttcctgcctgctcaggtgccggattcagagctggattcgtggatggagtcccggatttatccggtgatgagcgatatcccggcactgtcagatttgatcaccagtatggtggccagtggctatgactaccggcgcgacgatgatgcgggcctgtggagttcagccgatctgacttatgtcattacctatgaaatgtga

SEQ ID NO: 25334 - DNA, 396 bp, Escherichia coli
atgaaacatactgaactccgtgcagccgtactggatgcactggagaagcatgacaccggggcgacgttttttgatggtcgccccgctgtttttgatgaggcggattttccggcagttgccgtttatctcaccggcgctgaatacacgggcgaagagctggacagcgatacctggcaggcggagctgcatattgaagttttcctgcctgctcaggtgccggattcagagctggattcgtggatggagtcccggatttatccggtgatgagcgatgtcccggcactgtcagatttgatcaccagtatggtggccagtggctatgactaccggcgcgacgatgatgcgggcctgtggagttcagccgatctgacttatgtcattacctatgaaatgtga

SEQ ID NO: 25335 - DNA, 303 bp, Escherichia coli; identical to SEQ ID NO: 12577

SEQ ID NO: 25336 - DNA, 2742 bp, Escherichia coli
atgagcacgaaatttaaaaccgttatcactactgccggagccgcaaagctggcagccgccactgtccccggcgggaaaaaagtaaacctgtctgcaatggccgtgggtgacggtaatggcaaattgccggtgccggatgccggtcagacgaaactggtgcatgaggtctggcgtcacgctctgaataaagtcagcgtggataacaagaataaaaactatatcgtggctgaactggttgtaccgcccgaagtgggcggcttctggatgcgtgagcttggtctgtatgacgatgccggaacactgattgcggtatccaacatggcagaaagctataagccagaactggctgaaggctccggacgtgcgcagacctgccgcatggttattattctcagcaacgtggcgtccgttgagctgagtattgatgccagcacggtgatggcgacgcaggattacgtcgatgacaaaatcgcagagcatgagcagtcccgccgccatcctgacgccacgctgacagaaaaaggttttactcagttaagcagtgcaacaaacagcaccagtgaaaagctggcggcaacgccaaaagcggtcaaggcagcaaatgacaacgcaaattcacgtctggcgaaaaatcagaacggtgcagatatccaggataaatcagcttttctggacaatattggcgttaccagcctgacgtttatgaaacacaatggaatgattccaaccactgacaatcttgactcctatggcccagaagaaaaatatcttggaacgtggtcatgtccgtcacaatccactgcaaaaccagagtctggttaccctgaagataaaggcaatggggttctggaagtattcaatgctggtcgctttcactgcacacaacgctacaccacccgaaccggtaatatttacattcggatgcttgatgcagaatggaacccagccagtccaacatggagtgcatggagagttattacaagcgggactcgaccattaagcacgtcaattgacctgaattctttaggtggcgcggaacacctgggaatatggcgcaatagcagtacatcaatagcctcatttgaacgtcatttcccggaggacgggagctttggtcagggtattctggaagtctttgaaggcggtctgtatgggagaatgcaacgttacaccacccgtagtgggactatgtacattcgcggactgactgcctcatgggatgcagagaatccacaatgggaggactggattgctgttgggtatcagtccacgggatggacttattcaggggatcttgatgatcttttaaagcctggtatttatagcgtcacgaaacaggccacaaatgcaccagtcaccgactctaaagatcttgctgttggctcaatagttgaagtgaaaaaacgttgtgatattgaatcgtatatccagacatatacgacagtttctgcaacggatgcctataaaaaccggacatttcaacgaactcgtgccagcggtgaagctgactggggggaatgggcggaagtttacaactcaaaatcattactcactaaattaggtgtcggcggtgttaccgacaggttatccagtctggactggcagacctacgactttgtgccgggcagcatgataactgtcagactctccgatatgaccaatatccccgatgggatggaatggggcgtcattgatactaacctgataaatatcactgttggccccagtgaaggtggaggtgtcgcccgttcaatgcaggtatggcgcagcacctcaaacaaaaccaactatcgtttttttacagtccgcttatatggcaatcctggggagcgtagcttcaatattcgtcggctaccaattatcgacgaagcccagacatgggaggcaaaacagacattcagtgcaggcctctctggtgaactgtccggcaatgcggcgacagcaacaaagctgaaaacagcccgtaaaattaataacgtttcgtttgatggaacatcagatattaacctgacgccgaaaaatattggtgcatttgcttcaggaaaaacaggagacaccgttgcgaatgataaagccgttggatggaactggagtagcggagcctataacgcaactactggtggggcatcaacgttaattcttcattttaatatcggtgaaggaagttgtcccgcagcccagttccgcgttaattataagaacggcggtattttttatcgttctgctcgtgatggttacggattcgaggctgactggtctgagttttataccacaacgcgaaaacctacagcgggagatgtcggtgcactgtcgttatctggtggtcaattgaatggtgcactgggcatcggaacatccagtgctcttggcggtaattcgattgttttgggtgataatgacacgggctttaaacaaaatggtgatggtaatctggatgtttatgctaatagcgtccatgttatgcgctttgtctccggaagcattcaaagtaataaaaccataaatattacggggcgtgttaatccttcggattacggtaactttgattcccgctatgtgagagatgtcagacttggcactcgtgttgttcagaccatgcagaaaggcgtgatgtatgaaaaatcaggccatgtaatcacggggcttggtattgtcggtgaagtcgatggtgatgaccccgcagtattcagaccaatacaaaaatacatcaatggcacatggtataacgttgcgcaggtgtaa

SEQ ID NO: 25337 - DNA, 780 bp, Escherichia coli
atgggggcttaccgtgaactacgcaaattgcctcgtggcgtcagcattgctgatgagtttgacgaacgcgttgaggctgcacgtgccgccgcagacagtggtgattttgcgttgtatatcagcgcgcagggtggggcaaatgttccgcgtgattgccagactgtcagagtcgcccgtagcccgtcggatgacgttaacgagtacgaggaagaagtcgagagagtggtcggcatttacgcgccgcatctcggcgcgcgtcatattcatatcaccagaacgacggactggcgcattgtgccgaaagttccggtcgttgagcctttgactttaaaaagcggcatcgccgcgcctcggagtcctgtcaataactgtggaaagctcaccggtggtgatacttcgttaccggctcccacaccttctgagcacgccgcagcagtgcttaatctggttgatgacggtgttatcgaatggaatgacccggaggtcgtgagggcgctcaggggcgcattaaaacacggtcggagaacgccaaaccgtcagcaaagaaacggaagcccgttaaaaccatatgaaatggcaccatcggccagactgacccggtcggaacgaatgcaaattacccgtatccgtgttgaccttgctcaaaagggtatcaggccgcagcgatgggaacttgaggcgctggcgcgtggagcaaccgtaaattatgacgggaaaaaattcacgtatccggttgctgatgagtggccgggattctcaacagtaatggagtggaaatga

SEQ ID NO: 25338 - DNA, 477 bp, Escherichia coli
atgcagcagctttcctttctgcccggaaacatgacgcccggcgagcgcagcctcattcagcgggccctgaaaaccctggaccgccatcttcatgaacccggcgtggccttcacctccacgcatgcggcacgagaatggctgattctgaacatggcgggactggagcgtgaagaattccgggtgctgtatctgaacaaccagaatcagctgattgccggtgaaaccctcttcaccggcaccatcaaccgcacggaagtccatccccgtgaagtgattaaacgcgccctgtatcacaatgccgctgctgtggtgctggcacacaatcacccgtccggtgaagtcacacccagcaaggcagaccgccttatcacggaacgtctggtacaggcactgggcctggtggatatccgggtgccggaccatctgatagtcggtggcagccaggttttctcctttgcggaacacggtctgctttaa

SEQ ID NO: 25339 - DNA, 264 bp, Escherichia coli
gtggtggagccgctcggctatctcatcaacgtgacggagtggtgggaaaccagtgacccgccgggcaccttccggcttgatattggtgtactggaaagtggcatcacagaggcaatgtatcaggaaatggaacggctgattgctgatgccaaacctgcaagccgccaccttattggcctgaacattacccgggacattcccggctacctgttcgccggtggtgtggcttatgacggcgatgtaattacggtttaccccggataa

SEQ ID NO: 25340 - DNA, 1929 bp, Escherichia coli
atgagcacaaaattcagaaccgttatcaccactgccggtgcagcaaagctggcagcggcaaccgcgccgggagggcggaaggtcaacattaccacgatggccgtcggggatggcggtggtaaattgcctgtcccggatgccggacagaccgggcttatccatgaagtctggcgacatgcgctgaacaaaatcagccaggacaaacgaaacagtaattatattatcgcagagctggttattccgccggaggtgggcggtttctggatgcgtgagcttggcctgtacgatgatgcgggaacattaattgccgtggcgaacatggccgaaagttataagccagctcttgccgaaggctcagggcgttcgcagacctgtcgcatggtcatcatcgtcagcagtgtgacctcagtggagctgaccattgacaccacaacggtgatggcgacgcaggattacgttgatgacaaaattgcagaacatgaacagtcacgacgtcacccggacgcctcgctgaccgcaaaaggttttactcagttaagcagtgcgaccaacagcacgtctgaaacactggctgcaacgccgaaagcggttaaggccgcatatgacctggctaacgggaaatataccgcacaggacgctaccacagcgcgaaaaggtcttgtccagctcagtagtgccaccaacagcacgtctgaaacgcttgccgcaacaccaaaagcggtaaaagcagcatatgaccttgctaacgggaaatataccgcacaggacgccaccacagcgcgaaaaggtcttgtccagctcagtagcgtcaccaacagcgattctgaaacgcttgcggcaacgccaaaggcggtaaaggccgcgtatgaccttgctaacgggaaatacactgcacaggacgccaccacggcgcggaaaggtcttgttcagctcagtagcgccgccaacagtgattctgaaacgctggccgcaacaccaaaagcagtgaagtctgcctatgacaatgctgaaaaacgtcttcagaaagatcagaacggtgcggatattccgggaaaggataccttcacgaaaaatatcggtgcctgtcgtgcttatagcggcgctttgagcactgaagccggaaactggacaaccgctcagtttattgaatggctggattcccgtggtgcatttaatcatccgtactggatgtgcaaatgttcatggtcatacggcaataataaaattattaccgatactggctgtggaactattcatcttgcaggttgcgttattgaggttatgggtaataaaggtgccatgaccatccgtgtaacaacaccaagcacttctaccggaggcggcaccactaacgctcaattcacttatattaatcatggtgatgcttatgcccccggctggcgacgagactacaacacgaaaaaccagcagcctgcatttgctttagggcaaacaggaagcagggttgcaaatgataaagctgttggctggaactggaatagcggtgtttatgatgcagatatcagcggtgcatcgacattaatcctccacttcaatatgaatgcggggagttgccctgccgtacagttccgtgtgaattataagaacggcggtattttttatcgttcagcacgtgatggttatggatttgaggctaactggtcagagttttacaccacaacccgcaaaccctctgcgggagatattggtgcatataccaaagctgaatcggattctcgctatgtacgagatattcgcctgggcacacgtgttgttcagactatgcaaaaaggtgtgatgtatgaaaaatcaggccatgtaattacagggcttggtattgtcggtgaagtcgatggtgatgaccccgcagtattcagaccaatacaaaaatacattaatggcacatggtataacgtcgcacaggtataa

SEQ ID NO: 25341 - DNA, 342 bp, Escherichia coli
gtgcctgagtctgaagtttttaactggatcccccgcgaggggatggagacgacacgaaagccatctgttattacggtaaagttcggtgacggatatgaacagcgacgggctggtggtctgaatgcagatctgaaaacgtttaaaccggtatttcgtgtcacggatgaatattcccgtgccgcgctggacagttttttatcccgtcatgccggggttcgtgcttttttgtggcgtccgccaaaacacaacaggactgtccgggttgtctgcagggagtggagcatttcggataatgccatgtataccgattttaactgtacctttgaagaggtcactcactga

SEQ ID NO: 25342 - DNA, 648 bp, Escherichia coli
atggcagcgacgcacacactccctctggcgtcaccgggcatggcacgcatctgcctttacggggatttacaacgatttggccgccgcatcgaccttcgtgtaaaaacgggggctgaagccatccgggcgttgtccacacagctcccggcgtttcgtcagaaactgaatgacggctggtatcaggtgcgcattgccgggcgtgatgcaggtgaaaccgaattatctgcccgtcttaatgagccgctggcaaatggtgccgtgatccacatcgtgccgcgtctggcgggagctaaaagtggcggtgtgtttcaggtggtgctgggggcggcgctgattgcggtggcatggtggaaccctgtgggctggctgggtgccgcggctgtatcgggcatgtatgcggcaggggccagtatgatcctgggtggtgtggcccagatgctggcaccgaaagcccggacgcccacagcgaccagcacggataacggtaagcagaacacctatttctcatcactggataacatggttgcccagggcaatgttctgcctgttctgtacggtgaaatgcgcgtggggtctcgtgtggtttctcaggagatcagcacggcagatgaaggggacggtggtcaggttgtggtgattggccgctga

SEQ ID NO: 25343 - DNA, 615 bp, Escherichia coli
atgggggcttaccgtgaactacgcaaattgcctcgcggcgtcagcattgctaatgagtttgacgaacgcgtcgaggctgcacgcgctgccgcagacagtggcgatttcgcgctgtatatcagcgcgcagggtggggcaaatgtcccgcgcgattgtcagactgtcagggtcgcccgtagcccgtcggatgacgttaacgagtacgaggaagaggtcgagagagtggtcggcatttacgcgccgcatctcggcgcgcgtcatattcatatcaccagaacgacggactggcgcattgtgccgaaagttccggtcgttcagcctttgactttaaaaagcggcatcgccgcgcctcggagtcctgtcaataactgtggaaagctctccggtggtgatgcttcgttaccggctcccacaccttctgagcacgccgcagcagtgcttaatctggttgatgacggtgttatcgaatggaatgacccggaggtcgtgagggcgctcaggggcgcattaaaacacgggctgagaacgccaaatcgtcagcaaggaaacggaagcccgttaaaaccacatgaaatagcaccgtcgggcagattgaacaggtgggaacgattgtaa

SEQ ID NO: 25344 - DNA, 1137 bp, Escherichia coli
atgagaataaaatcactggagacatataactctcacagtaaattgaaaattaataaaatagaattcaaatcactgaccttattggttggtgcttcaggtgtagggaaaacacaaatacttcgttctatcaataaaataaagtctatcgcacatggtgattccgttagtgggttttgctggaacgttgagtttaatgctgaaggtaatgattatcaatggtctggtgagtttgaagcgctggaggattatgatgattttacttatggaatgtttcattttgatgatgacgacaaggttgaaccaaaaattataaaagaagaagttaaaatcaatggttcaattattatcaccagaagtggcgatgatatcgtttataatgacagtaaaacagttaagctggcttctacagttagtatagttcatcacttgcgtgaggaagatgatatttcggttatacacaagtcattttcacgaattgtgcaagttgatgatgatgaaatgcataaggtgtttcctagaaaaaataaagatgcttcagaggatgaagagcttagcatcaatgatatcagagagaagtcattctctttgagtgctaagttgtatttgtgtcaagaaaaacaaccagtctactttcatcaaattaaaaattcatttgtggagatttttccatatattgaagatataaaggtggttaaggttgatacaagagggattcctttctttgttcattctgtatatgcactcaaggttaaggaaagagggattgatgagtggatttcgcacaattcaatgtctaccgggatgttgaaaacatttgtccaactggcatatctgcatcttagcccgacgggaactgtgttcttaattgatgagttcgagaatggctttggtgttaactgtattaatgatataacagatgtgctactacatcatggtaatgatgttcagtttattttgacgagtcatcatccttatattataaataacataccgcttgataactggaaaattatttcaaggaaggccggggttgttgataactattctgcggatttttttaatttaaaagaatccaatcatgaggcgtttactaaattaataaatttaagcgtttattttgatggtgcggatagatga

SEQ ID NO: 25345 - DNA, 711 bp, Escherichia coli
atgaatttgtatattttggctgaggggcgacaaacagagcgaagaatctatccggcatggataggcgttctatctccatctttaaagcaagttgagtgtttgtctgcaatagataaaaacaactattattttataagcggcgagggatatcctcgtatgattgatgtgacgcttattaatgcaattaaagatatacatgataaccctaaatttaccgatttttgggttgtgctagactctgaaggagaggatgttgaggcaaggagagagcttgttagaaataagattgattcttctggtatagatatatctcattgtgaagtaaatataatagttcaaaatccgtgcatagaaacgtgggggctagggaatcgagtcattatttcgccaaataagttgactgaatcttttttggactattatgagcactatgatgtgtcatccaatgatccagagggtatgggaaagcctcttgcctatgacggatcaattgctaagtatcacgagagttatttaaaaagtatgcttgctttaagaaatgcaatgtatacgaaaaaaaatccagcagcattgatggagccttcatatttgcaacagcttatatccagagcttatgctgaggatggacatataccaagctttaggcattttcatacgttggctactcagcttgaggctaaagcgaaaatgttggaaaaccgtgtagcgtag

SEQ ID NO: 25346 - DNA, 744 bp, Escherichia coli
ttgcaagcattgcctattgaaattagtgcgagaatacactgtgttattcatgatgtggcaactgatttctttaaagaaatgtttgtatctcataatgaggttgtacgaaaaattttgttttttaatgattacctaaagttgaaaattactgaagaaaatattatcaaacgtttgagagttgagcaatttatctttctgacagaagaagataaatgttggtataaaacaagatacaatattgatgagggttgttgttccttagcgagcaatcatctttatgtagaaaagattaagagaactatcaatttccaaacccctttcctgcttattcccggtagcattgaattttcacaaaatttttacggcttaaattggtttataaaaaatatatatcctggattaaataggaaaataagaatagttgtaacaggaaaggcatcagataaaaaaataaagatgttaaactgtggagaggaaattacctttacgggagagcttgacttttccacatataataaacttagctcaacatgcttgtgtgttattgcaccgattacaacgggcactggaattaaaataaaaatattagaagctgtacaaaaaggtattcctgtacttacaacaaaatttgcttcaaaaggaatatgttccgatttatgtttttattgcgaggaggatactgacacaaactttgtcaatttaattaacagttttcttgaaacgacattaagagtccaagaatga

SEQ ID NO: 25347 - DNA, 312 bp, Escherichia coli
atgagagttgagcagaataatttcagggacatgttctccgtttatctctccggcccgccgcagacgcagcatgtgttttgtgtatccccggcggcccgggtcgcgcacacgggtctggcaggcgaagaatggctgaaagccttcccgctgcaggctttccagtacggtgatggtggggatgtacgtatagttctggcttcgggacgtgtgtttatcttccccaaaaataccgggtacatagtgcatcagttcttcgtgtgtcagcggacggtcacggcgtatctggttcgcataaccaaaacgactggctag

SEQ ID NO: 25348 - DNA, 456 bp, Escherichia coli; identical to SEQ ID NO: 12502

SEQ ID NO: 25349 - DNA, 468 bp, Escherichia coli
atgctcaaacccgacagcctgcgcagggcgctgactgatgccgtcacggtgctgaaaactaaccccgatatgctgcggatattcgtggataacgggagtattgcctccacactggcgacgtcgctgtcattcgaaaagcgttacacgctcaatgtgattgtgaccgactttaccggtgattttgacctgctcattgtgccggtgctggcgtggctgcgggaaaatcagcccgacatcatgaccaccgacgcaggccagaaaaagggcttcacgttttatgcggacatcaacaatgacagcagctttgatatcagcatcagcctgatgctgaccgagcgaacgctggtcagtgaggtggacggcgcactgcatgtgaagaatatcccggaacccccgccgccggagccggtcacccgcccgatggagctgtatatcaatggcgaactggtgagcaagtgggatgaatga

SEQ ID NO: 25350 - DNA, 210 bp, Escherichia coli; identical to SEQ ID NO: 22985

SEQ ID NO: 25351 - DNA, 210 bp, Escherichia coli
atgattaaacaggcgtggtgcagtgccctgggagtggatgccggacgttatgacacgctggcacattttccggtcaggccggcggtgtggctggcgcgtaatgatgacaccggctttcagcaggtgctggagcgtgctgactatctggcgaaggagagtaccaaagcttacggcaccggtgagcgcaactttggctgcagtcgtggctga

SEQ ID NO: 25352 - DNA, 210 bp, Escherichia coli; identical to SEQ ID NO: 22985

SEQ ID NO: 25353 - DNA, 255 bp, Escherichia coli
atgcgcgccgctcaggcgaagtgggataaactgcaacggggtgtggcggagttctccatcagcctggctaccggtcgggcagatatttacacggaaacaccggttaaagtgtcaggctttaagcgcgtcatagacgagcaggactggacaatcactaaggtgacacattttctgaataatagtggcttcacgacgtccttagagcttgaggtcaggctttctgatgtggagtacgaaacagaagatgatgagtga

SEQ ID NO: 25354 - DNA, 249 bp, Escherichia coli
atggcagctcaaaaacgaattgctctaacagtttcccctgaacatcacgaaattttaaagaaattaagcgaatttcaaaacaaacctgtaacaaccatagttcatgagtttgttgaagcatgtatgccaatggcagaagaaatggtcaaggcttatgaagatttgaaattgggaaagtcgcttgctgaagttgaacgaaaactatttgctgaaggtctacgtatcgcttctgaaaatatgaaggactaa

SEQ ID NO: 25355 - DNA, 240 bp, Escherichia coli
atgtttgcgaaacttatcaccagtcgttttttgcatatccgcgccagcccggaacaggcatcaatggaattttacggcgggaagtcgccgaaaatcgccagcgtgcatcagttcggtctgtcggaagaaacccggaaagacggtaagaaaattgattatccggcgcgccctctgctcggcttcaccggtgaggatgtacagatgattgaagagattatcctggctcacctcgaccgttag

SEQ ID NO: 25356 - DNA, 177 bp, Escherichia coli
gtgtgtgcgatggcgaccgcatcgctttatgagcgttatcgcggcgtggatgccagtgcgaaaggcgacaagaaggctgacagcattgacagcaccattgatgagctgtggcgggatatgcgctgggcggtggcgcgcatccaggacaagccgcgctgcatcgtgagtcaaatctga

SEQ ID NO: 25357 - DNA, 177 bp, Escherichia coli
gtgtgtgcgatggcgaccgcgtcgctttatgagcgttatcgcggcgtggatgccagtgcgaaaggcgacaaaaaggccgacagcttagacagcaccattgatgagctgtggcgggatatgcgctgggcagtggcgcgcatccaggacaagccgcgctgcatcgtgagtcaaatctga

SEQ ID NO: 25358 - DNA, 216 bp, Escherichia coli
atggtgaaagcatcagcccgcgtcaccctggacacaccggaggtggtttgcaccaacaaactgattaccggcacgctggaagtgcagaagggcggggcgatgcgcggcaacatcgcgcataccgacgggaaattcacttctaacggcgttcaggtggatgaccacggtcacggtggtgttaagtcaggtgacaactggacacaggggacaaaatga

SEQ ID NO: 25359 - DNA, 132 bp, Escherichia coli
atgaagctgatttttcagcatggtgatggtcgtctgctgttcactggcgacgttattcgccctgtccagcgaggcgcgcaggctggcatttttgtgtttcaccagaaacagaccggacaccgccagcgataa

SEQ ID NO: 25360 - DNA, 303 bp, Escherichia coli; identical to SEQ ID NO: 21213

SEQ ID NO: 25361 - DNA, 1650 bp, Escherichia coli
atgagcgcaatcacattacgtaaagcgttgggtgtacttgcgaagtcatcttcgttttccgtaaccacggtaacgcatcgtcaaaaggatgagttcgatcagttaaaagaacaactctttgttaaacaagaaattgaaactgagctgcaacgttatctggatgttgctaagcccggtgaaatcatctttttgtgtggcagtagtggtgatggaaagtccgaaattttgacccgttgtaagtcaaaccctcgttatcagcagcgctttagttttcatctggatgcaacacacagctttgctccccggcaatcagctattgatgctttaaatgatttatttagcaatcatcaccaatactcatctcctttgcttataggcatcaataccgggatgctcgccaattttgccagagaaggtgctgaatgccatctggcgatccgcactgcgatcgattctttcttgtcagcagatcaggaagaaagccgcccataccgcagtgggcattgttctttttttgactttgagcattaccctaaattccagtttaatgaaaaaaaacagtattcatcgtttattaaaacattactggataatttaacccgtaatgatgatagtaatttgtttcagtttatttttcgacatgatgagaccgttaaccctgagctgaaagaagttgctaactataaattactttgtctgccgggtgttcaggatgttctcatcactcagctctttaaggcccgcctgattaaagatcagtttgtgacaacccgaactctactggattttctgcatcatttgcttatggggccggggtatttatttgataatcttttcactggggcagaaaacgacctgattaaaaaagtttctgattttgatcctgctaggctgcacacctatgaaatcgatcagtttattttgcgctacgaattgggcctggttgaccctgaactggatgattttttagctgcactcgcgccattacacattagatttgatcgccagtgcgttaatccgggtgatgcggcttcattaattcggctcttctggttgctgcaggatgaatctctggggaataattatcatcagaaattttccgtattcttcaatgaatctttatttgagcattattcagaaatctggcatctgcacaaaaattacatcgctgactcagagcagaaaaaagcactgaaccggttttatacatccgaacttattgctggtattcagcgctatgcaaaccgcaaagcgccggaattgagtatgcaaaaagaagagttctttttaggtgaatatggtggggtaaaaataaccgcgccagtcgaattgaaacctgactgggaggccatccgcaataaaaatacggcccaccctactggcttcgacgtgcatttaaaagttgggcaaaactctctgttaccagttcgtatcggacttaatttatttgaacttttgaacaaattaaacaatggctatcgccccaataaatacgataaaaatgccattgttctactggacgaaatcgttgatttgattactgaacaggccaaatccagcagcgaaatcaagttttatgctggtgggcggcgagtttatcgcgctaaagcggacgacgacatgatcaccattagcggtatggagggttag

SEQ ID NO: 25362 - DNA, 525 bp, Escherichia coli
atgaataatcattcagttattccagccttcgacttccgagaaatggtgcaagccaaaaacggagaggtcgttaccacatccagaaaaattgccaagtacttcggcaagcgacacggtgatgttctcaggaaaatcgagcaggttaaggctgattgctcgcgtgagtttagccaacgcaattttgcgtcggctgattatatcgatgagcagggcaaggttcgcccgatgtacagcctgacgaaagatggctggatcatggttgtgatggggttcaccgggaaagctgctgcggcaatcaaggagagctatatcgcagcattcaactggatggcagagcaactgagccgccgcatggcaattggcgaagaaatgcagcaccgctacgccaccaaagaaacacgctcaaagctgaaaggtacgatcggcagtcggttaatgaacgaacggaagaaagagaagcgtgtcctggctgtcgagcatgaatacatcttgcaggtgacacagcctgaactgctgattaattga

SEQ ID NO: 25363 - DNA, 531 bp, Escherichia coli
atgagcaatcttttacagacgggtgcggagttcgagaaaaagctgaaagagagagccgaatctacagagaaaatgctgaacgacgagttcaggaagctcgaagaatctgtaaacagggaactgacctcaaacgaatctttaatcaggaacgctatcaacgaccatacatcagccctgaaagaacttctggagaggtatcagaaaacgaccgtcgatacgatggacgcacactggaaaaccgtactgaaaatgagcgtgaaacgctggctgtggctgattatcgtctcagtactgatgtttgccacgaccgggagcctgctgtggtaccagggcatgaagataaacgcgaacatgaatattctccgcgagcagaaagagagtctggagaagctgaacgcgaagacatggggcgtgcgttatcacgaggacagcaacggacgttttctggtgttgcccgaggggatgaaagccgaaacgaactggacgatggaaaacgggaaacagaatgccgtaaggctggtacaggagtaa

SEQ ID NO: 25364 - DNA, 1134 bp, Escherichia coli; identical to SEQ ID NO: 8777

SEQ ID NO: 25365 - DNA, 339 bp, Escherichia coli
atgccggactttcatcgtgaggatgactggtggcgtaacggccagaatctctatcttgataatctggaggccacagggctgtatcaggtgccgttgtcagcggcgcagccgggcgatgtgctgctgtgctgctttggttcatcggtgccgaatcatgccgctatttactgtggtgacggcgagctgctgcaccatattcctgaacaactgagtaaacgagagaggtataccgacaaatggcagcgacgcacacactccctctggcgtcaccgggcatggcgcgcatctgcctttacggggatttacaacgatttggccgccgcatcgaccttcgtgtga

SEQ ID NO: 25366 - DNA, 699 bp, Escherichia coli; identical to SEQ ID NO: 13878

SEQ ID NO: 25367 - DNA, 366 bp, Escherichia coli
atgctgttggttgtgctttatggcgttggtatttatctcactacctggtttaatgaattcatcaccaccgggccacatggtgtggtgttggcaatgttcccgcttatctgggtcggcgtagtttgtgttattggtgcatttagcgcctggtttcatcgttgctggttgttggtgcctttagcaccgctttccgttgtgtatgtattattagcttatgccatctggattatttatggacttattgccttttttactggacgcgaacctcagcgcgacaaacccacccgctattccgcactggtggaagcgtcaaccgcttattcccaaccttctgtcacaggaactgaaaaactatctgaagcttaa

SEQ ID NO: 25368 - DNA, 195 bp, Escherichia coli
atgcgtattcaccaacagcatcctgcatcccgtctttttccgttctgtaccggcaaataccgctggcacggcagcactgaagcgtataccggtcgtgaagtgcaggatattcccggtgtgttggccgtgtttgctgaacgtcgtaaggacagttttggcccgtatgtccggctgatgagcgtcaccctgaactga

SEQ ID NO: 25369 - DNA, 132 bp, Escherichia coli
atgacagacatgtacttggtgtttcgtatcctagtatttgaggaatataacgacaggcaaccattgatgcctgataaacagcaatgtgatcctgatgcctgtcagtattattcatggtgtaaactcgagtaa

SEQ ID NO: 25370 - DNA, 1098 bp, Escherichia coli
atggtgagcgacgaaaaaatgagctgggaggaattacttgaggagtatttccttattaaaaatcttaagccggacactgagcatagttaccgcaaggttgtccgtttgtttaatgagtttatgggagggaattcctggcccggagatgtgacagccagagatattcagagatggcggcgccatatgctgaaagttcaggggcgttcgacaaatacctggaataatagggtgtcacatctcagaccaattctggcgttaggtatcaggaaaaagtggttgccgcaaacggagaatccactggatgatgcttccgttcccggggagtccaaaaagaaaaaaacgcttactgagaagcagatgattaaggtttatcttaccgttcagaattttgctgaagcggaggttaagcgtcaggttgtttgtgacaggatgcgtaatgccatgtacccggcctggtactggcttacagtactggatgttttgcgttttacgggaatgcgttttaatcaactgaaacatattcgactgaaagatgtccatgaggatgaagcagtgattgcactgcaactggaagggagtaaaacgaggcgtgaatggagcgttccgattgtgacgccgttgcagatttcgctgaaacatctcctggcgtgtgcgcgagccaacggtgcgatggatgatgattacctttttgatgtctgtctgtacagcgagcactatggtcccgggaaatataagtattgtgccagacgggcccatcagtctgtcagatcatttttccgcaggttgagcagggaatgtggttttaatgtatccccccacagattcaggcacacactggcgacaaaactgatggaggcaccggagcgcaatctgcatatggtgaaatccattctgggacacaggagtgttgccaccacgatggagtatgttgatctttcactgaaggtggcagcccagacgctggaagctgaactttcgttatccacggacgagggaacgaagagacgtattcatgaggccagaaaacactcttatggttacagtgaagtcgagcagagttcagatgtttctgaagtggagtcgacagacacagaataa

SEQ ID NO: 25371 - DNA, 1506 bp, Escherichia coli
atgtttaagttacggaagttttttacctccggttcagcagtggagatacccgatgacgggcggtcagtgccgggaacaccggaaggcttttatgctccgctgacgacagattcactgctgatgccgaagaacagggcgcagtgtctgaagcagatacgggataacaatatgatgccaaagccattgtgtgaggcgatgtgttgtgctcccgtatacagcctgcttctctccacgcagaatgtcccggcggcccgggaggggcgctggtcacatgcagggggattcggggacctgacgttgttgcataccagttacgcggtccgtctggcccgtgcacatatgtttccgccgggcgcctctgcggaagagcaggccgcacagggggcggcctggcatgcagtgattttctggtcagccctgttttatcacctgcctctgcttgcgcatctggaaggcgaattgttcagcggccggggatggcagccgggaatatccgttcctgatgaggcgtatcgtttccggttcaggcagctcccgccacagggtacggaagctcagcaactggcggcagtgattgccggaggtctgttacctgagggggctgcagcctggcttgcgacggtgccgggagcgcttcagaatctggccggtgcgttctggcatcagcatccggaaatggcactcatccgtgatgtactgcaggagtcggcccgtcaggctgaaagtccgttgttaaacggtggaattgttgccacagccagtcatattgcttcagcagaggtcgttacgggggaggtggttgtatccggtaaaacggagagcaccgtggcaccggctgtgtccggggaagaggctgcggctgaagggaataccgtgtccggcaatgctgcagagtctgttcaggaacaaccagagatgcggcaacaacaggctgagaaaccgacgacaccagacagcagtgaaggttcagaggacgatgcagcatgtgaaatggagagtataccgacagatgaagatacagctatgctggtcagcatgtttgcggaggaggcgagggcgccggaaaagggggaggatgactcgccatctggcgaggtggttgcgcctgtttcatcgacaggagagatatcagcagccggagacgatgaagaggattttatcgcctggctgaagatggggttgtcatcaggaatgattgaagccaacacgccttctgcgagagtgcattatattgccggatatgtttttttgagtgtgcctgacattttttttctgtaccggaaattgacgggaagccagcgcgaacgcaaaaatattcaggcgttgtttgagcgtgcctgtatccacaaaatacgtgaaggagaacgtttttttagcgtgcgtttgtattcggtaccagaaaagacggggaattataaaaccgtcagcggatatctggttaagggtcgttatttatatgggtataacaaagtaccagaggacagtgcatttatcatatttccctga

SEQ ID NO: 25372 - DNA, 1509 bp, Escherichia coli
atgccccataaaccgacagaagaacagacggcaattattcactggcaggggaggaagcttgttgttaatgcttttgccggtacagggaaaaccagcacactggtcagctatgccatggcctgcccggagagcaggatgctctatctcgcctataatcgtgcgattcgtgatgaagctgagcgcaggtttccttttaacgttgaatgcaaaacgtcgcatcagctggcgtttgcccgcttcggaaggcattaccagaagcggcttgttccgggcttgttcgtcaccgatgtggcaagaaaactgaatacccgatactgggcactggcccgggtggccatgacagggctgaatcagtttatcggctcagcggatgcaacccccggcaggcagcatctgccggacaaggacgaaatgaaaggcgttgctccggatgaggcacttcgtgctgtgaggacgctctggcaggccatgagcgatccggatggaacgtttccggtcacccatgatacctatctcaaattgtttcagctctccggacctgatctctcgcgcagatgggacaccattctgtttgatgaagcgcaggatgcgaatccggtgacttccgctcttgtactgggacagcggtgcaggattgtgctggtcggtgaccggtatcagcagatctaccgttttcgtggcgcggatgatgccctgtctcatccgtctctggccggtgccgaccgtctctggctgacacagagttttcgttttggccccgcagtggccgcgatggctaatctgctgctgaaacgcgcaggggaaagtcgggaggtgagcggctgcggcggtgatgatgaggtgcttaccatgcaggaaatgcgtgagcgcatgaagcgtggaaaatttgggggactccgggcggtactgaaccggaccgtcgccggagtgattggcacggcgctgatggcggcaatggcgggcaggaaggtttactgggtcgggggcattgagggataccgaacggaggcgcttgaagatctttactggttccagatggatatgccggcccggatgcactctgaccggttgcgcagggattaccggaattttgatgaataccgtcatattgcgaaggtgacgaaggatgtggaaatgaatcagtccatacgactgctggagctgtgttttccgttaccaaaaaaactggagctactcagggagcacacagtcacgaacgagcgggaggctgatatcacggtttcaacggcgcaccgcagtaaggggctggaatgggagcgggttgtactgggggatgattttcaggatatcgctgatccgctgatgtcagaacaggagcgccgggatgaaactaacctgttgtatgtggcggtgacccgggcacgcaggacgctggtactcaatgagctcatgcagcaactggcggaggaaaagagcaggacgaaggagaagacgacgtccccgcatgagcgtggcacagagaaggcggtggagggaaaggatgtttaa

SEQ ID NO: 25373 - DNA, 231 bp, Escherichia coli
atggcatcagcgcaggccaccccgttcccgtataaatactgtattcaggccaccatcgaaaaacccggcggtacaccggtttcatggattcgcttccagaatacgcccatgacgaaacaggagtgtgaaaaactcttctccactgaaaaagaagccggtaaatcattcaccgttaaagtcggggttactcaattttcatgtaaggaaaatccacctgcccctggagagtga

SEQ ID NO: 25374 - DNA, 441 bp, Escherichia coli
atgcctcatcccatcacatatacagattttcttccggtggttctgtttttcgttatcgttattttcattatcacttttataatagccaccgccacgaccatccccgcagatatgactgtaaggggcttttacaacagatacagaaaggattttttgtctcttttttcagcatatttcctttcatcaatattctgggcattcctggtgacaggcaccagtatttcagacagcacgcctgttttcggtaatacaccggacaatgcgcttacaaactcgctgatttccctggtgttctgtaattcgttattaactcacgcatggatttgttatctctgcaacatacacagagacaaaaacacctttatttatataaccctggcttttcttcatcttattttaatcaattcatgtgcccattttatttacgccacgttttattaa

SEQ ID NO: 25375 - DNA, 672 bp, Escherichia coli
atgaatatattaagatacttaagtatttcgatcttcgcgttcttattttcatataccgccacagcctccactcagacatcatcatcgaacaaccacgccgaaaaacgtgcaatcggaacgctgaaatttatacgggccgacggacaccgaccgtttggtcaggcgatgaaacaattattacccacaggctggcgtactgagattgcccgtgacgtccggctccccgccagaatatcatggtccggaaatgaccagtggaaccatgttatcgaaaaaacgctgccccgctacagcctgaaagccacatttgatacctcaggaaaacgcgtactgatccagcaggcggaaaaaacggtaaaatctggcctgttctcagcccccgtcaccggtgtcaaaaaaacagaaacacgtcatattgagcagggaatgaccctgcgtacagggctggaaaaatgggcagccgccgaaccctgcgctaccggaaaatggaaagtggcatggaaaacgccggtaaattacagtatcgatgcccggttagttttttcaggtaattttatggatgcactgaacagtacattcgcactttatcagcaggctgaaaaacccttatatgcctcggtgaataaaaaccagtgtgtgctgataattactgacatcccgggagacagctaa

SEQ ID NO: 25376 - DNA, 435 bp, Escherichia coli
atgggatggctcatgcccctcataatcgcactgtttatcatcgggaactggtttcatgccggcaatacggagcgggcaataaaaaatactgatgagcagcaaagacaacaacaggcatatgaaatattacgcctgacaaatgccattaatgactggaaatatcatcatcccggtgatatccgtgaaggaaagatgcttacggttaacgaaaccggattcgctccggtatacggaacaaaacatattatttcagggcaaagaacttttgtctggcttccttttcagccagggctgatatcagccctgaatgaagtgagccgaaactcagcattaattgcgcaggtcagggacagaaagttactggataaccagggaaataatattggtgttccgccttccgttataccggaaaatgcgatcgtcctgatcaattaa

SEQ ID NO: 25377 - DNA, 1602 bp, Escherichia coli
atgaaaaaatttttctgcgctgtcaccgccttatccgttgttttatcaggctgcagcagttttgaacgaatcagtgccacagaaaaaaaagcatccgatgagataacacgggctgaacgtatagccggtgaacttcgcaaacaacgcgccgttgtgcgcgaaacaaaccagcagtggatcaataccacgccccttccggaaaaaaccgttacccgggcaataccggattgcccggtcgtcataaacacccgggaagccatcacacttcaccagattgcacagcggatttctgaaagctgtcatattccggttcaaatcatgtctgatgtctggacactgctgggtacaggagaaaatcgcacacagaggatcagcggcgacattcccccgcctgacaccagtggcatgcagccactgagcaccgtggggctgtcatcagccgccccctccacggcctcactgccggaactcaatgttcaggggctgcccgctttgcttaacaccgtatcttcacgctttgggatctcctggcgctatgtgaaaggaaaaattgaattccactggcttgacacccgtacattcccggtcacctacatggacagccaggtcgcctacaatgccagagtcgtcagtggcaccatgtcatccacgggcagttccggtggttcatccggcagttccctgagtggggatgccagcaatacgcagacaaccgccgttgatatgaaatccacactctatgaagacacaaaaaatgccgtgaattccatgctgacgcccggtatcggaaggatggtgttgtccaccggctttctgaccgtaaccgacaccccacaggttctggatactgttaagaattttatggaagaacgtaaccgggaaatgcgccgtcaggttgtgctgaatattgaaattctgagcatcaaaaaaaccagcaaagagcaggccggaatcgactggaacgccgttttcagtgacggacatctcggtatcgacctgaccagtgcatttactaatgccgccgatgaagtcgtgaccagtggggtatcgattattgacggtaagctcaccggttcaaaagcctttctgaaagcgctttcatcacagggtaaagtcagtgtggtcacccaaaactcggctgtcaccaaaaacctgacgccggttcctatgcaggtcgccagccagcaggggtacatagaaagtgtcaccacggatacgacggccaatgtgggctcctccacctcactgaatgcggcaacaatcaccaccggcttcaacatgacactgttaccgtttatccagcccggctcacaccggttgcagttactgttcagcatgagcctgtccgacaaacctgtttttgaagtgtttgaaagcggtggcagtcgggcccagacaccgagtgttgagctgaaaaccatcaaccagaccatcgacctgaaatcagatcagacggtgatcctgagcggattccagcagttcagccggaaatcgctcagacagggcgtgggcaccccgtcattcttcggactcggtggtggcgtggacagtgcggatgacgacaccattctggttgtgctgatcacaccgcacgtaatctga

SEQ ID NO: 25378 - DNA, 1308 bp, Escherichia coli
ttgaacgggtcaatgcagaaaaaaattcgtccggtttcactgatatcgggtaaacaggcattccttgcgggccttgactggaagaacatacctcccggttaccggaatgcccggcggtttgcccggtcacagggcgcagaactgtatctttcctgccacaaccacgacggtgaaaacggtgatgaaatgatgattgccctgctcagtcgtcaggatgcagatatcccccgtaacattcgccagtgcctgtcactggcaatgttaatacgcccgctactcaaatcaggtgggtatgccattttcatcatcgggaacgacgagaacgacgacgctgaactcacctgtgcgtttgtatcggtgattaatggcattctggttaacgacgttaccggtaccccgactgagatcacggaagcccgcaacacgttcctgatgctcaatgcggaaccggaaaacggctgggtacgctacgaacctgacggtttttcaccagacagcaggtgtatcccgctaccgctgtcaaacctgatcagcaccagaaagcatccggcagaagcacgtctgctccccgtatccagaggcccacagttaatgacagccttactcatcatcacgctgcttggcgcatcgtggtacggctggcaacgttatgaaatctggcaggcggaaaaagcggaacgggaagaaagtgcccggaaagcagctgaagcacgtataacgccaccatggacggggcagcctgagaccggagaatttatccggcaatgcagcacaacatggaaccagacgccactgtctgctgccggatggcgttataccctggctgaatgttctactgacggtaacagcggtaatctgcgggcttcatacaccaatacagcaggcacgacagtgacagccttcatccggcgcatcactgaactcacagacacccggccgtttattgtgatgcctgaagggaactctggcggtgttgcactgccggtcacattccggctcccggataatcctgtcccggttgattcccttccggaaaccagtgacctgcaggaacgactgaccacactcgcacagtcagttcaactgcagattgactggcaggaagtcaataacagcttcactgatgaaaacggaaacatcatccagccaccgtggaaagagtatgacctgcagatacagacgctactcccggctaaccagctggcagagcgcttcagcgagccatctgtccgttttctctccgtcacaagacaactggaaaatggtcgtttccgttatcagttcacaggtaaatattatgcacgataa

SEQ ID NO: 25379 - DNA, 462 bp, Escherichia coli
atgcacgataaaacaaaagcgctgctgattgcagccctgctgttaccggcaatggcagtggccggcaacgaaaatgacgcgtcacagaacaaacaactgcagattgagcagattcaggaagaaaccgccctgtatgaagcgatgctggcaagagaaaaaattcgtcatgaattgcggacactggaacagggtatctccccggtttccggttctgtcacgggacatcagccggaaaatgcggctggcacctcctccggttcacaggcattatcatccccccgtctgaaagaaatctttggtattcacccacagctttcagcacgcgtcatactccccggaggaactgaaactgatgtcagggccggacaggcattacccggtacactgttcatggtggaacaaatcacaccggacagtgtgattctggaatacaacggcaacaggcagacgctacgcccgtga

SEQ ID NO: 25380 - DNA, 1521 bp, Escherichia coli
atgccagagactatcgtactgcctcctgaagatattcgtgatttcgtcgcaattcagcatgacgctgacggaaaaatcagggtgaaagtcgtcgaggcgaagaagcacatcacctctgtacaacgttacctgacgctcttacgctcccgctatccgggaaaaatcagcaaattcgattttaccactcttgacgttatcgcagccctgaacagcaataatgcggaacgtgcaccgggcgttttatccgacggagggatcaacacagtacaaagaaaagttcttgattacatcagaaaagccgctcaactggatgcctcagatctgcatatcacaccaggacgcgacaacacggacttcacctatgtggaagcccgggttcacggcgaactggaagtgctcgatatcctccggaaagaagaaggcctcgaattactgggggccacctattccggcatgaccgacgtcatcaagggcacacagtttgatcccggggtgcctcaggatgcgcgtctttcagaacagtacctgaaactggccggtctgtttggtgcacgctattcccactacccctgcgtgggtggtctctatgccgtactccgcctgatcaaggatgacagccagcaaatcccgaccttcagtatgctgggctatcaccctgaccaggagcgcactcttcgccgcattctgcagcgccctgaaggtattatcacgctatcaggccccacaggctcaggaaaatccaccacgctgagaaccgcctctgcggcgtaccttgaacagtacggcttcaacaacaccggcggtattcttcttccccgtcgcaggctgttcaccattgaatccccgccggaagggcgcattcccggtgccattcagaccgccgtcatggataccgcgcagggctgggtggactccatcaaatcagcgttgcgtcttgatcctgacgggatcctgaacggtgaaatccgcgaccacgattccgctattacggcgataaaagccgccatgaccgggcatctgatgctgaccaccatccatgccaacgacccgattaatatcctcgaacgccttgagatggaaggcgttcagaccaggatgatcgccgacccacagttgttcatcggcctgctgagccagcgtctggttcagctgatatgtccgcactgccgtcgcccctggcatgaggtggccaccggacgcacggatgatgaacggcgcctggtggaaggcttctgtaacccggaccaggtgtatctgcgaaatcatgaaggctgctcacactgctggcgtggcgtgacggggcgaacggttatcgcagaagtcatctccccggatgcgcgttttttccagttgtaccgggaaaagggtcgtattgaggctaaaacctactggcacagagaactgggcggaatgacccgaaatcagcatctcctgggaaaaatcaacagcggacaggttgatccgctggcagcccattacatctctcccatcgacgaggacagctatacgctgctgcactga

SEQ ID NO: 25381 - DNA, 1101 bp, Escherichia coli
atgagatttctggaaaaactcaacaacaccgacattgagctgacagcactgaccgtctggatagccagaaaaacctttgccctgaaccgggtggagttctacgaatccctgggcggcatgatacgtgacgggaccccgtcactgcgtgcactcgaatttctctgcaatgtcgaaactgacttcggaacccggaaagggacatcaggcatgtattttctggcgaaggaatgcatcgcgtccatcaaatccagcggcatgttatccggtgctctgcccacctgggtgccaccggaggaagccacgttaatcagaaacggtgaagagcgcgggaatattgccgacgcccttttccaggtggccagaaccgttaaagcccggcgggaaatgacatccagcctcattgccgtctgcctctatccccttctgctgctttcactctgtgtggtgaacatgtacaacgcccatacccgtatcattcccatcgtcagtgcgtttgccacggaagataaatggtcattccagatgaaagtgctggccggcatgtcggaatttatcatcgggtacggactctggctctgcggggccattatcgccctgacggttctgatccgtttttccttcagcaggtacaccggccccggccggaggatgctggacagggtaccgccctggtcactgtatcagaccttacacggagtgaattatctgttcagtatttcatccatgctgcagattaatattccgctttcgcaggcactgctcagaatggaaaaaggggcagaaaagaataaatggttaaaggagagaattcaggcaatacgaaaacatgtgttatccggtcagaatctggccacggcaatgcgaaattccggttacgattttccgtccagagtatgcatcaataaactgctcctgaattccgaaagggaggacagtgtggcagccatggcggtctatgccgaccagtggctggaagaggcaaaaaaacgggtaaaacgcagcggattaattattaccggtatatcaggaggttttgtcttcttttttattcttaacatgatatctgccatctacagtatcagcgacatgctgaagcaataa

SEQ ID NO: 25382 - DNA, 537 bp, Escherichia coli
atgaacttcagagcacgtcttttttattatttttctttaaaaaaagagaaagaggaggataagggtttaaccttactggaaattgccggcgcactgattattatcggtattgtggttggtctcgcaatgagtcagatgtccagtaccatgtcatccagtgataaccagcgcgaactgaaaaacctgcagaccattgccaccaaaatgaagcagtataaattccagggccggtatacgggctcagattatatcaaaaccctgacggaaagcggttccctgccggccgatatgatcgccggtggtaacaaggccaaaaatgcctggggcggtgatgtcaccattaaggcaacaacagataagtatggttatacgattaccagcaataatgtaccgaaagaaaattgcgtggaactcattaacagcctgcgcagttcatccatgtttaccaaaatcatgaataccaccccggctactgtggatcctgtaacagtatgtagtaaggacaaaaataacatcacccttgaaacaaacagctaa

SEQ ID NO: 25383 - DNA, 477 bp, Escherichia coli
atgaaatggttatatttctctgtcctgattttattcagtcatacatcaatcgcatctgtgatgaataataatcatctcgattcctgttttattcaggccggaaaacgttacctgattgcccctgagcttctgaaaaccattgcacagcaggaaagcggcctggtcgccactgcgataaatcacaataaaaataaatccggaaaaatcatcagtacggattacggaataatgcagattaattcatcgcatattcctgaactgaaaaaactgggcgtcattaaagacaaggatgaactgcttaaaaatccctgcctgaatattcataccggcgcctggatactggcccaccattttcaacgctgcggcgttaactgggaatgccttggcagttacaacgcaggattcagcaaaaataacacagcccggcgcatgatatatgcccgaataatccacaaccggtatttcagaaaagattaa

SEQ ID NO: 25384 - DNA, 651 bp, Escherichia coli
gtgtctgaattactcccgatatgcattatcctgattgtccttgcggcaattctgtatcttgcatacagcgccgccacggtatatttgtcgcaggtacacaatacccgcccacacaacgctgcggtgtgcatctgttgtcttctggctgtactgagcatttgcctcaacggtgcatatggtgttgacgcgacaggactgttattcctttccattctgacgggattattaactgtaatgacgctgacggatattgctgtctgtcggcttccccggatattcacgctttctcttattattctgggcgcagcgttcagatacagccaggactcactggctcatgccctgctcaacgcgtcactgtggttcggcatgatatacctgttacgacgcatttttctggcagtgaaagggacggaagcgctcggccttggtgatgtgttcctgattgcggggatcgcaatgtggacacaagcacaacacactccactgataatcaccgccgcagcctccggggcatttctgtttatcctcattttctgccgtcgcagacgccagcaggcactgccatttgctccgtttctctgcgcgtccctgtatgtgttgaccctcttccctgattccgttatccacacatcggagatattcacgtga

SEQ ID NO: 25385 - DNA, 1203 bp, Escherichia coli
gtgaaaaaattcagactcgatgacgataaaggttttattctgcttgaaattcttgctggcctgatactaattggtatcgccacgccaatgatttattcagaaattgaagactggctgaatgaacaactttatcaaagtgcggctttacatgctgatgaatataataatgcaataaaaaattatgtggctgataaaaccagctcactttccagtaaaaccatcacggtaaatgaattaattcagcagggatatctgaacaacggattttcccgctccccctttggacacagctatattaccggtatcagaaaaaataatttatccggtcgtctggaagcacttacctgtacaaccggaggacaggatattaaagaagatgggttacgtcgcatagcgggccagattaatggactcggtggttttatgctccagaataattccgttacaggtgcctttggcggctggaccgatctgggaagtaattatcagattacctgcaacaaggggcatatcgccatgcgaatggctggaaaagatctggaggaaagcgatcggctttaccgctacagcgttccgggaagacccgatttaaacagaatgcatactggcattgatatgaataataacagcatcaccaatatcaatgaagccagtggtaaaaacgccagattttcaggcgatgtcacatcaaatcgttggttacatccaaatggtggcggcttcaccatgacggacaaccagtggatacgtgctgttaacaacaaagggatcacaaccggtggtgaaatcaaagggggttctgtcagtggtaacacagtccggtctgatggtcgtcttactgccggcgagtatttacagctaaacggaatcgccaacgcaggcactcattgctcaccagacgggcttgtaggccgcgacaacagcggggccatacttcagtgccaatccggtatctggacaacgacaaaaatgaacttcactaccagtacatacaatatcgggaaaaatactcgtaatctgagcattggcgtacatgcgtactgctcgtggacataccttaatggctcgccttttggtggttttcagcagatatacgccgaccaaaacaaggtttggtatgtgaataattatgcgtggggaaattatgagtccggtggcacaattacagtgacatgcctcaaccttcctggtgccggaatctaa

SEQ ID NO: 25386 - DNA, 1125 bp, Escherichia coli
atgtttcgaaaaataaaaattcgcaaaatgacgctcaaccgggcgctggacaaatacctgaagacagtatccatccacaaaaaaggtcacctgcaggagttttatcgcgtcaatgtgattaaacgtcaccctgtggccgatcgctatatggatgaaatcacgaccgttgatatcgccacttacagggatcaacgtctggcccaaattaacccccgtaccggccgtcaaatcaccggaaatactgtccgccttgaactggcgctcttgtcgtcattattcaatatcgctcgcattgaatgggggacctgccgtatgaatcccgtcgaactggttcggaaacccagaataaccagcggccgcgatcgccgactcacttccgccgaagaacgcaggctttcccgccatttcagggataaaaatccgcagctctgcgtcatcttccatctggccctggaaaccgcaatgcgtcagggcgaaattctcgcattacgctgggagcacctcgatttacagcacggcgtggcacatctgcctgacacgaaaaatggctctccacgtgacgtccccctgtcccggaaagcccgcagctacctgcaaatgctgccgcaacagcttcatggcaatgtcttctcttacacatcgtccggcttcaaaagcgcatggcgtactgcgattctgacgctgaaaatagaaaatctgcattttcacgaccttcgccatgaagccatcagccgtttttttgaactcggcacactcaacgtcatggaggttgcggccatttccggccatcgctctctcaacatgctgaagcgatatacacatctgcgggcgtatcagctggtcagcaagctcgatgcaaagcgtaaacagacctgcaaaatcgccccctattttgttccctatcccgcaacagtcgggaacagaaacggactgttcattgtgacactgcacgatttcgaccttgaaacccgtgctgaaacccgggaactggcaatatctcatgccagcgtattgttgctgcgcacactggcacaggcggctcagcggggtgaacgcgttcccacgccaggcgagctacccgcaaacattgatgaacgggccatgatttgtccgttaacaagctga

SEQ ID NO: 25387 - DNA, 282 bp, Escherichia coli
atgaaaataaactataaattccggattaacttaatcacagtcattctgtctcaggtcctgatacagatatatttgtggcataatattccggtatccggagatatcccactacccattatattacttatatccatattcttatcaggcctggccatctgtactgcattctggctggcatatgacagtgacagatttaagaaactatcactgccaaagcaaattattctgttagtgttatatactgccggattcacttttttaatattatacgacttcatgtaa

SEQ ID NO: 25388 - DNA, 822 bp, Escherichia coli
atgaaaccaaacagcactggcattgctgcccgcatgatactctccctggacagggcccggatttgtgaagccctgctcaacgaccgtcagctgcagcccacgccactgcaggttcgttatccgcagggcgtcagggaagccctcagcatcatgagcgaacagctttccctctccgtctctgacctgacgcgaatcctggtcgaagaggcattaagtgagatgtttctccccgcggataacagcgtccgccgtcttcacgaccggatggaatatctcatgcaggtgcatgagctcagcccggtcaccatggccacattactggcaccctggaatatccgccctgccgtcttccgggaaccggacagactcactgactacctgaccggggaaattcttgcctcactggctgactggttttatctctgtcctgaatggatgaacggctcggtacgttatccgctgtctcgtccgggggactggcccgaaacacaggacgcattctgccgtcttatttcagacggcgataatatcgatattattctctggcatggttttccttttgccggtgaacacgctcaggaatattgcggcgttcttctgcgccagaaaaagaaaattaacaatgccattatttacccggtactttctttatatccgacaggaatgaacaaaaagaaagagggctggtttcagatggcccgaaaaatatcacctgatatccccgtcagggccgtcacgctcagtccggtacaggcggaatatctggtcacaggaaaaatattaccggctgagttattccgaattcccttatcgccctggtaa

SEQ ID NO: 25389 - DNA, 1203 bp, Escherichia coli
atgatgatgaaaaagcatattacccgtacacttgtcgcgtctgccgttttattttcctttaattcaacggccgccacctcatattctgaagcccgtaatgatgcaatgggcggaaccggcgtcgcctcctctcactatggcgtggcaccgctggcaaacccggcgctgctgacaaaagccggtcctgacgatgatttcagccttctgcttccatccgtcggtgcgcaactctccgatccggataatatcaccgacaacgccgaccggatcagtgatgactggaaggccttcgacagcgccatcgacagtaaccacggtgttcctgaggctgccgcacgcctgaaagaacgcctccgggacttccgtcacacacatgccgccgcacagttgggcatttctgctgtggcggcccttcccggtgatcgcctctctgccgcactgatggttaaatcacacggcaccgtcagtatcgacggtaaagtctctgatgctgacctcacttacctggaagaggtggcaaacagcaccggacaggaggtggacaaaagccgcctgacatcacaggcctttgcccgcgcggcactgatcactgatgtgggtattgctctggctacggaactggaaacggccgggcagaaatgggctctgggcttcacccccaaattccagcgcgtcgacctgttcaactacaacgtgctggtcagaaattatgacagcagcgccttcaaaggtgaccgctaccacaacacgaaaaatggcatcaacgccgatatcggtgccagtacggacctggatgaccactggacgctggggctggtcgcacagaacctgatcccccgtagtattgagacaaaagaagtgaacggtatcacggaaaccttcaggatccgcccgcaggtgacggccggtgtctcctggcacaacgcgatgttcaccaccgcattggatgtggatctgaccccggccagcggtttcacctccgacagcaaccgtcagtttgccgccattggcgcagaatttaatgcctggaaatgggcacagctgcgcgccggttaccgtcagaatctggccggtaacgacggcagtgcattcacggccggggtggggatctcaccgtttgatgtggttcaccttgatgttgcaggcctgatcggcacggacaacacttacggtgcggtcgcacagttccagttcaccttctga

SEQ ID NO: 25390 - DNA, 753 bp, Escherichia coli
atgaataaaatttattcactgaaatatagtcatattacaggtggattagttgctgtttcggaattaacaaaaaaagtttccattgcatccagaaaaaaactcaaactggcatcctgtgcactattcgcatcaggaatgttgttggcatcaaatgccacagcatcccatatgtggatagataacttctgggtgcgtgactatcttgatttcgctcaaaacaaaggggtatttacgcctggaaatgaaaacatttcaattatgaaaaaaaatggttctgtttataatttcccaaaagttccttttcctgatttttctcctgtatccaataaaggcgcaacaacatcaattggtggtgcttatagtgttactgcaacacataataaaaccaaccatcatgctattggcacacaatcatgggcccagacagattataaatacatagaccgggcaaccagtaatgattttgctgtcacaagactcaataaatatgtggttgaaactcagggaatcacttctggtgccaatacttctttaacgaaagaacaggctcttgaacggtatggaattacatttaagggtgaaaagaaattaattgcattccgggccggttctggttatctggcgttccagagtaatgggaagacagtaaattacaaagatatcaattattcacctgaattacttaatggttcatttgttcttgttgataactggaactctggtcatattttaactcataatttgtttgactag

SEQ ID NO: 25391 - DNA, 2487 bp, Escherichia coli
gtgcgttcagccgttaaccgctggaatcaaaatacagtcgactatttaaagaaaacatacacacacgatatcaatcttaattcacaggaattagaacagcaacacatacaaaaaaataaagacaatagtattcacggtggaggcacattaaatatcatcagtaatctgagtctgggacatggcggattaaaatttgatgacaatcagacatatattgttaagggtgataatgccacatatactggtgcaggaatagatattggtaaaaatacaaccgttgactggtatcttaaaggtgttacaaatgataaccttcacaaaataggcgctggtactcttgatgtgaaggtctcccaggggggaaatctcaaaacaggagatggcacagttatactcagtgcagaaagagctttcaataacatttatatagccagcggtaattccactgttaaattaaatgctgataatgctttgggaactggcaattactctggtgtcttttttaccgaaaatggaggtacactggaccttaatggacataaccagtcatttaactttattgcagcttcagataatggagccacaataaccaacacaaatacaaaaaacaagtcgactttatcaataaacaataccagtgactacatttatcacgggaatatcaaaggtaacattgatttatctcacttacgtgaaaataaacaatccaacacacgactaatactggatggtaacattgacactaaaaacgacattcatgtaaacaatgggacacttgtcatgcagggacatgctacaagccatgccacattcagggattctcctgtacaatgttatgtccctaatattctgtgtgtcacggacagtgctgcggtcataaaaaaactcgaagcatctgcaaataataaaaataaaaccgggtacatgtccaacaatgctgtttctgattttgcccagccagactgggaaggacgaacctttaacttcaaaaccctgtacctggataacgctgatttctctgtagcccgtaacgcgcaggtcagcggtaatattgatgcaaaaaactcaacggtcacacttggtagtgacacagcgtttattgacttttactccggtaaaaacattactggaaatggatttaatttccgtcagaatgttaaatcaggtagtccgaccaatactgctgcacaggatatcagttccttcaccgggaacattgatgcaaataattcagagataaccatcaacaacaaattccggggatatttctctgccgagaataacagccatgtaacggttaaaaacaaggatgtaattcttgatggcggcgccagaatatcaaataacagcacactgaaactggataaaaatgccagtctgacagctcatacatggctcatgaactcaggaactatcgaaattggtgaaaatgccggattaaatttaccaggatatccggtagcagataaattccttccgtcagttcatgagcttggtaatgtaaaaatgacaggagacaatgccactctcactgctgctaactatacaatgttcagtggtaatatcacagctgatgatgatattgcagccatactaaatattggttcttctgatgaagccacattgtctgacttcaatccgaatcccgagctcacagacatgatgttcaaaaattataacgcatcatggacaggcagcatttccgcgtcgaaaggctcagcaacaatgaataatgctgtatggcgtatgactggtgattcaaaacttaacagtctcaataccaacaaatcccttacagtattcagcagtgataataacagctttgccacgctgactgtcaatgacatgacaatgaatgacagtacgtttgtgctgcgttcgaatgtaaccgactcagacaaactgattgtaaaaaataaactcgatggtaaaaacaataacctgcttgtggatttcatcgaaaataatggaaaagagcagacaatgaatgtcgaacttgtcactgctccgaaaggaacatcttcagatgtctttaatcctcaggaacagaacatcggtttcagtgatgtaatcccggttattgaaaccgagaataaagatgaaaaaacgacctggacactgaagggctttaatgttgccacaaatcagcaatcagtacagaaagctgaaaactttatgtccgcgggttataaaaacttcctcaatgaggtcaacaacctcaacaaacgtatgggtgacctgcgtgatatcaacggtgaggccggtgcatgggcccgtatcatgagcggcgcaggctctgcaggaggcggatattccgacaactacacccacgtccagattggtgcggataaaaaacatgagctcgatggccttgacctcttcaccgggatgaccatgacctacaccgacagcaacgccgggaacaacgactttctccggcaaaacgaaatctgtcggggctggcctctatgcctctgccatgtttga

SEQ ID NO: 25392 - DNA, 570 bp, Escherichia coli
atgtttgagtccggtgcctatatcgacctcatcgggaaatacgtccatcacgataatgagtacaccgcttcctttgccggcctcggcacgaaaaactacagctctcactcatggtatgcgggcgctgaagtcggttaccgttatcatgtcacagacgatgcctggattgagctgcaggctgaactggtttacggcgctgtctccggtaaacagttcacctggaaagaccagggcatgagcctctccatgaaggataaggacttcaacccgctgattggccgtaccggtatcgatgtcggtaaaaccttctccggtaaggactggaaagtcactgcccgtgccggcctcggttaccagtttgacattatggcgaacagtgaaaccgttctgcgcgatgcctccggtgaaaaacgcatcaaaggtgagaaagacggacgcatgctcatgaatgttggtctgaatgctgagattcgcgataatctccgctttggtctggagtttgagaaatcggcatctggtaagtacaacgtggataacgcggtgaacgccagcttccgttactctttctga

SEQ ID NO: 25393 - DNA, 294 bp, Escherichia coli
atggctgaatggtgcagaaatcgttttgaaatcaccggtaagtcagtctgtcttgacgtactgattcagtggattgaagggaatgatgcatcccggtaccgtcatgcgatccagcagagcatactgctgtttcttgcaggctgtgcggggatactgaaaccggtaagaacggagacatatccgccttatccagggttggtcagtcacggtgccggctcaacaactgtagccagtcaggcatgggaggtcgcggagcatgagcagccacaactctgtctgatcagggacacatag

SEQ ID NO: 25394 - DNA, 393 bp, Escherichia coli
atggagttgactgcagacctgctgaaaagccttaacaatataagacaaaatgccaccatatatgttcacgcataccactatactgatgatgaaaaatgcgttatggcaccacgctcatccctgccctctctggagctaacagttctgcagtcagaaaaaattatcgatctgcttctgagtggttcgggttatatcaggcatgacggctatgttcagggatatggagaaaaaactgtggcaactttcacaatacaggagggtaagcaccatcatttcaggacaaatctggcactgaataagacgggcaatatagccgataatgcgttgaatcattggctacatcgtatacgtaaaacagacatcattgttctgtctgttgttcttacagaataa

SEQ ID NO: 25395 - DNA, 282 bp, Escherichia coli
atgaaaactaataagaaagacacaaaatggtacattttttaccgtgaaaattcaggcgaggaaattttgcttgaaatgtcatcatttaaggaatgtctttcggcatccaaagaattaatgaccccatcaaattacatgatatgcatagaaagaaatggcgaaagaataaaacgttgggacagggaaatcatagcaggctctaacaaatggattaactgtccacctgataacttcgaaatattaggtgagctaataaccattaatagaattatcaaaaagtaa

SEQ ID NO: 25396 - DNA, 1794 bp, Escherichia coli
atggaaaaagtatcaataagaaaaatcaacaggacagagcattttccttcattaaatcttccttctgatacatcctgggttgtttggtggtatggtttcttaaaaaagaataaaagacgaggtgaacaacctaaagtagcaattacctttcgggaagttcagaccgatggaactctttgtgatagatattatgagcaagaatgtctgttgactgatttgtctttttttaaaataggcagtgtctggacaagaggaaggtgtgttgctgaaattctgatggaggaaaaaatatttaatgttgatttctcttatgcaaatggagggtggaagattaattctctttatcaggcatataaagaaggtgcgtcattaccttatgatttttcagattatcaactgaaatctccatatgataaaaattggctccttgagtttttaacagatgatgcggataaggtgatcatccatccgcttgagtttttttatcgttgctatggacattccgatgagttgaagagagttattcttacttattcaggaaatgaactgcgtaacaggattttttctgaggcatacgtggagggagacaaaatcttttatataaaattaagaaagagaatgaataaatatgatgctccttttgcttctttctttgcccttgatgggtttacccggaaagtgattgacagaatacaacgtcaattagatgtatgtgaagatcgtaaaatatacctcaaagtggctccctggtttaaaggaaaggccagaataaaagttaaaggattttggttggaaaataatgttactttccttgggctttctgttacaggtgtttctttgcctgcaggatatactataaattatgacagagataacagtaacctggttgatgaaaaagctgaacaagggagcaggcaagcctggagtaatgttccagttcggcatataaaaaatccggatgaacctttcagtgttgataacgctttttctcctgattctggagcgtcgactcttgaagttgaagcgtcagtttttgaatttcttgacgatggttgtgaactgagtcctttaaggagaaaaaaagcaaaatatatatccgttacaaaaaatgaaagtgatttacactcattatattcggtaaatgaagttgttgatgagcaaaatagcataagcacaggatatatgtcattagctgataaaaatgaacctgaaagattgtatatggagtcaaaagggattgttcgtgacatgtggaatgctatggtttatttgaggggagcttattctgaaagaattaagtctctggactggtataccccagaaagctcattcttaaatacgcaagaacctgaacttgttgcaatcccggagttcaatgaaagcgaagtggaaaatgataaaatttctaagtcgattcttaactggccttaccttgatgttgtgaataagaaagatataagaggttttctgatatcaaggatgttgattgatgataatatgatttattttatggaaatacagaggagagtgtgcaatgaagaaaccatgaattcgttctctgaagtggaaaaatttaaaggtctggtttttacacttgataacgaatgtgaaattgataaatgggtatctttgttagctcacgaatcaagatttgttaaaggtattttacaaaaaatagtgggaaaatgcccgggcacagcgatgacttacaagcattctcccgcaaaaaatgaacccgttgcttgttatagcgcattgcttaatgcattgtctaaagtcggagttactttttga

SEQ ID NO: 25397 - DNA, 699 bp, Escherichia coli
atgaaggttgtgtttaatgtaatggatggttttgataagacttttttgcccctggagttttctggttttcatggccggaatgggtactgttatttaagggttcagattaaacatggatttattgttttctcatgcgctcaattattgaactattatcgtacgtcagtaacaaatgcaattgagcaggtcagagaggctgcggttaatgctctcttcagggagggggtattgtcatacacgcagcaaaaagaatttctggatatattaaaaacatcacaacgagtagataaagaaattgattcgcaattatgggattacataaatgctaattcaatatggtttgaatactataaccataatgaatcattgtttctgaatgatcactttcatatcgcctcttttgagggaaacaggaatccactgtggaagaaaacttcactggaggatttagagagagcatatcctgagtttgactttgttattcataaacatcatcttgaaaaatggattaatggaggacttagtcctgaaaatgtaaaaaagacaataaaagaaaaaggctggagcaacaagatgttggctgcgcgctgggggtgcacagaggtatgggtgagtaaaatcattaacgatgaaaatagaaaggttcagtggaatgatgctattaatgggcttcctgtgataagtgataatatgatttga

SEQ ID NO: 25398 - DNA, 687 bp, Escherichia coli
atgaccacctttatcgaccatcagaaagcttttattttgctgtttaatcagactgcccgttatcacaaacgtcataaggtgtttgaggactttgtcagctgcagtgtgattgccctggagaaccggcttcagttcagtgaagcacgggagcagaagtacttgcgaatcgtcagtggttatgaaaagcaggatgttatcaacatggcgcatttgcttgcccatgtcattgagggactggagcagggattctgcgactttctgggcagcgtgttcatgcagctggagctgggggataaataccggagccagtttttcacgccatggggtgtggcctgcatgatggcacagatgcagctggggaatgtgaaagcgttgtttgagaacaaaccctttatcacgctcagtgaacctgcctgtggtgccggcagtatgattctggctatggctgacaccctgaaccgttcggggtatccggcataccgcaggatgtgggtgtcggcaacggacattgacccgctggcagctggtatggcgtatatacaattgtcgctgtgtggtgtggccggagaagtggtgattggtaactcgctgtgtaatgagcggcgccggattctgctgacacccgggcattacctcggaaactggtcatatcgtctgcgccatgttcaggaacaggcagcggcctga

SEQ ID NO: 25399 - DNA, 948 bp, Escherichia coli
atggccgaatggtgcagaaatcgttttgaaattaccggtaagtcagtctgcctggatgtgctgacgcagtggattgaaggatgtgagacaccgcgttaccgccatgccatacagcagagtatacagctgtttctgatcggttgtgccggactggtgaaacctacccggacgacgcagtatccgccatatccggcgctggttcgtcatggtacggggatgtcatctccggctaaccaggcatttgaacagtggctggggctgctggtaaaagatgccgtactggatgaagagacgataaagaccattgaccgcctttatcaccagtcatgtattggcgcagtccgctgggggaatctgccggataatgcccgggagataatcaccacgttaatgcattgtcagtattctgactggtttggtctggtcggactgagtgaacacattgatgccgaagcctgctggagccggctgtcggattacccggaacaggcgcagccctgtgacatgctgatggtcatacccccccgtctggccacagagctgaacggttcaggtggactgctgcagggcatttccaccacgaccagcctttacagccggatatacggtgtggagtggccatcaggtcacaatgtccgctgggtgcgtgatgagatgagcagtctggtgctgctgacagacacgccctggtatccgccttcaggtgagctggttggtgaaatctcgaaggtgttcgactgtgagatacggcactggtacagcgaacctgtccggggcatacagggttacaactgttatgacggtggtgaacatacggacagtgacccgcaggccgaatggccggggagggaaaaacttccacagccccggctgtatctggtggaggagcgcgctgaagaacagacagaagccgcgcctttaccggttccgctggcttcaggccagtaa

SEQ ID NO: 25400 - DNA, 435 bp, Escherichia coli
atgaatgttaagtctgtgactgaggttgacgatgccgtggttgcccgtgtcagtgacgttctggaattcgcatttccggggcagaaatttaacgtgctgaaggtatgcgattccggcgtttacaacatgattaatgtgtcctggctggatggaccaacagaggctgaagtgcggtttattacccgtgcgtttgaaggcaaaaacgggctgaggttcgtgcacgaatcccgcaaattcagtaatgaatttgtgcaggagtgcattgaccggcttcgtaaaaagtacgggcagagcaacgttccgccagatgtgacagtggcacgttactggaaaaacgatttgtggaagattaaaacagatcgtttcccgggcaatatcgacgtagctatcaacgaaatggggacagaaaccagtaaataccggaaggttgtataa

SEQ ID NO: 25401 - DNA, 339 bp, Escherichia coli
atgagacccgatttgaatattttacccggagattccggctgcagcgtatggttctataacggcatgtctcaaccgcgtctgctggcgggcagtattgccgggttactgacggatgttacgatcacatcgaattaccgcggtgacgtcacatctgaaattcatgacgtggtgcaggagtggcttgcgaccggcaggggtaacctggcggatttaaaggaagaactctggtactacaacctttacataaatccgtcggcagacgaacttatgaatgccagcaggcggtatggcctcgggcataccacctggctgaaagactttatcagtaacgcggtgtaa

SEQ ID NO: 25402 - DNA, 360 bp, Escherichia coli
atgtattcgcgttttattactggttactggcatcttcagagtcagtccgctttgctggcacatctctgtcagctggaaggtgaactggcgatacttcgcgcctggcaacgtctcggaattaccccggtgccggaggatgaggatgagccttcaccactttactcgattttgtgggatgttggtgaggctctgggctggttgctgtatgacctggagatggaaaatgctccagcaccgggaacgattttccatgaggtactcgacagggttatgtctctgggacatgaaacagagcacagtatctgggctgacagtatcagtaccgggaagcggtacgctgcaataccagatgcattttaa

SEQ ID NO: 25403 - DNA, 984 bp, Escherichia coli
atgaaaacgaaaaaacatacttcatgtcccgtgaataaaaccccggagcgtgacctgtatcagctggtgacggacagggtgattgaggccatcgaaaagggcgtagccccctggcaacgtccatggcgctcagtacggactcacagcggcgatccaatgatgccggttaatgcactgacacgtagcgcttaccgtgggatcaatgtgttgctgttgtggctcgccgcagaagaagccggttacagcagtaactgctggttgacgtaccgtcaggctcaggcgctgggtgggcaggtccgtaagggcgagaagtccacgatggccgtgatatacaaaagctggcataagcaggatgaggatgagaacggcaaccggatattcgacgcagagggtaaccccgttatggttgatgtaccggtgctgaaagcgaatcctctctttaacgttgaacagtgtgatggattgtcgctgccggaggtgacgacaaccgtcactgagaacggtgcgaacgacacgctgaatgctgtggctgatcgtgtactgacgatggtgaatgcctgcggtgtgaagattcattctttacctcaggaccgggcgtattacaccccggtatttgatcgtatcgtcctgccgctctcgtcacagttcacttcagcggaagattactggtccacattactgcatgagctggtacacagtaccggtcatgcgaaacgtcttaaccgggaagggatagtttcctcaggtgggcgctatggcgatgaacgttatgcgttcgaagagcttatcgctgaaatgggcagtgcctttctgtgcgctcaactgggtgtcacaggaaatgtgcagcatgagaattatattggcgcatggctgaaaattcttcgtgctgacaaaaaagcgctgttcagtgcatgtcgacaggccagagaggcaacggaataccttctttccgtacacgatacgccggcagaaaaagcggcgtaa

SEQ ID NO: 25404 - DNA, 480 bp, Escherichia coli
atgaatagtctgttaatactcctttacgttgttgtatgccgtgcctgcaccattcttcgggtaatcgcaccagtgtcgtctgtccgtgcgtggtgtgagtatcaactggaaggtatgacgatacttcgtgatgcgtacagctcgctggctaaggcggctggaatgcagaatgatgcatttgaatatcttgaaagtattgctcgtcatctgggctacgaaagcggtggtgaccaactgaaatcaggacttttccggccgtttctgtggcatatacgtgcgaaaggccacaggctgggagctgtcatggaaatggcggtatggcaggcatggaagaatggctgtaacgatgtctgcaatccatggggggatgtctacaatccatgggaccgtggatggaacgatggctggactgaatgtctggatcaacgtatagccggtctcctgaaggcggtctgtattgacttttccgacgcagactga

SEQ ID NO: 25405 - DNA, 381 bp, Escherichia coli
atgggactcgatatttttttccttgggcgtgatcgtgttaccgacgcggtagtatcggtaccggaaacgcgggaagtgggttactttcgcaaggttaacccactgattgcctggtttgagacgcattgtggaccggttgaaaatgccgtggagcgtccggtttccagaacggaactggaggcactactgagcgatcttgaatgccttacgccggagaactgccgggaattcttccccacaacagaaggattcttttttggttctcaggagtatgaccagtattactggaaggatgttgagatcgtgaaatcgtgggtcagaagcacgcttgattcgtttgattttgaacgaaaaatactgttgctctgggcatggtggtaa

SEQ ID NO: 25406 - DNA, 402 bp, Escherichia coli
atgtttataccacttttgttacgtgcagatatgcgcataacgcctttctttcatcttctcagacaatgtctgtttaatcagaagcgttgtgttcacccacaacagccctggtccgctccacaactgaggcatctgtactgcactccgtggtttattaacgccaccggcaatctgtcagtcagagcctgcattgtttccaccaacggtgcattgcgacactgctttgagttccgtgaaggctctcacagccgtgaatatcgttactggtttgaggcacttccgctgtctgtcgtgcggtttaatgtctttaccggtcgaatatccgctcgccgcacgctctctgctgcctcccgtatggccgcgcagcttacttcttttcgctatcgcttcggtcttcgctga

SEQ ID NO: 25407 - DNA, 732 bp, Escherichia coli
atgaaatcgaaatacaaaaaattaaaagatgaactactcagaatagccaaagcatgcgccccgacgccagaagatatgttggtatatacgggaagagccagaagacttgcttcatttcttaaagatgccaatatacagataagctcagcaaatagcataaaactacgtcatattgaatgctattttcaacaacgttatcgcactggcgtcagttccaaaatactacgagaagaattagatacaataaagcatgttctcacccattgcggaaagagaaacatcgttaaaaatgaacgactgacttatacatcactgaatattgcagatgtccgaccaattgttatctgcccatactgtggaaataagacgaatcttataaaaggggctctcatgccattttccatttcagccgcgacagaaaacaaatattactggatttgtcccccatgcaatgcatgggttggatgccataaaaactcaggaagaccattaggtactccggctaaagaaaacctgagaatactcagaacaaaagtacgtaaactttttgacaattatcagcaaagagccaacatatcccgtaacgaggcaaacatatggctatccagaaaactgaattgtcacattcatgaatgtcatattgggtattttgatgaagatatgtgtaatcgcgcatcagaaatcatcataaccgaaattaacaaaaacacatatcctccagattcattttaa

SEQ ID NO: 25408 - DNA, 918 bp, Escherichia coli
atggcccggaaatcgtcacgttctaaagttgaactgtttcgcaagtctttcatctcacttgcccgtgagtgtggtggcagttacgcaacaacagctgacagaatgagaattgcaaagtacttcctgaattatttacgtgaaaatggaattaaacttcgccagacgagcagtattaaaaccagacatatttctggttaccttctcagcaggaaagcagcgggtatttctcaccggactattcagaatgaacgggcggttatgcgtgccattttagaaaaagatggacgacttaaaatcgcagatccttctaacccattattgagtaatgaagcgctcggcctaaaggatacatgccgtgatggaaagaaaatagcagtgtcaccggatgaattctggaaagcatttgctaaagtggaaaaaaagaatcctggtgtggcagctgcaatgcagctttcttatgttctgggtttaagaacaaaagaagccgttcagtcatgtaagtctgttcagtcatggctacgggaactgaattcagggtgcgattctctttcggtcgtttttggtacgaaaggtggaagaccaagaaataccacaattattgacagagatgcggtaagacatgctttgctttatgctcaaaaaataatggatgaacacgacggaaaacttattgaccgtccaaatataaaacaggctatcaatgtttttcgttatcatgcccgtaaagcgggattgtcaggagtgaaatctccgcacagtatgcgttatcatttttctcaggaagccagaaaattttatcgaaaaaatggatatggagagtcggaaatctacgctcgtgtttctatggatcttggccatggtgacggaagaggtcgttatgtaaaacaggtttattttaacggttctgatgaaagttga

SEQ ID NO: 25409 - DNA, 267 bp, Escherichia coli
atgccttcatcatcacgtaaaaccgtagtgacatctgctctcaaaggtgtgcagatttgcccatacatcagggatgtttcccttcagtactcacagctcctttcaggctacggaggtgtaaaactgaccacccgaaggcgctcctcacaggtcatatggagcattggtggtcgccggagcgacatgggccacccgaaggcgttcctcacaggccactatggaacattggtggtcgccgaagcgacagttaatgcagatgcaggttaa

SEQ ID NO: 25410 - DNA, 141 bp, Escherichia coli
atgccgcaaaaaacgatcatcgtgagcattttatgcttaaccatgttgttgaccgtctggatgatacatcgttcaccatgtgaattcagacttaacatcatgtggtcagaatttgcggcgttcttgcagtgtaaaccgtaa

SEQ ID NO: 25411 - DNA, 285 bp, Escherichia coli
atgaaaaacgaagcagaaaaggcgatgtggagttgcaaaacctcggataccccatggaccttcagttccctgctgaaaaaggctgtctgcgcgattttgcctgatgcagaaccgaagattgagaatgccacaaaaggatgttctgttttatcgactgtagataatgcccctggcaataaatcattaaattacgaccctttttcttttgaatctggtttacatcttgatatagaaaatcttccccttatagaaaattgggatggagaaccttacaagctcccctaa

SEQ ID NO: 25412 - DNA, 387 bp, Escherichia coli
atgatgtatctgaaatatccggagccggagctgcagacagcggtgcatccgggtggcgttgtgttttttttgccgccacagggtaagcccggggtgaccgagataacacagccgcatcttctgcggctgcgctcacaccttaatcgtcgtctgggcaggctgcgtcgtgttgtatgccagccccagcgggttggcatgaacagcagcgtggcggtgacgctggaaggtgataccggaaaggtctatctgcttgtttccgtgtgtggtcatgaatgctggccgtcagaggaggagtatacgcatctgagatggtatatccaggttgttgatgcggccgatttgttctatctgctgttgtggctgaatggtatggaggcagaaaaataa

SEQ ID NO: 25413 - DNA, 2817 bp, Escherichia coli
atggcattcacactgtttaaacgtcgcaatgtcaccacgccatcagaaacggagacggcaggacagggttttgtaccgcctgtcccggccggggcgcagcccctgaaacgtcccgggcagatgacgcaggaagaggaggtccgggtttatcatgccgggccgtcagttatcgattttcttccctgggtggagtacctggatgaggcacagtgtctgctgctggatgacggaatgtcggtaggggctgtttatgacgtgacgccggcggcgaccgaagggcgtacggaggaacgtcttgaacagatcagggacatggtggaggacgcactgcaggacagctttgatgagtatgacacgcatccctgggtggtgcagttcttctgccaggatgaaaatgacgtggatgcgtatcttgattatctgaaagggtatgtgaaacctcacgcgcagggaacggcgtttacggaagcctggctgggcgaaatggaacgccatttgcggggaattgcccgcccggaaggcctttttacagacacgctggttaccggtcagccgtggcggggacagcagcggcgaacccgtatggtgatttatcgtcgtatcgcgaagaacaacagtgatccgatgccgccggtggccatgctgaatcaggtttgcgatcgcgttgtgtcggcactggggagcgccggggtgcgctgtcaccggatgaacggtctgcaggttcacagctggttactccggttatttaatccggcaccgtcctggattagccgggaggatttgtaccggatggcctcaagagccgatccccgtgagaacgctgcggatgttatgccggtgatgacggactttgcagaaagcctgtggtttaccccgcctcattccgatccggagaacggggtgtggtggattgatgatctgccacattgtgccgtggtggtggagaagctccgtacgccaccggagccgggcgccattaccggtgagatgtcccggggagaaaaaacggtgaatgcgctgatggatacgtttccggaaggaacggtgctgtgcatgaccattgtggtacagccacaggacaccctggaggagcggtttacccggctgtcgaaaaatgccgtgggtgagaatacggagtccatccgggcacgtcaggatgtgaaggtggtgaaggagttgctgggtaaccggcataaactctatcgtgcggggatcactttccttctgcgggccggtgatatggacagcctgaaacgtaaacgggtggagctgaccacggttctgctgggtgcaggcctgcagccggtgcgaccggagtttgatgtggggccgctgaacagctggctgcgtgcgctgccaatgtgctttgatccggatatggacaggaagcagtggcacacacgtctgatgtgggtacagcatctcgcagggcttctgccggtgaccggccgggaaaccggtacagggcatcccggcttcagtttttttaaccgcgggggagatgtcctgacgtttgatcccctgaacaaactggatcgtacccagaatgcccatctgttgctgttcgggcccacgggggcagggaagtctgccacgctgtgtgcctctctgtcacaggtgatggccgtgcatcgtccccggttgtttattgccgaggcgggtaactcgtttggtctgctggccgattactttgaaagtctcgggctttcagtgaacaaaatcagtgtcaaaccggggagcggtgtgacactgccgccctttgcggatgcgcataagctggttgaagaagggcagaccctgcagagtgtggatgagcactcgctgcccgatctggatggcgatgaagaggaggagaaacgcgacattctgggagaaatggaaatctctgccaggatgatgatcaccggcggtgatccgaaggaagaggcctcactcaaacgtgcggaccgggcgatgatccgtgaagcgctgctgatggccacacacgcgacgtaccgggaagggcggcagatgctgccggaagatttgcaggtggcactccgggaaatctcctgtgatgcgggacgtaacgaggtacgccgggcaaaggcggcagagatggcggaatcactgggaatgttcacccagaaagggagttttgaggcggagctgttcaaccgcgaaggcgaactgtggccggaagcggatgtgacgctgatagacctggggcacctggcccgtgaggggtatgaggcgcagatggcgctgaccatggtgtcgatgaccaacatgatcaataacattgccgaacgtgaccagtatctggggcgtgatattgtgtttgccgtggatgaggcgcatatcgtgacggtgaatccgctgctctcgccctatatgacgaaggtggtgaaaatgtggcgtaagctgggagcctggctgtggcttgcgacgcagaacctgaaggactatccggatatatcagagaaaatgctgaacatggcggaatggtgggtgtgtctgacgatgccgccggaagaggtgaacaacattgcccgttttaaatccctgacggaggagcagaaggcggtgctgatgtcggcgagcaaactgtccggctgttatacggagggggttgtcctggcgaagaagattgaggcgctgttccgtgcggtgccaccgagtctttatctggcgctggggatgacggagaaggacgagaaggctgagcggcgcatgctgatgaaggaacataactgcagcgaactggaggctgcgttccatgtggcccgtaaactggacagactgcggggactttccgccgtggagagtgcggcatga

SEQ ID NO: 25414 - DNA, 414 bp, Escherichia coli
gtgaaacgattacggttagtgatgtgtatccccctgactgccctgctgttatccgggtgctccacctcgaaagaggagcttctgccggcaggcgatcagaccatgcttgaactctggcaggggaaaacaacgggggggagccagcgacatgcgctggccgccagggagacactgtggcggcccctgacgtcagatgagaaacagcaggtacacagggaggggcagagctacagcaggacgcaggaaagtgaaatcagccagcagtttccccgtctgccaaaccctgacatggtgatgtacgtattcccgcatcttgccggcgggacgtcaccggtgccgggatacagcacggtatttcctttttacagcagaacgcagtatgcgttacccggtgagcgtacggaggcgatgtaa

SEQ ID NO: 25415 - DNA, 1479 bp, Escherichia coli
atgcagattaagtccaacgcgctggtgaaatttgtggtgcccgctgttgttctggtggggcttgcagtcacgatgaaaagctgcaaaacgcaggaaaatgttgctgaccgcggggagcaggcccgggccttatccggattatcgtcagaagagctacgggctcttggggtggaaggtgacacgccggaagacacattacggacgctggtcgcccgtatgaaccaggtgcgggacaatcagagaacgctggagaaacagaactcgcaacttcttaaggataacgagcagctgcgcaggcggagcacggatgtgtccggtcaggtgaatgacgctgtggcaggggtacagaagacctacgagcagaagcagcgggaactgcaggagcagcagcattccctgatgtcgcagattgacgccatgaaagatcaactgagccgggcagagacgctcagtcgccgccaggaaagcgatatcccgccggggctcgggcttgatgcgggcggcggcagtggcgtggtgatttcgcagggggctgacgggctgatgtgggtaagtccggccgatcagtctcaggacgatcccctgagcagcagtggttcaaagggaggccctcgttttccgacctcattccttgaggacaacgcactgagtcgtcagaaggctgagtatgagcagcaggtgaagggatacagcaatgaacagcagcgagccaccacacaggcggtttacacgctgccggaaaattcaacgctgacaggcagtcgtgcgatgacggccctgctggggcgggtgccgatcaacggcactgtgacggatccttacccgttcaagatcctggtcgggcgcgacaacctcacggcaaacggcattgagctgccggatgtggaaggggcgattgtctccggcacggccagtggtgactggacgctttcctgtgtgcgcgggcaggtgaacagtatcacctttgtttttgctgatggcacggtgcgcacgctgccgtcaccggatgtcaacggcaccaccaacagcaatcagcaggcgaaggggaatggtactggcgggattggctggatctccgatgaagacggtattccctgcatcagcggtacccgtaaatccaatgcgtcgagttatctgccaacgatatttgcactgtcagccgccggtgcagccggggatgccctgagtgaggggcagtatacctcgcagaacaatgtcaacggtatcacctccacgctgaccggcagcgcggggcaggctgtacttggtaaggcgctgtccggtggaatgaatgagacggcagactgggtgaggcagcgttacgggcagacgtttgatgccatttatgttcccccggggaaagcgctggcggtacatattacccgacaactggctattgattatgaagagcaaggccgccgtgtgcgttatgacttcgccctgccgggtgaagcaaacgaccacggggggcttgactga

SEQ ID NO: 25416 - DNA, 909 bp, Escherichia coli
atgaaagccggcattgtgtgcagtctgctgcgtcctgccgtcatgatgatgtcgttgtcagtgctgagtctgacggcacaggcggatgaactgatgaagtgggagcgtataccgctgaatatcccgctgaaggtggggcaggagcgggtgatttttgcggataaaaatgtgcgggtgggcttccctccggcgctgaatggaaaactgcgggtccagagtaccggtggtgcggtctacctgaaggcagacagtgcatttccgcagacccgggttcagctgcaggatgtggaaagcggggaaatgatcctgctggatgtcactgcgggggaaaagggaaccacggagcccgtgcgtatcgtgtatgacggagacgtgagtacggtcagccgtgctgccgggagtgatgtacagactgtgaaaagtcgcagcagcaacgggaagccggggacggataatagtactcaggcccgtcgcacggagccccgttatgctgagcccctgccggtgctgttgacccggtatgcggcacagtccctgtatgcaccactgcgcacccttgaaccggtggcggggatcagaccggtggtgccacatcttccccggcagatcaccacggtttatccgtcagagccgctgactgtttcaccggtggcggcatgggcagccggtggccggacggtggtggccctgaaactcaccagtacggtaagcaggcgtattgtgcttgatccccgggcccttcaggggcgttttgtggcggcgactttccagcatcgctggctgggtgctgccggtacgccggaagataccacgatgctgtatgtggtgacggcgggcagtccggagaaggcgtttgtggaagagcctgtgacgtcccgcaggggcggggaggtgacgcatgcagattaa

SEQ ID NO: 25417 - DNA, 648 bp, Escherichia coli
atgagccgttttcgtcatgccctgaaggatcgtgatcagcatattctgacgctgagggtgttcagcggtgtgctgtgcggacttcttcttatggtcactatcgggtggatgacggcccctgaccggctgaccattcataatccgccggatctgcgttccggcagtacgcgtccgtggtgggaagttcctccgtcaacggtctattcctttgcgttctacatttttcagcaactgaatgcctggccgaaaaatggcgaggtggattatccggcgaaaatacatgcactgtcggcctatctgacaccgtcatgccgggagatcctggagacggatgcccgtcgtcgtaaggatgcaggagaactgctggatcgtgttcgtgtggtgtatgagatccctgagcacggttacggcgggcgttacaaccgtgaccctgtcacggtggaggggcgggacaactggcttgtccgtctcgacctggtggcggatgagtattttcatgcagagccggtcaaacgggcactgatccgctatccgatgaaagtgatgcggatggagggcgatccggagcgtaatccgtttggtcttgtgctggactgctacagctccacgccacagcgtctggaagccgtgaagggaggtggtgaatga

SEQ ID NO: 25418 - DNA, 366 bp, Escherichia coli
atggagaccattcgttttctgcccgaccgtctgaacgccgaaccgacggtgttcagggggttcaccaccccggaactggggctggctgcactgaccgggttcttcaccggtctgctgtggtcacttccttttgtgccggtgttcgggtgggtgattatacccaccggcgccctgctgaccccgctggttcttgtctggaccgggggggcatggatcagccgtctgaagcgggggaaaccggataactggctatggcagcgtcttgaggagaaaaaagcggcgctgggcgtgggacgctccgggcttatcagggaggcccggggctggtccctgcgccgtacccgtgtcagagggggtaaatcatga

SEQ ID NO: 25419 - DNA, 378 bp, Escherichia coli
atgcgtaaaaaagggcttactgtcagccgtctgcgcctgatggcgcgtctggcgggaatggccatggtgacgtttctgctgggcagtctgacaccggcactggccgatctgccgcagattgaaccgccgtcgtccggtggtggtggcggacttttcgggcaaatcaaaggttatttccaggatggcattgtgctgattggtctggtgatcgccgcggctgcctttgtgaaagtggcggaggcggccgttaccacgttttcagaggtgcgggacggcaagacgggctgggggcagttcggggccattattgtggtgggggtggtactgctggtcgcggtcatctggctgcttggtaaatccgcgtccatcatcctgtaa

SEQ ID NO: 25420 - DNA, 243 bp, Escherichia coli
atggcactgacgtcggcacaggctgcggcctttaaggtggcatccggagatgtggatctgaacgtgctgcatctgtccttgctgggattactgattgccgttctctttctctgggctgcctggggactgtcggatgtctggtctggctggcgaaacggtgacgtcagggagtctgcgtttatctggtttactgcccgcactgttctgctgctggttgccagcatctggatgtttgcgggttga

SEQ ID NO: 25421 - DNA, 342 bp, Escherichia coli
atgttttctcttcctgcattatcccggaaaacggccggtctgacggggaccgccgggatgatgcttctcgtgaccctggttctgcccgttcaggccgctgaaaaggatgagctggcgacggtcatgcgccagcttgatcaggtccgtgcggcgcttgatcgggccagaacggcgtcccttcaggccacgccccacgacgggcgttattttttcgactatccgcgtgctcaggctgacattcagaccatgcaggaggggatcgaccgttatctcacgccctcccgggcgcaaccacgtaacggcagtgccgtgaccggtgaataccggcgggagcgtccctga

SEQ ID NO: 25422 - DNA, 126 bp, Escherichia coli
atgaatttatttgaacaggcctggaacagcgtgatgcagaaactggcaatgctgaccgcccctttatccacccccgtgtattctcccgtaaaaattttcagttttgcaaatagagtttatcgctga

SEQ ID NO: 25423 - DNA, 192 bp, Escherichia coli
atggaatttctccgcaccgctcttccgttctgggccctgttccttctgacctgggtttgtgttgtgtattttttcatttatgaagaaccacgttgccccccgtggatctatgacgtcgtcaaggccatcacgatgttcattgttttcgtcaacattgttgttattccggcgctggcattacccggacactga

SEQ ID NO: 25424 - DNA, 762 bp, Escherichia coli
atggcggaagcacgtcgtgatgcagaacgcagtccgcagtcccgccctccccgtcagcatgggttgctgtacaatctggtgtggggctggccatgggctctggtggggctgctcctctcctcactgttactgagtctgctgattgagtatgcaggtatgacgtttttctggcctgatgagggggcgtcacacagtcgtgccgtcatgaatacagagctgggctggctgtcgacggagttcacgcgcagcctgctgctgtccacgccgtcagtgacggtaccgggctggatttccgtggcgtatcagtggctgtttgtggaaagtggtatgcagtcatggctgcagtcgcagcaggcggtaacggcggcggggcgtagtgtgtcgcagttcagcggagagctgagccagtggctggcatatcatcttcatgattacctgctggcaacggtttatgtgacggtggtgacgatggtcagggtgattattctcgcgctgtccgtgccactgttcgtgatggtgatcctggtggccgtggttgaggggctgggcagacgtgatctgcgccggtatggtgccgcgtatgaatccagctttgtttatcaccatgcgaaaaagtccattaaaccggcgatatatattccctgtattctctatctttcctggccgacggccgtgtacccgaatctgctgatatggccggcggccatgctgctgggtatggctgtcaccgtgacaatggcatccttcaagaaatatttataa

SEQ ID NO: 25425 - DNA, 2118 bp, Escherichia coli
atgagtaaccgttatgttattgaggcgttactgaggcctgctgtggagttcaatacggccgtggttgcggcaacggcagccggtgtctgtgtgacagctccctgggcggtggcgcttgcgccttcggtcagttatgtcacagctgccggatttggcgttctggcggctgtccgtttccgccagggcatgaaaatcatccgctaccgacgcaatctgcgtcggttaccccgctatgtgatgagcacgcggcaaattcctgtcagccgtcagcgactgtttctggggcggggatttcgctggacacagaagcatacccagcgtctgcaggatacgctgcggccggaggtggcgcattatctgctgcccggaggactttaccgggctgcgcgctggcttgaaatgaaaacggaacaccggctgcccgggctggggcagtggcttcgtcgtgattcgccgctgaacccggttcgtcccctgccaccggtgggcgggaatccggccctgcacggtattgaacctgatgagcaggatgtgacactggcactgggtgagcgtgtggggcacaccattgtctacggcaccacgcgtgtgggtaaaacccgtctggcagagttgctggtcacccaggatatccggcggggtgaagtgaccatcgtttttgatcccaagggggatgcagatctgctgctgcgggtctgggctgaagcgcaccgggccgggcggggggatgagttgtatatctttcaccttggctggcctgaaatttcagcccgttacaatgcggtgggacgctttggtcgtgtatcggaagtggcttcccgtgttgccggtcagttgtccggtgaaggtaattcggcggctttccgggagtttgcctggcgctttgtcaatatcattgcccgcgccctggtggccctcggtgagcgtccggactatatgctgattatgcggtatgtgaacaacatcgctgacctctacattcgctatgcggggaaggtgatccgtgagcgtctgcccggactggagcagattatcgcgaataaccagagtgttctcagcgaggacgatgtgcccaggaccatgcagaaccagccggatgcggtgcggatctggtcgattgaaatggcactgagcagtgaggaaggtaaaaaaatatacgatccgattctggatggactgcgcagtgctgtccgctatgaccgtacgtattttgacaaaatcgtggcttccctgctgccgttactggaaaaactcaccaccggcaggattgcagagctgctggcgccggactatctggatatgagcgatgcgcgccccatttttgactgggaacaggtgatccgcaaaaaggcggtggtttatatcggcctcgatgcgctcagtgacagtgaggtggccagtgccgtgggaaattcgatgtttgcggacctggtgagtgtggcagggcatatatacaaacacggtatgcatgccggtctgccggctggcggggcgggtaaaaatgtggtgaacctgcactgtgatgagtttaacgaactgatgggcgatgaattcattccgctcatcaacaaggggggcggcgccggaatgcaggtgaccgcgtacacccagacgtcatcggatattgaagcgcgtattggtaatgcggccaaaacggcgcaggttcaggggaactttaacaacatgatcatgctgcgcgtcagggagaaccggacggcggaattgctgaccacacaactgccccaggtggagatttacacgaagacgctggtctccggtcatcaggatacggcagatgtgtcagccggtcaggatttcacctccagtacccaggatcgcgtcgggacggtgaaagtccccctgctggagcccgcagatattgtcacgctgcccaaggggcaggcatttgccctgctggaaggtggacagttatggaagatccggatgccgctgccggcaggtgatacggatgatgtgctgatgccggagagtatttcccgggtggcggaggcgatgcgacagaattatcactccggtgaaggatggtggaatgcaccaccttcagtacaggcgatagcgacggaggagggaggtgaccatggcggaagcacgtcgtga

SEQ ID NO: 25426 - DNA, 789 bp, Escherichia coli
atgaacgtttcatttactgaacaggtgcagaggaatatgccgcaatgggcgaatgaacctttacgggcatgggatgcggcagagtttgcggcaatgtcggattttattacggaacactactggacggggcagggcagcatcaatgtattccgcattgtggggacagaccatccacagtatgccggcatgagctggctggagttgctggagcgcggtaagcgtatggatatcaatatcccgttggtggagaagaacccggggtattacacgcaggcagaacaactgcatgccgggatgagttttgtcagcacggatggcattcactggtatgtcagtgctgatggtaatcaccgcagttgtctggcccgctttctgtttcacctgcagggagaggagcgcacacagcttcacaacgtggcccagagcatttatcacgcagaccgggcgttctggtctgcctgtcgggaaattcacaatctggctgatgttctctcccggcatggtgtgtatcttcgtctgcagacccggcggcagtgtgtttcccgcgaagacctggcctgctggaaagtggaccgtttcagaacagaggctcagctgacagtggatgacggacgggctggcggacatgcgtctgcggagtataaggcattgttactgaatgcagcagacgcatggcgggaggtgaggagattgcagaacagagctgaggcgttgtcagcgtcaccggagacagatatcccccgctcatggtggctgcgtcttttacagcgaggacgcggacatgagtaa

SEQ ID NO: 25427 - DNA, 600 bp, Escherichia coli
atgctgcggcaaatgacggatattgtgccggataagataccgtacggcgttctgctgtgtgtcctgaccgtgttgttcctgcttttccccgtcctgtgtggtcgccgccggcgtcgtgaacgcgccagtgagtggcgtcaccgccattaccggcgcaaggctgagcgtgtgctggcgcaactgtcgtcgttgccggagggcggtgcaggcgtgaaatacctgcgaaaaattaacccgtatgtgtttgaagaactgctgcttctggcgtttgaacgcaggggaatgcgggttatccgcaattcccgctacagcggcgacggagggctggacggacaggtgctgattgacggcgagcggtggctgattcaggccaaacgctatggccgcaccatccgaccgtcacatatcgatgattttggtgaattactgcgtcgtgaaggttgtcgtggattttttgttcacaccgggcgtacgggaccggccagccgggcacggcttgtgctgtggccggatattgaactggtcagcggacagcgtctgctgaaactgctgaacgggcgattactgaccggtgaactcaccggagaaaagcgaagatga

SEQ ID NO: 25428 - DNA, 522 bp, Escherichia coli
gtgaaacgatatgtaatgacggcagtgtggcccctgctgctgtgcgcggctcaggctggcgcggaactcagggttattgcggacattggcggcagtgatgcctccgtgttttatgaggcaatcaaccgccaggaggggagcagtacgcctcccccggttacggcgcctctgccggcgcagggagagacgctggcgctgcccgtgaccacgccggaaatgacgccgggtgaggtgacgccgcgaccactgcagttgccggggatcggggcgctgtttctggtgggagacgatgcgctttcccgtcagtggctgcaggcgaatgcggccgctctccgtgagcggcaggctgtcggtatggttgtcagcgtggcggatgaaaacagcctgagaacgctgcgtgagctggcgcccggcgtgatgatggtaccatcatcggggtcagcactggcacgccgtctgcagctgaatcactggccggtactgataacggacagcggaatatccggggtggtgacaccgtga

SEQ ID NO: 25429 - DNA, 663 bp, Escherichia coli
atggcgcgtggcagccttctgacaatggcgctgttgagcatggctgtcagcactctctgccgggcgggggcgcatgatatccctgaggggtatgtgcgcgtggctgccgtgcatggtgtgcctgcagaagtgctctatgccgtctctctgacagagacggtgatggcgccctctgcgattgccggtgtgatgaaaaaacgggatgcggatttccgccttccgtccgttgcacgtccctggccgtggaccatcaatgtggcgggtaagggctaccgctatgccagtcgcctggaagcctggcaggcacttcaggtttttctgacacggtatccggcccggcggattgacgtgggaattgctcaggtcaatctgggctggaacgggcaccgtttctcctccacatgggcggcatttgatccgtacatcagtctgaacaccgcagcgaccatcctgagtgaatgccgtcgtcgtcatcctgtcagctggctgcaggcggccggttgttatcatcatccggcaggtggtgctccggcagtacgctacaccgcagtggtcagacaacatattgagcgtcttcatcgtgatgcggtgaagaccgcagagcagcatgacggcctgaccgccatgcatccccgttatatctggacagaaccccgggagtga

SEQ ID NO: 25430 - DNA, 723 bp, Escherichia coli
atgaaaatgaagaatctgtcaccggtgctcatgctgctcatttccctgcagacggtggctgccgtacgggagagtgcgcccgagggcacacgcacgcaggcctcttcgcaggtcagtaccaccactcaggcgctgcagcaacaggccgctcagtggggcgtcactgaggaggattaccgtcgataccgggctctgatggagggaccgcgggggatgcagtcccccggtctggatccgctgacggtgctggggattgaagcacggacggatgcggaacgccggcagctggctgagaaatgggtgaaggccgaatatgagcggactgagaaggaactggcatttcagcgggaagtcaatgcggcctggaagcgcctttatccgggcgttatgccggtcagcctggggaaagggggcgggctgctgaacgacaacggcggacggctggcgttgtttgtgaaagcgaaagactgtggcacctgtgatgcacgactggcatcagtgctgtcttcggggcggcaggtggatatttatctggttgacagtcagggcagtgacaatctgctgcggcagtgggcactggagcacgatatccctgtggaccgggtgagaagccgccatattaccctgaatcatgatgccggtcgctggctgcgttttggtgaaggcagaatgccggttgtactgcagcagggagcggacggatggcgcgtggcagccttctga

SEQ ID NO: 25431 - DNA, 768 bp, Escherichia coli
atgagtgaaaaaaaacagaagacattaccgtcagtgcattcatctcctcttgatgggtggacctgtgtgtcacccatgctttccgtgggatttgtactgaccgttctggtggcgaccattctggcggtttgcggcctctatcgttacagcggggagcaggatgaacgcattgccgcactggaggggcaaatgaaaacgtattcagatgctttcgcgttgtcgggaagtgagctggaaccgctcaggtcccggctggctgaaaccgaaaaacagctgaaaagcgtgacggagcgactgacattgctggagcaacgacctgtactgacggaggaagagtatgcacgcactggtcagatggccgccagcctggcatcactgcaggccacgctggcgcagcagggagaaacgcttcgtgcgtatgacctgcgactggagaagctggagaagacgccattcaccccggtatcaccgtcatctgcgaaaggaacgggcacggtgaagagcacaccggcggtcacgccacgccagaaaaagggctcttccggcgtttcagttatcagccgcagcgcaccgtttgtgctgacaggtacggagcagcgtggcggacgcacatatgctgcggtggctccccgtggatttacccgtctttcagatgtgacgctgctgggtgaaggggagagcacggccggctggatgcttgagcgtgccggacggggagaagcctcgtttcgggtgaacggacgtcaggtccgggtcatggtggagtga

SEQ ID NO: 25432 - DNA, 579 bp, Escherichia coli
atgaaaacatcccttcttctttccgtgctgtccgcctgcgtacttctgaccggctgtcaggggcagcaaaaactgctgcagcgggatgcggctgttccggtaccgtcggtgacggtcagcaataatgtccgtccggccagccctgatatgtacgcggggacgaccgtgcccgaggtggtgcgttatgaccgctatgtgctggttaacactcatccggatgcggtacagcgggatcccctttcccaggtgattgacatccgtattccggcatccctgaagccgacggtggcagatgcgatgcgttatgccctgaaacagtcgggctacacgctctgtgccaccggaccggccaacggggtgctttatcgtcaggcgttgccggcagtgcagtatcagacggggccgctcaggttgcgtaccgccctgcagatgatggccggtccggcgtggcaacttgaagttgatgatgtgcagcgggttgtctgtcacagcctgcgggaaggttatcagttgccgccgggccagctggcgccggtaccggccggtgtcagggacgcaggagcggggcttaaaaaatga

SEQ ID NO: 25433 - DNA, 354 bp, Escherichia coli
gtgacagatattgagctgactggtaaatcaatcacactgacggataagtatggcagcagcgttcacctgaacacggtgctcacttatctgcttgaactttaccagatggattttgctgaactttctgaagcagtatccacacactatcccagccacaagggggtgattatgacgatagcagagcaactggaagagaaaggtctggagaaaggtcgggcagaagagcgcaaaaaagcgcttgaagccacttatgcatctgtccgccgcatgagtgatatggggatgtcgacagaagtcattaagcaggcacttcagctttctgatgagcagattcgggaagctcttcataattaa

SEQ ID NO: 25434 - DNA, 936 bp, Escherichia coli
gtgagtgaaaaagttaataaaaccagcctgatacatgatgcggcgttcaggaagacactgaaggaccctgcagccgcgagggactttcttgaacaggtattgacaccgtatcagaaatcccgctgtaatcttgatacaatagaacttgaacccacgacgtttgtggcagaaagtttacgccagtctgcctgcgatgttttgctcagcatgaagacaaatgacgggaaggacgggtacatttatactttaatagaacaccagagttcgccggataaatttatcccactgcgcatgatgcgttatatcctggcggtgatggagcagcatattgaagagcataagtgtgcgccagtagtgatcccggtgctgttttatcatggtgcaaagcggccatatccgtatccgatgaactgggtggattgtctggatgacccggtgtacggacgcgagatttatggcgagcaaaagccattcagcctggtggatgtcagcacgcttaccgatgatgaaattgaacactatcaccggatggcggcgctgatgttcacgatgaagtccggcaccagtggtgatgtgattgagctgattggtaaatcaatcacactgacggataagtatggcagcagcgttcaccagaatatcgtgctgacttatctgatggaactttaccagatggattttgctgaactttctgaagcagtatccacacactatcccagccacaagggggtgattatgacgatagcagagcaactggaagagaaaggtctggagaaaggtcgtgctgaagagcgctccagattagtgctcatgatgagacaaaagggaaaatctctggaggaaatcaaagattttctggatctgacagatgagcagttgctgcaggccctggattacgtcccggtgcagcgtaatggtgcgctaaaccaggactga

SEQ ID NO: 25435 - DNA, 558 bp, Escherichia coli
atggcttcacgtggcgtaaacaaagtcatcctgcttgggcatctgggacaggatccggaggtcaggtactttcctaacggtggtggtgcagtggcgaatctgtcactggcgaccagtgatacctggaaggataaacagagcggtgaaatgaaggaagtgaccgaatggcaccgcattgttatttatggaaaactggcagaaatcgccggagagtaccttcgtaagggctctaaggtctatatcgaaggtcagctgaaaacccgtaagtggtttgaccagcagaacggtgtggaccgttattcaactgaggttgttgtgggagtgaatggtgtcatgcagatgctgggttcactgcgtcagcagggcactgccggtaatggtgcttctgcacctgcacaagggggctggggacagccgccgaagacggccggacaggctggtcgtgcaccccagacaacatcaacgggtaatggtgcaccaccaatggactttgacgatgatattccctttatggggctcgggtatggcatggaacgacgaattattcatgccatgtaa

SEQ ID NO: 25436 - DNA, 204 bp, Escherichia coli
atgaaccgtcaaaacggcattcttgcagctgcggctggctatacattacccctggaaattctcaaaagtacgcgtggatattatattggcactcagtgttctgaggggccggtgtcccgtgaatctgaagagtatttcaaaaaacatgatcaggctgaacaggcgctgaaaaatggcacctggacacagcgttgtgactggtaa

SEQ ID NO: 25437 - DNA, 465 bp, Escherichia coli
atgtctgcaacaaatacttcttctgcaaaagctgaatacttcaatctgaccgtaaaaggtctggggtacctcagtaatgtacgtcaggttaaccatcagaatggctcgttcctttgctgcgtgattaacgcactgagtggaccaacggacaatccgtcctatacgcgttttgatgttacggttgttggtaaagatgcaaccaccctgatctctcgctgccagaaagcagtggatgaggaccgtaaggttttgcttggctttgcgttaagcaacctggccaccgatatcttcaccctgaacaagggagagcatgccggtgagcagcgcgtcagtctgaaagcccgcctgatcaaggttgactggattaaaataggccaggagcaggtctataaggctgaaaaagcggagtccctgccaccgcaaaatggcacaactaaacgtcaatacgcagaaaactctttctga

SEQ ID NO: 25438 - DNA, 2013 bp, Escherichia coli
atgcgtctctatttatgcgaaaaaccttcacaggccagtgacattgccagagtgcttggggctgccagacgcggtgaaggcctgattgaaggtaacgactttgttgtgacatgggcttttggtcatttgctggagcaggctccaccggaggcgtacggtgagcagtatggcagtccctggagcattgaggttctgccggttattcctgaagagtggcagatggtggtgaaggataagatcgccaggcagtttaatgttatcaggcgtcttctcggtaaggcagatgaagtagtgattgccaccgatgctgatcgggaaggcgaaattattgccagagaactgcttgattattgtggctatacaggagtagttcgacgcctctggttatccgcactggatgagagcagtatcagggaagcgctgggcagaatacttccaggagagaaaactgcgcgtttatatgaggccggtaaggggcgcagccgggcagactggctgacggggatcaacctgacgcgtttgtacacgatgaaagccagggagtgcggcgtgtctggtgttctctcgattggcagggtgcagactcccacgcttgcgatggtggtcagacgggatgcggaaattaaaaattttatcccggtaccttactggcaactgaacctctggcttgagaaagacaacgtgcgttttcgcgcagtctgggttgcggcagagcagtactgtgatgcggaaaagcggtgcgtgaatgtgcaggctgccacaagcgtccagtcgcagtgtcgtcaggccggtgttgctgtagtcagagaggtcagcagcaaaagagagaagacgccgcctccgctttgtttttcactcggtacactgcaggaggtctgctcgaaaaaatttggtttaggtgcgcaggccgttcttgatatagcccagtcgttgtacgaaaaacacaaggcaacgacgtatccccgtactgactgtggttatctgccggtatcaatgcataaagaagtgccggaggttctggcggctgtggcaaacaccgatccggacattgcccctgaactggcaaaactcagtcctgatattgtttccagagtctggaatgataagaagatcactgcgcatcatgcgattatccccacccgtcaggcgtttaatattggtgccctgagtgataacgaactcagggtttaccggttaatccgtcagcattatctggctcagtttttacccgtgcaggaagcggacgtcactgaagccacttttgttgttgccgggcagttatttggcacgcgaggacgggtggaagtggtgaaaggatggcgtgcgctttttattgcagatgcgccgcatgatgaagatgaggggggcgatacagagcagacaatgcctctgcctgttctggctaagggggatgaatgtcgtcttgttgaagctgaactgaaagagatgaaaaccacgcctccgcgtcactatacggagggcacgctcattgctgcgatgaaaaatgcggcgggaatggtgagcgatccggcactgaaaaaagtgttacgcgagaatgccggactgggcacggaagcaacccgtgctgaaatactggagacactgttcacccgtaaatatattgagaaacagggtaagcatatccgggcaacacaactgggggcagagttgattgcaggattacctgaggtgctgaccagtccgggaaccacggcactgtgggagcaggccctggatgatattgcacagggtaaactgtcgctggcgtcatttatggagaagcagaaacagtggctgaatcacctcgtctcgggcgcccgacggcagcagttgcagattacggcaccagtgacgccggtatgcccactttgccagggcagaatgcggaagctgaaaggtaagaacggagagttctggagttgccagcgttacccggagtgtaaaggcgtgatttcagagcagaaaacgtcacacagtaaacgcggcggcagaaaaattaaaaagcgtggatga

SEQ ID NO: 25439 - DNA, 681 bp, Escherichia coli
atgactgatgagaaaaaggctgagccgggtgtattgaaaagtactctgtcaattaatcttcatacttattatgcgattcgtttgtgggaaggtcgcaagcctgagcctggcgctgataagtctgagcgtcgtcgcagaatcattggtatgccaggtgttatttcaagggcaaaaatcgcatcaaaagattctgagaatgacaatccgtgggcagatatgtttttgttcaaccttgaggaaaaactgagcaaatccaaacaggagatcgatttactggttgaacaactgaatgaggttttacggaatgtgccgggggatattattatttctggtgttgcatcaaccagtcctgtcaacattggtgtgcacagccgatcgcctctggggtataagagcgtctggttacttgtgggatatgatgagttggtgctcaaagcctttcaggcgtttcattatggtcttatcgcccgggcgcgtcgtgatgagctcctgaatgccggtggacatgcggtacgtcagatctgcgcccttgcacagagctataaaactgtgcccgcaaccagaagtgatatttcttcaggatcacaaaaaggaaaagaggctattagccgctacggtatgcctgatcctgatgtccttagtggaaagaaacgttcctctttttctgctcctcttaaataa

SEQ ID NO: 25440 - DNA, 450 bp, Escherichia coli
atgcaggttgtttcttataccgtggtggcagtgccaccatcgctcgttttttgtaccgtggtggcagtaccaccatcgctcgttttttgtaccgtggtggcagtaccaccattgctcattttttataccgtggtggcagtgccaccatcgctcattttttgtaccgtggtggcagtgccaccatcgcttattttttgtaccgtggtggcagtgccaccattgctcattttttataccgcggtgccagtggcaccatcgattattttttgtaccgtggtggcagtgccaccatcgctcgttttttgtaccgtggtgccagtgccaccatcgctcattttttgtaccgtggtggcagtgccatcatcgctcattttttataccgtggtggcagtggcaccactgctcattttttgtaccacggtaacagtaccaccatcgctcaatttatag

SEQ ID NO: 25441 - DNA, 1287 bp, Escherichia coli
atggcgttaccagcagaaagccttattgcgcatacgctcagaaaaatgaaggccagcatggcagagaaagccagtcgtgaggagggcaggatacgcagtgggctgctgtttaccggtaatgttcatgatgcggtgccccgtaggctgctgctggacacgcgcctttctcctcttgataaaaccgcatggatgatgattcgtctgcatgcgctgagtaatgagggcgcagtattccccacctacgatgaacttcagttacaactggcctcacccggtagcgggaaggcatcccgtgaaaccgtaagccgggtactgaccatgcttcggctgaccggctggctgagtctgtgtaaacgggttcgtgatgaaaaaggccgtatccgtggaaatatctacgccctgcatgatgaacctcttggctgttgtgatgcagaaaagtttgaccctcgctacctggatatggtgctggattctgcatgcaagaacaggaacaagaccatccggtatacagccagagaggttctcagtgatatcaaaaatgaacctggtatgcggcattaccacagccatatcacgctgtttgaatcacggatgggcgcagcgcagacaccgtctcagatggcagcgcgtcagcgggtaaatccggcggtgaatggccgtgcagcgaagagcggttcggaatccgcacagccccctgtatgtgcgtcggtaaccgaactcagtgctcaggtaaccgaactctgtactgcggtaaccgaacccggagaaaaaacagaggtaacgcaacgcagtacggattccgaacaaccaggaaaatcagtgggttatcactcagtacggaaaccgaaccactacgtacgtaatattacacacagtatgaaaaaaaatacgtacgtattgccggatgcactgaaatcacaactcagtgtggaagacaccggcatgctgacgaagcaactgcaggcgttgccggaaacgctggcggaaggtgtgctggacagtctgtcacagatgctcagcaaaaatacgcttcagaatcccgttggctggatgctggctgtgatgaaacgtgcgcgtgaagggaactttaactcgccggatatgagcagaagcggaacgatccagtctcagcctgcccgtccgtcatctcagtccggacatggatgtgatgaacgtgaacgtcgtcgcagggaagtggcttcgccagaaaaagcgagaaatattgtcgcagaattccgtgccagcatacagcgtgctaatgctgcccgtctggctatgcgtggttaa

SEQ ID NO: 25442 - DNA, 228 bp, Escherichia coli
atgaaactgaaaatgcagacaatttcgggtcctgtgattatcgacagtaatgaggtgacacagttttacccggaccatgaaagtggaggggaactcaccgctgttgaatactttactgacgagggaagatgcaccacccgggtacgccattccttttatcaggttgctgaggcacttgccagtgcatggcatgtggatgatgcatcaaaaaggaatcgccgtggataa

SEQ ID NO: 25443 - DNA, 216 bp, Escherichia coli
atgagaaaaatcagtggaatgttgaatctggagaaggccaggatgcagttgcgtgttttgttatctggacctgttcctgcaatcactccgatggcgcatgccgtggcaataaaagttgtgcttgatgctctggatgctagtgagcggagggtggctgaactggaacaggtctgtactgccgcggggattcgtatcaaaggggaacaagtgaaatga

SEQ ID NO: 25444 - DNA, 258 bp, Escherichia coli
atgagtaatgcagcaagactccagctgggtttttctccgttttcaaaaactatcgtgctggcaaaaatgcgtaatcttgacgacggaaccagtcttcgtgtcggtaatgatcccggccgcgatgtaaccaatgaggcggctcagcttgtctggcatctggtcatggcagaaggtggtgaaattatgtgggaaatggacgatggctcccgcatggtgctgaaggctgaaagtcaggaggcaaccagtgaacaagattga

SEQ ID NO: 25445 - DNA, 249 bp, Escherichia coli
atgaagatgacagaactggttcccggagtgctgacaagtcctggcgtccctcccgccagtcagcgtaaggcggttgaactggtcaatcgcttccgtcgtggagagcggaattatcatgaactgaaggaaaggggatttggttatttcaagattgatgttggtcctgactggcggttactgagccggaataaagggctgacctgggccctgttgagtcatgaacgatacaacaacatgagactgaagtga

SEQ ID NO: 25446 - DNA, 579 bp, Escherichia coli
atgagtaacaacttgtcacaggccaccaacgggctgttgatgcaactggtgatggatctcaagagtggttatctgcggcgatgtgaagcactggggctttcccgggaagaaatgcagatgctgcaggggctgagcattgaagaaattcactatctgtcaaattcagaagtgtcggtgctgcggctggatattaaccacaacaatcttgtgcgcatgttgcagcaggcgcggactgaacagaaacgtctgcagcgaatcgatcgcgctctggcgctggggggctctatcgaactcatggcgttttattttggtctttccagcgtggatgtggctgcgcggcgtcgtatctctggtattgatgttcgtcccggaagggggatcaccctgagtgacgatgagaattctgaactctggcggttgtggcagaaagccgggatcaatgatgtggagagtgtggatgggctggatgtcatgatgctttgtgctgaacagatgaacattccactgacggccatctggcatgccgtcagagggtggcatacaaccggaaatccggatcaggtaaggagcgcgtcatga

SEQ ID NO: 25447 - DNA, 732 bp, Escherichia coli
atgaatgctgatgccgcacgtcaggatcaactgattaaacggataagaaaactgctggcgctgagccggaataacagtaacccccatgaggcaggccaggcactttcccgtgctcaggcgctgatgcgcaagcacggtatcactgaactggatactgatatttcggtgataaagacctcgtcatcaaagggggccccgtcagaagcgaaaaaagttccggtatggatggggcgccttatgcatgttgttgcagaggcattcggatgccatacatacctggactggcgtatcacaaccggaaggtactggcggcgggttgtcatattttatggctttggggagcgcccggttgtggcggcgtatgcctttgatgttctctgccggcagatgcaaaaggcaacaaaggcgtatctttcaacccagagcaggacattaaaattgtcaacccgcagggcaagagcagccatgtttcgtgacggctgggtttatggggtgcgtgatgtggtggatgcattcccgctcacggaagatgagacgcgtgtaatgaagacgtggctgaagagacagcaatttgagggaatggctgccttccggaatgttaaggactgtaatggtggtgatcgtgcacgctggcagggatacagcgagggtaaaaaggcaacactgcatcatggtgttggttcccggaatctgagacctgaaagcctgatatcgggcggaggtgaggtatga

SEQ ID NO: 25448 - DNA, 1626 bp, Escherichia coli
atgtcaattaagcgaaatcattcccttgatctgggggccgccatcatgcaaccggggcgccaggccagtaagaccggtaacgtggttgccctgggggaaacgcccatggttctgacgctggatcagttgcgccctaatcctgataacccgagaaccacgcgcaatccccggtacgacgatattaaaagttccattttctcccgcggactggatacggtgccaaaggtcacccggataccggagagtgagccggatatctacatcttcagcgatggtggtaacactcgttatcagatcctgagagaactgtgggaggagaccggcgagcagcgtttctaccgtattcatgtgcttttcaaaccgtggccggggcggcttcagtgtgtcattggtcatctggctgagaatgaagtcaggggtgaactgacgtttattgaaaaggctcagggtatccataaagcacggatgatttatgaagagtccctgcagcggactgtgacgatcagagaactggcatcactactgacagatgaagggcttcctgtaaatcattcatccgtcagcagaatggagcatgcgctgaaatatctgtatccgtggatccctgatcttctggagtcaggtatggggagtccgcaggtcagagccttactgtctctccgtcaggatgcggaacgcatctgggggcagtttgcagtcgcggcggaaaacgatgtggattttgatcgcgtgtttggtgaatgttgcggcaaattcaactcgccggaactctggtccatggaaatgttcagggatgagctgatcggtgacctgctgaaggctctgccacatccggtactggattacgatcgctggttgctggagctggatccccgggagcgtaatcgacgtcaccattttggtgaacccgaaccggtactcatgccggcggacagccccccagaaccgggggcgcaggtggcgtctggcggggcgacggaagttgctcaggtcgttgccgccactcccgcagaccgtgagagcgtcatggatactgcgcaatcaggggctgagaaagaggaccgcccggtcgcagataaatgcgaacgacgcagaaaggaagttcaaccggatatgtatggtggcgaagactcatacagcggtgattgcggagaggatgcgaccggtgcgtcaactgatattccgataatgccggaagataacgccatgcaggaggggggagaatttcgccaggcgtctgcattcactggtgctgaacaggatgatatcgaatctctgcagaatgaggcgtttcacctcgcatgggagctggcgtcacatacaggctgtgtcgatgagatagcgatggaccgggaaagtgagctgtctgcaggatttggtgcggcagaggcaaattgctcaccggtcatggcatttcttgtcagactgaccggtgaggaggttctgcgggtcaatccggtttcccttgatgcactgctgataggtggcagtactgaagaagacctgccgttgcttgatgatgaacatgcaggaaagttgcttcgcctgctgggtgtgttgcgtcgtctgcgggggctgcagcgtatggtggaagacgagagtgaggaagggcgcgatgaatgctga

SEQ ID NO: 25449 - DNA, 1389 bp, Escherichia coli
atgactgaatgctatattccgcgctccgttgatgctgaacaggctgtgcttggcggcctgatgcttgataatgatcgctgggatgaagtggtgctgatgctcaggggggaggatttttctctggctgtgcaccgggtgatattccgctctatgtcagagctggcagtcagcggtcagccgttcgacctcatcacgctgagtgagcatattgagaaaatgcacaatattgaggcactgggcggcttcgcttacctggctgagctcagtaagaatacaccttcagcagccaatatcatggcgtatgtccgtattgtggcggaaaagagtatgctgcggcagcttcaggaaaccggtaattctctggttgctgatgttgcatcgccggatgccactccgcgcgcagttcttgaatccgcggaacggcgacttttttctctttcccagacaggcatgctgcatgagcgcagtgaagtgagcctttcctccgcaatggagctggccctgcgtcagctggaagaaggactgagggcgggcgggatgacgggcaccccaacggggtttgatgaactggatgagatgacctgtggcctgcagcccggggatcttatccttctggcagcacgtccgtcgatggggaaaacggcccttggactcactctgtgtcttaatgccctgcgtgagcggaccgatgaaacggtattcctgttcagcatagaaatgtccagggagcagctgattctgcgtaccctgtcgatgctgtcccgggtggagctgactcgtcttcgcagcagcatgatggacgatgaggagtgggcgagacttacggcaacaatgggtgagttcatgcaggaggggacatttgccggtgaaggtaaccgcctgatcattgatgacacgtcatctcagactccgtcatcactgcgcgccagtgcccgtcgttatgtgcgtctgtatggcagaccttccctgataatggtcgattatctccagttgattcgttcaccggaccaggaaaaccgcactcaggagattgcggaaatatcccgcgctctcaagtcgctggggaaagaacttggatgccctgtgctcgcactgtcgcagcttaaccgacaggtggaacagcgggcagataaacgaccaaacaacggtgacctgcgtgattccggggcgctggagcaggatgctgacctcattatgtttatttaccgtgacgaggtctacaaccccggcactctggataagggcgtggcggaaatcattgtgagcaaacagcgacagggaccgaccggtacgatacgggtgagcttcgatggtcgttacaccctgttttcaccgtttgaacgtggctggaattttgaccgttccggaggcaatgcgtatgtcaattaa

SEQ ID NO: 25450 - DNA, 903 bp, Escherichia coli
atgtcttcctcagtgaaatattctccggttccggcggtgttaacccgccctgaattgctggctgaactgaacctgctgatgacccggattgccagtgggtgtcgtgtgggggttacggcgtcatgtcgtccggtcattgcggtgcacggtggttatgtttcatacagttctccacgcgccggacgtatttttcaggacggttcccgcccggagatagtgatggccgtcagtaaccgggaacggatgtgcgaatggttcagtcaggtctggcttccgctgcatctggctgcccttgaaggcgatgagagtgcttttttcagtgcggaggtcaacatggtgcgccgggagctgcagcgcgttccggggaattcagtgaactgcatgtgctgggcaagccttgctgcactggcatttgatgctgaagagcgggtggaactgcagaaaggcaataatgagaacatcgcaacatatgatgagagcatcgcaacatatgcattccgtgctgcctgtactgtgagtcgctgtctgagccggaatgtttccggaggtattccgcgctcataccctgaatggaaagcgattttatttccccgtgatggtgctgacattttccccgacgggtggctggaaaatatgacccgtcgggctgaacgtgtctttacgagtgcgaaacgtcagtgtggaatgctctcagccagtcaggcagcgcttttttctcaacaaacacgtcagtgtgccagtgagcaatgctccggccgtattcaggccggcagccatcattcagggagccaccctgacgtttcagcttatgaagtacgctgtgcacaagaaatgtcgctttcaccggtccattcgacccgacagtgttcagttcaatccactgattctgctgaaacggagtga

SEQ ID NO: 25451 - DNA, 345 bp, Escherichia coli
atgagcactgacgatgtggcacgttgtaaaaccttctttgaccagggaactgaaatctttcccggggctgaccagaagctcgcttaccgactttgctggcccggacactggctgattaacagccgtcgctggttttttctggacgataacagtatcagcattcaacaagccgttaagtttgctcttattcatcagcatcactggctcccggcaacggttgagcagatgccccccgcagagatgtcccttgctctgacagattactgggctgactactggacacagccgactgagccggagaaggcgctggttcacatgactgactggcagtacctgaatcactga

SEQ ID NO: 25452 - DNA, 879 bp, Escherichia coli
atgaaaatactgcccgttgtctccaccaaaggtggtgaaggtaaatcaacacaatccgcaaatcttgctggttttctggccgatgcaggtatacgtaccctgctgattgacggagatcatgctcaacccacagccagtaatatctttccgctgacatatgaagcgccagccggcctttttgaacttcttatgcgtacggctgacctcactcatcccgataatatcatttcccgcacggctatcgatggccttgatctgattgtctccaatgatcctcatgaacagttaaaaaccgcgatgcttcacgccccggacggacgccttcgcctccggaatgttctgcaacatccacttttcctgaataactacgatgtcattgtcgttgattctcagggggcgcgctccgtcatgctggagatgatagtgctgtcggcgactgagtcggttgtcgggatggtcaatccggttcttcccgatgttcgtgaatttattcgcggtactgtcaacgtcatggagaacctgctgccctaccgtgaacttgggatacccctgcctaaagtacgcacgctggttaactgtatggactataccgcgctggccaggaagacgctggatgagctggccggaattattcagaccggtcgttacagcagacagttacctgaaggtgccgtttcccttctttccacacagatttacgacctgaatatttacaagcagggacatgcggctggtcaacccgttcatcgtctcgaaaaagaatccacacgtcgcagtgattctgcgcttgtcacgatgcacagcctggcctgtgaactctttcctgagtggaaaccggcgtttgacgggctgctggaaaacggaggaactcgtcagtga

SEQ ID NO: 25453 - DNA, 669 bp, Escherichia coli
atgaacgatttaatcaaaatgctacaacagcgggccgatgacaaataccgtgataaacgcgggcacatccatagcaatatggcgggggtgttaggtgtcgccagcgatgaaataaaggccgtattcaagcgccagaagacgccaaaatgggaggtctttgttcaggtcgtgaatgagcttaattgcgggcgtggggttatcggcttcctgtacgctggggaagttagcgaggccgtagaagaactggaagcggctaacagcgaactgaaaggcatcattgcagacaaggacgcacagatccgggaactggaagcacgtctgatggcaatcagtacaaaagccgcgcaggaagttgaaacagtaccggaaagcgccgtaccggacgtaggcaagacgaaaggtacagaaccacatgaaatggtcgtaactggtacgaataaggagtttaaaaagcctgtacgctttaaggctgacactgtactggattatctgaaggcaaacgcgccgctacatggcgtcaatcatgccggactgattaaggcgatctggcctattggtgcaccgggccgcaatactttcctggcattgttgaagcaactcaaggaagatggcctgataaccatcacgcagcacggacgcgccggaatggatattcatgtgaacgggtaa

SEQ ID NO: 25454 - DNA, 378 bp, Escherichia coli
atgaaacgagtaatagcaatcatcttgatggtactggctggtaattgctttgctgatcttggtgattacagcctggctaaggaagataccgcaaaatttgaatcggtcgttatcgagaactgcgcgaaatcggctaaaacggtaggcggtgatgatcttgcgcggcttgaggtcgaatatgtagctgcggtatgtgcgccaatggctatggcgattatttacgatagattcgacgatataagagcaatcccttacaaagtgtcattaaaatcggtgttagatgaagatggcaatcaaaagattaatgtattgaataaaatgggtgttcttgctggtcgtattgttgcagaacagtatttaggcatgaattacgagtaa

SEQ ID NO: 25455 - DNA, 2199 bp, Escherichia coli
atgacaaccaatgtaggcacaattgaatacacagtagacgcgaaaactggagctttattgacagcagggaaacaagctgacgacgcattcgatcgcattgaacgcggcgcaaagaaagcagatagcagcctcaaaacgttaaatacacaggtaacaaaaacatcacgcgctattagcggcaacttacgcgccggattccagcaggctggctatcagattcaggatttcgtggttcaggtccagtcagggcaatccgcgctgatagcgttatcgcagcaaggcagccagttattgagtgccttcggtggctgggggattgctcttggtgcggcacttacggttggtgtatcgctgtttaaagctctgtcaggtgaaacagaggagacaacagataagaccgaagtattcgagaaggcttgcagcaatttacgccaggtaatggccttgaacgaacaaggcgtaaacgtcctgtcaaacgaatacgccaacctcgcgaaacagtcagctgcagccgctgagatggtcgaacgacatttaacccttagactacgcgaagctaaatcagcgatgaaagattatataactaatacgctggatgcacagaacgcgaccgctggtttcggaataattggttctgacagcttactcgacatgatgcaggcgatgcgggtgctaggcgttgaaacgtatgattacgccgacgcaatggaacagctaaacgacatgggcctacgcggtgcgcagatccataaagagctaacccgcgagcttgatgatatggcagacaaaactggcgtatcaaaagaggcgctatttgatatgtgtcaggagttaatggcggtcgctaaagcgcccacggcagacagtatttcagcactatcaaaccgcattgccagcatgaaccctacaacagcagaaggtgtgaccctgtttaatgaactacagcaggcattgattaaagccgctattgagcttcaacagttcggggatattagcgaagataccgccaataaacttgatgtattaaaacgcgcggcagattctcaatgggtgaaagactttacagaaaacataaagatgcaaacaaaggcattgggagcttcacgcggcgaaatcatgcggttacagcttgagaataagaaccttacagcagaagaacgcgccaatgctgaacaggcaatcaaggattacgaagataaacaaaatcgacttgaacaagagaaagaagcgaaacgccaggcactggcagcagaacgcgccgccaccgcagaacgcaaacgcctgatgcgtgaagaagagcaggagcgaaaacgcattgagcgtgagaaagaacagcgcgagcgccagacaaaacaagcgaaacgcttcactgaccagatcgaaaccaactatctgacaaccgtcaatccggcgacaggtcaggcagaaaatccgctggcagcaattcaggcgcaacagcaacgtgaattcgaaatgctggaaatgtatcgccagcagaatttagtcagtgagcagcaataccgtaacgccctggaaaacattattaacacgtcagccatgcgcgtagcagccatcgagcaacaacaggcgagcgaatacagtaagaacattcagggattgatgagtgcatatagcggcatgtttggcgagcttgctggcgttatttctgatggtgcgggcgagcagagtgcagcatatcgtgcgatgtttgcagtacagaaaggttttgcaatggcatccgcagcattgagccttcaggagtcactagcgaaggctaacgcgctcccattcccggctaatattccggcctatgcgcaagcattaacagcaggtacgcagatcatttcagccattcgcggcatagcttttggtggcggtcgctacaacggcggtgtggttgattcgggtaaattctatcgtgtcggtgagtccaacaagcctgagctgtttcaatccggcgggcgacagtacatgattcctggtgagggcggcaggattattcccaaccgtgacattggtggcggtggcggtggcggtggcggcatcacgatgaacaatacgttcaacatacaggccaataacggttggaccgagcaagacagcaaagcactgcagcagacgattgagaatacggcgatgcgcttgatgcagagagagtcaaccaggcccggcggaatgcttcaaggccgacgccgttaa

SEQ ID NO: 25456 - DNA, 210 bp, Escherichia coli
atgaatcaggacattgctgacaggctggagatactcgaagagcaaagagctgaggcgagacagatgcgtaaggaagcaagaaggatgcacaaaaaagaagaggccgaactgttatctgtattcatcaactttacgaaccgctgtatctgggagtgctataaggaagatgcggaaagctggcttaactcccacgctacgtcagggcaataa

SEQ ID NO: 25457 - DNA, 348 bp, Escherichia coli
atgagctttttagatatggcccgccagcgtattggtatggcggttaaagcaaacggatcagcagcggaaccggattctaaagaacgggcttttcgcaaaggtatggcggctgtacttgagaatatcgacgcggttgatgaaaagctggtccaggaaatgatggttgtgctgatggaccaactggagcgccgatttggtggtaaacagcctgaagagcaagcagaacagcaacccgccgccaacgcacagcgtagcgggccgaaaacgccggatcttgagttttatttttccacgcctaccaggaaaactgatgcccggacaccggatattggaagctatttcgactaa

SEQ ID NO: 25458 - DNA, 438 bp, Escherichia coli
atgacacgcaaagaatatcttcaccaactggcacaagaaattgcacaagaaattattagcatgaaccagccactgattgaccgtattgtcacggctgaagtcgataaaattaaatttcaattagcatcgctcgcgccgaacatggcggcaatgcgaagcgaaatgttggctgtaatggggtcaaatagctctttgggcgtgtatctggcaaacgtcgataaactacaagccgataaatcagacattgccacaaacgcattcacagcgccacagcaggcaccaaatccgcgtgaatacttcggcaatgagatcactgatagttttaccagacagtacttcgatggcgatcctgtattcaacgccgctattgatgagtatttcaatggtcccaaagaatttcgcgatcagctagacaattatttttatatgggagaataa

SEQ ID NO: 25459 - DNA, 312 bp, Escherichia coli
atgtactacccaaataacacttaccttaatctggttggtaataattacaagccttcacaggaaactttagataagcgcgcctttggtaaagcaatgagcgccgaggcagatcgtatcactgacatgctgccatccttattggctaaggttatcgacgaaagcgcggcggaattatttgagcagatgccggaatgtatgcgacgtgaagatccagtaactcacgacgtattaaatgaatccagtattcgccggatgcttgccggaaaggtggcaaataagatcggccacggtgtgagttttcttcagaaataa

SEQ ID NO: 25460 - DNA, 291 bp, Escherichia coli
atgaccaatattgaacgattagagcgatgcgctgatattatgcgccgcaaatggatttatgcccctgaaacgggtttattattcagcagtgaaacgaaagacgtgataaaaggcggcatgactaacaaaggtcatttattagtaactgtaagggaaggcgaatttaaggtaacactcacctatcaaaaagcctgctatgtgtacacatacggcgcttatgatgagacgttatatgaagtgcaccatgttaatttgacaagcaggataacagaattaaaaatcttcgattga

SEQ ID NO: 25461 - DNA, 177 bp, Escherichia coli
atgaaagcaattacgctagagcaatttgctgcaatggcgaatgtatcaaccaggacgctaaggcgctggctgaaaaaaccatcaaccggagtgccattgccatttacaccgcgcgggactcgtcaattattttgggaacacgaggtcaaagaatggttgtatagagtagaacgataa

SEQ ID NO: 25462 - DNA, 453 bp, Escherichia coli
atgcgagacatagactggtcagctatccctttcgatgatttaccgccctggcatctggactgggacgtagaccaacgcgaaaacgcgacatatccagcaaccaccagcattacagcgatgcgccccgtaaagcctaagaaataccaggcaaccgacctgatagctcacctcaaagctattggcggcgtatttaccggaagcaaagacacgcttgcacatgaagtatggccccggaagacgccagcgggtcgaaccgttttacgcttactgaccgaactgtcagacaacggcgacgctgtagtgattaaccgtggtcgttgtggcgtggaagttattctgacgccgaagaacagggcacagacgcctgaattaagcgcacccaagcaaatgcatagccaaaaattaagtccagcagaacgcgttatatcgcttttaaatggcatcgaattttaa

SEQ ID NO: 25463 - DNA, 900 bp, Escherichia coli
gtgctgttaatcggcgtgacgtttgttctttctattgtttgttctgcattcggctatagtagagtacggtttggtacgagtaattatactttagtagacagaaataactactcagcaagagatttccatacgcctaggttaaataaactggtaacagatgtggttcctgtagaggttaccagtgcaggaacagcgcagggaacatataaaaatgtaaccaagtttcctgttttctataggataggtacagggacacaaatatataaaaatgaacaaggatattatactctgaacggtgcttacagttatcttactggggggattgttcctacgccatcaatttcagattggtcatttgtgacaaatgctggcaacggtgctcttgcgtcgtatggaactcccggtgacagtggttcaccgctacttggatgggatacaactctaaataaatgggctcttgtgggggtactcagagcatatgcaggaaccacagggagtaccaactggtatgttgttataccaacagtgcaaatcaccgcaaatataaatgctgatactgataaacctgttaccagtgaggccgggagcggtgatattctctggactttcaacagtgtgacaggaaccggtcagttagttcagggagataattcctgggacatgcatggtcagaaggacttagatctcaattatgggaaaaatctgacattttctggaggcggtacaattgttttagaaaattcggtgactcagggggctggggcgctgacttttaatgatgactatgtggtgaaacctctggatgatcagacctggattgggggggtgtcattgtcaatgatgggcacgttgttgactggcaggtcaatggtgtgtcaggagatgcgctgcataaattag

SEQ ID NO: 25464 - DNA, 708 bp, Escherichia coli
atggaaaatctatatattaacggtaaaaagattgatagcttcggtgactggtcaccacagactgaacatccagctatcgctattcagcgcaaagagcacgatgaaagaattgcacttgagcaagagttaaagatgtcaccaaaggaaatcatctttgtgactcctgaacctcaagagatgcctgatgtatgcaaaactgaatcattacttgagcttgagcgtgaatattacccactactgaaagcacaaagaattaaacttgatattgcttacgatgcggttaagaacttcgaagaaacctcgaaaccttcagaatatgatattgcttacgagattaagtcaaacccgtttatctattatgaaggaaactttaatgatggttttggtacagcgattgaagacgttcctaaagttcttcaaagtatccctgaagggttccggttaattgatgtcagacaagcattaaggggttctggtcaatttattttgacgactgataaaacagatgaagagattcttcagttagctgaagctaatttgactaagcattattccggtaaactggataagttaaagcaaaagcttaaaaaagaacttgatagcatgaaagcgattattagtgactatgaaacgcagaagaaggttgctatgcaggctgatattgagcagttaacgaagatttctcagaaatacagcaaagcactttga

SEQ ID NO: 25465 - DNA, 192 bp, Escherichia coli
atgtccgtaatgttacaaagtttaaataacattcgcacccttcgtgcgatggctcgcgaattctccattgacgttcttgaagaaatgctcgaaaaattcagggttgtcactaaagaaagacgtgaagaagaagaacaacagcagcgtgaactggcagagcgccaggaaaaaattagcacctggctggagtaa

SEQ ID NO: 25466 - DNA, 477 bp, Escherichia coli
atgcagcagctttcctttctgcccggaaacatgacgcccggcgagcgcagcctcattcagcgggccctgaaaaccctggaccgccatcttcatgaacccggcgtggccttcacctccacgcatgcggcacgggaatggctgattctgaacatggcgggactggagcgtgaagaattccgggtgctgtatctgaataaccagaatcagctgattgccggtgaaaccctcttcaccggcaccatcaaccgcacggaagtccatccccgtgaagtgattaaacgcgccctgtatcacaatgccgctgctgtggtgctggcacacaatcacccgtccggtgaagtcacacccagcaaggcagaccgccttatcacggaacgtctggtacaggcactggccctggtggatatccgggtaccggaccatctgatagtcggtggcagccaggttttctcctttgcggaacacggtctgctttaa

SEQ ID NO: 25467 - DNA, 258 bp, Escherichia coli
atgatttccgtgcgtctgaataacccgcgcggcactggttatacgcaactatggctaagccgcggaacaggcgcttacacctatgactggacgccagaaacacgctacggcagcatgaagagcgtcagtttacaacgtattcaaccgctgactgagcaacttaatctcgggctgacggcaggtaaagtgtggtacgacaccccaaccgatgattataacggtctgcaacttgcagcccatctgacctggaaattctga

SEQ ID NO: 25468 - DNA, 1899 bp, Escherichia coli
atgggggtaatgataccgatgaaacgcgagaggatgctcacgatacgggttactgatgatgaacatgcccggttactggaacgctgtgagggtaaacaactggcggtatggatgcggcgggtctgcctgggtgagccggttgcccgttccgggaggctgccgacactggcaccgccgttactgcgtcagctggcagccatcgggaataacctgaaccagacagcccgtaaggtgaacagcggacagtggtcttccggcgaccgggttcaggtggtggccgcactgatggccatcggggatgagctgcgccggttgcgtctggccgtcagggaacaggggcgcgggatgatagttaagtttcatgccaggggaaaaggtggtggcagtggtccggttgattacctgctgggaagggagcgtaaccgggaaggggcaacggtgcttcagggtaatccggaagaagtccgggaactcatcgatgccacgccatttgcgaagaaatacacgtccggtgttctgtcgttcgcggagaaggagctgccgccgggaggacgtgaaaaagtgatggcgagctttgagcgtgtactgatgcccggtctcgaaaaaaatcagtacagcatcctgtgggtggagcaccaggacaagggacggcttgagctgaattttgtcattccgaacatggagctggagaccggaaaacgcctacagccgtactacgaccgggcagacaggccgagaattgatgcctggcagacgctggtgaatcaccattacgggctgcatgacccgaacgccccggagaaccgccggacgctgactctccctgataacctgccggaaacgaaacaggcgtttgctgagggcgtcacacgcgggatagatgctctttaccatgcaggagagataaaaggccgtcaggatgtgattcaggcgctcacggaagcagggattgaagtggtcagggtgacgcgaagcagtatcagcattgcagacccgaacggcgggaagaatatcagactgaaaggagcattctatgagcaatcttttacagacgggcgcggagttcgagaaaaagctgaaagagagagccgaatctacagagacaatgctgaacgacgagttcagcaagctcgaaaaatctgtaagcaaggctgtgacatcaaacgagacgaaaatcaaagacgctatagccctgttcacagcttcgacagaggaatcactgaaaaagcaccgggaaggggtgaaagaggcgatgatgcagcacaggaaggacgtgttaaagctggcagggaatacgggcatgatgttactggggatggtcattttcctgtttaccgtgagttgcgggacgctctggtatcttggagggatgatacaggcgaacctggaagatatcaggaagcaggaagagacattgcagaaactgaacgcgaagacatggggcgtggagttcgtacaggacgggaacaggaaatttctggtccttccgtacgggaaatcagcagaggtgattccccatcaggggaaggactgggtacaactgatggagtgacacagagtgacggagctggaaagacatttgctgaacgcattagagcaactgcaacaggactatatgcagcggctgaacgaatgggagagcgccttcgtggaattgcagaaaatgttttcgcttacgcaacgggacaacgcgatgctgaacgagcgggtcatgaagttgagtcagcaggtgcagcacttgagcgagcggacagaacgcttgagccagttatacagcgagaacaggagataagggacgaacggctgatacaggaacgcgaacatgagttatccctggagcgtgagcgccagctggaaatacaggaacggacactggatggcccttcgctgggatggtaa

SEQ ID NO: 25469 - DNA, 195 bp, Escherichia coli
atggaaattacaatccatatattctcatttgctatatttttaatcattgcatttggtagcgttttaattattcagtatgttgttgtgagcaaaatgttccctgtttttaataattactcattacgaaaaagaacgctgattatggttatcgttttatttatatcaatccagattgcaatgctcttgaataaataa

SEQ ID NO: 25470 - DNA, 1068 bp, Escherichia coli
atgagcggaggtatttttgaaggagttgaaaagaaccttatcggtgggctgactaatgtagctcaagggcaaatgatgatctactccaatatgatgatggggctggcggtaatgtcagctacaatctacatcatatggcgaggataccagaccttagctggcaagctctccacgccagtggaagacacaatgtgggacattatgaggatggcgatcatcctgtcctttgtggctaatttgggcggttatcttgatggcgtgattgatgccattaacggactgaaagagggcttttctggaggtgataacatttggcggatgttagatagtctctggcaaaacgcaaaattcttgggaaaaacattacatgatttggatgattcagaatttattaaagatgagggcacaattgctgaattgtttgtatggggtggtacttttgcgctgatgattgtaacggcttttgtatcaatggttgctgaaatcacgattatgttactcagtgtcactgcgcccatattcatcttttgcctgatgtatggtttccttcgccctatgtttaacaactggttacagaacattttcgcagcaatactaactatcttgttctctgcgctttctctgaggattgttattatttatacagattcagtaatgacaaccgctatagacggtgctgcgagggcgaatattgttcaacttggtgcccaggtatgcttgtctggtatttgtgcggcaatattggtgtatatctctgcaagaattgcttctgcactggcaggagcgagtgctacagccactatgcagggggcggcggctatcggtattggcgctgctgcatacggtgttggaaaaatggctggcggtgccaaagacaaattggaaaaaaacattgatggctggaacgcccatgatgatggtgccaaaagagcgcccaaaggtggagcattaggttataacgccgccaaggcacgtaaatacgcgattgagcagatgattgctaggaacgaagcgcgagaaattgctcggtctagggaagaggctataaaaaaatacggagctaaataa

SEQ ID NO: 25471 - DNA, 279 bp, Escherichia coli
atgaaaaaatttgccactatcgcttctgctttgattatttgtttttcaataactggatgtgacaataaaacttctgttgactggtatatgaaacaccatgaggacatgttttctaaatataccgaatgtcttcttgctgactcatggcatgaagttagttgccagaacgctagaagtgcaatgaatcttgagaaggaaaaaccggatgtacaggatgggcttgctgctgcacgcgagaagctcattgaacgtaatcgtaatctgatggggcacaaatga

SEQ ID NO: 25472 - DNA, 225 bp, Escherichia coli
atggctgacatgaagactaccacacagacccgtgtaatcgatctcgagatccttgaggaggtcatcactcgcgcagaatttgcgcatagtctggctggattaattactgaatccgctaattttaaaaaactttcagagcatcaacagaacgcgctaatggcattaatgacttttacgtatgatgtcagaaatgctatatctgaattaatgaactcagccgagtga

SEQ ID NO: 25473 - DNA, 969 bp, Escherichia coli
atgtcagaagataaattcctgtcggagtacagcccgaaagattcggtttgggactcacatcgtgcgtttactgattctgtcggtggtatttaccgaagtgctgctgaatttgagcgttatgcagagcgtatggcctcctgtagcggtttattgcgttttggttggtctacgctcatggagactggagaggcgcgcttaaggcttcgtagtgcgcaattctgtcgtgtccgtcattgtcctgtctgccagtggagaagaacgctcatgtggcaagcccgtttttaccaggctcttccaaaaattgttgctcaattccccagttcgcgctggttgttcctgacgttaactgtcaggaactgtgaaatagggattttaggggatactctgacactaatgaatgccgcatttaaacgtatggagaagcgtaaagaacttgctcctctccaaggatggattagagcgactgaagtaactcggggaaaagatggtagtgcacatccgcactttcactgtttgctgatggtgcctccatcatggttctctggtgttgcttatgtcaaacaagctcgttgggtggagctatggagagattgtctacgggtgaattacgaaccgaacgttgatattaggactgtgaaaatgaaaacaggcgaagtagtggccaacgttgcggaacagctacagagcgccgttgctgaaaccctgaaatattctgttaaaccggaagatatggctaacgatcctgattggtttcttgaattgacgcggcagcttcataagcgtcgtttcatttcgacaggtggggcacttaagaacattttgcagcttgacagggaaaccaatgaggatctggtcattgccgatgaaatgggggatggcacagatgatggcaaacgtactgcgtttgtttgggattccgggaggcgccgttacaggcgcgccccggagaaagatagattcgataactga

SEQ ID NO: 25474 - DNA, 492 bp, Escherichia coli
atgaacgcagaatatataaatttagttgaacgtaaaaagaaattagggacaaatattggtgctcttgattttttattatcaattcataaggagaaagttgatcttcaacataaaaactcgcctttaaaaggtaacgataaccttattcacaaaagaataaacgaatacgacaatgtacttgaactatctaagaatgtatcagctcagaattctggcaatgagttttcttatttattgggatatgcagattctcttagaaaagttggtatgttggatacttatattaaaattgtttgttatctaacaattcaatctcgttattttaaaaatggcgaacgagttaagctttttgaacatataagtaacgctctacggtattcaaggagtgattttctcattaatcttatttttgaacgatatatcgaatatataaaccatctaaaattgtcgcccaaacaaaaagatttttatctgtctcttatacacatctga

SEQ ID NO: 25475 - DNA, 1257 bp, Escherichia coli; identical to SEQ ID NO: 13723

SEQ ID NO: 25476 - DNA, 342 bp, Escherichia coli; identical to SEQ ID NO: 9277

SEQ ID NO: 25477 - DNA, 462 bp, Escherichia coli; identical to SEQ ID NO: 10202

SEQ ID NO: 25478 - DNA, 159 bp, Escherichia coli; identical to SEQ ID NO: 5044

SEQ ID NO: 25479 - DNA, 294 bp, Escherichia coli
atggatataacacctttccttcatgcgctttgtgctgtggctgcgcagctactgattggtctttttaccgggaactgggcttacggggcgatagccggttgtacgttcttcattgcgcgtgaacacacccaggcagaatatcgctggatcgaaatgttcgggcatggcaagcgaatgaatatgccgtggtggggcggttttgatacacgtgcatgggatgtggcaagcctgatggattttgctgtgccggtggtggcgtgtctgctggtctggctgttggttaatcgtgggtga

SEQ ID NO: 25480 - DNA, 600 bp, Escherichia coli
atgcgtaaattatgtgctgttattctgtccgcagtagtctggctggttgccgctggtacgccagcgagcgcagcagagcatcagtccacactaagcgccgggtatcttcagacccatactgatatgccaggcagtgatgacctgaagggcattaacgtgaaataccgttatgaatttacggacacgctggggctggtgacgtcattcagttatgcaggatacaagaatcgtcagctgacccgttacagcgatacccgctggcataaagattccgtgcgtaaccgctggttcagcgtgatggcggggccgtctgtgcgcgtgaatgaatggttcagcgcgtatgcgatggcgggtatggcttacagccgtgtttcgactttttccggggattacctccgcgtaactgacaacaaggggaaaacgcacgatgtgctgaccggaagtgatgacggtcgccacagcaacacgtctctggcgtggggagctggcgtgcagtttaacccgaccgaatccgtggccattgatattgcttatgaaggctccggcagtggtgactggcgcactgacggtttcatcgtgggtgtcggttataagttctga

SEQ ID NO: 25481 - DNA, 189 bp, Escherichia coli
atgtttggctatcgcagtaacgtgccaaaagtgcgcttaaccacagaccgactggtcgtgcgtctggtgcatgatcgtgatgcctgcgtctggcggattattacgcagagaatcgccatttcctcaagccctgggagccagtgcgcgacgaaagccactgttatccatcaggctggcaggccaggctag

SEQ ID NO: 25482 - DNA, 561 bp, Escherichia coli
atgaacaagtttttatttgccgctgcattgatcgtcagtggcctgctcgttggctgtaatcaactcacccaatacaccatcaccgaacaagaaattaaccagtcgcttgcgaaacataataatttctcaaaagatatcggtttacccggcgtggctgacgcccatattgttctgacaaacctgaccagccaaattggtcgcgaagagccgaataaggttaccctaaccggagacgccaatctggacatgaactccctgttcggtagccagaaagcgaccatgaaactgaagctgaaagcgctgcccgtatttgataaagaaaaaggcgcgatcttcctgaaagagatggaagtggtcgatgcgacggtacaaccggaaaaaatgcaaacggtgatgcaaacgttgcttccctatttaaaccaggcattacgcaattactttaaccagcaacctgcttacgtcctgcgcgaagatggcagccagggcgaagcaatggcgaagaaactggcgaaaggcattgaagtgaagccaggcgaaattgtcattccgtttactgattaa

SEQ ID NO: 25483 - DNA, 885 bp, Escherichia coli
atgatcactattaccaatagcaaactaacagacgaatacgtttcaaatgcaacgttgattcggctcattctgtgggctgaccagcacaatagccattatgttgtagcggctctgcgcgagctacaggagcgccgcaaggctgatagtgtgcctgtagaagtcaacgacgacatggcttacgcattccatcacgcactgtcagattcatcgctaggcgctgatgaagtagaggaaattaaggccggtttgcgtgctgcctttgccaatgtcaccgtccagccggtgctgatagtgccggatgaaatcgagccagacgatagcaatacgtttgattatgttgatggctggaacgcctgccgcgccgccatgcttcaggctggaaactttcgggaaaataaggattcgccaaccaataattttcgggaaatctcggaaacgtcaaccaactatccggtaattcctagtgaggtgttgtccgcaatccagaaggttgccaagattcgtgccgatttcgatgattttgacggtgacaggcgaggtatcggtgattgtctggatgaggctgagcaagagcttatcgttaccattaacaaatatgccagtcagttggcagcagaacctatagcgcctaatgacgttcgagagcagacagccattccgcaagttccggtaactccggatagttggataagctgtagtgagcgaatgccagatgatggtcagcacgtaattattttatgtgatggcgcattcgttctttatgcgcaatatcgagacggtgagttttttgatgttgtccgcaatggtgaggagttcttcgaaacgcagagccgcaatgtaacccactggatgccgctaccagaaccgccgcaggaggtgaagtga

SEQ ID NO: 25484 - DNA, 516 bp, Escherichia coli
atggcgttaacacaccgcgaactctgtcagattgcgtacaagttccttaagcgcaacggtttcaaggtttgttttcatgaccgctttatagctgtaaccagtaccggagaacagccagatgctatgggattcagaaattcagcatcatgcctgatagaggcgaagtgttctcgtgctgacttgttagcagatagaaaaaagcgttttcgtaaaaatccgtctcttggaatgggcgactggcgattctttattagtgagccgggaattatttcaattgaggatttaccacctggctggggattacttcacgttgttaacggaagagtacggaaagtacatgggtggcccaagggtaattgctgttggggtaatcctgacgataagccatttactgggaataagcaggttgaatgcgattacatgttatctgcattaaggcgcatggagttgagagggcaccttaatgaaatatatgacggtgtaattgttaataagaaagaaggaaacgcggcatga

SEQ ID NO: 25485 - DNA, 2721 bp, Escherichia coli
atgatggcacaactgacagaaaaacagaaagcctattcccgtcatctcgatgaaaaatatggtttcccatcagggacgatggaaacattagttggcaatgaatctagtggtaacggaagtgccgagtcaccgaaaggagctagaggatttgctcaactgatgccctcagtaatgagtgatgctggttatcgtggaacagatccgcgctcactgccatttgaaaagcaaatggatatcgcagcaaaccatctcaataaaggaatgaagcgatttggtgatataggtatggcattggctgggtataattctggctatgctcgtattaatgccgtaagaaacggtaaatctacactgccagatgaaacggctaattacgtaagtaaatttgcagatgccggaataatccctgatgacagtgaaatcttgcagtttgcacaaaccagtcaacatcgcaatcttcagcagcctgactactcagagcttgataaagaaatctctcaggtgggagatatttctgcatgggaagcaaaacgtcagcaatttaagaacatagaagcaggactaccaacagccagttcatgggagcagaaaagagctcagtttctcgccgatgaaaatgccggggaaccgcagcagcaagtagccaagtctaaccttaatcctgagatggaatatctttcgccaggactgaaagctgcgccagagcagatggccagagggattgctaatataccgtttgatgtaatggacgcaggcgtgggggtagtcaatgcggcgcaatcagccggagcatgggcagctcagaagcttggtgtgggtgatggcacatacacgcccatatcacctgtctttcgcccagtagaccaacctacagatccatacgcgcaggctggtgagcagctagcaccttaccttattacaggattaggtgcaggaaaggcagctaccgcagcttcttcagttgccaacgctccacgtgctgaacgtgcggccacaaaggtggctagtatgttggcagaaaacctgccaggtacattggtgaacgcccaaaagaacgggcagatcagcccagaagacctagcaaaagagacaggtattggcctagcaggatcgctaggagcacgcgctttaataaagagcggacagacagccagtgacgtaatgcgagatgtattgcggagtaatacaaatcaatcaggccatgtgttaggggcagcaaatactctggaaaccgccaatgatgtatcgaaagcagcgcgttctgccgtaggccgagaacatatcgcatcgcaggcatcaaacgtcagagatgatgtcgctaaggcggcgaaaatcactggtattaatatcaacaccctgacgcctggaatgcgctcaggtagtcgtggaattgcccaagcagaaggtgttctggcatcaactcctgggaatgttcaggatgctcaccttacggccttcaatgaaatatcctcaaagttgaataagcagttgtctgatttcggtgctgagtctggaagcgcatcagaaaaaagcgcagcaattaaagagcgcatcatcgcgagcctcagtgatatgaaaacagcagagaatatggcatgggcagaactgcgaagcacgatgccacgcgaaaggatgaaaatgagtaatgggatggctgtcgtccaagcagaaaaagcagccaatgttccactcagcccggagatgaaacagtttcaggctgccaacaaccaaggtggcggcataaccttcgacgggatgaaggcatggcgtgctaagtttgctgatgctgaacaagcaaacacccgggcaggtaaggccaatgccgcccggattgccggagaaatgcgcagagctatcactgatgacatgcgcatcatggctgaaaaaggaaacttcctcacagaatggcagaaagctaacgatctctctaaaagttacattatcgccaaacaaaatgccgaatctgtttttggtcgagatctcgcatcagacgctatggtaagaaaaggtgccgatacgcttaaggcatccgcaaacactggaactggagcttttcaccgtcttatctccgcgctgccggaagcagaacgccaaccagcaatagcatctattcttcagcatgctgtggcgcagggagagaagggaggaatcggtgaagagtctggtatccagtattttgccaagctcatgacccagcagaatgtaaacgccatcagtcgtcatgcgccagatctcggtagaatgatgaaagagttcggtgtactcgctaaagccagcaccagaccgcagcgatacgtagagcgcacgggaagaacaactgaggctctcaaaacgctcgattcaggccttccaaagatcgtcggcgtgattatgaacggagttcaacagtcaggtgcgatcgctggaggctttggcggtggtgtaattggttcgattagtggtttggttgctggtggcgcgctgagaaatactgtggctaagattggggcgacaagaagtggtaggtatgcgatagagaaagccgttcaggaagctacaaaagcagtgcgcgcaggggcatcaccagcagcgatcgccgcagcagagaaacgattttcggccaataaaattgccatgaaagcaattcgtgatgccgttggggctgaagaattcgtgaaactgacaagggccgggattgtagctaccctcagtggcatgaaagatgttagcgaatgggaatag

SEQ ID NO: 25486 - DNA, 840 bp, Escherichia coli
atgattgttcagaaggtgctcaataatagcctggtgctctcccttgatgacgataacagggaagttatcgtcatggggaaaggtattggcttcaacagcagacccggggacgagatcgccccggagcagatagagaagctatttgtaacccagacgcttgacgaacgcagcggctatcttgaggcactttccgctataccggatgaagtcatcgaaatggctgcgatgattatttcccgtgccaacatgcagctttcgagcaaagttcgtgagcagattttctttacccttgccgatcacctggcttttgccatcgagcgcagccgcaaagggatcaccattcaaaaccgcctactaccggaggtcaggcggttttatccacaacagttccacatcgccagcgaggctgtaaccattattcgccagcagtacggtattgaactaccggaagaggaagccgggaatatcgcttttcatcttgtgaatggtcagagcgaaggcgacgacgtagcgcaaaccatgcagtcagtgaaaatgttgaaggatatttttaatctcgtgcagtaccactttaagcaggagatcgacactgaatcgattaattactcacgttttcttatccatatgcagtttttccttcagcgtttacaggagggagaactggatagctcgcgggacagtttcctgctagtgcaagtgattaaagagtatccagaagcctggcagtgtacgctactgatccgcgattatatcaaggttcaactcggtatcaccctcagaggtaacgaactgctatggctcacagtccatctggtgaggataactggacttgatgcataa

SEQ ID NO: 25487 - DNA, 516 bp, Escherichia coli
atgtgggcaaaggaaggcgaggatttaagtacaacatgcaaaagttgtggagtagctgttttaccacctgacgattattgcaaaggttgtgctgataaaaagcttacggggattggaggttggctgtatttacctgctatttctttagtgctggtgattatttcgagcatttattcttttgtacgaacatgggggcttgctcagggcagtcaggaagaaccgctcagaactctgctttatctggaagtggtcggatgtgccacgatatttctgttggtgagttatactacttttttgttttttaataagaaacgccaacttcctcactactatattgcccttcttctggcgctcttcgcattgaatgttgctgatacctggggagcagtacaatttcttcatgccacaattgatctttcagacgcatggggtgtgctgaaaaatatcattcatctggctatctgggttccctatttccgtgtctctaaacgcgtcaaattaacttttgttaattaa

SEQ ID NO: 25488 - DNA, 1374 bp, Escherichia coli
atgcgcattcatattttaggaatttgtggcacgtttatgggtggtctggcgattctggcgcgccagttgggccatgaagtaacgggttcggacgccaatgtgtatccgccgatgagcaccttacttgagaagcaaggcattgaactgattcagggtttcgatgccagccagctcgatccgcagccggatttggtgattattggcaatgccatgacccgtggaaatccgtgtgtggaagcggtactggaaaaaaacattccgtatatgtcaggtccacagtggctgcacgattttgtgctgcgtgaccgctgggttctggccgttgctggtacacacggcaaaaccactaccgcgggaatggcgacctggattctggaacagtgcggctataaaccgggttttgtgatcggcggtgtacctggaaactttgaggtttcggcgcgtctgggcgaaagcgacttctttgttatcgaagcggatgagtatgactgcgccttctttgacaaacgttctaagtttgttcattactgcccgcgcacgctgatcctcaataatcttgagtttgatcacgccgatattttcgacgacctgaaagcgatccagaaacagttccaccatctggtacgtattgttccggggcagggccgtattatctggccggaaaacgacatcaacctgaaacagaccatggcgatgggctgctggagcgagcaggagctggtgggcgagcagggacactggcaggcgaaaaagctgaccaccgacgcttccgaatgggaagttttgctggatggtgaaaaagtgggtgaagtgaaatggtcgctggtgggggaacataacatgcacaacggtctgatggcgattgctgcggcccgtcatgttggtgttgctccggcagatgctgctaatgcgctggggtcatttatcaacgctcgtcgtcgtctggaactgcgtggtgaagcaaatggcgtgacggtatatgacgattttgcccatcacccgacggcaattctggcaacgctggcggcgctgcgcggtaaagttggtggtacggcgcgtattattgccgtgctggaaccacgctcgaacaccatgaagatgggcgtctgcaaagatgatttagcaccgtcgttaggtcgtgccgatgaagtcttcctgttgcaaccggcgcatattccgtggcaggtagccgaagtggcggaagcctgtattcagcctgcacactggagtggtgatgtcgatgcgttggcagatatggtggtgaaaaccgcccagcctggcgaccatattctggtgatgagcaacggcggttttggtggtattcatcagaaactgctggatggtctggcgaagaaggcggaagccgcgcagtaa

SEQ ID NO: 25489 - DNA, 249 bp, Escherichia coli
gtggcaaaagctgggcgtggcagtccgggaacaattttaaaaaagcttgagaatgtgctgaaaaggccgagcaatccatcggctaaactgcgggatttgccggactgctataaaattaagtttcggacactgggatatcgtctggtctatcaggtcaacgataaagcgttgctcgtgttggtgatagctattggtaagagagagaactcagccgtttatgatgaggcggataaacggctggatgagtga

SEQ ID NO: 25490 - DNA, 456 bp, Escherichia coli
atggctaaagcccgtttcactgatgaacaaattgctgaaattttacagcagtcaaaaaagggtgcacctaataaggatttatgtgaacactatcaatttagtgttagtacgctgcggcgctggcaagaacagcacgcagaaggcgtaagaagtgaattaaaaaaaatagaatccaaagcgcaaatcgtctttctgcttttctttgctgtctccattatactcacgcttatatttggcaagcctacaggtggatgggtaataccgcctttattactttattgtgtttattatatccgcctgtatcgcaacatctcctccagacacattaaaaaagaagacatctgtctctctcgttcggtaaataaaagctatagcgccctttataatttgagctggacgtttatttgtttttttatttttgcagtaatctatttttttgtgcagattttttcgtag

SEQ ID NO: 25491 - DNA, 285 bp, Escherichia coli
atgagcagcaataaagagttaatgcagcgccgcagtcaggcgattccccgtggcgttgggcaaattcacccgattttcgctgaccgcgcggaaaactgccgggtgtgggacgttgaaggccgtgagtatcttgatttcgcgggcgggattgcggtgctcaataccgggcacctgcatccgaaagtggttgcggcggtggaagcgcagttgaaaaaactgtcgcacacctgcttccaggtgctggcctacgagccgtatctggagctgtgcgagattatgaattag

SEQ ID NO: 25492 - DNA, 543 bp, Escherichia coli; identical to SEQ ID NO: 13864

SEQ ID NO: 25493 - DNA, 207 bp, Escherichia coli; identical to SEQ ID NO: 19640

SEQ ID NO: 25494 - DNA, 303 bp, Escherichia coli
atgggggattctgtgacacctgaagtggaggtactgagtgacatgattcgtcagtacttcagccaggaacgatcagaaaaagagactatacaggctctgaatcatctgcgcagggtacttcatgaagtcagcccttttgcacaggagcctgtggactgtgtgctgtgggtgaaagcagatgaggtggtggccaacgattataaccccaatgtcatggcgccgggtgagaagaaactgctgaagcagtcactggagaaagatggtttcacccaacccgtggtggtgtctgtagtggtcaagtaa

SEQ ID NO: 25495 - DNA, 447 bp, Escherichia coli
atgataaaaactgataccggcattattactatcgctgtggaacatcaccccgccgggcttaccacgggtttcccatgccatttccagcgctttcatggtgagcctgctgtccggcgagaacgacatggcccagcccactggttttcttgcgaacaggtcgagaacaacggcgaggtacgcccagcgcttacccgtccagatataggtcacatcaccgcaccacacctgatttggctcggtcacggcgaactgcctttcaaggtagttagggatagcaacatgttcatgaccaccacgtttataccggtgagtcggctgctgacagctgaccagccccagctctttcatgagcctgccagcaagccagcgtcccatctggtagcctctccgggttgccattgtggcgatgcttcttgctccggccgaaccgtggctgatgccatgtag

SEQ ID NO: 25496 - DNA, 966 bp, Escherichia coli
atgccggcctttgaatgggttcatgtgcagctccatcagcaaaaggggatgataagtttatcaccaccgactatttgcaacagtgccgtggaagcttatatcgaacgcgtcagccgggccaaccgctttgaatatggcaaagtgcgggtcgcaggctgcgtcggctgggcgctatgcgcctcgataaccggcgtgctgttcggcatcgatcccaatatcaccttctggatcgcctccggctttgcgctggtgctcggtctgctgctctggctgtcgcggccggaaagcagcaacagcgcccaggttatcgaggcgctgggcgccaatcgccaggccttttcgctgcgtacggcggcagagctgctgcgtatgccgcgcttctggggctttatcgtctatgtggtgggtgtcgccagcgtctacgacgtgtttgaccagcagttcgccaactttttcaaaagctttttcgccagtccgcagcgcggtaccgaagtgtttggcttcgtcaccaccggcggcgagttgctcaacgcgctgatcatgttctgcgcgccggccatcgttaaccgcatcggcgccaaaaacgccctgctgaccgcggggatgatcatgtcggtgcgtattctcgggtcgtccttcgcctcatcggcagtcgaggtggtgatcctcaagatgctgcatatgtttgagatccccttcctgctggtgggaacttttaaatatatctcttccgcctttaacccgcgcctctcggccaccctgttcctgatcggttttaatctgtcaaaacagctgtccggggtggtgctttccgcctgggtgggccggatgtacgacaccgtcggcttccatcaggcctatctgatcctcggctgcataaccctgagcttcaccctgctctcgttcgtcaccctacgcggcggcaaccgtctgctgccgaccgcagagacgcagagccccgcctga

SEQ ID NO: 25497 - DNA, 435 bp, Escherichia coli
atggaacggattgaacatcacgtctgtttcggcggcagccaggaagtctggcgtcaccactctgcggtgaccggcacgccgatgactttttccgtgtttctgccgccgcaggcaaaaacagagaaatgtcctgtgctgtactggctttccgggctgacctgcaacgagcagaattttatcaccaaagccggggcacagcgttacgcagcggaacacggcctggtgattgtcgcgccggataccagtccgcgcggcagtcaggtggcggatgataaagagtacgatctcggccagggtgccgggttttatgtcaatgccacacaggagccgtggaaagcgcattatcagatgtatgattatattctgaatgagctgcacaccctggtaagcgggcatttcggcacatcggaaaaacgggcactgttgcaaagttag

SEQ ID NO: 25498 - DNA, 279 bp, Escherichia coli
gtggtgctgtgcgtcagacaggagtatttcgacggccccgaactggatcggttgatactggatgcctggagtaatgtgctgggtttcgcgtcaccaggtgaagcaaagccgtaccagaagcagatcacccgggatgtggtactggatcgccggtcaccggactgcgaagccctgtttaaggaccttatctgggcgttcagtgatttcgcccgcgatcgccgtggagtgtgcgatccggaagcccgttgccttgccggcaatcccggttggcagtgctga

SEQ ID NO: 25499 - DNA, 273 bp, Escherichia coli
atgaatctgtccggcatggctgaggtcatccaccaccgactgaaccgtggcgttatcggggatattccaggtggcaccggatgtcaggatgacattcgtggggtcaatggcaccgttcagcactgtgctgccggtcagcttcagggccgtgccgcgctgagcgatgacatccgtggtgacggtactgttgttcagcgtcagcgtgccttcattcaggttgacggttttctgggtgagtgtggtgttgctgacagtgagtgtgccacttcctga

SEQ ID NO: 25500 - DNA, 1206 bp, Escherichia coli
atgaaagggaatgtagctaaaacagggagatcatttaaaaataggattgattatatattaaaagatgatcacagttttatttgtagcaatatgtcagcagataaaaataacgttagtgagttaactgatgagtttaaaactgtaagcggctttagacaagatataaaaaaaccagtttttcatgcgtttttatctcttccaaaagatgaaaaattaacagatggaaaatgggaagagatagcaaaagactatttgaaagaaatgaatattgatatagacaaacatcaatatatttgtgtacgtcataaagatacagataaagaccatattcatattgtagcaaatagggttgggctggatggttcggtatggcttggtcagcactcagcatttaacacaatagcagcttgtggacgtcttgagataaagcacgacttaaccataactaagagcttgcaggggcaaaaatcagacgtattagcaccaaccaagaacgagatcgagcaagccctacgtacaggtgagaaaccagctcgtatcgtgctacagaacgcattacaggcggctatgttgggtaaaccagatctacagacgttcatagacagactacaggctgtaggcatcgatccggccttcaacgttgcaagcactggcaacgtcgccggggtgtcatttggtatcaaaaataatgaaaaaaatattttcttcaagggttcatctcttggcaaaaaatttagttggaacactataaaaagtaaggtgaaatatgacaaaaatagagatgatgaactcattaggagcttctcagcaagaaaagatgatgaaccaaatagtgttggacgatcatttgttgaaccaaatatcaatgacaatagaacctctgacagaatcaatgatgatattatcggagtcggtcagtacggcattaaatcagacgcaacagacactaaccagagtgaacaactcattagaagcaacaacaaccgctttaaactcagcgaaaaatataatagaccagcaagccataaagttagaagaacaacacaaaaagctgcacaaatactcaacagagttaaaaaacaataccataaagaatcaatcaaaacttataataaaagtggcctcggtggtaggagtaatacatatattggtggttctatcagtaggatactgatggctcgaagtgtcgaaccatcacccatataa

SEQ ID NO: 25501 - DNA, 375 bp, Escherichia coli
atgcgaacagacagaaaaagagggcgtatagaattaaatcacgaagaacgcagagatatatctatacagtttagagtaaacaaagcagagtttgaatatttaaaagaacttgttgaggcatccggtcttgaaagaggccattacattaggaaagagattttaaactctgaacctattgttaaaagaaaaatgcctgaaataaatcaaaaaacatacatgcagctttcagcagttgccaataatataaaccaagcaacaaagaaactaaatggtaatgagtattttgataaaaatgaggttgataaactcaactttaatataaaacaggttggtagaaggataatagaaataaataaagacttggggtatatatga

SEQ ID NO: 25502 - DNA, 291 bp, Escherichia coli
atgaatgtagaaaacttaatgaatagtataactatagaatataagctcgaaatactggcaaggtttttttattacatagaacaaaacaaagatataccatttaatgaaatcaatagtgatgagcgagatttgtgttattttgtagccaatagatacattacagagaataaagctgatgagcttattgaagcattaattattgaaaatgataacgactacataagagcaacagatgattacattatccagaggaataaagaatgcgaacagacagaaaaagagggcgtatag

SEQ ID NO: 25503 - DNA, 327 bp, Escherichia coli
atgtccgctgtgacctccggcggatatcatgccacccggcatgttaccctgaaatttatccccgaagctgccaccaccgctcagactgattccactgtgactgactttataatccgcttcgttgtgaatatcgctgaagccgagcgtcccggtatccaggtggtttttatccggtgtggcagtggaggcaatcaccgcaccatccagttgggtatgtttacccactgtgatatcgaagccgccatctccggaaaacatcccggtttgttcagcaacggagtcaaagcggctcttcatcttatcccgggaggcagcgatgtaacctga

SEQ ID NO: 25504 - DNA, 828 bp, Escherichia coli
atggatatttttttcttagatattcttactgagtttctttcggagcctttatttttcttgagttttgttgaccgccgtactggttatcatgacgctctaatggcgagcacagaaattgttcttctatccatgcatttaaaatataatttatggattgagaatgatatgacctttatgcatctagcggatgatattgcttctgacttagatgctgcttttatggtacgaagattagcactgcccggtagtggaacaccaaaaggtattttgcaaaaatatacatcaggattctttggtaggcttctttttaaaattcaacgactggctaatgatgatttaacagatctgggcctgatccttttaaaaggaaatggtaagtttgtcgatatgcttaatgaggcagtaggtaggatacaatacttaaccatacaggataaccttactcatgattttactattcagctagaaaatggggttggtggtctaaccgttcatacattagctggtgatttagaatcagctcaaaataaattgatggcccatgttaatgcaaaaaaatatttagcaaagcaaaatcaatggtttggggttttggttgaggctgatcgacttggtatggtggcttcgatatgtaagctatcctttccgtggcaaaaagatacaaaaatggatcttgcagttaaagaagcaaaaatggataagccaatgatttatgattcgaaggaattaagggggaaatttaaagttaagcttggaagaaatgataagtgtttatgtggaagcggtaaaaaatataaaaaatgctgtcttataaaaaataatctatga

SEQ ID NO: 25505 - DNA, 237 bp, Escherichia coli
atgctacaggcacagatggttctggatcaggtgatttctttggtgacaactcactggcaacaagacgtatcagaggcatatgtcggtacatcattcgttcaggcgcatcgccaatattttttagcaggtgccatcgatcggccacctgtctggcctgaggtgcaccttcacgtgctgctgttgcatagactccactgcgatcacgcgagacaacctgtatttccggatattttctga

SEQ ID NO: 25506 - DNA, 222 bp, Escherichia coli
atgaagaatgaaatactggaatttctgaacaggcatgatggagggaaaacggcagaaattgcggaggcgctggcggtaacggattaccaggcacgctattacctgttattactggaaaaagcaggtatggttcagcgctcaccattaagacggggcatggcaacatactggcttctgaaaggagagaagcaggcggggcagagctgttcttccacaacttaa

SEQ ID NO: 25507 - DNA, 180 bp, Escherichia coli
atgaacggtaaccgcgctgaaatgagcccggaagctgccggtattgccgcctgtctgatgacgtacagccatcatgcctgtcgtacggagaattatgccatgacggtccattattaccggttgcgggattacgccctgcagcatccggaatgcagcgccattatgcgcatcattgactga

SEQ ID NO: 25508 - DNA, 246 bp, Escherichia coli
atgaccattctggactacatcgctgccaatccgggttgtagcggtggagaaatcgccgcagcactgaatacaccaaccacaaccattaatgcggagctacgccgtctctggcgcagcggttcagtcataagaaaagagcgcaaaacaggcggtcgcttttcctatcaggtaaacccgatgccgtttgggtgtagcaacccactaacccagatgttcaaccagctactgagggaaatcagagcatga

SEQ ID NO: 25509 - DNA, 594 bp, Escherichia coli
atgaacgcagtaaaagatattcgcaatccggtgcatctcggaaacggcgcggttgactgtgaggtgctgtttgaggggcgcagcgagtacgttgtttatacggctgcgccgggcgacgcagccccgacaggtcagcgtatctggcaggaactacagagcggcaaatggggcgaaattgccccgttcacggccacgccggaactgatagcggcggcgaaggatgcaaaacgtcaggaaattgaggtgtggcgtaccgaacaggaagcgcagtcgttcacgtttgagtggaacggtcgaacctggaacgcggggccgtcctcactggcccggctcacgcctgcgattacggcggcggaatacgccggcgagcaggctgttacctggagcgatacaaccaacgagccggtaaacctgacagtgcaggaactgaaatcgctggccgtcgcactggctcaggcactctctgagcggaacaacgcgatttatcgtcgccagcgggagatgaaggatacgttaaacaccctggagaatctggcagaggtgcaggcgtttaaggttggagaacaatctatattgggggtaagccgtatttag

SEQ ID NO: 25510 - DNA, 1038 bp, Escherichia coli
atgtctgttgttgcgcatattgtaaccgggcaaaacggggaatatgcgtttgaggcccggacggggaagtacagcgtttatctgaagactgactggcgtaatgagtttcaggttggtgttatttctgtttatgaggactcacaaccgggcacactgaacgacttcctgatagcagtgagtgatgctgatttgaagccggacgttctgcggcggttcgatgagctggcgaggcgtgtccatgaagacgcgaacagcgcagaacagtttgccggagatgcccgtcgtgctgtggatgaactgggcggtaaggttcaggacgatattcgtgaccgtacaccggaccgtctggctctgcccggtgcttacggcttcggcggaatattcagccgctcggaagctctgtcgtttcagggggtatctgattttggtgcgtggctacagaaagccacgccggggcgttatccggtcactgttgcggattcttctgcattgctgttgggcaccacgaaatttaacggcaacattgatgtgctgtggtcaccctttgataacgacgggtcggacacagcgcacaaattcaaaacgctgttgtgttacaacgagccacgtgccggagagcacgggctacacctgctccagtactggtacgagggcgacaacctgcgggttgcgggcagtatgatagtctgcgacgctccgtcgctggcgacactgctgtcagcaacagcgggagcggacccgtcagggttctaccgttatccggcggtgggttccctgttgctggcagcgtaccacggggcatctgccggtgctggcggggtgagtattgcaacaggcgacgttgttccgggctcctgtctggggccggtgagtattccgtgcgcggtgaacgaaggcggcacaactccgtcgccgctgcgggcgtttgttggtggtgccggacagtacaatttccccggacgttaccaggcgttatccggtgcaaataatgtccgtggaaacaatgggtttatctgtctgtttgtgcgcgttgagtag

SEQ ID NO: 25511 - DNA, 2355 bp, Escherichia coli
atggcagtaaagatttcaggtgtactgaaagatggtgcaggtaagccggtacaaaactgcactattcaactgaaagccagacgtaacagcaccacggtggtggtgaacacggtggcctcagaaaatccggatgaagcaggtcgttacagcatggatgttgagtacggtcagtacagcgtcagtctgttggtggaggggttcccgccgtcacatgccgggaccatcaccgtctatgaagattcccgacccggtacgctgaatgattttctcggtgccatgacggaggatgatgcccgtccggaggcactgcggcgttttgaactgatggtggaagaagcggcacgtaacgctgaagccgcctctaagagcgcagcggcggcaaagaaatccgaaactgcagcggcatcatcgaagaacgcggcgaaaacctcagaaacgaatgcagctaacagcgcacaggcggcagcgacctcacagactgcatcagcaaactccgcgacagcagccaaaaaatcagaaaccaacgcgaaaaacagcgagacagccgcaaagacgagtgaaactaacgcaaagtccagccagacggcagcgaagaccagcgaaacgaatgccaaagccagtgaaactgcggcgaaaagcagtcaggatgcagcagccgaaagcgagagtgctgcagccggttctgcgacttcagcagctggatcagcaactgctgcggctaacagccagaaagccgcgaagacgagcgaaactaacgcaaagtccagccagacggcagcgaagaccagcgaaacgaatgccaaagccagcgaaactgcggcgaaaaacagtcaggatgcagcagcccaaagcgagagtgccgcagctggttctgcaacagcggcagctaatagccaaaaagctgcaaaaaccagtgaaactaacgcaaaggcgagtgaaacaaaagcagcagccagcgagacagaagcaacgtcagccgcaacaagagcagagaatgcagcccggattgcagaagatgccgctgatcctgcttctgtccctccgcttcctgatatctggctacccttgaatgattctctggaagcgataacagggtatgccccgggctataaaacaataaccatcggcagtgatgaaataacaatgcctgttaatggcatatgccaatttagccgggcttcatctgcaacgtatattgataagtccgggcatattaccgtggcagggaataacgttcctcgttttgaaaaatatggtttgctgatagagaatcagcgaacaaacatgttcgtaaatagttttaatcctgatgcctggaataaaagcggtggtatatctgtaacatcatcaacagatgaatttgagtttaaatatggacgtttcacggtaggaagcgatatagcaggaacgacaacagggcgaaatatatgcacagttgctggtaacaaaggcatagatgtgactggcgatgaacagtacagtaaaggtccgtatgttaccgcgtcgttcagggtaagaagtgatctcaatgttcgcgcacgtatccgttttgaacggtataactcggaaggatacaccttcctttgcgacgcctatttgtcattacagacccatgaactacaaattactggtggcaatgcccagctattaacagcaaactttgaaatcgatccaggtagtggatggatatattttcaggcaacactgaaatgtctgccagaatggggaatggttggtacgcagctgcaaattgcagccgacagagcagtgggggcttttgcaacaggtgactggatagaagtaaccaccccgcaattcgagtatggtgcctgtgcaacttcctttatcataacgacaacagagccagcgactcgtgcatcagatttatgtaaatttccgctgatgaaaaatatgtataccatgccttttacgttcatggtggaagtccataaaaactggtttatttctcataatgctgcaccgcgtgtcattgattcagaaaatcaccagtccggaggcccatttattatggggtttggttcttctggaactatcagtcaggatggttattcgtattgcgatataggcggggctaaccggcgtgtatatgagtcatgcggagtaagagatctcgttatgggattcagggttaaggctgacggcatgacatgctcatttgcaaataagaatataagcactgaaaccaaaacagtatggaaatatattcgtgaagcagccgtgattcgtatcggggggcaaacgacgacaggattacgacaccttaatggtcatataaaaaacctccgtttctggaacagagcattgtcagatacgcagattaaggaatacgtataa

SEQ ID NO: 25512 - DNA, 180 bp, Escherichia coli; identical to SEQ ID NO: 9255

SEQ ID NO: 25513 - DNA, 477 bp, Escherichia coli; identical to SEQ ID NO: 4518

SEQ ID NO: 25514 - DNA, 735 bp, Escherichia coli
atgaaaatttccaaattttctgagttggtgaatcgtattttgtccaacaaccacagccatcgtcgcgatatggatgtaacaatcgttgttcattcgcctggcagcattggttcaacaccttcagttgaggttcagtcaattcacgctggttttgattgggattccgggaaagtgcttattttcccatcacagccactgaccacgctaacaccagaacagattactgatatcactgatagtgtgcgcaaaggtcagtcttggcacgcatatcaggaatacaagaagcatcaagagcagttggaaaaattgtcgattgaactggatgccgcaaaacagcgcattgcagagctggagggtaatcgcacggcgctggcagtggagaatgagctggctcgtaaggcagttcaggcattctgcgatgttgttggcgacaacaccgaggttatcgctgaggtggttgggcgagatggcgttctggttattttgaaggccatgaaggcaacaggaaatatgtcagccaccgacgctttcttggctgaagtccgggcgcagggggtggatgctgctatagaagctgcaaaaaatctggtggcccaagaatatgagtataaggatttcaaagcggcgcagagtgattgctgtatgcaccctggttcagacctggtagggaaggttgaaatgactgagtggttagttgactttgctgcccagcttcgcaaaggaggcaaccagtga

SEQ ID NO: 25515 - DNA, 1041 bp, Escherichia coli
atgatgaatattaagccgctgaaaattaggaacaaggtcatgaagcctcataaagcatcattaaaccctgacctaaccgcaaggaatgtacttacatacagtcattgggattttgtcgaactctggttaaagcgaaacgaaaaagatgaggctcttttttattgggagcaagcaaaagtatttaatcaggcggccaatggtttacccaaccaatcagccccacttttgcactattattcattcatgaatgcagtaaaggcgttactttcatctcgcaatataaacttcaaacagcatcatggtgttgctaggggtgaaaatgcagcccaaattgataacttatctgatataaaagtaaaaataaaaaatgagggtatacttccgtctttttcaaaatatattgacggcacctctcatgagggggtgtacaatataaaaaaccttttttctggattgccatatattcatcgtacatattgccttacttatgatgtaactgatgatatatttattccactgatcgatgctgagttcgttttgaatgagtcagacaatagcctgtttttcactgcgattttatccaaggattttcggttcgacacagttttcgacattctaccgccagcgttcgaattgtttgaaagagaaaagtacaaaataaaatcagtagaatcattacttgattttaatgaaaatcaatcgtccaacatgccgcaattaactgaatttcatcaaaaaataagaagaaatctttactatatcaatggcgcagagactctttggtatctcaaacgtaaaaacaatcaatctgagcatacttctgtttcaatatcgccattggttataaccctagcagctatgcatcgattaagtgagctatgtcggtatgacccacttaagctaagacagttactaaatgaaaaagaaaactggattattgctgaatttattcaacaatctccgtcacagtttatagatgcaatttcatctgaaattactggacaccaatttcttatcccaaacgtaaggtctgcttcttaa

SEQ ID NO: 25516 - DNA, 312 bp, Escherichia coli
atggttgagaaatctgatgtaataattgcagaatgtagttttccatcaacagggctaggaatagagttgcagattgctgaacagaagaacattcctgtaatcatctgttataaagattatgggataaataaaactaaaaccattgaatacgtgaatccagatgagactacccataatctacaagttggcgagggtttcatttctcatatggtattaggactaccaaacatccttgatgtcatattatgtaaagatattgataacacatgcaggaagctaaaaatactgttagatatgattaaccataattaa

SEQ ID NO: 25517 - DNA, 1356 bp, Escherichia coli
atgacacactgcaaagaaaatacttggtatgagcgtcaagggtacaataccacccgcccgaatgagataaggtcggagtatgaacgtgatctttcccggttaatccactcttccgcttttaggagattacaatcgaagacgcaggtgttgggattgggcgaaagcgatttctaccgtacgcggctaactcactctatggaagtagcgcaaattggcggcggtatcttgtctcagttgtctaagcgcgatacagatgaggggggtaaattcttacctgacccaagcctgatgcaggctatctgccttgctcatgatataggacatccccccttcggtcatggtggtgaggtcgcactaaactactgcatgagatcctatggcggctttgaaggtaacgggcagacactgcgtatactctccaaactggataagtacaccgaaaccaatgggctggatcccacccgtagacttattttaggcgtactgaaatatccagcaagctattcagaggtcgtcaatgagagggcttacagccagttacagccaagaagcaatgagtggttgtttaaatcatccgaatttaagcccccgaaatgttacctggactctgaggagaacactgttagattcgcactccaaccttttgatagtgatgatgttaagttattcaaaacggtaaaaactaccgcgttgaataagcacaaggaaacaatatataaagcactggatacaacgattatggacttggctgatgagatatcctactcactccatgatcttgaagacgcaatttctctgaagatgatcgacaaaaaaatgtgggaggagcacttcgaggacaaatcccatttatttgcagcttgccaatgcgactcgtttaatctaaaagccgatgatgtagctgaaaaactgttcggcgaaagttatctacgcaaggagtgcatagggacacttgttcatctgatgatcactagcgttaagcttgaagtgcagaactctgatttcaaaagtaaaattttacgctataaagtggcacttcctgccgcggtagaagagttacgtaaagccatttttgagctggttaggaacaaagttattcagcacgaaaacgtccaactattagagttcaaaggtcagaaactgattgtggaactattcaatgtactggcaaatgacccaatacgttttctcccgacagaaactcgaaagaaatataatcaagaggaagcaaaaggtgatgataaaaaaatgcgcgtcatttgcgactatgtttcaggcatgacagatgattacgctactcgactgtatgagaaaatatttgtaccgagaaaaggctctatttttgatagactctga

SEQ ID NO: 25518 - DNA, 369 bp, Escherichia coli
gtggacgctttgtctgaggttttcgttaataattggcttcctggtatctgcacattttttttaggtatcttttattctaatattgttgaaaaaaagaaacttaaacagaagttaaagaatgatattcttgagatattcattcctgtatttaaccccggaaatgaaatctccattgaaattgctgagaatgcttacaggaatatgaatggtacgtttcagttgtacaagagaatatatccaggtatgttcaacaaagaagcagagcgtgagctagaccgactactaaaagacggtttcctcataaatggagaggttaataagcattactttgaaccaactaatattgagagcctgattaaaagattataa

SEQ ID NO: 25519 - DNA, 249 bp, Escherichia coli; identical to SEQ ID NO: 14162

SEQ ID NO: 25520 - DNA, 348 bp, Escherichia coli
atgattaaaatcaataacgtacgtggtgctagcgttagcgtcaacggagaagacttcactggtcatcatattacgattaacaatggaaaagtgatcgttgatggtgtcgaaaaaaatagcaatcttgacggacagattaacgtaacaattaatggaagcgtggaaggcgttgagattgaaaatggatcagtgactgtaagcggtgatgcacattatgtgaaaactatgtctggtgatgtccattgttccaatgtattgggaaatgtaaacaccatgtctggagatgtaatctgcgaaactgttggtggaaacgccagcacaatgtctggaaatattatcaagaaataa

SEQ ID NO: 25521 - DNA, 417 bp, Escherichia coli
  misc_feature (361)..(370): n is a, c, g, or t
atgaaaacatggttaatggggttcagcgagttcctgttgcgctataaacttgtctggagtgaaacatggaaaatccggaagcaattagatactccggtacgtgaaaaggacgaaaatgaattcttacccgctcatctggaattaattgaaacgccggtatccagacggccgcgtctggttgcttattttattatggggtttctggttattgctgtcattttatctgttttaggtcaggtggaaattgttgccactgcaaatgggaaattaacactaagtgggcgtagcaaagaaattaaacctattgaaaactcaatagttaaagaaattatcgtaaaagaaggagagtcagtccggaaannnnnnnnnngtccggaaaggggatgtgttattaaagcttacagcactgggagctga

SEQ ID NO: 25522 - DNA, 180 bp, Escherichia coli
gtgcaacaagttaaccgctggttcaaagatcactacggagtgcccgtcagagtcattcgttgggaaccggaaacacaacgggttatctacctccgcgaaggctatgagcatgaatgcttcagtccgctcgaacagtttcgtcgtaaattcagggaaatagaggtcggtcatgagcactaa

SEQ ID NO: 25523 - DNA, 921 bp, Escherichia coli
gtggaagaacttattgggaccacgcgtgccgacaagttttttggcagtaaatttactgatatcttccatggcgcggatggtgatgaccatatagaaggaaatgatgggaatgaccgcttatatggtgataaaggtaatgatacgctgaggggcggaaacggggatgaccagctctatggcggtgatggcaatgataagttaattggggggacaggtaataattaccttaacggcggtgacggagatgatgagcttcaggttcaggggaattctcttgctaaaaatgtattatccggtggaaaaggtaatgacaagttgtacggcagtgagggagcagacctgcttgatggcggagaagggaatgatcttctgaaaggtggatatggtaatgatatttatcgttatctttcaggatatggccatcatattattgacgatgaaggggggaaagacgataaactcagtttagctgatatagatttccgggacgttgcctttaagcgagaagggaatgacctcattatgtataaagctgaaggtaatgttctttctattggccacaaaaatggtattacatttaaaaactggtttgaaaaagagtcagatgatctctctaatcatcagatagagcagatttttgataaagacggcagggtaatcacaccagattctcttaaaaaagcatttgaatatcagcagagtaataacaaggtaagttatgtgtatggacatgatgcatcaacttatgggagccaggacaatcttaatccattaattaatgaaatcagcaaaatcatttcagctgcaggtaacttcgatgttaaggaggaaagatctgccgcttctttattgcagttgtccggtaatgccagtgatttttcatatggacggaactcaataactttgacagcatcagcataa

SEQ ID NO: 25524 - DNA, 486 bp, Escherichia coli
  misc_feature (471)..(480): n is a, c, g, or t
ttgaaatttgttacgccattgttaactcccggtgaggaaattcgtgaaaggaggcagtccggaaaatatgaatatattaccgagttattagtcaagggtgttgataaatggacggtgaagggggttcaggacaaggggtctgtatatgattactctaacctgattcagcatgcatcagtcggtaataaccagtatcgggaaattcgtattgagtcacacctgggagacggggatgataaggtctttttatctgccggctcagccaatatctacgcaggtaaaggacatgatgttgtttattatgataaaacagacaccggttatctgaccattgatggcacaaaagcaaccgaagcgggtaattacacggtaacacgtgtacttggtggtgatgttaaggttttacaggaagttgtgaaggagcaggaggtttcagtcggaaaaagaactgaaaaaacgcaatatcggagnnnnnnnnnnagataa

SEQ ID NO: 25525 - DNA, 213 bp, Escherichia coli; identical to SEQ ID NO: 6096

SEQ ID NO: 25526 - DNA, 300 bp, Escherichia coli
gtgactgtatgtcttattgataaacgtcgacgtgggcaacaaataccatctgttgaaatgccgaatcacacatggttttgcgtacttgatatcgatggtatggatacgttgatcgacactcgtcattactgcgataccgcaacagctactcctgcaaaagcaaagaaaatggctgctctgatagaaaactggactccacctgatggttggtgcaatgggaatgatcgagattggcacgaaaaaatgaagggctatatctgcgattttttacgtaaatgcaacggattcagggtgatgtga

SEQ ID NO: 25527 - DNA, 246 bp, Escherichia coli
gtgcttgtggtgggaaaccgtcgtattcccggcgcgtttattcagcaactgaaaaatggccggtggcatgtcatgcagcgtgtggccgggaaaaaccgctaccccattgatgtggtgaaaatcccgatggcggtgccgctgaccacggcgtttaaacagaatattgagcggatacggcgtgagcgtcttccgaaagagctgggctatgcgctgcagcatcaactgaggatggtaataaagcgatga

SEQ ID NO: 25528 - DNA, 387 bp, Escherichia coli
gtgggctttgatgctaatggtgacaccattcaggcaaccaaagcggctgcggcagtccgtaaaatcacaattgaagcaaaccagaccgctgattttgaagacaatgacttcagcggcaaacgctccctgatggagtctgtcgaagcgaagaccaaagatattatgccagtggcatttgaatttaaatgcgttccgtttgaaggcctgaaagaacgtccgtttaaattacgcctcagcattatcactggcgatcgtcctgtactggttctgcgcattattcagctggaagcgatgcaggaagaaatggctaacgaatttcgtgatctgcttgttgagaaattcaaagacagcaaagtagaaacctttattggtactttcaccgcctga

SEQ ID NO: 25529 - DNA, 387 bp, Escherichia coli
gtgggctttgatgctaatggtgatgccattcaggcaacaaaagcggctgcggcagtccgtaaaatcacgattgaagcaaaccagaccgctgattttgaagacaatgacttcagcggcaaacgctccctgatggagtctgtcgaagcgaagaccaaagatattatgccagtggcatttgaatttaaatgcgttccgtttgaaggcctgaaagaacgtccgtttaaattacgcctcagcattatcactggcgatcgtcctgtactggttctgcgcattattcagctggaagcagtgcaggaagaaatggctaacgaatttcgtgatctgcttgttgagaaattcaaggacagcaaagtagaaacctttattggtacttttaccgcctga

SEQ ID NO: 25530 - DNA, 324 bp, Escherichia coli; identical to SEQ ID NO: 12928

SEQ ID NO: 25531 - DNA, 324 bp, Escherichia coli; identical to SEQ ID NO: 9185

SEQ ID NO: 25532 - DNA, 324 bp, Escherichia coli; identical to SEQ ID NO: 23068

SEQ ID NO: 25533 - DNA, 324 bp, Escherichia coli
atgtatcccaaactggcaaaggcctaccccaccaataaattaccggatttacgcggtgaatttatccgtggctgggatgatgggcgcgggattgatgcgggacgtaccctgctttcagggcaggatggtacaagtttttctcattacggaggtaatttcgacattgggtctggtcattcaatcaataactatgaccaaattgtttctaaccaaccaggattttcccgtttttcatttgcagggccttcacgaggtgatggggttaattatgtaaccattcgtcctcgtaacattgcgtttaattatatcgtaagggcggcatga

SEQ ID NO: 25534 - DNA, 147 bp, Escherichia coli; identical to SEQ ID NO: 8534

SEQ ID NO: 25535 - DNA, 387 bp, Escherichia coli; identical to SEQ ID NO: 25528

SEQ ID NO: 25536 - DNA, 336 bp, Escherichia coli
gtgatcacccgtacggtgaaggtcaccaatgtgggccgtccgtcaatggcagaagatcgcagtacggtgacggcggcaaccggtatgaccgtgacgcctgccagctcctcggtggtgaaagggcagagcaccacgctgaccgtggccttccagccggagggcgcaactgacaagagcttccgtgcggtgtcagcggataaaacaaaagccaccgtgtcggtcagtggtatgaccatcaccgtgaacggcgttgctgcaggcaaggtcaacattccggttgtatccggtaatggtgaacttgctgcggttgcagaaatcactgtcaccgacagttaa

SEQ ID NO: 25537 - DNA, 291 bp, Escherichia coli
atggcagaagatcgcagcacggtgacggcgacaaccggcatgacggtgacacccgccagtgcttccgtagtgaaagggcagagcactacgctgaccgtggcattccagccggagggcgcaaccgacaagagcttccgtgcggtgtctgcggataaaacaaaagccaccgtgtcggtcagcggtatgaccatcaccgtgaacggcgttgctgcaggcaaggtcaacattccggttgtatccggtaatggtgagtttgctgcggttgcagaaatcaccgtcaccgccagttaa

SEQ ID NO: 25538 - DNA, 714 bp, Escherichia coli
atgaactcttgcggtggttttctcagtcgctatggtagctacagtaccgcacagatcagtgccgcgatgaattatatgttcggtgccaatgatggcaacagcccggatgatatcgccaatacgaaactggtcgttatgttcggaaataacccggcagaaacgcggatgagcggcggtggtgtcacttactacgtcgagcaagcccgcgaacgttcaaacgcacgcatgatcgtcatcgatccacgttataacgacactgctgccgggcgtgaagatgaatggctgcccattcgccctggcaccgatggcgcactggcctgtgcgattgcctgggtactgattactgaaaacatggtcgatcagccatttctcgacaaatattgtgttggttacgatgaaaaaacgctgcccgccaacgcaccacgtaacgcgcattataaagcctatattctgggcgaagggcctgacggcatagctaaaacgccggaatgggcagcaaaaatcaccagcataccggcagaaaaaattatccagttggcacgagagatcggttcagcaaaacctgcttatatttgtcagggttgggggccacaacgacactccaacggcgaacaaacgtcccgcgctattgccatgctttccgttctcaccggtaacgtcggcataaacggcggcaactcaggtgtacgcgaaggtagctgggatctggggtag

SEQ ID NO: 25539 - DNA, 159 bp, Escherichia coli
atgggaaatggatggcatgaatggccactggttatctttaccgtattgggtcaatgcgtagtaggcgcgctgattgttagcggaattggctggttcgccgccaataatgacgcagaccgtcagcgtattgtccgtggcatgtttttcctctgctgttga

SEQ ID NO: 25540 - DNA, 294 bp, Escherichia coli
atgacagtactaattgaccaagaaactatgaattggttgattgacctgaacaggtcgggctttaatatctgtttcctgcattgctttgaagcttcaagttatatcgataaacgcaccatcaacgaaattaaacttggtgactatgttcacaagctggaagtaacagacccatacaataagcgttttatcactgaagagtgcaatcgacttgatttaagtcctgagcaattattgaagctgaatgtattcttgacctatcagaatgaattaaacccttacagtgaggtgatgtaa

SEQ ID NO: 25541 - DNA, 279 bp, Escherichia coli
atgaataaacacacattaacccgtatttcagaggaggcttttaacgagcttgccagaattaaacgagctactaacctgcctcatcagactgttatgcagcttgcaattgctaaagaggttactgagtcggatttactgaaatatccagtctctaaaggtcgtaaacacatccgaattactcaggacgctttagatactttgaaggcacttaacagctttaaaattgatattgcccgtctattgagtcttaagattcacaagctgtctctgggggtttga

SEQ ID NO: 25542 - DNA, 387 bp, Escherichia coli
atgtcaaccagaaagagcacgaagaacagcatcaagagttatctggctaactttgacagctacgagcagttaccaagcaagcttgaagatgtaattatcggattctgtagaagtgaaggtcatccgaaatacaataaaaaactattttatcttctaaagaatcttgatgaaattaactcagctaccgtgacaaattatcttcagcgacaagcaaccagacttagttatgaattaccaagcgataaatattgtgcattgcttgctgtaatgtgtgcaaagctaattggtattgttgaacatcatctcgccgttgggaatattgagccaatggaaaacgaacaagcagactttgaatttgacccgtatttagttacagaggaattttaa

SEQ ID NO: 25543 - DNA, 534 bp, Escherichia coli; identical to SEQ ID NO: 24417

SEQ ID NO: 25544 - DNA, 246 bp, Escherichia coli
atggcaaagaaccgtagccgtcgtctgcgtaaaaaaatgcacatcgacgaattccaggaattaggattttcggtggcatggcgattcccggaaggtacatcggaagaacagattgataaaaccgttgatgactttattaacgaggttatcgaaccgaacaaactggcctttgacggcagcggttatctggcctgggaaggtctgatctgcatgcaggaaatcggcaaatgcaccgaagagcattag

SEQ ID NO: 25545 - DNA, 213 bp, Escherichia coli
atgaatcagacatacattccggcgtgtttaagagaccttcctaagaagcgtcagaagccacgcaaacaggcgattaaagaagcgcaagtggaagttctgaataaggcaatcgcatcgataaaagacgatatgcgtgcgttcaaaacagaagagcagcgtcgcggtcattaccaggcgatcagcacactctcacagattcgtgatgagttgtag

SEQ ID NO: 25546 - DNA, 231 bp, Escherichia coli
atggcaatagatgcgacgttaaaagttaagcaaattaactctattaacccatacggcgacggatggaataggcatatggaaatcgatatcgacagtatcgagttagttgaatgtgttaagccggaagaaattatttctgagtacacggcggcatcacttcttgatgcaatggatgaatctgatgtggttcgctggcttgaaaacgaaggttacacagtaacaaacgattga

SEQ ID NO: 25547 - DNA, 249 bp, Escherichia coli
atgagcaataaaactggagggcgcgctttcccatgcgattctatcgtggagcgcgacgaagttggtcacttacatggtttcgaagtcagctctggcggcatgacgctgcgcgattacttcgcggcaaaggctatgcaagcaatgattagcaatccatcgattatcgataatgattctgatggagctgttaattatgcagcaagcgctgcatataagtttgcagacgcaatgctcaaagctcgcgaataa

SEQ ID NO: 25548 - DNA, 312 bp, Escherichia coli
atgaaattacgtgtctggcatatcccgcaagtacctatgaaaccgttcattgtagaagtggcaagtgttgaagagggtgttcgcctgatggatgcactggctgattatgacgcctttcagtatgacaacaacatcaagcctgactactgcaatgctaacggccttgagatgtgggatgagagtcttaccgatgaagatttatcagagatggggcttacggatcgctgggtggattggtacagcgaatgccaatgttacgacgacccacgtaaatatctcgaaagcctgaaagaagaaacatcagccgcctaa

SEQ ID NO: 25549 - DNA, 249 bp, Escherichia coli
gtgagcaattcagcacgactacagcttggtttttcaccgctatcaaaaacaatcgtgttggcaaaaatgcgtgacttaggggatggaacaaaacgtcgtgtcggcaatgatcgcggtcgcgatgtaaccaacgaggccgcacaactcgtttggcatctagtcatggctgaaggcggtgaaattaattgggagctggatgatggttctcgcatggtattgaaggcagaaaagcaggagcctccacagtga

SEQ ID NO: 25550 - DNA, 993 bp, Escherichia coli
atgctttacaaaggcgacaccctgtaccttgactggctggaagatggcattgccgaactggtatttgatgccccaggttcagttaataaactcgacactgcgaccgtcgccagcctcggcgaggccatcggcgtgctggaacagcaatcagatctaaaagggctgctgctacgttcgaacaaatcagcctttatcgtcggtgctgatatcaccgaatttttgtccctgttcctcgttcctgaagaacagttaagtcagtggctgcactttgccaatagcgtgtttaatcgcctggaagatctcccggtgccgaccattgctgccgtcaacggctatgcgctgggcggtggctgcgaatgcgtgctggcgaccgattatcgtctggcgacgccggatctgcgcatcggtctgccggaaaccaaactgggcatcatgccgggctttggcggttctgtacgtatgccacgtatgctgggcgctgacagtgcgctggaaatcattgccgccggtaaagatgtcggcgcggatcaggcgctgaaaatcggtctggtggatggtgtagtcaaagcagaaaaactggttgaaggggcgatggcgattttacgccaggccattaacggcgacctcgactggaaagcgaaacgtcagccgaagctggaaccgctaaaactgagcaagattgaagccaccatgagcttcaccatcgctaaagggatggtcgcacaaacggcggggaaacattatccggcccccatcaccgcagtaaaaaccattgaagcggcggcccgttttggtcgtgaagaagcattaaatctggaaaacaaaagctttgtcccgctggcgcacaccaacgaagcccgcgcactggtcggcattttccttaacgatcaatatgtaaaaggcaaagcgaagaaactcaccaaagacgttgaaaccccgaaacaggccgctgtgctgggcgcaggcattatgggtggcggcatcgcttactag

SEQ ID NO: 25551 - DNA, 150 bp, Escherichia coli
atgaccaccaggtccgcgatctgcgccgtgctgacatcggcgataaacgtcacgttccggctctggctgctgctgttaatgctggcagtgactgtactggtacccgccgtctggctggtgacactgatctccaccgtaccgtccggctga

SEQ ID NO: 25552 - DNA, 441 bp, Escherichia coli
atgaagagcggtgtgccagcgatatatattcaaagtattcttggctcgcgtaatgattacgcaggtgtcgaaaaactgggatataaccgtgcgattaaccgtaaaaaatatcacaatgaagagataacccgagaactgaacgatgaagatacattaaggcatgcggtatatcatcagttgtcgcgtttaattacacttcgttgcagtcataacgagtttcatccggataatgattttaccatcgatacggttaattcatccgtaatgcgtattcaaagaaacaacgcggatggtaattgtctgacaggattgtttaatgtcagtgaaaatattcagcatataaatattactgatctgcacggtcgggatctgattagtgaagttgatatattgggtaatgaaataacgctgcgcccctggcaggttatgtggattaaataa

SEQ ID NO: 25553 - DNA, 1377 bp, Escherichia coli
gtggtttatgtcaacggtactaataaaaaacccgaagcaacaacagccaggaagatcaaatcttatctggaatatggtactcaggtttatccgttgatcaatgtgcgcggttattctgaggcctatgagtttgatgaggatcgtatcgatctcgaacaacagggtagggccggtgacgctttatgtcagactgttggggttctcgcttccgtattagggccggatgtactgctgaatgggaactgtgtgcagggattgctggcgttttcggcgttggcttatgacgacaatacacaaagcacgaccattcatccttcacgtgatcttaatctggcggtatatcaacgcggtttttttgatgtatttccttctcgtcaggaaatgctgacatttagccagattgatgccgtcgctcagacaattaaaaataaggtcgctacttttcgtgaggatattatcgaaagcaataaaggtaaagtccgtgaaacgctggatcaatacttacaggtacttgaagagcaattgagcagccatcactgctttttgcaaaagataatgccggaatttgaaaaatgtcgggttgcattcagaaatgcgactggtgaatttgaacgccgtatcgcgaacagtcgtcgtaatcgctggaataccctgtttaatgacctgagcaatgccagtgacgatattgtcgaagataattttggtgataacagtgctatttccacacggatccgtcgtgagtatgaaaagcgccgtgaaattatggaacaagtgatgctggaggataccgaagagagtgtaaaggtattacagcagcaaacacttcaggcggtaaatcgtttgctgaaagatattcacaatgtggaacttcaacaccccctcagttttgctcacagccgcagtattgagtttagtggtgagatgataccccgttacgatctgggggtaactgatttcagttcaatggctttaaaagttggcagttatgccatgtcaggcagtgcgattggcagcgtctttcccgttattggcacgctcgttggctctgcgcttggcgcgctggtcggcataataatgaccgttgcaggtatttttaccagtaaagcgtcaaaaatacgtaaagcacaaggaaaagtacgcgacaggctggaggaggtgcgggataaatctctcgacagcgttgtcgatgaaacccgcctcctggttgctgctattgaaaaagaacttgagagtggtctgctgcaaaaagtcaacgatatgcaggtggctctgcaacagcctgttgccattttcgaaacacaaatcagtcgaatcacaacattaaaaaaacaactggaggacatgccttatggaacaattcaaacagttcagtattga

SEQ ID NO: 25554 - DNA, 174 bp, Escherichia coli
atgagtgatacatggtcttctgtagaggagaatccggagcgggtattcagggatactcacccggaaggtaaccctgcgagtgatattctgtacttactggagcaaaactggtcgcgttttgtcagttcttttattctgacagagagattaaaaaacagggcaagggcgtgttga

SEQ ID NO: 25555 - DNA, 576 bp, Escherichia coli
atgatatctgtcgctttgccattatcgttgactgtcagcgtaccgccttcattaatcgttgtttttactgcctcaccgttagccgaaactgtttgtattccgccgtcgttaatcgttgtctcattcgccaccccctcgacgatttgttcgccgccggtgagcgtcgtgcctgtcgcagtggcttttgttttgacgatctcccgcccgcccgcattgacctgtgttttggcggaagtggtgtctgactccacggttaacacgccgccatctgccagcaggatattgttcgccgcatcctgctcaatgctgaacgcgacgccatcagcgcgtgtccctgtgacccgcgtcgctctggtggttgcaaccaacgcgccctggctactttgctgtatccccgttgcgctgcctttctcccgcacatcgagagtgccgccttcattaagcaccgagttttcagccagaccgccctcattaactacctgtgaaccgccattaataatggaaccttccgctgtcccgtttaccataatttgttgtaggccagagacgatatcggtattgatcgccttaccataa

SEQ ID NO: 25556 - DNA, 444 bp, Escherichia coli; identical to SEQ ID NO: 24413

SEQ ID NO: 25557 - DNA, 516 bp, Escherichia coli
atgtactcaataaaaaaagtaaccatgctcttggggtgcctcgccctcacctgctcgatcgcatttcaggcgagtgcaactgaaaaattcaaggtcattacaacatttaccatcatcgcagatatggccaaaaacgtggctggagatgctgcagaagtctcatccataaccaagcccggtgcagaaattcatgagtatcagcctacccctggcgatattaaacgtgcgcaggaggcacaactgattctcgccaatggtatgaatctggaattgtggttccaacgcttttaccagcatcttaatggggttccagaagtaattgtctcttcgggtgtgacgccagtagggatcactgaaggcccctatgagggcaaacctaacccccatgcctggatgtcgccagataatgctctgatttacgtcgataatattcgtgatgcgttgataaaatacgatccggcaaatgcacaaacctaccaacgtaatgccggtgatgctgccaacttactgatttag

SEQ ID NO: 25558 - DNA, 222 bp, Escherichia coli
atgctggaaaaatctctggcaacacttttcgcgttgttaattttagcaacgctgataaaccgttttctgatatggcggttaccggagagaaaagggggtgaggttacattacgtattcgtacctggtggggcatcgtcatttgtttttcaatggtgatttcaggtccacgcgggatgacgttgacgttttttgcgctgataagttttctggcattgaaataa

SEQ ID NO: 25559 - DNA, 504 bp, Escherichia coli
atgactgaattaaccaaaaagcaattaatcgaagaagctaaattaaaaatagcgattgagaaatgccaccccaattcagggatggcacgggtagagggcgaattattcaaaattgctctggcatcgctggaagcagagccagttggtgatttttatgaatacaaaccggatgactggtatcagcgttcggctggagataaagcgccaaaatggacgccaccctatgccgtttttccagcgcccgtagtgccggaagaaatggatttgcttacatgccatctcgatggtgtaactgaaacatatgctgagggatggaacgcttgccgcgctgccctgcttcagggcaaaggggagcccgggaaacaagttcgcgaattgacaatgctggttaaacaattggttagtcaactgaagaaaccgaaaccgggctgcaaattgccggataaagtgatggactacctggagcgaagcggacttataagcgtggaggatgttttacgatga

SEQ ID NO: 25560 - DNA, 489 bp, Escherichia coli
atggcagcaccaaagggcaaccgattttgggaggcccgcagtagtcatgggcgaaatcctaaattcgaatcgcctgaggcgctgtgggctgcttgttgtgaatacttcgagtgggtggaagctaacccgctatgggagatgaaggcgttctcgtatcagggtgaagtgatacaagagcctatcgccaagatgcgagcgatgacactcgccgggctgtgcttatttctcgatatttctgatgaaacatggcgaagattccgcgcggatgaaggtttttgtggagtcactacgcgagcggagaaagtcatctacgaccagaaattctctggcgcagccgctgaccttctcaacgctaacatcatcgcccgtgatttgggcctcaaagagcagtcgcaagttgaagacgtgacacctgataagggagatcgcgataagcgacgctctcgtatcaaggagctattcaaccgtggaactggacgcgattcttga

SEQ ID NO: 25561 - DNA, 501 bp, Escherichia coli
gtgagccatccatctatagaagatataaggaaaaatttcacatacgatgctgaaaccggaattttgtacgcggctaatcgcacaaggaggacagaccttaacggcaagcccgttgggtgccagcatggaaacggataccttgatgtaaggcttggtaaaaaactgtactacgtgcacagaatttgttttgcgcactactatggttactggcccgaagcagtagatcacataaacggaaaccgtgctgataaccgcatctgtaatcttagagatgccaataagcagttgaacggactaaaccgtggcatggattgcgacaattcaactggatacaaaggagtttcctatcgcaaggacacaaataactacatgtggcaatttgtggtagaaggcaagaaatacacaaaaagcggattcgctacagcattagatgcatacaagcataaggtagcatttattaacgctctgaattccgctgcctctgaatttctcaagccgtaa

SEQ ID NO: 25562 - DNA, 321 bp, Escherichia coli
atgtacatatcgctctctaccatttttttcatctgcttagctatttggcttttaagaatatggcaggattgctctgtcagccatgctgctgcggtgagaaataaaaacgccctcataaaagaagctgaaaacgttgtcttatcaatggatcacctttcatggaccgagatgactacagggcaacaagaggtttatgagtgtgcgattgagcggttaaggctgcttaaatcgtacaaaaagaaccacgctcccgactcattcccattcctgaaagaatggccgagatggtatgacccgaaaaaagcaaccatcaaccgctaa

SEQ ID NO: 25563 - DNA, 501 bp, Escherichia coli
atgtttgaccaacatgttcacaataaatcacctagtatttatggagatgctcaaagccaacatgaaaaccttgactttgacaaatcgttatggagttcaatagaaaacgctaaatattcagagtattacagaccaactggcagaaatccgtcaaaggaaccacaaatatttagcctacaagaagagcaacacaaagaagaaggtcgtgataccgtgaaacgtttagagctatacggggttgcagttgctatcattggttctatcgttgccgccacatggacgattcgaggcactatagatgaaaaagttgaatcatcacgacaagagctaacaggaaacatccaaaccagtaaggcagagataatggctactatccaaaacaaccaatcagtattacagtcaaggattgataacactgatcaaaaattagactcaacaaaccaatctctttataaggtattggctatattagagtctcaaaaagacaaacgttctcaatag

SEQ ID NO: 25564 - DNA, 348 bp, Escherichia coli
atgagcagtaaggagcaatacttaaaagttacttttgagtcttttagtaattacctgacttcattcaaaaaaacttatgtatgcccaatatgcagcaatacaaactggactcttttagcaccggagcatcttaaaaaagatgatggtgttgaagttataggaccatccataccaggtaaaagcttgcctaataatcctgttaatcaagatacttatagcaacgatagtcttaacatggtagccatgcaatgcaccacttgcggtttcttccacttttttagtttaaacaaagttagtgaaaatatctcttctggaaaattcgtaaagggtgatggagataatgtttga

SEQ ID NO: 25565 - DNA, 585 bp, Escherichia coli
atgacatcctttcaattatctttgatttctcgtgaaattgacggcgaaataatacatttacgtgccaaagatggttacataaacgccacatcaatgtgtagaactgcgggcaaactgctctctgattacactagactcaaaactactcaagagttttttgacgaattatcacgcgatatgggaattcccatatcggagttaattcaatcatttaaaggtggaagacctgaaaaccaagggacatgggtgcatcctgacatcgctattaatctagcgcagtggctatcgcccaaatttgcagtccaggtttcaagatgggttcgtgaatggatgtcaggggaaagaactacagcagaaatgcctgtacatttaaaacggtacatggttaatcgtagtagaattcctcacacgcacttttctattcttaatgaactgacattcaacttggttgcacctcttgaacaagcagggtacacactcccagaaaaaatggttcctgacatttcacaaggaagagtattttcacaatggttaagagataatagaaacgtagaacccaaaacattccctacctatgaccggtga

SEQ ID NO: 25566 - DNA, 405 bp, Escherichia coli
atgacaaggttgtggcgcaaagaaaactttcgaatgtggtcactgttttttgaatactgcctgacgacaatatgggcctttacctgcctggtcggtttcattatttacgcagtccaacttgcaggtgtaccgttaaatatcgaattgacacatatcgcagcgacacatgctgccggaatattattgtgtacgttatgtttactgcaatttattgtcagtctggtgattgagaatcgctatgagcacaatctggcttcatcgcttttctggattatttggttcccggttattttctggatgctaagcctggcaacgacgttggtatcatttacacgagtcatgttgatgcctaaaaaacaacgcgctcgttgggtaagtcccgatcgtggaattctgagaggttaa

SEQ ID NO: 25567 - DNA, 414 bp, Escherichia coli
atgaacaatctaattattacaacccgacaatcgccagtacgtttactggttgattatgttgccacaaccatcttgtggacattatttgctttgttcatattcttattcgccattgatctgctgacgggttattactggcaaagcgaggccagaagccgacttcagttctattttttgctggcagtggcgaatgctgtcgtgttaatcgtctgggcgttgtacaataagctgcgttttcaaaaacagcagcatcatgcagcataccaatatacgccgcaagaatatgcagagagcttagcaatacctgatgagctttatcagcaactacaaaaaagccacaggatgagcgtacacttcaccagccagggacaaataaaaatggtggtttcagaaaaaatgttagtccggacataa

SEQ ID NO: 25568 - DNA, 234 bp, Escherichia coli
gtggataacgaattgtttcactatactattaaagaagcatataccccatataatatacacacttataaaacagaagaagttgtaaatcagatgaatataaaaattaaaaatatgacattagatgaaataaacaatacttactgtaataacgattattacaatgaggcgataagagaggaaccgatagactttctggacagatcgttttcctccagctcatggccttttcagtga

SEQ ID NO: 25569 - DNA, 786 bp, Escherichia coli
gtgatctccttccatgaaaatacgcaggcttggcacgaacttaaacagagcagtaaagtggctttaccggaagccatggtgaagggatatatcacccgcctggagaaccagcctgtgcagggggaagtatcgtctccggtaacgctactggcgcaggcactcaggcttgaagctccggatgtgcaggaacatcagaccctgccgcactcccgtctggtgtatgttgtttctgaaacaaaaacagagcccacactcttccttcaaaaatccccgctcacgtttctgaaaacgtttgttacaggtgtctgtacggcattgctggcggtctgcgtggccattccgggatggcagtttctgacacagccatcaccggcggagcagcaactcagggcgctgctgacaccctcaccggatgtgctttcagcagaccagatgatgcagctcagcagaacactgttaaatcatgcgtcagagtggataaccctttccggtcagcagataacgcgactgacagaattccccccggcatacaacctgcaacgcagtgtgcaattgctgcagcaactgatggtacttttccccgacaatcctcgtgttcaggaaatggtggataactggcagaagagtgcaaggagtcgtgcgctcccggaagaggcgatgactggctggaacgaaggcatgacccgcttacagctgttggctgagcgcctgaaccgtccggatgaacagcggggaaaagacatgacggtcagtgagctgaaaacggaggtgtctggcatcatgtag

SEQ ID NO: 25570 - DNA, 1008 bp, Escherichia coli
atgaaattcccttcaatatttaataaaataaatccacaatccatacagcaacatccagaaaaaaatgaacttaactggatgcgcgaattaaataaatggaaagcagaacgcatacttacaggtgaaatccatcgtccggaatgccgaaacgaagccgctaaaaggataaattgtgcttttttgtcgaaacagaatgatattgatttatcagggcttaatttaactacccaaccaccagggctgcaaaacttcacctctatcaatcttgatgagaaccaactcaaacattttgatgcaaccacctacgatagactcatcaaccttagtctgaatagtaatgctcttgagtcaataaattttcctcaaggtagaaatgtaagcattacacatatatctatgaataataattctctcagaaatattgatatagataggctttcatcaattacttattttagtgcggcacataatcaactagagtttgtgcaattagaatgttgcgaaaggctgcagtacctgaatctcagccacaatcaattaactgatattgtggcaggaaataaagatgaactcttacttctggatctatcccataataaactaacaagtttacataataccttatttcccaacttgaatacgttacttatcaacaacaacttgctttctgaaattaaaatattctttagcaacttctgcaatattcagacattaaacgctgcgaacaatcagttggaaaaaataaaccttcatttcctgacttatctttcatctatcaaaagtttaaggctggacaataataaaataacccgcattgacactaagaatacgtccgatattggaactttattccccataataaaacagagcaaaaacttaaattttttaaatgtttctgggaagaacaattgccctactatgcagctcatgttatttaatttattttccccagcacttaagcttaatactggcctggcaattctttcgcctggtggctttgttgaataa

SEQ ID NO: 25571 - DNA, 510 bp, Escherichia coli
atgaaaaaatggatgttagcaatctgcctaatgtttataaatgggatctgcgaagccgccgattgctttgatcttgcaggtcgggattacaaaatagacccggatttactgagagcgatatcatggaaagaatcccgttaccgggttaatgccatcggtattaatccggtaacgggatatggcagcggactgatgcagatagattcccagcattttaacgaactggcccgctatggaattaagccggaacatctgacaacagatccctgcatgaacatttataccggtgcttattatctggcaatagcctttaaaaaatggggcgtctcctgggaggccgttggtgcatacaatgccggattcaggaagaccgaacgccagaaccagagacgtcttgcctacgcatcagaggtttaccggatttatacctggataaagagcagtaaaggcatccgggttccgaccacgaagaaatcactttcccaaattaacagtgtgcagaacaattaa

SEQ ID NO: 25572 - DNA, 222 bp, Escherichia coli
atgagaagcgacctcaacgagccgggaacgcgcaacttctcgcacttgttgccacgtggcaaaatattctcgatcgaccatctcatcgccaaattttacttgttcatccgctggcgtatcgacccaactgccgacgggggcccatacagcaggccactggaaggcctgaagaattgggaagacgcgggtataaaaactctggtagccgtcatcaaaagttag

SEQ ID NO: 25573 - DNA, 675 bp, Escherichia coli
atgaaacaggattttcgctgtggctgctggctgatggataaaccggaaacagcaatgaaagccatcacccgcaatctcgatcgcgaaatctggcgtgacctgatgcaacgttccgggatgctgtcattaatggatgcgcaggcccgtgatacatggtaccggtcactggaatacgataattttccggaaatcagtgaagcgaacattctgagcacatttgaacaactgcaccagaacaaagatgaagtgtttgagcgtggggtgatcaatgttttcaggggactgagctggaattacgaaaacaattcaccctgtaaatttggcagtaaaattatcgtcaacaacctggtgaggtgggaccggtgggggtttcatcttatcaccgggcaacaggcagatcgacttgccgacctggaaagaatgctgtatctgttcagcggcaaaccgatccccgacaaccgggaaaacatcaccattcatctggatgaccacatccagtctgttcagggtaaagaggactatgaagatgagatgttcagcatcagatactttaagaagggctccgcgcacatcacgttcaggaaaccagaactggttgacaggcttaatgatattattgccagacactactcggaagccctggcaagcacagtgaacaaaagccgcaaggcataa

SEQ ID NO: 25574 - DNA, 558 bp, Escherichia coli
atgattataattccaatggcggggatgagttcgcgttttttcaaggctggatattccaaaccaaaatatatgcttgaattgaatggtgagtttctattcgatctatgtttgaaaagtttcaaattatattttgagactgaacattttgtctttatccttagggatgttttcaatacgaagtcttttgtattacaaagaatagcatctttagggattaatagctacaccttgattactcttgataaagaaactcgggggcaagcagaaacagtatatttggctatatcaaaattatttaatatagaacaaccaatcactatttttaacattgatacaattaggcctaattttatatttactaagttcgaaggggaaaatgaatgttatattgaagtatttcgaggagatggggataactggtcttttgttatgccatcaaatgatgtaaaaaatgaggtcattgctactagcgaaaaaaaacaaatttctaacttatgctgcacaggattatatcatttttctacaattaaaaattttatttcagcatatgaacattag

SEQ ID NO: 25575 - DNA, 366 bp, Escherichia coli; identical to SEQ ID NO: 7050

SEQ ID NO: 25576 - DNA, 1023 bp, Escherichia coli
atgttaaagcttgaagaattattagagtatgctgagcaacttaaggatgatgatgcggcgaaaatatcgttgtatttcattactagacatcttaaagcgggtatgagtagaaccgcaagagttgttgataaattcgattttaaaatcataaaagctccaatcgctccagatattgctaaattttttaagtatactttatcaaaccagattatttctcatgcttcgaaagatgatattgtgatgaaaaagtatactgttattgatgatgatattgataataagatttatgcctatgctatgaataacgcgatatcgttttcaaaagttattaataacgatataaagaatgataaaccagttgtacttacctctcttgctgaggttcagaatgatttgtgggcctattgtattaaagtccaaaagggggctgacgtcacttattctttccgaaaaatcagcagggggaaagtcacaacaaatgaaccacaaaatatgactcagcgcgtattcgctttgtttgataaaacagataaagagttaagatcatttgatggcagcgcagtcaattttgatgacaaaatcgattgtatttatataaaagatcaattttatgtatttcataagaaaagttttgaggctattgtaggcttggaggttgagtttacagaagctgcacaaaaaacattaaatacaattaaagaacttgatcttattgaaggtttagatgttattgaacaagctattcttcataagccatcactgagaaaaattctcactcatatcgctgagaaaggtaaccatacggctctggaaaagaatgatgttcaagctatgaatgatgtgctaaaaatgtttcagaacgaagagtttaagaccaatgagcatggtaaattagtcatagaagatgagaggcaaggaagaaactttctcaaactgttaaatgattattataaacaaggcatgactacaaaaaaatactatggtacggatagcggaaatgtgattaaccctattaaggcgtaa

SEQ ID NO: 25577 - DNA, 228 bp, Escherichia coli
atgaaaataaacaagttaacactgaatgaacgtaagaatgacattctttcttatttcggagaaatcgatgccccctgcagaacctcagaagttgctgaacatttaggggtaagtgcttatcaggccagacattacctgcagtgtctggagaaggaagggaaaattaaacgctcaccggtacgacggggagccagtacgctgtgggaaatcagcagtattccgccataa

SEQ ID NO: 25578 - DNA, 330 bp, Escherichia coli
atgaaaacattgacttttaataacggcactgtttctgttggcgatgtgtttgtatcttcctggggatatgagcaaacgaacgttaatttctaccaggttatttctgttcatggcaaaaaaaccgtaactgttcaggagattcgcgcttcagttcatcggactcattcaatgagcggatataagaccccattacttaatgatttctgtggtgagccattaaaacggcgagtgcgtgattattacagtacgccagcaattgaaattgaggaattcgaaacagcatataaaggatcaccggaagaaaaacacgagttcacatcatactactaa

SEQ ID NO: 25579 - DNA, 261 bp, Escherichia coli; identical to SEQ ID NO: 9826

SEQ ID NO: 25580 - DNA, 873 bp, Escherichia coli
gtgattagttcgattacagttacatataacccagatattgagtgcctcaggcagcaacttttatcagtacgcaagcaggttgatttatgtgtaattgttgataatggctcaaacaatattatcgagattaaaaatttaaatcatgagtttgattttcatcttattcaatttaatgagaattatggtctcgcatatgcacaaaataaaggcatagaatatgctatgtctttgggtacacaatatttattgctgttagatcaagatagtatcttgaaagagaaattttctgagaatatgaaggacatatatacgaagtataatgttggaattttaggtccttcattttatgatcctcaaaataacaaagtttattttgggacttgttataaaggaccttttattagtcgtaaaccagtcggtgaggttaccgacgtgacttttgtcattgcatcgggctcctttttttcatcagatgtttttaaaaaaattggaggaatgaaatctgaactttttgtagattatattgatgttgaatggtctcttagagcaaaaaatatgggatacagagtgtgtatgactaatagggctttaatggctcatacaattggtgattcgagaattacaattcttggtcggactatatcggtgcatagtcccttaaggcgttattatttggttagaaatagtttctatatgttaaggttgcgctatgtgcctatgggatataaattccgcgaaattttctttaattttttacgttcaataatttctttggcaataagtgataataaggttaatgtattaacgaaaataggtcaaggaatatatgatggtattcgtgggagatatggtaattataaaaacaatagataa

SEQ ID NO: 25581 - DNA, 225 bp, Escherichia coli
gtgctgtttacgggcctcttccgcccgctgcgcctgcgtggtcagcaccagacggaactcccgcccggcaccgtccgtcacgccggtgatttccccggccaggtcaccggcggcctcacgccggtacgtcagcgtctgcccgaagcggtccgccagcccggtaagcacccggtacggcggcagcggcgctggcagtacgtcctcagtgcccggcacccgctctga

SEQ ID NO: 25582 - DNA, 576 bp, Escherichia coli
atggatttcgacacaatcatggaaaaggcttacgaagaatacttcgaaggccttgccgaaggcgaagaagctctcagcttcagtgagtttaaacaggcactcagaataagaatgtgctctcacaatgacgcggagcacaaatatgagaagcaaaatcagaccgcagaaaattttgttctggaacccggagaaacgcttttcaaaattcccgttacgtgccccatttgcggttttacatcagaagaacttgacgactcctgtaacaatcaggaaacaaccaagtatgtcgaagatgataccgagtgcgcacgaagaacgattatatccacgagtccaaactccaggaccaataaatctcactttgagagggtgattaatccactcccccaaaccaataaaaaagatgccggaggacaaaaaacccaatggaacaacgggatatctgtcaaaaaaagacgttccattaaagacaaacaacgcagcgccaacaactgtaagcgctttataccagtaatcaattttcatgttcttaagcggatttattggtggttgcgacattgcttaatgaatccttaa

SEQ ID NO: 25583 - DNA, 156 bp, Escherichia coli
atgaaaatacccactactacggatattccgcagaggtatagctggtgtctggccggaatttgttattcatctcttgccattttaccctcctttttaagctatgcggaaagttatttcaacccggcatttttattagagaatggcacatccgggtga

SEQ ID NO: 25584 - DNA, 1620 bp, Escherichia coli
gtggataacggggcgcactttgacggcgaccagagcggcacggtgaatggtgtcacgccgccagcggtgcagcacctgaccgccgaagtcaccgcagacagcggggaatatcaggtgctggcgcgctgggacacgccgaaggtggtgaagggcgtgagcttcctgctccgtctgaccgtaacagcggatgacggcagtgagcggctggtcagcacggcccggacgacggaaaccacataccgcttcacgcaactggcgctggggaactacagactgacagtccgggcggtaaatgcgtgggggcagcagggcgatccggcgtcggtatcgttccggattgccgcaccggcagcaccgtcgcggattgagctgacgccgggctattttcagataaccgccacgccgcatcttgccgtttatgacccgacggtacagtttgagttctggttctcggaaaagcggattaccgatatcaggcaggttgaaaccacagcccgctatcttggcacggcgctgtactggatagccgccagtatcaatatcaaaccgggccatgattattacttttatatccgcagtgtgaacaccgttggcaaatcggcattcgtggaggctgtcggtcaggcgagcgatgatgcggaaggttacctagattttttcaaaggccagataaccgaatcccatctcggcaaggagctgctggaaaaagtcgagctgacggaggataacgccagcagactggaggagttttcgaaagagtggcaggacgctaacgataagtggaatgccatgtggggcgtcaaaattgagcagaccaaagacggcaaacattatgtcgcgggtattggcctcagcatggaggacacggaagaaggcaagctgagccagtttctggttgccgctaaccgtatcgcgtttattgacccggcaaacgggaatgaaacgccgatgtttgtggcgcagggcaatcagatatttatgaacgacgtgttcctgaagcgcctgacggccccgaccattaccagtggtggaaatccaccggcattttccctgacatcagacggaaagctgaccgctaaaaatgcggatatcagtggcagagtgaatgcgaacgccgggacgctcaacaatgtcacggtaaatgaaaactgtacgattaagggcatgctggaggcgactcaggtcagaggtgacttcgttaaagctgtatccaaatcattcccgaaacaggctggtacgtggggtaacacggaaacaccaaacgggacggttacagtcaccatcagcgatgatcataactttgaccgtcaaatcattattccgcccattatctttaacggaatagcgtatagcgatccgggaagtggtaataacccgggaggtacaagatacacgggttatggttttgaagttcgcaaaaacggtgtattaatcgcatccagagaaactaaaggggccattcccggtagctacagtgcggttattgatatgccgagtggcaggggaagcgtcactctggagtttaaggttttccataaaggcaatcagtgggcaggtaatatcaccgactgtacggtgattgtgaccaaaaaagccgcttccggcatcagtattcgttga

SEQ ID NO: 25585 - DNA, 297 bp, Escherichia coli
atgtgtatccaccttaacttaatgatttttaccaaaatcattaggggattcatcagtacgtggtatatatataaagataaagaacttaataagcgtaaattagctcttgaattattacgtgattggataagacaatttaatccagcaagttataatgatttaataaatggattaagtgaagactttaaaaaacgtacagttatgcttgtcgatcagggtagtgactccaacttactgatagtgttttatgttcagataatgcccgatgaccttgtcatgcagctccaccgattttga

SEQ ID NO: 25586 - DNA, 1131 bp, Escherichia coli; identical to SEQ ID NO: 9867

SEQ ID NO: 25587 - DNA, 522 bp, Escherichia coli
atgaaacattcatttgaagtaaaaattgccgctgtaaatcattacctggccggtcatgcaggcatcatttctacggcaaaactctttcaactttctcacaccagcctctcacactggattaatctttttcttcttcacggtcctcaggcactggattgcagacacaagcgtagctattctcctgaagataaactttgcgtggttctttatgctctcgggcattctgagtctctaccccgggtagctgcccggtttaacattcccagccacaacacggttaaaaactggataaaaggctaccgcaaatctggtaatgaggcctttatcaggcgcaggaaggagaaaagcatgacccgttctgatgatacccatgaaaacgaggcaaacatgacgccggaagagatgaagaatgagctgcgttatcttcgcgcagaaaatgcatatctgaaagccatgcaggagcatctcctggaaaaaaagcgccaggagctggagaaaaaacgaaagtcatccggagcctga

SEQ ID NO: 25588 - DNA, 549 bp, Escherichia coli
gtgcaaataaccgaagccttactttcagcgccgggggaaatccggcgttttattcagcaggcggtggatcactggccgcgtctgctggccgtccacttcacactccattcggcagaaggaaacatcaacggacaacagattcatgcattctgtacttccttttaccgacaggtgcacgagcgtattactgaacgtaatcacacggccagtccagcaccaccggtggtattacgctggttgcgggaacaacatggaggagcaacaatgcgatgcctgttgctgctcagccagacgagcatttgccatccacgggtcagtgccacggttgatgaagaatgttcgcaacgggtggatttattgcaacagacatggcgggtgataagtgctgacggacaatgctgggtggaaaggtgttttcaggttgcccgaggtgatacatccggccagtatattgcgttaaaaacagttgcattgtctctggggttaccggttgtgaccggtattacccatcgcccggtacagcgctgtacattgattacagctcagtga

SEQ ID NO: 25589 - DNA, 324 bp, Escherichia coli
atgaattctgatgaagaagcttgcaccagctttcttgattgctttgagtgtgagcaccattcattggtctctgatgtaacagatatatggctaatgatgtcattcaaggaaacattacaagagcttgaagtaacacctgcaattaactcaatgccacctaagaaaatgaatacactattaaacaccattgaaactattctaggaggatttagagataaatctccagaaaattataagcaagcctatgagctacaaaaacaaacatcacaccccttgtattcgaatatctacagtctaaatgatctgcatgaggtgttttcatga

SEQ ID NO: 25590 - DNA, 924 bp, Escherichia coli
gtggcaaagcaaaagttcaaaatcaccaactggcccacctacaataaagccctcatcaaccgtggctccataactttctggctggatgatgaagctattcaggcctggtatgagtcagcaacaccttcttcacgaggcagacctcagcgctattctgaccttgccatcacgactgtgctggtcattaaacgcgtgttcaggttgaccctgcgggctgcacagggttttattgattccatttttacactgatgaatgttccgttgcgctgcccggattacaccagtgtcagcaagcgcgcaaagtcggttaatgtcagtttcaaaacgttcacccggggtgaaatcgcgcatctggtgattgattccaccgggctgaaggtcttcggtgaaggcgagtggaaagtcaaaaagcatggccaggaacgccgccgtatctggcgtaagctgcatctcgccgttgacagtaaaacacatgaaatcatctgcgctgacctgtcgctgaacaatgtgacggactcagaagccttcccgggtcttatccggcagactcacagaaaaatcagggcagcatcggcagacggcgcttacgacacccggctctgtcacgatgaactgcggcgtaagaaaatcagcgcgcttatcccaccccgaaaaggtgcgggttactggcccggtgaatatgcagaccgtaaccgtgcagtggctaatcagcgaatgaccgggagtaatgcgcggtggaaatggacaacagattacaaccgtcgctcgatagcggaaacggcgatgtaccgggtaaaacagctgttcgggggttcactgacgctgcgtgactacgatggtcaggttgcggaggctatggccctggtacgagcgctgaacaaaatgacgaaagcaggtatgcctgaaagcgtgcgtattacctga

SEQ ID NO: 25591 - DNA, 375 bp, Escherichia coli
gtggccttcacctccacccgtgcggcacgggaatggctgattctgaacatggcgggactggagcgtgaagagttccgggtgctgtatctgaacaaccagaatcagctgattgccggtgaaaccctcttcaccggcaccatcaaccgcacggaagtccatccccgggaagtgattaaacgcgccctgtatcacaatgccgctgccgtggtgctggcgcacaatcacccgtccggtgaagtcacacccagtaaggcagaccggcttatcaccgaacgtctggtacaggcactgggcctggtggatatccgggtgccggaccatctgatagtcggtggcaaccaggttttctcctttgccgaacatggtctgctttaa

SEQ ID NO: 25592 - DNA, 477 bp, Escherichia coli
atgcaacagctttcctttctgcccggagagatgacacccggtgagcgcagcctcattcaacgggccctgaaaaccctggaccgccatcttcatgaacccggcgtggccttcacctccacccgtgcggcacgagaatggctgattctgaacatggcgggactggagcgtgaagagttccgggtgctgtatctgaacaaccagaatcagctgattgccggtgaaaccctcttcaccggcaccatcaaccgtacggaagtccatccccgggaagtgattaaacgcgccctgtaccacaatgccgctgccgtggtgctggcgcacaatcacccgtccggtgaagtcacacccagcaaggcagaccgccttatcacggaacgtctggtacaggcactgggcctggtggatatccgggtgccggaccatctgatagtcggtggcagccaggttttctcctttgccgaatatggtctgctttaa

SEQ ID NO: 25593 - DNA, 141 bp, Escherichia coli; identical to SEQ ID NO: 6191

SEQ ID NO: 25594 - DNA, 216 bp, Escherichia coli; identical to SEQ ID NO: 5123

SEQ ID NO: 25595 - DNA, 216 bp, Escherichia coli; identical to SEQ ID NO: 5123

SEQ ID NO: 25596 - DNA, 969 bp, Escherichia coli
atggataattttcttgctctgacattaacgggtaaaaaaccggttatcaccgagcgagaaatcaacggcgttcgctggcgctggctgggcgatggcgtgctggaactgacgccattaacgccaccgcaaggcgcactggtgatttcagcgggaatacacggtaatgagacggcacctgtggaaatgctggatgcgttgcttggcgcgatatctcacggcgagatcccgttacgttggcggttgctggtgatcctcgggaatcctcctgcgctgaagcaagggaaacgttattgccatagcgatatgaaccgaatgtttggcggtcgttggcagctatttgctgaaagcggggaaacctgtcgggcgcgcgaactggaacagtgcctggaagatttttatgaccagggcaaagaatctgtgcgctggcaccttgatctacataccgcaattcgtggctccttgcatccgcagttcggtgtattaccgcaacgcgacattccctgggacgagaaatttctgacgtggctgggtgcggcggggctggaggcactggtgttccatcaggagcctggtggtacgtttacccatttcagcgccagacattttggcgcgctggcctgtacgctggaacttggcaaagcgttgccctttgggcaaaacgatcttcgccagtttgcagtcactgccagcgcaattgctgcgctgctatctggtgagagtgtcggtatcgtgagaacaccgccgctccgttatcgggtggtttcgcaaattactcgccactcgccgtccttcgaaatgcatatggcaaatgacacgctgaattttatgccgtttgagaaaggaacattgctggcgcaagacggggaggaacgttttaccgtaacccatgatgtagagtatgtgttattccctaatccgttggtagcgttgggattacgtgcgggattaatgctcgaaaaaataagctaa

SEQ ID NO: 25597 - DNA, 486 bp, Escherichia coli
atgcgtaaattaactgcactgtttgttgcctctaccctggctcttggcgcggctaacctggcccatgccgcagacaccactacctcagcaccggctgacgcgaagccgatgatgcaccacaaaggcaagttcggtccgcatcaggacatgatgttcaaagacctgaacctgaccgacgcgcagaaacagcagatccgcgaaatcatgaaaggccagcgtgaccagatgaaacgtccgccgctggaagaacgccgcgcaatgcatgacatcattgccagcgataccttcgataaagcaaaagctgaagcgcagatcgcaaaaatggaagaacagcgcaaagctaacatgctggcgcacatggaaacccagaacaagatttacaacatcctgacgccggaacagaaaaagcaatttaatgctaattttgagaagcgtctgacagaacgtccagcggcaaaaggtaaaatgcctgcaactgctgaataa

SEQ ID NO: 25598 - DNA, 132 bp, Escherichia coli; identical to SEQ ID NO: 6261

SEQ ID NO: 25599 - DNA, 333 bp, Escherichia coli
atgaaagagaagactgcagctgagcgctatgccgcagctatcaatgccgcgatggcgattgtaaacctgcgtgaagagattaaagatctccttgcaattatccataacaacctgacatgtacagagttgcttggcggtcagtacaacggtgaggcggtgaaggaggcatttaaaaatgccgaggtaggaataattccagcaaactatgtcaaggctgaatgtgtgctcctaaaggcacgagtgagtctgcatgaagatcctggtaatctcggtcgaactgcaatgcgttacgtgatagacgagtcgaatgccaaacacaatctaccgaaataa

SEQ ID NO: 25600 - DNA, 915 bp, Escherichia coli; identical to SEQ ID NO: 6688

SEQ ID NO: 25601 - DNA, 216 bp, Escherichia coli
  misc_feature (147)..(156): n is a, c, g, or t
gtgatcaataaattactgttagcttacctgataggtctggttgtgacatcgaccttaatatttatcttctcggaagaaaaagtaacatatcggttgtttgctgcagcaattacagggttgacttctgtccttgaagcaaaacattcnnnnnnnnnnacctggccgcttagcctcattccatccatcataagtctcatgattcgtaaatccgactaa

SEQ ID NO: 25602 - DNA, 2757 bp, Escherichia coli
atgaaacaggcatgtgtggaagctattgcgcagacacttggtcgccagccaaaggctgatgagctgaaaaatattgaagatcgtatcaaagaagctgtgcagcatgtgcacagaaagaatgccaaagaaggcaaaagtggtattcctgatgctcaaacatacatggatgcagcagaactggtacgccagcgtgtggttcatgatgtgtacaagaaaagacagcgtgttgcccagaatgcgatcgccatcagtaaaattactgacactctcgatgctaacatcccgcctgatcagcagacacctgttaatttgcagcagtttatttttgctggccgacgatcgagagacaaagctgatatctccgttacttctgctgaagaacttgcaattggggcatatcaggactggtcccgtcagctcagtgctgaacttctaaaagcaggtgatgacgtccgcaaattcttcgagcagagcagggcgcttggagagcagcggtttcggagtgtattcgacaggcaggcggcaaagtctgcacaactccagatcctgaaagaaatatatggcgaagataccgggaatcccctggcgaagaaaattgcacagatttggaaggatgtaacaggccgtgttcgtcatgagatgaacgacaacggctttgacataggcctgcgagaagactggcatacgccatatgtggatgatgctgaccttattcgcaatgccgggcgcgaagaatggctggcatcgttaccagtggcagagcaagctacagcacgtctttcaggtcgccagccaccgattgagtttgcccgccagaaatgggttgatgacgcttacaacacgcaggatcgcagcaattacgttaatcctgacggcagcattatgaatgacgtcgagtaccgtcaggcactggaagcgatctttgaaacgaaggccactgatggggcaaacaaaattgagcctggtacatttatgggagccggaggaataaagagccgtggttctcagcacagggtgatggcgttcaaggatgcgcagtcacacttcgcctatatggaacgatacactcagcagccgctggtgggggtgatgatgtcgcacctgcaatcatcatccagggatttgggcgtcgttaaagcctttggtccggacgccgaaagaaacttttccctggtactggatcgcatctataagcgcgcagtaacaggcgggaaacgcaaaaaagaaatggaggatgaggccaaattagttgcccgtatgttcaactcaatggctggcctaaatggtgtcgcttcatcgagtgtgttctcttcagcagttggtggtctgcgtaacctgatgaccagcgccatgcttggcaccagcgtactgacagcaaccagcgaccaggcaattatgcgggcaaatgcgcaggcgctgggctttacccgtggtggaatgcggctttccgttaacactatcaaaaacctgtttagtggagatgccaaaaaggcgaatgctgaactcggtctgctggtggattcacatgctgctgtggtttcgaaaatgggcgggtttgacttgtctcgcggcataactggctggttcgcagagaagacactgaagtggtccgggctgatcgctatggaccgcgcaaacaaagcgtcgtttggtctcctgatgtacaaaaacattggcgagctgaccagaaaatttaagacgctggacgatatgaaaggaaccgataaaaccattctggctaacaagggatggagcaatgaggactgggccatcatggcagcggcagaactcaggccgatgactactgccgggcatatggggatgacgccagacgcgatttacgctgtgcccgataacgtaatagccgacattatggcagaccgtattacccggattcgtgccgggagtgaaaaggcactggcagcccttggagatctccctccagaacgcctgaaacggatgaaagaagcattcgacgctgaggctgagcagaccatcacgcgcatgattcgtaatgcacgcgctgaagcagcccagaaattgctgggaattacgcacggtgagatgaccaatgctgtgaccaccgctacgggtattgatacatatgcccgtgatgatgctggcgagttaatgaagagcttcatgctcttcaaaacaaccccatttgctggatttcggcaacttgttaacagaacacgggatttggacaccgttccggccattaaatttctggcctcatatatcgggggaacaactcttgctggtatgtttgcgatccagatgaacagtttgttaaatggtaatgatccgctggatatgacaaaaccaaccacatgggttcaggctctactgaaaggtggttcgttcggtatctacggtgattttattttccaggaccatacgcaatatggctccggcatcggtgccactatgggtggccctgtgttgagctttgcagagcagttaatgaagcttgtagtaaccaactcgcagaaagcgcttaaaggtgaagaaacatcattcggtgccgatgcactgaaaacagcccgcatgctcaccccattcgcaaatctgtggtatgcgaaagcgataaccaatcacctgatattgcaacaacttcaggagatggcaaaccctggttacaatgatcgagtaagggaccgcgcgcaacgggagttcgacataacgagttggtgggaaccgggtgctattgcgccacgtagagcaccggattttggaaaggcggtgggggaatga

SEQ ID NO: 25603 - DNA, 2061 bp, Escherichia coli
atgtctgatgttttttctttggctccagaaggtcaggcatggattgacgacaaaacagttgccaacccagcaaggccagaagactacgatccgactcccttccagggttcaggtactgcacttttgagcggcgtggcggagggggctctcggtctcgcgcagtctgccgtcggattcagcaagcgcctgattagcgatccggcatttaccgcagacgtggcaccgactgttaatatttttcgggagatgttccctgatgctgacaaaacactgaatgatacatacgacacgatcggaaaacagttacaggatgcccgcagctatgtgaagcctgatgcaggcagtcagggaatggcggctgaggtattaaatgagcttggtaaatttgttcctgcaatcggaacaactatgtttggcggtcccctcatcggcgctgctacagctttcagttctacgtatgagcagtcctatcaggattttaaagggaagggagtagacgaggctacggcgcgtaacctggcaacgcagcaaagccttttcaatgctgtgggtatggccttacccgctgccgtcggcaccacactggcaacgcgcattgcctcaggtgtggcaatcaacaccggattcggtggactgaaccgttactctgtcggcgcaacactggaggaaaaaggctacacggagatggcaaaacagtaccgggtatttgacggtcaggcgatgttagtcgatgccgttttaggcggggtctttggtggcgttcatcacctgactacccataataaccatgatggtacagagtcgaacatttctgcagaagaaataaaatcaacttttggtgaacattatcagcaatctcctgatggtaacattgagtcaatggttcgtgatttatctgattcaggagtaatagaacttattaatgaaccagcaataaaaaatagtgatggagaaatacttctgaataaaggtcatgtgacagtagcttccggaaaagaaccaataataagaataaatattaatggattaaaagaccatgaagaactgttagaaacccttcatcacgaggcgcttcatcttgagcagcgccattaccctgactggaaggccagaaagctagctaatgctgtacttaaatctgcaaacaagcattctgactatcctgaatttgcatatgggatgtcacaatattatgaatataagaaaaggggtgagtaccctgaaacatatcctgagtggttgtacgctgaagaagttgccgcacatgcagtaaatccatctctaaagacaagcgtttcatcatgggaaaaaattatttcaggttttaaagcctatatattcagatacagtggtattcaggttggaaccgttacacctgagcagttacggttactcgtaagtatgcgtcttcgcaatatgaaactggaagccgcagtagaaaaagtttttggtatccgggcgagggaaagaataaaaccaagcgatattgatgcagcccacattttgaatgaggggcttcattacgatattgaatcgtcaccagtgcttcataccagcaatgagagcatcaacagccatgttgacgccatggatgaagcatacaggcaacttaatgatggtcagcctgtaaatgttggggggatggcgcgagggcttgatggtccattgcgatcagatatatctgatacttaccaagagcaataccatgaaatacaaaaggtttttgaagaaaatggtgtcagatacgaaacatcatcagagccaattagtgaatcgcctgtccctcgtgctgaaagtgctttctcatcggctggtgaacacagaggggacatcagcgttgatccagatacagggcaggttctctcatccaacagctatgaccttatggctgccagggacatggctgttgccaatcctgagctgactatagctcacccggaaaccggaaacccgacaaaactttctgatctcctggctgagttggatgaacagattaagacagtccagaacgaatcgaaggtttattctgtagcagcagcgtgcttcttgaggaacccataa

SEQ ID NO: 25604 - DNA, 2532 bp, Escherichia coli
atgccagtcgtaccaacagtatccggacgtcaggttgagagccgtggaattcagtcagcaggcttgcagacgttttctcagccaggtattagtgatgcttttgttcgtgcaggagcagaggcaattgatgttctgggtcaggcaaaacagcgtgccaatattgccttggttcaggaggcatcccttaaactcagtcagacaggcagtgatctgctgaataatcctgaaacaggattgcttaacctgaaagggaaaaatgctattggaaaaggccatgagtatacgcagcagtttgatgctcaggtcgaacaactggctatgtcgctgccggatgaacaggcccgtaatgctttcatgcagcaggcacagcagcagcgcattcagttcactacgcaggccgggcggtacgagatcgggcaaataaatgcctacgaagaaggccagtttcaggctacgctgctgaacaatggtaaaaatgccgcagcattgtatggcgacaacgccgcatacgtattggctaataagcaaactttccagcaaattgaggagtacggcattgcgcatggctggagcgacgagcagattcgggccaggaaaatagagtttaaagaagcaacagcaaaagcaactgctcaaaatgctattggagcaaactatcttcaggtaagacagcaaaacggcgagttaagcgatactgctgctggagctcgccgtgctgtagcagatagtggatcttccgatcgtacccgcggtatacgcaacaataaccccggcaatcttgaatacagcaaaactaatccgtgggttgggcagactggtgatgatggtcgctttgctaaattcgaaacacctgaacacggtattcgtgcattagggcggaacctgatgtcgtatcagcggcagggtattgataccgtcagcgagataattaatcgctgggcaccgcctactgataaaaatgacactatgtcgtatatcaaagcagtgtgcgaacaacttggcgtttctgctgatgaacctctcgatgcatctaatcctgataccctgaaggcgctttgtgcagccattatccatcatgagaacggtagccagccatacagtgatcagcagttaactgcaggtgttagtgctgcgctggggctttctcagctaccgacaaaaaataaacgttataccggtgtagcctggttcgatgctttaagtgaatcggatcaggccagcgtgttgcgacagactgatgcactagccagacaacagcaggctgaatataaaacgatgctcgacagccaggttcgcgatgcgacagctgcgtatatgcgtggcgttgaatttcctaacccaccaggtgaggctgattttattgcagcttatggcgtcagagaaggaaacctgcgatataccgagttcagaaatacgcagatcgccggacagtatataggctctttccgcaacatgccgacaaacagcattaccgcatatgttgagcaattgcgcccggatactggtgaaacaggggaggggtatgcgtctcgtgcggagttattcgaccgggtatcggcggcagccacgaaggtaataacccagaggcagaataatccgtttagtgcagcggtggaaatcggagcctataagccgatcaccagcaacaaccctgacgacatcactgccgaggtggctaaccgtttctcgtcgcaggaaagcttacgcgcgttgggaattaatgccccaatcctcaacagtgaagaggcggctgcgctggcacagcaggtgcgcggcactcaaaacgttgaccagacaattaaactgttgcagagcatgggggaaaagctacctgcgccagcaatacggcaggtggcatctgtaattgctccgaacagtgcagcaacagcctattctgcgctgctgctgggcacgccggataatcagtacgataacaccaggccgtcgatcccatatagtcagttcatcgggtataagccgacgatgaacaagtacgacgttgcaaaggttattctttccggtgaccaactactgaatccgacgaaggctatgaagaatgcgggcataactccggtacagttgccgagcgaagataaaatgaagcgcgctttcgacgaacaggttggtaatgcatttgcccgtaacccagagacgcgccagatcagttatagccttttcaaagccgcttacgcaggaatcgcttatcagtctggtaatgcgtctatgacgagcacagatgcggttaactccgatgtggcggagaaagctgcgcagtacgcaacaggcggtgtatacaagagatttaatggtggtgatgttgtaatgcctttcggcatggatgaatccactttcaaagatcgctataccacatcagcgaaacaagcactgaaagatgccggacttaacgtaaatgcagtgtcaaacttcacaccagttaatatcggcaataaccggtatcggctggtaaatggtagcggacgctgggcaacagatcccagaaccaatgaagctattgtcgtgagggttgaataa

SEQ ID NO: 25605 - DNA, 207 bp, Escherichia coli
gtgaattgtattaacgacctgaacacaggcgatgtcagaggtggttccgttcatctggatgcacagaccgtgatgcgcattaagcagtacagaatcgaccatgtgaacaatcaccctgatcagccattaccaggcgtggcgcagattgtcagacatgccgtaaacgcctggcttaatcagaatggttttgcatcggggggtgagtaa

SEQ ID NO: 25606 - DNA, 417 bp, Escherichia coli
atggaaatagtaagaaatgatcacgcacatggtcgccgtgcaggtgatcacattgtggatgaaattgcggaaaaacaaagagttgacattgttgtcagtgtcacagtcgagagcgcgaagcgccaaaataagcgtataaatgatcattcagatgtacatggtgtgatcactcgtttacgccagacttttgtaactcgtgaagagatgattgaagctattgaccagcatacagcatgtatcagcgtcagggatataccagagatcattgctaactacttcatgatcaccagacgcctttaccggagaaaagacaagagcacggttaaccgtctcctgatgtctgatattcgcgaatacctgcaagaaaggggctatgtgaatccaccagaacagcactacggaagagtcggaggctaa

SEQ ID NO: 25607 - DNA, 498 bp, Escherichia coli
atgacaaagctgaccataaacagaaaaccgaagggcatttacggcacgccgcagaaaacagcacaggcggcgcagcagcagaataaaaccacatcggcgcataaagtgatgccagataaccagaacacacagcagaagctcacaggagcaacaccgcggcggcgtatgaccaaacagcagcgtaaaaaccgcagacgcgttaaccgtcttattgagctatggcctgaattattcagcccggaatcccctaagccgcttaaggtggggatatttgacgacctgatacaggatattgccgcgagaggtatttcactcggacagggaacactacgcgcaacgctggcgcgttatgtgcagactccgcgctattaccgcgccctggtagctggtggcgcgcgttacgacctgaaaggccagccgtgcggcgaggtaacaccactacaacagacgcacgcaggaaaactactggaggagatgaatggaaatagtaagaaatga

SEQ ID NO: 25608 - DNA, 2127 bp, Escherichia coli
atgaaacgcgcaccgaatttaaagcaccagccgaaagacaaaatgacggaggtgattatctttgcgggtagtgatgcctgggcacatgcgaaagagtggagcgaatgggccggaaagcatattgcggcagatgatacacatccagttattcttggaccggaacaactggcgagtctggcagacacgcaaatcatcgacaaaggacgctattacgtgcgcatttatcgtgctggtgaaatatcagagcagcaccttacacagatagcgacactgcttgcagtggcgggtgtgaaggaggcgcgttgctaccgcagctttgttgatcagcagccggaggactggactccgcgcatggctggactgaagtatgatgcggaacgcggtaacagtctggtgatcaaccttccggcgaagacaaatttcaccggaaattatgatgacgaattaaagcctcgtgttgaaagtcgcgtcgatggtgttttctgggtaacgcccaaagtggacaagcagtcaggcgaaattatccggcctgagacgtggttatgttctccgcttgaactactgggaacaggaacaatcggcaaagagcattaccgcgtgatgcgctggaaaaaaccagcaaaccatgaggtcattacaatggcggtcccgtgcggaggcattggtgaccgtgacggctggcggttgctgaaagaccacggccttaacgtgacgaccaacggcaaatacagggctatcctggctgactggatgcagttaagcggaaaccatgaggaatggcagttaagcacaacaacggggtggcattttggtgcgtacatcatgccggatggttcgatcatcggtgaatcagagaaacccatcctgtttaccggaaaaactgccgctgttaatggctattccgtggcgggaacagcggagggctggcgcgataccgtggcacggctggctggtggtaatccgtccatgatgctgggtgtggcggtatcgctatctgcaccattaatcgggctggtgggtgctgacggcttcggggttcatctttttgagcaatcatcagcaggtaaaaccaccacacagaacattgcatcaagtttatggggagagccggacgcgcaacggctgacctggtacggaacggcgttaggtatcgccaacgaggccgaagcacataatgacgggctgttacccctggatgaaataggccaggccggaaacgcacgggaggtgtccacgtcagcctatacgctgtttaacggttccgggaaattacagggggcgaaggacggcggcaacagggagataaaacactggcgcacggtggcaatcagcaccggagaaatggacgttgaaacattcctcaaaacggaagggataaaaattaaagcggggcagcttgtccgcctgcttaacgtgccgatggaaaaagccacgcagtttcacgaatacagcaccggaaaggcgcatgcagacgcgttaaaggatgcctggacagcaaatcacggggcagcgggtcgtgagtgggttaaatggctggcaggccaccagcaggaggcaaaggacgcggtaagggcatgtcgcgagcggtggcgcaacctgataccggagagctacggcgagcaggttcaccgtgtgggggaaagattcgccatactggaggccgcgcttgtactttccggtcatgttacaggctgggatgttcaggcgtgccgtgatgcagttcagcataactttaatgcctgggtgaaggaattcggcacgggcaacagggaatttaaacagatggttgaacaggctgaggcgtttttgtcgtcgttcgggttcagtcgataccttccctatccaaacagcgacgagcgtgatttaccgattaaagaccttgccggatacagaaaggggagtatcagaaacgaagatgacgagttccgtttttacacgttcccgcatgtgtttgagggtgagatagcacagggatttaatccgtctcactttgcccgcgcgttgagtgctgccggaatgctggaagcgggaggcgaccgccgttacaagaaaaaggcgctcggcaggattggcgggaagcagcatattttttacgtgctgatgttccagcctgaagcagaagattaa

SEQ ID NO: 25609 - DNA, 303 bp, Escherichia coli
atgaagaagattaaatttactggcttaaatgccagcggacagactcacccgaaaatcaggatcggggatattttccgggataaatatggtgacagcgtggttattaattccgtgtatgaacggcacattacataccgccgcgcagggtacgactatgactgtgtgatgcccgttcatcagttccggcgtgatttttcactggtatgtgcagcaccacgcagtaagcccaccagtaaagagaaagcacgggcaaatattcaggtaataaagaacatgattaacgcattcaggggcaagaaatga

SEQ ID NO: 25610 - DNA, 258 bp, Escherichia coli
atgcgtgatgaacgatttattcttctggagcaaaaattcagcgaagcgccaaaaaatgaaattgatgctcttttgcatatcgcgaatatgctaaaagtagcaacgttccttatagtttcgaatctggagcatgaaacggcgttagatatactgaacagtgctgtcgattattctgaatatattgccgaggataaatacaggcaattaccagatttgttagcccataaatataaagaagaacctcacaccgggaaataa

SEQ ID NO: 25611 - DNA, 558 bp, Escherichia coli
atgtgtaacgatccgaacgttacagaaagaaaaagcgctacgttgctggataactggcaaaacaaaggcgaccgggagaggtcgccagtgggaacaaaggaaatcaaacgcatcgccaacaatgccagatttgcagctggtgggcaatttgatcagtgtgctggcttgctggttggctgtcagcctttgggctcgataccgcgctgttgtaattctttgcggagtattcgtttaatccaagtagctaatgaggtgtcgccgtctgccttggctgcctcctcaagttgcgctctaaattcttctggtagtcgcatttggtatggtggcgatcgtttctctaatggtgttgacatggtaattacccttgattactatagttacatggtaattaccattgtacttaccattacacaaaaaacaacgccccgcactgtaggagcagtaacggggcgtctaaccaaaccgttaacaggagtaacgattatggctggaacacagcatacccaaactcaccctgactattccagtatctccacattggaggcgtgtcatggctga

SEQ ID NO: 25612 - DNA, 558 bp, Escherichia coli
atgcgtaaacctgtcttttatgccggtcgcactgaaatctctgtcattaaattcgatgacattcaggtgcgcatagtgagtatcaacggcgagccgtggtttgttggcgctgatgtgtgtgccgcgctggaaatcagcaatgttactgatgctgtttcagttctggataacgacgaggtaatgaccctagctttaaccgaggggcattccggtaagcgtggtggtgccagaagctggaatgttgtctctgaatcaggtttctacaaactgatcgtccgcagccgtaaagcttccacaccaggcacatttgcgcaccgtttcagtaactgggtattccgcgaggtgattccttcaatccgcaaaacggggggttatggtgttccgtttgccatgctgaatgatttcagtaaacgccaggctgcatatcaacaggaagccagcaaacgcggttacaggttacagcaatgcaaagaggcaaaagatgcactggaacgagaagagcgggcgctatggcgtaaatatcagcctgattttctggagggtgaaaacaatgtgtaa

SEQ ID NO: 25613 - DNA, 825 bp, Escherichia coli
atgaaactgcgaaaaacgcccgtacaggggcagggctttgttcggcctgaaaaccagaatctgcaaaatttcggcgaaattatcccggttatttacggcgttattggcgggcgtgaagccgctgttgttagcgcaaaagcgttacacaaagcgttgggcgtgggaaaagacttctctacatggatcactgatcgcatctctgaatatgacttcaccattgggtacgattactcagtccataaaacaatttccccaaatttggggaaaagcccgaatggcgaggcttacagcaagattaagcactctggcagacccggtaaagactatctgttaagtgtcggaatggcgaaagaactggcaatgatcgaacgcaccgaacagggccgcgccgttcgtcagtacttcatcaaatgcgaggaggagctacacaaggtagcgcctgtacgttccgcagcgttacgccgggaactgaaagcccgtatcaccgtagccagctactttaagccaatgtgtgccgcgctggaggcgtaccgggctgaactgggtaaaaacacgctccagcaccactacactacggaagctaatatgctggcgcgtatcgtgctgggtggcatgactgcaaaacagtgggcgcaggcgaacggcatcacaggtgaaccacgcgaccacatgagcgtgttgcagcttgagcacctttcttaccttgagcagagcaatatcacgctgattgagttaggcctggactaccaccagcggaaagctgaattaattcgcctttcgcaacgctggttagcccgccgcatggaggtgagcagccatgcgtaa

SEQ ID NO: 25614 - DNA, 207 bp, Escherichia coli
atgacagaacaatctaccattcctactactggctacattcgccgataccgtttgccagaactgctgggagtctctatgccaacaatcgatcgctgggtgaaaaatggcacgttaccacggcctataaaacttaccagtaatgttaccgcgtttgatgcggtagagattaatcgctggctggaagaacgccgaaacacatcagcctga

SEQ ID NO: 25615 - DNA, 957 bp, Escherichia coli
atgtctgacactacaaaaataccattttcattttgccgtataaaaagggctgctgattttttaggtgttagtactgatgatttactaagcctcgctgtatctgagaaaataactctatgcgttaggttagatggattaaaatcagtcctatggattgaaggtaatgcaactgagcttagcgattggtatttatctttaagtactaacaatagcgttctagcatctgctcgcaatatatcaaaatatacatcattcgctattgatcgagtttcttacgatcaagaaaatgatgacacaattttccatccatggttctatcagtctcaactagctgagggaagttcttctagcgaaaaatcacaaagccatcaaggaagagcctttggcttgtgggttccccaactgccagtaataaattcagtattgaattatgggaaatcttctcttttatgggggtctttggatctttatcgtactgatgagaccacacccgctctttgtttaatttctttattgctagattatgatgatatttacgatagcaaagaagatgacgaaaattatgaagaagtatattctgacgtcgaaataacggaaaatgatttatggataacctcagaccaagtaagagaattactaaaatacaatggtgattacagtgacctcccaaataacactcgacgaggggtttccgccaatcctcagttaatgcaggaaataaaaaaggttaatcacattgcagaacatcacgcaacgaatagagaaaagctatttaaatctgcaatatacttactatcaaaataccctgatgagtgccggggtgaacgcaaagaaataagccctgaaaagtggcgtgattgtattctcactcacaaagatgagataccaccgctaaccattactaacgaaaacgtaatcctaaaacacttaagatccgcagctaacggcaaggtgtag

SEQ ID NO: 25616 - DNA, 1455 bp, Escherichia coli; identical to SEQ ID NO: 6496

SEQ ID NO: 25617 - DNA, 222 bp, Escherichia coli; identical to SEQ ID NO: 17691

SEQ ID NO: 25618 - DNA, 219 bp, Escherichia coli
atgattgatttacagcagcgttacgaggttattaaatctgtttgtgaaagtttgaagctgcaaccaaacaagccaaagctacgaattaagagtaagcgccaaattatcacctcgcataaaccaaaggttagaaggattccttcatggtgtattgaccgtgttcctgctgatgctcaattaattggtgagtctggttcttacacttatatccttcattaa

SEQ ID NO: 25619 - DNA, 147 bp, Escherichia coli; identical to SEQ ID NO: 23041

SEQ ID NO: 25620 - DNA, 2505 bp, Escherichia coli
atgtcacaaactatcgacctgaccctggacggcctgtcctgcggtcactgcgttaaacgcgtgaaagaaagtctcgaacagcgcccggatgttgagcaggcggatgtgtctgtcactgaagcgcacgttaccgggactgccagtgcagaacagctgatcgaaaccatcaaacaagcgggttatgacgcatctgtaagccacccaaaggctaaaccgctggcggagtcatcaatcccgtcggaagcactgacagcggtttctgaggcgcttccggcagcgaccgccgatgacgatgacagccagcagttgctgctgagcggcatgagctgcgccagctgtgtcacccgcgtacaaaatgcgctgcaaagcgtaccgggcgtcactcaggcacgggtaaacctggcggagcgtactgcgctggtgatgggcagtgcctccccacaagatttagtgcaggcggtggaaaaagcgggctacggcgcggaagcgattgaagatgacgctaaacgccgcgagcgccagcaagaaaccgccgtcgctacgatgaagcgcttccgctggcaggcgattgtcgcactggcggtgggtatcccggtgatggtctgggggatgatcggcgataacatgatggtcaccgccgacaaccgcagcctgtggttggttatcggcctgataaccctggcggtaatggttttcgccggcgggcatttttaccgcagcgcatggaaaagcctgctgaacggtgcagcgacgatggatacgctggtggcgctgggtactggcgtggcgtggctctattcgatgagcgtcaacctgtggccgcagtggttcccgatggaagcgcgacatctttattacgaagccagcgcgatgattatcggtctgatcaatctcggccatatgctggaagcgcgcgcgcgtcagcgttcttctaaggcgctggagaaattactcgatttaaccccaccgacggcgcgcctggtcaccgacgaaggtgaaaaaaacgtgccgctggcagatgttcagccaggtatgttactgcgcctgacgaccggcgaccgtgtgccggtagatggtgagattactcaaggcgaagcgtggctggatgaagcgatgctgacgggcgaacctatcccgcagcaaaaaggcgaaggcgatagcgtccatgccgggacagtggtacaggacggcagtgtgctgtttcgtgccagtgcggtcggcagccatactacgctgtcacggatcattcgcatggtgcgccaggcccagagcagcaagcctgaaatcggccaactggcggataaaatctcagccgtatttgtgccggtagtagtggttattgcgcttgtcagtgcggcaatctggtatttctttggtccggcaccgcagattgtctataccctggtgattgccaccacggtgctgattattgcctgtccgtgtgcgctggggctggcgacgccgatgtcgattatttccggcgtcgggcgggcggctgagtttggcgtgctggtacgggacgccgacgcgctgcaacgcgccagtacgctcgataccgtagtgttcgataaaaccgggacgctgaccgaaggtaaaccgcaggttgtcgcagtgaaaacgtttgctgatgttgatgaagcgcaggcattgcgtctggcggcggcactggagcaaggttccagccatccgctggcacgagcgatcctcgataaagcaggcgatatgcagctgtcgcaggtcaacggtttccgcacattgcgcgggctgggcgtgagcggtgaagctgaaggtcatgcgttattgctgggcaatcaggcgctgttaaatgaccagcaagttgatactaaagcgattgaggcagatatttcagctcaggcatcgcaaggggcaacgcctgtgctgctggcggttgacgggaaagcagtagccctgctggctgtacgcgatccattgcgtagtgatagcgtggcggcgctgcaacgcctgcataaagcgggatatcgtctggtgatgttgaccggggataacccaaccaccgccaatgcgatcgccaaagaagccgggattgatgaggtgatcgccggggtgctgccggacggtaaagccgaagcgattaaacgcctgcaaagtgaaggacgtcaggtggcaatggtgggcgacggcattaacgacgcgccagcgctggcccaggcggatgtcggcattgcgatgggtggcggcagtgatgttgccattgaaaccgcggcgattaccctgatgcgccatagcctgatgggcgttgcggatgcgctcgcgatttcccgcgcaacgctgcgcaatatgaagcagaacctgctcggtgcgtttatctacaacagcattggtattccggtcgccgccggtattttgtggccgttcaccggtacgctgcttaacccggtggttgccggagcggcaatggcgctctcgtcgattaccgtagtgagtaacgccaaccggttgctgaggtttaaaccgaaagagtga

SEQ ID NO: 25621 - DNA, 234 bp, Escherichia coli; identical to SEQ ID NO: 7244

SEQ ID NO: 25622 - DNA, 303 bp, Escherichia coli; identical to SEQ ID NO: 7218

SEQ ID NO: 25623 - DNA, 375 bp, Escherichia coli
atggtacgtctggaaaatttcatcaatgatgcctgtgaggggattaaaaaatacaattttacccgcggctgcctggttggaaatatgatgcaggagagtccggggcttccccaatccttcattaaagtactacagaatattcttgagagctggcaggcacttgttgcggcctgcctgtccgacgcgttatcttcaggcgaaataagttcaaatatgaataatacacaactggcggctattttctggagtggctgggaaggtgcggtaatgcgttccaaactatattgttctactgagccagtgtacgacttctggagctatttcaaaacctcggtacgctatcagtcttctcaggaagcaacaactggccagtaa

SEQ ID NO: 25624 - DNA, 864 bp, Escherichia coli; identical to SEQ ID NO: 7260

SEQ ID NO: 25625 - DNA, 264 bp, Escherichia coli
atgcgccgtaagcccggtaaagaagccattctgatggcgtggaatgttgaagagagagcacgattgtggctggaagcatggcgtttatcattgtcaggatggcacatttctgttcttgctgatcccattgaatcgccgcgcccggaactgttcccgacgcaaacattgattgtctggacaggcatggcaccaacgagaaggcaaaacgaacttttacaacactggggtgagcaaggttataaagtcatcttccatgccccctaa

SEQ ID NO: 25626 - DNA, 876 bp, Escherichia coli
atgctgacaggactaccaagtaattcagataaaatatcaggaatcatctatcaagaatattcagatgcattcaaaccaaaagttgacgcattacctaatgccctgaaaaacaaaggctatattactttcgcagcacataattaccaagcagacttttggtataggaataaaatttaccctaaatttggatttgatagatttgatagcattattaatatgggagatttaccaccagagtatagcagtattaaaaaaccatggcagtggcaacctgatgactacctgctttacaatgcagcattaaaagccatccaaaatgcaggaaacaaagatatttttgtacatttgatcactatgtcaactcatggtccttatcaacacattaatgattatggtgaaggtgtttatacctatgagattaatgaggcagtcaaaagattcgttcaattttcacagcaagtagaaaaaatagatccaaatgctgtaatcgtcttttacggtgaccataaaccaccactaaataaatatttcgtcgaaaatggggtgctaccaagtaatattttcaacaaaatcggagaagaaaaagatgaagatttcgtctttaaaatgagcacaaccccactcgattttggtgatgttcctgtgcttattaaatcaaatgataaagacgccattaaaaaattcataaccgacgccaatggaaaaccttttttctgtgtatcttcattagttgataaacatttcattcaatctggattggtatcatttaatcacaacgcaaagcatgtctgtgaaaacagtgataactttaattatgataagttaattaacatgaccccgtcgtggatttattcaatgtcattatttcacgattag

SEQ ID NO: 25627 - DNA, 777 bp, Escherichia coli
gtgcctgctgcctcgctgacggcaaaaggcaccgtacaactgagcagcgccatcaacagcacgtctgaaacgctggccgccacaccgaaagcggtcaaggctgcatacgacctggcagccggcaaggcgcctgccagccacactcacccgtggagtcagataacgggagtgcctgcggcttcactgacggcaaaaggcaccgtacaactgagcagcgccacggacagtcaatcagaaactgaggctgccacgccgaaggcggtcaaggctgcatacgaccttgcagccggcaaggcgcccgtcagccacactcacccgtggagtcagataacgggagtgcctgctgcctcgctgacggcaaaaggcaccgtacaattgagcagtgccatcaacagcacgtctgaaatactggccgccacaccgaaagcggtcaaggctgcatacgatctggcagacggaaaacaaccggcagatgccacgctcactgctctggcaggacttgccactgcagcagatcggttgccttattttaccggagcagaccgcgcagcgctggcaacccttacagctattggtcgcgctattatcgctaagggcagtataaaagatgtcctcaattaccttggtttgggggaaggctctgcattgcctgttggtgtaccggttccgtggcccaccgccacaccgccagcaggctggttaaagtgcgacgggcgcgtttacaaaagaacaatatcctgttctggccagagcctacccgaccctccgtcttcctga

SEQ ID NO: 25628 - DNA, 300 bp, Escherichia coli
ttgctgtccgcacaaggggcaacgctgttaagaacagcaatgctggattattataaccaggacactacgggaacctcggggatagtcggcatgggattcaacaatgaagattccattacagaccttcgtgagggcagctttaaaatgccggacgggacaacattcagcgatcctgtcatagtaatgtcagacaatggtatgcaggctactattctgacctctatcagaagcgggtatgcgaagggtatcactgtcagaccccgtagcattgcacttaattacattgtgagggcagtttaa

SEQ ID NO: 25629 - DNA, 366 bp, Escherichia coli
atgaatgaatctgaccttgatagtgaagctactaaagaggtcgttaaaaaggaagataaaatctctgatgtgattgctagtagtgaccataaaaacacacagtgccccgccactgatgatgagatggaccccttcgatgatgatgaagaggatgaagagtcagaacgtgaaaaagccattaagagggtagagaagaaaaagagattcgagcttgcaagacaaaagaacaaagtatcgggtttagacccattcgatgacagtgacgatgatgacttttctttcacaccgaaaaagaaacaaactcaggatgacaagaagcaaaaaattaaaccgaagatgtattttgctggtggaggtatgtgctaa

SEQ ID NO: 25630 - DNA, 192 bp, Escherichia coli
gtgactaaacaggaaaaaaccgcccttaacatggcccgctttatcagaagccagacattaacgctgctggaaaagctcaacgaactggacgcggatgaacaggcagacatctgtgaatcgcttcacgaccacgccgatgagctttaccgcagttgcctcgcacgcttcggggatgacggtgaaaaccgctga

SEQ ID NO: 25631 - DNA, 339 bp, Escherichia coli
atgaaacgcgagaggatgctcacgatacgggttactgatgatgaacatgcccggttactggaacgctgtgagggtaaacagctggcggtatggatgcggcgggtctgtctgggtgagccggttgcccgttccgggaagctgccgacactggcaccgccgttactgcgccagctggctgccatcgggaataacctgaatcagacggcgaggaaggtgaacagcgggcagtggtcttccggtgaccgggttcaggtggtggccgcactgatggccatcgagagagagttgcgcagcttacggcaggtcgtcagggaacatggagcgcgggatgatagttaa

SEQ ID NO: 25632 - DNA, 294 bp, Escherichia coli
gtggcgcacgtcttcggtgaacgcactctggccacactggagcgtcttctgagcctgctgtcggcctttgaggtcgtggtatggatgacggatggctggccgctgtatgaatcacgcctgaagggaaagctgcacgttatcagcaagcgttacactcagcgcattgagcgacataatctgaatctgagacaacatctggcaaggctgggacggaagtcactgtcgttctcaaaatcggtggagctgcatgacaaggtcatcgggcattatctgaacataaaacactatcagtaa

SEQ ID NO: 25633 - DNA, 372 bp, Escherichia coli
atgaaagatataaatgatagtttttataataatataaaatttttaagaagaaatggcattaaaatttcccttgatgattttggcagtgggttagctgacttgaaaaaattatacaaagttagacctgatagcatcaaaattgattcagaatttacttctggtattttcgatgaaactaacagggttgtgtgttttatatctagtcttgcacgagaagaaaatatgccagtgatcgctgaaggtgttgaaacagaaagacaggccagagaattacaaaaattaggcttctcccatgttcagggatatttataccagaaaccattaccgttttcagagtggcatatagacagtaaaccgaaaaaaagaaaataa

SEQ ID NO: 25634 - DNA, 237 bp, Escherichia coli
atgcttaacccacccgatggcatgcagcttaagctccggatacatggcgttaacttctggcattttcatcaacgcttcaacgatatgtccgtcgaatgttgccatgtcttcctgcaacaattcctgtgcgctaataaccatatcaacggtgatgttttcacatgtgtcgaacttaaccatgacagcgttctgtacttcaggggccagcttgtcaaaagcgacgttcatcggatctga

SEQ ID NO: 25635 - DNA, 135 bp, Escherichia coli
atggtcgctaaattaaaaccagatgtttttgttaatactaatccttttttagatgcaatgtataaggagaggcttagtcataaaggctattctgataaaattgctttaagtattaacaaaaacatctggttttaa

SEQ ID NO: 25636 - DNA, 201 bp, Escherichia coli
atgctccaggaattgccagtgaaattttgcgcgggcgcgacgttcatcaccggcttcaatggcagtggctacagcgactgcaccttcttcctttattgcctgttcgtccggaatggcggcgcaaataaagactttactcattttgttttacctcattacagatttaagggtgaacaaatccctgccattgctggcatataa

SEQ ID NO: 25637 - DNA, 306 bp, Escherichia coli
atggaccgtctgtgcgaagactactgcggtggtatctggaatctgtacaccctgaacaacggcggggcatttatggcccccgaaccggatgacgatgatgacgaaacatgggtactgttcaatgccatgaacggtaaccgcgctgaaatgagcccggaagccgccggcattgctgcctgtctgatgacgtacagtcatcatgcctgtcgtacggagtgttatgccatgacggtccattattaccggctgcgggattacgccctgcagcatccggaatgcagcgccattatgcgcatcatcgactga

SEQ ID NO: 25638 - DNA, 387 bp, Escherichia coli
gtgaccgtcacgctttctgaactgtcagccctgcagcgtattgagcatctcgcctggttgaaagagcaggaaaaaaaggctgaatccagtggcaacctgcaggtgtctgtagaggatcttatcagaagcggggcgtttctggtggcgatgtctctgtggcataaccatccgcagaagacaaaactgccgtccatgaatgaagccattacgcagattgagcaggaagtgcttaccacctggcccacggaggcaattgctcaggctgaaaacgtggtgttacgtctgtccggaatgtctgagtttgtggtgaataatgcccctgaacaggcagatgacgccgggcctgcagagcctgtttctgcgggaaagtgttcgacggtgagctga

SEQ ID NO: 25639 - DNA, 249 bp, Escherichia coli
gtgctggcgtccgcatcactgctggcgctgccgaccaccttcatcatgctgattgtgcagggctgctttggcctgctcaaccgcatcgcgccgccgctgaacctcttttcgctcggctttcccatcaacatgctggcggggctggtttgctttgccaccctgctctacaacctgccggatcactatctgcatctggcgaattttgtgttgcagcaactcgacgcgctgaaaggtcactatggcggatag

SEQ ID NO: 25640 - DNA, 237 bp, Escherichia coli
atgaaaaatctggcagtcgcagggaaactggatttcaatgacattgtaactgatatgaaacgtcaggaagacgaaggaaaacgagtcctaaaagacgttacaaaaatgcatggtgcggcgcagaaattaaatgacttcgtacaatcgtgtgacccagattcaacggaattgattcaaattccaaacgatatctctaattcaatttatgatctatttggtattgaactagtaaaataa

SEQ ID NO: 25641 - DNA, 321 bp, Escherichia coli
atggaaccggtcaaaattaaaccatctgtggattatattgaaacctatgcggacttcgctagttttgctccactaccgggagcggaaaaaaatctcatttgtatacattttatcgcaaacaagtcaatacctgcggtactatcccaaaatgatataccagatcaaccaggtagagcgaatatgcagataggctctgtaaatgaactcaatcagcaatgcactgtgataatgccaatggcacaactaaaggctcttcaggagaatatagttcttcttttcgaacaattagaggcacaaaactctaatggagcgaagtcgtaa

SEQ ID NO: 25642 - DNA, 684 bp, Escherichia coli
atgcaacaaccggaagaagtaggtgatttaactattacttacaaaacatcaagtattgttaaaccactgcaagtttccctgaataacgttaatactcgcgatttcatgatgttcatggaaacagcaaaaggtaatctgttttctacgcctatttcctcttattcaccaaaaaacatggtggatgatgcgaccaattcccagctaactgctacaatcgtagataaaggaggggttgccgattgtaaaggacaatctaatgttatcccaccgtacgaggaaactcctatacagggaaccgcaatgtccgatttgagcagaaacgaaatacaggcacttctgaaggcaaataaagctgaagtggatgcagtggcctcaaaaatgcaggctgatatggccaaatggcgtgaactaatggcttcagatataaaggagatgaagcatttagttgttactcagcacgaacaaatcaacagtcgtctggacatacaatcgagtagaattgagagtgcccttgactcccaatcaaaaaagatcgatgcagctctttctgttcaagaggcaaagttagaaggtaagcttagtgatgttaagcttgatataatcaaatgggcccttggcttgccagcattagcatttgctgtatataaaatctacggattgctctctggagtctcaaccccctaa

SEQ ID NO: 25643 - DNA, 762 bp, Escherichia coli
atgcaaaacagaaaatggattttgacctcgctggtaatgacttttttcggcatccccattctggcgcagtttttggcggcggttattgccatgctgggggccgggcttgccgctattcttgagttttgcaatttactctttacgccaacaatttatcttctactcaacgtctttatgctgacgctgggcgcattactgctatttttctctgggcgagtgtgggcgggtgatagcgcaccagaaaacagagaaatagccgcctggcgacaatgtctttttttagttcccgctttattaatcctggttggctggataatcgcgctacatctggcagattatcaatttcgccagatggtttcaggttggttggcagatcttatgcttccctggctgggtgttttgttagtctcattattcggtggtgagtactggtggatagtcattattcccgttggaacgcatatcagtttttcgctgggatacggctggccgacaaggcatcctttaaccggcacgtccgggctacgttgccgtaacttactcctgtttctacttctcttacttggtattgtcgctgggtatcaggcccatttatataagcagcaaaaccctggtgttggtgtacgtgaaaatattgatatctgggcctggcgacccgataaactcaataatcgactgacgccgctgcgtggcaaaccgcaaattcagtttacgcaaaactggccgcgaatcgatggtgccacggcggcgtacccaatttaa

SEQ ID NO: 25644 - DNA, 213 bp, Escherichia coli
atgccgcattgtatctggtttctttctaatgcggtttttgattatgtacacccttatgtacacgtttttttaaagcgttcagcaattacgctggtggatgatcacggatggcctgatatctacagccgccttaaaaagctggacccgaccagcattactgcgtatcgggttcgttcgctctttctactcgtggcagatgagtttacggtgtga

SEQ ID NO: 25645 - DNA, 315 bp, Escherichia coli
atgacgagagataaaattgaatatattgcttctcttaaatatgaagctgagaaatggagaaggattggcgggtggggaacattaatatcactctctgctttacttatagactcctggttcagacatattgatgcagcatcattactttttgaatcagcagtacttggtggattcatttgctgttggggtggtaattatgatcgggcgtccaaacataagagagaacttgacgcgatatgttttgctttattcggtaaggattacgaaagttctgaccttgatataattgaattcaacaaaacggaactatcgtga

SEQ ID NO: 25646 - DNA, 423 bp, Escherichia coli
atgacggcgcaaatatcagcttacgggcggctggtggctgacccgcagttaaagaccaccagcaagggcacacaaatggcgatggcgagtatggcggtcccccttccatgcaatcaggcagatgacggaacggcgacgatgtggttatccgtcctggcgtttggcagacaggctgacgcactggcaaaacaccacaaaggcgaactggtgagcgtggccggtaacatgcaggtgagccggtggacgggccagaacggcgaaacgaggcagggatggcaggttatcgcagacagcgtaatcagtgcgcgaacggcgcgaccgggcggcaaaaaaggccagcaggggcaggctactgacgcactgaacagggcaaaacaacaggcgggtaacgacgatccgtacggggacgggataccgttttaa

SEQ ID NO: 25647 - DNA, 180 bp, Escherichia coli
atgaccgataaagaatcaaccaaaacaccatcaccaactcgtaagagacgacgcaaaaatatagcgcatgaacatgaatcagaaagattcgcaccttgttcgtttgctcttgagaaattccttaaagagcacaggaaaaagctctcgttgcaaaccctggaacgaaccaaatctgactga

SEQ ID NO: 25648 - DNA, 744 bp, Escherichia coli
atgcttaaggatttcgccgcacttattccggtatcacctggcattattggcggacatgaaacagccattgtcagcgccagagcgttacataaggcgcttggtgtgaagcgtgatttcactacatggattaaagggcgtattgatcagtacggatttaaaaatggcgtggattttgagtttgtagaaaatttgacctcccccaatccggtgagcgcaaaatctcgccaacgtgtagagcacgactacctgagtaccatcaacatggcgaaagaacttgcgatggtcgagcgtaccgaacagggccgcgctattcgtcagtacttcatcaaatgcgaggaggagctacacaaagtagcgccagtgcgttccgcagcgttacgccgtgaactgaaagcccgtatcaccgttgccagctactttaagccgatgtgtgccgcgctggaggcgtaccgcgctgaactgggtaaaaacacgctccagcaccactacaccacggaagccaatatgctggcgcgtatcgtgctgggtggcatgactgcaaaacagtgggcgcaggcgaacggcatcacaggcgaaccacgcgaccacatgagcacgctgcagcttgagcacctttcttaccttgagcagagcaatatcacgctgattgagttaggccaggactaccaccagcggaaagctgaattaattcgcctttcgcaacgctggttagcccgccgcatggaggtgagcagccatgcgtaa

SEQ ID NO: 25649 - DNA, 699 bp, Escherichia coli
atgaaactgcgaaaaacgcccgtacaggggcagggcttcgttcggcctgaaaccagcatgagcgatattctggttcgccacaaagcggagtcgcgcattgattcccgcttatttgctgagcgtattggcataaagcacaaaaacctttattcgctcattcagaagcacaaaaccggattgcgtgaactgggcatccttccgtttcaaacggagcgattaaaaacccgtcaaaacggggagcgtgaacataagtttgccctcctgaatagcgatcagtttgattacatgtgtcgcattgtgcgcggtcgtgatgatgaacgcatgaaccgcttcaagctggatgttacgaaggcattcgcaaaacatcgcgctaccgagcctgtacgccgtgaatatctgccaggctatcacgaaagccgtgacgggcttaaagcactgggcgcagaacgtcaccattacatcaatctggcacgcgcagagaaccgtgttacaggtctggtaactggcgaacgaggcacagccagcgagcagcagttaggcttgctgattgtcatgcagaaaatcgaacaggccgcatttgaggaggcgatacagaacggcatgacacctaccgaagcagtgcgggaggttgcccgacgcatggagacattcgccagcctgatgacatctgagccgtatctgggggtaaatcatgcttaa

SEQ ID NO: 25650 - DNA, 309 bp, Escherichia coli
atgggtagggattataatgaaccctccactttccttacgttgttaacgtcaacgcattcagggaatatttcacgctttaacaatccggcatacgacaaagtactggcccaggcatcaacggaaaataccgttaaagcgcgtaatgccgattacaatgcggcagaaaaaatcctcatggagcaagcaccgattgcaccaatttatcaatataccaatggacgattaatcaagccgtggctgaaaggttatcccattaataacccggaagatgtggcgtacagtcggactatgtatattgtgaagcattga

SEQ ID NO: 25651 - DNA, 249 bp, Escherichia coli
atggcaagacttattctgctcactgagtgggcaaaagaggaattcagtgaaccggtccctactccgagtacgttaagtaaatacgctaaagccggaatgatatttcctctccccaaaaaagttggaaaacgctggcgagtggatccgcaagctcgctttgtcggaatggtaaacaagccggaggtgatcgccacagatcaccctgctttgaagaggatactggaagatggcgcgcccgcgaaaatataa

SEQ ID NO: 25652 - DNA, 9492 bp, Escherichia coli
atggataacttgcgcttctcttctgcgccgacagcagattccattgatgcatcgatcgctcaacactacccggactgcgaacctgtcgcggttatcggctacgcctgccattttcctgaatcgccggatggcgaaacgttctggcaaaatctgctggaaggtcgtgaatgcagccgacgctttacgcgcgaagagcttctggccgtcggtctggatgtcgccatcattgacgatcctcattatgtcaatatcggtacggtgttagacaacgccgactgcttcgacgccaccctgtttggctattcgcgacaggaagcggagtcgatggacccgcagcagcgcctgtttttgcaggcggtctggcatgcgctggaacatgccggttatgcccccggcgccgtcccccataagaccggcgttttcgcctcttcccggatgagtacctaccccggtcgcgaagcattgaacgtgacagaagtcgcgcaggtaaaaggtctgcaatctctgatgggcaatgataaagactatattgccacccgcgccgcgtacaaactcaacctgcacggcccggcgttatcggtacagaccgcctgctccagctcgctggttgccgtgcatctggcctgtgaaagcctgcgcgcaggcgaatccgatatggcggttgccggcggcgtggcgctctctttcccccagcaggcaggctaccgctaccagcccggaatgattttctctcctgatggtcactgtcgtccctttgacgcctcggctgagggcacctgggccggtaacggtctcggctgcgtggtgctgcgtcgcctgagagacgcgctgctgtcaggcgatccgattatctcggtgatcctctccagcgcggtcaacaacgacggcaacagaaaggtcggctataccgccccttccgtcgcagggcaacaggcagtcatcgaagaggcgttaatgctggcggccatcgacgacaggcaggtaggttacattgaaacccacggcaccggcacaccgctgggcgacgcgattgaaattgaagcgttacgcaacgtctatgcgcctcgcccgcaggatcagcgctgtgcgctcggttccgtgaaaagtaacatgggccatctggataccgcggcgggcattgccggactgctgaaaaccgttctggcagtcagtcgcgggcaaattcctcccttactgaattttcacacccccaacccggcgctgaaacttgaagagagcccctttaccataccggtgtcggcacaggcatggcaggacgaaatgcgctatgcgggcgtctcctcctttggtattggcggcaccaactgccatatgatcgtcgcctcgctgcccgacgcgctcaacgcgcgcctccccaatacggatagcggcagaaaaagtaccgcgctgctgctcagcgccgccagcgacagcgcgttgcggcggctggcgacggattatgccggggcgctgagagagaatgcggatgccagctctctggccttcacagccctgcacgcgcgccgtctcgatctccccttccgcctggcggcgccattaaaccgtgaaaccgccgaggcgctcagcgcctgggccggtgagaaatcgggggcgctggtttacagcggccacggcgccagcggcaagcaggtgtggctgtttaccggccagggctcgcactggcgcactatgggccaaacgatgtaccagcactcaacggcgtttgccgacacgctggatcgctgtttttccgcctgtagcgaaatgctcacgccgtcactgcgcgaagcgatgtttaaccccgattcggcgcagctggacaatatggcctgggcgcagccggcgattgtcgcgtttgaaatcgcgatggcggcgcactggcgtgctgaaggactgaagccagacttcgccattgggcattccgtcggtgaatttgccgctgccgttgtctgcggacactatacgattgaacaggtcatgccactggtttgtcggcgcggcgcgctaatgcagcagtgcgcaagcggcgcgatggtggcggtatttgcagacgaagacacgctgatgccgctggctcgccagtttgagctggatctcgccgccaacaacggtacgcaacatacggtattttccgggccggaagcccgtctcgcggtattttgcgccacgctctcgcagcatgacattaactatcgtcgcctgagcgtaaccggtgcggcgcactccgctttactggagccgatactcgatcggttccaggacgcctgcgcgggactgcacgcggagccggggcaaataccgattatttccacgctcaccgccgacgtcattgatgagtcaacgctcaaccaggcggattactggcgccgacacatgcgccagccggtgcgttttatccagagtattcaggtggcgcatcagctcggcgcccgcgtttttctggagatggggcccgatgcccagttggttgcttgcgggcagcgcgaataccgcgataacgcatactggatagccagcgcccggcgtaacaaagaggcgagcgatgtcctcaatcaggccctgctccagctttacgctgccggcgtcgccctaccgtgggccgacctgctggcgggcgatggacaacgtatcgctgcgccatgttatccgtttgatactgaacgttactggaaagagcgcgtctccccggcctgcgagcctgccgacgcagcgctgtctgccgggctggaggtggcgagtcgcgccgcgacagcgctcgatctccctcgcctggaagcgcttaaacagtgcgccacgcgactgcacgccatctacgtcgatcaactggtacaacgctgtaccggcgatgccattgagaacggcgtggacgccatgaccatcatgcgccgtggacgtctgctgccccgctaccagcagctactccagcgcctgctgaataactgcgtggtcgacggcgattaccgctgcaccgacgggcgatacgtccgcgcccgccccattgaacatcaacagcgggaatcactgctgacggaacttgccggttattgtgaaggttttcaggctattcccgacaccatcgcccgtgccggcgatcggttatatgaaatgatgagcggcgcggaagaaccggtggcgattatcttcccgcaaagcgcctccgacggcgtggaagtgctgtatcaggaattcagctttggccgctatttcaaccaaatcgccgccggggtattacgcggcattgtccagacgcgtcagccccgccagtcgttgcgtattcttgaagttggcggcggaaccggcggcaccaccgcgtggctgctgccggaactcaacggcgttccggcactggagtaccatttcaccgatatctcggcgctgttcacccgtcgcgcccagcagaaattcgccgactatgattttgtgaagtatagcgagctggatctcgaaaaagaggcgcagtctcagggtttccaggcacagtcttacgatcttatcgtggcagcgaacgtgattcacgccacccgccatattggccgcacgctcgataatctgcgccccctgctcaagccgggcgggcgcctgctgatgcgcgaaatcacccagccaatgcgtctgtttgacttcgttttcggcccgctggttcttccgctacaggatctcgacgcccgcgaaggtgagttattcctcaccaccgctcagtggcaacaacagtgccgccacgccggattcagcaaagtggcgtggctaccgcaggatggcagcccgaccgccgggatgagcgaacatatcattctcgccacgctgcccggtcaggcggttagcgccgtaacattcaccgcgccatcagaacccgtgttggggcaggcgctgacggataacggtgattatctcgccgactggtctgattgcgcaggtcagcccgaacagtttaacgcccgctggcaggaggcctggcgtctgctttcacagcgtcatggcgacgctctgcctgtggaaccgccccccgtcgccgccccggagtggctggggaaggttcgcttaagctggcaaaacgaagccttttcccgcggtcagatgcgcgttgaagcccgtcatcctgctggcgagtggctgccgctatcgcccgccgcgcctcttcctgcgccgcaaacgcattatcaatggcgctggacgcccctcaacgtcgccagcattgaccatccgcttacctttagcttcagcgccggtacgcttgcgcgcagcgacgagctggcgcaatacggcatcattcacgatccgcacgcctcttcacgactgatgattgttgaggagagcgaggatacgctggccttagcggagaaagtgatagcagcgctcaccgccagcgcagccggattgattgtggttactcgccgcgcgtggcgagtcgaggaaaatgaagcactctctgcatcccatcacgcgctatgggccttgcttcgcgtcgcggccaacgaacagccggaacggttgcttgccgccatcgatctcgccgaaaacaccccgtgggaaacgctgcatcaagggttgagcgcagtctcactatcacagcgctggctcgccgcacggggtgacaccctttggctcccttcactggcgcccaatacgggatgcgccgctgaattaccggcaaacgtgtttaccggcgatagccgctggcatctggtgaccggagcgtttggcggattaggccgccttgccgtgaactggctcagagaaaaaggggcgcgacgcatcgccctgctggcaccgcacgtggatgagtcatggctacgcgacgtggagggcgggcagacgcgcgtctgccgttgtgatgtgggcgatgtcgggcaactggccacggttcttgacgatctggcggccaacggcggcattgccggagcgattcatgccgctggcgtattggctgacgcgcccttgcaggagcttgatgaccaccagctggctgccgttttcgcggtaaaagcgcaggcggcaagccagctgttgcaaaccctgcgcaaccacgacggacgctatcttattctctactcttccgctgccgccaccctcggcgcgccgggtcagagcgcccatgcgctgtcctgcggctacctggacgggctggcccagcagttttccacccttgatgcgccgaaaacgctctctgtcgcctggggcgcatggggagaaagcggtcgggcggccacgccggaaatgctggcgacgctcgccagccgaggtatgggcgcgttaagcgatgccgaaggctgctggcacctggaacaggcggtgatgcgcggcgccccgtggcgactggcgatgcgcgtttttaccgacaaaatgcccccgttacaacaggctctgtttaacatcagcgccacagaaaaagccgcaacgccggtcattcctcctgctgatgacaacgcctttaacggcagcctgagcgatgaaacagcggtgatggcatggctgaaaaagcggattgcggttcagctaaggctgagcgatccggcgtcactgcatccaaaccaggatctgttgcaactcggcatggactcgctgctcttccttgaactcagtagcgatattcagcactacctgggcgtacgcatcaatgcggaacgggcgtggcaggatctgtctcctcatggactcacgcagcttatctgttctaagccagaggcgacgcctgccgcttcgcagccggaagtgttgcggcacgacgccgacgagcgttatgcgcccttccctttgacgcccattcagcacgcctactggctggggcgaacccacctcattggctatggcggcgtcgcctgtcacgtcctgtttgagtgggataaacgccacgatgagttcgatctagccatactggagaaagcatggaaccagctcatcgcacgccacgatatgttgcgtatggtggttgatgccgacgggcagcagcgaatcctggcgacaacgccggagtatcacatcccgcgtgacgatctgcgcgcgctttccccggaagaacagcgcatcgcgctggaaaaacggcggcatgaactgagctatcgcgttttgcctgccgaccagtggcctctttttgagctggtggtcagcgaaatcgacgattgccattaccgtctgcatatgaacctcgaccttttgcagtttgatgtgcagagttttaaagtcatgatggacgacctggcgcaggtctggcgcggtgaaacgctggcgccgctcgctattaccttccgtgattatgtgatggctgaacaggcgcgccgaaagacatcggcatggcacgatgcctgggattactggcaggaaaaactgccgcaactgcccttagcgccagagctgccgatggttgagacgcccccggaaacgccacacttcaccaccttcaaatcgacgatcggcaagacagaatggcaggccgtgaaacagcgctggcagcagcaaggcgtcacaccgtctgccgcgctgctcacgctgtttgccgccacccttgagcgctggagccgtaccacaacatttacgctgaacctgacgttcttcaatcgccagccgatccatccgcaaatcaaccagttgattggtgattttacctccgtcacgctggttgattttaacttctcagcgccagtgacgttgcaagagcagatgcaacagacccaacagcgcctctggcaaaatatggcgcacagtgaaatgaacggtgttgaggtgatccgtgagctgggccgcctgcgcggatcacaacgtcaaccgctgatgccggtagtgtttaccagtatgctggggatgacgctggaaggcatgactatcgatcaggcgatgagccatctgttcggcgaaccctgctatgtattcacgcaaacgccgcaggtctggctggatcatcaggtcatggagagcgacggcgagttgatgtttagctggtactgcatggacaacgtgctggaacccggcgctgccgaggcgatgtttaatgactattgcgccatcctgcaagccgtcatcgccgcccctgaaagcctgaagactctcgccagcggcatcgccgggcacattccccgccgacgctggccgctgaacgcgcaggcggactacgacctgcgggatattgagcaggcgacgctcgaataccccggcatccggcaggccagagcggaaataaccgaacagggcgcgttgacgctggatatcgtgatggccgacgatccttcgccatcagcggcgatgcctgatgagcacgaacttacccaactggcgctgccgttgcctgagcaggcgcagcttgatgagctggaggcgacctggcgctggctggaggcgcgtgcgctacaggggatcgcggctacgctaaatcgtcacggcctgtttaccacgccggagatcgcccatcgctttagcgcaatagtacaggcgctgtccgcgcaagcgtctcaccagcgtctgctgcgccagtggctacagtgtctgacggaaagagagtggttaatccgcgaaggtgaaagctggcgctgccgcattccgctcagcgagattcctgagcctcaggaagcgtgcccgcaaagccaatggagccaggcgctggcgcagtatctggaaacctgcatcgcccggcacgacgccctcttctccgggcagtgttctccgctggaattgctgttcaacgagcagcatcgcgttaccgacgcgctgtatcgcgacaaccccgccagcgcctgtctgaatcgctataccgcgcagattgccgccttgtgcagcgcagaacggattctggaggttggcgccggaaccgcagccactaccgcgccggtgctgaaggccacgcggaacacgcggcagtcgtaccacttcacggacgtctccgcgcagttcctcaatgacgccagagcccgtttccatgatgaatcgcaggtgtcttatgccttgttcgacatcaaccagccgctggatttcaccgcccacccggaggcgggttacgacctgatcgttgccgtcaatgtgctccacgacgccagccatgtcgtccagacgttgcgcagattaaaactgttgctgaaagccggcggacgtttgctgatcgttgaagcgacggagcgaaactgcgtattccagctggcgagcgtgggctttattgagggattaagcggataccgcgatttccgccgccgggatgagaaaccgatgctcacccgctccgcatggcaggaggttctcgttcaggccgggtttgcaaacgagctggcgtggcccgcgcaggaatcgtcgccgctgcgccagcatctgctggtagcgcgttcgcctggcgtaaatcgcccggataaaaaagccgtgagccgctatttacagcagcgctttggcaccggtctgcccattttacagatccggcaaagagaagcgttatttacgccgctgcatgccccgtctgatgcgccgactgagccagccaaacccacgccagttgccggggggaattcggcgctggaaaaacaggtggctgaactctggcaatcgctgctgtctcgccccgtggcaaggcatcacgactttttcgaactgggcggcgacagcctgatggcgacaaggatggtcgcgcagctaaaccggagagggattgccagggctaaccttcaggatctgttcaaccattcgacgctgagcgacttctgcgcccatctacaggcggctacgtcaggagaggacaacccgatacccctttgccagggcgacggtgaggaaaccctgtttgtcttccacgcttcagacggcgatatcagcgcctggctgccgctcgctagcgcgttgaacaggcgcgttttcggcctgcaagcaaaatcgccgcagcgctttgctacgctcgaccagatgatcgatgagtatgtcgggtgcatccgtcgtcagcagcctcacggcccttatgtgctggcgggttggtcgtatggcgcgtttcttgcggcgggcgccgcacagcgcctgtacgccaaaggcaagcaggttcggatggtgttaatcgatcccgtgtgccgacaggatttctgttgcgaaaaccgggcggccctgctgcgcctgttagccgaaggagaaacgcctctggcactgcccgaacatttcgaccagcagacgcccgacagccagcttgccgactttatcagcctcgctaaaacggccggtatggtgtcgcaaaacctgacgctgcaagcggcagaaacgtggctcgacaacatcgcgcatctgctgcgtttactgactgagcatacgccgggcgaaagcgttccggtcccctgtctcatggtgtatgccgccgggagacccgcgcgctggacgccagcagaaaccgagtggcagggctggataaacaacgccgacgacgctgtgattgaagccagccactggcaaatcatgatggaagccccccacgttcaggcttgtgcgcaacacattacgcgctggctttacgcaacctcaacgcaaccggagaacacgttatga

SEQ ID NO: 25653 - DNA, 336 bp, Escherichia coli
atgcggctcgctgaacagcggactccactcggtcaccccgttttctttcaggatcgtcgcgagtatgctttcgatgtcctcattctggaagatacggaagttctggcgcagccctgtgcgccacagtggtgggcacaccttcatgctgtacagcatctggtttttgtcgttctcccccagttcaaaccaggtcaccacacctttcacccggcgctgtacgtcatcgccctgccataccgtcaggtaggccattttgtccagcacctgcgcaaattcaagggagagaaactgctggctgaccagagagagatcgagggaaaagagcgaagagagtga

SEQ ID NO: 25654 - DNA, 774 bp, Escherichia coli
atgacatcctttcaattatctttgatttctcgtgaaattgacggcgaaataatacatttacgtgccaaagatggttacataaacgccacatcaatgtgtagaactgcgggcaaactgctctctgattacactagactcaaaactactcaagagttttttgacgaattatcacgcgatatgggaattcccatatcggagttaattcaatcatttaaaggtggaagacctgaaaaccaagggacatgggtgcatcctgacatcgctattaatctagcgcagtggctatcgcccaaatttgcagtccaggtttcaagatgggttcgtgaatggatgtcaggggaaagaactacagcagaaatgcctgtacatttaaaacggtacatggttaatcgtagtagaattcctcacacgcacttttctattcttaatgaactgacattcaacttggttgcacctcttgaacaagcagggtacacactcccagaaaaaatggttcctgacatttcacaaggaagagtattttcacaatggttaagagataatagaaacgtagaacccaaaacattccctacctatgaccatgaatatcccgatggtcgcgtataccctgcaaggctgtacccaaatgaatatttagcagatttcaaagaacattttaacaatatttggttgccgcaatatgccccgaaatacttcgctgaccgggacaaaaaggctctcgccttgattgaaaaaattatgctacctaacctcgatggcaatgaacagttctaa

SEQ ID NO: 25655 - DNA, 444 bp, Escherichia coli; identical to SEQ ID NO: 24413

SEQ ID NO: 25656 - DNA, 1257 bp, Escherichia coli
atgaaattcccttcaatatttaataaaataaatccacaatccatacagcaacatccagaaaaaaatgaacttaactggatgcgcgaattaaataaatggaaagcagaacgcatacttacaggtgaaatccatcgtccggaatgccgaaacgaagccgctaaaaggataaattgtgcttttttgtcgaaacagaatgatattgatttatcagggcttaatttaactacccaaccaccagggctgcaaaacttcacctctatcaatcttgatgagaaccaactcaaacattttgatgcaaccacctacgatagactcatcaaccttagtctgaatagtaatgctcttgagtcaataaattttcctcaaggtagaaatgtaagcattacacatatatctatgaataataattctctcagaaatattgatatagataggctttcatcaattacttattttagtgcggcacataatcaactagagtttgtgcaattagaatgttgcgaaaggctgcagtacctgaatctcagccacaatcaattaactgatattgtggcaggaaataaagatgaactcttacttctggatctatcccataataaactaacaagtttacataataccttatttcccaacttgaatacgttacttatcaacaacaacttgctttctgaaattaaaatattctttagcaacttctgcaatattcagacattaaacgctgcgaacaatcagttggaaaaaataaaccttcatttcctgacttatctttcatctatcaaaagtttaaggctggacaataataaaataacccgcattgacactaagaatacgtccgatattggaactttattccccataataaaacagagcaaaaacttaaattttttaaatgtttctgggaagaacaattgccctactatgcagctcatgttatttaatttattttccccagcacttaagcttaatactggcctggcaattctttcgcctggtgcatttgaaattcactctgaaggagtagatgtggataacgaattgtttcactatactattaaagaagcatataccccatataatatacacacttataaaacagaagaagttgtaaatcagatgaatataaaaattaaaaatatgacattagatgaaataaacaatacttactgtaataacgattattacaatgaggcgataagagaggaaccgatagactttctggacagatcgttttcctccagctcatggccttttcagtga

SEQ ID NO: 25657 - DNA, 375 bp, Escherichia coli
atggatatctgctcccgaaacgagaaattagcgattagaagaccagcggtactggttgcactggcacttttactgtgtagttgcaaaagcacgcctccagagtcaatggtgacaccaccagcgggttcaaagccaccagccacgacgcaacaatcgtcacaaccgatgcgtggcatctggctggccacggtgtctcgcctcgactggccaccggtttcctcggttaacattagtaaccccaccagccgggcccgtgtacaacaacaggcgataatcgacaaactggatcatctgcaacgtctcggcatcaacacggtctttttccaggtcaagccagacggtaccgccctgtggccgtcgaaaattttgccgtag

SEQ ID NO: 25658 - DNA, 153 bp, Escherichia coli
atgccgcacagcaagtggaaatggatgccggtttccgcacagcatttccgcgatgtaagtgtttgtgacaaagccatggcgaaaagctgtggcagccttaacatgttccccgttcagaaaatgcagaaggccgagttcataccagtaaggtga

SEQ ID NO: 25659 - DNA, 741 bp, Escherichia coli
atgaataaggttattgcggtttcagcgcttgccatggcaggcatgttttcgacccaggctctggctgatgagagcaaaacaggcttttatgtgaccggtaaagcaggtgcttctgttatgtcacttgcagaccagcgtttcctgtcgggtgatggagaggaaacatcaaaatataaaggcggtgatggccatgatacggtattcagtggcggtatcgcggccggttatgatttttacccgcagttcagtattccggttcgtacggaactggagttttacgctcgtggaaaagctgattcgaagtataacgtagataaagacagctggtcaggcggttactggcgtgatgacctgaagaatgaggtgtcagtcaacacactgatgctgaatgcgtactatgacttccggaatgacagtgcattcacaccatgggtatctgcagggattggctacgccagaattcaccagaaaacaaccggtatcagtacctgggattatgggtacggaagcagtggtcgcgaatcgttgtcacgttcaggctctgctgacaacttcgcatggagctttggcgcgggtgtccgctatgacgtaaccccggatatcgctctggacctcagctatcgctatcttgatgcaggtgacagcagtgtgagttacaaggacgagtggggcgataaatataaatcagaagttgatgttaaaagtcatgacatcatgcttggtgtgacttataacttctga

SEQ ID NO: 25660 - DNA, 222 bp, Escherichia coli; identical to SEQ ID NO: 9993

SEQ ID NO: 25661 - DNA, 261 bp, Escherichia coli
atggccaggtacgaagatgaaaataaaacgccagtgacgccagaacaaataattactccccgccgttgggaggataaacagaaagatctctggacaacctggcagcgggttcaggagaatatgataaaaggtggattatcggggcgaagtgcctccggtaaaaataccagaacaagagccattacaggcattgacggtgatatccgaatcaacaaagcattatggatgattgccgaacagttcagggagtggaagtcatga

SEQ ID NO: 25662 - DNA, 258 bp, Escherichia coli
atgcagttaattgttgattacccagatcatagcatttattcatcttttgtggatgcggatgctgaacttcgagagttaaatggtggggcagtagttgtaataacggtaaaaatacctcttactagcacatcggaacagttgtttaataaatacacttgcggggaaagtcttcgtattaaattgaggaatggcgatgaatggaaaatgtatttcgttatgcttgatggagggcgctatatattttcctcgcacctgtga

SEQ ID NO: 25663 - DNA, 516 bp, Escherichia coli
atgagcgagattaattatcaggaaggacatgaaacggcagggcaggcaaaaccagttgcatggcgatatcgctacgtgaaaaaaggcattacggactcacagggggagccgtgggttggtgactggaaatatgtaccgacaaaagaggattgcaacgacaggccgagctatgaaattcaggcgttattcactgccccgcctgtgccactgacatcagaaggactggttaaagccgtgcgcttttatgaacaggtaaagcgtgagaatccaccagtcgaaacaggagcatggaaagatgctgttgattgggtactcaaagaggcctgcagtgctgtcattctgggtaaagccgacaacccaccagcttccggcaatcaggttagcgaattaacaatgtgggttaaacgactggtcagccaactgaaaaaagccaagccggactgcaaattaccggagaaggcgatggactacctgaagcgaaacggactgataagcgtggaggatgttttacggtga

SEQ ID NO: 25664 - DNA, 183 bp, Escherichia coli; identical to SEQ ID NO: 9298

SEQ ID NO: 25665 - DNA, 534 bp, Escherichia coli
atggcggttatgggacttgccggtgttctccggggtaaaaaggtccgcactaccgtcagccggaaaaccgttgctgcaggtgaccgcgtaaaccgtcagttcgtggcagaacgtcctgaccagctgtgggtggctgattttacttacgtcagcacatggcggggcttcgtctatgtggcgttcatcattgatgtgtttgccggatacatcgtggggtggcgggtctcatcgtccatggaaacgacattcgtgctggatgcactggagcaggcgttatgggcccgtcgaccgtccggcacggtccatcacagtgataaaggttctcagtatgtatcgctggcctacacacagcggcttaaggaagccggattactggcatcaacaggaagtacaggcgactcgtatgacaacgcgatggctgagagcatcaatggtctttacaaagcggaggtaatacaccgtaagagctggaaaaaccgtgcagaagtagaactggccacactcacgtgggtggactggtataacaatcgatga

SEQ ID NO: 25666 - DNA, 1473 bp, Escherichia coli; identical to SEQ ID NO: 8685

SEQ ID NO: 25667 - DNA, 2886 bp, Escherichia coli
atgccgcgtcgcgtcactctaaccgatcggcagaaagacgcgctgttgcgcttgccgacttcacagacggatttgctcaagcactatacgctgagtgatgaagaccttgggcatatcaggctgcgtcggcgcgctcacaacaggttcggcttcgccctgcaattgtgtgtcctgcgctatcccggccgggtgctggctccaggcgaactgatccctgcagaggtcatcgaatttatcggagcgcagcttggcctgggtgccgacgatctcgtagactatgctgcccgcgaggaaacacggcacgagcatcttgccgagttacgggggctctacggcttccgcaccttctccggacgtggtgcgagcgagctgaaggaatggttgttccgagaagccgagatggcggtgtcgaacgaggatatcgcccgtcgcttcgtagccgagtgccgacgcacccgcactgtccttcccgcgacatccacgatcgagcggctttgtgccgcggctctcgtcgatgccgagcgacgcatcgagacgaggatcgccagtcggctgcctatgtcgatccgagaacagttgctggcattgctcgaggagacggctgatgatcgggtgacccgttttgtgtggctgcgccagttcgagcctggctcgaactcttcgtcggccaaccggctgctcgaccggctcgaatatctgcaacgcatcgatctccccgaggatctgcttgccggcgttcctgcccatcgggtgactcgtctgcgcaggcagggtgaacggtattatgccgacggcatgcgcgatctcccggaggacaggcggcttgcgatcttggctgtttgcgtctcggaatggcaggcgatgttggccgacgcagtggtcgaaacccacgaccggatcgtcggccgtctctaccgtgcttcggagcgtatttgccatgcaaaggtcgcagacgaagcgggggtggtgcgtgacaccctgaaatccttcgccgagatcgggggcgccctggtcgatgcacaggatgatggccagccgctgggcgatgtcatcgcgagtgggtcagggtgggacggcttaaaaacccttgttgcaatggcaaccaggctgaccgccaccatggccgacgatccgctcaatcatgtgctcgacggttatcaccgcttccgccgatacgctccacgcatgttgcgcctgctcgatctgcgagctgcgcccgttgcactgccgcttctggaagcggtgacggcccttcgtaccggtttgaacgatgccgcgatgaccagcttcttgcggcccagctcgaaatggcatcgccaccttcgggcccagagggctggcgacgctcgcctatgggagatcgcggtgctgttccatctgcgcgatgcgttccgctccggagatgtctggcttactaggtcccggcgctatggcgatctgaaacacgcactcgttccggcacaatccatcgcggaaggcggtcgtctcgctgtgccattgcggccggaggaatggctggcagaccggcaagctcgcctcgacatgcggttgcgcgagcttggccgtgccgctcgcgcaggcacgatcccgggcgggtcgattgaaaacggcgttctgcatatcgagaaactcgaagccgccgcgccgacaggcgccgaagatctggtgctcgatctctacaagcagatcccgcccacgcgcatcaccgatctcctgctggaggtggatgcggcgaccggcttcaccgaagcgttcacccatctgcgcacaggagcaccctgcgctgaccggatcgggctaatgaacgttatcttggcggaagggatcaacctcggcttgcgcaaaatggcggatgcgacaaacacccacaccttctgggaattgatccgcattggacggtggcatgtcgagggcgaagcctatgaccgggcgctggccatggtggtcgaggcacaggcagcgttacccatggcccggttctggggcatgggcacgtcggcttcgagcgacggacagttcttcgtcgctacagagcaaggtgaggccatgaacctggtcaacgcgaaatatggcaataccccgggcctgaaagcctatagccacgtctccgaccaatatgcgccgttcgcaacccaggtgattcctgcaacggcaagcgaagcgccttacatcctcgatggcctgctgatgaacgatgctggacgccatatccgcgagcagttcaccgacacgggcggcttcaccgatcacgtctttgccgcatgtgccattctcggctaccggttcgctccgcgcatccgcgacctgccatccaaacggctctacgcgttcaatccgtcggccgccccggcgcacctgcgagcgttgatcggcggaaaggtcaaccaagccatgatcgagcgcaattggcccgacatcctgcgcatcgccgccaccattgctgccgggaccgtcgcgccaagccagattctgcggaaactcgcctcctatccgcggcagaacgagctcgcgacagccctgcgggaagtcggtcgcgtcgagcgcaccctgttcatgatcgactggattctggatgccgaactccaacggcgtgcccagatcgggctcaacaaaggcgaagctcatcatgcgctgaagcgggcaatcagcttccaccgccgcggtgaaatccgcgaccgttccgccgaaggccagcattaccgcatcgccggcatgaatctgctcgccgccatcatcatcttctggaacaccatgaagctcggcgaggtcgttgcaaaccagaaacgcgatggaaagctgctatcgcccgatctcttggcccatgtttcgccgctcggatgggaacacatcaatctcaccggagaatatcgctggccaaagccttag

SEQ ID NO: 25668 - DNA, 600 bp, Escherichia coli
atgtcgccggaggactggctgagtgcagaaatgcagggagagattgtggcgctggtccacagccaccccggtggtctgccctggctgagtgaggccgaccggcggctgcaggtacagagtgatttgccgtggtggctggtctgccggggggcgattcataaattccgctgtgtgccgcatctcaccgggcggcgctttgagcacggggtaacggactgttacacgctgttccgggacgcttaccatctggcgggaattgagatgccggattttcatcgcggggatgactggtggcgtaacggtcagaatctctatctggataatctggaggccacagggctgtatcaggtgccgttgtcagcggcgcagccgggcgatgtgctgctgtgctgttttggttcatcggtgccgaatcatgccgccatttactgtggtgacagcgagctgctgcaccatattcctgaacaactgagcaaacgagagaggtacaccgacaaatggcagcgacgcacacactccctctggcgtcaccgggcatggcacgcatctgcctttacggggatttacaacgatttggccgccgcatcgaccttcgagtga

SEQ ID NO: 25669 - DNA, 3741 bp, Escherichia coli
gtggtcattaaggatggttcagaggcggacggttcgacggcgaacacgctgcgggcgagggtgaccgatgcgttcggcaatgcacttgccgggcaggcggtcagcgtgatggcaggcaacagcgcaacggtcactccgacggtcaccacgcagtcggacggtacggtggagttcagtgtcaccagccagacggcaggaaccagtacagtcaccgccagtatcaacagcagcagcctgagccggaacgtgacgtttgtcgcggatgtcaggacggcgcagatcgcggtgctggaagtgacgcaggattacgccgtggcagatggttcgacggcgaacacgctgcgggcgagggtgaccgatgcgttcgggaatgcacttgccgggcagacggtcagcgtgacggcaggcaacggcgcaacggtgtctccgacggtcatcacagggccggacggcacggtggagatcagtgtcaccagtcagacggcgggagtcagtgcagtcactgcaaccatcaacaacagcaccgcgagccagaacgtgatgtttatcgccgatgtcaggacggcgaagatcgcggatctggtggtcattaaggacgactcagtggcagacggtgcaatggcgaatatgctgcgggcgagggtcaccgatgcgttcggtaatgcgcttgccggacagacggtcagcgtgatggcaggcaacggtgccacgactgctccgacggtcaccacgcagccggacggcacggtggagatctctgccaccagccagacggcggggatcagtacagtcactgcaaccatcaacaacagcagcctgagccggaacgtgatgtttgtcgcggatgtcaggacggcgcagatcgctgatctggtggtcattaaggacggctcagtggcagacggttcgacggcgaacatgctgcgggtgagggtgacggatgcgttcggtaatgcgcttggcggccagacggtcagcgtgttggcggacaacggcgtaacgactgccccaacggtgatcaccgagccggacggcacggtggaaatcagtgtcaccagccagacggcgggagtcagtgcagtcactgcaaccatcaacagcagtagtcagagtcagaacgtgacatttatcgccgatgtcaggacggcgaagatcgcggatctggtggtcattaaggatggttcagaggcggacggttcgacggcgaacacgctgcgggtgagggtgaccgatgcgttcgggaacacgctagccgggcagacggtcagcgtgttggcggacaacggcgcaacgactgccccgacggtcatcacagagccggacggtacggtggagatctcagtcaccagccagacggcgggagtcagtgcagtcactgccagcatcaacagcagcagccagagccggaacgtgacgtttgtcgccgatgtcaggacggcgcagatcgcggatctggtggttattaaggacggttcagaggcggacggtgcgacggcgaacacgctgcgggcgagggtgaccgatgcattcgggaacacgcttgccgggcagacggtcagcgtgttggcggacaacggcgcaacggtcgccccgacggtcaccacgcagccggacggtacggtggagatctctgttaccagccagacggcggggatcagtgcggtcacagccagcatcaacaacagcagtctgagccggaacgtgacatttatcgccgatgtcagcacggcgaagatcgctgatctggtggtcattaaggatggttcagaggcagacggttcgacggcgaatacgctgcaggtgaaggtcaccgatgctaacggtaatacgcttgccggacagacggtcagcgtgttggcaggcaacagcgcaacggtcactccgacggtgaccaccaagccggacggcacggtggagatatctgtaaccagccagacggcgggaatcagtgcagtcactgccagcatcaacagcagcagtcagagccggaacgtgacgtttatcgccgatgtcaggacagcgaagatcgcggacctggtggtcattaaggacgactcagtggcagacggtgcaatggcgaatatgctgcgggcgagagtcaccgatgcgttcggtaatgcgcttgccgggcagacggtcagcgtgttggcgggcaacagcgcaacggttgctccgacgatgaccacaaagccggatggcacggtggagatcagtgtcaccagccagacggcgggcaccagtacagtcaccgccagcatcaacaacagcagccagagccagaacgtcacctttgtacctggtgatgcatcgcaactcacttcaatcgttgaaacaaataagtcgaactatacggttggagagacaatcaccatcacggtaacgctccgggatgcgttcgataatctggtaaccggtgcagcttcacagttagccgctgatggtgtgctgacggtggctggcactgacccgtcagaaatgggaagctgggttgaatcaggtggcgtgtataccacaacccgaatggcgacgattgccagtaccaatcagcacgccaacctgcaattgcagacgtggagtgatggcgtaacgtcagatcgctatgacatccagtccggttctccggcgcaagccacatcaactatcgctacggataaaaacgcctacaccgctggtgacactataaccgtcgccgtgacgctgaaagacgcgcacggtaacctggttgaagggggcgagtccttattgtctggtgataacgtaacagtagaaggagccgtacgttcaggaggatggtctgaaaccgccggtgtttatactgctacatggtcggcgcaaatggcgggagactctcaccacgcgacgctgaagttgtctgaatggggcagcagtaaacaatcagagagttattccatccacagcggtgctccggtgcaggcaaattctgctatcaggacagataaatcggcatatatcgccggggagccattaaccgtcacaataacgttgcgggatgagtttggtaaccctgctttagggctgacatcagaagtcatcgagtcttatattgatagtttcgcggtaggcggcgcaactcacgatgctatgcggtgggtcgagcagaataatggtgaatataccattgtctggacagcatgggttgccgaggaaaatctagttgccagtctgaaattaaaaacatgggcaacggagattaagtcctcgttatacggaatacaaccaggtgcggcggcaaaaactcaatcaacgattgtcgcggacaaaacgatatatatcgctggggatagcataacggtgaccgttgttcttaaagatgcccagggtaactttattactgatggtgttgttcagcttaatgaggaaaacgtacaagtcaggaatgcggatcctatccagggcaataattgggtttacaacggcaatgggcaatatcaaagacagtatatggcgcattttgcggaagcgaatttgaatgcgcaactgaagatggctggttggagcgatgccaattattcaaacaattacactattaaaccaggtgaagtgagtccgcttggttcacagcttcgtatacgagaagttttagtagtggaaggggcggatttacctgtcagtgctttattagttgatgattttggaaatccggtggataacggtctggatttgctggatgatgcagtgtacttacaaaatgtaggtgatgctgccaacttactgatttag

SEQ ID NO: 25670 - DNA, 852 bp, Escherichia coli
gtgccgtccggctttgtggtttccgtcaaagcgaccgttgcaccgttgtctgccaacacgctgaccgtctgcccggcaagcgcattaccgaacgcatccgtcaccctcgcccgcagcgtgttcgccgtcgaaccgtccgcctctgaaccatccttaatgacctccagatcagcgatcttcgccgtcctgacatcggcgataaatgtcacgttccggctctggctgctgttgttgatgctagcggtgaccacactggttccggcggtctggctggtgactgagatctccaccgtgccgtccggttgcgtggtgaccgtcgaagcagtcgtggcaccgttgcctgccaacacgctgaccgtctgtccggcaagcgtattaccgaacgcgtcggtaacctttacctgcagcatgttcgccattgcgccgtctgccactgcgccgtccttaatgaccaccagatcagcgatctgcgccgtcctgacatccgcgacaaacatcacgttccggctcaggctgctgttgttgatggttacagtgactgtactgatccccgccgtctggctggtggcagagatctccaccgtgccgtccggccctgtgatgacagtcggagtgaccgttgcgccgttacctgccatcacgctgaccgtctgtccattcagcgcattcccgaacgcatcggtgaccttcacctgcagcgtattcgccgtcgcgccgtctgccactgagccgtccttaataaccaccaggtccgctatcttcgccgtcctgacatcggcgacaaacgtcacgttctggctcaggctgctgttgttgatgctggcagtgactgtactggttccggcggtctga

SEQ ID NO: 25671 - DNA, 618 bp, Escherichia coli
atggttgcagtgactgcactgactcccgccgtctggctggtaacagagatctccaccgtaccgtccggctgcgtggtgaccgtcggggcgaccgttgcgccgttgtccgccaacacgctgaccgtctgcccggcaagcgcattaccgaacgcatcggtgaccctcacctgcagcgtgttcgccgtcaaaccgtccgcctctgaaccatccttaatgaccaccagatcagcgatctgcgccgtcctgacatcggcaacaaacgtcacgtcccggctcaggctgctgttgttgatggatgcagtgacaatactgatccccgccgtctggctggtgacactgatctccaccgtaccgtccggccctgtgatgacagtcgaagcgaccattgcactgttgtctgccgtcacgctgaccgtctgtccgccaagcgtattaccgaatgcatccgtgaccctcatccgcagcgtgttcgccattgcgccgtcagccactgagttatcctggataacgaccagatccgctatttttgccgtgctgacatcggcgacaaacgtcacgttccggctcaggctgctgctgttgatgctggcagtgactgtactggtgcctgccgtctga

SEQ ID NO: 25672 - DNA, 816 bp, Escherichia coli
ttgataatcagcgaaatgcaacgcaagcttgccacatgggcagccaccgatccgtccctacggattcaacggctgctgcgtctgataacacaaccagaatggctggctgaagcggcgcggatcacgctttcatcaaagggggcccatacccccggcgttgatggcgtgaacaaaacaatgctacaggccagactggctgttgagctgcaaatcctcagggatgaattactctcaggccactaccagcccttgcccgccagacgggtttacatccctaaaagcaacggcaaactgcgaccactgggtatccccgcgttgcgggatcgtattgttcagcgggccatgctgatggcgatggagccgatatgggagagtgattttcatacgctctcatatggcttccggcctgagcgcagtgtccaccacgcgatccgcacggtgaaattacagctcacagactgtggtgaaacccggggacgctgggtgattgaaggcgacctgtccagttacttcgacaccgtacatcatcgactgctgatgaaggctgtacgccgcaggatcagtgacgcacgtttcatgactctgctgtggaaaaccatcaaggcgggacatatcgatgtcggtctctttcgggcggccagtgaaggtgtgccacagggcggtgttatatcgccgctattatcgaacatcatgctgaatgagttcgatcaatacctgcatgagcgctacctgagcgggaaagccagaaaagatcggtggtactggaataacagtatccaacggggccgaagtacggcggtcagagaaaactggtag

SEQ ID NO: 25673 - DNA, 207 bp, Escherichia coli; identical to SEQ ID NO: 6172

SEQ ID NO: 25674 - DNA, 1041 bp, Escherichia coli
gtgaacaccgttggcaaatcggcattcgtggaggctgtcggtcaggcgagcgatgatgcggaaggttacctagattttttcaaaggccagataaccgaatcccatctcggcaaggagctgctggaaaaagtcgagctgacggaggataacgccagcagactggaggagttttcgaaagagtggcaggacgctaacgataagtggaatgccatgtggggcgtcaaaattgagcagaccaaagacggcaaacattatgtcgcgggtattggcctcagcatggaggacacggaagaaggcaagctgagccagtttctggttgccgctaaccgtatcgcgtttattgacccggcaaacgggaatgaaacgccgatgtttgtggcgcagggcaatcagatatttatgaacgacgtgttcctgaagcgcctgacggccccgaccattaccagtggtggaaatccaccggcattttccctgacatcagacggaaagctgaccgctaaaaatgcggatatcagtggcagagtgaatgcgaacgccgggacgctcaacaatgtcacggtaaatgaaaactgtacgattaagggcatgctggaggcgactcaggtcagaggtgacttcgttaaagctgtatccaaatcattcccgaaacaggctggtacgtggggtaacacggaaacaccaaacgggacggttacagtcaccatcagcgatgatcataactttgaccgtcaaatcattattccgcccattatctttaacggaatagcgtatagcgatccgggaagtggtaataacccgggaggtacaagatacacgggttatggttttgaagttcgcaaaaacggtgtattaatcgcatccagagaaactaaaggggccattcccggtagctacagtgcggttattgatatgccgagtggcaggggaagcgtcactctggagtttaaggttttccataaaggcaatcagtgggcaggtaatatcaccgactgtacggtgattgtgaccaaaaaagccgcttccggcatcagtattcgttga

SEQ ID NO: 25675 - DNA, 819 bp, Escherichia coli
atgccggtattaagctgggatttagatcccacattaacgcgagtaaaatacttaccgactggggagaaaaaagcacaaattcatcctgaacaatatcgccgtctctctcctttcgatgacagagtcagagcacaagttggcatgttatatgaagatcttgccggacatgctgcttttgatggcatattgttccacgatgatgctttgctttcagattatgaagatgccagtgcaccggctatcacggcttatcagcaagcaggctttagcgggagtctgagcgaaattcgacaaaacccggagcaatttaaacagtggacccgctttaaaagtcgtgcgttaactgacttcactttagaacttagtgcgcgcgtaaaagccattcgcggtccacatgttaaaactgcacgaaatatttttgcacttccggtaatacaacctgaaagtgaagcctggtttgcacagaattatgctgatttcctaaaaagctatgactggaccgctattatggctatgccttatatggaaggtgtcgcagaaaaatcggctgaccaatggttaatacaattgaccaatcaaattaaaaacatccctcaggctaaagacaaatctattttagaattacaggcacaaaactggcagaaaaatggtcagcatcaggctatttcttcgcaacaactcgctcactggatgagcctattacaactgaatggagtgaaaaactatggttattatcccgacaattttctgcataaccaacctgaaatagacgttattcgtcctgagttttcaacagcctggtatccgaaaaatgattaa

SEQ ID NO: 25676 - DNA, 405 bp, Escherichia coli; identical to SEQ ID NO: 25566

SEQ ID NO: 25677 - DNA, 354 bp, Escherichia coli
atggataatcttattggcacaccaccaaaccacgcagttccccataagtatatggatatggagcaaatggaatatttatgtcatctcaatcgtttttctaaattgtctgacgattttttaataaatggtcagagagaggacctttttacatacaaatatgttttagatggctctttttcaaatttacagcatttacttcccaaaggacaactacagaagatacaacagcgattaagttctcttatgtataaaaacaagtttcattgttttcatgtttttttattaaaactatgctcaattgagagtattcctctcccaaatgccgattacgctttctttgtgatatgcgtttaa

SEQ ID NO: 25678 - DNA, 153 bp, Escherichia coli
atgcatctgaaagtggatgatgaggttgttttttgtatgtggtgctgtttttttctgtactggcgggcttcagacgtgcggattcctccggcgcaggccggattattcagaggaggtcaggttcagggggaagctgtggccagccggctgtaa

SEQ ID NO: 25679 - DNA, 426 bp, Escherichia coli
atgaaatattcgacatttcatgatgttaaccttgatatgtgtgagataaagaattgcaattttgacaattcagagatgaatttcatttcgtgcgtcgggacaaattttagcggttctacatttaacaatgtaaaaacaacaacagcgcaactaattaagacaccaacaaagtggacgaataatactctaaaatattggttctccagttgtaataaacgtaatatcatcttcacttttaatacaatatctgatagaaatatgaaattaaaaggtatcaaggatatattactgtcgttggttgaccaaaaagtcaatatttatagtgtaaggcaagagcttctggattttcttaataatgatttatataaaaataatggagagattctctcttataaagaatcaataatgttgttttgtgctgtgtag

SEQ ID NO: 25680 - DNA, 528 bp, Escherichia coli
gtgaagctgaaccgctttgaaagtaacgtagccggtaaaatgagcagcggtggagccgccaacggcagttatcatagcaacgggctgggggggcacattgaaaccgggatgcgatttaccgatggtaactggaacctgacgccgtatgcatcgttaacggggttcaccgctgataaccccgaatatcatttatccaatggcatggaatcgaaatcagtcgatacccgcagtatatatcgtgaactgggcgcaacgctgagttacaacatgcgtctggggaacggcatggaagttgagccgtggctgaaggcggctgtgcgcaaagaatttgtcgatgataaccgggtgaaagtgaataatgacggtaattttgtcaatgatttgtcgggcagacgtggaatatatcaggcaggtattaaagcctcattcagcagttcgttaagcgggcatctcggggtggggtatagccatggtgccggtgtggaatccccgtggaacgcggtggctggtgcgaactggtcgttctga

SEQ ID NO: 25681 - DNA, 372 bp, Escherichia coli; identical to SEQ ID NO: 24282

SEQ ID NO: 25682 - DNA, 336 bp, Escherichia coli
gtgaccctggagccccgtgtcttcggctggatggaccgtctttgcgaagactactgcggtggtatctggaatctgtacaccctgaacaacggtggcgcatttatggcccctgaaccggatgacgatgatgacgaaacatgggtactgttcaatgccatgaacggtaaccgcgctgaaatgagcccggaagccgccggcattgctgcctgtctgatgacgtacagtcatcacgcctgccgtacggagtgttatgcaatgacggttcattattaccgtctgcgggattacgccctgcaacatccggaatacgacgccattatgcgcattattgactga

SEQ ID NO: 25683 - DNA, 150 bp, Escherichia coli
atggcacaggttaatatgagtttaagaatcgacgctgaactgaaggatgcttttatggccgctgcaaaaagcatggaccgtaatggctctcagttaatccgggattttatgcgccagaccgttgaacggcagctattagacgtcaactag

SEQ ID NO: 25684 - DNA, 2136 bp, Escherichia coli
atgaaatcaatgaatattgccgccagtagtgaactggtatcccgactttctactcatcgccgcgtggtggcgttggcagatactgattttacggacgtcgcggcagtcgtcattaccgctgcggatagtcgcagtggcattcttgcgttgcttaagcgcaccggttttcatctaccggtgtttttgtattccgaacatgttgttgaattacctgcgggcgttacggcggtaatcaacggcaacgagcagcagtggctggagctggaatccgcagcctgtcagtatgaagagaatttgctgccaccgttttatgacacgctgacgcagtacgttgagatgggtaatagcacctttgcttgccctggacatcaacatggtgcgttctttaaaaagcatcctgccggacgccatttttacgatttctttggcgagaacatctttcgcgccgatatgtgtaacgctgacgtaaaattgggcgatctgctgattcatgaaggatcggcgaaagatgcgcagaaattcgcagccaaagtctttcatgccgataaaacctattttgtgctgaacggcacatcggcagcgaataaagtggtgacgaatgcgctgttaacgcgtggcgatttggtgctcttcgaccgtaacaaccataagtcgaatcatcacggcgcgttgattcaggcgggggcgacgccggtctatctggaagcttcacgtaacccgtttggtttcattggcggtattgatgcgcactgttttaatgaagagtatctgcgccagcaaattcgcgacgttgcgccagaaaaagccgacctgccgcgcccgtttcgcctggcgattattcagctgggaacctatgacggcactgtctataacgcccgtcaggtgatcgataccgttgggcatctgtgtgattacattctgtttgattccgcgtgggtcggttacgaacagtttatcccgatgatggcggatagctcgccgctgctgttagaacttaacgaaaacgatccggggatctttgtgacccagtcggtgcacaaacagcaggcgggattctcacagacgtcgcagatccataaaaaagataaccatatccgtggacaggcgcgtttttgcccgcataagcggttgaataatgcctttatgctccatgcttctaccagcccgttctatccgctgttcgccgcgctggacgttaacgccaaaattcatgaaggggagagtgggcgtcggctgtgggcggagtgcgttgcgttggggattgaagcccggaaggcgattcttgcgcgctgtaagctgttccgcccgtttatcccgcccgttgttgatggcaaattgtggcaggattatccgacgtcagtgttagccagcgaccgccgttttttcagttttgagccgggggcgaagtggcacggctttgaaggatatgccgcggatcagtattttgttgatccgtgcaagctgttactcaccacgccgggtatcgatgccgaaaccggcgaatatagcgatttttgcgttccagcgacgattctggcgcactacctgcgtgagaacggcattgtgccggagaagtgcgatctcaactccattctgttcttattaactccggcggaaagccacgagaagctggcacaactggtggcgatgctggcgcagtttgaacagcatattgaggatgactcgccgctggctgaggtgttgccgagcgtttataacaaatatccggtgcgctatcgcgactacaccctgcgtcagttgtgtcaggagatgcacgatctgtatgtcagtttcgacgtcaaagacctacaaaaagcgatgttccgccagcagagtttcccgtcagtggtgatgaatccccaggatgcgcatagcgcttatattcgcggtgaagtggagttggtgcggattcgtgatgccgaagggcgaattgcggcagaaggggcgttgccttatccacctggcgtgctttgcgtggtacccggggaagtctggggtggggcggttcaacgttatttccttgcgctggaagaaggcgtgaatttgttgccgggattttcgccggagttgcaaggtgtctatagcgaaaccgatgcgaatggcatgaaacggttgtacggttatgtgttgaagtaa

SEQ ID NO: 25685 - DNA, 1260 bp, Escherichia coli
gtgcgctcaaaaaactttagttggcggtactcccttgccgccacggtgttgttgttatcaccgttcgatttattggcatcactcggcatggacatgtacttgccagcagtgccgtttatgccaaacgcgcttggtacgacagcgagcacaattcagcttacgctgacaacgtacttggtcatgattggtgccggtcagctcttgtttggaccgctatcggaccgactggggcgccgccccgttctactgggaggtggcctcgcctacgttgtggcgtcaatgggcctcgctcttacgtcatcggctgaagtctttctggggcttcggattcttcaggcttgtggtgcctcggcgtgccttgtttccacatttgcaacagtacgtgacatttacgcaggtcgcgaggaaagtaatgtcatttacggcatactcggatccatgctggccatagtcccggcggtaggcccattgctcggagcgctcgtcgacatgtggcttgggtggcgggctatctttgcgtttctaggtttgggcatgatcgctgcatctgcagcagcgtggcgattctggcctgaaacccgggtgcaacgagttgcgggcttgcaatggtcgcagctgctactccccgttaagtgcctgaacttctggttgtacacgttgtgttacgccgctggaatgggtagcttcttcgtctttttctccattgcgcccggactaatgatgggcaggcaaggtgtgtctcagcttggcttcagcctgctgttcgccacagtggcaattgccatggtgtttacggctcgttttatggggcgtgtgatacccaagtggggcagcccaagtgtcttgcgaatgggaatgggatgcctgatagctggagcagtattgcttgccatcaccgaaatatgggctttgcagtccgtgttaggctttattgctccaatgtggctagtgggtattggtgtcgccacagcggtatctgtggcgcccaatggcgctcttcgaggattcgaccatgttgctggaacggtcacggcagtctacttctgcttgggcggtgtactgctaggaagcatcggaacgttgatcatttcgctgttgccgcgcaacacggcttggccggttgtcgtgtactgtttgacccttgcaacagtcgtgctcggtctgtcttgtgtttcccgagtgaagggctctcgcggccagggggagcatgatgtggtcgcgctacaaagtgcggaaagtacatcaaatcccaatcgttga

SEQ ID NO: 25686 - DNA, 534 bp, Escherichia coli
atggacacaacgcaggtcacattgatacacaaaattctagctgcggcagatgagcgaaatctgccgctctggatcggtgggggctgggcgatcgatgcacggctagggcgtgtaacacgcaagcacgatgatattgatctgacgtttcccggcgagaggcgcggcgagctcgaggcaatagttgaaatgctcggcgggcgcgtcatggaggagttggactatggattcttagcggagatcggggatgagttacttgactgcgaacctgcttggtgggcagacgaagcgtatgaaatcgcggaggctccgcagggctcgtgcccagaggcggctgagggcgtcatcgccgggcggccagtccgttgtaacagctgggaggcgatcatctgggattacttttactatgccgatgaagtaccaccagtggactggcctacaaagcacatagagtcctacaggctcgcatgcacctcactcggggcggaaaaggttgaggtcttgcgtgccgctttcaggtcgcgatatgcggcctaa

SEQ ID NO: 25687 - DNA, 234 bp, Escherichia coli; identical to SEQ ID NO: 20771

SEQ ID NO: 25688 - DNA, 246 bp, Escherichia coli; identical to SEQ ID NO: 4533

SEQ ID NO: 25689 - DNA, 141 bp, Escherichia coli; identical to SEQ ID NO: 7328

SEQ ID NO: 25690 - DNA, 639 bp, Escherichia coli
  misc_feature (620)..(629): n is a, c, g, or t
atgaattttttattctttttagagccttctatagagttgaataatcctctcttcagatatgctactttaagaaactctcttcttcctcaaattaaaacattaagaagaatggggcatgatgtagttacattattgagtgactcggttgcacaaaaatgtattgtagataataaagtagaacaaattggaacaattgccgtaattgattctatcgaatggatgaatggagaagggtattttcctcgatcgctgcgccatcaatctaggaattatttcgatggggaactattgaatataaaaaaaatattgttgaattctattggggacctttcttataaaccagatgtaattatagtttgggaaactccagcctattacttagaagagttatttccagaggcaaaatgtatctatcaaatgcctggggtattctcaagacctccatttgcaaatttggtatcatttgatgatagattgctggaaagaaaaacaaaaccggtagattatattattgatgatggtgagttatcagattttgaaaaattaagagaaaaagagaattcttttttttcctccataagcccaactaaaaagaagatagaggatataaggaaaaaatnnnnnnnnnnaatattctaa

SEQ ID NO: 25691 - DNA, 219 bp, Escherichia coli
atggcagacatcattgattcagcatcagaaatcgaagaattacagcgcaatacagcaataaaaatgcgtcgtctgaaccaccaggctatatctgccactcattgttgtgagtgtggcgatccgatagatgaacgaagacgcctggccgttcagggttgtcggacttgtgcaagttgccaggaggagatcgaacttaagaacaaacaatggggactgtga

SEQ ID NO: 25692 - DNA, 321 bp, Escherichia coli
atgatccataaatcaagccttggagaaaaacttcgcctgattcgagaggcagagggattgtcacgtagagagatggaagaggtgacaggggtatctcaaaacaatctcaaaaattatgaaatattgggaagaatgatacctggagaaacgttactcctgattttgaatcatcctcgttttcggaagtattcggattgggtgatgtttaatcaaactaatgctgcgacggggcagattgctccgcctctctctcttgatggtttcttcgattcggagggcgatcaggtttcaaccgaaacaaaccaaaaatcaccccgctaa

SEQ ID NO: 25693 - DNA, 141 bp, Escherichia coli
atgttcgggcatggcaagcgtatgaatatgccgtggtggggcggttttgatccgcgtgcgtgggatgtggcaagcctgatggattttgctgtgccggtggtggcgtgtctgctggtctggctgttggttaatcgtgggtga

SEQ ID NO: 25694 - DNA, 1071 bp, Escherichia coli
atgtctctagttacccgcaatgtattcattgatactgagttttttgtaaaagcaaacctggacttcaactcaaaaactataaaatcatttgaagaactatgtagaaatgatgagttcaggcatatttctacaacaattgtagttaaagaagttgaacgaaaaatcatcgagcatatacaagaagcattgaaagggattaacaatttccgacgaaaggctgttatcctcaaagaatatgaagatgacaatattaaaaatctattttgtgaaattaatgaaacagacattcaagaaaaggcattaagcgcatttaatggtttcatggaggactcaaacacaactattgtagatatgtcgaaggtggacctcaatgaagttatagacatgtactttgataaaaaaagcccctttagtgcgaaaaaacctaacgaatttcgagacgccttcactcttttagcaatacgttccgcgctaggagataatgaaaaaatttatgtggtttcagaagaccctgacctaaaaggttactgtgaaaacaatgataatttcataattataggagcactaaacttactactagatgattacaacaaacacaatgacgaaagaactggatttatagaacgttttttagaaagcaaacatgaagaaatcatacaaaaattaacggaagaattagaaactgctgaagcttataattcttcaacatgggaagactcagagattgatagctttgaaattacgaacataagcgaatttgaacccaaaataattcatttggatgacgaaagttgtcaaattacttttgatgttactgttagttttaatgtcactgccagcggacctgataccgcaaacggctattatgacaaagaggatggaaaattttatacctttgacaccgtatctaatcacgaggaggaggaaaaggattttacagtagaactagaattattctttgaaatagacgaaggccagtttatcaatgatgagtttaatttgcacataaatggactggatgctggtattgaattttgtgtcgatgaaaactcatgggaagactatagatag

SEQ ID NO: 25695 - DNA, 315 bp, Escherichia coli
atgaagtggcgttattccctgcgctggaaattaccctcaccgtgtcctggcaaagaggtgctggtgacggcagaagttgaagccgggcagcctgcaccggaatcggtaatgtctttatgggttgccggagccggatatgcggtgtgtctcgatttctgcgcagataaaccagtacggcgctggagtgatgagcgaaaagcagcgacccgtcgccggaatctggataaacgcatacacaggattgccccgttgtttgcggatgaactgatcgcgcgggaactggctgaacgaccggattattttcagggaaagtga

SEQ ID NO: 25696 - DNA, 510 bp, Escherichia coli
atgcagaacgccagacacccgaaaacacacagggaactgtgcgaactggcctgtcgttttctccgcaacaacggttttaaggtggtgttcagtgaccgttttcacgcatggacgtcctgcggtgaacatcctgatgctctgggcttccgtaacggagcgtcatgtctcattgaggtgaaatgctcacggtctgatttcctggctgaccggaaaaaggtgttccgggcagagccggaaaagggcatgggagactggcgtttttatctctgcgagccgggggtgattaccgtggacgatttaccggcgggctggggactgttgtatgtgattaacgggcgggtcaggaaagtacatggctggcccggaaatcatcagtgggtggttacggttgcaaaaccgttcagggcaaacaaacaggctgaatgcgattatctgttcagtgcactgcgtcggctggaaatccgggccgtgacggagaacggtacagacgctgacagggtagcagtatga

SEQ ID NO: 25697 - DNA, 435 bp, Escherichia coli
atgaaaactgaactgaccctgaatgtattacagaccatgagtgtacaggaatatgaagatatccgggctgccggaagtgatgaacgccgtgagctgacacacgccgtgatgcgggagctggatgcgccggacaactggacgatgaacggcgagtacggcagcgagtttggcggatttttccccgtccaggtgcgtttcagcccgttccatgagcgttttcatattgtcgtatgcagccccggtgaggccagcgcaacctggatggtgatactggtcagtatcagcggacgtcctttccgggtgattcgcacacagccatcgttccgccctgaaacggtgaatcacatcctgcgtctggcggcgagtctggatgaggccggatattccactgccagcatcatcaacctgctggtcacggaaggaggtgctgcatga

SEQ ID NO: 25698 - DNA, 513 bp, Escherichia coli
atgaaaaagagtatctatttcattttatgtccagttctttctctatattgtggaatgacgatggctgtaacaccaccaccggcaaatactattcctagtagtaccactgcatttgcacaaggtgagatcgaaataactaacaattgtagggttagtatcatcgcccctagcaaaattgtacgtcctgctacagaggccacacgagctgataatgtgacttttactattactcaaaatcagtcttgtgcagatataggctccagaattgcttattggtctgaaggaaatcagtcggcttttaaaatggtcaataaaaataatccttctatatattacagttttactaactttaccgaagctcctgcaacaactacattaactggtagtaaacaatattcggtagctgctaaaaaagttaagagcgtaagagtgagtatcccaattccccaagcaggtgtttatattcctggtcagtatacacttggtcttaacgcaggcttggtcataaactaa

SEQ ID NO: 25699 - DNA, 444 bp, Escherichia coli
atgtacaccagtcgccccaccgcacagggggattcaccacacggcgcactttttaacaaatatccctccggccagacaataataaacataatgaattgtgatcttcttaacagttttaaagtgttacagataatatgccaagtaattgcttgttttttcatcaataggaagaccacaccaacaaccccagctatcagccagaaccgacattatccggctgataaaatctaccatcactccaacaccaatcaccgcctgtgccagatcgcgtttctcaaactttttaatctctgttgccactctgtgggttttctttttgaatttgaaaataccaaatatcgtgacgtttctttgggggatgagctatcaagcgggaacgatctgcctacagagaaagtcagccagaccactctgcaaattatccccgaaaggctctgtgactga

SEQ ID NO: 25700 - DNA, 741 bp, Escherichia coli
atgccaacaccaaatcctctggcaccggtgaaaggggccgggaccacactgtgggtttataacgggagcggcgacccttatgcaaacccgctttcagacaatgactggtcgcgtctggcaaaggttaaagacctgacgcccggcgaactgaccgctgagtcctatgacgacagttatctcgatgatgaagatgcggactggaccgcgaccggacaggggcagaaatctgccggagataccagcttcacgctggcgtggatgcccggagagcaggggcagcaggcgctgctggcgtggtttaatgaaggtgatacccgtgcctataaaatccgcttcccgaacggcacgatcgatgtgttccgcggctgggtcagcagtatcggtaaggcggtgacggcgaaggaagtgatcacccgcacggtgaaagtcaccaatgtgggacgtccgtcgatggcagaagatcgcagcacggtaacagcggcaaccggcatgaccgtgacgcctgccagcacctcggtggtgaaagggaagagcacgacgctgaccgtggcattccagccggaaggcgcaaccgacaagagcttccgtgcggtgtctgcggataaaacaaaagccaccgtgtcggtcagtggtatgaccatcaccgtgaacggcgttgctgcaggcaaggtcaacattccggtcgtatccggtaatggtgaacttgctgcggttgcagaaatcaacgtcaccgccagttaa

SEQ ID NO: 25701 - DNA, 1245 bp, Escherichia coli
atggcaggaggaaaaaaagatgataatgcagcgggatttgtcctgattttagtttgcgttattctctgggggatttatgtggcggtcagggcgctgataaatcttaatgagcgctttattgatgcagtatcgaatccggcaggtattattggtttgttttttggtttgcttactgtatttgcaattttacttcgtttttttatttaccggagactcagaaagaaaacagcagcctttgagcaggccgtttcagagctggttcagagagagcggggttttaatgaaactgtcaatgccgcgatagcccggggaatacgacaggaaaaggagcaactggccagacgtcgtgaggaatttcataccgccagacagaaggccagccgtgcaatgcaacggattgttgattccgcctggaaatttaaggcgaagactctgctggctggtgtaacgattaataactggcaaagcaaatatgaccagcttcgtaaggaaagagaggcttacgctgctgtcagtgagaaaatagcctttcttaacctggaagataattctgaccgggagagtatcaggcaacagtttctggacaaagtggcattgctggaaaaagcgcaggaagagaaggaatatcaggcagagcttaagcgtcagatgcgtgaagaaaaagagcgtcaggatgaacctgaacggcgccagcgggaagcggaagaggaagaacggcgtcttgctgagcagcagaaactgattgaggaggcgctgcgcgcagcagaaggggctcacagggaggagttagagaaacaacgcctggagctggaacagaaaattcaggaagcgcatgcgcagtatgaacgtgctaaatccatggctcagcttacgaaacaggggcatgtttatatcatttcgaatattggttcgtttggtgaggatgtctttaaaattggcatgacccgacggctggaacccatggacagggtcaaagagttaagtggtgcttctgttccgtttgattttgatgttcacgccatgatttcctgtgatgatgcgcctgcgctggaaaaaacacttcatgacagtctggaaaaataccgcattaacaggattaacctgcgtaaagaatttttccgcgtgaagcttgagaaaatcattaatgaagtggagcgtcaccacgggcaggtggaatatgtggctgacccggcggcgctgcagtacctgcagagtctggaatacgcggaaaatgaagctgcctga

SEQ ID NO: 25702 - DNA, 219 bp, Escherichia coli
atgttttggaaaataatcaatagaatggatgcctccaagatttttattaatgatgaacataatgggtggtatgttcatggaattcctggtgtaggtgatgttaacaaaagcattgattttttattcaatattttaaatatgcttaaagcagaagaggtaatattgataggcccctcaatgggggggtatggtgccatgttatatggtgctattcattaa

SEQ ID NO: 25703 - DNA, 837 bp, Escherichia coli
atggtgctattcattaaaatgaagatgccatggatacaatttcgatgcctttcttttggtggtgagtttcatctgtatataaaggaagcaagaagtggcaagctatctaaaaaaccacgtaatccatattatgctgatataagatgtttagtatcctcatctgaattggatatagttcaggtttatggtgacgatgatatcaatgatatttatcaagcccatcttgttcatggaattaaaaatattgatctaatttctgtaagaaattccccgcatgcggtttcgacgtatttaggaaagaaaattgatttaacaaaagcaattaaaaattatgaatcctatggaaagtttgaggttgaatctgcatctaatgtcagtcaatttaaagagcatggcgctctattatattttggtcatttaatgatgcttgataataatgctaaagaggcaattaaaaaattagaaaaagcaataactatcataccagaccatgctctgacgcagcataaacttggacttgcattactcatgctgaaaaaagaaaaagaagcacttttacaccaagaattagctataaatctaaatcctgatctggctcatgcacattttcatattgccatgctatcagagatgaatggcgatattaaaaaggctgagtatcattacaaagagtgtattaggtctgatgaacgtcatattcgagcattgatttcattatcattgttatatgaaaaagtaaaggagtatgaactggctttggattgttcatataaggttttagcgtattctgaaggtaataaaatggccttggatatagtacgaagaattacaaagtaa

SEQ ID NO: 25704 - DNA, 240 bp, Escherichia coli
atgcaattgagcagcagtgaaccttgcgtggtgatcctgaccgaaaaagaggtagaggtaagcgttaataaccatgccacgtttacccttccgaaaaattacctggccgccttcgcgtgcaacaataacgtcattgaactctcaacgttaaatcacgtattaatcacccacatcaaccgcaacatcatcaacgattatctgttgtttttaaataagaacttaacctgcgtaaagccctag

SEQ ID NO: 25705 - DNA, 174 bp, Escherichia coli; identical to SEQ ID NO: 5968

SEQ ID NO: 25706 - DNA, 207 bp, Escherichia coli
atggaacgcttcttcaggagtctgaagaacgaatggatgccggtggtgggttacgtaagcttcagcgaggcagctcacgccataacggactatatcgttggatattacaacgcactaagaccgcacgaatataacggtgggttacccccaaacgaatcggaaaatcgatactggaaaaactctaactcggtggccagtttttgttga

SEQ ID NO: 25707 - DNA, 297 bp, Escherichia coli
atgtgccagaaggaactctataagttgaagttattccactggattttctgtctggttcaaatgatacaatacatgatgaaggatagttatacaaaaattggggagcaagattacgaagtaatgcttccattaactcgggtaaatcttcatctaatctctgatgaatttttgaacttaagaaagcaaaagactccgttaatctctgaacatgtggatcttcagaccccccctgattgtatccaagacgccgggctacctttggatatttttttgcaaactcaataccttgttttctaa

SEQ ID NO: 25708 - DNA, 2850 bp, Escherichia coli
atgaaaatctgtctctaccataccctgaacccggaagcgatcccgggctataaaaaatttgcacaggccattaaggctgataacttcgttcaggctgatgttcgtaaaattgacactaatctttaccgcgcacggctcagtatccgggaccggttactgttttcactgtatcgctatcagggggaaacagtctgccttgtactggaatatattcgcaatcatgcctatcacacttcacgttttcttcgcaaaaacgtggtcattgatgaggaccgcttacaacaacaacctgtgccggatcctgttgatagtgcgcctgaacagctgacctacatcaatccgtctcacgggcgttttcaccgtctggataaaatgttgtcctttgatgatgatcagcaggcactgtacgaacatccgctgccgctggtgattatcggctctgcggggagtggcaagacagcgctggtactggaaaaaatgaagcaggctgctggtgatatactgtacctcagcctgtcctcatttctggtggaaaaagcgcgaacactttataacgcgtcgggtgaagggagcgaggtgcagaatattgactttctgtcgctgacggagtttctggaaaccctgcgcattccggaaggccgggaagtgaccttccgtgcgttcagcgactggctgccccgtaacaggaccacggctgcactgggatctgcccataccctgtatgaagagttccggggtgtgattggtgcggctgcgtccggcaacggaccgctgtccagggaggcttatctgtcgctgggggcacggcagtcgctctacagtatggatgaccgtcagacagtttataccctgtttgaacgttatacggcatggctgaaacagtcgcgtcagtatgacagtaatctgctcagccatcagtacctgccgcaggcagagccccgttacgatgccattttcgtcgatgaagttcaggatatgacgcctgttcagctgcagctggtactgaaaacgttacgtcatcccggtcagtttttactctgcggtgatgccagtcagattgtacaccccagctttttctcatggagttcgctcaaaagtctctttttccggcaacaccaggggaacgaggctgccattaatattctgcaggcgaactaccgtaacgggcaccatatcaccgcactggctaaccgtctgctgaggctcagacaggcccggttcagtgccattgatcgggaaagtcaccatttcgtcagaagctgtggtcagacggaaggcgttgtccggttactggaagacagggaagagacaaaacaggaactgaatggcaaaacatcacgttcgaatcgggtggcggttattgtgatgcatccggaacagaaagcacaggcacggtgctggttcagtacaccgctggtgttttcagttcaggaagtgaagggactggaatacgaaacggtgatcctccacaacatggtcagcggcgcccggcaggcgtttgatgatatctgtgagggcatttctccggcagaccttgaggttgaggcccgttattcccgtccgcgggacaggcaggatcgttcagcggaaatctataagttttttatcaacgcgctctatgttgcgctcacccgtgccacacacaacgtgtatctggttgaacagcaactgacgcacccgttatgggagctgcttgcgctcacgcatcaggaagagcaactggagctgaaggaagagatttccagccgtgatgaatggcagaaaaccgcacatctgcttgagaaacaggggaagcaggagcaggcggacagcatccgcagccggatcctgcagacgtctgaggtgccatggcaggtcatcaccgcagaggacgcccggcagtggaaagaacagatcctcgcaggcacggcaggtaaagccacacagttgcaggcgctggagtacagtctgatttattcccttttcccgctgtataatgcgctgtaccgggaagattttaagcccgcagggcagcccagggcgaagagtctgcagttgctggagcagaagtatttccggacataccaggtgaataacccggttgcgctgttgcgggatattgagcgttatggtgttgatcaccgctcgccgtttaatcttactccgctgatgtcagcagcccgggcaggtaatatcgccctggttcagcaactgcttgatcgtggtgcagatccctcgctgacgggtaatgacgggctggcggcttatcatcatgtactgtcagcggcggtcagtacgccccgttatgcgcaacagaaaagcgcgcagttgtataccctgctgaaaccagaaagtctctcactgcaggtggacggacgactcatcaaactggacaaccggcagatgtccatgttcctggtgctcctgatgcaggcgctgttccacacgcatctgggaggtgctctggttttttcagaagccttcagtgcggcacgactggcagagtgtgtggcccatcttccggaggcgctgctgccgggacgtcgcaaacgaaggagttatatcagcagccagctttctcagcatgaagttaacagcaaacacccgtatggcaaaaagctctttctgaggctgaaccacggacagtatattcttaacccgggacttaaaatcaggcagggggaaaggtggtgtgcggtttatgcgttgcagtcaccggaagatctgggtcatgatttgcagacttatctgcaggatatgtctccggaattagtgaaaatcctgggagggaaaaaggatgtttataaatacagtgaagaggctgtcggatactgggcggagatgatccgtcgtgccgctcagaaagcgtga

SEQ ID NO: 25709 - DNA, 381 bp, Escherichia coli
atggctctccagtacatccagacgaccgccggattccagaacaacaccgtcagccttaccgttttccaccgtgaaattccccagacggtttgtgccgatgacagttgcagcagtactggtaaccagtgcaccgcccgtgttctgggtgactgcagtggcttccccgccggcatgtaccctcagttcaccgttctgatttatggtggtgttaccggcagcgccacctgccttaacaacctgccagcccccctcgttaattaccgtgttcagcgcaagtccgtccctgtgcacatactggtaaccgccattcagtgtggtattcagggcccttccgtgtaccgactggtcaccacctgcgtaaatgagagtgtcacgggctag

SEQ ID NO: 25710 - DNA, 441 bp, Escherichia coli
atggaacgttaccggggagttactttttgcaacagcacggctcagcgcggcattcggtgtcgtctgattatcaaagcgaatctcccctgcgttaacaatatcgccggtactgaccacatcaccattcagtaccatactggcgcctttactgagctgtgttctgccactcagacttcccccggcagccagcgtcagtgttccacgatgtccgacagtggtgttgccagcctgtcccccggcattaaccgtaaagctgccgccattttccagcagcaggccgctggcctgaccggatgtgccatcaatactgaacttaccgctggcattggtcccctcaacagtggcaccactgtctgcaatcagggcaccaccggatgttatggtgacacttgtcgccttaccgccggcagacactgccagggtaccgccgtcatccactag

SEQ ID NO: 25711 - DNA, 285 bp, Escherichia coli
atggcgggctggaacgaaggcatgacccgcttacagcagctggctgagcgcctgaaccgtctggatgagcagcggggaaaatacatgacggtcagtgaactgaaaacggaggtgtttggcatcatgcaggcttttaaccggcatatcccggcagaagagcagttacgtcgctatgatgaagttcgtaaccagaatagcagtgaacagcagcaaaaaaaggtggaaaatggtcttgtcgagctggtgagtcgttactgggttttgacgcaaggggacatgaagtga

SEQ ID NO: 25712 - DNA, 906 bp, Escherichia coli
gtggatagcgcacgcgcccttattgcccggggatggggagtaagcttagtcagccgttgtctccgggtgtcgcgtgcgcagttgcacgtcattctcagacgaaccgatgactggatggatggccgccgcagtcgtcacactgatgatacggatgtgcttctccgtatacaccatgttatcggagagctgcccacgtatggttatcgtcgggtatgggcgctgcttcgcagacaggcagaacttgatggtatgcctgcgatcaatgccaaacgtgtttaccggatcatgcgccagaatgcgctgttgcttgagcgaaaacctgctgtaccgccatcgaaacgggcacatacaggcagagtggccgtgaaagaaagcaatcagcgatggtgctctgacgggttcgagttctgctgtgataacggagagagactgcgtgtcacgttcgcgctggactgctgtgatcgtgaggcactgcactgggcggtcactaccggcggcttcaacagtgaaacagtacaggacgtcatgctgggagcggtggaacgccgcttcggcaacgatcttccgtcgtctccagtggagtggctgacggataatggttcatgctaccgggctaatgaaacacgccagttcgcccggatgttgggacttgaaccgaagaacacggcggtgcggagtccggagagtaacggaatagcagagagcttcgtgaaaacgataaagcgtgactacatcagtatcatgcccaaaccagacgggttaacggcagcaaagaaccttgcagaggcgttcgagcattataacgaatggcatccgcatagtgcgctgggttatcgctcgccacgggaatatctgcggcagcgggcttgtaatgggttaagtgataacagatgtctggaaatatag

SEQ ID NO: 25713 - DNA, 366 bp, Escherichia coli; identical to SEQ ID NO: 10065

SEQ ID NO: 25714 - DNA, 678 bp, Escherichia coli
gtgtccggtcagcacatccaggcgtccgccattttccagtacgacattatcagctttaccctccacaacagagaatgctcccaggcggtttatgccggtaacggttgcagccgtactggtaaccagtgcgccgccctgcttcagggtgacattcgtggctgtaccaccggcgtccacctgcagtctgcccttctgattaacggtggtattcccggccacacccccgtttttgacaatctgccagccgtcactgttcacaacagtgtcagacgctgtaccgccgttgtgcacatactggtatcccccattcagcgtggtatccagtgcgtgaccatgtacagtctggtcgccgccggcataaaccacagtggtatttgtcgttccttcagttctcacaatctggcgaccgtttttattgatggttgtgcgtacggcatccccgcgaacaaactgcccggtatcaccgttttctgcatccggtcccccttccgccccggtattaacaacggtatccgttgccactgtaccgggcttgacgacctgccagcccttatcattaatgacggttcctgtggctatcgccccctcatgcatccactgttcgccaccattcagcgtggtgttcactgcccgtccctgaaggctctgtccgcctccggcactgataaccgtgtctga

SEQ ID NO: 25715 - DNA, 198 bp, Escherichia coli
atgaaatcattaaccacggaaaccgcactggatattctgattgcgtggctacaggacaatatcgactgcgaatcgggaattatctttgacaacgatgaggatagaacggattcggcagcactgttgccctgtatcgaacaggccagagaggatgtccgtaccctgcgtcagctgcagtttctgcaacagaaccggtga

SEQ ID NO: 25716 - DNA, 312 bp, Escherichia coli
gtgattactaaaggttcggaacgtgtggctgaagttgctgcccgcttttcgcttgacggtatgccaggtaaacaaatgagtattgacgccgatctacgcgccgggatcattgatgcagatttagcaaaagaacgtcgtagcgtattagaacgagagagtcagctgtatggttcctttgatggtgcgatgaaatttatcaaaggtgatgctattgcaaacattattattatctttgttatcagtaggagtaggccaaaatggaatggatttctcgacagcgttgaccgtctacacaattcttaccgtcggtga

SEQ ID NO: 25717 - DNA, 420 bp, Escherichia coli
atgtttctcaataagttgtcacaactattgtctcttcagtcggcagaggctttatttctgaaaactttaatgaataacccaataattaaaaaatttattagcgcagaagattactggatattttttctgatatcgttaataaagtttcctgagactgcagaggaactcctgaaaaatgcactggtaaccctacccgcagatgctaattataaagacaaaacgttactcctgaaggcgatttacagcggatgtacaaatcttccattttcactttttattaataatgaacaattattagagattagggagtgttgtaaacaggcaataaaagtaacatttgcagcagagctctttgatacacaaaacagtaataaaaaacaaaataaaaaaccatggaagaaggtaatgttcaatgtttaa

SEQ ID NO: 25718 - DNA, 204 bp, Escherichia coli; identical to SEQ ID NO: 14452

SEQ ID NO: 25719 - DNA, 291 bp, Escherichia coli
atgagtctgtcaaacccttcaggctcgtatgttaatagcgcagcgacagatgtatttgcagagaaaaccacatttggatgtattgcaaaagctgatggttactttcatgtggtgacaaatggtaaagcggttaatgaagtttattgtgaatataatggcgtgaccgctgataaaaatatccgatttggagggcagacgaatactggagaacgacatctgtttggccatattcgcaatttccgcatatggcataaagaattaaatgacaggcaattaaaagaggtcgtatga

SEQ ID NO: 25720 - DNA, 444 bp, Escherichia coli
atgaaaaacttgaatgattctctgaagacccaggaagtggtggcacaagagcaaaaaacgctgcgtatccgtcagattcaggaagcgttgcagtatgcgaatcaggcgcaggtctcaaaacatcaaattcagcaggctcaagatgtgacgcaagatactctgttcttgctggggagcgaagcgctggagtcaatgattaagcacgaagcgacccgtccgcttgaattctcatcaaactactatcagacccgtcaaaatctgttggatattgaaggcttaaaagttgatgatcttgatattcatgcctaccgctatgttatgaaaccgacgttacctattcgtcgcgatagtccaaagaaagaaatcaccttgattctgactgtgctactgggtggtatagttggtgctgggattgtgctggggcgtaattacaacgcgaagtaa

SEQ ID NO: 25721 - DNA, 489 bp, Escherichia coli
atgaaactggccctgacgccggaagctgacagcgttaacgtgcaggcactgaacatggggcgcattgtcgttgatgtcgatggtgttaatctcgctgaactgattaacaaggttgctgaaaacggttattcactctgcgtggtgaatgaatccaaccaacagtcaaccagtacaccaccaccgttaacaccccttaccggcatacgctgcagcaccgcacatatcacggaaacggacaacgcctggttgtactcgctgtcgcatcagaccagtgacttcggcgaatcagaatggattcattttacaggtagcggatatctgttacgtaccgatgcgtggtcatctccggttctgcgacttaaacgcccgggtctgtccagaacgttccgtcgtccggttgccgctctcatccggcgttatggcgtcagtctcattcatctggataccagtgccggatgcctgccgggtttacccactttcgactggtaa

SEQ ID NO: 25722 - DNA, 246 bp, Escherichia coli
gtggcggtgctttccgttaccgaaggtgaagacaaaccgctgaaatatccgcatatgtttgccgccgcctcgctgatgctgctcaacaaagttgacctgctgccgtatctcaactttgacgttgagaagtgcatcgcctgcgcccgtgaagtcaatccagaaattgaaatcatccttatttccgccaccagcggcgaagggatggaccagtggctgaactggctggagacacagcgatgtgcatag

SEQ ID NO: 25723 - DNA, 939 bp, Escherichia coli
atgccccgtgagttacccggcgggcgcgcctcgttcattcacgtttttgaacccgtggaggacgggcagactcgcggtgcaaatgtgttttacagcgtgatggagcagatgaagatgctcgacacgctgcagaacacgcagctgcagagcgccattgtgaaggcgatgtatgccgccaccatcgagagtgagctggatacgcagtcagcgatggattttattctgggcgcgaacagtcaggagcagcgggaaaggctgacgggctggattggtgaaattgccgcgtattacgccgcagcaccggtccggctgggaggcgcaaaagtgccgcacctgatgccgggggactcactgaacctgcagacggctcaggacacggataacggctactccgtgtttgagcagtcactgttgcggtatatcgctgccgggctgggtgtctcgtatgagcagctttcccggaattacgcccagatgagctactccacggcacgggccagcgcgaacgagtcgtgggcgcactttatggggcggcgaaaattcgtcgcatcccgtcaggcgagccagatgtttctgtgctggctggaagaggccatcgttcgccgcgtggtgacgttaccttcaaaagcgcgtttcagctttcaggaagcccgcagcgcctgggggaactgtgactggataggctccggtcgtatggccatcgatggtctgaaagaagtacaggaagcggtgatgctgatagaagccggactgagcacctacgagaaagagtgcgcgaaacgcggtgacgactatcaggaaatttttgcccagcaggtccgtgaaacgatggagcgccgtgcagccggtcttaaaccgcccgcctgggcggctgcggcatttgaatccggactgcgacaatcaacagaggaggagaagagtgacagcagagctgcgtaa

SEQ ID NO: 25724 - DNA, 501 bp, Escherichia coli; identical to SEQ ID NO: 11817

SEQ ID NO: 25725 - DNA, 1008 bp, Escherichia coli
atggctaaagaatatccatacgatcccacaggtcctgtaaaaacccgggatttgagggtgtgcaaattttatgcaaatttgttaaaaaacaaattcattgatttccctgacatcccctgccaggacatcgaaatttgcagaaataaattaaataatgcaattcaccaatatgcgtccaatgaaatcgccataaagagtttaatgtcagttctggagattatgcgggaagaaaatattcttccggatgaatcattcagctggttaaaaaagaatgagagagccacattctggttatgggcaacactccacaacatggatgatattgagctgaaatacatgtgtggctacagcaacgaaagcctgcgcgacgatatttccaccacctggtatcagcgtttaaatttaagtctgtcaccaacaaatcatcaggacagaataaaccttatcatcgcatttatggatgagcttattttccctgcacctccactaatgcacagaaaaaaaacactgatggagaatctgaagcaaagatggaaaacggtcttcgccagaccattgccattaaaatggttgccggttaacgatgaggaggctgtattgtgggcctgggaatctctgaaaaaacaccagtccggaacattcggttctttctggaatacagaccctctactgactcaatggttctctcctgtcagccattcagaacgcgctctggctttacaggcggctctcgatatctgggatgcacctgacagcagacgtttgtttttgcttaatctgaataaagcctggaatcagcaaaaattacgtaaatcccgcacggataaaaaagcaatcaacacttatctgaaaaacgatactaaaacccggctcgatttaatggctgaacacaacagattgcgcattggagacatgctggagaaactgattaatgagtactaccaggagcattattgcaggcagcacaaccacacagaaacagaaaacccggctgacgacaaattctga

SEQ ID NO: 25726 - DNA, 606 bp, Escherichia coli
atgaaacaacaatatcagacccgttacgaatcgctccacgaaagctaccagaaatggctgaccggcttcacccggcacgctgtatcctggggagtgtgtcatccgaatatctactacttccataatctgacgcccggatggatatcattcaatggtgaaaaacccgagatcgccattgttccccggagtttgcaccggctgatttatggtcatgacaaacaggccacaccgcctctggatgatgatctggtggtgaatttatgtaccagtgaacatctgctggtgcatcatccgatgctggaagggatcctgctgtctgaatgtgagcgcctgggacagcactctctggcaaacagactgatcagcctctttcgtcagttcagtggtaccgaactgcgcctcaaactggtctggttgtgctggtatgacttaatgatcggcaacagcctgaaagactggacagaaaatctgaaacgcaaatcagaaaaagaactggcggaatggatcatcacccgccagaaccagaacgcaccactgacgaacctgatggatcagtacgtgctcctggcataccgaacaacagttgatgaagctcattccgggtga

SEQ ID NO: 25727 - DNA, 240 bp, Escherichia coli
atgattcatcacagaacgtttgctaatctcgcactggtcagcaatatgctggtagctgggccagcactcaccctgatcgctggcattatcagccagcttgatcagaaccagttttcgcaatggattacccactcgaattttcatcgctttaaccatcagctccatactcatgctgcacctccgagatgcttcatgttttttccggagcgaaaggctataagcggcatactgacgcggtaa

SEQ ID NO: 25728 - DNA, 351 bp, Escherichia coli
atgtgtcaggtatgtgttacggagatgaacgtgagtgaactgttgatgacatgtcgaaacgacttagatgatgtcgaaagcgcgctatgtgaggagcgcgtgataaatccagcggaaatctggctactggctgggtggcatccggcatatagacagcatgaacgtagcacaggcttttgtatggaacgtgggaacctgtcgtcccgatgtcaagggagcggtgtgaagcagaagaactgtgagcgcctgagtaccaatgcggggcacaggggcagatggttccgtagtagtgttgaagtatctgtaatgggtgctgagcgaagggaaccagttgtcggggaggatttatga

SEQ ID NO: 25729 - DNA, 1272 bp, Escherichia coli
atgagccaaccaaaacagcgggaagagtccatgaatcatcatccaaaaccatttatgatttccaagatcgcggtctggaaagcatatcaacgaattagagccaatcgtggctcgccgggtgttgacggtcaaacgatagagacgtttgaagggaacctgtcgggaaatctctacaaactctggaatcgaatggcttcggggagttatatgccgccaccggtaaggcgcgttgagataccaaaagcaacaggagggacgcgaccgttggggattccaacggttgcagaccggattgctcagatggtggtcaaggatgtgctggagccaatactggagccgcattttcataacgactcctatggctaccgaccacataaatccgcacatgatgctctcagagctgcacggcatagatgctggcgatcaaactgggtgctggacgtggatatcaaagggttcttcgataacattgatcatgaccttttgatgaaggcggtttgtaaacatacccggtgcaagtggactgaactttacatcagacggtggttgactgctccggtgcaaatgccggatgggacactacatgcaagggacaggggcaccccacagggaggcgttatcagccctctgttggctaacctattccttcattatgctttcgatctgtggatgacccgtcagtatccagatcgtccttttgaaaggtatgctgatgatatagtgattcactgcaatagccaggctcaggcaatagtgctgcgaaacaaactggagcatcgacttgcggaatgcaagctggaattaagtcagagcaaaacgaagatcgtttattgcaaggatggtaaacgcagagaaaattatcctgatattagttttgacttcctgggatatacctttcgccccagaaaagccagggcaaaagatggagtaaaatttcttagctttatgcctgcaataagcggtaaagcatccaaaatgatccgtcagacaatacgaggatggaaatggaagcaacgaaccacgcttacagctgaagaagttgcgcgccgtataaatcccattcttcggggatggataacgtattatggatgtttctaccgttctgccctgtatccagtattggcgcatgtggatctgcattttgcaaagtggctcgccgataagtacaaacggctcagaggtagcagaaagcgtgcattcctgctgttaaaacatatacgccggaaacgtccgggtctgtttgtacactggtgtatggcatacaagagttga

SEQ ID NO: 25730 - DNA, 396 bp, Escherichia coli
atgctgcagggcgtaatcccgcaaccggtaataatggaccgtcatggcataacactccgtacgacaggcatgatgactgtacgtcatcagacaggcggcaatgccggcagcttccaggctcatttcagcgcggttgccgttcatggcgttaaacagtacccatgtttcgtcatcattgtcatccggttcaggtgccataaatgccccgccgttgttcagggtgtacagattccagataccaccgcagtagtcttcgcacagacggtccatccagccgaagacacggggctccagggtcacccactgtggaatgaggccaaaatgctgcggccagaaactgatgcgctgttcatcagggacgggagtggcaaccagttgagactggttattccctga

SEQ ID NO: 25731 - DNA, 396 bp, Escherichia coli
atgctgcagggcgtaatcccgcagccggtaataatggaccgtcatggcataacactccgtacgacaggcgtgatgactgtacgtcatcagacaggcagcaatgccagcggcttccgggctcatttcagcgcggttgccgttcatggcattgaacagtacccatgtttcgtcatcatcgtcatccggttcgggggccataaatgccccgccgttgttcagagtgtacagattccagataccaccgcagtagtcttcgcacagacggtccatccagccgaaaacacggggctccaggggcacccactgtggaatgaggccaaaatgctgcggccagaagctgatgcgctgttcatcagggactatggtggcaaccaactgaggctggtcattccctga

SEQ ID NO: 25732 - DNA, 540 bp, Escherichia coli
atgccggttatccagctcaggaaaacgtcgctgcaccgacagaggaataccgtcgagaatactggatatttcccttgctatacgcgacagcacgaaagtacagaatgcggtttccaccacttcagccgattctttggcatttttcagttcctgcgccgtcgcctgagcacgggtcaggcgatggcgctcaaattcaagtgttccggggtgaagatctgcctcgctggccagccgcagttcttcaacctcccggcgcagcttttcgttctcaatttcagcatccctttcggcataccattttatgacggcggcagaatcataaagcacctcattacccttgccaccgcctcgcagaacgggcattccctgctcctgccagttctgaatggtacggatactcgcaccgaaaatatcagccagctgctttttgttgacttccattgttcattccacggacaaaaacagagaaaggaaacgacagaggccaaaaagcccgttttcagcacctgtcgtttcctttcttttcagggggtgttttaa

SEQ ID NO: 25733 - DNA, 459 bp, Escherichia coli
atgtcggttttccagttccggaaaacgccgctgcaccgacagggggatcccgtcgagaatactggcaatttcacctgcgatccgcgacagcacgaaagtacagaatgcggtttccactacttcagcggagtctctggcatttttcagctcctgtgcgtcggcctgcgcacgcgtaagtcgatggcgttcgtactcaatagtcccaggctggagatctgcctcgctggcagccctgtaatcctcaacctctttacggagtttttcattttcgatatcagcttccctctgcgcataccactgaattgccatggcggtatcaaatacagattcaacgcccttactacctccggagacgcaagggagtccctgagactgccagcgttcaatcgttcgcggatccacgttgaaaatttcggcaagtttctttttattaaccttcatgaaacagtctcacaataa

SEQ ID NO: 25734 - DNA, 240 bp, Escherichia coli; identical to SEQ ID NO: 11875

SEQ ID NO: 25735 - DNA, 174 bp, Escherichia coli
atgcagcgtgtggccgggaaaaaccgttaccccattgatgtggtgaaaatcccgatggcagtgccgctgaccacggcgtttaaacagaatattgagcggatacggcgtgaacgtcttccgaaagagctgggctatgcgctgcagcatcaactgaggatggtaataaagcgatga

SEQ ID NO: 25736 - DNA, 525 bp, Escherichia coli
atgaaaatgtcctacttccacaccctgcttgctgaggtttgcaccggtgtggctccggaagttaacgctaaagcgctggcctggggaaaacagtacgagaacgacgccagagccctgtttgagttcacttccggcgtgaatgttactgaatcaccgatcatctatcgcgacgaaagtatgcgtaccgcctgctctccagatggtttatgcagtgacggcaacggccttgaactgaaatgcccgtttacctcccgggatttcatgaagttccggctcggtggtttcgaggccataaagtcagcttacatggcccaggtgcagtacagcatgtgggtgacgcgaaaagatgcctggtactttgccaactatgacccgcgtatgaagcgtgaaggactgcattatgtcgtggttgagcgggatgaaaagtacatggcgagttttgacgagatggtgccggagttcatcgaaaaaatggacgaggcactggctgaaattggttttgtatttggggagcaatggcgatga

SEQ ID NO: 25737 - DNA, 450 bp, Escherichia coli
atgaccactattaccagagaaaacgcggaaattaaatcattcatcactggtttcctgagcgacccggcgcacgataaccaatcttcaagcagtctgcttgccaatgtgtttcgtatcgcactggcatcgttggaagcagagccagtcgcgtggcgatatcgctacgtgaaaaaaggcgttacggactctcagggggagccgtgggttggtgactggaaatatgtaccgacaaaagaggattgcaacgacaggccgagctatgaaattcaggcgttattcactcccccgcctgtgccactgataccagaaggattgattaaagcagtgcgcttctatgaacaggttaagcgtgaaaatccgccagtcgaaaccggagcatggaaagacgctgttgactgggttctcgaagaggcttgtcaggctgtaaacattcgcatcaaaggagagtga

SEQ ID NO: 25738 - DNA, 183 bp, Escherichia coli
atgggaaaagatgaaaatatcatcgtcgaggatgtgttccatcaagactatggtcctgaggatggcattccgcctcattggtgctgcaagttttatcgtgatggatttgctgattatgaatacttcagcactaaggatgaggcatacgatttcgcctttaaacatggatacaaaccattctga

SEQ ID NO: 25739 - DNA, 393 bp, Escherichia coli
atgaagctgagatataagctggttattgttgccttcgttgttaccgtcattggttccttcatctggtctgctgggcattactacagcaaatatcagcacgaaaaggagcgtgctgatgaggctgtacgaaatgctgaatcagcaactgccattacccgtaacgttctgcaatcactgcaaatcatcaatacagttatagaggctaaccagcatgcaaaagagcagatcgcactggacgcatcgggagcctcggctgatatccgggttgctgttgcgaatgatgattgcactaatcgccctgtccctgctggcgcagttaagcggctgcaacaattcgcgaacggtctacgtcaaagtgccggtagtcccgttaccggccagcctgacggctga

SEQ ID NO: 25740 - DNA, 561 bp, Escherichia coli
atgatccataccgtacacttcatgacagatgtgacagttgcttctgtatccagccttatggatgtttgcctcaaagcgatatcaagccctaaccaaccagcctctgagatcaggatttacatctctagtaaaggtggagataccgttgcaggttttaccgcatacaactttcttaagtctcttcctgtaaaggtgaagacacataaccttagtaacgtggaatctatagcaaatgttattttcatggctggatctgagcggtttgctaatcctctctcgcgatttttattacatcctttacattggggatttgccgccccacaagcagatcacctcaggcttagggaatgggcggcatgtctggatgacgacttgcaaagatttgtgcaggtgatgaatatcgaggctctcgctgtagccccagatgagcaaattgactgggctaatttgatcacttctgcaaccatcattgatccgggaagggccaccgagttgggtatgatccagaatgtcgaggctgcaaccatacccacagattcgatcaggtggtgggttctgtaa

SEQ ID NO: 25741 - DNA, 450 bp, Escherichia coli
gtgagtgaaaaattatcagttgagatttacagggatgccaaaaaattggttaaaaaggcattgctgatttccctatttttgttagccattgccattgttttttttgtggcagacaaaatctatacagaacaaaaaaatagcaaaaaaaatgctgagctgattatgcgcgcagaaaatgttgtcaagggtaaatcacccatggtattcaacagaacattccttggcgaaagctcctctatttctgtttggtttattaatgattcagatgggcatattcttgtagaaaaaaacggtgaaaaatcattgttttcatcaagagaatccgtatacggtggcatcaatgcataccatcaagccggaaaggcatgtgaaaccctgtctttttctatgacttcaggttttgtgatatctgtttcttgcgattttgatgattattacactaaaaaatag

SEQ ID NO: 25742 - DNA, 354 bp, Escherichia coli
atggctgaacgttctaacgtttatgacgctgaaaatctcttctctggtaaatatttcgccacgcttggtgatgaaccgccgcatacaccaactggtagtggcaatggaggaggatcagacatgaacagtagaatgacccgcattgagactatcgctgaaaatcagagcaaactcatctcggatattcgcaatgagatgattgccattcgcggtgatatgcatggcttggagcgtcgaatcattgataagatggatgaaaatagagacaaagccagtgagaatcaaaaatggctcattggtctattgatttcatcgatccttgtcccgctgtttatcgcattggttacaaaatag

SEQ ID NO: 25743 - DNA, 372 bp, Escherichia coli
atgaacaataaccaaaacatcacagaagaaaagaagagggaagctgagtatcgcacagcgttgtcttctatcaccactaaggtgctggacgcatttcttcgagcaaaaggtgtacaagaagaatgcccgatgtgtggaatgtctgagatggttgtccctcaagttcaatttataaaccaagatagtggagaagatgtcatggggagacatgctcactacgaaaaatatataaagggtgatgatgataatcatacattcaacccaatcaattattgctatcacgtcatttgcaaacattgtggctataccatgcagtacaacacaggagttgtgttaagttggtatcttaaggagaaagagcgtaatggctga

SEQ ID NO: 25744 - DNA, 1272 bp, Escherichia coli
atgattactggtttcgctcctggttataaaaaagtaactatcggtgatgatgttattacttttccatcagagaaggttgtatctttcactcgctccacttctgcaacgtatataaacaaatcaggttcatttgcttttgcagaaattaacgagccgcgctttgaaaaggaaggtttattaattgaaggtcagaggacaaatacatttactaatagtaacaatccttcattatggaattatgacgacaagaatatagaaataaccacatcggttgatgaatatggttttaaatatggtttgttcgatgtaaaggaaacatcaactactgaaagggcgacgataatatctactggatacagtagggttattgatgttgctgcaaatgaatctgttactttgtcctgtagggttaagaagataaatggagaaggtattataacgttaagacccagaatatctttcgttaacgatgacggcacaagcaacacgctggtagctggttcctacatagattgcgaaactggtgatgttttaggtttttctggtggggatgctgtaaatcatgtcatatacagagaagctaacggatggttacgcgtcgaatttacatataaatcaccagaagcaaaaagcatgtatgggcgctttgaaatgggagcagataaaagggcgatcaaaaaaggcgatcagataatgtttactacgccgcaatttgaaaaaggatcgtgtgcatcatcatttatcgttacatcagatgtggcagttacacgggctagtgacgtggtaataatgccaataagactgaactggtcaacacctccgttaagcgttcttatggaagttaatatcaactgggacaaaatgccaaacagtgaaggttcagcaaggcttcttaacgtgtcaataactggcgcaacaacggatgttgctgatgaaagttatatgtattttggttttacctctggaggcgcgcgctcaattataactaacggaaaaggaacaaagaccgagtataaagcctactgtaacaggacaacccgcaggtttattgctggatttaagtttacagagcagaaagaattgcgtgctgttataaacggtaactttggcgctgttggtgtatcacaacacacaagacaacgttatacagaagggccaataaatataggcggtcaatcaatatcaggtaacaggcatttatttggacacgtgcgcaatttacgtatctggcataaggaactgacagatgcacaaatgggagaaagaatataa

SEQ ID NO: 25745 - DNA, 231 bp, Escherichia coli
atggataaaaatgaagtaatccttcttagccgccctgccatctgccgtatgcttggaggaattagcaggggaacgttttattcgtggcgtaagaaatgggaacagaacggaactccattccccgaccctgttgatgtgctgggaaccgggcggggcgtcatgtatcgctatcaggatgtgatgaaattctttaaatcaattggactactttctgacagcgatacccagtaa

SEQ ID NO: 25746 - DNA, 189 bp, Escherichia coli
atgaaacacgatagagcggaaattatcttcgatatggtgcgtgaaagagtgtgcgctatggatactaagattgcgctgataagagcgggcgtgccagccaccgcacaagaactgatggcaatcatagaaaaacgcgaatatgaactaagcaaagccaaaagagcgtttgccttaatgtacgcaaaataa

SEQ ID NO: 25747 - DNA, 2178 bp, Escherichia coli
atgagtggaaatctcgggaccatatactacgaggtcgatgcccggacagggaaactccttgccgcgcaacagcaggcagatgaggcgttcgatcgcattgaacgaggagcaaggaaggctgatagcggcgtcaaaaaactgaatacgcagatgaccaaaacgtctgccgcagtcaaaagcaacctttccccggcaattcgcaacgcatcataccagatcgcagaccttgccactcaattgcagatgggcggtaatgcgcttcaggcgttcgctgtgcagggtgcgcagttattagctggctttggcacgatgggcgcggtagctggcgcggtactggctatcgctggcgctatgggcggaagcctggcacaaggcgctgatagtgcagccggatcggttgagtatctggacaaggcgatcaccaaactgaacgaggtcatagctgtaaatgagcagggcgtgacggtgatgactgatagttacgccaatctttctaaggttaacgctgaagtggcgaaacagatgcggaacatggctgagatccaggcaattgcagcactgcgtgacctgaaagaacaggcaagccaggcgcagggggaaatgtcatcattctggcgcggcttgcagggtggtaaagctgacgcacaagcggcagcgcaggcacttgatgacctgggaatcacaaccaacgactacaaagaggcgatagccatacttaacgccaaccagcccaccacacaggcgcaaatggcaacgctggctaaatccgtgatgtacataggcgaggaatacaacctgacaaaccagcaagcctacgagttcatccgggcgctgaataaggccgcgacaacgagaacgccggaagccatgcaagaactgtcaggattcatgcaggtattgctacaggacacagaaaacggtaacgaggcattccgtgaactggctatcaaattcgtcgatgcacaaaccaaaggcgcaatgctggaagaccaactaaaccgactgaaaggcgctattagtgacgcagccacagaagccagaaacgcaaactttaccactatgctcaacaccgtcgccgcacgcctggcaaccattgaacaaggctgggaagcaggtgtacgaatgcagatgaaagcccagggctacactgaagagcagatcgatgaatatgtgaacatggaaacggcgtaccgtgatgcaaaagccgctttggacgagaagaacaaggccgaccgtgaagctattgcgctatccaaacgccaggccgcagaagcagcccgcaaggcaaaacaggaagaagctgaagcacaacgcaaggccaaacagttagcagcgcagaaggagcaagctggacgctttacgcaacaggtaatgaccgaatatcaaacgaccgtggatccggcaacaggccaggcattgaatccggcggcacaagtagaaatgcaggaacagcagaagaaagcggcgttggataaatacaggcaattgggtgtcatggatgaacagcagtaccagtacacgctaaccgccatccagaaaaccgcgtcaatgcgccgccagcaaatcatcaaagatgaagccgatacgttgttcaacaatcagcagcagttgatcgggtcatttggcgacttcttcggtgagcttgccggggtgatttctgacggtgcaggtgagcaaaacgcggcatatcgggcgctgttcgccgtgcagaagggttttgtattagcgtcagcggctttaagccttcaaaaagcgctggcagaggcaaacgccttacctttcccggctaaccttccggcctatgcgcaagcgatgtcagcaggcacgcagatcctttcagctattcgcgggatagctttcggtggcggacgctacaacggcggtgcggttgattcgggtaaattctatcgtgtcggtgagtccaacaagcctgagctgtttcaatccggcgggcgacagtacatgattcctggtgagggcggcaggattattcccaaccgtgatattggtggcggtggcggaatcacactgaacgtaacaaacaatatcacagcaagcaacggctggaccgagcaagacagcaaagcgttgcagcagacgattgagaatacagcgatgcggttgatgcaacgagagtcaaccagaccgggcggaatgctccagggacgcagacgttaa

SEQ ID NO: 25748 - DNA, 387 bp, Escherichia coli
atgttcaagcagaagaagactaagccgctgattagcaaggcaaaacaaggcaaatcatcgctttcactggctgaacgcccggtgtcaacgtggacaaaagccgatctggaagaatacgaacgggtcatgctggatatttacgaagacgtctatcacgccagtgagcttgccgatttgcgggacaactggcgctacatcatcgagaacggcgagcttatccatgagcgcattgctgagccagcaggtttattccttgcttacgatgattcacctgatttcggtatggacctgcgaccttatcggaaacaaggtttaccgctgccggagcagtatcgcattggctaccgccgcaacctgggtgcatggcccttgcgatccggggattga

SEQ ID NO: 25749 - DNA, 435 bp, Escherichia coli
atggatactgatatttcagaaatcaacgagatagataattttcggaacactacagagaaaaaacaggcagggaggccaacaaaatacagtgaaaaaatggcgctccgtattgcgatgttagtgggtgaaggtaagagcctacgggcaatcagtcagatgcctggctttccagccttaagcacgatcatgaaatggcagatcgagttcccatcactgaaagaggccatagcctggatgaagtggctacacgctatggatctcggtcagcaggcaatcgaatgtatcgaggcggtgaatcttgatgatgagaacgccgccatgcagcttaagaaggcacaggcaaaagcgcgggcgcttatagacacggcaaaactattagatctgaaatcgtcaccgtttggaggtaaagaccatgttcaagcagaagaagactaa

SEQ ID NO: 25750 - DNA, 270 bp, Escherichia coli
atgttagtgcttaaggtagccacaggcatggcccgtgttatcaccaaccaggttaatgaaattcgtcattccaacggtgatttaccaatgaaacgccaatctctcaggctgttttctgagtacgtcttcggaacgttcgcatcactgaagcgtaaattgaacggaggaccggtcagccatgaagaacgcgaatttttgaaacgcctcacaatgatcgagaaagacctacacacgcagttagccagtatcgggtgtgacgtaggcgagtaa

SEQ ID NO: 25751 - DNA, 345 bp, Escherichia coli
atgagttttttagatgaagcaaaacgccggatcgccctggcagttaaagcgaacgaatcagcagcggaaccggacgacgctgagcttaaattccgcaaaggaatggcaatggtattggagagccttgataaagtcgactcgaagctggtccaggaaatgatggttgtgctgatggaccaactggagcgccgatttggtggtaaacagcaggaacagccggaagagcaacaaccagccgccaacgcccagcgcggcccgaaaacgcccgatcttgagtcttatttttccacgcctacccggaaaacttatgccgggacaccggatattggaagctatttcgactaa

SEQ ID NO: 25752 - DNA, 471 bp, Escherichia coli
atgacacgcaaagaatatcttcaccaactggcacaagaaattgcacaagaaattattagcatgaaccagccactgattgaccgtattgtcacggctgaagtcgataaaattaaatttcaattagcatcgctcgcgccgaacatggcggcaatgcgaagcgaaatgttggctgtaatggggtcaaatagctctttgggcgtgtatctggcaaacgtcgataaactacaagccgataaatcagacattgccacaaacgcattcacagcgcaacagcaggcaccaaatccgcgagaatatttcggggaaaatctggatgatttcacacgcaaatactttgatggagaattggatgatttcacgcgccagtatttcgacggtgatgatctggtaaataaaagtatccgtgaatatttcgatggcagcgacgagtttaatcgccgcttagatgactacttccatatgggggaataa

SEQ ID NO: 25753 - DNA, 312 bp, Escherichia coli
atgtactacccaaataacagctaccttaatcgggttggtaataattacaagccttcacaggaagttttagacaaacgcgcttttgataaagcaatgagcgccgaggcagatcgtatcactgacatgctgcctgatttactcagtgaaattctcgacgaatccgctgccgcgttatttagccagatgccggaatgtatggctgttgaagatagtgtgactcacgacgtattaaatgaatcccatattcgccggatgcttgccggaaaggtggcgaacaggatcggccacggtatgagttttcttcagaaataa

SEQ ID NO: 25754 - DNA, 573 bp, Escherichia coli
atgagcaaccaaatcaaattcaattacatatcgcggctgtggtatttgcaggacggcgtagtttatacgcggtatggaaataagcccgttgctttttctagtaagactggaaacgggcggcgctttcaaatcatcaaagttaacggcaaacatcacgtagttttaatccatgaggcggtatttatgcttcatcacaaccgcgcaatagctgaaggtaaggagatccatcatatagatatgaatcacgagaataacgccatcgagaaccttatagaattaacgccagcgcagcacggacgcattcacaagtaccaagcaaacgatcccatgcgcggtatttgcttgattcaaggcgcgtggcaattttattggtacgacgatgacggaagataccgcagccgcaagttccacggcatcaacgaagcgatggccttccgggatgagattgagcgcccgcgccgccaggaacttcgcgcgcttggcttgaactgcatgcgtgttgtttctggtgaaaaatcacgagcaattacagccagcaaattctatttttcacgtagcaacgcaattctatag

SEQ ID NO: 25755 - DNA, 189 bp, Escherichia coli
atgaacagctttccctcgctaatgaccgtcaaggaagtcgctcgacttttttgtgtaagcgagcgcacgattctcaggtgggtaaataaaatccccgggtttccaatccctgtaagtcctgaaggaaccccgctccgctttattcgcagtgaggtgttggaatatttttatcgagggcgcgggcaatga

SEQ ID NO: 25756 - DNA, 783 bp, Escherichia coli
atgaatattttaccatctgcctatgtcttgcaacaaggcgaatcactgggcaaatacgatttaaagaaaatcgattccatccctgaagaagtacagaacgccatgcgtgatggcctgaatgacatccgctttaatggttatcgctgggaatgcaacgccaaaactggctgggtgcgtatagcaccgatttcatcacctgccgatgcagaacctgaatcaccagaacaaaacaaggaagacgcccgcgctgagttcatggcgttgcaaggtgagtacctatcggtcaagccagaaggcaaaagcgataaaaagtccgccacagagatcgtgaatgaattacgcagtaaggccgccgctaagacttcgcagtcagcaccgcagccgccagcacaggagcagaaagcgccggaagaaccggaagccatgcgggataaagagacacaataccaaacggaagaaaaaggaatttattgtagttatgtctgtttgggtgcggcacgtaaggcatttgtcagaagtggttgcgagaataaagctaaagctacagcctggagcgtattatccagcattgcgtcagcagcaagaaagcagaatgatggagcttatgtatctgaagtttgccaagcaaaaatagctgatgaatggggcatgaatcgccgaaccgtaattcgccagatgaaattcctggttgagttaggactcattgagccatacggggaatatgttattggtcagcacgcaagaaaatacagaatgctttttcaggtcgagaacgcaagataa

SEQ ID NO: 25757 - DNA, 192 bp, Escherichia coli
atgaacggacaaatatcaattgttcgaccgggagcatgtgacgattgcgagatacgaatgattattcgtctggcgagggggaaaacaataactgctctcattacacctgaaaatctcgcattagcattaacaggaaagtcagacctgccagtagagctaaagctgcgaaatattgagattaaagtgaaatag

SEQ ID NO: 25758 - DNA, 549 bp, Escherichia coli
atgtctcgcaattcagatatctataaacttatcggagcggctgcaggtgttgaaaatggtcgctctgaagcatccttaaactatactgacagtcaagaacaggtttttaaatctgcatttgagccgtctaatcatgagagcgatgatgattcttcttcagaaaataaagctattctggaggaagaagagtttggttctaatacaggtgcattgcatgagtttatgcagcagcacagaatggacagtcttcaagctcagcttgatatgctcaaatcacaagtacgcgataagatagctgacgcaactggtaaagaaatagacaatgaacttcggacaaaaatggcatcattcacggtttgttttatgtcgtggtggtgcttatttgtagccgtaatgtttgtatcgtttcttattgctcatgaaggaaagcctccagttgaagcaatcgttgcattactaggtacaagtacaattagcattgttggtttggttggcttcgttgttagtggattgttcaaatcaagaaaagatggcgataaagaaaaataa

SEQ ID NO: 25759 - DNA, 474 bp, Escherichia coli
atgtacagcccggtacaaatagccaataaattcataacgttgggaaaccaacatcataatcctctgacccacatgcaactgcagaagcttacttatattgcccatggttactatttagcattaacaggtaagcctttgctcaacgaatgtgtctctgcgtggaagtacggtccggttattcccggaatgtacgatgctttcaaagattatgggaataagcctgttacgaatgtagcagtagctccttttggtggcattgttactatggatccgcaagcagagagcattataggggctgtttataaattttacggctcgaaaaatggaattgagttatcaactctaactcatatgccaggtacgccttggtcacaaacttataatggtattggctcgtcaatcatcccagatgatgcgatcaagacttattatcatgatttattgaataaccgacagcaatgtcagggcctctga

SEQ ID NO: 25760 - DNA, 132 bp, Escherichia coli
atgaaacggaacacgaaaattgccctggtaatgatggcgctttcagcaatggcgatgggatcgacatctgcatttgctcacggcggacatggtatgtggcagcaaaatgccgcgcctttgaccagcgaataa

SEQ ID NO: 25761 - DNA, 210 bp, Escherichia coli
gtgaattgtattaacgacctgaacacaggcgaggtaaaaggtggttccgttcatctggatgcgcagaccgttatgcgccttaagcagtacaggatcgaccacataaatcatcatcctgaccaaccattaccaggtgcggcgcagattgtcagacacgcggttaacgcgtggcttgataagaatggttttgcatctgggggggagcaatga

SEQ ID NO: 25762 - DNA, 582 bp, Escherichia coli
atgaataaaaatattgccgtgacgggcaaggggtacgctcgttcagtaaaaaaattctgcgatattcgtgatcttgtcgttctgcgctttgatggcgtggatgttcgtgtggtgtatctgaacggcgatccgtggtttgttgcaaaggatgtttgtgaagctctggaaataagcaactcacgcgatgctctaaaagctctggatgtggatgagaagaataccgtcgctttaagctacggtattcgcggaaatccaaatcatagcgtcgtttctgaatctggtttttacaagctgatcgccagaagtcgcaaagctgttactcctggcacgttcgcccatcgtttcagtaactgggtattcaggaatgtgataccaggtatcagaaaaacgggggcttatggtatcccgtggggtgcattacaggatttttcccgccgtaaagagcaatatcaaataagtgccagcgagaaggggagggagctacaggcatgtaagcgcaaaaagcgtgagctggaggaagaagaaaaaaggctgatacgtgaatatcagcctgagttttactttggtaaccgcattcagtga

SEQ ID NO: 25763 - DNA, 996 bp, Escherichia coli
atgctgaatcaggaaaccgcaaaggcagcacgaaccgattcaggttatatccttcgcgcaccgagacgaatgcgggttgctgatgccgttgctcagtatatgcgggtgcccatgggggcagggaactcagtcccgtgggatccgctggtggcaccgtatgttattgagccgatgaactgcctggcctcgcgtgaatacgacgcagtgatatttgttggcccggcacgaaccggcaagactatcggcctgattgacggctgggtgatttacaacgtgatttgcgaccctgcggatatgctgatcattcagatgacggaggaaaaagcccgcgaacactccaaaaaacgactcgccagaacgtttcgcgtcagcccggaagtggtcagtcgcctgagtccgaacaaaaatgacaacaacgtttatgacagaacattccttgctggcaactacctgaaaatcggctggccgtcagtcaatatcatgtcctcatcagattataaatgcgtcgcgctgacggattatgaccgttttccggaagatattgatggcgagggggatgctttctctcttgcctcaaaacgtaccacaacatttatgtccagtggtatgacgctggtggagagttcccccggcagggatgtgaaggatgtgaaatggcgacggacttcaccgcatgaggctccaccaaccactgggatactgtcgctctataaccgtggcgatcgccgtcgctggtactggccctgtccacactgtggtgagtattttcagccctgcggcgatgtggttgctggtttccgtgatattgccgatcccgtgctggcaagtgaggcggcttatattcagtgtccttcctgttcaggacggattatgcctgaacaaaaacgtgagctgaacggacgtggggtctggctgcgggatggtgaatccatcaatgcggatggcagtcgttatggtgatccccgacgctcacgtattgcgtcattctggatgtag

SEQ ID NO: 25764 - DNA, 171 bp, Escherichia coli
atgtactccaatgaagaagccaccgacatagtctcctccattcgtcgtgaaactattttcatctacccagtaatgaactctttgaagagttgtaatcaatacaactcgctaatggagaggcttgtctcacacgtgagacaagcttcctgtttgatttactggacactatag

SEQ ID NO: 25765 - DNA, 732 bp, Escherichia coli
atgcttaatactgtaaaaatatccagttgtgagttaatcaacgccgactgcctggaatttatccggtcgttacccgaaaattctgttgacctgatagtcacggacccgccgtactttaaagtgaagcctgagggctgggataaccagtggaagggcgacgatgattacctgaagtggctggaccagtgtctggcgcagttctggcgggtgctgaaacctgccggaagtctttacctgttctgtggtcatcgcctggcatctgatatcgaaatcatgatgcgtgaacgcttcagtgtgctgaaccatattatctgggcgaagccgtccggacgctggaacggatgcaacaaggaaagcctgcgggcgtatttccccgccacagagcgcattctgttcgcggaacattatcaggggccgtatcgtccgaaagatgccgggtatgcggcgaagggcagtgcactgaaacagcatgtgatggccccgctgatttcttactttcgtgatgcgcgcgcggccctggggataacggcaaaacagattgcagatgccacaggaaagaaaaacatggtgtcgcactggttcagtgccagtcagtggcagctaccgaacgaaagcgattatctgaaattacagtcgctgtttgcccgggtggcagaagagaaacatcagcgcggtgaactggaaaagccccaccaccagctggtggatacgtatacgtcactgaaccggtag

SEQ ID NO: 25766 - DNA, 141 bp, Escherichia coli
atgcaatggcacatagcgccactctccagcccctctccggaggggctgtttatattgattttgtcagatgtgagtaaactccttatggactttgttgttttagcccataaggacatatttgcagagtacaacggttattaa

SEQ ID NO: 25767 - DNA, 234 bp, Escherichia coli
atgtcggactgtcaccctgttttattgcccgaaggccctttctcacgcgaacaggcgatggctgtcacaacagcttaccgcaatgtgcttattgaagatgatcagggaacgcatttccggctggttatccgcaatgctgaagggcagctacgctggcggtgccggaactctgaagctgatgccggaaaacagcttaatgcgtggctcgccagtggagggcttctcagacaataa

SEQ ID NO: 25768 - DNA, 885 bp, Escherichia coli
atgtcattcagccattcttccctctccgcacaagtgaaatcatatctgacgtttcttcctgaagaaatatgccagaaaatccttgaacatctccacggtgttattcattacgagcccgtgattggcattatgggtaaatccggcaccggcaaaagcagcctgtgtaatgccatttttcagtcccgtatctgcgccacgcatcccctgaacggctgcacccgccaggctcatcacctcaccctgcagatcggtgaacgcagaatgacgctggtcgatctgcccggcattggtgagacaccgcagcatgatcaggaataccggacactttatcgtcagctgctaccggaactggatctgattatctggatcctgcgggcagatgaacgcgcgtatgccgccgacattaccatgcatcagtttttactgaatgaaggcgcagatccctcgcgttttctgtttgttctcagccatgccgatcgcgtgtttcctgctgaagaatggaatgccacagaaaaatgcccgtcccgtcagcaggaactctcactggcgacagtaacagcccgggtggccaccctgttcccgtcatcatttccggtactctccgttgcagcgcctgtcggctggaatcttccggcactggtgtcactgatgatccacgcactgccaccacaggcaaccagcgcggtttattcacatatccggggagaaaaccgctctgaacaggcccagaaacacgcacaacagacttttggtgacgccatcgggaaaagttttgacgacgccgttgcccggttcagttttccggcctggatgttacagcttctgcgtaaagcccgggaccgcattatccacctgctggtcacactgtgggatcgtctgttctga

SEQ ID NO: 25769 - DNA, 1317 bp, Escherichia coli
atgacggcgatcgtaaatgaaaccgtgagtgtgaagaaaaagcccagcggcaggcgggtgatctttgcctcggcgtttggcaatgcgctcgaattttttgattttggcgtttacaacttttttgtggtctatatcagtacgcttttcttcccacccagtgccgatcataacgtcgcgctgttactggcatttgcaacgtttggtgtgagcttttttatgcgtccgctcggtgggattatcgttggtgcctgggccgatcgcttcgggcgtaaaccggcgatggtgttcactattgctctgatgagcctcggtacgctgatgatcggcatcgcaccgacgtatgaaacggcgggctattggggaaccgcaacgctggtgctggcgcgtctaattcagggtgttgcggcaggtggtgaagtcggggcttcaatgtcgctactggtggagtcagctccggcaaatcgtcgcggcttttacagcagttggtcactggcgacccaaggcctggcaacaacttttggcggtgttgtcgctttaggtttaagcgcatggctaccgttcgccacaggttcagaaaccgtaatggcagaatggggctggcgtgtgccgttttttattggcgtgttattagcacctatcggttgctggttgcgtctgagcctggaaaatgacgtacctgagccagtgcgcaataaaaaagctgctaccagcgaaagcgcgttttctctgctcctgcaacataaggcgactatcgttaatggcgttttactcgctattggtagcacggtagcaacctatatttccctcttttattacggcacctgggcggcgaagtatctggcaatgcctcaacactattctcatgcagcgatgttactggcgggggtaattacgtttgtgggcgcgctgttggtggggatgctatgtgattcggttgggcgtaaaaagctgattttaatctcccgtgtgatggtgcttctctgtagctggccgtcattctggctgttggtgaattacccaagccctggcatgttgctgacggtggttttcgtgatggtcagctttaccacgcttggcggtgtgccagtgatgttgttgatctctgaactgttgccgaaacggattcgggcattaggtttcgcgctggtttatagcattggcgtagcaatctttggcggttttgcgcaatatttcgccacgcaatccatcgtgttgctggatagtctgacggctccggcgtggtatctgggtggaggcacgttgctgtcgatgctggcgttgttgtacgtaaaagaaccggccaaagaattgcagtaa

SEQ ID NO: 25770 - DNA, 936 bp, Escherichia coli
atggggtttataatgaataaagatagatctttaaatgaaatgatgttaagcttgtttaataaatcaactattgttgacttgtcaagtgagacaatatctgagagtaaatctctttcaggccgtatttatcaggatcctgaacataacggggaatttgaacttgatcgtgtattgacagatatttatgctcctcagttaattatttttttaccagataaaccaaatggaacaggaatattgattattcccggggggggctaccaggctgttatgttagataaggaaggtacagctcttgctccagagtttttatctcagggctatacattatttgttcttagttacagattaccatcgccagttgagggagaaaatataaacaaaacttttattgatgcaatatctgcaatgctttatattcgtaagaatgctgataaatggcatctacagcgtcatcgtattggtgtattaggattttctgctggggggcatatcgcctcaacgtttgtgaatcagatttgtgatttcaaacgttcttctgacagtaaagaacaagagattttcgctattcccgattttgtcgggttaatttatcctgtaatatcaatgaaagatgatgtgacacatccaggctccaggaagcaattactgggggacaatagtacctcagaaaatataatacaatatagtgcggatcttaatgtcacatcatgttttcctcctgtgtttttactccattgttgtgatgatgatcttgtgtcaattgaaaacagtctgctcatgtaccgtggcctaatagagaaaggcgtttctgctgaaatgcatctctatgagaaaggagggcatggttttagtattcagtgggccacagatcttcctgttggaggatggataaaactgtttatggactggatgtattctcatggatttaaataa

SEQ ID NO: 25771 - DNA, 294 bp, Escherichia coli
gtggcgcacgtcttcggtgaacgcactctggccacactggagcgtcttctgagcctgctgtcggcctttgaggtcgtggtatggatgacggatggctggccgctgtatgaatcacgcctgaagggaaagctgcacgttatcagcaagcgttacactcagcgcattgagcgacataatctgaatctgagacaacatctggcaaggctgggacggaagtcactgtcgttctcaaaatcggtggagctgcatgacaaagtcatcgggcattatctgaacataaaacactatcagtaa

SEQ ID NO: 25772 - DNA, 1491 bp, Escherichia coli
atgccatactttcagtatcctgatgagtttcccctgagctcgctgcctccactcattcgtgatgccgttattgaagctcagcaaatcacgcaggctcccctggggcttgtggcagcatctgccctgggcgctgtttcacttgtctgccagaatctgattgatgtctgcagactgaatacactacgggggccggtttctcttttcttactgacgcttgctgagtccggagaacgaaaaaccgcagtggacaaattattaatggagcccctgtaccagcaggagatgctgttatattccagacacaaaaatgaactgacgacatggaaaaataaggaagagcttttaaaggcgcagaaaaaagcattgttgtcaaaactgaataaagaactccgcaaaggcgcggatgagtcagaaacgctcagacaactggaagcgcttcagaaaaacagaggggaaaaacctgtaagatataaattcatttttaatgatgccacgacagcagcaattaaagatcagctttgtggtcagtggcgttcagtgggtatcatgtctgatgaagccggtataatatttgatgggtataccctgtctgagctgccttttattaacaaaatgtgggatggctccgtattgtcggtggacagaaagaatgaacccgaacagatgattgaaaatgccagaatgacattatccctcatggtacaacccggtctttttgaccgatatatggagcgaaaaggttctgttgccagggacagtggttttcttgcccgttgtctaatcagtaaacctgccaccacgcaggggaaacgctttattaacggagctgtgaccccggaaggatcattaacggcatttcatgaacgattaatggagctggccagaggcagtattgaaaaatccagtaaggatgaacgttattgtctgcatttttctcctgaagcgcaaaaaatatttattgatcactataatgttctggagcaggatttgtctccttccggacccttaagccagtttcggggacatgtttcaaaaaaaacagaaaacattgcgagaattgctgcgttattgcagtatttcagtcagggtgaagggaaaatctctgccgatatcatgacgtctgctgtcgtaataagttcgtggtacacagatgaatataaaaaattatttgcgttacctgatgaatctgaactgcagctgcaggacgcccgggagctgctcgactggctcattgaggagtgccgcggagaatgcccgccccgtgtcaggaaaaattatattctccagtgtggcccgggccggttccggaacaggaaaaagctgaacgtcctgctgaacattcttgcatctcaactcaggctctctgtcgtgcaggaaggaaaaaccacctatgtcctgctttccgaaataaacaatatcacgctgcctgaactgaatgcgtgctacagccagaaactgataagatggcatgagcaatcctttggcttataa

SEQ ID NO: 25773 - DNA, 348 bp, Escherichia coli
atgaaaaccctgtcgcgacactcagaactggcgaaagcgttcgcatacgccctgaaccagtggccggcgctgacgtactatgcagatgatggctgggctgaggcggacaataacatcgctgaaaatgcgttgcggatggtcagtctgggccgcaaaaactacctgttcttcggttcggatcatggaggagagcggggagcgctgctgtacagcctgatcgggacgtgcaaactgaacggagtggagccagaaagctacctccgctatgtccttgacgtcatagccgactggccgataaaccgggtcggcgaactgctcccctggcgcgtagcactgccgactgaataa

SEQ ID NO: 25774 - DNA, 2124 bp, Escherichia coli
atggattcttgtcataaaattgattatgggttatacgccctggagattttagcccaataccataacgtctctgttaacccggaagaaattaaacatagatttgacacagacgggactggtctgggattaacgtcatggttgcttgctgcgaaatctttagaactaaaggtaaaacaggtaaaaaaaacaattgaccgattaaactttatttctttgcccgcattagtctggagagaggatggacgtcattttattctgactaaagtcagtaaagaagcaaacagatatcttatttttgatctggagcaacgaaatccccgtgttctcgaacagtctgagtttgaggcgttatatcaggggcatattattcttattgcttcccgttcttctgttaccgggaaactggcaaaatttgactttacctggtttatccctgccattataaaatacagaaaaatatttattgaaacccttgttgtatctgtttttttacaattatttgcattaataaccccccttttttttcaggtggttatggacaaagtattagtacacagggggttttcaacccttaatgttattactgtcgcattatctgttgtggtggtgtttgagattatactcagcggtttaagaacttacatttttgcacatagtacaagtcggattgatgttgagttgggtgccaaactcttccggcatttactggcgctaccgatctcttattttgagagtcgtcgtgttggtgatactgttgccagggtaagagaattagaccagatccgtaattttctgacaggacaggcattaacatctgttctggacttattattttcattcatattttttgcggtaatgtggtattacagcccaaagcttactctggtgatcttattttcgctgccctgttatgctgcatggtctgtttttattagccccattttgcgacgtcgccttgatgataagttttcacggaatgcggataatcaatctttcctggtggaatcagtcacggcgattaacactataaaagctatggcagtctcacctcagatgacgaacatatgggacaaacaattggcaggatatgttgctgcaggctttaaagtgacagtattagccaccattggtcaacaaggaatacagttaatacaaaagactgttatgatcatcaacctgtggttgggagcacacctggttatttccggggatttaagtattggtcagttaattgcttttaatatgcttgctggtcagattgttgcaccggttattcgccttgcacaaatctggcaggatttccagcaggttggtatatcagttacccgccttggtgatgtgcttaactctccaactgaaagttatcatgggaaactggcattaccggaaattaatggtaatatcacttttcgtaatatccggtttcgctataagcctgactctccggttattttagataatatcaatctcagtattaagcagggggaggttattggtattgtcggacgttctggttcaggaaaaagcacattaactaaattaattcaacgtttttatattcctgaaaatggccaggtcttaattgatggacatgatcttgcgttggccgatcctaactggttacgtcgtcaggtgggggttgtgttgcaggacaatgtgctgcttaatcgcagtattattgataatatctcactggctaatcctggtatgtccgtcgaaaaagttatttatgcagcgaaattagcaggcgctcatgattttatttctgaattgcgtgaggggtataacaccattgtcggggaacagggggcaggattatccggaggtcaacgtcaacgcatcgcaattgcaagggcgctggtgaacaaccctaaaatacttatttttgatgaagcaaccagtgctctggattatgagtcggagcatatcatcatgcgcaatatgcacaaaatatgtaagggcagaacggttataatcattgctcatcgtctgtctacagtaaaaaatgcagaccgcattattgtcatggaaaaagggaaaattgttgaacagggtaaacataaggaactgctttctgaaccggaaagtttatacagttacttatatcagttacagtcagactaa

SEQ ID NO: 25775 - DNA, 252 bp, Escherichia coli
atgagtaagctggtttctgatggcagcgtcaaaaaaataaattatccggtgctgtatgagtccggaataacacctccgttatgtgaagtcagtgcaccagaacctgatgcgggtgggaaacgcattgtggcatatgtttataaatcatcacggagtacggtttttgaaaatcctgacattgtaaaaacctgtacggtcagggatttgaagaaggattttgtgaactgcgatgagaaaggtgagggacaatga

SEQ ID NO: 25776 - DNA, 321 bp, Escherichia coli
atgaacatgcgtaatattaatgttattacagccctctctgtgccgggtaaaaccgtgtcagatgattttattcatgctgttctcagtaactgcgccacaagaatcgtacttcctgcaccggagaaattcggttctgagtcattgccggacaattttaatatggctgctgtcggtgtgatgaagaagggtatgtcgatgagtttattttcttctccggggcatattgtggttgccggacaatccggtggcggaaaatctgttccggtgaaagaactaatcgacagaattattcagaaatataaggagcccttcgatgagtaa

SEQ ID NO: 25777 - DNA, 462 bp, Escherichia coli
atgctccacacactcactgaccagatacttttccaccgacgaaaaacgtgctccccggttcaggatggcatcgagcaccacgggcaggttttcgtcgtcttcatcgagccagcaggggtgatcgctttccttcaccaccaggcgaaagcggcgcgtctggcgggtcagcaacgtctgaccggttgtggtcagcgccgccctgatacgctgcgcatcttctgccacccggcaactgacactgcgtaccgcatcgcgcactgcatcaagaactgccctgatttcgtcttcggtcagccattctccggcatacgggaaaaacacctgtgttccgtctgccggaagtaccggcagcgactgccactgactgccggacagtaccagttccgccccggttccggtcagtttctgaatggcggaggccaggagcggcggcagtacgccgccgtgacggttgatgagtaa

SEQ ID NO: 25778 - DNA, 312 bp, Escherichia coli
atgggagttcagcaggatgatttcagggacatgttgtccgtttatctccccgtcacggcgcagacgcagcatgtgtttggtatacccccggcggcccgggtcacgtacgcgggtctggcaggcaaagaatggctgaaaaccttcccgctgcaggctttccagcactgtgatggtggggatgtacgtatagttctggcttcgggacgtgtgtttctcttccccgaaaatccccggcacatggtgcatcagctcttcatgtgtcagtggacggtcacgacgtatctggtttgcataaccaaaacgacttactaa

SEQ ID NO: 25779 - DNA, 408 bp, Escherichia coli
atgacgatggagcaggccaatgagaaggccaaaaaactggagcagtcctcagaagcaaagccggttgcggcatcactgccgcgcctggctgaagggaacttccggacaatgccggtgcagaccgtcaccgcgaccactccgtccggcagcagacctgcggtgacagcacatccggagcagaaactgctggcacctcgcccgctgtttaccgctgcccgggaagtgaaaacggttgttccggtcagttcagttacgccggtaacacctcctcgtccgctaagaacgggtgagcagacggcagcattatggatagcgccttatattgataaccaggatgtttatcatcagccatccagcgtgttttttgttattaaaccgtctgcgtggggaaaaccacgtattaattaa

SEQ ID NO: 25780 - DNA, 624 bp, Escherichia coli
atgcagcaaccggacaaatctctggcactgctggcatggacgctctgcctgaatgtgtttggcagcggagcgtacagtaaaccggcacaaatcagcctggaatgtaaacattattcgctgaccagcgatgcgccgtcagggaaggaaggtgtcgcattcatggcgctgatggcagaaaaagcccgtcttgctgccctgttaccggagggatggtcacgagacatgacgacattcctgtcactcagtcaggaggtgctgttgtccctgctcagtttctgcaccgcatgcagccttaacggtgtccagacccgtgagtgtggtcacacgtcacgcagtccgcttgactcgctggaaaccgctatcggattccacatgcgcgactggtggcagccgacaaaagcaaacttcttcggacacctgaaaaagccgcagattatcgcagccctgaatgaggcaggactgtccggtgctgcacgggatgcagagaagatgaagaaaggtgatgcggctgaacatgcagagcaccatatgaaagacaactgctgggtgcctggctggatgtgtgcaccacatccacagacggataccactgaacgcaccgataacctggctgatgccgcctga

SEQ ID NO: 25781 - DNA, 261 bp, Escherichia coli; identical to SEQ ID NO: 21369

SEQ ID NO: 25782 - DNA, 348 bp, Escherichia coli
atgatcccgttaccttccgggaccaaaatttggctggttgccggtatcaccgatatgagaaatggcttcaacggcctggctgcgaaagtacagacggcgctgaaagacgatcccatgtccggccatgttttcattttccggggccgcagcggcagtcaggttaaactgctgtggtccaccggtgacggactgtgcctcctgaccaaacggctggagcgtgggcgcttcgcctggccgtcagcccgtgatggcaaagtgttccttacgcaggcgcagctggcgatgctgctggaaggtatcgactggcgacagcctaagcggctgctgacctccctgaccatgctgtaa

SEQ ID NO: 25783 - DNA, 456 bp, Escherichia coli
atgcaaaatatccttaagcgaattcctgatgctaatgcttgtgaggaagctacagcagcaggaggtagagggtcggcaggatcaaacacaagctcagctaaagctgctttagctgaaaatagtgtgaaaatgtttacgggagcgagcaccggtataaatgaggctaaaaataacgtgatgggccgagtctcaattgaagtctgttctgacgaggatgtgaaatacaacagaggtggatgtagttctattggtgcatatgctgataaagataaatctgctacctcactcaccacaccaccgttatccatatctgatgctcaggggaataaagtttcaaaccaatcttatgatgttaaacagatgaaagtggctgatgctgctaagcgaaatctgattggtaatttacccctcttgagtttactgatacatcaccagatttctttattgccagaatag

SEQ ID NO: 25784 - DNA, 297 bp, Escherichia coli
atgaataaaactaaaactaaaacaaaaaaattgaaagaaagtgagtttataagacatatagaaaacaatcctgttgtctcaacggctctatgcgagaaatatggaatctctactgaaacgattgcctatgctttatatgttcatagcaataacttctttcttaaaaacgactacgttcaggatgacattcactatgatatagttaaaaacaatttaataataatgaaacccacgcttagacaatattatagaagatcattggcaacatcaacgacaaattggcttccttcactatga

SEQ ID NO: 25785 - DNA, 165 bp, Escherichia coli; identical to SEQ ID NO: 13034

SEQ ID NO: 25786 - DNA, 168 bp, Escherichia coli
atgcaggccattgatttaagattacagatgcttctaatagaaagaacagaagacacaaatattttattagcagccctattaggacagcaactacaacctgtcgataaggtgatgttgaataatctgaaaatcaatgccacaaaatcaacgcaggcagcaactaactaa

SEQ ID NO: 25787 - DNA, 189 bp, Escherichia coli
atgaatgatactgttattaagataccttgggctaaatctgttgatgaaaaactcattcatattcacgatgcagttaaaggccaaaaatattattgtccgtgttgcaatgagcaattaacgtttaaggaagggaaaatcaaaaaaagacacttttcacacatgatttacagatcacaaattcccatctga

SEQ ID NO: 25788 - DNA, 1134 bp, Escherichia coli
atgacacacgttctgcgcgccagaaggctgctgactgaagagggatggctcgatgaccatcagttgcgtattgctgacggtgtaatcgcagcaatcgaaccgattccagtgggcgtgactgaacgcgatgcggaactgctctgccccgcttacatcgacacccatgtacatggtggtgcgggcgttgatgtaatggatgacgcgccggatgtgctcgacaagctggcaatgcacaaggctcgcgaaggtgtcggcagttggttaccgaccaccgtaaccgcgccgcttaataccattcatgcggcgctggaacgtattgctcaacgttgccaacgcggcggacctggtgcgcaagtgctggggagttatctcgaaggaccgtacttcacgccgcagaataaaggcgcgcatccgccggagctgtttcgcgagatggaaattgccgagctggatcaattgattgccgtttctcagcacaccttacgtgtggtagcgctggcaccggaaaaagagggggcattgcaggccatccgccatcttaaacagcaaaacgtaagggtgatgctggggcatagcgcggcgacctggcaacaaacccgcgccgcgtttgatgctggtgccgacggcctggtgcattgctataacgggatgacaggtttacatcaccgcgaaccgggaatggttggcgcgggattaacggacaagcgcgcctggctggaactgatagccgatggtcatcatgtgcatccggcggcgatgtcactgtgttgttgctgtgcaaaagagagaatcgtgctgatcaccgacgcgatgcaggcagcagggatgccggatggtcgctatacgttatgtggtgaagaagtgcagatgcacggtggcgttgtccgtaccgcgtccggtgggctggcgggcagtacgctgtctgtcgatgcggcagtgcgcaacatggttgagttggcgggtgtaacgcctgccgaagccatccatatggcgtcgctgcatccggcgcaaatgctgggtgttgatgatgttctgggatcgcttaaaccgggcaaacgcgccagcatcgttgcgctggatagcgggctgcatgtgcaacaaatctggattcagggtcaattagcttcgttttga

SEQ ID NO: 25789 - DNA, 546 bp, Escherichia coli
atggatgctattacaggattattggatttttttagaaagattccaacggcacttcttgtagctattacatgtggtttaagtttgatcctttttttgccagaatctttagcttctaaagttgcggttgatggtttccgtaaggaatatagaaatttcataggaccagcatttttactggctgtctcttttttagttgcaagagtatatcagttttttcatgacctatatggcgatagacaaaggcacaaagtacgtatctcttatttggagaagctaactcctgaggagaagggatacctctggtcttatattattgatggcgaaaactcactaatgtgtggtcctgaagatggtgttatgggggggttggttgctaagcgcataacctatagagctgcaaacgtgggcagtatgattgacggattcgctttcaatttgcagccgtgggctcgcgagcatttacagaacaacactcatttattagaaggagcggtccgtagggcaatgacaccgggtgagaaactaggatttaggcgtagattttaa

SEQ ID NO: 25790 - DNA, 852 bp, Escherichia coli
atgtttactgttggtatttacggctttactctaacaaagataactcacttttcattcgggacaatgtatccaatagaaaccagtttttttaaattaaaaaaaaataggcaagacaaggaaaaattatatcttactgcgctccttgaacttgacatcatagacaagagcgaaacagatgatatcatatttcatctagagaaaattttgagttttatagaacagagagcagtatttatcagacaccaactaaataataagactcataaatttgacttacccatagatttccctctctttataactcctaatattaacttatcaagttcaggagaaatcattcttgaagattgcttttccaaaaactcaagacgctactttattgaacttgctataaataagatcatcattgctagagatcgaccatttaccacaatacttcataaaaatgtattggttttctctaatccaataaattatcttgatgtatcatattacttacttttttccggccttgagtcattagttcgagaacgtgagaatgattttaaatcaaacattacgccaataatgtatcgttacctcaaaaagcatgggtttaatataaatcaacaaaacaataaacatcatgacatctcacttgatatttactgtagcttaaggaacgcattatttcacaatggtcaattccaaaccatgccgatgaaaagaggctctaaaacaatcagttttgcactaaaggatttttactcacaatttaaacgattaaactgcctcgtcatattaaaagaagcagaattcagcgatcatcatatcaactggaattttagtgattatagaaacccttttatataa

SEQ ID NO: 25791 - DNA, 1209 bp, Escherichia coli
atggagtcggatatcaaagagaaagggtggctatatcttggtgtgtactatcacacattagctactgcgaataccgagatgaaagatgttgctaacctgaagccggtagtttcaggaatgagtaacgatggcgatatcggctctatcgattactttaaaggcttgttccaggcttaccattctcagctgaaaaatagtaattatacgccgcctcttggcaccgaatctaacgcacttgcaaggaacattgatcaaaaaagccttgaaaatgccgccacaactggagacggaacgtcccttattacaaaaattttcgacttcaacgttacaaactggcttgcaacgagtaactacggcactggtgatggttacagtgacgtgaccaaccctttactcaaaatgaaagctatcggcgattacacgttaggtgtagctgaggttggactcgccagttggaccgctatcaatgttgcagtgaaggtttcagaagggaagagtctacccggttttgctgcgggaatgatgaacaaacttacagggattcgagatgctattgctggcgtattagaatcggtttcgttcttggtttacccgctgttttatagcctctttggtatcggtcttgcgctatctatctggctgccgtttataccgatgatttattggtttgtagctatggcagattggctggttacgcttatgacaggtgtattggcgtcttccctgtgggcagctacccatatcaacattggccagagtaatgatgagcggagtacatatggttatgtgttccttatcgatgtaatgattcggccgatgctcatggtaatggggtttatttttgcttcactggccatcgtagctttgggaacggcgttaaacatgatgtttaaattcgctatggaacaggtccagtctgactctttcactggcctgctgtcatcgatcggatttttgatgttatatgcaaggctttgcacaggtatggtggctcgcgtatttgcacttcctgcgaggatgccgaactatgttataaactggattggacagaagatgaacgattcagtgttgggtgatatgcagaaccatgttcatgacatctttgctgcgttcggtcgtggagccaaaaatatgaaccgtaacaaccctaagcaatttaatcctgacgcaggtgtagataagagcaaggacggcatcaaaggagcttaa

SEQ ID NO: 25792 - DNA, 231 bp, Escherichia coli
gtgagcagagtagttgagcggcaggtgcataagagtaacctggataagcagaaggattacaggaatcgcatcagagatactcatgaccagctaaatctttatctgcccaaagatgcaaaaagaatgttgatagagatcacaaaagtaaaaaagctcactcaggcggaggttattgaatttcttgtgaaaagttattacgacggcttaaaatttgacgattctgaagagtga

SEQ ID NO: 25793 - DNA, 213 bp, Escherichia coli
atgaacgcaaacgccccgaacactgccagttgcaccacctgctgcgtatgctgcaaagaaattccgctcgatgccgccttcaccccggaaggcgcggaatacgtcgaacatttctgcgggctggattgctatgaacgcttccaggcacgcgccaaggccgcgacagaatctgacattgcgcctgtccctggcggttcgcagccgtcagattga

SEQ ID NO: 25794 - DNA, 366 bp, Escherichia coli
atgagcgcctacacagtgtcccggctggcccttgatgccggggtgagcgtgcatatcgtgcgcgactacctgctgcgcggattgctacggccggtcgcgtacaccacgggcggctacggcttgttcgatgacaccgcgttgcaacggctgcgctttgtacgggctgccttcgaagcgggtatcggcctggacgcactggcgcggctgtgccgggcgctggatgctgcggacggtgacggtgcgtctgcgcagcttgccgtgttgcggcaactcgtcgagcgtcggcgcgaggccctggccagcctcgaaatgcaactggccgccatgccaaccgaaccggcacagcacgcggagagtctgccatga

SEQ ID NO: 25795 - DNA, 426 bp, Escherichia coli
atgggactcatcacgcgcatcgctggcaaaaccggcgcgctcggcagcgtcgtttccgcgatgggctgcgccgcctgttttcctgccatcgccagctttggcgcggccatcggactgggcttcttgagccagtacgaggggctattcattggcatcctgctgccgatgttcgccggcatcgcgttactcgccaatgctatcgcttggctcaatcatcgacagtggcgacgcacggcgctcggcacgataggcccgatcttggtgctggcagcggtgtttttaatgcgggcttacggctggcagagcggtggactgctctatgtcggcctggccttgatggttggggtgtcggtctgggatttcatctcgccagcacatcgccgctgcgggccggacagctgtgaattgccagaacaacgtggctga

SEQ ID NO: 25796 - DNA, 276 bp, Escherichia coli
atgaaaaaactgtttgccgccctcgccctcgctgccgttgttgcccccgtgtgggccgccacccagaccgtcacgctgtccgtgcctggcatgacctgcgcctcttgcccgatcactgtcaagcacgcgctttccaaggttgagggcgtgagcaagaccgacgtaagtttcgacaagcgccaggccgtcgtcaccttcgacgatgccaagaccaacgtccagaagttgaccaaggcgaccgaggacgcgggctatccgtccagcctcaaacgctga

SEQ ID NO: 25797 - DNA, 351 bp, Escherichia coli
atgtctgaaccacaaaacgggcgcggcgcgctcttcgccggtgggctggccgccattcttgcgtcggcctgctgcctggggccgctggttttgatcgccttggggttcagcggggcatggatcggcaacctgacggtgctggaaccctatcgcccgatcttcatcggcgcagcgctggtcgcgctgtttttcgcctggcggcgcatctaccgcccggcgcaagcctgcaaaccgggtgaggtctgcgcgattccccaagtgcgagctacttacaagctcattttctggatcgtggccgcgctggtcctggtctcgctcggatttccctacgtcatgccatttttctattaa

SEQ ID NO: 25798 - DNA, 456 bp, Escherichia coli
atgcaaattaattttgagaatctgaccattggcgtttttgccaaggcggccggggtcaatgtggagaccatccggttctaccagcgcaagggcctgctgccggagccagacaagccctatggcagcattcgccgctatggcgaggcggatgtaacacgagtgcggttcgtgaaatcggcccagcggctgggctttagcctggacgaaatcgccgagctactgcggctggaggatggcacccattgcgaggaagccagcggcctggccgagcacaagctcaaggatgtgcgcgagaagatggccgacttggcacgcatggaggccgtgctgtctgaactggtgtgcgcctgccatgcgcggaaagggaacgtttcctgcccgctgattgcgtcactgcaagacggaacgaagctcgctgcatcggcgcgggggagtcacggggtgactacgccttag

SEQ ID NO: 25799 - DNA, 702 bp, Escherichia coli
atggcccgtcggtcgaagggctggcaggatcgtcggtgcaagcgcaagcctgatgatactgaagcgctggctcgtatccataccgttatcgacgatctgcccacctatggttatcgtcgtgtatgggcactgctgcgcagacaatcagaaactgacgacatggcggtgatcaatgccaaacgcgtataccgcatcatgcgtcagaatgcgctgctgcttgagcgtaaaccggcaataccgccctcgaagcgggcgcatagagggaaagtggccgttggagaaagtaaccagcggtggtgctccgacggcttcgagttcagctgtgataacggtgaaaaactgcgggtcacgttcgcgctggactgttgcgatcgcgaggcacttcactgggcggcaagtaccggtggatatgacagtgaaaccgtgcaggacgtcatgctgggtgccgtggagcgtcgcttcggtaacagcctgccgacatccccagttgagtggctgacagacaacggttcagcctaccgttcttatcagacgcgtcagttcgccagaatggtaggactggagcctaaacatacggcggtacgtagcccggaaagcaacggaatggcggagagcttcgtgaaaacgatgaagcgcgactacatcagcatcatgccaaaacctgacgggttaacagcggcggtgatgctgccaacttactga

SEQ ID NO: 25800 - DNA, 744 bp, Escherichia coli
atgagcctggtggcggccggcgatgtgtggggcgttggccatcgtaccgaaaaagggctggcggcaatggggatcaaaacggcgctggcgctcgcagagatggatatccgtcttgcacgccggctgtacggtgtgacgctggaaaggaccattcgtgagctgcgtggcgaggcctgctttgccctggaggaaggaaccggcgcgaaacagcagcttgttgtatcccgttcgtttggagcacgggtcacgcaactggcgcagatgcagcaggcggtgactaaatatgccacacgggcaggggaaaagttgcgccaggaaaaccgcctggcgaaggtggtaacggtctttatccgcagcagtgcttatgacgccggcggtgtgccctacagtaaccaggctacggaagtgcttcccgtgccaagccaggatacccgcgacatcatcgccgcggcgcagctgggactgtcgcgtatctggcgtgagggcgtgcggtatgcaaaagccggcgtgatgctcagcgatctgcagggatatgaaacccagctggatctgttttcgccggctgctgtgcggccgggcagcgaaaaactgatggccaccatcgacaaaataaacagggaaggaaggtcaaggatcttcttcgccggagaaggtattgatccggaatatgccatgcgccgtgaaatgttgtccccggcctacaccacgcagtggaaggatattcccgcggcgtttatgcgataa

SEQ ID NO: 25801 - DNA, 258 bp, Escherichia coli
atgaaaacgacctgtcatgcggccggcatcacggcggcgccgctttccccgcaggagtggcgggcgctgctcagggcgaaaggctggaagcagaaggagctggcccgccgctggaatgtgtcagaaacctggatcagtaagctggccaataaccccgaacggggcacgcactggaacgatgcctgccggggtctgcccgatattcgtgcccggcggcccggcgaaccgcacagacgcaccagagccgggaggccctga

SEQ ID NO: 25802 - DNA, 471 bp, Escherichia coli
atgataaagaaaccacttattgccggcatcatgctggttgtggcgcacaccgccggcgctgcgcagggtgatgataccaatctgcagcagatttataccgaggcgggcattcaggggatatgcagcgccgggatgctggctgtgccggaaggggccagggatgaagttgtcccgcagaacgtcagacacctcctggttcagtgtgcctatttcgacgagcagcagttgcgccggcgtgccggcctgccggctcagacatttagccactggcgtgaccgcaatgcggtccttaatctgtcgtctgaccaggtatctgatgcgctctggctgtcagcgtggcgtgatttccgggcacaactggcctcggcctacccggccccggcggaaaaaaggcacaggggaaagaggccgtacccgccggcacgaagcccggcactgagcatgggagtgcggcggattgaccggctttga

SEQ ID NO: 25803 - DNA, 216 bp, Escherichia coli
atggagcgccgcctatctgtgcaggccgctcaatctcagatgatgacctttgcgcctcatgccagcatctcgactatcgccctgggcacctcagcgcctgcctgctgtcaggttgcgggcgtgacgactggccttcagaactggatgcaaacggctacagcgttgcctgtagcagctatgagcgtgaaaaatcgcttgattaatatggctcattag

SEQ ID NO: 25804 - DNA, 318 bp, Escherichia coli
atgagtcgtagtgagtcacgaaaaacagatgcacaaatccatttccgctgcacagcagaaattaaagatgcattgtccaataaggcccatgaagcagggcttagtcttagtcaatatcttatcaaatctgggcttggaaagcgcattcaatcgaaaggtaattacaatgcacttgccgctcttgtaaagataacagcccttcaaaaacatctgtttaacgaaggtgccggggttcatagcaaggagtattcagagattctgatcgaggtcaaaaaggccgcacagaaactgcaacaggagatggatggtgatacctaa

SEQ ID NO: 25805 - DNA, 1908 bp, Escherichia coli; identical to SEQ ID NO: 19788

SEQ ID NO: 25806 - DNA, 1179 bp, Escherichia coli
atgaattcgacatcgcatcccgtagaacgtttttctttcagcaccgcgttattcgggatgctggttctgaccttaggtatgggtttaggccgctttctctatacgccgatgctgccagtcatgctggcggaaggcgaattttcctttagcgaactctcatggatcgccagtggtaactatgccgggtatctggcggggagcctgctgttttcattcggcgcgtttcatttaccctcacgcctgcgcccgttcctgttagcttccgccctcgcaaccggattattaatcctcgcgatggcgtggctaccgccgtttcttctggttttcatcattcgctttctggcgggagtcgccagcgccgggatgttgattttcggctcaacgctcatcatgcaacatacccgccatccctttgtccttgcggcgctattttctggtgttggcgtcggcatcgctctgggcaatgaatatgtgctggcaggcctgcattttgccctctcttcacaaacgttgtggcaaggtgccggagcactttctgccattatattgcttgctctggcgctgctcatcccgtcgaataaacacgttatcccgccagcgccattggcaaaaatcgcgcaacaacccatgagctggtggttactggcgattctgtatggtctggcgggttttggttatatcatcgtcgccacctacctgccgctcatggcgaaagacgcgggccagcctgtgctgacggctcacctttggacactggttggcttgtcgattgtcccaggttgctttggctggctgtgggcagccaaacggtggggagcattaccttgcctgaccgcgaatttgctggtgcaggcgatctgcgtgctgttaactctcgccagcagctctcctttattactcatcatcagcagtattggttttggcggcacctttatgggaacgacctcgctggtgatgaccatcgcccgccagcttagcgtgccgggaaatcttaaccttttgggctttgtgacactcatttatggtatcgggcaaattcttggcccggcgctgaccagtatgctcggcaacggaacgtcggccctcgccagtgccacgctctgcggcgcggcggcgctatttatcgcagcattaatctgcgggatgcaaatattcaaattgcatacgaattattcttaa

SEQ ID NO: 25807 - DNA, 1155 bp, Escherichia coli
gtgaccgatgcgttcggtaatgcgcttgccggacagacggtcagcgtgacggcagacaacggtgcaacgttgtctccgacggtcatcacagggccggacggcacggtggagatcagtgtcaccagccagacggcgggagccagtacagtcactgccagcatcaacagcagcagccagagccggaacgtcacgtttatcgccgatgtcaggacggcgcagatcgcgagtctggaggtgaggcaggataactcagtggcagacggcgcaatggcgaacacgctgcgggcgagggtgaccgatgcgttcggcaatgcgcttgccggacagacggtcagcgtgatggcaggcaacggtgcaacggttgctccgacggtgattacagagccggacggcacggtggagatcagtgtcaccagccagacggcggggatcagtacagtcaccgcaaccatcaacagcagcagtcagagccgggatgtgacatttatcgccgatgtcaggacggcgcagatcgcggatctggtggtcattaaggatggttcagaggcggacggttcgacggcgaacacgctgcgggcgagggtgaccgatgcgttcggtaatacgcttgccgggcagacggtgagcgtgttgggaggcaacggcgcaacgactgccccgacggtcatcacagggccagacgggacggtggagatcagtgtcaccagccagacggcaggaatcagtgtggtcaccgccagcatcaacagcagcagccagagccgggatgtgacgtttatcgccgatgtcagaacggcgcagatcgcggatctggtggtcattaaggacggctcagtggctgacggcgcgacggcgaatacgctgcaggtgaaggtcactgatgctaacggtaatgcgcttgccgggcagacggtcagcgtgatggcaggcaacggcgcaacgactgccccgacggtgaccactcagcggatggcacggtggaaatctctgtcaccagccagaccgccggaaccagtgtggtcaccgccagcatcaacaacagcagctagagccagaacgtcacctttgtaccgggtgatgcatcgcagctcacttcaaccgttgaaacaaataagtcgaactatacggttggagagacaatcaccatcacggtaa

SEQ ID NO: 25808 - DNA, 2226 bp, Escherichia coli
atgaagatactgaggcagctgtggaaccagaaagggcttgatgcggcagttgaagatgtacctgaggatcgatacggtttcggtaatatcgcagaaaatatatcccgttccatccttactcttcctctggaggcttcaaatgttgtcggaatagaaggtgcatggggatcgggtaaaacaagcctccttaatctgatcctgagaaaccttgccctgagaaaagatgctcacacgcatgtgctgcatatttctccctggctgagtggcggcagtccggttgaagcgctctttcttccggttgccacggttatccagcaggaaatggaaatacgctatcccccgaagggcttcaaaaagctctggcgtaaatatctgttgtcaccggaagctcaaaaagtgattgagtatgctcaggatacttcatcgcgcgtccttccactggttcaatatatcggacagttttccagcattattaactggatagcaggcggaataaaggtattttcagacagccgtctggctgttgatcagaaaaccacgacaaagcttcgggctgaaattgcaggacaactggtgaggctggatctgaagttcattgttgtcatggatgatctggaccgactggagccatcccaggtggcggaagtgttcaggcttgtgcgtgcagtagccgatctgccccgctttacccatattctctgttatgacaggcagattatcactcatgccgttgaacatgcgctgaatatcgaagatggcagccgttatctccagaaaatcattcagcttagttttaaattaccccgacctgaagcctttgatttacgtaatgaatttcgccagcgggctgaggctctatatcagcaaattaataatcaaccgccagactctggaatggtaagggatctcatcgcggtgactgatacctatggtgccgcactttcgacgccacgggaaatccatcaggccattaattccctgatttttctttatccggggatgcgggattttgtttatttccctgatttgtgcctgcttcagcttatacgggtgacaaacccggctctgtatgactggacagagcattacctgacagaacggtccgtgattgaagccggtcagggtatgctttctgacggagagaaagcagacttccgggaggggcttatcagatgtatgaagacgttcagggcatcaaatgcagactcgtttctgacacttgcagactggatcccaggtatcagtggacataatgatgaatatctgaatctttttgagcccgtcagtgaggattttcgtcatatccagacgaccggtaaacgactcagcagcctgacgcactggcgatattattttgccttctcctcaccacagaatgttctgccacctgaattcttcagacagctttttgagcaggctggcgtatcggaaaaacagcagcagctttctgaattgctgctctcaaaaatcaacagtgtgggcagtctgtccggaacctggtttgaacatatactgagcagactgactccaggcctgataagagaacgtaatttcgaagagtgcgcaggactggttcattttttcttcgatcacaccgatgaggtgagcactcgcttcagtatccgtaacccatggttttccctgcgtgaaatggccattaatgaggttgtacggcatctgctgaagcatatgcaggatattgatgagaccagaacgatcacgcttatggaaaaactgatcgttacgggtgcttcgccgttctggatagccgattttatgcgggatcttatctgggaacatggacttgctcagaatgcagtaccttcgccttcagacgctcttttcagtcgcgatattacggaacggttgcgtgacaggtttgcggaacgtatgaatcaaccagaacttcagcaacagcttctcctgcgcaagtctcttctcgggtatctctacgcctggagagacatgagttcaggtgaaaccgtgaagcaatgggtcagagaagttactaccactgatgaaggccttgttaacctgttgatacgattacagaccagtgtcttcagctcccaccgaggggcatatcgccggattgcgcgtgaccaggtcagtccgttctttgatgactggccagcagtcgaagagaagttgaaggttatgctgtccggcaacgagctgactccggagcaggaagcgctcaaaacagcgctggaaaatgacgactga

SEQ ID NO: 25809 - DNA, 237 bp, Escherichia coli
gtgttttcactcagctatgagcaactgaccagaatagcggaaaaaaatatccgtcaatgtgggctggacagccagatcgccaggtgcatcagtgaactgaaggcctcagcttcgctgtggttgtggtatgaactggccattcatggtgcgccacagaacaatcacgcacaggcccaacgcatcgataccgattacaagcgcctcaaaaaactcatctggccggagggtgacagttaa

SEQ ID NO: 25810 - DNA, 312 bp, Escherichia coli
atgctgaagttgctgaatgggataagttacagcaacgattgcttgatgccagaaataaaatttacaatttttgctgactggatcactgagtttggtaaggctgtccggacagataactggcgtcctttttttgttaaaacagaaaccatcatagcaggtaatgctgcaacggctcttgttgcactggtcttcagtattcttcccagaagcactttaggcattattgggtatggtttactgatggctgtcaccgatacactgattgatgaaacgcctgtggaaaaagcgaatagttctggggtatttaaataa

SEQ ID NO: 25811 - DNA, 417 bp, Escherichia coli
gtggaagaagcaatagttactatcgttgctgctggggaggacgttgttcctgcttctgagctcgcagaagcactgaaacaggttcgggaaatcccgcgccttctgggtaagaagacgatggaagttgagatcctgaaagaagccatggagtacggcctgtcgcgaaaatggatagcgcacacgcctttgttgccaaaggacgggaaacggcagaaggatgcacagagtgcagacaaaaaggccgctgatatgcttgctaaatatgagcgcagaaaaggtattgttgtgagtggtgctccgagatttgccggtacgataaaaatcaccacaaactcggtcatcgataaccgtgcaaacctgaattatcttctgactcattcctgtctggactatacatgtaatattctgagtgactga

SEQ ID NO: 25812 - DNA, 1062 bp, Escherichia coli
gtgttatatcaactaaataaaatgcttagcagaatcttctttaaattaattttattatgtcttcttttaacgttctttaaccaacttttttttaagagtgcgacttttatagctctaatacaaccagcatttataatattggttgttatatggacatcaattccattagcgatatcatctgtcatcttatggccaaaagcttgtaaatattttaaaatgaaagcatggcgaattgttgtagaaataagaaaatattatagtctttctccaattaattattttattttgtatgttggagctttgtcatttatggtcgctgtactaagtcaattcttattcggcaataaattttttattctgactggattttccattgttgcaatgagtgtttctttttcgattgatttgtataaccgtactatttatattttaaaaaaagtatggtctgggatgttgggaaagattttaatatcactaatggccactttatcatatattattacaaattacctctcacgacattggctttatgtcacaactgatcttgaaccaaggttttttagtgagtttattaatatagtaagcatttttcttacgcctctgtcctatctaattatattaggtttcctttcgttgtttattgttatacctgagtttataggaataacatttttgttcttgtttacccctatcagagaaaatttcctgagaaacagattaaaaccccttactgaactatctgtaagaatgagaacaggaaagagaattgagagacttacaccatctgagttggtattgttaaactcaaaagttatgttttttagaacattttcatctcctgtttttgtttgccttattttttatttgttttcgtgggttagcagtatcacaggaggaaatatggatacaatcgcaagagcaggacttgtcagttattattatcactcttctaagattgatgatgtttccagaatgaaatattataactacgataatgagaagttttccacagcaatatttaatggagagaaatgggagttttttacttttaatgacaaataa

SEQ ID NO: 25813 - DNA, 801 bp, Escherichia coli
atgttaaatacaacaatatataaagataatgattttataataaatcgtgtaaaaaattatcatgcagtgctattagtaacaaagcgctgtgaaatgacattgtttgatgataatggcagtatttgtatcccatcccatacgatagctctgttagagaaaggaatgttgtttaatctgaaactaataataaatggagaggggggatcatatgacacatttcttattgaagataaaattatagcgaaagttttaaaggtctttgaaactacttgtgctacagataaacgaacttttcctgtgttaactaggaaaatcgaaaatagagtttttgtaatagatacatgcgaacttgaagattcttatttttataaaattatagagtcaaaagaagatgagactttgttggtctttaagttagcctatctgttatccaagatgagtaatagagaagacttgctattttcattatcagtatctgcatcaagatctttcagcgataaagttagggagatagtcgaaaataaattagagaaaaaatggaaaatatcagacattgcagaagcatttcattgttcagaaataacagttaggaaaaagctagaaaaagaaatgatgacatttaatcaaataatgcttgatataaggatgaatcatgcttcaaaactaatattaagcacagattgtaatgtaaactctgtttcgagtgctataggaatagcaagcacgtcttattttataaaactattcaaatgttattatggggtaacaccgaagcaatattatttaacactaaaaagatag

SEQ ID NO: 25814 - DNA, 405 bp, Escherichia coli
atgccggattccggaaccagtccagcaaacaaagttcgttctatacgacccatctctctcagagctttagccaacccattttgtttgggggaactggcaagttttctcagcatcagggatgctgtcactgttccctgttttattgaggccgccagacgtagcacttcacgccatgtgcaactggttgacgcgttctgcgcccgccttgatgccatcctgccccaggatcatgctgcagtggatgcgaccacggagattaatgttgtgctgcgcctcgctgggacaccgatcggcccgaacgacacggcaattgccgggcacgccatcgccgccggtgctgtgctggtgacgaataatgttcgggagtttgtgcgggtgccggactggtactcgaagactgggtaa

SEQ ID NO: 25815 - DNA, 3708 bp, Escherichia coli
ttgactttaataataggaggttatttatatatctctccccacactgcatattgctcaacagttagtgctgaaatttcatatcaaactttcagagattttgcagaaaataaggggcaattctctccggggagtctcaatttaaatatttatgataagcatggggcattagtcggaacccttgataaagcgccaatgattgactttagcagtactgatttacttggtatctcaacacttattcaccctcaatatttatcgagtgttagacataatattggttataaatcagtcagctttggcaatggtcaaaataaatataatattgtagacagaaacaatcacagtggactcgattttcatgcgcctcgtcttgacaaacttgtgacggaagttactccagcaacactcactcaacaaggtcctgtttctggcgtttacgccaataaaaatcggtaccctgtattttatcgtatggggtcaggtacccaatatattaaggataagaacggaaatcttaccaggattagtggcgcctatcaatttgtcacaggggggactgtaggttcaccaaactcctatcagaatggccaaatgattacgagtcggccaggagatacatttaatcctcaacatgggcctcttgcaagttatggacaggccggagacagtggttctccattatatgcatttgacacacttctgaataaatgggttattgttggtgtcctgactgcaggcaacggtgttgctggaccgggtaacaactgggctgtaatgcctacaaactggatcaaagatacgataaattcggactttgatcagcccataaatattacaaataaaaatgttcctgtcatatggacattcaaccaatctctgggaacgggctctttgtcgcatgatggcatttcttttgaaatgcatggaaaaaaagggaatgatctaaatcatgggaagaacctcttatttagcggtaatgaagccaaaataactcttgattcagatgtggatcaaggtgccggttatctccagttcaatgggcatttttctgttgcctcacctgaccatcattcatggaagggggcgggaataattgttgacaaagactcggatgttatttggaaagtaaaaggagtgaaaggtgataaccttcacaaaattggtgagggaacgcttgtcataaatggtacaggaataaacgatggagggcttaaggttggtgatggtaccgttattcttaaccaggaagctgatagtaatggatatgtgcaggcattctcatccatcgaactctcaagtggacgcccaacagtagtattaacaaatgaaaaacagataaacccagattctattttttgggggtacaggggaggaaatcttgatctaaatggtaataatattacctttactaggttgaatgctgatgattatggggcgaaaataataaataattctaataagacttcaactttgaatatttctcgccctgactctaacttgagcatttttcatggtgttatatctggaaatataaacgtaaatattgatgggaaaaatactaatggatccgatttcttcgacggtagcatctatttaccatatacaaaattaacgaaaaatggaggggaactaacattccagggacatcctgtaattcatgcttcagttaatggttcagatccagtatcgttaacgcaaaatgactgggaaagacgtgactacactattgatagtttatatatctacaacacagagtttaatgtatcacgagatgcttcagtatattcaactgtacattcttttaattctgatactgttattggcagtgataatgttgctatagacaagaacgagggaaaaggtactcatccaaatattgttactggcaaatccatagcttctgataataacaaaagcaattttaaaggacaaattttcctttatggaagttcaagtctcacaataaaggataattttgaaggtggtatatttgcattagggaatggaactgtaaaaatacaaagtggcaaagctatattgaatcagtattcgcatattttaggttatgcaaatctgtcggtagaagataatggggagcttattgcatataaaggattacaaagcgccaacccaataaaactgaatgattcaaaagtaactttatccggaagtggaacgaatgaattgtataacatatcggaaattaacttaaatggatcaggttcaacactatctgtagaaaatggtgcatatcttttgagtaaaataaaatcagactcatcttctactgtgtcatttaactccgattgtaagagttattgtgatgataaacgatatgccacaaattggttaggatcaatcgatgggagtaatattacgcttacaatgaataataataattggcttgtcaatcataattcttctgttagctcagctagtattaataattcagttatcgatatgtcttcttataatgtgacctttaaaacatctaaatttaataaacttgatatatttaaatcttcttttattttaaatacaaacttaaaatcaagcgataatattatagttagagatcaattgaaaggtaatgacaataaaatatttgttaagccactaattgaaccaaacagcgtagagaaccttaatattccattaataattgctcctaaaaataccgatagcaatttatttaacatttgtcctctgtcttctggtttccatacggttacacctttagtagatgttagagagtcagataaaactaaagactggttgctaaaaggatttagtatatcagaaaataattccaataccaaacaaggaaaagtagtaggtgataattcattacgagcatttagtgtagaattaaataatatgtacaaacgaatgggggagttaagaaataatactgaaaacttcggtgcttgggcgcgtataatgaatagccatggttctgaaaactctgaattcaaggataaatatactcatttacaattaggggtggatataaagtcaaaccatagagattatgacaaatatacaggtctgtttatctcacatactaatttaaatggctcgaactcaatggttaatagtgatacaaaatcatatggagttggattctattcaagtgtcttatttaacaatggggcatactttgatataataggaaaatatgtgcatcataaaaatagttactctagtggcttcttatctttcgatgataagaaaaattccaactattcattatatagtggtattgaagtagggcatagatcatatttaaaagatgactattatattgagccacaggcagagttgacttatggttatattagtagtcaaagtataactttgtggaacaaccctaaccaaacaggttcgattattaaggaatcaagcgctcctttagtcggaagagtgggggttattgcaggaaaacagatttcaaacgagaaatttgattttggattccatttgggaagcagctatcaaatggatttgaggaatgatagcaacactattcttaaagatagctatggaaaatttaagtataagagagaaaaggatgaaagattaatatttaatgctggtttaaatatggttaataacaatatccgtttcggagtggaggcggaaaaatctatattaggaaactataatatagatcattctatcaatgcaaatttcagatatagcttttaa

SEQ ID NO: 25816 - DNA, 2289 bp, Escherichia coli
atggttcataaatctgacagtgatgaattagctgcattgagggcagaaaatgtccgtctggtctcattacttgaagctcatgggattgaatggcgacgtaaaccgcagagccctgtgccgcgcgtttctgtattatccaccaatgagaaggttgcattatttcgtcggttgtttcgcgggcgtgatgatgtatgggcacttagatgggaaagtaaaaccagcggcaaatcagggtactctcctgcctgcgctaacgaatggcagttgggaatatgcggtaagccccggataaaatgtggggactgcgctcaccgtcagttgattcctgtatccgatctcgtcatctaccatcatctggccggtacccatactgccgggatgtatccgttgctggaagatgattcctgttattttctggcagttgattttgatgaagctgaatggcagaaggatgcatccgcattcatgcgatcctgtgatgagctgggtgtacctgctgcgctggaaatatcccgttcacgtcagggggcgcatgtctggatattttttgcctcacgagtttcggcccgcgaagctcgccgtctggggactgctattattagctatacgtgtagtcggacccgacagctgcgattggggtcttatgaccgattatttcctaatcaggatactatgccaaaagggggatttggtaatctcatagcgttacctctgcaaaaaagaccgcgtgaattggggggaagcgtttttgttgatatgaatctccagccttatcctgatcagtgggcttttcttgtatcggtgatcccgatgaatgtgcaggatattgaaccgacgatattacgggctacagggagtatccatcctctggatgtgaattttatcaacgaagaagacctgggtacgccgtgggaagagaaaaaatcatcaggaaacagactgaatattgctgttactgagccgctgataatcacgctggcaaaccagatctatttcgaaaaagcgcaattacctcaggccctggtcaaccgactgattcggctggcagcatttccgaatcctgagttttataaggctcaggccatgcgtatgtcagtctggaataagccccgtgttataggttgtgcggagaattacccgcaacatattgcgttgccccggggatgtctggacagtgcattatctttccttaggtacaacaatattgctgcagaattaatcgataaacgatttgccgggacggaatgtaatgccgtttttacgggaaacctcagagcggagcaggaagaggccgtttcggcattactccgttatgacactggtgtactttgtgcgccaacggcttttggtaagacagttaccgcagcggcagtgattgccagacggaaagtgaatacactgatactggtacaccggactgaattgctgaagcagtggcaggagcgtctcgcggtgtttctgcaggtcggtgacagtattggtattatcgggggaggtaaacataaaccctgtggcaatattgatattgcggtggtgcagtccatatccagacacggagaagttgaacctctggtcagaaattatgggcaaatcattgtggatgagtgccatcatattggtgcggtttcattttctgcgattctgaaggaaacgaatgccagatatctgcttggcctgacggcaacatcaatccgacgggatggtctgcaccccattatttttatgtactgtggtgccattcgccatactgcggcccgcccgaaggaaagcctacataatctggaagtgctgacccgttcccgttttacatctggtcatttaccatcggatgcgagaatccaggatattttcagagaaattgctctggatcatgacagaactgtggcgatagctgaagaagccatgaaagcttttgggcaggggcgtaaagttctggtactgactgaacgtacagatcatctggatgatatagcctcagtgatgaacacactgaaattgtctccctttgtgctccatagtcgattatcgaaaaaaaagcgtactatgctgatttccgggctgaatgctcttcctcctgattctccccgtattttgttgtcaacaggcagacttattggtgagggatttgaccaccctccgctggatacgctgattcttgccatgcctgtgtcatggaaagggacgttacagcagtatgcgggacgtctacacagagagcataccggtaaaagcgatgtcaggatcattgattttgtggataccgcgtatccagtgctgctcagaatgtag

SEQ ID NO: 25817 - DNA, 390 bp, Escherichia coli
atggcaagactggcaggacttattcaccattcgagcggtgaagagggggagatttccccttacactgcagaaatggcgagagaattagcagtatggtacggtaatgagtatgtgcggttgtctaatccgttaacttttgacaactctgccctgaccgtacctgtgcgactcattccagaggagcttgaacttttcaactggataaaaagctattgtattgagaaggggatcctctgtatgaaaaaaaatgacattttacagcgtggtccgaaccgtttccggaaaaaggataaaatcaactggttactggatttactgtatgaacaaaacagagttgtaccggttattgagggaaaaacgttgtgtgtcgcacctaactttgacctctga

SEQ ID NO: 25818 - DNA, 504 bp, Escherichia coli
atggcgaaacgtggggctggagtgaatacgaaaaagatttctaggcttgaacggcatacatacatggatgaaaacggtgaggtaaaacaagactctaagatcgagaccttttccatcccagccgaacctccctacgtcaagctatacattgcagacattgcgatgattcatggtttatcaaaatctcaaaatgatgtgcttttacaattggcaatgctgattggatgggatgggtttgtgtctgtatcaaaaactagatttgaaaaaaccatacagcccagggttcatattgaatatcagacctttaaaaacataattgcggctcttgtagataaacaaatattcttccgggcagggcgtggggaacttgaagctaacccctttctttttgcacggggagactggccatcaatttacgaaagaagaaagaaaattgagttaaagatcagttatgacaccaatggaagaacggtgcagacgaaggtaatggatgatgaatgctga

SEQ ID NO: 25819 - DNA, 471 bp, Escherichia coli
ttgctgaggattaaggcgaagctctttatccagatgttcacggattgtacgtctaatcatatgccgctggataagcattgggtcaatatcaactacgatatcaccttctttcatatagtaggtattagaaggcgtatccagtgtcagatagccttctttgcccgtgcggatctcacttatcctgtatccctgataaatatcacgccccgtttcgtcatcaagtgtcataccgtcatgcacggtaatttcagaacgatttacgcccccttttttatcggctatatcaacaataagagtcgcgctaatgctattcttcttattgttaatactgaccagttttacataggggctattacttgcattttggacttcaagcccggcaacttcgatttgtttcaccagtttctgattgtaagcatcaatggcatcgaggcgatacaccatatgatgtttatgcacatgtgtcgctga

SEQ ID NO: 25820 - DNA, 276 bp, Escherichia coli; identical to SEQ ID NO: 19808

SEQ ID NO: 25821 - DNA, 792 bp, Escherichia coli
atgtacaacctaaagcatctaaaacagggagggggtataattaagtcgttcctgattttgggaagcatgatcttctcttgcagtatagttgcggcaaaggatgtagatgcaaacaattttctccatcaagatgacgtaaatgcccagctgtttggggtagatttgggggtgagtcggattatttatgttccagagtcttctggtgagaatgttgctgtaagaaataagcagacatatcctatgctggtgcagtcacaggtgttagatgaagatacaaaatcaaaagcaccatttattactactcctcctctctttaggttggaagggaaacagacgagtcgtattcgtattattcagacggggggggacttccccaaagacagggaaaaattacaatggctatgtgttaaaggaattcctccaagggaagatgataaatgggctgaaggacagactcagaaaaagtcatcattgcttgtacaattttcggtaaataattgtatcaagcttctcatccgaccagatgctgttaaaggtcacccagaggatgttgcagatagagtaacatggacaaaaaaagattcagttctggaggcttctaatccaacacctttttatatcaatattaaagaacttattgtcggtggaaggactgttaaatcactaaaatacatttcaccatttagtaagcagagttttgatatttctccttcaattgcaggagaggttaagtggaaaattgtaactgattatggtggtgagagtaaattatacactgccgaaattcggtga

SEQ ID NO: 25822 - DNA, 2559 bp, Escherichia coli
atgaatttcaccttgaggaataaatataatctctcaaaaatatatgtttatgttcttacatcattctctgtcctattctcagcaaatgtaaatgccagaatctatacatttaatccatctatgctgaatattgaacagcgtaatatagatctttctgtttttgaaagtaactctcagttaccaggtgtttattatgttgatattgtacttaatggtagattggctgagagaaagaaaatttcgttctataatgtgcgtgatgaagaaggaaatcttgctcttgcctcctgcttaactaaggatatgctgacgcgttatggaataaagattggtgattatccagatctctttattaaaaagatgagcatggatggagaagtttgtgctgatcttaacgctattccaggggcaaccacatattttgatttttataatcaacggttgagtttaaatgtacctaatattgcactatattcgaaacatcgtggtattgctccagaagttctatggaacgatggtattgatgtatttgtgatgaattatcaggtgaatgctttaagaaaggagtttcgtcaagggcagaatcatgatgttagttcctactgggccagaatagaaccaggggtaaatataggtccatggaggataagaaacctaactacatggactaaagagcatggtcaatcagcagaaagccaaagtgttcacacatatgcagagcgtggtgttgcatctataaaaagtcgagttctaattggagagaattataccacctccgatatttttgatagtattccttttagaggtgcaatgctccgttctgatgaaagtatggttccttacagtcagtatggatttgcacctataattaggggaatagcacagtctcaggctctgatagaggtacgtcagaatggttatatcattcatacagttagtgtggctccgggtgcttttgctctttatgatattcctgttactgggtccggtggggatttacaagtatctgtcatagaaacaaatgggaaaaatcagttattcaccgtaccttacaccactcctgctgttgcgctacgtgaaggatattttaaatatagcatagcggggggggaatatcgttcatcttattctggtgtagataattcagtattaatgcaaattactgcaatgtatggtttaccttgggatctgacaacgtttatcgggtttcagggggctaaacattatcaatctgcagcaacaggattaggactctctatgggatatattggagccatgtcgctcgatggaatatttgctcgtggacagaaaagagaacagcgtaaagataaaggatattcatggcgtgtgagatacagtaaggtgtttgagaaaactggaaccagttttgttgcagccagtcaccaatattcttctagtgactataatacactttctgatgttctcgatacttataataataagaattacatttataacgataaaactagtcgttcgcggagaactagtctgacgatgagtcaatcaatgggaaaatggggagcgttcagcataggaggtgttagagatgaatatcgaggagggcgaccatcacaagactctataaatgcatcctacacaacgacatgggaatggggaacattgtcattgaactggagtaagaataatgcaggctattattcaacaagtttaaaagataaaaaagaaaatatatttaatgtttggatgagcattcccgtagaacgattgtttggagggcgtgcgaatagtattaatgcgacgaccaacttccagaaatcaggtgatcaaaaaacacaatatgaattaggattaaatgggcgtgcgtttaatcaacagttatactgggacattcgtcagcaatttgcaccgggaagtgacacttatagtgatgcaagcagggtaaactttatctggtatggttcttatggtcagttccaaggaggatacagttatagtgattcatttagacaaatgaatgctggcctgtcaggaaccatggttgctcacaggaaaggtgtcgcgcttggacagaagcagggggataccatcgctcttgttgaggctctcggtgcggatggggctgaagttattggatggcctggtgttaagactgacttcaggggctatacaaccttggggtatcttaccccgtatcaggaaaacactgtgtctctgaatcccgcgtcgttgcctgataacgcggaagtattacagacagatatccgtgtcgtcccgacaaaaggtgctgtggttcctgctcgttttaccactaatattggcaaaaaggtgctgtttaaattaacacgcactgacggaaaaaaagtccctttcggtgctgtggtttcattatcaatgaaaacagaaaaaagtggcgctggtattgtaaatgaatttggtgaggtttatatgacaggtgtgcctgaaaaaggtcaactaaaaatcaactggaacacccacggaaaatgcacggcagattatgaattgtcggataaaaaaggtattttaaacatttatactgttcctgtaacttgtttgtga

SEQ ID NO: 25823 - DNA, 330 bp, Escherichia coli
atgaatgacggtgacgtaattgctacaggacaggtcttctgtgaagaaaataatatatctaaagtgagccttttgaatatatatatgggagaccatgtttatagtaatgtatacactttgcaaggaaagaataaagaggaaaataaactaatggtcaggattgaaggtgatggatggcattcttccgacaaggcgggaaatggaatttataagaaacaaaaaaataaaagtgaacagttttatgtggtgattaatggtcatcagaatgtgaaatcagatatatattctatcaaagcaagttctatatgtctttattcttaccaagaatag

SEQ ID NO: 25824 - DNA, 489 bp, Escherichia coli
atgaaaaagaaagttattgcagttgcggctcttatgattatgtgtggtgggattgctaacgcagccagtctgggtaattcttcttctgttaatgcgaactttaccgtcatcggcggctgctcagtgagcggtaattggactccagaaacaattaatgctggaaatcatctgtctactactcaaaaagtaggttctcttgatattacactgagtggttgcgatagtcatgtttattttaaagggcaggagattgattcgcttggtcaacctgtagctacgtcacctagtggtgcaaaaattcctgtaatgccagaactggcgaaactgggtagtacatggactaaagacccagatctgaatgttttcagaacctcatcagccttagttaatgggcaaactctttctaccgctttgatcaactattctgattggaatgcggaggctggcactcatactatgactcttgaagttggtacctacaccttataa

SEQ ID NO: 25825 - DNA, 141 bp, Escherichia coli
atgaaatctgatcataatgattgtatgacaaatcaacgattctggtatctgaaaatacagaattttgatatgcagatatttcccctgcaaactgacataatgctatataatacaaccatgggtgaactgcatcttccttaa

SEQ ID NO: 25826 - DNA, 291 bp, Escherichia coli
atgcctactactgcaagcatccgtaaaacaccgcgagaaaatcagattaacatccgggcaacggatgaggaacgagccgttattgattatgccgctagcctggtcaataagaaccgtactgatttcatcattgagctggcttaccaggaagctaaaaacatcatcctggatcaacgtttatttgtgctggatgatgaatgttatgattcatttattacgcaacttgaagctcctgtgcagaatgctgaagggcgtgaacgtctgatggcggtaaagcctgaatggaaataa

SEQ ID NO: 25827 - DNA, 483 bp, Escherichia coli
atggaaataaatgtcaccgcaccggtattactgacggatgagcatatacttcagccatttgattgtgggaatgaagtgttaagtaactggttacatggtcgcgctatgaaaaatcagatgctcaatgcttcccgcacgttcgtcatttgcctggagggtactttacgtgttgtggggtactactcattagctaccggttccgtcactcatgccgaacttgggcgcagtttgcggcataacatgcccaatcctgttcctgttgttctgttagggcgcctggctgttgatgtttgtactcaggggcatggttttggtaaatggctgctgagtgatgccattcatcgggttgtcaatctggctgatcaggttggtattaaggctgttatggttcatgcaattgatgatgatgccagagcgttttatgagcgttttggttttgtccagtcagttgtggcaccaaataccttgttttataaagtctga

SEQ ID NO: 25828 - DNA, 561 bp, Escherichia coli
gtgaaccagctgcttagctgtgattttaaggggttaattgccaggctggaggtattacgaacagcggcaatcgccgatgaacaacgtaaacggattcatgtaaaccgttacggtattattgcccgggattctcgcgttttacatgcgcgtgaaatacaacgaatggcgtccgaacgccgtcatgccacgctggtagcctttgttattgaaaagcaggcagcaattacagatctggcaattgatatgttctgcaaattgattggcagcacgaggcgcagagcagagataagccagaaagagcgtcgtctgaaagttgctgaagtacttgaagtcgtagctcgggatcatattaagctgggacaggctctcctggcagcacgtgacggtaatactgatattgaatccgtaataacagcatcactcggctgggaaggtttgattgccagtatggaggctgtagcttcggtggcatcttcccatcactgttctgaactggatgcaccagaaagtccacaccagaatggtgaaagaggttctgaaagccgtcgccagagccaataa

SEQ ID NO: 25829 - DNA, 342 bp, Escherichia coli
atgacccgaagtggtggtgattttcagccccgaccgctgaaacgcctgttcacagtcaaccagtgctggacgtccttcctggatgcgggcggtctgcgcgatatcgaggttgaggctgtctccaaaatgctggcctgcggcacgctgatactgggcgtgaaggaatacaactgcgataaacctgactgcccccacgtcagatacgtcactaactcatgcggcagccgtgcctgcccgtcctgcggaaagaaggccacagacctgtggatagcgacacagctgaatcgtcttcctgactgcgactgggtacaccaggtcttcatcctgccggacacgctgtga

SEQ ID NO: 25830 - DNA, 366 bp, Escherichia coli
gtgttcgaaagcaaccgctggctgctgaatgacgtgtgccgtctggtggtggagaatctgctgtatgccgcccgaaaacgggggctggaacccggtatcttctgcgccatccatacgtatggccgtcgtctcaactggcatccgcatgtacatgtgtctgtaacctgtggaggtctgaataagcatggtcagtggaaaaagctgagcttcctgaaagacgcgatgcgttcacggtggatgtggaatatgcggcagctgcttctgaaagcgtggtcagaggggatggcaatgccggagtcgttgtcacatatcacgacggaatcacagtggagaagcctggtgctgaaagtcggcggaaaatactga

SEQ ID NO: 25831 - DNA, 489 bp, Escherichia coli
atgtcgaagaagacagccggagggcggaatacggcacgctacctgggtcgttatctgaagaagccaccaatagcggcttcccgactggcgcattacaacggaggatcgagtctgagcttccgttacctggagcacaaaacgggagaaacggcgacggaaacgctgacacagcgggagctggtcgcgaggctgaaacagcacatcccggagaagttttttaagatggtgaggtacttcgggttccttgccaaccgggtgtgtggagagaagctgccgcaggtgtaccgtgctctggggatggataaaccggaaccagtggcgaaagtgtgctatgcacaaatggtgaaacagttcctgagtcgtgacccgttcgaatgcgtactgtgtggcggccggatggtataccgccgggccattgcggggctgaatgtatcagggctgaagaaaaacgcgcgggatatcaatctgctgaggtatatgccggcctga

SEQ ID NO: 25832 - DNA, 420 bp, Escherichia coli
atggtacgattcattccattcttcgttctttctgagcattgcgttcaggatagtcagcagcttgcgtatacaggtaaccagcgccacttttttgggttttcctgcggcaagcagtcgcatgtaaaacacctttattaccgggttaaagcgggttgcgacaagcgctgccatgtacagggctgttcgcacaccagccctgccgccaaagatggttcgtcgccctctcatcgtgcccgagtcccggtttactggaaccataccgacaagcgcactgatttcacgcctggagaggttaccctgttcgggtacttccgccagcagcgcagcagccgtcatggtgccaacacctttaatactgctcagtcgcttagcaagctctttgaagtggctatggatatggctgttcatgtcagcatctag

SEQ ID NO: 25833 - DNA, 480 bp, Escherichia coli
atgagtcagccaggttcactttgtgtggatatcgatgtttcgaaagcgatactggatattgccgccagcagcgctattgaacaattttctgtcggcaatgacagtgatggctttgacgccatcattgctgagttgagaatgtacgccattgcgctggttttaatgaaagccactggaggacttgaaaccgccatagtctgtgcgcttcaggcagaaggttttgagcttgccgtggttaaccccagacaagctcgtgactttgcccgcgccatgggatacctcgcgaaaactgatagtattgatgccagagtgctttcccagatggctgaggttctcaaccggcatccggagcgggaacgctttatcagagcactgccggatactgaatgtcaggttctcactgcaatggtagttcgtaggcggcagttgattacgatgctggttgccgagagaaaccggttgcaccctgctcatccatag

SEQ ID NO: 25834 - DNA, 141 bp, Escherichia coli
atgattaatacatatagaagattgatttctgaactgagccaagttagcgaagaaacaatagagtccttagttccgaagatatcaaataatatgaaaaccaatttcccggcaagcggtgtgagtgctttggaagatgattga

SEQ ID NO: 25835 - DNA, 303 bp, Escherichia coli
gtgggccttgctgctggtctggtgggtatggctgcagatgcgatggtggaagatgtgaactataccatgatcacggatgtgcagattgcagagcgtactaagtcaacggtgacaacggataatgttgccgctcttcgtcagggcacatcaggtgcgaaaattcagaccagtactgaaacaggtaaccagcataaatatcagacccgtgtggtctcaaatgcgaacaaggttaacctgaaatttgaagaggcgaagcctgttctcgaagaccagctggccaaattaattgctaatatattgtaa

SEQ ID NO: 25836 - DNA, 591 bp, Escherichia coli
atgttatcaatttgtttcctcattcagggatgcataagtacacaagtatctgaaggaactttatataaatataagaataaacatataagagaatttttgtccgaccaggtaatgtataacattcataatgagaattataactatattacccgtactggcggttctgatacgtatttcctatatactccggctctgtttgttgataaacaagtagcggcaccatcagtgaatgtggaaaatttatgtgctataagtggagggcagagacgaattaaaaaattcacctctgatacttttattgaatccggctataaagttgctaaagcctttcgtgatatgggattgtatgctcatttcggagcatatgaagcattcagggattcttatcagagctttgaaaaacaaaagattgcgtatagatttcaaacagagaaactggatgagtatgtaaataaaggttatttctttgatgatttttcctgtattgtcaatggtaaagaaatatggtcactttcaattgagccagttgctgttgatcaagattcatcaggtgttgatcaaatatgggtgcttatgacggtaaatagctga

SEQ ID NO: 25837 - DNA, 282 bp, Escherichia coli
atgttagatattggttcaaccattaaactatgccgtgaagcacgtaagctcaccttacaagaactttcagatagaacggatttaacgaaatcttatctatctcgtatagagaacaatcaaagagatcctactattacagcgttagaaagaatatcattagcgctacatatccctctaaatataatcatccttctttctgaaagtgaagagacaaatgatgagttttctgacatcaataatatgctcaaaaaaactataatggatacattagttaatgcataa

SEQ ID NO: 25838 - DNA, 483 bp, Escherichia coli
gtgaccatcacccgggataaagccctgaaatcacagattacaaaactgctcaccagtattcagaataaagcggtgagtgatactccactggatgacagggaaaaaggcttcatttccagcaccaccgtccccgtctttaaatatcttattgacccgcagatgctcggtgtgtccagcagcgtggtttaccagctgacggactatatcggctacgacatcatgctccagtacattcaggaactgcttcagcaggcccgggccatgattgccaccgggaactatccacagaccgtgctggacagtgtgctggagaatctgaatcaggcacagcaacagattgcggttttccaggggcaggtaaaggtccagcaggatgcattgctggttgttgaccgtcagatgagctacatgcgccagcagctgtccgcccgcatgctcagccgttaccagaacaactatcacttcggagggagcacgctgtga

SEQ ID NO: 25839 - DNA, 351 bp, Escherichia coli
atgattcaggtaaatatcacccagcacgcagttctggacgtagtcctggaacagattgatgatttccggattccgggacaggaaatcggtgcttttcaaaatcagattcgccccgaacagcatgcctgtcttgctgtaggtgacgctgtccggttgggtgaatatcatctcgtagctgaccaccatcgcatgcccgatacgggtcgtaagagaaagtggcatcgccagaccgaccggaacattatccacccggtgaacctggaccaggtcactgttatcaataatttgcaccgatgtgcggacattaaccagcaggctgataagcacaaacaccgccacccagcccagtaa

SEQ ID NO: 25840 - DNA, 465 bp, Escherichia coli
atgaccattctcagggcgttcattcgttctctctcggttcctcaggagcaggagcctgccgttcggttcgaaactgaacccggacgacagatgcaggttgactggggcactatgcgtaatggtcgctcaccgcttcacgtgttcgttgctgttctcggatacagccgaatgctgtacatcgaattcactgacaatatgcgttatgacacgctggagacctgccatcgtaatgcgttccgcttctttggtggtgtgccgcgcgaagtgttgtatgacaatatgaaaactgtggttctgcaacgtgacgcatatcagaccggtcagcaccggttccatccttcgctgtggcagttcggcaaggagatgggcttctctccccgactgtgtcgccccttcagggcacagtctaaaggtaaggtggaacggatgtgcagtacacccgtaacagtttttacatcccactaa

SEQ ID NO: 25841 - DNA, 708 bp, Escherichia coli
atgcgaaaaaaaatagagatgagcttgataaactctcctgcaaatggtgttgtgattaaaagaataatttctgatggattgaaagaaatagtttctctaaaagaacagatccttcttgaaaccaccgcaaaaattcagagtattgaggaaaagagagaagaaaaagttattcaaggttattatgatggctatgcgaaaggcattattgatgtgatggataattttatacccttgataagtttgctgagctcagaattagaaaaaaacagaataaatatgataaacgatctgaagagcatattgttaaaatcttcagaggaagttgaagtttttatcaaaatttttgaaagttgggtaacaaaattaccgtcaatatcaggccctttaaatctctatatacctaccagtttcaaagataagtctattgaagtagagtcatattttgtcgacaagtcaatatggaatgtccatatttcatatcatgatgacaaacgttttgttttttttacagatcaatttattgctgaatttagtccgcaggaatttgtggataattgtgagcaatatttaattagcaatcactgtttttcccctgacaaggttaatgaaatctgtgaacatgccagacattatttagttgaaagaatgtgtgaaatagattctttggctatgaataattctgatttgacgaccccagaggacttatag

SEQ ID NO: 25842 - DNA, 687 bp, Escherichia coli
atgtgtgcgctggatcgtagagaaaggccacttaacagtcaatctgtaaataaatacatccttaacgttcagaatatctacagaaattctcccgttccggtttgtgtccgtaacaacaaccggaaaatcctttatgccaatggggcttttattgaactcttttccagagaagataaacccttatccggagagagttatatacgtctgcaggttgaaatttttctttcatcacttgaactggaatgccagactcttggacatggctctgcattttgtcgtcgttttaattttcatggcgaaatctatcagataaggatggagaatgtttctttttataatgacgaatctgttgttttatggcaaattaatccgtttcctgattatccattttttgcgttaaatcagagtggaagtaatacaaatacttctgataaattaacgatatggaatgatctttctccagggacattggttgttttctctttttatatgctgggtgttggtcacgcaacaattgccagagagttgggtattacagacagagcatctgaggatcgaattaaaccagttaaacggaaaataaaaggattttttgaacactttgatttattcagagtgtcatgtatctataaaggagaaatagattcgctattaagtataattcgtgaattttatggtgttaagtaa

SEQ ID NO: 25843 - DNA, 693 bp, Escherichia coli
atgtgtgcactggatcctagagaaaggccacttaacagtcaatctgtaaataaatacattcttaacgttcaaaatatctacaggaattctcctgttcctgtttgtgtccgtaacaaaaaaaggaaaatcctttatgccaatggggcctttattgaactcttttccaaagaagataaacccttctctggtgaaagttatgtacgtctgcaggttgaaatttttctttcatcacttgagcttgaatgccagtctcttgggcatggttccgcattttgtcgtcgttttaattttcatggagaaatctatcaaataaggatggaaaatgtttcattttataatgaagaatctgttgttctatggcaaattaatatatttcctgactatccattctttcgtgtggaaaaagaaaattattatcatcgtgatagctatgtacagtctgttatatcgaatatgacagcaaaatcattggttgttttttgtttctatgcattagggtataaacatataaatatagctaaagaattaaaaatcacagaagtggcttctaaaaaaaggattaaaaagattaatgcggatatcaataaaagattgggttccttcgatttgttcaggaataaatgtattaagacaggtgtaatgtacgaaatattaaacgttttgagtgaatatatggatgttaaaaaaatgtaa

SEQ ID NO: 25844 - DNA, 933 bp, Escherichia coli
atgtacggccgccagggcgtggagctgagtcgttcactgctgtcgggctgggtggatgcatgctgccggctactgtcaccgctggaagaagcgcttcaggactatgtgctgactgacggtaagctccatgctgatgacacgcctgtcccggtgctgttgccaggcaataagaaaacgaagaccgggcggttatggacctacgttcgtgacgaccgtaacgccgggtcaacgctggcgccggcggtgtggttcgcttacagcccggacagaaaaggcatccatccgcagacccatcttgcggggttcagtggtgtactgcaggcggatgcatacgccgggttcaacgagctgtaccgggatgaccggataacggaagccgcctgttgggctcacgcccgccgtaaaatccacgatgtgcacgttcgcaccccgtcagccctgacggaggaagcgctgaaacggatcggcgaactgtacgccatcgaggcagagataaggggaatgacggcggagcagcgccttgccgaacgtcagttgaaaacgaaaccgctgctgaaatccctggaaagctggctgcgtgaaaagatgaaaaccctgtcgcgacactcagaactggcgaaagcgttcgcatacgccctgaaccagtggccggcgctgacgtactatgcagatgatggctgggctgaggcggacaataacatcgctgaaaatgcgttgcggatggtcagtctgggccgcaaaaactacctgttcttcggttcggatcatggaggagagcggggagcgctgctgtacagcctgatcgggacgtgcaaactgaacggagtggagccagaaagctacctccgctatgtccttgacgtcatagccgactggccgataaaccgggtcggcgaactgctcccctggcgcgtagcactgccgactgaataa

SEQ ID NO: 25845 - DNA, 258 bp, Escherichia coli
gtgcgtgagcgtttccgcagttaccagacagagcttaagtcccgtggaataaaacgtgcccgtgcgcgtcgtgatgcgaacagggaacgtcaggatatcgtcaccctggtgaaacggcagctgacgcgtgaaatctcggaaggacgcttcactgctaatggtgaggcggtaaaacgcgaagtggagcgtcgtgtgaaggagcgcatgattctgtcacgtaaccgtaattacagccggctgaccacagcttctccctga

SEQ ID NO: 25846 - DNA, 258 bp, Escherichia coli
gtgcgtgagcgtttccgcagttaccagacagagcttaagtcccgtggaataaagcgtgcccgtgcgcgtcgtgatgcgggcagggaacgtcaggatatcgtcaccctggtgaaacgacagctgacgcgtgaaatctcggaagggcgcttcactgccagtcgtgaggcggtaaaacgtgaagtggagcgtcgtgtgaaggagcgcatgattctgtcacgtaaccgcaattacagccggctggccacagcttccccctga

SEQ ID NO: 25847 - DNA, 234 bp, Escherichia coli
atggtcacagaataccgaggcaatatcggagatactcagagcagcatacgtggcgaagaaaatattgtaggaagacagtattctgaactacaaaatcaccataaaacagaggcattatctcagaataataaatataatgaagagaaatcgggtcaggaaagaatgcccggggctgacagtccacaggaactgatgaaaagagcaaaggagtatcaggataagcacaagcaataa

SEQ ID NO: 25848 - DNA, 246 bp, Escherichia coli
atgtttcaggctctgacagtggatgaatcgttatatgcccgctactggatggacatatctgtcagccagaaaacagcttactgcatatttttacctgcgataatactaactctaccagtaaatcatcagggctacacgaccaataaaatgaaacacttttttgggcctgagctaacttccataactctgaatgtttatcgatctttaaccagattatattttctcttacctgtaactcagatgtaa

SEQ ID NO: 25849 - DNA, 714 bp, Escherichia coli
gtggcacatatccgcactcgcgaaacatatggaacccggcggctccagacggagctggcagagaatggcatcatcgttggtcgtgaccgactggcacgtcttcgtaaggagctaaggctacgctgtaagcagaaacgcaagttcagagcgactacgaactcgaaccacaatctgccagttgcgccaaatctgctgaaccagacgttcgctcctacagcaccaaatcaggtctgggtggcggacctgacgtatgttgccacacaggagggatggttgtacctcgctggcatcaaagatgtttatacgtgcgaaattgtcggctacgccatgggagagcgcatgacaaaagagctgacaggtaaagccctgtttatggcgctcaggagccagcgcccacctgccgggctaatccaccactctgatcgaggttcacagtactgcgcatacgattaccgggtcatacaggagcagtttggtctgaaaacatcaatgtcgcgtaaaggtaactgttacgacaacgctccgatggaaagcttctggggaacgctgaaaaatgagagcctgagccactatcgttttaataaccgggatgaagccatctcagtaatacgggaatacattgagattttctacaatcgtcagcgtcgtcactctcgtctggggaatatctccccggcagccttcagggaaaaatatcatcagatgactgcttaa

SEQ ID NO: 25850 - DNA, 255 bp, Escherichia coli
atgtacgaaatccgtgaacgttcatcgcggccaccagtgcacggatgtccgggtcaatccggtaatagcctgcaggtaaactcattgcgacttatccccggtgccgtccagcagtccctgagccacctgccggcagtctcctgtggcggccactttctccagcgcctgcctgacgcgcagatttccccggatgatgtcgtgcccctggctgcagaacaccaccagggccggaacgctgcgaatgccgtactgtga

SEQ ID NO: 25851 - DNA, 285 bp, Escherichia coli
gtgataccgattggtgcgggcaacgaagtgacagtggtgttccaggacggcttccagctgaaaaccgtggaggaaatggcgctggagcagtcacagagtacagcggaagagggtaacccggaaagccctgtgccgaatcctccctcggcagaaagccacctgaacggttttaacaccgaccagatgctgaagcagctgggcaatctgaatccgcagcagtttatgtccggagacaagaacccgcagggcggggatgccggcaaggagggcggaaatggcgggtga

SEQ ID NO: 25852 - DNA, 225 bp, Escherichia coli
atggagcgtaaagagtcagcgttcaatcaggctgagtttaataaggtacttcttgaatgtgcggtaaaaacacagtcaacagttgctaagattttaggtattgagtcactaagccctcatgtttccgggaatccaaagtttgaatatgcgaatatggtcgaagatatcagggataaggtgtcatctgagatggagaggttctttccagaaaatgatgaggaataa

SEQ ID NO: 25853 - DNA, 225 bp, Escherichia coli
atggagcgtaaagagtctgcatttaatcagactgagtttaataaattgcttcttgaatgcgttgtaaaaacacaatcatcagtagcgaaaattttgggtattgagtctctcagtcctcatgtctccggaaatccaaagtttgaatatgcgaatatggtcgaagatatcagggagaaggtgtcatctgagatggagaggttctttccagaaaatgatgaggattaa

SEQ ID NO: 25854 - DNA, 270 bp, Escherichia coli
atgctgcttctactgacacttttgcctgcgtgttcagtggcgggtatgcgctttaaccctgcattcctgtcgggtgatacagaagctgttgctgatttatctcgttttgagaaagggatgacatatctacctggtagttatgaggttgaaatatgggtcaatgattcgcctttgacatcacgtaaggttactttcaaagctgatgagcagaatcagttgatcccctgtttttcgctcgatgagttagggaaggtgcgaacaagtccctga

SEQ ID NO: 25855 - DNA, 567 bp, Escherichia coli
atggcggcgatgctgaccggcagtgagcagaactggcgcagcttcacccgctccgtgctgtccatgatgacagaaattctgctgaagcaggcaatggtggggattgtcgggagtatcggcagcgctattggcggggctgttggtggtggcgcatccgcgtcaggcggtacagccattcaggcagctgcggcgaaattccattttgcgaccggaggatttacgggaaccggcggcaaatatgagccagcggggattgtccaccgcggggagtttgtcttcacgaaggaggcaaccagccggattggtgtcgggaacctgtaccgcctgatgcggggctatgcggaaggggggtatgtgggtgctgccggaagtccggcgcagatgcggcgggccgaaggcattaattttaatcagaacaatcacgtggtgattcagaacgacggtatcaacggacaggccgggccgcagctgatgaaagcggtgtatgagatggcccgtaaaggtgcgcaggatgagctccggctgcagttgcgtgatggcggtctgttatcggggagcgggcgatga

SEQ ID NO: 25856 - DNA, 330 bp, Escherichia coli; identical to SEQ ID NO: 15505

SEQ ID NO: 25857 - DNA, 600 bp, Escherichia coli
atgcgtaaagtttgtgcagccattttgtccgcagccatctgtctgtccgtatccggtgcgcctgcatgggcgtctgaacatcagcccacactgagcgcggggtatcttcatgcccgtacgaacgctcccggcagcgataatctgaacgggattaacgtgaaataccgttatgagtttacggacgcgctggggctgattacgtccttcagttatgccaatgctgaggatgagcaaaaaacgcactacagcgatacccgctggcatgaagattccgtgcgtaaccgctggttcagcgtgatggcggggccgtctgtacgcgtgaatgaatggttcagcgcgtatgcgatggtgggtgtggcttacagccgtgtgtcgactttctccggggattatctccgcgtaactgacaacaaggggaaaacgcacgatgtgctgaccggaagtgatgacggtcgccacagcaacacgtctctggcgtggggggctggcgtgcagtttaacccgaccgaatccgtaaccattgaccttgcttatgaaggttccggtagtggcgactggcgaacggatgcatttattgttggtatcggataccgtttctga

SEQ ID NO: 25858 - DNA, 738 bp, Escherichia coli
gtggcactacctttcgctgctgacgcttgtctggtcgcctcatcttttgaagcagacgcagatgatgccgatgacgccgctgaactggctgacgatgcggctgccgccttagaggaagcagcattgtctgctgaagtctttgcatttgtttcagaggtttttgctgcagaagcagacctcgctgctgcagtggcttgctcagtggctttgccagccttcgttgtggctgttgaagcggatgatgcggcgctttctgccgattttccggcggcggtggcactggctgaggcctgcccggcacttgttgacgcggcactggcagataatgcagccgctgtttttgaacctgccgcagctgaggcgctctgtcccgctgctgtttcagaagacttagcgttcgtctcggacgtttttgccgccttcgcggaatttcctgccgccgttgccgaggaagctgcactactggcacttgatgatgcattcgtttctgaagatttcgctgcctcttttgaggccgccgcaccccgtgccgaggtggcagcttctgacgccttcatggtcgctgtggatgcagaagtggctgccgatttttgtgatgctgcggcattcgtttctgacgttttcgcggcactggcgctggtagctgccgcgctttttgatgactctgcagcagcagcactttttgctgcttcacgggcctttgtcgatgccgttcctgcgctggaagacgctgactga

SEQ ID NO: 25859 - DNA, 300 bp, Escherichia coli
ttgctgtccgcacaaggggcaacgctgttaagaacagcaatgctggattattataaccaggacactacgggaacctcggggatagtcggcatgggattcaacaatgaagattccattacagaccttcgtgagggcagctttaaaatgccggacgggacaacattcagcgatcctgtcatggcaatgtcagacaatggtatgcaggctactattctgacctctatcagaagcgggtatgcgaagggtatcactgtcagaccccgtagcattgcacttaattacattgtgagggcagtttaa

SEQ ID NO: 25860 - DNA, 558 bp, Escherichia coli
atggacattgagttttcgcagattcatgaaatggtctatatgcatgatattgtaaattcggactcgaaaaagaaaccaaggattccgttaaaaaaattccttaatgctgagaaggttctcacgcaaacaacatcatgggcactaaattcaagatatgtgaatccagttaaaattacgatgaggtctggtttaaattatattgaacaagaatctcttggaggaaaatatctaacacatgatttgtcaataaagatagcggatatttctgaagaaataattcagcaagcaatattatcggctatgagcatatataaatttccgataacagatgatttaatgagtatggctacaaatgaactcataaaactggccaaaatagagaataatttagacctgaataaattctctactatatgcaccgacgttctatcccccctcgtcaccagacataataaagaaaaaaaaccagacgatttactacccttcgcaaaaatcccctttttaattttcatcgaaaaaatggaaattgataatatgaatcaaggtcatgcatattaa

SEQ ID NO: 25861 - DNA, 366 bp, Escherichia coli
ttggagtcattaccccagtttttaaccagacaacaagtatatgaattatcggaggttgtcgatcaactcgatatacccgtactttgttatggtttacgtaccgattttcgaggtgagttatttattggcagccaatacttactggcatggtccgacaaactggttgaattaaaaaccatctgtttttgtggccgcaaagcaagcatggtgctgcgtcttgatcaagcaggcagaccttataacgaaggtgagcaggtggttattggtggtaatgaacgctacgtttctgtatgccgtaaacactataaagaagcgttagaagtcggctcattaacggctattcaggaaaggcatcgccacgattaa

SEQ ID NO: 25862 - DNA, 297 bp, Escherichia coli; identical to SEQ ID NO: 15534

SEQ ID NO: 25863 - DNA, 384 bp, Escherichia coli
atgattgcggtccttgcggtaaatccggcatgtgcaggattcattgtcctgctcaaagtccataccatcaaactgctggttttcattgatgatgcgggaccagccatcaacgcccaccaccggaacgatgccgttctgcttatcagggaaggcgtaaatttctttcgtccacggattaaggccgtactggttggcgacgatcaacaatgcgatgaactgcgcatcgctggcatcacctttaaatgccgtctggcgaagagtggtgatcagttcctgtgggtcgacagaatccatgccgacacgttcagccagcttccctgccagcgttgcgagtgctgtactcatccgttttatacctctgaatcaatatcaacctggtggtga

SEQ ID NO: 25864 - DNA, 432 bp, Escherichia coli; identical to SEQ ID NO: 7321

SEQ ID NO: 25865 - DNA, 396 bp, Escherichia coli; identical to SEQ ID NO: 15513

SEQ ID NO: 25866 - DNA, 165 bp, Escherichia coli
atggtattatcgcacttgttgatgatatgtcagaaagtgctctttttagctttagtggtggaaaagactcttttgcaattgcttttgatattacaggtccggcacctgcacctattgcctgtagaattctacccaaaagaagcatatttaaattgttggccataa

SEQ ID NO: 25867 - DNA, 921 bp, Escherichia coli
atgggcttggcgatgtataacgatccttatagtgacccaaaagcgtgggaatcatatttcaaaaatattgtttggctacattataagcctgctaactgttgtgacttgccagatgagcatggaggcgactttgggctggagtgttacactctgagtggtcatgtttttcagtgttacttgcctgagcagtcgagtgatattgataagctttataaagcgcaacaaaaaaagatttatactgatataaaaaagttttctcaggataacattaaagaattagaggagctttttggcacattaaaaattagccgctggatattagctacaccatataataaatcggcgaaattaagtcaatattgcacaaaaaaatcattaaaagtaagagagttagggatttcttacgttgctgatgattttcaaatagtagtgcaaacagatcgaaattatatagaagaagcgttctttcttcgcaaaaataactatcaattaagctttgatataaatgatgcgacggctgagaatgctgctaactttattagtgaaaatacatcttttttagataagctaaatttaaaattacctaagataaatgatgatgtatctaggcagggtttatatagagagtttttaatacaaaaatatcttgattatcaaaacttgctggatgctttgaagagagactgggttgatatctatgaaattatctataactgtgttcaacatagagaacgtaatttggtaggtctctttcttcttacttcatcagatgcgaaaccatcagatataatgaaagatgaaatcgctttgttaaagaaatgtattgaagaggaagttcgtacgcttaaacaggctgacttggaaaagataacatggggagttatttctgattggcttataagatgccctttagatttttag

SEQ ID NO: 25868 - DNA, 465 bp, Escherichia coli
atgcatataacgatagatgaaataataggaaggccgtttacgtttaataaacgacctgaacatttgccatgtgatatgagaccattgtggcgttgcagtttgttgctgataatattccttgtcacagggagagctggttgctgttctttaaaaaaacttcatttaattaattggatgttaaagtcagagaataatgaagcaatgtttgaattctggcttttaaacaaagaaggtttaaagcctgaagtaagattggatccaactttagatagagcaatacagctattattagcagaggattttattttgagaaatgaacgagcgttcaaaataaatgaaaaggggcttaaggtcgctgagaaattgctttctcttgatgtgttcaaagaagaaaggttggtgctaaataaacataaggctggactgtccgaaactaacattaataaaatatttcaggtgggttaa

SEQ ID NO: 25869 - DNA, 2022 bp, Escherichia coli
atgtcgttggaaattatttcattggagttagtagcaaacacttcggatgggcgttatggtgttagtatacctttttcaaatggcttgtttttattaagagttgagaattctcatggtaaatcaacttgcatgaatgggattgcatatgcacttgggatggaaaaggcattaggtgtcggttctggaaaaatcccattccctccatctttgactagagcactaacgacaaaagataatgttgaagttagtgtaatatcatcttatgtcttgctaaaaataaagaaccataagggaatagaagcatctttgaaaaggaatattatcggtcacgataataataatgttatttatatagatgagaagaataatgtaaaaagtaagagtggtacttattttttacatagagagggcgatactgaaagggaacgtggtttctataagtggttagctgattttataggttggagtttgccaaatgttccaaaccataatgggaaggatactattctttatccatccgtacttttccctgcatggtatgttgagcaaaaaaaaggatggtcgtcaattatggcgactgtaccaacacaatttggaattaaagagccaaagaaaagagctctagaatttttaatgtctcttgatgttaatgataatattttattgcgtagttcgttaagaaatgaacttgatattatttatcatgattggaagttaattaaacacaatgcagaagttattgcttctaaattgtcgtcagttgtcacagggattcctgatcaaccagtggcaaaatttgatcattataagatagatttgattattaaaaatggtagtgtcgttagatctattgttgatgttcgtaatgaactggaaaaagagttgcaagaaattaagtttgacactcttggtgagcaagaagaacaaactttacaattatcagtggttaagttattaggtcaaaaaaatgatgaaattaactctctggaattaaagattaaagagatttgtgagcatagaagttatattcaatatcaaattcaggcgactaaaaacagattgtataatctgttggaagataaaaggaagtatgaagatttaaagaaaatatcatcttcggatgcgtataagtcaacagatttaatgtcaaatatttgtccgacttgtggtgcaagttataatgataatttgctaagtttttcatcgcaagaaaatctgatgacatatgaagatagtttgaactttattaaagagcaagtaaaagcatttgagtttgttctgtcggatagtgaaaagcaattaaagcttaaagatgttgagaggagtgatttagagggggaaatagccaagattagagttgatattaatgcattaagggagtcaaaatatccctcaatggttgttcaggaggagtttctgagacgtaaaataaacattgagaataaaattaatgccattaacgatggtattaaaagtatattggacattagactggagttggattcattacaccgtaaatataaaaagcttattgcgaaaagaaaaggattgccagataatttcttgtcgcgtaatgatgccgataagttaaaatttcttaataaagaagtcgttgcacgattagaaaaatataattttacaagttttgattctaaacttgtgtcaatatcagaagataattacttacctactagggaaggatatgatataggttttgacacatcagctagtgatggaataagaatcatttggggttatttaataagtttatttgttgttggttctaaatttcaaacaaatcaccctggattgattgtgtttgatgagcctcgtcaacaagaagcaaataaagtaagttttgccgagttacttaaagatgctgcagaaacaacaaaaggacaagggcagatcatttttgctacctcagaagatgaaaatgtcttaaaagaggcattagaagggtatgactatacaatgatatcctttgataagaaaaatgggaaattgttgaggaaattataa

SEQ ID NO: 25870 - DNA, 786 bp, Escherichia coli
atgtcaggaataagatggttggataaaaaagatttaatccttaaaggaataaatgaaggcacctacccagaatcagtttacaagttcagaactatagataaagcctgtgatattcttcaaaaaaaagaattttacttttcatcagcggaaaattttaatgatccatttgattgtatgctggatgaggaaaaagaatactctttatcagactttacttgttggttatattcatatcagaatggattaaccaagaaggcaaagcagaacttaatagatgtgtataaagaaaacagccaagcatttaatgatctagttaaaaatataaaaacaaaagccgtcaatgcccatggcattttatcgctatctaaaactaatgaaaatgttcttttatggtctcattatgcggagaaccataccggagttgctataaaactcaatattgctaaggatccagagttctttataaccccccaaaacatagtatatatgaagcaatatattccattaaattatcttagagaccctaaaaaatcaatactcgacacactctctacgaaatcaatggattggaattatgaagaggagattagagtttataaaagtaatattggagcctataagattaagccagaggcaataactgatgttttttttggtttgaaaacgctggaacaggatattgcaaaaatcaaaaatatatgtagtgaaaatggtctaagccatgtgaagtttcatcgggctgaaaaaaaatatggagaatttgcgctacgttttaatcctatttga

SEQ ID NO: 25871 - DNA, 486 bp, Escherichia coli
atgaatcaagatgagttaaaaaatttttgtgttgatgtgcgtgaagcacttgagaagatgaccaaaaaagatcattcacggctgtcatcctttagaaattcgaactttccagtgggatgctgcggagatacatcgaaactgcttgcttatttgctttatcagcaattcgggatagtctctgaagtactcgcaggatattactatgaatctgatcataagtcccccgccagcggtctttcaaacggtaattcacatgcttggcttgtcgtggatggaatgattgttgatttgactgcagatcagttcaacgaccggggatataacaatcttcccgtcatgattacatcagacactaggtttcatgacctctttgccaatcgtaatgcctcgtttcaaccttctcaaggtaatgaaattattctacctgatattctaaaaatgacagcatcacatgtgcagcaaaggcttaaagagcgaggttggtaa

SEQ ID NO: 25872 - DNA, 753 bp, Escherichia coli
atgcctgtctataatggggctcgaactataatttcatcagtagaatcgattataaatcaatcatatcaagactttgttttatatatcattgacgattgtagcaccgatgatacattttcattaatttttaatcgatataaaaacaatcaaaaaataaggatgttgcggaatgactctaatttaggtgtggcggaaagtagaaatgttggaataaaagcagcaacaggaaaatatatttctttttgtgatgcggatgatttatggcaccagaataaattagaacgacaaatcgaattattcaacaatgaatgtgttgatgtggtatgttctaattattatgtggtgaatattaatggggatgttattggtgaggttaaagcacctcatatcataacttacagaaaaatgcttatgaaaaatcatatagggaatttaactggtatttataatgctaacaaattgggtaaattttatcaaaaaaatattggccacgaggattatttaatgtggatggagataataaacaaaacaaacgttgccatttgtattcaagacaatctcgcttattacatgcggacaagtaattcactctctgctaataaagtgaagactgcaaaatggatgtggaatatatatagacaatgcttacatttatcttttactaaatctttatattgtttttttatgtatgcttttaatggggttattaaggagataatgcatttaccattgaaagccttaagaaaaaagtaa

SEQ ID NO: 25873 - DNA, 621 bp, Escherichia coli
atgaagaaaaaattgataattatcggagctggcgggtttgcaaaagctgtaattgatagtttagatcatgcatgttatgaaattcatggtttcatcgatagttttaaatgcggagaacatcaaggctataaaataatttcgagaacaatagatagtttagatgaacctcataaatattgctactttattgcgattggcgaaccctattatagggctatctggttggaaaccattaatgccatgaaacttgaaactataaatgttattgacagaacggcaataatttctaaaggcgcaattcttgggtcatgcatctatgttggtaagatggcaatagtaaattgtgattcgcatcttgaggatggtgttgtcattaatacaagggctctcgttgaacatggtaattatatatcatattgttccaatatatcgactaacgtcgtcttgaatggtgatgtttttgttggtagaaaatgttttataggaagttgtacagtcgttaatggacaactgaaaataggcgattcgtccatagtcggctctggttcagttgttattcgaaatgttgatgaaaacgttgtagtcgctggttctccaactagacttattaggaagaggtaa

SEQ ID NO: 25874 - DNA, 1038 bp, Escherichia coli
atgtcatctgtatatatagttgcggaaattgggtgtaatcataatggagattataatttagctaaattgatgatcgatgaggcttatagtgctggtgtaaatgctgttaaatttcagacatttaaagctgatagcttaatatcaaaatatgcacctaaagcagagtatcaaattaaaacgacaggaaatagtgagtcacagttggaaatgactcggaagttagagctttcctgtgaggaatatatcaagttagaagagtattctaaaagtttaggtttggatgttttttcaactccttttgatttggaatctatagaatttttatacacaagaaaacaaactacatggaaaataccatctggtgagttgcttaatcttccatatttagaaaaaattgcgttattgccaggtgataaaaaaattattctatcgacaggtatggcaactctcgccgaaataaagcaagcattgaagatatttactgataatggagttaaagccgaggatattactatcttacattgtaatacagagtatcctacaccttatgaagatgttaatcttaatgttcttgctggattaaaaaaaatcttccaagaatataacattggtttttctgatcattctcctggatactttgccggtatagcggctgtaccttatggaataacgtttattgaaaaacattttactttaaataaagattttgaaggtcctgatcataaagcatcgattactcctgatgagctgaggttattgtgtaatggcataagagcgattgaaagagcattaggtagttttgataaaagagttactaactctgagaggaaaaataaactagtggcaagaaaatctattgttgctaagcgtgatataaaaaaaggggaaatttttactaccgataacattactacaaaacgacccggaaatggaattagtcctatgtattggtatgaggttttaggtaaaaaagcggagcaggattttttagaggatcaattaataaaagtatctggatttgaagaacaagagatttaa

SEQ ID NO: 25875 - DNA, 939 bp, Escherichia coli
atgaggaaaaagattgcaattatcccagctcgttctgggtcaaaaggattacccaataaaaatattttaatgctttttgataagccgttaattgcatatacaattgaagctgctatcaaaagtgaattatttgagaaagttattgtttcgacagactcttgtgaatataaggatattgctttacgccatggtgctgaagttattatgagggacaaaagtctagcttctgatacagcaacatcatacatggttgtaaaagatgtgttagagaaaaatattagctgtgattattttgttttattacagccaacttcgccatttaggaattataaacatataagggaagctgttgaaaagtttgaaaataaagatgacattgattttttggtttcaatggttaaaacaaataaaagtgcagatttaattaatcagttggctcccaatgataatttaaaatatttcaatgcggactttgctaattatagaaggcaaaaccaagagaactattgtcctaatggtgccatatttataggtaatgtcgatgcatatcttagacagaaacatttttttggtgaaagaagtattgcttatgtgatggatagaattgattcattagatattgatgacaaacttgattttgagtttgcgatatctctaatgcttaaaaaaaataggatgaaagaccttcaaaaggaaatcttgaaaagaataaaggaaaaggaatttttttttgataaaataaagccggtgacattagttggtcattcaattatcgattattggaatgttactcatttaaatggacgtgaagtgaataatttaggtattgctggcatcaatagtaaggagtattatgatcttatcataaaaaataacattattaaatttggtgatacagtcatacttatgcttggtacaaatgataccactgtttgttga

SEQ ID NO: 25876 - DNA, 327 bp, Escherichia coli
atgaaaaaaatattatatataacaggctcaagagcagagtatgggataatgaagaggctgttaagaaaacttaaggataacgaacatattgaactttcaattattgcaaccggaatgcattgtgatgcgaagtatggctatacatatcagaatattattgacgatggtttcgaagttaaagagttatttgatataaatatagagtcatcaacaaacagtggtatcatttgtaccaagcataagtatgactgtatcaccaaatttaataatgttattttttatgataagatcataatactccttactattgatgccagcaatacctaa

SEQ ID NO: 25877 - DNA, 138 bp, Escherichia coli
atggcgtggacgagtctgaatgaagaagcctctggttattatcagtgcctgtcagttcaccaggctggcactggagtctctcatcccaacggacaggtatatcgtgcgggtgtacagcaacgtcactacagaggttga

SEQ ID NO: 25878 - DNA, 2037 bp, Escherichia coli
atggaaaaagtttatgataccactagaattagtaatcttgctaacgacccgaaacagttttgttcttttttttgtgagtacataaaaagaaatgatattagtatagatatcgccttggatgtgctgagaatatcttccatctattataatagattttcagttcagactgaagttgagtataacaatacattcaaaaaatgtattaatgagctagtaaactcatttcctgataacattgaactaatctctgagttcgagagtcaatgtaaaattatgcatgatataaataattctttctttgcggctacaaaatgtgctggtatttggcgtaaaaatacaaaaaaatcacatgcattaatacttaatctcatcatgttttgtgagatgtttttatcatcattatcatccttggttgtggtcaatgatcctaaaaaaatgaagaggatttttccattatttatcgtttctgaaaatattaatattcatgctgaacctgatatcgaatattttcgagttatcgatagggcatttgatgaggtagccaattacaccggaagaatattttcttatttacggactcatgggccattgaaactaacttcttgtgtgaataaacaaaccttgctttcaatgggagggtaccttaatgagtggaatgtttttgactcattaagcagagtaagagactttttcagactaagtagtgcagtatttacaaaattggataataacatttactctcttgaggttgatagtttttgtttataccgagattatgagattgcaagaaatagactaatgatgagagcgtcacatctatatagcgaagttcatgaatttagtaacaaacattttcatctaaatagttgggtaaaggatcatatgccatcttacttaaattctgatggcgtttttagctcatttcatctaagcgagttggaaaatatgtctcctgatgaccttcatgaagaatatgggaatatatcattatttaattgggtgcacgcttatcaatgtttagtcgagttatctaaagaagaaatgagcaaaagattttcatcgacaaaacctatacccctacagttggatcgctggctgatcataaaaagccgtgagagttggttatcattctttcaacgtaaggggattgcagcagatgcagcaaaaaaactgatagattattttaccttcaattcaaaatcacatgatcttaatgattgcccatttattccctgtatggacggtttatgcttaatgcctgcattaatagcaaatagctcagtgactcgctctctaatgtcattatttggttccaaaaaaatttctcaagcaagtaaagggcgatttcatgaacaacaatttataaaacaagttcgtgatgcggggattaaagcttctccaattgatgctcatgctaattatcagtgcgattgcgtgattctcctggatgattgtttgatttttacagaactaaaatcaaatggtcaaccaatatattatggtaagtactatcagcaagtgtataacatcgttggagatagctcattaatacatgatcataataataaatttatgcgttcttattttcaacaaataaatcgaatttctgaacattatcttaatcatcttgatgtgatcattaaagaattcgaactaccatcaacatggcaacccaaaggtgtgtataagcttattgttactacaactatgctcggtgggaaatatcatgtggatgatatatatgtagcggacaaatatgcattatctagtttttttcaacgaatacctggagtgatatatcaaacaaatgaaaatggaaaaatggcgaaaaatatcattgatgggtttgagtgttgcgaaggggaaatcactatcgataagtttatagattatctttcctctttgcccagtattaatgctgtacgtaaaaatataaaaaaattaacttatagtgttcgatttaatgaaaaattagtccatcacccttattatgattcttggacttttggcccatatattcgtaagggaaatgattag

SEQ ID NO: 25879 - DNA, 459 bp, Escherichia coli; identical to SEQ ID NO: 22898

SEQ ID NO: 25880 - DNA, 522 bp, Escherichia coli
gtgaaaaactacaaagtcattaccccgctttttcctacctatgcgcaagttaaggctatgatgaaagccgtctcaggctattccctgaaagcggtacgcaatatgattaccgccattcacgagcaaaccggaacgccgcaaaaacccgttgactggtcggaacctgacctgtggatcagcgaacgcttaacgggtgaagatgccgacatcgcccgtcgtatttgggataccgataatcacatattgaacccgcgccacagctacggctgctacttattcctcaactatccccagtttgagctgatggaaagcacgccagatgatacctggcagcccacctcgcgcgggcaaaattcctgcaagatgacgaaaaaacgctgcgttcactggacgaccaggaaggcattctgcaactgcttgagctgctggctggccgggaaatgtcgcgccgcgccgatttattgccggaatggcaggcctttttgcatcagcattcgaaattcgcgtcagcaagttcagtga

SEQ ID NO: 25881 - DNA, 186 bp, Escherichia coli
atgccgttccttatcggcctgttttccccgatacttacccaaggaatgtgctcactcaactccctgcttttgacgctggcggcggctaagccagtccttatgcgacatcgcggccatcaggtcgataagcatgttattgtcaacgccacgatgtttgaccgtaacggtcaaacatcgtggcgttga

SEQ ID NO: 25882 - DNA, 885 bp, Escherichia coli
atgaccaatgcagatcagacagttgaaacagtaaaaacagcaatagatacagcagataaagctttagatctctacaacaaggtactagatcaggttataccttggaatacatttaacgatacagtgaaagaattaagccgttttaaagaagagtactctcaatcggcatccacattagttggcgaaattaaatcacttctgatgaatagccaagatagatacttcgaggcgacacaagtagtttatgaatggtgtggagtgacaacacaattattgacagcctatctttcattatttaatgaatatgatgaaaaaaaagcgtcagcacaaaaaacaatattaatcaaagtgctggatgatgggattattaagctcgaaaaagcacaacaatcacttcatgctagttctcaaagtttcaactcagcatctggaaaattaatagcacttgatagccagttagctaatgattttgatgaaaaaagtgattattttcaagggcaagtagataaaattagaaaagaagcatatgcgggggctgctgcaggtgttgtcggagggccttttggtttaataatttcctactcaatagctgctggggttgttgaggggaaactaattcctgcgctgaaagaaaaattaaagtctgtcaaagatttttttgaatcgctagctgcaactgtaaaaagtgctaatacggatattgataaagccaagagtaagttaaaagatgaaatctctgtcattggagacttgaaaacagagacggaaacaactcgattttttgttgattacgatgatttaatgctaaagcagttacaggattctgcaacaaaattaattttatcgtgcaatgaataccagaaacgccatggaaagaaaaattaa

SEQ ID NO: 25883 - DNA, 651 bp, Escherichia coli
atgaatgcacgaaaggcggtactggcagacaatccggaattgatcctgcgtgtgctacaactgagatttgacgagtcactgtcgtacccgcgcatttctgcgcagaccggtatcagcaaaaccgccattttttctctggtgaggcgatttcaccaggtattcactgactggcctctttccggggaatattcctgcgtgcaactggcccgggctctgttcccggggcgatacccttcagccccgacagtaactcagactgtgaaaacagagaaaacccgccggaaccaattttcaccggagtttaaatggagacttgttcagcaaactcttttacccggtgcctgtgtcgcacaaatagctcgtgagaacggaatcaacgataacctgctctttaactggcggcgtctctggcgtaacggcggcctgcagtcgcccggcgaacatgaaacatcgctacttcccgtgacgttaactccggagccggataataaaatcccggcaccagtgcagatacctgaacagacaaatacactgtccgacagtctgtgctgtgagctggttctgccggccggaactctcaggctgaaaggtaaactgacgccggcgttattacagacacttatccgtgaaataaaagggagcagccactga

SEQ ID NO: 25884 - DNA, 444 bp, Escherichia coli
ttggtaccagtcccgggtactgctgtaagtttctgcaccgattcagtaaatttcagcagggataaaatagtgcagataatcgaagcattacttccagagtggggaacatccagagttttgttcacaaagtggtggagcactggccaaatctgttggcatttcacttcacgctctattcggcagaaggaatctatggtcaacagattcagacattttgtagttcctttcaccgacgggtacacgaacgtattacggagcataatcacacggtcagcccatcagcgccggtggtattacgctggttgcgggaacaacatgaaggagcacagatacgatgtctgttgctgctcagccagacgagtatttgccatccgcgagtcggcgtcatggctgatgaagaatgtgcgcaactggtggatttactgcaacagacctggtcggtga

SEQ ID NO: 25885 - DNA, 564 bp, Escherichia coli
atgcgtgccgtcagtgttcttaacctgggtactattgatgaaccaggtcacgcagataacaccgccactctcaaactgaaaaagacagctccgttctctgctctgttgtctgttaatggcgagcgtaactcccagaagtcactggcagaatggattgaagactgggccgactaccttgtgggctttgatgctaatggtgacgccattcaggcaaccaaagcggctgcggcgatccgtaaaatcacaattgaagcgaaccagaccgctgattttgaagataatgacttcagcggcaaacgctccctgatggagtctgtcgaagcgaagaccaaagacattatgccagtggcatttgaatttaaatgcgttccgtttgaaggtctgaaagaacgtccgtttaaattacgcctcagcattatcactggcgatcgtcctgtactggttctgcgcattattcagctggaagcggtacaggaagaaatggctaacgaatttcgtgatctgcttgttgagaaattcaaagacagcaaagtagaaacctttattggtactttcaccgcctga

SEQ ID NO: 25886 - DNA, 753 bp, Escherichia coli
atgtggctatggtccttatttgacattaaattcttatctattcttgccgctgccttcactatatattttggcgtgcaaaaaatatcaaaaaaggtgacagtgtcgtattcagcaaatgcaagtagaatatatgacatgcatatatcaaccataatcctgaataataaaagagataatgcaattgctatatcttcaatcaatatggaggttgaaggtaaagggatactacaagttattaaatttgactcccctcttcttttaaagaactatgattctttaaaagttgaaccaccaaaatttagcagcctttacaataatgatggcgtagttaagttagatatttctgataagtttcatttttatataatcacgacatctggagatgaaattaaatgtatttctgaaaataaatatgtagcaccaaacatggaaaacaaaatagctacagacataagaaaatttaatggcattgtcttaacaaacagaatgtcttatatttttttctatgcaaatgacaacggagagaaatactgcataatagatgtttcattgttcataaatggtgacaacccatttcattttaattttttaaaagaagatgaattaagagatttttctagcatccttattagttacggatatcaccaacagtttaaaagttatgcattgtttaaaatagacaaccatcttgctccttctttggttttaaataaatcaatgatagaaaataatattattgaaatgaataagtaa

SEQ ID NO: 25887 - DNA, 306 bp, Escherichia coli
atgcacattggacaggctcttgatctggtatcccgttacgattctctgcgtaacccactgacttctctgggggattacctcgaccccgaactcatctctcgttgccttgccgaatcaggtactgtaacgctacgcaagcgccgtcttcccctcgaaatgatggtctggtgtattgttggcatggcgcttgagcgtaaagaacctcttcaccagattgtgaatcgcctggacatcatgctgccgggcaatcgccccttcgttgccccccagtgccgttattcaggcccgccagcgcctgggaagtga

SEQ ID NO: 25888 - DNA, 285 bp, Escherichia coli
atggtggaggaacagcttgtcgtcagccgtaaccgtcgtcgctacagcacatattgcagagaaatcggaccggctgctgataattttatcgccagagattttaaggcggagcaagctaaacataaatggctgacagatatcacggagttccagttcctcacagggaaaatcaggctatcactggtggtggacttcttcgatggaaaagttgtgagcagttctctcagtgcacgtcccgaggctgaactggtcaacaccatagtggataaagctgtcgaaacgtaa

SEQ ID NO: 25889 - DNA, 1071 bp, Escherichia coli
atgaaaaaaatcacttttgttattgctgatattacttttgttggaggtattgaaagagtaaatacattacttgcgaataaattttttagcgaaggatataatgtagaaatcatatccctctacaataccaataaaaaggttaattatgagcttaataattgcattaaagttaattttgtgaaagataattcctactcaggtgcaccaggaagttttgggcggctaaagcaacacatcagttcacagtttgcgttatttaaggccattaaaaaatcaaatgctgatttttatatcgttaattcattcccaatggcttttttgtcatttttcaatgtcttttcaaataaaaaatatgttgttattgaacatgtgcactatgactattacggggtagccatcaagttttttagaaacttattatataagttttattacaaagtggtttgtgttaatgaaagtgacttgagtaaattttccaaacatttaaacaatgctgttaaaatcaataacccgctgagtttttcatcttcagaaataacctgtttgagcgaaaagaaaattatagcggtaggccggcttgagtatcaaaagggatttgatatattaatagatatttttgcgagagttaataaggaacatcctggctgggaacttcatatatatggcgtcggaacttgtgaagagtttcttagagataaaataaatcagtataaactaaataatataaagttaatgggctgtgttgataacatacagttatattatcctaaatattctgttttcgtattttcatcaaggttcgaaggcttcggaatggttttattagaagctatggagtgtggtttgccatgtatttcatttgattgtcctactggtccatctgaaatactagggaatggacagtatggcatcttggttgagaatgggaatgttactaaatttagtgcggaattagctgatctaatgtccgataaagaaaagaaaattaaactttcaaatatatcaaaaactcgtgcaaaagaatttcatatagacaagatttttagtgaatggagaaaattaattaattag

SEQ ID NO: 25890 - DNA, 291 bp, Escherichia coli
atggctgatatagcaacaatgagaatgaaggctctgcacttctgggataaacacggtatttctgcagcttctgaagcctttggcgtatcctgccgcacgctttactggtggcgtcagttactgaacaagggaggacctgaggggctaatcccgcacagtaaggcagctctggtgcgacgaaaaaagcactggcatcccgatgtgctgaaagagattcgacgcctcaggacagagctgccgaacctcggtaaagagcagatttttgttcgcctgaagccctggtgcgcataa

SEQ ID NO: 25891 - DNA, 651 bp, Escherichia coli
atgattgaccgtgactggcaggacccagacaagcctggcatctggacagatgaaagcagacatcccgatacctgccttaattttgccaacgaatttgatctgaatatcaaaggctggctcttaaatgaaccagattatcgcctggggcttatggccggatatcaggaaagctgttatagctttacagccagaggtggttcctatatatactctgacgggggattcagagatgatatcggctccatccctaatggagaaagagtaataggctataaacaacgttttaaaatgccctatattggccttacgggtagttaccgttatgaagattttgagtttggtggcacatttaaatacagtggctgggtagaagcatctgataacgatgaacactatgcccgtgtaaaaagaatcacttatcgcagtaaggtcaaagaccaaaattactattctattgcagtcaatgcaggttattacgtaacacctaacgcaaaagtttatgttgaaggcgcatggaatcgggttacgaataagaaaggtgatacttcactttatgaccataatgataatacttctgaatacagcaaaaatggtgcaggcatagaaaactataatttcatcactactgctggtcttaagtacaccttttaa

SEQ ID NO: 25892 - DNA, 996 bp, Escherichia coli
atgcatcacctttccgggatagagtctactcaatataaatatgcacccaaagaagaaaaggtgaacgcgatgagcgataaggaacgcaatccagtaaatgcagggggagagagcgtaacgtacacgctgcggaatattccggctgaacttgaccgggtgatctccgatctggcgatctctgccggtaagcccaaggcgacatttctgaaggagtttctggagtccagcttccacgacgtgattgatctgttttccctccgcagtcccctggtggccacactcgatgacgtgctggccagtgagctgggcgcgcaagtcatgacccagcgttacgggagccattttgtcacccgctggaaccgggagtaccagaacctcctggggatctcgacggaagaggaactgcgccgtatgttgctgaacaacaccccctatctgcggacacgtgccgtccaggtgctgaaaggctggtctgccattccccgggggatctccctgactttcgccctgttcgcggagcttgctggccgggacagggcgaccatcgaccaggcctggaccagcattttttactcacagctgcccgaggccagacaccgtttttaccgggatatcgataccatccgtgccctgaagaaacagcatgccgtctgcggatacagccagaccagggatgacatcaccgtgcgcatttaccgcccggatgactacggccatggtgcctggcgggtgctgctggttctggatgaaagtgtcattacccagacctggaacatcccgttccctgagcttgacggacgtcgctttaccactgatccgggctatgacgccctgatcagcaccgcacccgacagctgggataaggccttctgttttgtggacgggatttgtgagctgcacctttacagcaatggcgtggcagaagagcagaatcccaccccactgccggccgtcgctgaggcgctgatcaacgcggtggtgcacgaactactttaa

SEQ ID NO: 25893 - DNA, 255 bp, Escherichia coli
atgaaaggtcggcagagccgctatgttaccggcggggagagtttcgcggagattgcccgtcgcccgggagggacggtggtgatgctctgcctgaaccccgggcttgaggaggcgctgcgggaggcatccaaatccctcaagtcggccttcagccggagcggccgtaaatgccggctgtcagccggaacggcggaagggccgtttgccggtcgcaggcagggaaccgccacgcatctgtttgtggcggtgctctga

SEQ ID NO: 25894 - DNA, 345 bp, Escherichia coli
atgaaaaatttgtccgacatcgtgggaatgttcgcattcccgttccagactgaaatcgcttttgtagcagcgatttaccccaccgctaaaaaccttaccgtcagtacccgggggcacatcggtcagaagcaatactggagcgcatggctctgcgtcatgcttcttatggtttacgtgggatttgctgctgcggtagtctgggctgtagtgccctggcttaagggctttattgtgtcgaaatttgccgtttcggcactgtgggccacgccagtaaaaggtgcgcttctctggggtgtcggtaagatggttgcagccatccgccgaaaaattacaccaagcaactaa

SEQ ID NO: 25895 - DNA, 1002 bp, Escherichia coli
atgaccgaaccattaaacctgcggaccgacgttgtcaggcagcacacagtcccccgttttttactgaagcacttcagcaagccggtaaagggaaaacgccagcgtttacacgcctttgataaggctgccgggcgtgcttatgccaccacgccggatgacgccaccgtccggaatacgttctacaacctcgataatcaccctcaacgattcagtcttgaaccgttgttggggatttacgaacatgacgcggcaccggtcattgccggcctactggagcataaggacattcgccggctgactgaagatgaccgctacaagctggccgtgtttgttgccgtgcagcgcgcacgtaccttcggtgagctggaacgtatctcaggcatgatttcggtgctgactgataagctggcggcaatgggcgcgactgaggagcaggcaggagaaactctgggtttatcgcccgggggcgataccagagacatttttctgcggcagcttgtccagcaggtgtcgcatattaaacacctgctaagtaaggactggtacctcctggaaaccaggccagaacatccgttctatgtgtcagacaatccggtggtactggagaaccgtaatgacttcggtgtgtacggtaatatcggcctagccgtgcccggcatacaaatctatctgcccctgtcatcgacgctgatgctggccatgtattgcccttccatccgtgaacagaaagttcgtgaaaagcagcatctccttcatcttattgccagagcgccggatctaatcccgcgtcacatgcgcccgtttgaaatgctcgagcatgtcaacaggcatacggactatcttcttatgccactttctgcagaaaatgtgatgcattataacgcgctgcaggtggagtatgcggaacagtacgtgttctgcggtgaaaacgatttttctctggctgaaagaatgctggctgcagatgatcgttaccggaccgggccgcggtttacattttag

SEQ ID NO: 25896 - DNA, 516 bp, Escherichia coli
atgaaacagatttctttatttattcctctgctggggaccttattactttccggctgtgccggaaccagtacggaatttgagtgtaacgccaccacatccgatacctgtatgacgatggagcaggccaatgagaaggccaaaaaactggagcagtcctcagaagcaaagccggttgcggcatcactgccgcgcctggctgaagggaacttccggacaatgccggtgcagaccatcaccgcgaccactccgtccggcagcagacctgcggtgacggcacttccggagcagaaactgctggcaccacgcccgctgtttaccgctgcccgggaagtgaaaacggttgttccggtcagttcagttactccggtaacacctccccgtccgctaagaacgggtgagcagacggctgcattatggatagcgccttatattgataatcaggatgtttatcatcagccatccagtgtgttttttgttattaaaccgtctgcgtggggaaaaccacgtattaattaa

SEQ ID NO: 25897 - DNA, 1131 bp, Escherichia coli
gtgagcagtgccctgaaagtgatccgcacagaacgggtaaaaaaagcctgtacaaaatgtgactgtattgttgaagcaccggcgccgtcccgcccgatagagcgtggtatcgcgggccccggattacttgcccgcgtgttaacgggaaaatactgcgaacatctgccactgtatcgtcagagtgaaatctttgcccgccagggtgtcgaactgagccgggccttactctccaactgggttgacgcgtgctgccagttaatgacaccggtgaatgatgccctgtaccgttatgtaatgaatacccgcaaggttcacactgatgacacaccggtaaaggtactggcaccgggtcagaaaaaggcgaaaacagggcgtatctggacgtatgtccgggatgatcgcaatgtgggttcgtcatctcctccagcggtctggttcgcgtactcgccgaaccggcaggggaaacacccggagcaacaccttcgccccttccggggtatcctgcaggcggatgcgttcacaggttacgacaggttgttcagtgcagaacgtgaaggtggtgcactgacagaagttgcgtgctgggcccatgcccggcgaaaaatccacgatgtatacatcagcagcaaaagtgcgacggcagaagaagccctgaagcgaatcagtgaactgtacgccatcgaggatgaaatacggggattaccagagtcagagcgtcttgcagccaggcagcagcgaagcaaagcgttactgacgtcgctgcatgaatggatggtggagaagaatggcacgctgtcgaaaaaatccagactgggcgaagcgttcagctatgtactgaatcagtgggacgccctctgttattacagtgatgatggtttggcagaagcggacaataacacagcggaaagagcgcttcgtgcagtctgtctcggaaagaaaaattacgtgttcttcggtagcgatcacggcggcgagcgtggagcactgctgtacgggctgatcggcacctgccgtctgaacggtatcgatccggaagcgtatctgcgccatattctgagcgtactgccggaatggccctccaactgtgttgacgaactcctgccatggaacgtagtactcaccaataaataa

SEQ ID NO: 25898 - DNA, 525 bp, Escherichia coli
gtgccgcaacgaaacgacaggagccgcagcacatcgacgaccagtccgaagaataattcctggttcaggatgcaggcaggtcaccagagtgacgcggatatttatatttatgacgagattggtttctggggtgttacagcgaagcagtttatcagtgatctgaatgcactgggcgatatcacccacattaatctccatattaattcaccgggtggcgatgtctttgaaggcatcgccatttttaatgcactgaaaacacatggtgcgtccattaccgtttatgtcgacggtgtggcggcgtcaatggcgtcggtcattgcgatggtgggaaacccggtcattatgccggaaaacaccttcatgatgattcataaaccatttggctttacgggcggtgatgcggaggacatgcgcacctatgccgacctgctcgataaggttgaggcggttctgttacccgcttatgcacagaaaaccgggaaaaccaccgatgaaattgctgccatgctggtggatgagacctag

SEQ ID NO: 25899 - DNA, 201 bp, Escherichia coli
atgaatacaatcaagttttcttgcccagaatgtggtggcgaagtctttgacacatcctttaagccgcagggctctgacagtttcgcgggagccatctgcaaaaattgtggtcaccttgtaactgaagatgagtcctcgcagttcgatgacgaaatcgttgacaatatcttcggtgcactcaccagagactttctgaaataa

SEQ ID NO: 25900 - DNA, 267 bp, Escherichia coli
atggagactgtttttgacgcactgaaagcaatgagaaaagccacatccgtacaactggctgcgcgacttggtatcagtcgtgaagaagtgctgagcgaactgtgggaactgaaaaaggctggtttcgttgataaaggtgtgtacacctggcatgtggctgctagcaatgttcagcaagaagaaccggaactaccgacagtgaagaaagaacattcatttcatcctaaagccccggaaagtggagtatgggatggtcgtggtatttga

SEQ ID NO: 25901 - DNA, 1314 bp, Escherichia coli
atgtttgttcaattttcttttaaaaattatttgtcgtttaaagatgaatcaactctatcgatgcttgccgcgaaaattaagtctaaagataaaggtttagataaacgcgcggtgtttaatgcttttcctgatgttgatcttttaaaagcagccgttatatatggtgcaaatggaagtggaaaaagcaatatcttttctgctttatctttcatgaagagaatggtgatcaattcttcaaaagaatctcaagcagatgaagatataaatgttcttccatttaagttaaatccaaggtttgaggatgagccttcggcttttgaaatgatatttataattaataacaaactttacgagtatacgtttgctgctgttcgaaataaaatcacatcagaaacattatctgtaatcgaaaagaacagagatgaagtgattttgttcgagagaaatatgaaagaaataaaggtacacaaacagttcaaagaaggtattggtttagaaaaaagaaccaggaaaaatgcgttgttcttatctgtctgtgctaattttgatggcgaggtatctaaatcggtaattagatggtttagaaaaattagagttattcaaggtatgagtgacataggttatctgccatttactgtgaaacttttggatgatgataataaacgtaaaaaaataaaatcaattattgatatgttcgatctcgatattgtcaatatatctaagagccaaattcagcagacagagaaaaaagaaaatgagcttttagatgcgatattttcaactataaaaaaagattcaagatttaaaaatgtgtctttacctcagtctaatccactaggtatctcaactacccataaccgtttcaatgacgaaggtgtttttgtagatacaattaattttgagttaaatgaaaacgaatctgaaggaacaaaaaagctcattgcattggctggccctttaatggatacctttgacaactcatatatattgtttatcgatgagtttgatgcaaggcttcatcctttgattactaaacaaattgttaggatgttcaatagtttagatatcaataaaaataatgcgcaattggtagtcgcaacgcatgatacaaatcttttagataaagatgagttacgtagagatcagatatggtttgcggaaaaggactcattgggtgggtcgcatttaaaacaactagttgaatataaagttaggaacgacgcatcttatcgaaaagggtattttgaaggcgattttggcgctattcctatgttgggtgagccagatataatttttgattcagaattaaattaa

SEQ ID NO: 25902 - DNA, 591 bp, Escherichia coli
atgaaattaaaacaaaggaacgttggcagcaaagatattgagaaaaaaattcttattgtttgtgagggggcacgaacagaatcgtcatactttaaaaagtttaaagcaaatgcaaaatgtgaggtagtgggggctggttgtaatactgttagtgttgttgaaaaagcattagacatgttctctacagggaagtttaaagaagcgtggtgtgtttttgatagagattctttcactaaggacagagttaagtctgcgcttgcattagcacgaaaaaacaatataaatatagcattttctaatgagtcgtttgagttgtggtatgttttgcattttgcatatttagatacaaaaattactcgtggagattatgtgaaggcgctaactggttatttggggaaaccgtacaaaaagaatgatgataatatgtatcaaatactgcttaagaatcagcacaaggctatagagagagcgaaacgtctttataatgaaatgttgcctccgggagcttgtgagtgcgactcttatccttatactactattcatacattagttgaaagattaaataagttagggcgggaaatcggctcttaa

SEQ ID NO: 25903 - DNA, 1794 bp, Escherichia coli
atggcaacgttacaacaagaactaatagttcgtggcgaacaagttgagcgagtgtttatcaactatcaggataaaaaatacgttgtgaatcgacagtatcaacgtaaattgatttggactattgaggaaaaacaaaattttattgactcgataatcaagggattcccgatacctatcattttgttagcagaacctcttgggagaaaagacggcactctcgagattattgatgggatgcagcgtatgaatgccatcatgtcttttatctcgaacgatttttcatttaatggattctactttgatttaaatacgttcgcgacgacgaaagacctattagatcgcggagtcattgatcagaagatgccactccttgatcgaagccagtgtcttgcaatagcatcatatcctgtcccgctttcaatttatgaagcagccgagagagactcagttgaggaagtgttcaggcgaattaactcaggtggacgtcagctctcacgacaggagttgcgtgcagcaggtgctacaaatgtgtttgcggaatgtgttcggaagatctccgcaagagttcgtggtgacacatctaacgcggatctcttgctcttaagcgagatgaaaaaaattagcatcacgaacaaggatttagactacggcattagtgccgatagcgtcttctggattgttaacggaatattgacgaaggagcagttaagacagagccgggatgaagagatagtggcggacattcttgcttatatggtttctgacaaacctctggcctcgcgtacagagcttctagatgactactatggagcaatatccccggaagctttagccagcaaagcaagattcgaagcgattgatcaagctattaaaaagagaaccggggagctagtcgatcttgattatcaaagagtacatgatgcgataatcctacttcttagtcaggctcaaacgacattctctggtttgatttttcctaacggaaatggtggtaatccagtcccccgttactttcaggtggtctttctcgccatgcatgacctgataattaaaaggggtatggtggtttcagatagtgcgggcctcattgggcggctgaaagattgcggtaggaatattcaggttcaagatggagggagatggggggctgacaaccggagtagaatggtcgattcaataattggttggattcagggcttttttgaaaacgatcaaaatccagatcctgcaaaagttcattggatcacgaagctccaaaatttactcactaactcaataactgagcaggcggcctacgattttaaacaaggtttctatactttagacccatcaccttcctttgatgaacgctccttcgaaaaaattatggagacctgcgctgctattgctaatatcggcagaggacacaagggctatgttcttgtaggggttgctgaaaatgcgcatactgcaacaagagttcaggagattttcggaagcaaggctttatcttataacggcttccatataactggtgttgatcacgaagcgaaccacgctggaaagaaccttgaccagatgttccaagacatctctgatcgggtaggacgctcaggactttcagaaccgcttaagtcctacataaacactcatcttaaatgcgttcgatacttcgataagacggttttcgtcttcgaaattttaggtcaggataccccttcacatatagctggtaagtgggttgagcggcaaggagcccaggtcagagatatcgctcctgaaggaatggttgcactgtttgagcgtttcagatag

SEQ ID NO: 25904 - DNA, 168 bp, Escherichia coli
atgatgcttgaatacttttttcatctcctcgattttcttctgtttttcactaatctgtgtagcaattttattcttctgcttttgtttttcattaattacattacccaccaccttcgaactcttatccatatcactgacctgagcattcgttggtgcagtattaactga

SEQ ID NO: 25905 - DNA, 264 bp, Escherichia coli
atgtatcttggcggcccgcttggactaatgtctatcggtttaatggccattttggtcagaggtctggggttactgatgctgggggttgcttcaacggcgggccagttactgggatcagtattgattgacgtattaattccatcgctgggcaataccgtttatctggtcacgatcatcggaacactgtttgcactggtcggtgcaattgttaccactattccggaatacagagcctcgaaaacaatgaagaaaatggaggtataa

SEQ ID NO: 25906 - DNA, 444 bp, Escherichia coli
atgaaatttgaacgccatcatgaaatattgaaacgactcagtaaattcggttctgtaaaagtatccgatctgtccaatagcctcaatgtaacgaaagaaactattcgttcagatcttaatgaacttgccaggcttggctatctgactcgatgtcatggcggtgcttttatcgtcctagactcgcttgatactattgcgaaaaatgaaatcgcttatgcgcttgaaaattatgatacagcccagggaataaaaaaaggccactcaactatgaaaagtcaagtatgcgttattggttcgtttaatgttgatatcatcagttatttgccgaggcttcccactatcggagaatcgcttctggcaagtaattttatattttcaccgggggaaaaggctgtaaccaggcgctggcagcaagctttgccgatactgatgtttatttcataa

SEQ ID NO: 25907 - DNA, 477 bp, Escherichia coli
atgcagcagctttcctttctgcccggagaaatgacaaccagagagcgcagcctcattctgcgggccctgaaaaccctggaccgccatcttcatgaacccggcgtggccttcacctccacccgtgcggcacgggaatggctgattctgaacatggcgggactggagcgtgaagagttccgggtgctgtatctgaataaccagaatcagctgattgccggtgaaaccctcttcaccggcaccatcaaccgcacggaagtccatccccgggaagtgattaaacgcgccctgtatcacaatgccgcagccgtggtgctggcacataatcacccgtccggtgaagtcacacccagcaaggcagaccggcttatcacggaacgtctggtacaggcactgggcctggtggatatccgggtgccggaccatctgatagtcggtggcagccaggttttctcctttgccgaacatggtctgctttaa

SEQ ID NO: 25908 - DNA, 582 bp, Escherichia coli
atgtttaatatcatactcggagttgctgctgtaggtgttggtttatatatcttgaacgagcttgatgatcgcgccggagaagaaaaaaagcgatgggaaaatcaacgagaatcagtatgtaaaagcattgaagaacataagagatatatagaacaacatgtcgaatatgttcaatcaatgtatgattttcatcagttagttgaccttcattattcatgtatgaaagtggcaaatgaagcatataaacttcttaatgatgctaaaaaatcaatgggcgctatttatgatgctatcaataaactcaaagctcaccgctctaaattatttaatgataaaaaagaaagcgatgattatgaaaagaaaaaagaaatacaagcagaaataaacatgatcaaagaaatcatagatggcctatactctgaattagatttaattaaaaaggataaagaacatttttatcaggaattaaaagcttttaacttaaaaactagcagcattaaatacagaattagagacaataccggatataaaggctttgattggtataatcggttacaagaacgaactttacttcgacgttag

SEQ ID NO: 25909 - DNA, 585 bp, Escherichia coli
atgagcaaaaaaaataacgtgccaatgatacaaaataatggaaatctccaaccatttagcatgggtaatttaccatctattgctaaaacattcccaatggaaatccatacaactatacttcaacagcttaacccattggagcatatatccaatgctataagtaggatttgttactataaagaacagtgtaaagcacttgagcttgagtcactaaaaataaaagaacaagccagtttgatgcaccttaaaatagatactaattttaaaaaggcaatgtatgagctagaaacaagaagaaagagtaatgagttgaagttgatagctgctgcaaatgattttaagcaaatatcaataacaaaatcagacttaattaaagagatatcaaagcttgtttcaagcatatgtagcaatgacgtttcgttggaaagtaaaaaggcgatgaacgatactcttatcattatgaaaggcatgctcagtgatcaacggtctgagtcatatgaaaaattcaaatctttgttaagtagtattgattctagttacaatgatgcgttgttgatagaggatcatcaggataattatgtttaa

SEQ ID NO: 25910 - DNA, 405 bp, Escherichia coli
atgacaatactcgtgacggcacagactcaactcatagttggtgaggctatggcgataaaaagtttagctcctgatggaatgttggccgctgtatttgaagatgacgggaataccggatatttctatgcacttgatgagtccgctgaaggtaaccctgtcagggatgctgtgcatatatataacgttgaagatatttcagatgctcacatcccctctgatgtgaagattggctggtctgaggactgcctgaagtgtgttctgctgataaacggatatccacatggtgtatttgattttgaggggaagaacggctactgtcgaagtggattcccgcctccggttaatcgtgagtggtctgttcaggggcatgcatgggatgattacgttgataatttcttccggtga

SEQ ID NO: 25911 - DNA, 381 bp, Escherichia coli
atgagagaaaataaaagtaatcctgagctcaaaatcagaagtacagaacgagattataaatacatttccagaattactggcaggtatgctgggttgtctctggtattcctgactgccggaattgttttatggacagttatggatattatttttgatgcctgtattgattcgtggaaagcggacccggaattaaataattcgagttatatgtggaatatcctgatatatgccattccgtatgcgttatatgcgtttgcagccgggtttcttgttacatttttttctgtccccaatgtacgaattaatatacggaaatatcgagatattcctgctgaaatgtcgtatgcaccgggagaacacattaagggagggcaagaatga

SEQ ID NO: 25912 - DNA, 1377 bp, Escherichia coli
atgatgccacgcattaaacctcttctggttctttgtgccgccttactgacggtgacgcctgcagcgtcagcggatgtgaacagcgacatgaatcagttctttaataagctgggatttgcttccaataccacacagccgggcgtctggcaggggcaggccgccggctatgcttacggtggctccctgtatgcccgtactcaggtcaaaaatgttcagctaatttccatgacgctgccggatatcaatgctggatgtggcggcatcgacgcctatctcggctcgttcagttttattaatggtgagcagttgcagcgttttgttaagcagattatgagcaatgctgccggttacttttttgaccttgccctgcagacaacggtgccggaaataaaaaccgcaaaagacttcgtgcagaaaatggcaagcgacattaacagtatgaacctcagttcctgccaggctgcacaggggattatcggcgggcttttcccccggacgcaggtgtcccagcagaaagtctgtcaggacattgccggtgagagcaatatttttgctgactgggcggcttcccggcagggatgtaccgttggcgggaaatctgacagtgtcagggataaagccagcgacaaggataaggagcgggtgaccaaaaacatcaacatcatgtggaatgcgctttccaaaaacagaatgtttgacggcaacaaagagctgaaagaatttgtgatgacgctgaccggctcactggtgtttggtcccaacggcgaaatcacaccgctgtcagccagaaccactgaccgctcaattatccgggccatgatggaaggcggcacagcaaaaatttatcactgcaacgattctgataaatgcctgaaagtggtggcagacacaccggtgactatcagccgggataatgcactgaagtctcagattactaaacttctggccagcattcagaacaaggcggtcagtgacacgcctctggatgacaaggaaaaaggctttatttccagtaccaccatccccgtcttcaaatacctggttgacccgcagatgctcggagtttccaacagcatgatttaccagctgacggactatatcggttacgacatcctgctgcagtacattcaggagctgatacagcaggcccgggcgatggtggccacgggaaattatgacgaagcggttatcggacatattaacgacaacatgaatgatgccacccggcagattgcggcgtttcagtcacaggtgcaggtacagcaggatgcgctgctggttgtcgatcgtcagatgagctacatgcgtcagcagctttccgcccgcatgctcagtcgttaccaaaacaactatcacttcggagggagcacgcggtga

SEQ ID NO: 25913 - DNA, 1374 bp, Escherichia coli
atgccacgcattaaacctctttttattctttgtgccgccttactgacggccatacccacagcgtcagcggatgtgaacagcgacatgaatcagttctttaacaagctgggcttcgcctccaataccacacagccgggcgtctggcaggggcaggccgccggttatgcttacggtggctccctgtatgcccgtactcaggtcaaaaatgttcagctgatttccatgacgctgccggatatcaatgccggatgtggcggcatcgacgcctatctcggctcgttcagttttattaatggcgatcagttgcagcgttttgttaagcagattatgagcaatgctgccggttacttttttgaccttgccctgcagacaacggtgccggaaatcaaaaccgcaaaagacttcctgcagaaaatggcaagcgacattaacagtatgaacctcagctcctgtcaggtggcgcaggggattgtcggaggattatttcctcagactcaggtgtcacagcagaaggtctgtcaggacattgccggtgagagcaatatttttgctgactgggccgcgtcccgtcagggctgcacggtcggaggacagtcatcgtctgttcgtgacaaggccagtgacaaagataaggaacgggtgctgaagaacatcaatatcatctgggactcgctgtccaaaaacaggatgcttgatggtaacaaagaactgaaagaatttattatgacgctcaccggtacgctgatttttggggaagacagcgagattacccccctgccggcacgcaccactgaccgcgatatcctccgggcaattatggaggggggaacggcaaaaatttaccactgtaacgattcggacaagtgtctgaaggtggtggcggatgcaaatgtgaccatcgcccgggataaagccctgaaatcacagattacaaaactgctcaccagtattcagaataaagcggtgagtgatactccactggatgacagggaaaaaggcttcatttccagcaccaccgtccccgtctttaaatatcttattgatccgcagatgctcggtgtgtccagcagcgtggtttaccagctgacggactatatcggctacgacatcatgctccagtacattcaggaactgcttcagcaggcccgggccatgattgccaccgggaactatccacagaccgtgctggacagtgtgctggagaatctgaatcaggcacagcaacagattgcggttttccaggggcaggtaaaggtccagcaggatgcattgctggttgttgaccgtcagatgagctacatgcgccagcagctgtccgcccgcatgctcagccgttaccagaacaactatcacttcggagggagcacgctgtga

SEQ ID NO: 25914 - DNA, 612 bp, Escherichia coli
atgctcgaagagatgaacaagaaaggcgatttcagctacgtcgggcgtaaggatgaatccaccgagaagttctataacggtgattgcgcaatgacgactgcctcttctggttctcttgccagcattcgcgagtacgccaaattcaactacggcgtaggcatgatgccttacgacgctgacgcgaaagatgcaccacaaaacgccattatcggcggagccagcctgtgggtgatgcagggcaaagataaagaaacgtataccggcgtggcgaagttcctcgacttcctcgcgaagccagaaaatgctgccgagtggcaccagaaaaccggttatctgccaatcaccaaagcggcgtatgacctgacccgtgagcagggcttttacgagaaaaacccaggggcggatatcgcgacacgtcagatgctgaacaaaccgtcgttaccgttcaccaaaggactacgtctgggcaacatgccgcagatcagagcgattgtggatgaagagcttgagagcgtgtggaccggtaagaagacgccacagcaggcgctggataccgccgttgagcgtgggaatcagttactacgccgctttgagaaatcgacgaagtcttaa

SEQ ID NO: 25915 - DNA, 243 bp, Escherichia coli
atgcgatttgttgttttcatatcggaatcccagcagacgttacaggaagaataccgggtccgggccagaatcatccgcgagcgaacggcgttgcgtaatgaaatccgggggctgttgagtgaatttggtctgctgctgcctgtggggataaggcacgtgcgtaaaatccagcagggaatactgcccaggggcagtggaatgacccttcatccgtttgttgtgcgaactgtcagagtaaaatga

SEQ ID NO: 25916 - DNA, 1038 bp, Escherichia coli
atgttttattgttcctctttagttttagttgttctatctttggtactgaaaaagtatgattggttttggttgttgtttcttctatttttttcagctgtgtttgttggtcttagggtagatgtcggtgccgattatactgaatatgcccaaatttataatcaatctggtaatattacaaattttgaattgggttttgatataatatttaactatgggaaaaggcttggatatgattatgtatttgtgtctttatttttctttttgctaactacattattttttatctactcaatcaaagagttgaattataagacacttatttatttttgttttttgcttttcatgtttgtccctttaacatcaacaatccgacaaggcttagctattcctttttttataatgtgcattttgaactctgataggcccaaagtctactttacaagtatagccttagggtgtctttttcattactcaattttatttatgttttttttcttttgggtcagacatattaagcagtcgtattgtagggcttttttaattgttttgcttttttcattgttgagtatttttaatatcgttgagtatataattatgttattaaattatatgcctggtttaggggctataagcactaaacttcttatgtatactcagcgatatcaagttgagttttcaatgaattcttttgtttataaattggctggtttactattgattacaatgtttatgccatttataaaagtaaacgaaaaattacgttgtagttacaacttgtattttattacagtatgtatatttattttgttgaaagacaatgctgttttaacaaaccgtttgacgtatgctaccaatatatcattggtgacttttttttcattgttattatcgatgatacgtgggttctataaaaaagctattgtttctattttgtttgtgttttatttttcttttagttattttaagttcacagcgacagatttaagacactcagttgaatctgcttatatgccttataaatccttgcttataaactga

SEQ ID NO: 25917 - DNA, 171 bp, Escherichia coli
atgtacagaacaatctggcaggtactggcgtcagaagacctccgggccgcctgcactttccggaatacgccggttatgaaaaaccggaaattcagtctctgttgtaagatgtaccctcttatattacgttttctctgtgtatttaactcactgtatttattagctttttaa

SEQ ID NO: 25918 - DNA, 600 bp, Escherichia coli
atgcgtaaagtttgtgcagccattttgtccgcagccatttgtctggccgtatccggtgcgcctgcatgggcatctgaacatcagtccacgctgagcgcggggtatcttcatgcctcgacgaacgttcccggcagcgatgatctgaacgggattaacgtgaaataccgttatgagtttacggacacactggggatggtgacgtcattcagctatgcaggagacaagaatcgccagcttacccgttacagcgatacccgctggcatgaagattccgttcgtaaccgctggttcagcgtgatggcggggccgtctgtgcgcgtgaatgaatggttcagcgcgtatgcgatggcgggtgtggcttacagccgtgtgtcgactttctccggggattatctccgcgtaactgacaacaaggggaaaacgcacgacgtgctgaccggaagtgatgacggtcgccacagcaacacgtctctggcgtggggagctggcgtgcagtttaacccgaccgaatccgtggccattgatattgcttatgaaggctccggcagcggtgactggcgtaccaacagtttcatcgttggtgtcggttataaattctga

SEQ ID NO: 25919 - DNA, 1536 bp, Escherichia coli
atggctacatcagtacagacaggtaaagctaagcagctcacattactcggattttttgccataacggcatcgatggtaatggctgtttatgaataccctaccttcgcaacatcgggcttttcattagtcttcttcctgctattaggcgggattttatggtttattcccgtgggactttgtgctgcggaaatggctaccgtcgacggctgggaagaaggtggcgtcttcgcctgggtatcaaatactctggggccgagatggggatttgcagcgatctcatttggctatctgcaaatcgccattggttttattccgatgctctatttcgtgttaggggcactctcctacatcctgaaatggccagcgctgaatgaagaccccattaccaaaactattgcagcactcatcattctttgggcgctggcattaacgcagtttggtggcacgaaatacacggcgcgaattgctaaagttggcttcttcgccggtatcctgttacctgcatttattttgatcgcattagcggctatttatctgcactccggtgcccccgttgctatcgaaatggattcgaagaccttcttccctgacttctctaaagtgggcaccctggttgtatttgttgccttcattttgagttatatgggcgttgaagcttccgcaacccacgtcaatgaaatgagcaatccagggcgcgactatccactggctatgttactgctgatggtggcggcaatctgcttaagctctgttggcggtttgtctattgcgatggtcattccgggtaatgaaatcaacctctccgcaggggtaatgcaaacctttaccgttctgatgtcacatgtggcaccggaaattgagtggacggttcgcgtgatctccgcactgctgttgctgggtgttctggcggaaatcgcttcctggattgttggtccttctcgcgggatgtatgtcacagcgcagaaaaacctgctgccagcggcattcgctaaaatgaacaaaaatggcgtaccggtaacgctggtcatttcgcagctggtgattacttctaccgcgttgatcatcctcaccaataccggtggcggtaacaacatgtccttcctgatcgcactggcgctgacggtggtgatttatctgtgtgcttatttcatgctgtttattggctacattgtgttggttcttaaacatcctgacttaaaacgcacatttaatatccctggtggtaaaggggtgaaactggtcgtggctattgtcggtctgctgacttcaattatggcgtttattgtttccttcctgccgccggataacatccagggtgactctaccgatatgtatgttgaattactggtcgttagtttcctggtggtacttgccctgccctttattctctatgctgttcatgatcgtaaaagcaaagcgaataccggcgtcactctggagccaatcaacagtcagaacgcaccaaaaggtcacttcttcctgcacccgcgtgcacgttcaccacactatattgtgatgaatgacaagaaacactaa

SEQ ID NO: 25920 - DNA, 567 bp, Escherichia coli
atgccaggtcttctgaaacggcagcggaacagagcgcctcagctgcggcagactctgagacagcagctgcatcatcggcccgtgaggcgtccattaaggcagaggaggcagcagtcagtgccaccgccgccggaaaatcggcagaaagcgccgcatcatccgcttcaacagccacaacgaaggctggcgaagccactgaacaggccagcgcagcagcgaggtctgcttccgcagcgaagacatccgaaacgaacgcgaaagcgtcggaaaccagcgcagaatcctcaaaaacggctgccgcatcgtccgccagttcggcggcgtcatcggcatcatctgcgtctgcttcaaaagatgaggcgaccagacaggcgtcagcagcgaggggcagcgccacgacggcatccacgaaggcgacagaggctgctggcagtgcggcagcggcagcacagagcaaaagtacggcggaatccgcggcaacgcgcgccgagacagcagcaaaacgggcagaggatattgcatccgccgtggcgcttgaggatgcgagcacgacgaaaaaggggatag

SEQ ID NO: 25921 - DNA, 432 bp, Escherichia coli
atgacggctggcgcgcttttcttccatcagttcattgacaatatcggaaacaactctgtcacatgcgccatatacaaaagcatcgtccagccgctgcatgacggtttccagctcatcgtctgtcagactccagtcctgggctatgtgacgcacatccccacgggtcagcaccacggcaaaaacgcattcactgtccggcacgtctgtatccagtacatcgcggatgatttctttaacagtacagtacatgttctcgtctcctttacaggggcggcattgccgccccgtccgttaatcagtcaagtgccgcgtaaatcgcgttgcattcggggtgaaattcgatgtggctccacaactgcgcatcgcgcatcctgtacaggtgagtcagccctgcgctaccgctgtcgtggtacagccacaactggcggttaa

SEQ ID NO: 25922 - DNA, 249 bp, Escherichia coli
atgaaatccgcagcatggcggatgcactggcaaaaatccggaaatgatgacgctggcggggaaaaatctccgccttttccagccggtccccggaaagagcaaaaggatgtcgccgcaggctccgctttacccggccatgcggggcatggccttgtgggttttcagttatgtggcctcagcgtcgtgtgcgggctgtgccgtgcctccatcgtagccgggcttctgcgggcgggttgcaaggtaaggtga

SEQ ID NO: 25923 - DNA, 201 bp, Escherichia coli
atgaaaccggaagaagagatggaacagcaacggccacccgggatcagtgaatccggtgaagtggtggatatggccgcttatgaggcatggcaacaggaaaatcatccgggcatccagcagcagatgcagcgtcgtgaagaggtgaacattaatgtgcaccgggagcgcggggaggatgttgagccgggagatgatttctga

SEQ ID NO: 25924 - DNA, 993 bp, Escherichia coli
atgggagaaaaccgtaaccgtcgtgtgtggtttttctgtgatgagctacccacgttacacaaactgccggacctggtggagatcctgccggaagcccgtaagttcggtggctgttatgtgtttggtatccagtcctatgcccagctggaagatatctacggtgagaaagcggcggccacgctgtttgacgtcatgaacacccgtgcttttttccgttccccgagccataagattgcagagttcgcggccggtgagattggtgagaaagagcacctgaaagccagcgagcagtattcctacggtgctgatccggtacgtgacggggtatcgaccggtaaggatatggagcgccagacgctggtcagttattccgacattcagtctctgccggatctgacctgttatgtcaccctgcccggaccgtatccggcagtaaaactctccctgaaatatcagacacgaccgaaggtcgctccggagtttattccgcgtgacatcaacccggaaatggagaaccgtctgagtgccgtacttgctgcaagggaagcagaaggtcgccagatggccagcctcttcgaaccggaggttgcctccggagaagacgtgactcaggctgaacagccacaacagccacaacagccacaacagccacaacagccacaacagccacaacagccacaacagccacaacagccacaacagccacaacagccagtgtcttctgtcatcagtgataagaagtcagatgcaggtgtgagtgttccggcaggggggatcgagcaggagctgaaaatgaaaccggaagaagagatggaacagcaacggccacccgggatcagtgaatccggtgaagtggtggatatggccgcttatgaggcatggcaacaggaaaatcatccgggcatccagcagcagatgcagcgtcgtgaagaggtgaacattaatgtgcaccgggagcgcggggaggatgttgagccgggagatgatttctga

SEQ ID NO: 25925 - DNA, 456 bp, Escherichia coli
atgctggaggcgacccaggtcagaggagatttcgttaaagctgtatcaaaagccttcccgaaaaaagtcggtacgtggggtaacacggaaacaccaaacggtacggttacagtcaccatcagcgatgatcataactttgaccgccagattattattccgcccattatttttaacggtatagcgtatgacgatccggggagcggaaataacccgggaggcacgcgatacacgggttatggttttgaagttcgcaaaaacggcgtattaatcgcatccagagaaactaaaggggccattcccggtagttacagtgcagttattgatatgcctagtggtggtggtagcgtcactctggagtttaagattttccagaaaggcaatcagggggcaggcaatatcaccgactgtacggtgattgtgaccaaaaaagcggcttccggcatcagtattcgttga

SEQ ID NO: 25926 - DNA, 456 bp, Escherichia coli
atgctggaggcgacccaggtcagaggagatttcgttaaagctgtatcaaaagccttcccgaaaaaagtcgggacgtgggataacacggaaacaccaaacggtacggttacagtcaccatcagcgctgatcataactttgaccgccagattattattccgcccattatttttaacggtatagcgtatgacgatccggggagcggaaataacccaggaggcacgcgatacacgggttatggttttgaagttcgcaaaaacggcgtattaatcgcatccagagaaactaaaggggccattcccggtagttacagtgcggttattgatatgccgagtggcaggggaagcgtcactctggagtttaagattttccagaaaggcaatcagggggcagggaatatcaccgactgtacagtgattgtgaccaaaaaagcggcttccggtatcagtattcgttga

SEQ ID NO: 25927 - DNA, 495 bp, Escherichia coli
gtgatcatgagtcttttgaatgaagttcagaaattcattgaagcccatccggggtgtacttccggagacattgcggatgcttttgcaggttactcacggcagcgcgtactgcagtcagcaagcaagttacgtcagagtgggcgtgtggctcaccgttgtgaaggagatacacgcagacatttcccgcgcctgactgagagagcgcaggagccggaaccacaaccagttcgtgaaaccagacctgtgcgcaatttctatgtcggcactaacgatccccgggtgattttgtgcctgacccgccaggctgaagaactggagtcaaggggcttataccgtcgtgctgcaaccgtgtggatggcggcattccgtgaaagccactcccagccagaacgaaacaattttctggcgcgtcgtgagcggtgcttacggaaaagcagcaagcgcgctgcatcgggtgaagagtggtatctgtcagggaattacgtgggggcttaa

SEQ ID NO: 25928 - DNA, 369 bp, Escherichia coli
gtgcgagttcgttcaaaccgaccggaatactctccggagtttgagcaggcatggctggcatatcccaaacgtgctggtggcaattcaaaatctgcagccttcaaagcctggaaagcccgtttgaatgagggggtaaaccccgaaaccatgctggaaggtgtgaaacgctatgcgggctgggtatctgcgatgggtaacagcggcacacaatttgtgaaacaggctgtcacgttctttggtccggatcgtcatttcgaagaatcctgggaagttcctgcggtatctgcagccagacgtgaggatccgtacttcaaagccagttacgacaacgtggactacagccagatcccggcaggattcagggggtga

SEQ ID NO: 25929 - DNA, 432 bp, Escherichia coli
atggctcagatagctttaatgaaagcggtaaaaggcattgcttccgcgctgccttttgattttgtagccaatgctgatggcggtgtttatcagtctgctgatttgagtcgttacagtggcacggtggttaaccgtccgacgttttttgcttttgcaaaaggcgcgggtgtgatgggggaagctggacctgaagccattctgccactgcgtcgtggtgctgacggtaagctgggggttgtggcggatattggtgggtcaggtatggcgatgtttgccccgcagtacaacatcgagatcaataacgatggcacgaacgggcagataggtccggctgccctgaaggtggtttatgatctcgggaaaaaagcggcagcggactttatgcaacagcaggcccgtgatggtggtcggttaagtggagcatatcggtaa

SEQ ID NO: 25930 - DNA, 132 bp, Escherichia coli
atgcataacacttgctttgagcgctttaaccggacatatcgtacggaaatactcgatctttatctgttcagcacgctgaatgaagtgcaggaaatcacggaaaaaaggttgtcagaatctaactcctcatga

SEQ ID NO: 25931 - DNA, 351 bp, Escherichia coli
atgatctcactcccatcaggtacccgtatctggctcgttgccggcgttaccgatatgcgtaaatccttcaacggactgggagaacaggtacaacatgtgctgaatgataatcccttctcaggtcacctgtttatcttccgtggccgacggggtgacaccgttaaaattctttgggccgatgctgatggtctgtgcctgttcaccaaacgcctggaggaaggccagtttatctggcctgcggtacgtgacggcaaggtatccattacccgctcgcaactggcaatgctcctcgataagctggactggcgtcagccaaaaacattccgccttaacgcactgacaatgttgtaa

SEQ ID NO: 25932 - DNA, 153 bp, Escherichia coli; identical to SEQ ID NO: 3602

SEQ ID NO: 25933 - DNA, 582 bp, Escherichia coli
ttgcggctgttcagcctgagtcacgtcttctccggaaacaacctccgggacatccggttcgaagaggctggccatctgacgaccttctgcttcccttgcggcaagtacggcactcagacggttctccatttccgggttgatgtcacgcggaataaactccggagcgaccttcggtcgtgtctgatatttcagggagagttttactgccggatacggtccgggcagggtgacataacaggtcagatccggcagagactgaatgtcggaataactgaccagcgtctgacgctccatatccttaccggtcgataccccgtcacgtaccggatcagcaccgtaggaatactgctcgctggctttcaggtgctctttctcaccaatttcaccggcagcgaactctgcaatcttatggctgggagaacggaaaaaggcacgggtgttcatgacgtcaaacagcgtggcagccgctttctcaccgtagatatcttccagctgggcataggactggataccaaacacataacagccaccgaacttacgggcttccggcaggatctccaccaggtccggcagtttgtgtaa

SEQ ID NO: 25934 - DNA, 336 bp, Escherichia coli
atgacggcgggccgtacggtaacctttctcaataaactcaccgaccttgtgatttttgaagtccagcagacgccagccttcatcaatgacgttcagtttcttgaggttacgcggcgtgcggtacatcctgttctcaatgtagataatcagggagaacatcaccgcaacaagcagggacggacggtcttccagtccccccagctccagcaccaccattctggcatcatcccgcagggacggctcatcagagttaaaataccggccataagtgccgttggcagtgtactggtcaagcagcacaatcatttcatccagacggctgcggatggtcggtga

SEQ ID NO: 25935 - DNA, 474 bp, Escherichia coli
atggccctgatggctctgtttgttttatggaaggacaacaccacgccggggaaattactggttaaggagattaacttcgtaagacaaacagcacctgccggacagttcccggtcagtgaatgctggttttcttcctctgattcttcaggcagatcagaaatacaggatatctgccattaccgcgcggctgatgctgcagattatgtcagagagactgaccgatcactgatgcaactggtcaccgcattctgggcaacgctggcacttatgtatatgtcgtttgcggcaggcaccgggaaatatccggtgcgacccggaaaaatgaaatgtatccgggtggtaaccgcagatgaacgtctgaaggacgtttatacggaagacgcttccctgccgggaaaaatcagtaaatgtcctgtttatcttcctgatgacagaacaaacagaaacaacggagataaaaatgaacatgcgtaa

SEQ ID NO: 25936 - DNA, 321 bp, Escherichia coli
atgaacatgcgtaatattaatgttattacagcccgcgctgtgccggataaaaacgtatcagatgattttatgcatgctgttctcagtaactgcaccacaaaaatagttcttcctgcaccggagaaattcagtcctgaatcattgccgcacaattttaatatggctgctgtcggcgtgatgaagaagggaatgtcgatgagtttattttcttctccggggcatattgtggttgccggacaatccggtggcggaaaatctcctccggtgaaagaactaatcgacagaattattcagaaatataaggaacccttcgatgaataa

SEQ ID NO: 25937 - DNA, 303 bp, Escherichia coli
atgggaggcccagcgaaagctgggccgagcttgttacgctgtcattacttcagcatgataactaaagctatacatactagcactacggctattgggcatagacctaaattgccaagtgctgcgattaaacctgtaacggcaatcacacgtgcagacagcaggtctgagccctttcttaaagtatccattgatacctccgtcagggtttttgccggtctcttggagagttgggggcaaaagttcagacccgtagcactttcttgttcgcaggtgaacggctgctacgacccaactgttctgtag

SEQ ID NO: 25938 - DNA, 189 bp, Escherichia coli
atgcatttagaaaagatgacccgcaaagaagctgccgagcatttgggggtaagtgtccagactcttgctaactgggcgtgtactggcaaggtaaaaatcccttttcataagctggggcgcaaagtgctgtatatgcgcactgatctcgatgcttatcttgcatccactcgcagaacgcagacggtgtaa

SEQ ID NO: 25939 - DNA, 687 bp, Escherichia coli
atgtcagaaaataaaatcattgctgcaatagaatttgaccataatgatgcgaaggatatgaatactattgcagattatattagagatgaactggcgtcttcttttgtaaaaaaaacgatatgcgatatggcaaatatcacaccatctaaaatgtctctggaggagagattatcattatcgtcagagatagaaaataaggatttaaaggttaatatttctgtatgtgccggatatggagatgattttgataaaaaatttaatagtgcatattcagaattcaatgatattttgaaagctgccattatatttgaagttcttggtttcaacagacttgcagatcagttacgtgaaagatatgcgattttagtgtcggagaatttattaaaatcagtacgtgatatagctaatgtaaagaaaattatcagtgaagaccgtagtaaagcaaagaaaggaaaaacaaacaggcataaatcaacagcgttatctatagcttgtaacacttggaaaaaataccctaatgccagtttacccgggctatccgcagagatatacgcgcacttacgcaataaatggaatgatgtccctgtagttgggactatagagagatggcttaaggagtcggggatgaatccaaaatccccgcaaaaaaacagggattttaagttagttattggagacaaagaataa

SEQ ID NO: 25940 - DNA, 1428 bp, Escherichia coli
gtgaaattattcagattctctaaagtaaaaattgcagaactgccaacgccggaacatggacaggtcgaatatggtgatacggaggttaacgggctgcgtgtccgtgtaggttcgtctggtgtgaaaagtttctgcatttcccgtaagcgtaacggaaaatttattcgtgcaacgctggggcgttttcctgatctgagcgtggataatgccagggctaaagctatggaactccttggcgaagtcgccacaacggggataaatccgaacatagcaaagcgcactaacaacaaggccatgataacgctgagtaaggcgattgacgcctacgtaaaaaatcgtggccaccgcctgaaacccgccacagaaaaacagtaccgcagcatattacagaattattccggtgactggatggcccataccctcgccagtatttcccgcgaacgggtggaacaacggcataaggccatcactgatggggctgtatggttcggtgctgataaaaccacgttacgggctggggttggtacaggaagcaaggcacaggccgatttatgggcgcgtgcgctacgtgctgtgtgtcggtttgcgcatgatcattaccgtgatgatgcgggtaatactcttttaccggatccgccgactctggtactgagcaccaagcgccagtggcacggaacggtaagaaaaacggaacgtatccgcctgcatgattttccccgctggtttgctgctgtagctgctgtgcgcgaccagggcgaacaggaaagggatgatatagcggtgacggtatgcgatgccgtggaaatggcgctttttaccggactgaggaaatcagaaatttttggccttacgtgggatcgcgtgaatatgggcggtcgttttttctggatagacaccacgaaaaacggggatccgctcgaattaccgattactgatacgttgcgggaaatgttccaccgccgactgaaaataaaaaacgctgatgatgttctggtgtttcctggtgtgaagggagtgattcaggaaacacggcacatcatagaccggataagcgcggctactgttccagagtcgaacgatgaaatgctctcccctgtaccattcaaatggcacgatgcacgccggacgttcggaacggttgccgaactggtgggcgtgggcaattacatcctcaagcgcctgatgaatcaccgtactatgcgaagtgctgacgtaacgcaggggtatttacattttggtgctgatgaactgctggagccagcgtcacggatagaacgggcaattctggaacatgccgggctggtggagagtaaaaaatctatcgatgcgcaattgctttccgcactggagagtatgagtgacagtgagaaacgcgcattactatttagtatcgttaattcaaatggtggtttgaatgtcagaaaataa

SEQ ID NO: 25941 - DNA, 513 bp, Escherichia coli
ttgagcggtgcatttattgaagcatttttcgaggttgataatgatttcgaagtcaacgttattatcggtgctgcaggtaaaggggggggagccggaagaaattcaggtagtgaaggtggcacaacttatttcggttccctgataactgcaccgggtggtacaggcggtggcgcggggggagcatctgcaaacacatcatatattcagggtatttcatggggtgccagtccgacatcgtccggtactgtactaagagcatttcgctgtagtgcaaaaacaccaggagcaatggttatctctgttaaagctgttgcaggtggtaccgggggggatacaccactaggttcaggcggtataggtggtgcaagttcttcatcattcagcggacgtggtggtggtaaagctgagggctttggtgctggcggaggcggagcctgcgcacctgccggaagtgaggctcaatcgggaggtgacggtgccccgggaatagttattgttgaggagtatgcctga

SEQ ID NO: 25942 - DNA, 264 bp, Escherichia coli
atgagtaattttgctctgattgaacatggcgtggtgaaaaatattattatctgggatggagagggtgatttattctctaactgcgaaattataaatattgatcatatagatgcaggcgtcggttggttctattctgacggagagtttatagcaccaccggaaccggaaatgactgaatatgatgttggtaatatcgacgcggtgatggaatcagataccagcaccgcgccggacgtcatctggcctgaactgccggaggcgtag

SEQ ID NO: 25943 - DNA, 2079 bp, Escherichia coli
atggcacaatttaaagttgatagtttcattgttgaacttagtttcaatgaaaacgttgttaagggcttgcaaagagttgaaaaggcagctttgcagtcagcacaaagaattgaaaagaacctaaataaaggtttcaggattaatacaaaacagcttgatagtaatttgacaagttctttagggcagcttgaaaggaagtttaataaggcctttgaccgtctggaagctagagccaaaaatactaaagctttccgtttcacaagtcaggttaatgacgctattaatcctccaaaacaatcaaggcaaccacgaattagcggcaacagagcaatcacagcagcgcatagcgtgaatatgagcaaacttcgtgactttaatcctatgcttgagaagtattttaagagccaatattacagcttaagcagtaaatccaagacacttggaaacgaagcttttaatcgtgagttagcaaagttaaatcagtctcttcgtgaaacactttctaagtttaacaagaacaccagcaaaaataatcacagtgaaaatgcttcgaatggtctggatgtattagctacaagtgcaatcaaagcaggtacagccatttatagttttcagacagccttagaagcttacaggcggattatggagattggtctgaaaaaagaagcatcacaacgagcggcacaattcgttttaggtgatgaaggtgctaaacgagctacagaatttgttaagaatcttgctaataatactggtgttgaccagattgaaacattaagcagttttgctaagttttccgctggtgctggtgatatgaatacagaccagaaagaatccctattttctaatgtgattggcacatccagattaatgggtttaagtactgatgaaattaacgggattctgaaagctttcgagcagatggcttctaaagggaagattcaggctgaagagctacgtggtcaattaggtgacagaatggcaggtgctttccagttatttgccagaagccttgggatgactacagaagaattagacaaggctatgaaagacggtaaagttctttctaaagatgttcttcctaaagtatccgctgaaatgggaaggatgattgataaagctggtggatgggaaaagattattaactctactcagacgcagttaggccgcttaagtaattcatggaacaataatttagctcttatgttcgacggttcacaggaagggttaacagactttacaaggtcactgactaatttacttggttcattaggtggtcaatctaaaaatcttggtgaacattttggcgacctgatgaaaagcatgtcaaacggtattgatgacttaaccacgattagctaccgagtacagggattctttgacagagtgacccttgcttacagagaattagatgacactcaaaaagctgtggctgatggtcttgctaatggcctgttaagtgcattaaaggggcttgctggtatagtcgctgtaaggtctgggattggtgctgtaggtggtatctggaacttaattagggctatttccacgcttggtaatgcagcaaatacagcagcaggaagaatcaattcacgttctgctggtagtgttgaaggtggtaaaggaaaattatctgtagctgatgcagttgccagagtaatggttgtcggtatgacgacggatgtgattaatgccattgtcaaaccgttctatgaacgtcagatgagtaagtcagataatccaattgataaagttgtaaggtcaaaggtggaacccacagaccaagcattgactggtgacatgaactctttagccactgttttatgggctatggttcagggcaaatcaaaagatgttccacagttttcacctgaagcattgaataacctgaaaggtcgagtggaaacattcacacaagatttaaaggttatcaagccgtcagtaaatattcagcctcagacaatcaatatcacaactcagacggtacttgatgggaaagttatcgatgaaaggacagcatcacacatcaaccgtatgcaggaagataccctgattagctcagcttacccagaggaataa

SEQ ID NO: 25944 - DNA, 177 bp, Escherichia coli
atggttgagtattttaaagctaaaccgaccgggatttattacagggtagaaaatggtaatgtgttttatcttaatcgcgcggctaatgagtggcgagagtgtcagtgctactacctgagagatattagaaatcatccacattattttattaaagttgacgatgtaccagtggcataa

SEQ ID NO: 25945 - DNA, 924 bp, Escherichia coli
atgcgcaagttaacacatgatgaacaggttgcggctatcgctaaggttaatcatgatgtcgaagtgctgggggaaattgtcaataacaggacaaaagtatcctgccgctgcaaggtttgcagtcacgaatggtcggctagaccttacaatcttaaaagcggttacggctgcccgaaatgcgccggaaagatgaaattatcacacgaagaacaggttgccgctatcgagaaggttaattctgatgtcgaagtgattggcgaaataataaacggcgatacaaaagcattatgccgctgcaaagtttgtaatcacgaatggtcggctaaacctaacaacctaaaaaacgggcgcggctgcccgaaatgtaaaggtttaaaaatcgcacaaagacgaacattatcacacgaagaacatttatccgctatcactaaggtaaatcatgatattgaagtattgggagaaataataaacgataggacaaaagtattatgtcgatgcaaggtttgtgatcataagtggtcgcctagaccttatgctattaaaagcgggcaaggctgcccgaaatgtgcgaaacacggttttttgtcacacaatttcggcaaactttacatcatggttgatgatcctgaagtgcctacacaaatgaaaatcggcgtaagcgttaatgagaacaagcgaagaaatcgggtattaaaaagcgcacataaatcaggcgttagaatccctgatttatgtgtcgtgaaaacgttagaaggtccaaccgaaaatatccatgaattagaaagcatgatgcataaatatttcagcaattataaaattaactttcctgtaaaatttgatggcagtaatgagtttttctattacaggcaggaagtattcgacatggtagaagaagcatataaagggcttgtttgctgccaatga

SEQ ID NO: 25946 - DNA, 621 bp, Escherichia coli
atgaacgacatcaaaacagcttattcacttggcggcaatggcatgttaatcactcgctacactgaagacgcaagtgttcatgaagtggaaacgaaggattatcacgaagtattaaaagatatggaagctggcgcgtatgacgctgatttaaacctggctatgcagatcgttgatattgtgatggacgcgtcgatccgcgattatgtttctttaaacgctgaagaaaaaacggttgtagctcgttatgtcttctgccttactttcgtaaaacgcatggaagaggattttggtcgagtgccagtgccggaagagattgacccgatggcgttcggaagtgctgttatcttcccgctggatgaaaatcatatgggtagcattgcactgcatactatgcgtgacatgatgaaaaaactgtttgaagttaaattgctagagaagttcgttgatgacggttacgaagaagaagaagttaaacaccttatgccattgttttacggcgaaatggttggcactgatatgcgtgcaaatgatttcggcgtgcaggcggctatagctgtgcttaatgatgcacggaaaaactcacagccaatgcctgaaccggaaaaacgtgtactgcattaa

SEQ ID NO: 25947 - DNA, 192 bp, Escherichia coli
atgaaatgcgttggagaatataagttaccggacaacgccaaattagctggtgtcggttattgcggatgttattactacaactcaatcggtgacatttacctaatctgcatcattaaaggcgttcagcattttcgcttgatgccttgcacattaaaagatctaaaacaggcggtaaaaatgtatgaagtataa

SEQ ID NO: 25948 - DNA, 204 bp, Escherichia coli
atgaagtataaacgctataaagagtggaaaatcccagaagcagcaacaaaggcagcgcccggaaacttttcgggcgtttacttttatatggaaggcaaatggtatttcggcagcaggcctgatcactattatcaggaaatatgcaaacctcatgtatgggatataaaagagcgggtgaaagacggtgtaatagacgaggtttaa

SEQ ID NO: 25949 - DNA, 222 bp, Escherichia coli
atggttaagagctttttaaactggttaaaggcgtggcttttggttacgctttttgtttttttggtgttcagtggcgctatcgtcatatttacgctgggtatgatttttgttacatggtcagtacctgaatttaacgacattgaaagcattctttttactgtacgcgctttattggctggtagcgcattcatcggtttttgctttactgtttcgcgtgattag

SEQ ID NO: 25950 - DNA, 321 bp, Escherichia coli
atgaataaagcggctgaattgctgagacttgcggctgaaactatcgaggcaagaggggagcaaaacggatacgatcgaaaagaagaaaaatcagcgccaaaaatagctactattttcaacgctaagatgaatgcgaatttaaccccacttgatgtatgggatctaatgatttgcctcaaggaagcgcgtttaggggctattctcgctaatggaactgatccgctcgacactcttatagaccttattgcttataacgcgcttaaggccgaacagatattagcgtatcgggaggaagagctaaatgaagatggtggcaattga

SEQ ID NO: 25951 - DNA, 759 bp, Escherichia coli
atgagcaagggcaaacattggttaaataattggcttagaagttgggtggtgtggtcgctgtacgacggcagcgggtacgccgttaaagattgggcggaagctggatataagtgctattgcttcaactatgacggcgcaaatcacggagattatgaaggcgttaaaatcattcatccaaatattgaatacgttaacgtctggattgatagccatttcctggtaatgttctcccctgaattgtctgtttatccagagcctgacattatcctgggctttcctccatgcgacgatctcgctgtgtcaggcgctcgctggttcgttgataaatacaggaaagatccttgttttcagaatagggcggcaagaaacgcaatgttggttgaatctctggctaacatgtataacgtgccgtggatggtggaggatcctgttggtgtgctgtcaacgctatggcgtaaaccggattttatcttcaatccttgcgcttacggtggctacctgccggaagatgacaagcatcctgctttccctgatgtttacccaccgcgcgacgcgtacacgaagaaaacttgcatatggtgcggcaacggattcaggcagccgctttttagacctgtagatcttaactctggtgataaccctgggtgggcgaaaaccggaggcaggacgaaacgaacaaagatgatccgctcactaacaccgcgtggctttgcccgtgctgtattcctggctaaccatgaccgcgttttatcgaactga

SEQ ID NO: 25952 - DNA, 348 bp, Escherichia coli
atgaaaataattaatatcgggtggttatattgcgaaaactgcgacgacgacggcatggttgttaagactgaaaaaggttgcggcttctttttgtatcaaggcgataagtttgtttgtccgcgatgcggtggtcatggtgagatagaaattattgaagatagtgctacagcaccagagccggagcgcattgttcttgacgaaaaaataaaaattcatcctgatttattgcagcaaattatcgatcacatatcggcagcagcaatctatgcagataataattatcatcgtaaaatgaacgtaaaacgtgttcttgagcagtatttcgagggtggtgataatgaagcctaa

SEQ ID NO: 25953 - DNA, 270 bp, Escherichia coli
atgaagcctaaattaaaagaacatgaattcagggatcttgtaaacggaataactgataagtccaggacttattcaaatacacaacaattaagggctgtgatagttactgaattaaggaaatatatagacctaagagatccggtcgatgttatgacgatggacgaggccatcaagcgccgttcggctgaatggtcagtgagtaataccggattaaccggatatattgaaggctataacgactgtttacaggatcatagcgatggcaagtaa

SEQ ID NO: 25954 - DNA, 213 bp, Escherichia coli
atgaaaagtaaccgtaaacgcctggtaaggtcatatgacaaagcgttaaaggtttttgatgatctgcgacacaataaacgccagcgccgcaaatgggcgcgaatgcttgttggtgaatggcataacgaagatttctttctggaagcgcggcacatgacgcaagaagacgcggaccaattagcttacgataacgtttattatatgatgtggtga

SEQ ID NO: 25955 - DNA, 216 bp, Escherichia coli
atggacgtttacgaagatctctacctacagaccaatagccgcactttttattttctgaaaagcggcgtcgtatatcgcagcgacgacggggtgataatgaaagagtggttatttaagcgtaaagacctactcgaagatctggtttttgccgggatatttcgtaaacgtccggctaacctggaagaagaaatgttgatcgacgaggtgttaaaatga

SEQ ID NO: 25956 - DNA, 246 bp, Escherichia coli
atgaaagtgaattatttcagggcaaaagacaaggcaacaggaaagcgggtggctatcctggttaatgaagcaaattatatgtttgttctccagccgtggtgcatagctgactataacgatgattatcgccgtcacgctgcgcggcgggcggtcgggatgaaaggctggcagcctcgcgacatgcttaattactgcgactggaatctgatagcaaaatacacggtcgattataaaggggttttctga

SEQ ID NO: 25957 - DNA, 294 bp, Escherichia coli
atgaaaagcgctaaatttattgcttgctgttttgttgaagttccctataacgatgcgttctatcacgctacttttaccgataagaatgggaatgatcacgttattgtcggcaagcgtggtgactggctttatataactgatgatgattgcattttcactaaaaatcagttgcaaaaactggttatcggtaaacaggaacaggaagactatcaaatcatcccggtggaaagactgaaaagggagcagagaattaaacgcgctcaagaggaattaaataacataaagggtatgtga

SEQ ID NO: 25958 - DNA, 255 bp, Escherichia coli
atgaaaacaatcagactatggcgcggcaatagccgacttgatggtgagtacatccgcgtgattgaagatgttaatcgtggtcggttttatgaattggcatacagcgaaaaaagggagaaagaatatctgaacgaatcgacccctatgtggcgtaaagtggctggccttgcctcaattctgcgccacgggttttatgcagatcataacacgctaattgatgccgaactggtgacaactctttacgaaggagaataa

SEQ ID NO: 25959 - DNA, 324 bp, Escherichia coli
atgagtaaatttatcagcgttaaggttttccgtggcaattttccagaagataaagaaattggacaattcgcaggtgaacgtggcgtatgtttccgtgtagctactgaagacgatgcgcacgttaaatgctttcacgtatctgaaccgccttttaatgcagaccatcttgaagacctgaatagaattaaaagcctcatctttgcttatcttgcgttccctggcattggtgatgctgatgttaaattggttggggctgaactgatagcagaatataaaatgactgaaggagaagaagggggaattaaaattgagcgcatcaaataa

SEQ ID NO: 25960 - DNA, 165 bp, Escherichia coli
atgattgaagatggtgtgtacgcagcaacagtagtcgacaggttgttttaccgcgtggaaggtgatgatattcgtgtcagtattgatagcggtgagtggagaaaaccatttattgagacgacgcgagaaaacattaaatcatgcttgataatggtgatttggtga

SEQ ID NO: 25961 - DNA, 177 bp, Escherichia coli
atgaacgagatcgaagacggtatctatttgcataaggtatttaacatcgtctatttacttaaaggtaataaggtgatgataagacctgatgacgatccacattgggaatcaagcgacatggatcggtggcatatgcaaatgttgtttgataatggcctgatatacaaaactgcgtaa

SEQ ID NO: 25962 - DNA, 144 bp, Escherichia coli
atgaacgatgaagaactaaaaatagcagatgaaataagaagggcacttgattcagcagaaaataatgaaaccatctatctttccgaacaggaagtagaaaagatgatgaatgaatttaaattaagatttggaaaagataattaa

SEQ ID NO: 25963 - DNA, 429 bp, Escherichia coli
atgtctcgttttcgtcgtgtaaatattgatggtaaatccattaccgaaacctacactgctaaggtcgcagtaaaaccaggtgaactggtaaaactggacggaggtaagtttgcaaaagcaaccagtgctgatgtcggtgcagctcagttgtacatcgtcaacccggcattccacgaaggcaaaaccattactgatgcaatcgctgcaaatgaaactgttgttgctgattatgtggaacagggccgagagtttgctctccttgttcctgcagccgcttatgttaagggtgcagctattgctctcgcagccgacggggtgaaactgtttgttgcgccaagtgaacaggcagcgccagatccgatcatcgcatactgccaggaagacgtaaccctggaggcggaagattttatccgcgttcgcgttgcttaa

SEQ ID NO: 25964 - DNA, 375 bp, Escherichia coli
atgaaaaaaataatcaaagcggttctcattggtgttatggctttagctcttacagggtgcgcaagatcaactgatttcgttaagttagctgataaaaatttgcaagttggaatgacttgtgagcaagtgaataaaataatgggggaaccacaaagaatcgagcatgacggtaattatagttatcacgtatggtattcagtaaccagcacgataggatttacttacatggatgttgaagaattatccccttcaagggttatcgcaaagtttgataactgcatcctaaaagaatggaaagatcgcagtaaggcaaagtctgtatacaatacaatcacacacagttcaccaggtacagcaattaaagatttcaattag

SEQ ID NO: 25965 - DNA, 660 bp, Escherichia coli
atgaaacggttagcaaaagtggcaatgattgcggcggtattgggtctggttggttgcaatgaggataatgaaaaagcgcctatagtgaccaatcaagagcaacaagcattagcagagaaaaatgctaaatggcttgcagaacaacaagcaaaacaagccgcatacgatgcacagttagaaaaagaaaatgctggtaaacagtggcttgtagttgaaagaaaagatgatatgcaggacgcaaaaaacgtattcctttttgtgaaagcagaacaattcagcggaagtcttgatgctttcccgacactgaaggcacaggataagaataaaccggtattaacaatcgcttgccagggtaataaaacaaaaatgttcgtagcatggtcacaccatgtaactgacgccggggacactacttatattaactaccggatcggcgttcacaaagctgtagctactgagtggtggcggtcaactaattataaagctcttggattatgggacggcaaaaaagccatcccaatgattaaaaaactggttaacgaaaaacaattcatcattgaagtagtgccggaagctggcgacattgagaaagcagtgtttaacattgatggtctttataaccacatcgacaaagtgaaaaacgcttgcaactggaattaa

SEQ ID NO: 25966 - DNA, 255 bp, Escherichia coli
atgaaactggtagcgattgacagaaatctgaaagcacagaaaaacgcacaggaccggatcatcaagaaaggtaaggaattacttaaagcctttctgagaaaagaagtttaccccaaaaagttacgcgacggttacggatacaaaatggatatcaatcttgattggaggctgtttagcgaagatttgaaggtttggttaattgttgagcatcatgcctataacaagttatgtggcgtgaaaggcactcataagtga

SEQ ID NO: 25967 - DNA, 354 bp, Escherichia coli
atgccggaagtgttcagatggacgccgcaaagaagctacagcgtgaccaggaagccagacgtatctgttgttaagttgggcgatggttatgagcaaagacaggtaaaaggtatcaatccattgcttgatagctacaccctggtgtttaaaggtagtagcgccggatgtggtgatggtggaaacgtagcaatccaggcggaagcattcttgagggcgcacggcgcggtcgaggctttttactggtcgccgtcgatggataacgtgcaaaggctttttgtttgccgtagctggagcatgactaaagacggtccgctatacacgctaaatgcaacatttgagcaagttattaattag

SEQ ID NO: 25968 - DNA, 183 bp, Escherichia coli
atgccttatttttgtgtagtggagcgcactggcgcttttacattgttcgccgaccatgaaattaaagatcttactgtccgggctgataacggtgagacgtggtatcttcatgatatgggtgatggatatatcggctgtacgacttgggatggcaaagaagtagcatttctatcctacgattaa

SEQ ID NO: 25969 - DNA, 204 bp, Escherichia coli
atgttaaagtacgacggtcaaagaatggttaggtttacgggttttgctaaagggaacaatagagaattaacagaatattacagtttagatattggtggcgtttaccgcgtggaaagatgtctgccttcaattaattctttaataattataaataaagaaaatcaaggggtgcttgttacatttaacgaagtggagttaccttaa

SEQ ID NO: 25970 - DNA, 282 bp, Escherichia coli
atgaagatgattggcactatcaaactcgatgctgcatctgacaaaaatgagtattttaaccaaaaggacagatacccattattcaaaacatcttctggtgcttatttcaccgctgatggctgtatgaactttgttccactgacagagcttggcaatcatggaacaagggcaagaaggtatcgaactgtttgcggtgatgattttgtacctgatatgctatttgaaacgtgggggataaagttatgcggcggcggtcacacggcgattatgtgtacacgttga

SEQ ID NO: 25971 - DNA, 351 bp, Escherichia coli
atgaaaaaatacagtcttgatgtgtggttaagtggtagcaaggagtgtttcggattatttgatagcgaagaagtagccctggaagaaggcaggattcttgaatgtagtttaggtcatccagtgaaatatgctgctaatccggtacagatagttgatgaggtggaagatatgaacccgaaagatattaactttaacgtcaatgttgaatttgctgattctatggatcagtcttgccctggtgaaatacacgcaaaaggtttcccggctgacgatccagaagcaaaacgcgaatacgaaaaggccgcaaaagacttctgcgtagataacctgagctgttttaatagcaaataa

SEQ ID NO: 25972 - DNA, 189 bp, Escherichia coli
atgactgaaaagctatggaagttgacggtattcatgacagacggtagggaaaaggttatcgccatgtatgacgacgagggggaagcattggttgacgcgcttttacttgctgaggatgaccgccttttgggataccagatcgaacctgtcaaatatgaggctaacaaaaatgaaaaaatacagtcttga

SEQ ID NO: 25973 - DNA, 1812 bp, Escherichia coli
atgatttacacaacaggcactatagctgttagcggaaacacagttaccggggcagggactgaattcaacgccgcattatctctgatcagagtgggttgcactcttattgccattagcgatccggtgcagattttttcaatcacaaaggtaaaaagcgcaacaagtttgtcggtaactcctgcggcaagtccggctattccggctggaactaaatttagcatcctgctttcagattcgatctctgtggatggtcttgctcaggatgtcgccgaaacactgcgttactatcagggcaaagaatcagaaatagcggacgcagttgaattttttagcgacaacaaagatgtgatttcagcctcaaaattagcatcacaatcagctaccactgcaaccaacgctgcaacaacagcgacaagcgcagccgattcagctaagacatacagagacgaagcccacgaatacgccaatcagaccgcacagccttacgcgtatgttttgcaaccgctgccggacgtatggataccgtttaacgattctctcgatatgatcacgggctacggccctggcactaaaaaagtaaccattgatggggaagaaaaaacaatatcatcagataaggttgtttctttctcacgagcaagtacagctacttatattaacaaatcaggtgcgtttactattgcaggtattaacgagcctcgtttcgagaaagagggtctgcttattgaaggtcagaggacaaattattttgcaaactcaaacgcaccggaatcatggaacccaaattctggactaaatagaagcgagacaaaaacagattctagaggttttaaatacgcaacgttcacccctggaggatttatagacggatctggtgtatatacagttatagcagtgaatgtacaagataagatagcagcagttaaaaatgatgaaattacaatatcttttagagcaaaaggaaataatgtaagatttattgctaggtttgataagggagatcctcttacgactgtagctttagcttacattgatagcaacactctagatgtgtctacttcaggaacagataaggataatattgtttcgaaaaatgttgttagtgatggagaatgggttgctatagaaattgtttacaaagtaactgacgattcaacatatattagaggtgttattcagatgtcaaataaatataacactaaccttgataacacaagttttatggatttgactacacctcaagttgaattaggttcttgcgcatcatcgtttattatttccggcagtgcgcctgcaacaagaacaagcgacattgtattattaccaattcctaaaaactacgcaactcaaccgatcagcttattaatggaggtaaacttaaattggggaccattaaataaaatgccgaacatcaaaggtgctgcaagattggttaacgtatcagtaaccaacgaaacaacagagatcggtgatgaaagctatatgtatttcggttttacatcccagggaagaagattaacaattacgaatggtaaaggtacaaagacagaatatcaagcatactgcgcaacgcccggaaataaatttgttgcaggttttagatttgatgccaatagaaatttacaggcttttgcaaatggtgcgacagaagccagcagaaaatcaggacatactaagcaaacttataaagatggtaatataaatatcggcggtcaaaatttatcaggtagcagacacctgttcggtcatgtgcgtaatttccgcatctggcacaaagcattaactgattctcaattaagcgaaattgtttaa

SEQ ID NO: 25974 - DNA, 267 bp, Escherichia coli
atgaaagacgttagcttgcaatttactgacaaacaacaatacaacgacactgtaattaacagcggctggctggacgccaatcagtcagcagtgtttgttgatgatattggttttgttcttgtattcgacgatccagaaagcgaaacgcctgttctgattgggaaaaagggttactatgtaaacatgcgcatcaccagtgacgatgttgatatttctcagattaagcctttcattgcgccagatcccggcgtccgcacatgggcttga

SEQ ID NO: 25975 - DNA, 6699 bp, Escherichia coli
atgcaaaggaaaactttattgtcggcctgtattgcattagctctgagtggtcagggttgggcggcagatatcacagagatagaaaccaccacaggtgaaaagaaaaataccaatgtgacttgtccagcagatcctggaaaactcagtccagaagagcttaaacgcttaccctctgaatgctcctctgtagtcgaacagaacctgatgccatggcttgtcacaggtgctgctactgcgttaatcacaaccttagccatagtggaactaaacgacgatgatgatcatcatcgcaataattctccacttccaccaactccacctgatgatgattcagacgacactccagttcctccaactcctggcggagatgagataataccagacgatggtccggatgataccccgacgcctcccaaaccgattgcgtttaataatgacgttatcctcgataaaacagaaaaaacgttaactattcgcgattcagtttttacttataccgagaatgctgacgggactatttctctgcaagatagcaatgggcgtaaggcgactattaatctttggcagattgatgaaacgcataacacggttgcccttgaagggataagcgcagatggtgcaacgaagtggcaatataatcacaacggtgagctcgttattacgggtgataatgccacagtaaacaacactggaaaaaccatcgtcgacggcacaggcgccaccggaactgaaatcgcgggtaacaacgcggtggtgaaccaggacggcgagctggatgtgagcggcggcggtcacggtattgatatcaccggcgacagcgcgacggtggacaacaaaggtggaatgactgtcaccgatccggattcgattggcattcagatcgacggcgacaaggcagttgtcaataacgaaggtgacaacgccatcagtaacggcggcaccggcacgcaggttaacggtgatgaagccaccgtgaacaataacggtaaaaccaccgttgacggcaaggattccacgggcaccgagataaacggtgacaaagccatcgtcaacaacgacggcgacagcacgatccttgatggcggcaccggaacccgcattacgggtgatgatgcgacggccaacaacagcggcaataccaccgtagacggtcagggttcgaccggaactgaaatcgcgggtaataacgcggtggtgaatcaggacggtgagctggatgtgagcggcggcggtcacggtattgatatcaccggcgacagcgcaacggtggacaacaaaggcggcatgactgtcaccgatcctgactccatcggtattcagatcgacggcgacaaagcggttgtcaataacgacggtgacaacgccatcagcaacggcggcaccggcacgcaggttaacggcgacgaagccaccgtgaacaataacggcaacaccaccgttgacggcaaggattccacgggcaccgagataaacggtgacaaagccatcgtcaacaacgacggtgacagcacgatccttgatggcggcaccggaacccgcattacgggtgatgatgcgacggccaacaacagcggcaataccaccgtagacggtcagggttcgaccggaactgaaatcgcgggtaataacgcggtggtgaaccaggacggcgagctggatgtgagcggcggtggtcacgggattgatatcaccggcgacagcgcgacggtggacaacaaaggcggtatgaccgttaccgatccggattccatcggcattcagatcgacggcgacaaggcggtcgtgaacaacgacggtgacaatgccatcagcaacggcggcaccggcacgcaggttaacggtgatgaagccaccgtaaacaataacggcagcaccaccgttgacggacagggctcgaccggtaccgaaatcgcgggtaataacgcggtggtgaatcaggacggtacactggatgtcagcggcggcggtcacggtattgatatcaccggcgacagcgcgacggtggacaacaaaggcggcatgaccgtcaccgatccggattccatcggtattcagatcgacggcgacaaggcagttgtcaataacgaaggtgacaacgccatcagtaacggcggcaccggcacgcaggttaacggtgatgaagccaccgtgaacaataacggcagcaccaccgttgacggcaaggattccacgggcaccgagataaacggtgacaaagccatcgtcaacaacgacggtgacagcacgatccttgatggcggcaccggaacccgcattacgggtgatgatgcgacggccaacaacagcggcaataccaccgttgatggtcagggttcgaccggtaccgaaatcgcgggtaataacgcggtggtgaatcaggacggcttactggatgtgagcggcggcggtcacggcattgatatcactggtgatagcgccactgtaatcaataaaggcaatataactgtcacggataaagattcggttggtgtgctgattaacggtgatcgagcgacctttgccaatacgggtcatattgacgtcaataattcagctactggcatgagcatcacgaccagcgagggggccatctcccaggcaggtagcatgaatgttggtgacttttcaacaggcatggcgctcagtggtaataacaacagtgtgacgttggcggcgaaagatctgaacgttatcgggcagaaggcaacgggcgtcaacatctctggtgacaataatgccgttgatatcactggtaacattttggtagataaagatcaaaccgcgactaacgcggtagattatttttacgaaccgtctattggtgtgaacgttagcggcaacagtaacactgtatcgctagacggcaagttaactgtggtggctgacagtgaacttacctcacgtatttatgctgactttgatggaagccaggagaatatttccgggcttgtcgtatctggtgatgataataccgtgtatctgaatggtggtatccagctggttggtgaagaaaatcaattgactgatggttctaccgtcgcatcaaatcgcaatggctatggcaaaacaccagtaatcactgttgatgggaagtcgtctgtttacctgaacggggactccacgattaatggtgatttacctctagcctattcagggatgattcggttgaagaatagcgccatgattgagatcggggcggatgccacgattaacatgcaggtagatatttatgaccactatgcgagatctgaatcccaaatgatctttgtagagtctggtgctgagttagtcaataaaggtgatattgatactcgaaatatcggttttgccgctatttctggtgaaaattcaacgggaagtaacagtggcaatattacgctttctcagtacaactatggcttgttagcaaatgcaggagttggctatttcacgactaaaggcggtagtgcggttaataatggtacgattactgcgaaagtcatggaacaagaaagtgtcattaatttgggggcgtctctgggtctgaatgaggcgaacactttctactctgatgcgaacagtatgatggggcttgatgcctttgatcacggatacgtgtccaatgaaagcggtggcagcattgagatgtatggtcgcggcaacgttggtatgttggctattgatgagagtacagcagaaaacgctgggcaaattacactggatgccctgtgggttgatgcagatgataccaccactttgcgtagcaatattggtaatgatgccaggagctatggcgttggtatggccgtaggtacaaatacttacagtgggccaagaaaaaatgctacggccgttaataaacagggtggtgtaataacggtttataatgctggaataggtatggccgcctacggtgccagcaataccgtgattaacgagggtatcatcaatctggagaaaaacgctaactacgatagtagtctgggagcagattctctgatcggtatggccgcctataagagtggtactgccattaatgaacagtctggcgtaattaatatcaatgctgacaatgggcaggcgttttatagtgatggatccggtactattcttaactatggaacgatttgtgttaacactaattgcctgacgggcaatgactataatgagactgactcttatacctcgttactttacacgggtggcgatgtaatcactgcgcagaatgaaacacaaaatctgacccaaaaagcctcgattaacgacaaaaaagaaggcaatgttgttaacagtggttcgctttccggtgctgatattgcgattagtagcggtgaattagttaatacatcgacgggtactattaataatgccatcattatcaatgatggagagttaagtaacgaaggctctgtggcgaaggtgacgctaaacgcaggcacgttcgggaacaccggtacggttaactcgcgcatgttccagacaggaggaacatttaataaccagcaaggtggggtcgtgcaaaacggtgctaacctgagtaaaactgcaatcaccaataacgagggtacctggtatctcggtgccagcagtagtagtgatagcaataatgccagcatgatggagatttataatactgcggtgtttaacaacagcggtgacttcattctaaataacagcagaaatgctattcacttatatcagtctgggtcgttctacaataccggtcatatgttaatttctggtgctaactatagcggtaacgcaattaattactggaacgcgaataataatggacggttcattaatagtggtacagttgatgttactgcaaaagcgctagcgaccagcggtgttgatgccagtaccaaccatgcatacttctggaaccaaaatagtggtatagtcaattttgataaagacagcggcgttgctgtgaaattcacccacagtaattatgttgcacagaatgatggcaccatgaatattagcggtaataacgctattgcgatggaagggaataaaaatgcacagttgattaacaacggcacgattaatcttggagcacaaggtacgacagataccggtatgataggtatgcagctggatagcagtgcgacggctgatgcggtgatcgagaataatggtactatcaacatatacgctaataattcctttgcgtttagcatgctaggttccgtaggccacctcgtgaataacggtacggtaaccattgcagatggggtgacggggtccgggctgattaagcaaggtaatagcgttaacattgaaggcgtcaatggcaataacggcaataatagtgaagtgcattatgctaattacacactgccagatgtgcccggctcgtcagttttcgtatctaccgacaatgtttcagataatggaggccagaacaacctaaatggctatgttgtgggaaccagttctgatggcagcgcaggtaagttgaaagtgagcaatgcaagcctgaagggtgtttccgttaacactggatttacgtcaggaacaagtgcgacttctgttacattcgataatgtggttcaaggtaacaatcttacggatgctgataccattacatcgacctctgtcgtgtggagcgcacaaggtaacaccgatgctaatggcaacgtagacgttacgatgaccaaaaacgcctatacggatattgtgacggattcttcagttaataatgtcgctcaggtactggatacgggttacaccaataacgacctgtacactagtctgaacgtaggaacgactgctgaactgaacagtgcgctgaaacaaattagcggcagccaggcaacaacggtatttaatgaagcacgagtgttaagtaaccgcttcagcatgttgtccgatgcagcaccggaagttgcaaacggtctggccttcaacgtggtagcgaaaggcgacccgcgtgctgaactgggtaacgacacacagtacgacatgatggcgctgcgtaaatctctgacgctgactgaacatcagaacctgagtctggaatacgggattgcgcgtctggagggtaatggttcagataccgcaggcgataacggagtgacaggcggttacagccagttcttcggtctgaaacaccagatggcctttgacaacggtatgaactggaataacgccctgcgttatgatgtacaccagctcgacagcagccgctcggtagcgtacggcgacatcaataaaacagccgatgctaatgtgaaacaacagtacctggagttccgtagtgaaggagcaaaaacctttgagctgcgtgaagggctgaacgtcactccatatgccggggttaaactgcgtcacacactggaaggtggctatcaggaacgcaatgcgggtgactttaacctgagcatgaacagtggcagcgaaacggcggtggacagcatcgttgggctgaaactggactatgcagggaaagaaggctggagtgcgaacgccacgctggaaggtgggccgaatctgagctatgtgaaaagtcaacgtactgcgagtatttcgggcgctggaagccaacgtttcaacattgacgatggtcagagtggcggtggtttcaacagcctggcgacgatgggtgtgaaatacagtagccaggagagtgcattgcagttagatgccttccactggaaagaagacggcatcagtgataaaggtgtgatgctaaacttcaagaaaacattctaa

SEQ ID NO: 25976 - DNA, 1269 bp, Escherichia coli
atggaaatttttgatacgaatgatatctttgggctctcaagagatttgccacttaattacattgaaagacctgatgttgatttcaaacttaaacaggaattacaagcaaagaaacatattgttatttacggcagttcaaagcagggtaagacttgcgtaagaaaacactgtattaattctgatgattatattttggtgcagtgttcgaatcgttctgatgtatctgaattgaatgcaagtattttaaaaagagctggattcgaaataactcagtctaccaagaaaggtattacggggaaaaataaaataatcgcatcaataaaaacttctattttgggctttgtggcgagtgccggaggcgagatcgaagatacgaaatctcatgaacaagtaaccgcgcctttagaaattgatgttgatgatgttaatgatgttatagcggctttaaaatctataaatttcaagaagattatcgttcttgaggattttcattatatgcctttcgaaactcaaagagatttttcgatcgcattaaaagcctttcatgaaacatcaagcattatttttgtaattgttggagtttggctagaagataatcggctcattgtctacaatggtgacttaactggcaggattatttctgttaacgcagacaaatggcaagattctgaactggagatggcaattgataaaggaggtttactccttaacattgattttgatccaactttcaaagcagatgtagtaacacactgtctcaatagtatttatttagtgcaagaagcatgtaggcgtgcgtgtattgaatgcggaatatcagagactcagcaaacaaaaagaactattggagctggtttggatggaaaggatatcattgcaaaaattgttaatgaccaatcggctcgttacaattctttccttattaatttttcagatggatttcaagatactgaacttcaaatgcataaatggattttatatcctgtcctttcatcaaccattagtgaacttgaattaggtttgaaatttaaagatataagggcaatattacaaagtgtacatccaagaggggagaagttaaacctgggtaatgttactcagtcgttacaatcaacggcgtctttgcaaataaagaaaaatataatgcctattattttggattatgaccaaacaaataggaaactgaatgttgttgataaaggcttcctaatatggttgcaacatcaagatatcaaagatctaaaggatgatttggagttgccaaattaa

SEQ ID NO: 25977 - DNA, 957 bp, Escherichia coli
atgactgtggcaccaaaagatcaaagtttgaaatctgtaagggtgggcttttacacaagctctgagaatattcgcactagtaacaaggggttaaccgcagaggcctttaaaaatctctatgatcggtgttctaaagacttcaagatgacccactatgcagactttggtgaaagagaacttaaaattcattttctagacatctcacccgaggatggctcctacttcggattcatgtctcgaagaagaaaaagcgcaacactggcatatattacagataaagagtgggtggaagagaaaatccctctagccggggcaaagactctttcagaacgtacatactttatttattatcctcagacagacattctagtattgtctttaaatcatttaggtccacgccatagtgacttagccttccttcttttcaactccagtgatcgcggagtccctgtttcttttgaagccatttggaaagaagaaagcatcaaagaactactcgaaactggatccaatctaagaagctgcgagatttctgtggccatcccaagaaacttcaatgccgcacagtatcaactcgatggaatgttcgcgaatcagatgattgagatgatcagaggcaccagttcaagccacctgactatttcgttacgcggacattctccattaaaaagaaaagcaaagggatggcttgaggatgacgttaaaaaaagccttaaggagatgctagaaaagttccctggtggtgatggtcgtttaacttttgagaaagcaaatgttgttgctcagggcgataaaaagaagaaaagtcttgtagacgaagttcttacggtaaagaagatggtgcctatccaagcagatgggtatccgaccgatactgacgttaaaaatgctatgctacaagcaaagaatgacaaccttaggtatctaacccagtactatttggttagtcaaacgtaa

SEQ ID NO: 25978 - DNA, 438 bp, Escherichia coli
atgagttctcggaaattgtttgctgccaagtcattgtttgctctagctatggctattgctggtgcccattttttacacgacctagatcacaatgctgtcatttcggctgctggtgctctttcaactatttctggagttctctttggttttgttttggcatcagtcaccatgctaagtagctttgatagttcaaagggaattgtaggcgctctaaaaagtaacggagtactaaaaggcattattgaggggctttttgatacaggaactacgctgatcacagcctgcctattagcaatgatctcgatgtttgcccctgttgtcagcaatctgcctctggattattatgccctgctactcgcaggggcatatttgattatatcaatgataacttttttctttaactggaaatctttatctaaaataataagttacatatga

SEQ ID NO: 25979 - DNA, 1287 bp, Escherichia coli
atgaaaaagacagataaaggtgtatctctccttgaggtattacttgtcatcggcataatggtgatggttatccctaaagtttatgaaaacattgaaaaccatctgaataatgttcgctggcagaatgcagcagaacacgcaaatacctataacaccgctgttcgtaattatgttgctgacaatgcatcaacactacttgcaggctctttacccaaaacaatcacgccagcaacactcattcagaaaggctatctgaaatctggtttttctgaatccaattttggacaaagctacattaccggtattgcaaagaacagcaaaacatcccgtctggaagccctgacctgtagtaatggcggtcagtccctgtcagaagccggaatgcgctcggtagcaagcatgattgaagggcttggcggctacatcaacagcagcaagcaggcgattggcgcgggtggcggctggtctgacacgccttcaaattacgggctgaactgcgcgaccgggcatattgcaatggcacttgttggcgctgatttgcaggaaagcgaccgtttgtatcgttactccataactaatcgtcccgaccttaacaggatgcatacggcgattgatatgaacagcaacaatctgaacaacgtcggcactttaaacggcaacgccgccgcgctctccggcgatatcagcgcacgtaacggtacgttctctggcgcaatttcaggaaatacagccacaaccaacggtgatatcacttcgaataatggctggctggtcacaaaaaacagcaaaggctggatgaacagcacctatggtggcggctggtatatgtccgattcgtcctggttgcgcagcgtgaataataaagggatttacactggtggccaggtaaaaggtggaactgtacgcgctgatggacgcctctatacaggcgagtatttacagcttgaaaaaacagcaacggctggcgcttcctgctcccctaacgggcttgtaggccgcgacagtacaggggcgatactttcgtgccaatccggtacgtggaaaaaaattggcgcaggtgatagccaaattgttaccgcttcagctactgcgtggcgttggcctggagcaacggcaacatgtccatctggcaagaaagtcattggtggaggcggtcaatgcagatcaaataccggatttatatggctcacgcgttccatgccttcaggcaacaatgcatggactgccagttgcgacacgaccgaagatcaaaatggttcaattacagtttacgccatttgccagtga

SEQ ID NO: 25980 - DNA, 255 bp, Escherichia coli
atgaataagtcacgaaatgcaattatcgcctcatcaattatcttcgccagtttaatgttagtgggatgtaaagaaaaaatatattctgtagaatattactcaaacaacatcagtgaagccactaaaactttagaagattgcaagaaaggtacaataaccgatcaaaactgcgataatgctcgtgctgcacttcagcaaaaacaagatagtgaatataaaaagaaagttagtgaaatgagaagacgccttgattaa

SEQ ID NO: 25981 - DNA, 258 bp, Escherichia coli
atgtacagaaaaaaacatcacctaataaaaatatttttattaaaaatggcgtgcaatgttttttctttcctgctgggtgctttcatactttcagcaccgtttgtcttatatacattaaccggttcagttctgaatgccgttattcatttcaccttttctttgcctttagccaccatattactggtttatgcttattcaggctttgaagaaagcatttatttattcatggcatacaaatatgactcaagcaaaagctaa

SEQ ID NO: 25982 - DNA, 177 bp, Escherichia coli
atggctgattttggttccactaaacaaaccgtaacatttgaagaatggcacgagctattaatggattacgcagagttacgcggtggaaatgccgccgatgcggaagcatggcgcggtgattatgaagcaggaaaaactccggttgaagcatattgtgatgaatggggagaggattaa

SEQ ID NO: 25983 - DNA, 225 bp, Escherichia coli
atgaaacaatctacttttcctgttatcgtctctacaactggtcatgtgttttctgttgtgcgcgtgacgctttgcaccatttgccttaaacatgaaaaaacaggcgaggcttatgtcgtcatttttacagactgccataatatccgtgattataaaaagggcgttgttccggctcttggggagctttatcaggaagatgtcgatttgattaccggaaaaagttaa

SEQ ID NO: 25984 - DNA, 444 bp, Escherichia coli
atgactcaactaatcccagaaaagatactggaaatcatagatgatcatgatcgtgcagaaaaaaagcaacgcaacaaaatcggtttcatttatttatgtctctatttagcaataattggtgtggccgcgtattcctttatatcaacgtttagcattaatgtggtaacaatcatcataatgcttttcggtgtgttcatgattgtgatttttaagagttatttggactcatggagtgggataattcttagcagtgaccacatattgtccatactcgataaaaccaaagattacccagaaattaaacgtatagttattaatcgtctgctctccggctcaatactcacaggtaaagatgaagagtacatatacagtcaactgaaaaaggctgaacaaagcaacgaacgtgaaaagagattgcaagcaattaaagagtatacatcgtaa

SEQ ID NO: 25985 - DNA, 183 bp, Escherichia coli; identical to SEQ ID NO: 22625

SEQ ID NO: 25986 - DNA, 438 bp, Escherichia coli
atgttcttttctgttggtgtcgaaacaccgaaagatgatcatacagcatacggtatcactgttccggtttttgattgctttgattttggatgtgtttctgctgctgattctcaggcagaaatacccgcaatggcgcgtgaagcgatattggcaatcgtggaagagatggtaataagcggtgctcattctgttgatgatattcatgatgaagggtgtttgacttattccgccaacccaaattataaccactgtgatagctggtttgtaattgatgttgatttgtcagaaattgagggcaaacaacaacgtattaatatttcattgcctgatgtattgattcgtcgtattgatggatatgtgagagaaagtggtggcgtatacaaagatcgtagccattttctggctcaggcggcacgtcatgaacttgcatataaataa

SEQ ID NO: 25987 - DNA, 321 bp, Escherichia coli
atgacaactttaaccgataaagaaatgattaaagaaatcaaagagcgcataggcagcctggacgtgcgagacaatattgagcgccgggcttatgaaattgctctggcatcgctggaagcagaagcgccaaatttgcctggtggtttcacaattgaagaagcaaaagaattacacgaaaatctggtaaaaagtcacgtaagcaaggctttaagtggcgaaaaaatgaaaaaagaaaatcgtgatgccgatttgcgctggattcatggcgtaatagttcaggccgcgtggtttgtgaaagcatcactagggcagaatgcatag

SEQ ID NO: 25988 - DNA, 204 bp, Escherichia coli
atggcaaccaacaatcgtaaagcaaagatgctaatttcccgtgtatacagactttgctaccccagccagtggttgagagttagcaatcgccgtgtggtgttgttctcattttctggaatagccagagagggagtcaaagataagcgtagcgcggtgcaaaaccgctggaaaaaccactgttatctgcgcactaaaggagagtga

SEQ ID NO: 25989 - DNA, 732 bp, Escherichia coli
atgacgatgaacacggtgaataatatgagtacagttaatcagccagaattaaaacagcctgaaaaggctgtttccagtgaagatattgataattttattgttgatgtattcaaggagacagggcataaaatatcaaaagatgatccagttatttcattaatttttctgaaccaaaagatacaggaaaaattcagcaatgaattacaagctaacttcactgccctgtctgagggcttcagacaggtcgtttcatctgtagaaaatgactatattcaaagattcaagaatattgttgagacgtgcggcgatctggataatgaaataaaagaaaaagtagaagagggaaaaaacgatctaaaagaaacaagtgttgaggtaaaagaaaaattaacagatgatattattgaactcatatctggaattaaacgcaaccaggaaaaaaacaacaaattatatgaagaaaagttgaagtcattatctaaggctgtaaaacccttcagtacaagaacagccattgcaatttgtgccctgtgcacattatgcctgtctgcggcattttctggcgcaacctggtatgttgcacaacatgaaaaagaggcaagtctgcgcttctatgcaagagcctttcttgatatgaaaaaaataactgaagagagcatgagaaaattaccaaaatcagaccagcaaaatataaaactcaaactagacgaaattgattcaagaaaaccataa

SEQ ID NO: 25990 - DNA, 402 bp, Escherichia coli
atgaaaaagatcgagagtttattatctccaatatgcgaggctataaacgaaacaaaatcgaaatcaaaacaggctgtcttcaatatgtatttgcaaaatatacttgaagcaaagaaatattatacatgggagcaaatagctggttacataaacaacaacaccaagacagaactagcccaaaagacttatataaatatgacagagagggctaaaaaaagacaaaaatgcactgaaccaaaagaacaggcaaaaaccatagatgtaattgatcagaatgaagctaaaggcgatgaaccgagagggggggtaaaaggttttttttcaaacattagtgagaacaaaaaagaaatagagcacgatccaagtgctacgaatgaaaaattcataaataaatatctttaa

SEQ ID NO: 25991 - DNA, 2166 bp, Escherichia coli
atgaaactttttatcgcagaaaaacccgcagtagcaaatgatattgttaaggcgcttgggggcaattttacccgtcatgatggctggtttgaaagtgataatactattgtgactaactgttttggtcatattatcgaatcacagccccccgaaaactataatcctgaatacaaagagtggaagattgaaacactccctttgcgtctttatcccgtaaaataccagcctgtagaaagcgccgaaaaacaggttaaaacgattattgagcttatcaggcgtgctgatgtgaccgaaattattcatgctggcgatccagatgacgaaggacagctacttgtcgatgaggtcctggaatatgcaggcaacacaaaacccgttaagcgcgttctgatcaacgacaacacccttccggcagtgaaaaaggcactggcaaatcccaaaaataaccgtgacttcagaggactctatctcaaggctctggcgcgttctgtagccgacgcgatatacggtttatccatgacgcgtgcttacacaatcccggcaaaaactaaaggctataaaggtgttttgtctgtcggacgggtccagacacccgtgcttggcctgattgtaaatcgcacccgtgccaataaaaatcataaatccagcttctactacaccatgaccggacattttcaacgcggcgctgatgttatcagggcgaactggaaacctggtgagttcgcaccgctgacagaccgcaaattgcttgataaaacctgggcgaatggaacagcaacatcacttgcaggaaaaccagccacagttgaagcggcagcaacagatgataaaaaaacggctgcaccgttgccctttaacctggtacgacttcagcagtacatgaacaaaaaattcaaaatgactgctcaaaaaacgctggatatcacacagcagctacgcgaaaaatacaaagcaattacttacaaccgttcagattgttcatatctttcagacgaacaattcagtgaagcaccacaaataatcgatgccctgaagtcggtgtttgatcagccaatggatattgatacgacacgtaaaagcaaggcatttaacagcgcaaaagtaacagcgcatacagccatcatcccaaccgttagcgtaccggacgtaaacgcactgagcaccgacgaacgcaacgtttacctggcaattgcacaacactatcttgtccagttcatgcctgaaaaggcatatcaggaagtatccgtcgccattcagtgtggtgatgagtcgttttatgcccgtgccaggaaaactacagacagcggatttgaagcgtttcttggtgtggaaaatgccggggacgatgaagcagaagtcgaaaatgatgattccgcttttgatcttctctgtaaaattcgcacaggagaaacagtgacgacaaaagaagtggttgtgaatgagaagaaaacaacgccaccgccattattcaccgaagccactttgcttgccgcgcttgttcgtgtcgcagattttgtcactgatccagtgattaaaaagttactgaaggataaagatcgggataaaaaagacgaacatggcggtattggtacgccagctacgcgggcttccatattggaaacactgaaaaaacggaactatatcaccctggaaaaaggaaaacttattccgacagataccgggtatgcgcttattgatgctctgccggatatagctgttaatccagatatgacggcattatgggcggaaaaacagacactcattgaaaacggaaaaatgaccatcgaacagttcgttgacgaactgtacaatgatctgataccgatgatcagtaatgcgaacagtgctgaaataaaagtttcccccagcgcgccgtctggtcagtcacaacgcctgtcctctccttgtccttcctgtggtaaacagattgttatcaggccaaaaagctattcctgtacaggatgtgaatttaagatatggaaagatttctgcggcaaatcattaaccgataaacaaattgaaacgttaataacaaaaggagttacaagtgaattgaaaggtttcattagtcaaaaaacaaacaaagaattttcagcaaaagtaaaactggttgacaaagcaaccgggaaactgggatttgagtttacacaaaaaagtaagaaataa

SEQ ID NO: 25992 - DNA, 699 bp, Escherichia coli
atgcaggatattcgcgaagaaagtctgaacgagtcggttaagtcagagcagtcaccgcgggtggtactctgggaaatcgacctgacggtgcagggcggtgagcggtattttttctgcaatgagctgaatgaaaaaggggagccggtgacctggcaggggcgtgaatatcaggcgtacccgattgaggggagtggctttgagatgaacgggaagggcagcagtgccagaccatcgctgacggtgtccaatctgtttggtctggtcaccgggatggcggaagacctgcagagtctggtgggggccacggtggtccgccgccgggtgtatgcccgttttctggatgcggtgaatttcgttgcgggcaatccggaggcggacccggagcaggagctgagtgaccgctgggtggtggagcagatgtcgcagctgacagccatgacggcctcgtttgtgctggccacaccgaccgagacggacggggcgctgtttcccggtcgtatcatgctggcgaacacctgtatgtggacctaccgctctgatgagtgtggttacacgggcggggctgtggcggatgagttcgataaacccaccacggatatccgtaaggacagatgcagcaagtgcatgcgcgggtgtgaactgcgcaggaatgtcggcaattttggcggtttcctttccattaataaactttcgcagtaa

SEQ ID NO: 25993 - DNA, 291 bp, Escherichia coli
atggaagtcatcaacaaggaaaccgacagcattcaaacaaagtctaacagtgctgttttatcatatatctatggacagtctggattcaccattgttctgaataaatgttttgtgcggctattcaataatgcatctggcattaatgccttatatggctataaccaaatccgggaaatcaattacacattaccaaacactgatttcggtgaggcagagatctgtattctcacatctggaagcaacaatgctttatggaagtttactgttaagtcggaagacaataaaacataa

SEQ ID NO: 25994 - DNA, 1521 bp, Escherichia coli
atggcgatttttcatctggattttaaaattgtgaaacgaagcgaaggcatgacttctgttgcgaaagctgcctaccatgcccgtacacgtattacggatgatcgcattggagaaacatttgatttcagccacagaacagatcttcatggtcatattatattagcgcccgtttccgcacctgctcatattattgaaagctcctcagctctctggaatgaagttgaaagagtggaacgccagaacaatggtcaaacagcccgttattttgatgttgctatacctgtagaactcaacaacgatgataagaaaaaattggttgccgaatactgccagaaaaactttgtcgataaggggatgattgctgatatcgcatttcatgatttagacggtaaaaatcctcatgctcacgttatgttaaccctgaaaaccattggtcccgaaggcttcggtaaaaaagacagaagctggaatgataagaaggtaatgctccaatggcgtgagtcgtgggccacaatgtcaaacagctaccttgaagccgcaggctgtgaagaacgtatcgatcaccgttctctcagaactcaatgtgctgatgcccttgctcaggcagaagaagcattcagcgctgaagagaaagcattctggcttgccaaagcaacggaaacaaaccgtccggcaatgcaacgtgttcatcgtgctaaatggaatgacgccgagtcacaggaacagcgctctgctgaacaagctcaacgcgatcatcaaattgaggaagcaaagaagatctacaccacattcagtgagctaccactggagatcgttgttgatgtcagaagctttacgataacacatcttgctgaacccgaagagattgttcttccagactcccctgcaacagtagaacagcaacctgctatggagacacctaccacaagcagaagaccagcagcaaaatcttaccgtgatcccaataaagtcagtaaggttagtgctgcagggaagaaatcccctgttctggttgttcctgaaccaaataaatccactaaattgaaaaccccatctcttcaaaacaccagagcgatgaaacgtgctcctgtgaggagtaggaaacagaccaagccccgtcagagcggtttgtttaaacgtttcacgctactgatagtaggatatataagagagaaatttatatgggccagaaggaaacccgataccattgatgctgaccatgataagcgtatcgcagagaactatatctatgatgaagtgctgggtgtctctgttccacgctcagagtttgaaagacgcgctaagtttaacaatgaccagacatcaccagaagcaggaatctatggcagagtatcagataatgacgagacagttcgtttcccaagccgtcctacacatgaacaaccaaattttgatagaaacatggatctcacaccatcaagcccctcagagtattcaggaaagtcccatgtttcaaagttgagaccactggcatatcgtaataataattataatgaatag

SEQ ID NO: 25995 - DNA, 210 bp, Escherichia coli
atgagaaatataagtataaaaagccaaaacctaatgataatgttatttttattgctcataaacatacttgcgtttatgagcgttgatactacggataatgtatggataatactatttgcttcttctgtcttttttatggacttcgttattatcactatgctcattatgttttttatcgtctatattggtagtgtctgggagaggctttaa

SEQ ID NO: 25996 - DNA, 162 bp, Escherichia coli
atgcgttatccctggagcgtgagcgccagctggaaatacaggaacgcacactggatggtccttcgctgggatggtgaaactatgaaaaatggcaggttaagtggattaagacaggctaatgtggtctgtaccatctggttgcataggtattcatgcggttaa

SEQ ID NO: 25997 - DNA, 519 bp, Escherichia coli
atgagcaatcttttacagacgggcgcggagttcgagaaaaagctgaaagagagagccgaatctacagagaaaatgctgaacgacgagttcaggaagctcggcgagtctgtcagcgaggctgtgacctcaaacgagacgaaaatcagagacgctatagccctgttcacagcctcgacagagaaatcgctggaaaaacacagggaaggggtgaaagaggcgatgatgcagcacaggaaggacgtgttaaagctggcagggaatacgggcatgatgttactggggatagtctttctcctgtttaccgcgagtggcgggacgctctggtatcttggcgggaggatacaggcgaacctggaagaaatcaggaagcaggaagagacattgcagaaactgaacgcgaagacatggggcgtggagtttgtgcaggacgggaacaggaaatttctggtccttccgtacgggaaattagcagaggtgattccctttcaggggaaagagtgggtacatctgaaggagtga

SEQ ID NO: 25998 - DNA, 288 bp, Escherichia coli
gtgagcagcaccatttattgcatcctgaatgcggatcaacttcatactccatgcccccgccatgaaccagccatccttctggacgttatccttgaagtcatcccactggttgcctgtagaaaatgtagttctgaccgccgtatcgataacagaaacgtaggtagcagttgcactgtttatatcagactgaatatcgatgttattatcagcgacatatttttctgccagtgtcatcatattgttattcagggcaataaaagctgtattatgagcttcaacaacggctga

SEQ ID NO: 25999 - DNA, 570 bp, Escherichia coli; identical to SEQ ID NO: 17228

SEQ ID NO: 26000 - DNA, 384 bp, Escherichia coli
atgtctatccgtgatgaacatgaaatgattatcgaaaacaaaccaagtgcacttgatattcacgaattaagtttgcgtgaatcttttgatagagcttggcgggaatcacacgaagtaaataaaggtccatatattccaccagaaccactcgagattccaagagttgaaattgatttttcgatgaatgaggaatgtgagcttgatttgaaactgaagctgcaacgccgatatttccaagctattaaagactctcaagaagcaatgagaagtgtttacgagaaaattcagtccaagcttgaagacgaaatcgacgaaatggctattttgatggagcttcaaaccaattcttatgcttatttctctcgactagaccgtgacggttga

SEQ ID NO: 26001 - DNA, 540 bp, Escherichia coli
atggcagttcgtggcattaacaaggtcattcttgtcggtcgtctgggaaaagatccggaagtccgttacatccccaacgggggcgcagtggcaaacctgcaggtggccacgtcagaaagctggcgtgacaaacagacgggggagatgcgggagcagacagaatggcatcgcgtggtgctgttcggcaagctcgcggaagtggctggcgaatatctgcgcaagggcgtgcaggtctacatcgaaggtcagcttcgcacccgtagctgggaagataacggtatcacccgttacgtcaccgaaattcttgttaagaccacgggcaccatgcagatgctgggacgtgccgcaggtgctcagactcagccggaagaggggcaacagttcagcggtcagcctcagccggaaccacaggcggaggccggtacgaaaaaaggtggcgcaaaaacgaaaggccgtggacgaaaggccgcgcagccggagcctcagccgcaaccgccggagggtgacgattacgggttttcagacgatatcccgttatga

SEQ ID NO: 26002 - DNA, 429 bp, Escherichia coli
atgggaagaacatttagagaaaaaacaatcaacatattacaaataatcactctgttgacattctattggctaatttataatttttgtctcgaccacctgtatgctaatgcctcaaaaggccctgcaagcattattactgatacatattttccagctgcattattagctcatgttgggctattgtttcttttcatcccatactatttaatgtggaaggcgaaggagaaatttaactggagaggaatcttcaatgctcatcgaaactatcctttcacagtctttattagttatacttcagctaccataacatatatgatagctgataaagcatctttctatgattctggtataaatactctatacttgattcaaattattgcctttatttttgttacgattatttatctgcattcttccaacaaagattaa

SEQ ID NO: 26003 - DNA, 486 bp, Escherichia coli
atggacagtcatcgatgggatgctgttgtcaaatctatcgataaaagtatgtcagacaacccactcgtcctcgatttttactatgaagatagagaaaacaagaaacaactgagtcaaaaagatatccatatattatatggattaattcaggatgatatatcttctgtggacaaacgacttatattagccagacatttcttgggaaaaggacagcgaaatgaggcaatgagtattcttaaccagatagatgacagtgagtgcaagctgtcatgtatggaggtaagggagaaaacatcgtcccttgatcgagttgtttattctttaatgaaaatgttcaaatggtttaattccgatatttcacgggtaggtataatattttatgttctagctgttattgtcgtatatggtattatattaatctttgttggaagaatgcagataaataatcgtaacaaaaataaaggcaataatttgaatcaagtatag

SEQ ID NO: 26004 - DNA, 465 bp, Escherichia coli
  misc_feature (452)..(461): n is a, c, g, or t
atgttattgcgtatcaaattattaactttgcgaaaattaataatgcctgtggcgttaattattcttcctgtgcttgttatctcattcgtatctataactctgaccaaagataaaagtgcaacgcgtgccgaacgatttgaacataccccggatgtatttgcggactatgacccattaaacctgactcatcgcctcgtcaggatggatgagcaaaatggtatcattaattctaacgaagcgcgtaaagcatatggggctataaataattttttaaagaaagtaaaagatacatgtaggattgatgatactactgaaaatttcttggactgtgcaaacaaaatattaggagctaacttttattataaaccatcagctacagtagctaaggcttatgctaatcacttttctgactgtgatctgaacgtatatcttatgtttgatgctgcaagagnnnnnnnnnnatag

SEQ ID NO: 26005 - DNA, 219 bp, Escherichia coli
atgcagaaacgagaacccgtcataatcgcgccagactataccgatgatgaactttatgagtggatgcgccagaaaattaatgcagcgcaggatctgaaatgggctaatgaagccagggctaagcaggctgaaaatctgtccgctctggagcaggatatcaccaatctggaaaaagcagcggcattaagcattgccagaatgattacatacccgcgttaa

SEQ ID NO: 26006 - DNA, 153 bp, Escherichia coli
atggatactatcgagcttggcaacaacgaatctctggtgtacggcgtgtttcccaaccaggacggcacattcaccgcgatgacgtataccagaagcaaaacgtttaaaactgaagctggcgcgcgtcgctggttaaccagaaacactgactga

SEQ ID NO: 26007 - DNA, 561 bp, Escherichia coli
atgagtgaagacttgtcgcaacagtttgcacagtatgtaatgaaacacgcgccacaggatgccgaagctattctgacaaataccagttcaccggagattgcagaacgtcgtcgggcgatgacctggtcttttgtgcaggaacaggtacagcctggtgttgataatgcctggcgggaatcccgtggcgatattggtaaaggaatggagagcgtaccttcgggtggtggcagtcaggatattattgctgaccatcagggacatcaggccattattgagcaaagaacgcaggacagtaatatccgtaatgatgtaaaacatcaggttgataatatggtcacagaatataaagggaatataggtgatactcagaacagcatacgtggcgaggaaaatattgtaagaggacagtattctgaactacagaatcaccataaaacagaggcattatctcagaataataaatataatgaagaaaagtcggttcaggaaagaatgcccggggctgacagtccacaggaactgatgaaaagggcaaaggagtatcaggataagtataagtaa

SEQ ID NO: 26008 - DNA, 1263 bp, Escherichia coli
ttgcgtcagacccgcacccgtaagccgttccctgaatcactaccccgtgacgaaaagcgactgttgcctgcggcgccgtgctgcccgaactgcggcggttcactgagctatctgggcgaggataccgccgaacagctggagttgatgcgtagcgccttccgggttatccggacggtacgggaaaaacatgcctgtactcagtgcgatgccatcgtgcaggcacctgcaccttcgcggcccatcgagcgtggtatcgccggaccggggctgctggcccgcgtgctgacctcgaagtatgcagagcacaccccgctgtatcgccagtcagaaatatacggccggcaaggtgtggagctgagccgttcactgctgtcgggctgggtggatgcatgctgccggctgctgtctccgctggaagaggcgcttcatggctatgtcatgactgacggcaaactccatgccgatgataccccggtccaggtactgctgccgggtaataagaagacgaagaccgggcggttgtgggcgtatgttcgtgatgaccgcaatgccgggtcagcgttggcacctgcagtgtggttcgcttacagcccggacaggaaaggcatccatccgcagactcatcttgcttgcttcagcggtgtgctgcaagcggatgcgtacgccgggttcaacgagctgtatcgcaatggtcggataacggaagctgcctgctgggctcatgcccgccgaaagatccacgatgtgcacgtccgcatcccgtcagcactgacggaagaagccctggagcagatcggtcagttgtacgccatagaggcggatataaggggaatgtcggcagagcagcggcttgctgaacgtcagcgaaaaacgaaaccgctgttgaaatccctggaaagctggttgcgtgaaaagatgaagaccctgtcgcgacactcagagttggcgaaggcgttcgcgtacgcacttaaccagtggccggcactgacgtactatgcgaacgatggctgggtggaaatcgacaacaacatcgctgaaaatgccctgcgggcggtcagtctgggtcgtaaaaacttcctgttcttcggctctgaccatggtggtgagcggggagcgctactgtacagcctgatcgggacgtgcaaactgaatgacgtggatccagaaagctaccttcgccatgtgcttggcgtcatagcagactggccggtcaaccgggtcagcgaactgcttccgtggcgcatagcactgccagctgaataa

SEQ ID NO: 26009 - DNA, 126 bp, Escherichia coli
atgcgtttattttcttctccggggcatattgtggttgccggacaatccggtggcggaaaatctgttccggtgaaagaactaatcgacagaattattcagaaatataaggaacccttcgatgaataa

SEQ ID NO: 26010 - DNA, 252 bp, Escherichia coli
atgaataagctggtttctgatggcagcgtcaaaaaaataaattatccggtgctgtatgagtccggaataacacctccgttatgtgaagtcagtgcaccagaacctgatgcgggggaagaacgcattgtggcatatgtttataaatcatcacggagtacggtttttgaaaatcctgacattgtaaaaacctgtacggtcagggatttgaagaaggattttgtgaactgcgatgagaaaggtgagggacaatga

SEQ ID NO: 26011 - DNA, 477 bp, Escherichia coli
atgcataaatcagaaaatgaaaaaatagattttattctggatgagcatgagcggatattcagaaaacagggttctttgtgtatggcactgggtaagggctttttagttatagctattctttgtggtgttgccacattctgtgtttctggcctgtatctgaaatccctgtgcctgtccgttgcctgctgttgtggggtattcagtcgtatttttaattattacagcgtaccggaggaatcacgcatggtactcagtcgtcaggaattactccggcttatgcgtctgactgaagacgtaccagatgtgagacaggaactgcttaaccgtttgttgtccggtaaaaaactgacgggtcgggatgaacaggatatccggcgtctctggcaggagaaagtggatgcaatgcaggagtctgccacccgtcagcgtgaacaggatactattcggaagtttactgaagggaataaatccgaatga

SEQ ID NO: 26012 - DNA, 315 bp, Escherichia coli; identical to SEQ ID NO: 23145

SEQ ID NO: 26013 - DNA, 300 bp, Escherichia coli; identical to SEQ ID NO: 7650

SEQ ID NO: 26014 - DNA, 657 bp, Escherichia coli
atgcctgcgatcaatgccaaacgtgtttaccggatcatgcgccagaatgcgctgttgcttgagcgaaaacccgctgtaccgccatcgaaacgggcacataccggcagagtggctgtgaaagaaagtaatcagcgatggtgctctgacgggtttgagttccgctgtgataacggagaaaaactgcgggtcacgttcgcgctggactgctgtgaccgtgaggcactgcactgggcggtcacaacgggtggcttcgacagtgaaacagtacaggacgtcatgctgggagcagtggaacgccgctttggcagcgagcttccggcgtctccagtggagtggctgacggataatggttcatgctaccgggcgaatgaaacacgtcagttcgccaggatgttgggacttgaaccgaagaacacggcagtgcggagtccggagagtaacggaatagcagagagcttcgtgaaaacgataaagcgtgactacataagtatcatgcccaaaccagacgggttaacggcagcaaagaaccttgcagaggcgttcgagcattataacgaatggcatccgcatagtgcgctgggttatcgctcgccacgggaatatctgcggcagtgggccagtgatgggttaagtgataacaggtgtctggaaatatag

SEQ ID NO: 26015 - DNA, 288 bp, Escherichia coli
gtgctgggctggaaatattcaggcaatcgtcatcacccgactgaaaagcccgttaccagcctgcaaccgctgattgagagcttcacacacccgaacgcgattgtgctggacccgtttgcaggcagcggctcaacctgtgtggccgccctccagtccggacgccggtatatcggtgtcgagctgcttgaacagtatcaccgtgccggacagcaacgactggccgccgtgcaacgggccatgcagcagggggccgcgaatgataactggtttgaaccggaggctgcgtaa

SEQ ID NO: 26016 - DNA, 588 bp, Escherichia coli; identical to SEQ ID NO: 12395

SEQ ID NO: 26017 - DNA, 330 bp, Escherichia coli
atgaaaacattaacttttaataacggcactgtttctgttggcgatgtgtttgtatcttcctggggatatgagcaaacgaacgttaatttctatcaggttatttctgttcatggcaaaaaaaccgtaactgttcaggagattcgcgcttcggttcatcggacccattcaatgagcggatataagaccccattactcaatgatttctgtggtgagccattaaaacggcgagtgcgtgattattacagtacgccagcaattgaaattgagtcattcgaaacagcatataaaggatcaccggaagaaaaacacgagttcacatcatactactaa

SEQ ID NO: 26018 - DNA, 396 bp, Escherichia coli
atgatgacagaaaacaaaaagaatcaggaattcaaaatcagaaaaattaaacggaatattgagcgcagttgtgataacgccataaaatacttcgagctttttgtggttttctttgttgccggattgcttttatggcacggtatgcatgcttttttcagcgccggtattgattcgtggaaagctgacccggaattaaataatttgatttatatgtggaacatcctgatgtatgccattccgtatacgttatatgcgcttgcagccgggtttcttgttacatcttttctgtccccaatgtacgaattaatattcggaaatatcatgatattcctgctgaaacgccgtatgcgccgggagaacaaattaagggagggtggcaataatgcttcgcattaa

SEQ ID NO: 26019 - DNA, 249 bp, Escherichia coli; identical to SEQ ID NO: 18900

SEQ ID NO: 26020 - DNA, 582 bp, Escherichia coli
atggacacacaaattgcacacatatcgcacacaaataaaaaggggtatgtatggcgcaagcgttatgaaaaacgcacgattgaaatcatcctacgcacccgtgataaatcaattgccataaaaagagcggcatcaataacaattcgctatatggaattaaaatcacttgacgttccatttaaagcaatgctggaaatgttaaaaaagtttcgtgatggtctgattacgtcacatgacattgagcgcttaaggtcgattgcgatagcttcacaggaagctccacacgccgctgtaaccgcttcgcctatacaaagtgttggctatgatgtcaaaaccgctcagaaagccgcacaggggcattcccttggcgatgctcaaaaagtgtactttggcgccaacaccgaatggaaagaaaaaaccatcaaggcttattctggttgtatcgaccgctttattttatggtgcgctaataaaaaaattcataccgtggaagaaataacgaaagagcatgtgatttcatttaaatccagcatggatgaagaaaaattagcctccatgactaaatttcgcataataatatga

SEQ ID NO: 26021 - DNA, 411 bp, Escherichia coli
atggctaatttctttactgatttgaataattatattaaaaagaatccattggtgcatatgaatgattttggaattgatattaaaccaaatgaacatacaccatgtcctgtatgtggcggcgttgatagattcatctggcgtgataaaggtcagtttgcaaatacaggattttgcgctaatgaaggggcgcacaatggacataacgtattgcagccactgagtattatttcagatttcactaagttaaagtataaagaaattggtgcatacataggctttaataaaagtattggttatgctaacccgaatcatattattatgcgaaatttagtcatggaggctaatttttcttcatccatgctggatttaaatgaaatcacatgctctttcgttatttcttccacggtatga

SEQ ID NO: 26022 - DNA, 327 bp, Escherichia coli
atgaccgatataaattacatgcgcgaaaaaatgcgtaagctacagattgaaaaatacgttaatgagaataaaaggctaatcgcggcacagataaaagaacaatcgcagaaagtgcaacttacagggcttgtgtgtggcaatgatgcaattgctttatctggtgttactaaaccaatgttttatgccgccaaacgctttaaccctaaagaatttccgcaagaaattcatcatgaattagacggttatatctggtatcgcaaacaagatatcgttgatttctttgcaaagcatccagcaaggcgatacgggagcaaatataatggctaa

SEQ ID NO: 26023 - DNA, 1494 bp, Escherichia coli
atgtgcacaggaatgtttattgattggtctgctattcctgattattattacactctcgcgattgattattacgcacccgccaactacggtgagtggtctgaatatgatggtataaatgatgaattgtgtgcaattgaattagctgaaattcaattgcaatcagaaaagcggttacgccctgtaattgaaaatctatttaaccgaaaacaggtcggcttcctttatgttgaatccaacacaggcaaatcatttgcggcattatctcttttaaacagagttgcacagggtaaaccgtgggctggtttgcgagttgctaaagaatgccatgctttttattttgatggtgaaacaggcgttgaaatcaaagatcgaaatacagcgtggtctaataagtttaatagtggcgttaaaaatgacagaatgcacatcttgtcaccacaaataaacttatttgataaagaaatacagaatcgaataataaatgatgtaaataaaatcaccaataacaaaggcggcatcatttgttttgatacgctttcttcatttttggcatactacacaaaaaaaagcattgatggaaaaaccattttggatatggaaaatcctgatgaaaatgatgctattgcaatgcgtaagctgatttcgattttgaaaagaattgcagtagaaacaaattcttttgtcttgatggttcaccacggcggcaaagatgcggctaaaggtatgaaaggagccattacccttaaaaatgactctgatacagtcattaaactagagcaaatgcagggtaatgattttgggttatccgtatcactcactatcgaaaaaaaccgtagcgctgcaaaattaccagtgatgcaatttgatttatgcacagcggataacggaattaccgtctgtgaattacatgatattaataatgaattatgcgattatcccgaagaaaatgcaaaaggttatcaggtaaacgccaatactaagacgttggtatttattgataggccaactccagtaattgcagcaggaaaaatagaacgcaaacaagctaatgatgaaccatttatcatgcagcaatcaccgataaatgattatgcgcaaatgcacacgcaacagcggcaaccactaacaacgcaacagcaaaataagcaattaatgcaaaacgctgtaaatgcagaatcatatgaagcaggagttaattttactcaaaatgctgcgcgtaataatactctcgcttacgactcatatatgagcgagttaaaaaagaaaaatgcaccagcacaagaacgagttttagaaatgataatacagttaatggaatttagtgctgatggctgtgtacatgaatccgatttaacgaaggcattaaaaactgagtataaaatgcagctaaataatataaagcgagcaattacagggcttgaacgatgtagattcattatgaataatcgagggataattcatatcattaccccaccagcacagataatgacttaa

SEQ ID NO: 26024 - DNA, 153 bp, Escherichia coli
atgagcgacttaattacacctcgtgaagcacaacttttggctaaaattggctcaaccgctttttatatggctaaacgttttaaccctaaagaatttccaaaagagcatttagttacttgcgataaaaacaaaaaaaacaaagcatctatataa

SEQ ID NO: 26025 - DNA, 369 bp, Escherichia coli
atgcgcgtgcgcacgtcagttatggcggtcacggcgagggagtcgaaaggctcgccagttttgtttgtttgctggtactgcaaacctcgtcgtgatcgtcaccacggggatgcatgtatgcaggaaacagactggcacaaagcggatattcttgcctctttaaagaaaaagaaaatcagcatggcgggattatcccgtgaacatggtttatcaagtagcacgttgctaaatgcacttagtagagaatggcctagaggcgaattaattattgctaatgcaattggtgtgtcacctcaagaaatatggccttctaggtattttgaaaaagatggctctccaaaaaatcgtgtgattcgtaaacctgtttaa

SEQ ID NO: 26026 - DNA, 1152 bp, Escherichia coli
atgcacgagaaagcgcaaacaaaaataaaagatactattagagaaatactaatcactccagcaatcgcttttactggtcgtgcaggtcattttgatttttcattatatgaagttttagcaaatgagcttaacaaaagaaagataaagtttaaaattgataaattatcatgttggattatttttgatggcgcaaaaaaacattactttcaagataaatcaattactgacgcacaagcgataaatgattttgtggatacgttatgtagtatttactgtgaaacacctatggattactccatcgattttcactttagaaatttaaaaatcgatatcaacccgattgattatgagtttgtttcaattagagcgggtgaggatattggtattggtttgttcgctgaaaaagaaaagtatgcgattgcgagcattaaaaagaatggctatctttcaggtggttatcctagctcatttataaaatcgattttgcaagatttgaaaatcttcatttttttgattaaaagcattaatttgattaagacaggaaaaaccaatttagcatccacgttatttcaatcgatgtccggtcatgctgacacaattaagattgattgcgttaatgttaaatatccttggatgaatagcagtgtccatatttcagagtcggtagggaaatttttacacaactttatcttcaattatgaatttgaagaaggctacattatagaaaaaatagatcattcgcttcagctaatgaatgcaatagtaaaagatgagtcaaaagaagccttgcgtatcaaggctgcaattgattggttggtgcaatctgaaatcactgatgatgaaaccatgtcttttattcaaatttgcatggggcttgaatcaatttttggtgatgatgattatgagggtggcctaacaaacatactatctgatagatgcgcctacttaatagggaataaaattaaagagaggagatttataaaggacacatttaaaaaaatatatcaagttaggtcaaagatagtgcatggcgtaagaaatcatttatcagatgatgaattatattttaggcatttagcatattcatatttagagcgttctattctaaaagaaattcaaaatttagacctgcaatcccatcaggcgacgtga

SEQ ID NO: 26027 - DNA, 444 bp, Escherichia coli
atgaacaaatatcttgcatcttctgtactaatttttaccattctaaatttgactggatgcgcacagcgaagtgacatcataaacaacttagacaagtactcattaaatcgtgaagcatctgaagttataaatgaaagcgatgatggattttacacttgcacaaatgaacgtgatgaatcatttagctttacgataaaaggccgatatcttgcccacattaagcgcgttggaacgggcattgatgatagcgcattaaatggttatcaatattggggaatgcttaaagaagaaaacgaaaatgtgggagtttatggaattatggattcagtatttccaccagcactaaaaatgctctacttgaaaaaagataaaaatggacgcctcaaggctttcgaaaccaccaccagccatattccacacctcgccaacttttaccagtgctga

SEQ ID NO: 26028 - DNA, 360 bp, Escherichia coli
atgatcaagtctgtcaatacatcccctttaagcaaagaggatgctcttatacgcatcaaacaagctgaagctaacttactgaaagctaacgaaaggttagattacctaacgaggaagacatatttaattcaaatcaccattaataataaaatttattttttatgtgatgatgattctttaagtgaaaaattcggcagggcaattaaattcaaacgtaaatgcgatgcaagccaggaattaatgttttggtttgatagaattgatgcggtcgatagccaaaacctaaaatgtgaaattgtaattgaaaaagatttacttagaaattttatctcacacactaaaaaacaaattaacaaataa

SEQ ID NO: 26029 - DNA, 156 bp, Escherichia coli
atgccttctaaacgtgttatatgctcacttgatgagcaagagttagatattctcgaaaaatataaattacattataaaaatatgcatggcgtaaaattaaacagaacggcaattatcaaaatgttgattagtcgtctatcaaaagaaattcaataa

SEQ ID NO: 26030 - DNA, 315 bp, Escherichia coli
atgcacactcttttttctaaatttaaaaacaggaaaattaaaatgtatcaaccacgttataaaagcagaatgattgacgataatgaatataatcaggtgcttcaatcgagaatgcaaaatcttttaaatcaatataataatgaggtttcaaacttaacccgcattggtgttacaaatttgggtttcggccgatgggataatggagagagcaaaatcaataaccacgttaataaagtaagtgagactttggaaaagatgcaatctacgcaagccttgattgatgctcttgcaaatgaaattacacaaactaattaa

SEQ ID NO: 26031 - DNA, 285 bp, Escherichia coli
atggttaaatttggagtgttttaccatcatgcatggggtgatggtaaaaaggaaatcccgccacctgatttaaattacatccgaaccgatccacataaaaataatgaaattgctttagatgtttttgattcaagaatggacgcacaaaaacgcgctgatttactaaattcacgcatggcaaaaaatcaaactggtcagcattatgttgcgccaacaacgcaagaaaccaaaacggctcaaaagcgctttaagtttccttgtactagcatttatgggtggaaatga

SEQ ID NO: 26032 - DNA, 375 bp, Escherichia coli
atgagtaaacaattcggtgttttcttttggcgaaaaggtgacgctattaccgatatcccgtcagataaaaatgttgcaaatcgcggagtaaagcctaagcgcattttttcagattatattgatggaatgcgatataaagataaaatgaatgcaacaattccagcggcgcaaaaaggtaaatatgaatatgtattagcggaaattgttgaaccagacccgaacaatacaaaggtgttgtttaaatctggaaatttaacagaagcattaagggcgaagcgacaaacaaccgaacaaatcaaccgaaataaaattgatgcaatgattaaagaagccgcacacgattacctttacactattacaggaatggaaaaatga

SEQ ID NO: 26033 - DNA, 300 bp, Escherichia coli
atgattattgacgagcgatttattaaatggtcaatggtgctggtggaggccggaaagccatcacccagcctcgcggggctttataaaggaaacactaaaggattaatcttttataaaacacgtgaattggcatcaaatgcagccactaaacggaatgagcaattagcaggaactaaatcaaccagccgatttaaaatcattaaattgcatgacgcagaagcacaacagaaacatgattttcagttaaaacaggaacgccagcgccgcgatgcacgccatatgcgccgatttggtttctaa

SEQ ID NO: 26034 - DNA, 1989 bp, Escherichia coli
atggcaggtgaaaatgctcaattgggcttttccgtcgatacatcggaagtggaaacagcatcaaaaaggcttaatgaattagctaaatcagcgcaaggggcggctgattcggctggcaaattatcagattcatttgaggaaagtatgaagggtgttaattcatcaattacttccaatcatcaggctatgcgcgaattaacggtaatgatgcacgaagcaatgtctggtaattggtcgcgcttgcgtggttctgcaatgattatgggcggcgcattgggatttggtggattaactagcggtgcggtagttggtggaattacgcttgtttcggaaggcattgaatcgctaattgaaggaatgcgagaagctcaaaaagcagaaactgaattaaataattctgctgtaattacagcagatgtaagccttttaaatagtgattatgttgattcacttactattggttatgagaaattaggctattcagcaacacaagcaaaaggcatgattgcagcgttaagtaatgcgggtatgtttggtgatgaatttagtgttgcaggtaaacaaattgccgcactatctaaagcgttaggcggtaattcagacgaacaaaaaaaattagctggtcaatttggtggcttgtattctgacccgctaggacacgttaacgaatttttccaagtaacaaacggatggattaccaaaaccgaacaaaaccgaattaatgcggctgaacaatcgcataattcagcacaagctgaaatggctatgcaagaagcgctattagatgtttataagcgtcaaaccgatatgctacagcttaaagcctatttggaaactaacgccgctacatattcagcctttcagacgcgcgaacaattcggcagcgcatggggtaagggcgaaaaagaaaaggcagacgcatttatcaagcaatatgacgagcgccagcaatcatttaatcagggcgttgaaaagctaaaaggaagcattcacgaaacaggacgccagataagggaaaatgtagaagaatttaataaaggaatgcatccccataaagtgcatacacaccacggattaacagcaattgagaaagcagctaaacaattggtgacctaccaaacccaaattaaacaggctggtttgcaatttgaccagcaaattaattcaattggtgattcagtaaataatgcgtggagtaataaattatactcttattcaatgtcttctgaccagaatgattttgcaaaccgaattgaacaaatcaatgaacaattcgaccgtatgcgcgaaaatgtagaccgtttggcgctgcaacatcataaatcaattggttcaaaagaatatgttgaaatgttccaaaaaatcgaattagggcgcaaaaacgtattggctgaaaacgttgctggatttaatgaaatggagtcattgcagcattcagcgctggcgggaatggatgagggatggattaaataccagaagcaggttaatgatgttgcaagccaatcagagaaagtttttgatacggctgttgagggaatgacaaattcattaactgatttctttacaactggtgaggctggttggactaattttgtaaaatcaatcgcaacaatcactgaaaaatacatggttcaagattggattgttgagccgctagcaggattagtaaaaggggggattagctcgctattttcatcaaatccattgagttcaacggctaacacttttgccgttcccgatattccaaaattgggcgcaactcatttaggaggcggtctaggttcgaccgcaccagttatcaatatcaccattaatgacaatggcaacaaaggcggcgttgatagcaatgttagcggcacaacagggcaagtacaaaaaatgggggcggcgctagataaattcctgcaaaactatatcaaagagcaaaacgtaaaatccaaccgtcagggcgggttaaacaaaacaatggggaactggtcgacaagataa

SEQ ID NO: 26035 - DNA, 618 bp, Escherichia coli
atgagtggacgaataacaacaatatgcactgtattaggtgttgcaattggtgctataggtctatatttaccatatagaggtgaaataaatgaagcactttatcaaaaagaatttctaacaggcaaatggtcgacagacgctgaatatataataaatagtggagatcttggcttaaataaagatcaaccacttgttataatacaatttatcgccaattctgatggttcaattgatggtgaaataatatctgaaggtttatgtgatgctatgccaataacttggaatataacattaaatagtgaacctccgtcagtaattaattttataatcccaaggaagtttcaagttcgccaactaatagatggttctatggataaaagccctattgttgccactttaaaaaaagttaatgaagatcgaaaacataattcaataacatttgatataaccgatgatgctaccggaactttaccaaagcaattgacggtagctaaagatctccctaaatttgaagaaaactataagtatctgcaaaactactgcgctgattccactacgaaattctataagaaagtattgccagaacttagaaagatgagagaaaatacagcaaattaa

SEQ ID NO: 26036 - DNA, 582 bp, Escherichia coli
gtggctgacgcgagtattcgtactcctgataataaggtcatattagagaacctgaactttcatgtttcgccaggcaaatggctattactgaaaggttactctggtgcgggaaaaaccacactgcttaaaacattatcccactgctggccgtggtttaaaggtgatatttcgtctcctgctgacagttggtatgtgtcacaaacaccgttaataaaaaccggcttactgaaagagataatttgtaaagcacttcccctacccgtggatgataaatcgttgagcgaagtactgcatcaggttggtctggggaaattggctgcgcgtattcatgaccacgatcgctggggagatattctttccagcggcgaaaaacaacgtatcgcgctggcacgattaattttacgacgtccgaaatggatatttcttgacgaaactacctctcatcttgaggaacaagaggctatccgcttactgcgtttagtgcgtgaaaaactaccctcaagcggcgtcattatggttacacatcaacccggtgtctggaacctggccgatgatatttgtgacattagcgcggttttataa

SEQ ID NO: 26037 - DNA, 198 bp, Escherichia coli
atggatgacaaaccattgcaggctctggctaataaattcaaaacaccgactcaagaaagtcagcgtaagggcttcttccgactgcaacaggtgaagaaaaacctgccccatattatctgtatacccgtcaaccatcaggggcccctgcctgacatcgcccgaacatattcccccacgcaacctgccgcgctgacgtag

SEQ ID NO: 26038 - DNA, 1776 bp, Escherichia coli
atgtcaaccggattacgtttcacgctggaagtggacggcctgccaccggacgcgtttgcggtggtctcctttcatctgaaccagtcactctcttcgctcttttccctcgatctctctctggtcagccagcagtttctctcccttgaatttgcgcaggtgctggacaaaatggcctacctgacggtatggcagggcgatgacgtacagcgccgggtgaaaggtgtggtgacctggtttgaactgggggagaacgacaaaaaccagatgctgtacagcatgaaggtgtgcccaccgctgtggcgcacagggctgcgccagaacttccgtatcttccagaatgaggacatcgaaagcatactcgcgacgatcctgaaagaaaacggggtgaccgagtggagtccgctgttcagcgagccgcatccttcccgtgagttttgtgtccagtacggcgaaaccgattacgatttcctgtgccggatggcggcggaggaaggcatcttcttttatgaggagcacgcgcaaaaaagtaccgaccagagcctggtcctgtgcgacaccgtgcgttatctgccggagtcctttgagatcccctggaatccgaacacccgtaccgaggtgagcaccctatgcatcagccagttcctctacagcgcacaaatccgcccatcttccgtggtgaccaaagactacacctttaaacgacccggctgggcagggcgttttgatcaggaaggccagcaccaggattaccagcgcacacagtatgaagtgtatgactaccccggacgtttcaagggtgcccacgggcagaactttgcctgctggcagatggatggctggcgaaacaacgcagaagtggcgcgcggaacaagccgttcgccggagatatggccgggacggcgaattgcgctgacggggcatccgcaggcgaacctgaaccgggaatggcaggtggtggcaagtgaactgcacggcgagcagccgcaggcggtgccgggacgcaggggttcaggtaccacgctgaataaccactttgcggtaataccggcagacagaacatggcggccacagccgttgctgaaaccgctggtggacggcccgcagagcgccgtcgtgacgggaccggcaggagaagaaatcttctgtgatgaacatggccgcgtgcgggtgaaatttaactgggaccgctataacccgtcaaaccaggacagttcatgctggatccgtgtggcacaggcgtgggcaggcaccggctttggcaacctggcgataccgcgtgtgggtcaggaagtcattgtggacttcctcaacggcgatccggaccagccgattattatggggcgtacctaccaccaggaaaaccgcacccccggcagcctgccgggaacaaagacgcagatgaccattcgttcgaaaacctataagggcagcgggtttaatgaactgaagtttgacgatgcgacagggaaagaacaggtctacatccacgcgcagaagaacatgaacaccgaggtgctgaataaccgcaccacggatgtgataaacaaccatgctgagaccattggcaacaatcagatgattgcggttaccaacaatcagatacagacggtgggcgttaaccagatagagacggtgggcagtaaccagatcattaaagtgggctctgttcaggtggaaacgattggacttgttcgtgcgctgactgtgggcgtggcgtatcagacgacggtaggtggcattatgaacacctcggtggccctgatgcagtcctcgtag

SEQ ID NO: 26039 - DNA, 312 bp, Escherichia coli
atggtcgggctgggttatgacgtcaaagtcggaaataacgttaccttcaccgttggtaaaacgaaaaaggatgataccgggcagaccgcgatttactccgccggtgagcatctggaactctgctgtggtaaggcaaggctggtgctgactaaggacggacaaatttttctcaacggcacaaaaattcatttgcagggtaaggagcaggttaatggtgactcactgttgattaactggaactgtgcagcctcgaaatccccaccgaagacccctgatgaaaagcaggatacgccggatatgagagagtactga

SEQ ID NO: 26040 - DNA, 1602 bp, Escherichia coli
gtgcaggacagcattagcacaaaactgtcttttgtggataacagctggcccgttgaacagcagaaaaacgtcatgctcgccggtggcgataacgcgctgatgttgcccgagcaggcgagcaatatccggctacaaagtagtgaaacgccgcaggagattttccgtaacaatcttgatgcgttagtcgatgaaccgtggggtggcgtgatcaacaccggtagccgtctgatcccgctcagtctcgcctggcgttcgcttgccgatcatcaaagtgccgccgctaacgacattcgtcagatgattcaggataaccgtctgcggctgatgcaactggcggggcccggagcgcgctttacctggtggggtgaagatggcaatggtgactccttccttacggcatgggcatggtacgccgactggcaggccagccaggcgctcggcgtaacgcaacaaccggaatactggcagcatatgctcgacagttatgccgagcaggcagataacatgccgttattgcatcgggcgctggtgctggcgtgggcacaggagatgaatctgccgtgcaaaacgttgttgaaagggttggatgaagctatcgcccggcgcggaactaaaactgaagatttctctgaggaagacacccgcgatatcaatgacagcctgatcctcgatacaccggaatctccactagcagatgcggtggcaaacgtcttaaccatgacgttgctgaaaaaagcgcagttgaagtccactgtgatgccacagattcagcaatacgcgtgggataaagcggcaaacagcaatcagccgctggcgcacacagttgtgctgctcaatagcgggggcgacgctacccaggcggctgctattttaagtggtttgaccgctgagcaatccactattgaacgcgcgctggccatgaactggctggcgaaatatatggcgacaatgcctccagttgttttgcctgcgcctgcgggcgcatgggccaaacataagttaactggagggggcgaatactggcgttgggttggtcagggcgtgccggacattctctcttttggtgacgaattatcgccgcaaaatgtgcaggtccgctggcgtgaaccagcaaaaacggctcaacaaagtaacattccggtgaccgttgaacgccagttgtatcggcttatccccggtgaagaagagatgagctttactctgcagccggtgaccagcaatgagattgacagcgatgcgctgtatctcgatgaaattacgcttaccagcgagcaggatgcagttctgcgctatggtcaggtggaagtaccgctcccgccgggggctgacgttgagaggacaacgtggggcatttcggtcaataaacccaacgccgcgaaacagcaggggcagttgctggaaaaagcgcgaaatgaaatgggcgaactggcctatatggtgccggtgaaagaactgacgggaacggtcactttccggcatttgctgcgcttctcgcaaaaagggcaattcgttctgcctcctgctcgttatgtgcgttcctatgcacctgcacagcaaagtgttgcggcagggagcgaatggaccgggatgcaggtgaaataa

SEQ ID NO: 26041 - DNA, 1650 bp, Escherichia coli
gtgaactggcgcagaatcgtctggctattagcgttggttactctgccaacgcttgcggaggagacgccgttacaactggtgctgcgcggtgcgcagcacgatcaactgtatcagctgtcgtcatcaggcgtgaccaaagtctcagcattacctgacacgctcaccacgccgttagggagtttgtggaaactgtatgtttacgcctggctggaggatacccatcaaccggagcaggcctaccagtgtcgtggaaactccccggaagaggtttattgttgtcaggctggggagagcataacgcgcgataccgcgctggtacgttcctgtgggctctattttgcgccgcagcggttgcatattagcgcagatgtgtgggggcaatactggcaacagcgtcaggcacctgcgtggttagcgtctcttactacgctgaagccagaaacctcggtaacggttaaatcgctgcttgattcattagcgacgttacctgcgcaaaacaaagctcaggaagtcttactggatgtggtgctggacgaggcgaaaatcggtgtcgcatccatgctcggtagtcgggtacgggtgaaaacctggagctggtttgccgatgataaacaggaaatccgtcagggtggttttgccggctggttaaccgacggtacaccgctgtgggttactggcagtggcaccagcaaaacggtactgacccgttatgcgacggtgcttaatcgggttttgccagtgccgacgcaagttgccagtgggcaatgtgtagaggtggagctgtttgcccgctatccgctgaagaaaatcacagcggaaaagagtacgacggcagtaaaacccggcgtacttaatgggcgctatcgtgtgacgtttactaatggtaaccacattacgtttgtcagccacggtgagacgaccttactgagcgaaaagggcaaactgaaattgcagtcgcatctcgatcgtgaagagtacgttgccagagttctggatcgcgaggcgaaaagtacgccccctgaggcagcgaaagccatgaccgtggcgattcgcacttttttacagcaaaacgccaatcgggaaggcgattgcctgaccatccccgacagtagcgccacgcagcgtgtttctgcttcgccagcgaccacgggggcgcgaacgatgaccgcctggacgcaggatcttatctatgcgggcgatccggttcattatcatggcagtcgcgctaccgaagggacgctttcctggcggcaagccacggcccgggcggggcagggagagcgttacgatcagatactcgcgtttgcttatcccgacaatagccttagccgctggggagcgccgcgctcaacctgccagttattacccaaagcgaaagcctggctggcgaaaaaaatgccgcagtggcggcgtatattacaaggcgagacggggtacaacgaaccagacgtgtttgcggtctgtcgtttagtctcaggtttcccctataccgatcggcagcagaaacggctgtttattcgtaacttctttacgcttcaggatcggctggatttaacccatgagtatctgcacctggcctttgatggttatcccaccgggcttgatgagaactatatcgaaacgctgacccgacaattattaatggactaa

SEQ ID NO: 26042 - DNA, 126 bp, Escherichia coli
atggacagttttccgtacgaacaacaagaaatgaccaatctgccgacgcttgttaatggttatatcctggcgtcggcagatcgcccagcagtcttatctgaaaaaagagagagccaggttgtgtga

SEQ ID NO: 26043 - DNA, 465 bp, Escherichia coli
atgcgaaagaatctgagatacctttttggacaacgagtaaaagagttccgtatagctattggcttaagccaagaggcctttgcagatcggtgtggttttgcacgtagttatatgagtcgaattgagcgtggttgctctaatgcatctcttgatgcaattgaggttctggctgacgctttgcgtattgagccttggcagttactggcttctgattcaaggaaacctgatgatcaggaggtacttgttccttatgctgcagatgggtcgtgttttcatccaggattggcaagtactcgcgatggttcgtttagagtaggggaaaaatcagcccagaaacgtttcagttcgttcaatgaagctctcgaataccttcgtggaatggaaaccgcgaagtggcgtaggcctaatgctagtggtaattggggaattgtatctgcggttaaatgggatcgactgaatcaataa

SEQ ID NO: 26044 - DNA, 552 bp, Escherichia coli
atggctaatattggatacattagggtatcgactgtgcaacaaaacacagaccgtcaattagcaggagtaactcttgataaagtctttgaagataaagcgtcaggcaagaacactcagcgcccacagtttgaggcaatgatgaactatgtgcgggagggtgacgtgttacacgtccatagtattgatcgcctttgtcgtaatacagccgaccttctggcaactgtagagcaattaacaaagcgcggcgtgtctgtgcatttccataaagaagactttaagacaggaaagaactctcccgcagggaatatgatgctcacagttcttgcagcagtggcacaaatggaacgtgaaatgatgcttgagcgtcaacgtgaagggatcgccgcagccaaggccgctggacgtatagcaaaacgtggtaatggaaaagcaattgatcgagcgggaattgctgccgctctcgcgaatggtggctcaattcggagcgtagcaaaagatttcagtgtcagcacgcagacggtgcaacgtatcaagaaagagcaggtggcgtaa

SEQ ID NO: 26045 - DNA, 1506 bp, Escherichia coli
atgaatcaactaaaatcaatgaatatcaataagttacttttggatgttgataaccctcgtttcccgacgtcagcagaaaatcagcgtgatgctattgccaagatgcttgacttgcagtacgaccgcatttatcgcttggctaaagatattgcttcgaaaggtttagatccgtctgaaaacatattagtttatcctagtgaagaggaatctggctttttcgtcgttgctgaaggtaatcgtcgagttacagcccttaaacttttacactctcctagacttgcaccaacagaaaaagcacggaaagcttttgaaaaacttaagattactcagcttaaagatattaatgttatagataactgcgttctttttgacgatgatgaatatgagcattgggtcaatttaaagcatactggtcaaaatgctggagttggaagagttgaatggactgcaacagaaaaagcacggcatctggctaggatgggtaagcagtcatttggtaatcaaatacttacatttatagagttcaatactgacttatataaagagataattgctaaaaaaagacttttaaaaatcacaaacatcacgcgtctttttggtgatttaaaggtgagggattattttaatttaaaaagcattaatggagttctatactcatatcagccttatgaacgtttttgtgcacaattaaaaaatattttagatgtaatgattgaagaggatgataaaggtaaggcttgttttactgttaataggattcgtagccaagatgacagggttacatttattattgaacaaaaaataaaaccttcagaatctcttttagataagccgtggagtttactggagcctaaatcttttcttacagagaaaaaacatgattctattgacaaaaatgatgcatctgtgagtgtaaagaaagtaggtctttcagaaggtgatgccttaaagaatacaggtatggataaacaggaagatgattattctagacatgtaggcacagaagagagtaaatctaaagtttcgggtacggaacagaataaaagcaagggaaaaactcctcctaaagtagatcgtaatgtgttggtgccatcttatgtgaaatttaattttagagggcataagaaatgctctagaatatttaatgagcttaagtcgcatctgacatttgataatacccctaatgctatctcaatattgttgagaatatttatagatctctctgtaagcacttttgttgaagaaaacaagttacaatttaaggaaccgcatagaactccagggcttcatgataaggttaaaatgtgtgctaatttccttcgggaaaataaaaagatgacggggagtcaatgtacggctgtaataactttctcgagccaaataactaaacatgatggttcattgcagcagtatgtacataacccacacttaattccctcaaaagaggctgtcaacactgagtgggataactttgagttgttattaagccttatttggagtgagtga

SEQ ID NO: 26046 - DNA, 885 bp, Escherichia coli
atgaaattttatactccattaagataccccggcgggaaaggtaagttatcttactttttaaaagatgttattgaaaaaaactcgttgaatgatggagcatatgcagaaccttacgctggtggtgcaggggtggctttagaattattattggaagagtatgtccgtaaaatctatataaatgatgcagattttgctgtttattctttttggtcatctgttgttagtgatactgatgagctttgccgacttattagccgagcaaagatagatatggatgaatggtcttttcatcgctatgttatttcgaatccttctgagtttactaagcttgaggttggctttgctgcgtttttcttaaatagaacaaatcgttcaggtattctcaaggcgggggttattggtgggaaatcacaaaatggaaaatggaaaatggatgttcgctttaacagggcggatttaatttccagaattgagaagatagcaaattataatcaaagaatagtagtaactaatctggatgctttggattttcttgatgccttgaattttatggataatatgggaaaggtggataaaaataaaattcttttgtatttggatcctccttactatattaaaggacaagggctttacaggaatttttatgagcatgatgatcatgtattggttatgaagaaactcacagaaattaatttcccaaattggcttgtttcttatgataatgctaaggaaattaaagatatttataatgaatttccgcaagttgagtattcattgcaatatacagcgcatctcaaaaaatctggagaggaagtgatgattttttctcctgaaataattattcctaataccctgaaaggggtctcaatgccaacttgcgcctga

SEQ ID NO: 26047 - DNA, 312 bp, Escherichia coli
atgtgtccatgtcatgccattgttcgcaggtttgtatgtggcagcaccaccaagccggatatcccggacatagcgggaatcaaagttaccgtaatccgagggattaacacgccccgtaatatttatggttttattactttgaatacttcccgagacaaagcgcataacatggacgctattagcataaacatccagattaccatcaccattttgtttaaagcccgtgtcattatcacccaaaacaatcgaattaccgccaagagcactggatgttcctatacccagagcaccattcaattgaccaccagataa

SEQ ID NO: 26048 - DNA, 435 bp, Escherichia coli
gtgcactttgatcaattccacgggtgcgccgagggctttaaagcgggcttcaatggcgtccaccaccggccccgccgcgccgttcccggagttgatcaccagcttgagcggcgtgaggtttttgacgttgatataaccgaacaggtgatcaacgtaagcgtcacgcagattgatttgctgatagcgaccgcgtttggtttcatcgacaggagggaagtcattggcttctgccagacgctggacgtcgcgcagtccggtatcgccgctgatcgggcgagccccttcgcgcaccagcttcatgccgttgtaatccatcgggttatggctggcggtaacttcaatgccgccatccacgctgagatggaacgtggcgaaatagatctcttcggtgccggacatgccaatatccagcacatcgacgcccgcatcctgtaa

SEQ ID NO: 26049 - DNA, 222 bp, Escherichia coli
atgaaaattatcagtaaacgcctggcgatgacgatttaccgtcagcatccggcctcccgcattgttcgattctgcactggcagataccagtggcatggcagtgtctgtcaatacaccgttaaggtggttcctgacatttccagtgtgctggcggtatacgtcgaacgccgccaggatcgcaacggaccttatacctgtctggtgagtattaccctgaactga

SEQ ID NO: 26050 - DNA, 480 bp, Escherichia coli
atggcgaaacaactgactatgtttacacctgaactgccgttaccagcactgcgtaccattaagcgagccttggttctgcttgaccagcacttgctagaaccgggtgtggcattcacctcgactcaggctgcccgcgactggctcaggctgaaaatgggcccccttgagcgcgaagtgtttgtcgtgttgtacctcaataaccagaaccagctgcttgcccacgaaacgctctttaccggcaccatcagtcacactgaggttcatcctcgcgaggtggtgaaacgcgcgctgtactttaatgcggcggcggtgatatttgcccataaccacccgtccggagaagtgactccaagccaggccgacaaggctatcactcaacgactgttacatgcactgatgctggtggagatccgggtgctcgaccaccttatcgtcggtggtacgcagatattgtcgttcgctgaacatggtctgctttga

SEQ ID NO: 26051 - DNA, 273 bp, Escherichia coli
atgacaaaatcagcatcaatcaacaaaagtcacgcaaacaacacacgcctgaatttcgtgaagaagcccttaagttggccgaacgtctcggtgtggccactaccgcccgtgaactcagcctttacgattcccagctctacaaacaactgcaccagacaatatcctctgagagagagcgcacaagcagcggagattgcctgcctcaaacgtcaactggctgagcgggataatgagttggctattctccaaaagggcgcgacatacttcgcgtag

SEQ ID NO: 26052 - DNA, 126 bp, Escherichia coli
atggattttgagttcaccaagcatgacaacttgcgttcttcaagcgatcctgagaagcctattatattagtgtacaagatgcctcacgtggcaccactgaattttacattagactctatccattaa

SEQ ID NO: 26053 - DNA, 1734 bp, Escherichia coli
atgtacatagcaaaaattaaatttacaaatttcaaatcattcaaagagatgtcttttgagtgcaatgataaattcaacataattgttggtgaaaataatattggtaaaagcacattatttgagggggtaagtttatggaaatatgcttatgacaaccttattcaagaaaaaaacaaaaacaaattctacaaagcttcaactaactactacattacctattctacactcgatcaaataagacttgttgacgatattgatatttttaacgacccaaagaatagctccgcatcaatatgcattacaattaaagatgaacaaaatgaatttgatttagagattagatttgaaaagccagggattaaaaattcatacttacggatatttaatagcaatggttctgataatgacacacagttttcaaactttgaacgattctcaaactatataaaagaaaaggattgcactctaaaagatgccatttacatttaccaaacaagaccaatatcaactatttttagagatgagccattttacaataatgcgcagatagagaaaaaaataaatattggaaagtcacatgatgtcttaaggaataaaatattaaaaaccgaaaatactcaagccacaagggttgcacaaaaatttgaaaatcttgagattcgcctacaaaaagtccttggtgaaaactatatcttaaaatttaagaatagaaatcgaatcgatgatgagtatgttaaaataactgcaacaaaggaaaacgggaaagaattggaaatatcacttatgggtagtggttttttgcaagtcttagagatattttcaacaattgagtatatggaaaagaattcaaccggtattaacctcattcttatcgatgagcctgattcacatatccactcaaatttacaagcaaatttaattgacgaactaaagcaacaaacagcatgtcaaatttttgtcataacacataatgacagactaacatcaaaagctaatgaaggtgagcttttttatctaaatcagatagttaaggatcttggtttattgtctcaccttgaaatatctgattattcaaaagttaaagatggtctagctaatgtactaacagctataaatgatggagatgaaacacccattgttataactgaaggaaaaacggaccagaaaattttaacaactgcttgggaaaagctaaacccaggaactcctatgccttttaaaataatttcatccggcattcaaattgaagaggaaaaaagaactgggtgcgcagaggcagttagaagatctttagaatacatttcaacattaactgatagaacaattatcggtttatttgataatgatcgggagggaaatgagcagttcaaaggattaaatcgttctatttttgaacctcatgacctgcaaaataactcccgaaaacatcaggtaaaaaatatctatgggcttattcttcccgttcctgtgcatagagaacgttttgtacaaaacaattctttaacgcagcgttacttcgtaattgaacaatatttccaagatgaaatattactacagcataacatgaaaggtgagtcaatattaggtactgaggtattttttgttaatgactcaagaaagaatgagttttcagagtcaaccaatgaccttccggtagaatgctttggggattttagtattttattcgataaaatttccgatttattggctaacaatagaccagaaaacacttga

SEQ ID NO: 26054 - DNA, 411 bp, Escherichia coli
atgctgaaaataatgacctctgctgtacccgccctcattctgtcacttgccgccttcagtgccggtgccgctcagcttccggcaagtctgatggataaagataatcccggtcaggagtactggtgccagggaaacgacatcaatacctccatgtgctcactgaccggtgtcagcgacgaccataaatttgccctgattcaggacctgccgggcccggcctgtgaggacttaagcttcggggttattgatctggtgcgtcagacaggtgtcaatattccttacgacggtggtgactgtaagggcgatgtgcaggccggttttgtgcgaggcacgaaagataatgccctgtatgtgaaaattgtccggggcagtaaaacactattgatgtacaaggttaaaactggttactga

SEQ ID NO: 26055 - DNA, 438 bp, Escherichia coli
atgaaaacactgattaaagtactgggtattaccggcagccttctgctctgtgtgggcgctcaggctcagccttataaccgaacgctacctgcagtcgtcaatgacaacaacgggaatattttctggtgtgatgcgcatcgacaggttaccggaaaatgtgaagccatgtctgttgaccgcctgggtgggatggtaacagttcgttcagcaccctttaaggactgcgaaggcggcctgtggggctggataactatcatgcacaacgatgtgtcgaagggattcaccattactccggataggaaattcggtctcaccgtaaaagatctgtgccgtccgggcacggtagtgacctttaagcccaaccagaagaagccggaatatgacgacctggtggcactttaccagggcaaagagctgtttcgctaccggcgcttctga

SEQ ID NO: 26056 - DNA, 537 bp, Escherichia coli
atgacctggcattacgagaaaaatggcatacgtcacgacaatgtgaccgaagacgacatcactaacctgattaagcgcggtgaactcaccgctgccacgctggtgtggcgacagggcatgccggactggcaaccggtctccgccaccccgctggcttcggcgctgctccacagcaccacaccgccagcgctgacggggaaccgcattccgggtggcgttgtgtggacgcttgcatttgctcccttcattggctacgcgctggagttgtggactgcaggattgagcgggatgtcatttgacgaggcatatgatgccgtctcgggtgggcagtactggtttatcacgctgctgctcaatatcgctctggggtatctcgatgaacgacgccttcgtaaggccggagtggacactaccacgttcggcaaactggcctggctggtgccgttctatttgtggcggcgggcgaaaactctcggtcagaaaccggcttacttctgggtatggcttttgatgctgggcctgaccgtctgggcctga

SEQ ID NO: 26057 - DNA, 864 bp, Escherichia coli
atgaaaaaatctgaaggtttgcagtcgctgcagcaatcgctttctggcctgccgcagtgggcatcagagcgtattctgcaacaggtaaaccagcttactcactatgagccggtgatcggcattatggggaaaaccgggtcgggtaaatcatcactctgtaatgcgctgtttgccggaaaaatctctccggtcagcgatgtgagcgcctgcacacgcgaacctttgcgctttcgcctgcaagttggcgaacgctttatgaccatagtagatctgcccggtgtcggtgaaagcaaaagtcgtgatgcggaatatgctgcgatgtatcgccagcaactgacgcaactcgatctggtactgtggctgattaaggccgatgatcgagcactagcggtggatgaacatttttacctgcaggtgattggtgaagcataccggcataaggtgttgtttgttatcagtcagtccgacaaggttgaacccaccagcggtggtgaaaagctgtctacagagcagaaacaaaatatcagccgcaaaatctgtctactgcatgagttgttccaacctgttaaccctgtctgtgcggtgtcggtacgtttgcaatgggggctgcgggtaatggctgaacggatgattcattgcctgccgcgggaggccagtagtccggtggcggtacagcttagtgatccacttcgtaccgatgccattaataaaaaagcccgcgacgattttggtgaaacggtcggctcggtactggatacagtaagttccatgcccctgataccgtccccggttcggactgtcatccagtctgtacgcgacatcgtggtatcggtcgctcgtgcagtctggaacttcttcttctga

SEQ ID NO: 26058 - DNA, 1059 bp, Escherichia coli
atgagcaaagagaaggcgctgggcgctcaagaaaaatacaagttattaaaaaagaagctgaggtggcttgataaaaatccccgtgccgcatgtttctattttttctatattgctcgttttctgagtgagtggaggtcagcagttgttcgccaggatcatatagacgaacccagtcagatatctgctagggctctggggacggagtcaattgagctaagtattgaaaaaaataaagcagcaacacttccaggaatgatgccagaatttaattttaatcaaacaaatgaaggtaagggttatgaaggtgatgagctgttagaaaacatattaaacacaaaccttgaatcagcttctgaaaaatcaaccctgggtaaaatgtccactccaaaaaagatgatgccgccagatttttattacgccaatgggatttactcaccattcatgagggaaatggcaactggagttgatgatgtttttgagtgtgtattaagagaactctgtgatgcagaaactgaaacccggcgcaagctaataaaagcaataaatactgcatggggacaggcctgtggtgactttcctgaagctttttcatggctggatatcaatgatgaaaaacagtgcttgtgggtatggaacctgatgaaaaagaaggcggtttgccctccgataaatccgctgaataactatcaacgctggctttttatttgtgctacttttgatcagtgggagggctggactcatgagcaactgagttatttaaagggaaatcgaaaaaaaatgagtcagaacttcgctgatttactgacgcttccgcgctctcccctgcgacataaagcagtcctgatgggtgaactgcaaaaagcctgggatcagaaactgtttcgcagacagtctaaagagaacgatatgacaataaaaatttcagccagaactaaaaagaaactcgccagactgtcagaaatatatggtgagtctgagtcagatttaatgtcctcacttattgaacgtgagtatgccggattaatggtaaaaacagaaaaagtcagggcgcattcctga

SEQ ID NO: 26059 - DNA, 213 bp, Escherichia coli
atgaccagtaaaccttccttgtccgaagaccagttcgttgatatggcttttatcacccgcctgctgggggtcagcgataaatggatttaccgactcattaaggatggcatatttccaaaacccatcaaactgggacgaagctcccgctggttacaaagcgaagtcgaagcctggctgcaggcccgtattgatgcatcccgccctcaacactaa

SEQ ID NO: 26060 - DNA, 534 bp, Escherichia coli
atgaacaattcacccttactcaaccattaccaggcctggctggatgattttacccgcgtcagtctgttccacggtttatgccagaagcacatctcgcagtggcacaggctggcgataaccgcctgcccgatgccaggcagtagcgtaacagaagtcgtcattccacagtgtctgctgccggttacccgcaccagtcgactgggatcatgtactgtcgcccccggtctgactaaacacatcgattatgcccttctgcccggtgtgctgctcagcgaatgttatcgactggggaaaagtcggctggcagaccagttacagatgttattccggcttaatgtacagtccggtatgcgccaggcgctgatcctgctgtgctggtgtgagctggcaacaggtaaggatatggaggaatggtatgcgctgcatctgccactgcctgacacgctgacgcaatggttggcagtaaaacagcgggcataccggggactgaagacgctgactgacggttacattcgtgccacccagccgatgtga

SEQ ID NO: 26061 - DNA, 384 bp, Escherichia coli
atgctgataccaaaatgctatattgcacagcgtaaaaccggtgagattttcgctgtcagccaactgaattcaggcgatgaagagtggttctgccatcactgccagtgcccgttgattttccattcccccaccataacgtcaccgccctggttcgaacacgacatacttcagggacaaccagaagcactgttgcaatgcccctatctggcccccgtcaatgcaaagccttcagcggtggctaagctacagcgccttctggcacaactcccaccggtcatcacgaccacacaatggcaatgtaccatgtgcggcctgtcatattgcggcgagaagtgctgccctcaatgtagaaaagggatatatagtcgggagatacgaatttag

SEQ ID NO: 26062 - DNA, 612 bp, Escherichia coli
atgtttgacaatatctgtctcgatagacggcatgcaccattcaacaccacttacctacagcgtattctacgcgttatagataacgcgactgcagagcatgcacggacgatggcagttcgggtagacctgcgtcttcctgacaatatgctcattaaccgacagggcctgatatctcgtttcattgaatcccttgatgcaaagattgcagcgcgctacagaagtaagttgaagcagggtaaacgaacatatccatgccaccttcgcgatgcctgggttcgggaggtgggtgagattaatcagaaatcgcattaccacatggtgttgttcgtgaataacgatacattcaatgggctggggagttacaaagaagatgggacgggcctggcgtccttgatacgagaggcctggctgagtgctttacagcttagtcaccgcccagagcactggacgctagcccactatcccgataatccactttattttctggatattaattccgctggctacaaagagtcttatgaccaactgacgtttcggttaagttattttgcgaaggaacgcaccaaagattacaacagggaggaacgttcattcggatgtagccagggctga

SEQ ID NO: 26063 - DNA, 177 bp, Escherichia coli
gtgaagttcttcgatggtatggaaggcattatacaaaagaactcaacaatgattgggttcttttttatctatcaatactattcgccgcgagatatatcagcatggtttatgtgtgattttttatttatcgtcgaaactgaattgtttatcattgcttttcacaacgctaacatctaa

SEQ ID NO: 26064 - DNA, 567 bp, Escherichia coli
atgataaaaatagcaccctataaattcgcgatactgacagggatactgttatctccaggtgtatttgctaccgatataaatgtcgattttacggccacagttaaagcgacaacatgtaatattaagataaccggtaataatgtcaccgaagacggaaatgacagttatacgttaacattacccaatatgggtctggatcaaatagtaaataaaaccaccagggcccaggctgactttacgatggtagccagtggttgcagtgcaggtatcagccatattgatactacattgtcaggtaatgggtcccgaacctttgatagacttgttataccgctgtcttcagacaccacatcaaccaccagttatatcggtatggggttcaaaaaacgtaatgctggtgatgaaacatttttaaaaccaaacagcgcagaaaaaatacgctggagtgcaacagaaattagtaccacaggtctggaaatgaccgtggcactacgtgaaacgagcgcaggtgaggggatacccggagactttcgtgctcaggcaattttcaatttcacctatgaataa

SEQ ID NO: 26065 - DNA, 609 bp, Escherichia coli
atgatgaaatttaaaccttcacgttttggattatcgactgcaactattctggcggcatcagtactcactttttcgtcatttgctgcgactgatagcgttaaattaaatgtaaaaaccacggtagaaatgggaacctgtacagccagtctggttgatgataatgatcaaaccatttctgtcgttgcttttggcgatgtttatatttctgaaatcaatgcaaaaacaaaaatcaaaacctttaaattacagtttaaagactgcgcggggatacctggcaaaaaagctaagattaaactgacaaaacgtgccacctgtgaaggagcaagtaacgacggcctcggttttgctaatggctccacggctagcgataaagcaagtgctgttgcggttgaagtgtggaatacgagcactccagcagttggtagtgccacacaattcagttgcgttaccccagccgatcaggaagtgtctattgccacagccacggggaatacagttgtagattatccgatgagtgctcgtctggtcgtggataagagtaaaaccgtaagcgatgttactgcgggtacattttcagcaccagcaactttctctgtgacatacaactaa

SEQ ID NO: 26066 - DNA, 597 bp, Escherichia coli
atgctttcctctaaacgtaaaattaagaaaaaaacaggtctgttcctggcattcatattcactacttccttttcggccttcgccgggcaggatattaatttaactgcgaatgtaaaaaacagcacttgccagagcggtatcagtaatcagggaaatatagatctgggtgtggttggcgtgggctattttgctggtaatatttctcccgagagttatcagactggtggtaaagagttcaccatatcggtgaaagactgtgcatttcagggaacaggaaatgtcttaaatcaactacacatagactttagggcacaaagtggtgcaatggctaatggttcccgacaaatatttgccaatgaaatttcgtcaggggcgagtaatgtaggagtggttatattttctatccaggattcggcgaatatattcaatgttcttaatgcttcaggcggttctcgctccgtttatccagtaatgtcggatgacatgaatggttcgtcctggaaatttagcacccgaatgcaaaaaattgatcctgcattgagtgttacatctggtcaacttatgagccatgtgttagttgatatttactacgaataa

SEQ ID NO: 26067 - DNA, 234 bp, Escherichia coli
atggaaataaagacacggagagaaaccaggcagacgttagcgcagtggtttgaagagaagggattccagaaggcgtatcaagaagcgtatcaagaagtaagacaggaagtaagacaggaagtaagacaggaattcgcccagcgttttctaagtaaagggatgtctcgggaagacgttgcagaggtgacaactttacctcttacagagattgataagctaattaactctaactaa

SEQ ID NO: 26068 - DNA, 558 bp, Escherichia coli
atgactgatttcaccggaagcaatactcctgccgaacatcgcgacagctggcgcacaccaccagagatttttgctgcgcttaatgcagagttcgtttttcaacttgatgctgccgccagcgaaaaaaaccgactatgtcggctttttatctcacaggagcagaacacattaaccacttcatggcctgaagcaatgggatatgcctctggttatgtctggttgaatccaccatacagcaatatttccccttttgtgaaaaaggcagccactgaaaacaaattcagtagtgtgggatgtgtaatgttattgcctgctgacacatctgtcggatggtttcatgaagcgatacaaaccgccagtgaggtcagattcatcacggcaggacgactggcatttattaacccactcactgagaaacccgtcagtggaaataataaaggctcgatgctcattatctggcacccatacccccgtacacactgccactttacgaccgttgatcgtggagagttgatggcgttcggctcaaggattcttgcccgtcgggaggctgcatga

SEQ ID NO: 26069 - DNA, 783 bp, Escherichia coli
atggacaatattaataaacacgggctctcaagaagaatacctgagacaataaaacgtcagataaggcaaaggtgcggctttggctgtgtaatttgtggatttggattttatgattatgagcattttaaacctgacttcgttgatgccaaagtacatgatccgaatggaatgacacttctttgctcccaatgcaatcaaaaaagagctcgtggtagactttcagcacagacagtggaaatagctgacagaaatcccaagtgcttacaggctggttttgcaaatgaaatgtttgattttcataatgagcctataacagtaaaatttgcaggagtgacgtttcataactgtcaaaatttgattgtagtcaatgaacaacccattctttctgtgaaaccttcacccataccacatggaccgatgcttttatcaggaattttctgtaattctattggtaaggagactttactgatagatgaaaatgaatggaaagctaaatcagacaattgggatgtggagtgtaccggcccgcgtataacaatacgacgtgggccaggagagcttgccctcgttctaaaaatggaacctccaacaggattgattgttgagcgtcttgatatgttgtatgaaggggtcaggatgaaaggagataaagatctgctggaagtttcgattaatggaggtcccttgcacagatggcaatcatgctcaatgtcaaattgccatacagggcttgcgattcagggcggtattagagctgctaatgatcctttgtattgcgcctaa

SEQ ID NO: 26070 - DNA, 1374 bp, Escherichia coli
atgtctccttgtaaacttctgccattttgtgtggcccttgcgctaaccggttgttcactggcaccggattatcagcgcccggcaatgcccgtgccgcagcagttctcactcaaccagaacggcctggttaacgcagcagataactaccagaacgcgggctggcgcaccttttttgttgataatcaggtgaagacgctgattagcgaggcgctggtgaataaccgggatttgcgcatggcgacgctgaaagtgcaggaagcgcgggcgcaatatcgtctgaccgatgccgaccgctacccacagctcaatggcgagggcagcggcagctggagcggcaatcttaaaggcgattcagccacgacgcgggagttctcgactggccttaacgccagctttgatctcgattttttcggtcgcttaaagaacatgagcgaagccgagcgccaaaattatttagccactgaggaagcccagcgcgcggtgcatattctgctggtttctaatgtcgcgcaaagctatttcaatcagcagctggcgtatgcgcaattgcaaatcgccgaagaaacgctgcgtaattatcagcagtcatatgcgtttgtcgaaaaacaactgttgacaggtagcagcaatgttctggcgctggaacaggctcgcggggtgattgaaagtacccgcagcgacatcgctaaacgtcagggggaactggcgcaggcgaataatgcattgcaactgttattgggaagctacggcaagctgccgcaagcgcagacagtaaacagcgacagcctgcaaagcgttaaattaccggcgggcttgtcgtcgcaaatcttattgcagcgcccggatattatggaagctgaacacgcgttaatggcggctaatgccaatattggggccgcacgcgcggcatttttcccatctataagcctgaccagcggaatatcaaccgccagcagcgatctgtcgtcattatttaacgccagcagcgggatgtggaattttattcctaaaattgagatccccatttttaatgccggacgcaaccaggccaatctggatatcgccgaaattcgccagcagcaatcggtggtgaattatgaacagaaaatccagaacgcctttaaagaagtggcagatgcgctggcattacgtcaaagcctgaacgatcaaatcagcgcccagcagcgttatctggcgtcgctgcaaattactttgcaacgggcgcgggcattatatcagcacggcgcagtaagctatctggaagtgctggatgccgaacgttctttatttgcaacccgacaaactttacttgacctgaattatgcccgtcaggttaacgaaatttctttatatgccgcacttggtggcggttga

SEQ ID NO: 26071 - DNA, 588 bp, Escherichia coli
atgtgggatggtggcttacaagaacaggaagtattggctatcgagaaaataaaagctgctttttcagtcaacgtatctaagcctgacaagcctttccgtagcggttcaattagtgagcagctaaaaagctatggttttatcggcaatgaaatgttcccttggaaaggttatgcaggttttcgatttgttgaggcaaaaaaagagggggaattcgatttagttattgtaacacactgcaacgtgatcattgttgaactgaaagactggaaccatcagcctgtaaccgcacgcggagatacttggtttaaaggtgataagaacatggggcgctcgccagtaagcgtgactcgtagcaaaaaattcatgctggacaaaaaactcaagcgtctggtagaccgttttacgaacaaaggctatatcccgattgttcatttttttgttgtgatgaccggcaatgcagatttcagcgcgctgccggaggaacaacggcgccatacgatctcgttaaaagatttcctgaagtttgccgatcgcgggagcttcaataactatttcaaaccgcacccagctaccaaggttcttaactga

SEQ ID NO: 26072 - DNA, 543 bp, Escherichia coli
atgaaaaaaagtgtattgacggcgtttataactgtggtatgtgcaacgtccagtgttatggcagctgatgataatgctatcacggatggctcagtaacatttaatggtaaagtcattgctccagcttgttcgctggtagctgcgaacaaagattcagtagtcacattgccaaatgtcagcgccaccaagttgcaaactaatggtgcagtctctggcgttaaaactgatgtaccaattgccttagaaggctgtgatgttactgtaactaaaaatgcgacttttaccttcagtggtacggctgacggagtgcaacctacagcatttgccaaccaggcttccaccgatgcagcgacgaatgttgctctacaaatgtatctgccagatggttctacatcggtaactcccggtattgaaacgtcgaatattcagttagcggattccgctgagcaaacagtgacttttaaagttgattatatcgctacgggtaaagcgacttcaggtaatgttaatgcggtaacggattttcatattaactattattaa

SEQ ID NO: 26073 - DNA, 930 bp, Escherichia coli
atgcgtaagatcattaaactggcgctggcgggattgcttagcgtctctacttttgcggttgctgcagaatcctcgcctgaagcgttacgtataggctatcagaaaggcagtattggtatggtgctggcaaaaagccaccagttactggaaaaacgctatccgcaaacaaaaatctcgtgggtggagtttcccgcgggaccgcaaatgttggaggcgttaaacgttggcagtattgatctcggcagtaccggagatattccgccaatctttgcccaggctgccggtgctgatttggtatatgtgggcgtcgagccgccgaagcccaaagccgaagtgattctggtggcagaaaatagcccgatcaaaaccgtagccgatcttaaaggtcacaaagttgcctttcagaaaggttccagctctcacaatcttttactacgcgcactacgccaggccgggcttaaattcacggatattcagcccacttacctgacgcctgccgatgcccgcgccgcgttccagcaaggtaacgtcgacgcatgggctatctgggatccctactactccgctgcattattacagggcggcgtgcgggtgttgaaagacggcaccgatctcaatcaaaccggatcgttttatctggcagctcgcccctatgcagaaaaaaacggcgcttttattcagggcgtactggcaacctttagtgaggccgatgcgttaacccgcagccagcgcgagcaaagcatcgccttattggcaaaaacgatgggcttaccggccccagtgattgcctcgtatctggatcatcgccctcccaccaccatcaaaccggttaacgccgaagttgccgccttacagcagcaaacggcagatctgttttatgaaaaccgtctggtgccgaaaaaagtcgatattcgccagcgtatctggtag

SEQ ID NO: 26074 - DNA, 1140 bp, Escherichia coli
atgtttccattaaatgatctgtcgttaaaaactcagtcggttcaattaaataaagtcacatctaatactgagtctacgataaaacaacaagagctagtatctgatgatgcaatgataaatgaattatcaagtgagttagccagttgtcttggaaatggtaagtttacaccaattagtgaagacggcaaattactgaatatgctgtctgaatttaaattattgagagagcaatgtttcaggtggggtaattatactcttttgtttgaaaattatggagcttatgataagacggggtctatcacgatagaaaaaagtcagggggagggtgctttacccattcggcacaaattagagtttatatcgactaatattgcagagttgctggacaagttaaccaaaattacagatgccagactttgcaaaggtttcagtgactgggctagttcagtcaaagaaggcgcatcgaatgacttcaaagaaaatgtggatagagcattggtgagaatgtttaaatgtgttgagctccacagtaatgaacttaacttatcaaatcttttcttgggttctgtgccgcctcttcccgagtggattgaaatgcttagacttaatgataatcaacttgtctcaatacaggtgcccgaatcatgcaaagaattagaactcgagttcaatatccttacagaatttccaaaggtacccaatggaataaccctgatttccgtaaataataaccagatatcgcgtattgattcatttccgccgaagagtaagaacatttttattagtaacaataagctatcggaaataccagcaataccagatactgctgaggtttttgaatgtaatgggaataatataaaagaaattaggtacttccccaaaaatctgaaagaagcgcatattgaatataatgatattgaggttgttcctgcgatacctggcaatttaaaattactttttatggaatgcaatcctattaaagaggcatttttaataccatggactctgacagggatttgctatgatatatcgcaacaaaaatatattgttacgaatcccgccgattatgataaatattccgatatggttaaaaagtatgtaatagatggtgaggatcacatgattaaatattatatgtaa

SEQ ID NO: 26075 - DNA, 180 bp, Escherichia coli
atgcagagatgggctgaaatttccacggcaactaaaaaccagtcccatcaggctattttatttgccattttgaacctgggcagtgctcgaactcctcacgtaccagtgtacgctccgggttctgcgcgctgtccgtgttcaaactggctgcaacaattacgccagatgggcctggtttga

SEQ ID NO: 26076 - DNA, 660 bp, Escherichia coli
atgacggcgatcgtaaatggaagcgtgattgtgaagaaaaagcccagcggtaagcgggtgatttttgcttcggcgtttggcaatgcgctcgaattttttgattttggcgtttacaacttttttgtggtctatatcagtacactatttttcccgcccagcgcagacaaaaacgtcgcgctactactggcatttgcaacgtttggcgtgagtttttttatgcgcccgcttggtggaattatcgtcggggcctgggccgatcgctttggacgtaagcccgcgatggtgttcaccattgccctgatgagcctcggcacgttgatgattggcatcgcgccgacatatgcaacggcgggctattggggaaccgcgacgctggtgctggcgcgtctaattcagggcgttgcagcaggaggtgaagtcggtgcctcaatgtctttgttggttgaatcagctccggcaaatcgtcgcggcttttacagtagctggtcgctggcgacccaggggctggcaacgacctttggtggtgttgttgctttaggtctgagcgcatggctaccgttcgccacaggttcagaaaccgtaatggcagaatggggctggcgtgtgccgttctttattagcacctatcggttgctggttgcgtctgagcctggaaaatga

SEQ ID NO: 26077 - DNA, 1188 bp, Escherichia coli
atggataatcttattggcacaccaccaaaccacgcacttccccataagtatatagacatggagcaaatggaatatttatgtcatctcaatcgtttttctaaattacctgacgattttttgataactggtcagagagaggacctttttacatataaatttattttagatggctcattttcaaatgagcagcatttattccccaaaggagaactacagaagatacaacagagattaagttctcttatgcataaaaacatgtttcattgttttcatgtttttttattaaaactatgctcaattgagagtattccactcccaaatgccgattacgctttctttgatgacgaaatgccatttacattaactgatgaacagatcgaaaatatttcttttttaaacgcatatcacaaagaaaagaaaggaaacaacgacattgttacatttgatttcatgagtgctgatcaccaccataattttagcacaaccatagctttaacaaatgatagcttccatatatcttcaataaacaaccataatgcacaggttatactcgatgaaaacttccatttatatccctatgaattaccagaatcatcacaatggtgttatcagttaataaaaaacatgatttctttacattgcagatataataacaatttcaaaataaaaaaaacctgttgttttgattttaaaaataaatctttttgtaatgccaggttgcaatatataacgtttattgcatgtttattttcacatacaaacatgaaatattcgacatttcatgatgttaaccttgatatgtgtgagataaagaattgcaattttgacaattcagagatgaatttcatttcatgcgtcgggacaaattttagcggttccacatttaataatgtaaaaacaacaacagcgcaactaattaagacaccaacaaagtggacgaataacattctaaaatattggttctccagttataataaacgtaatatcatcttcacacttaatacaatatctgataaagatataaaattaaaaggcgttaaggatatattattatcgttggtagaccataaggctaatatttatagtgtaaggcaagagcttctggattttcttaataatgatttatataaaaatgatggcgagattctttcttataaagaatcaataatgttgttttgtgttgaatag

SEQ ID NO: 26078 - DNA, 2484 bp, Escherichia coli
atggctatatcatcatataatacagttacagataatttttctacgctgactaaaatgacagatgaaaataatagattacaaaaaaagtcagaaaaattttgtttgtctgttggtaatgaggagaagtattcaataacccataaagatataacaaaccttataactggtgatagacaatcttttcttaaactcactctttgggaatttatactcgatctctttcccatgtatcatattaaggaggctaaagaaacaattgtagaatttgtaacgaaaactgaggacaaagttaagagatttgagagaattaaatatctcgccattccagaagaaaaatggcgctttagtgcgactacagaatttacagtagatgagaataaagatattattgttagtagagtatttaaaataaatattaactcgaaagatcatcataatgaagctgaagaaaataaaatacattctgtattttcagaagtactcagcttggatatttataagcatgatatacaatttgacgagaaggctttacaatcagggatattgaaaatgcagttccctaatgataatgaaaagctaagcgtatatttaaaaaataaaatcccctttgaaaatatgacaattgatttatctgcactgaaaaaagatgttctggtatcgctaaaacagtgtcactttaaaaatatgacattcactggtaatatatcttacgagaaccttaatggcccagtatttgaaaattgtttttttgagagttgtaatttcgagaatgtgtcccttgttggctttgataaagtgacctgtaaagactatgactttgtgtgtagagtaaaaccaaataataaaataccgatttacggtatgtttaaagggtgttttttgtatcaatgcgaaatgaaaaatttcaagatagagacatcaaaaatatactctgtaaatcaagatcccaaagagggtaagaaagtcggtgcatatctgtttatgcagtcatttgtatatgaaagtaatcttcaagatggagactgtaaagaagcaagtgttattgcaagcggtttattatcttgcaagatagcaaagcttaatggtgatggaatggatttcatagaaacttcgttttatagaaaaactagcgatcgttctagaaatagtaataatttttatgattgtgattttcgttatgttaatatgacatgcaaacgagatggaattcgtgaagatttacgagattatgatcccagaaaatatttcgcaaaaagtgaaaataaacttaatctggataaacatcttttagatgtaatccaagaaaatattttccaaaatatgaagactcattataatataaatgacgatatagataatcatctaaaacttaataattgctgtttatatgctgcttgtttgggcgagttaaccggtggaaatcctttgcatgattgtgaaattgatacttataccaccaggttaagtggtaatcttgctgcaaacactcaggttaaaattcctgtttatatgtcctatagaggagctatagctgaaaatgatattttacctttcatgaaaaagttaacggaaattgattcacggataaaagatattaatgaacatagcgataatttgaagaataattacaaaaaggcactagccgatttacaatccttattagttaatctgcataacatcatgcctggtgatgatgtaaaagattttcaacttaatgatgaaactataaaatatatcatagacaatgttttgtacaatagaaaaaaagatatagctaatgaaatagatattgataaagtgaatttcatgcacaatatctataataaccttgattgctatagacgtttcgatgaaaatgggaaaataaaaacatatcgttctattaatccaaatggcaatagattttactttgattttaatgatttgcaatttctttactacgatcatgagaagaagaatggtcctaaagtggaggattttgtgaaaatgcaaaatgtttttttaacggtgaaaaactttaaggcagaagaaaaaataaaccaggagaagtatacagaaaaaccagcagatgtagcccgtgaaattgcttcattctttgacattgaacaatatttactgggggtcattgatagaaatggtaattatattactgagaattttactgctaaaatgaaaatgctatccaaacttactgtcgaaagaaatgctcagctcgaaagaaagatttattttgatgaaaaaatgcttgaattaaatgataatgatgaaaaaggaaaagtcaaaatcgaaaatgatatagagaaaatagataaaattattgaagaaatagataataaaatcttggatctttcctctgaaacagagagatttaagataaactttcaacaaaaaaatatacttaatgatgtagttcaaggtatcagtcgttggctaaaagaaaatcatcttatggtggaagctattaagaaaactgatactgaataa

SEQ ID NO: 26079 - DNA, 2442 bp, Escherichia coli
gtgacatttatcgctgatgtcaggacggcgaagatcgcggatctggtggtcattaaggatggttcagaggcggacggttcgacggcgaacacgctgcgggcgagggtgaccgatgcgttcggtaatacgcttgccgggcagacggtcagcgtgacggcaggcaacggcgcaacggttgccccgacggtcaccacgcagccggacggcacggtggagatcattgtcaccagtcagacggcaggcaccagtacagtcaccgccagcatcaacaacagcagccagagccagaacgtcacctttgtacctggtgatgcatcgcagctcacttcatccgttgaaacaaataagtcgaactatacggttggagagacaatcaccatcacggtaacgctccgggatgcgttcgataatctggtaaccggtgcagcttcacagttagccgctaatggtgtgctgacggtggctggcaccgacccgtcagaaacgggaagctgggttgaatcaggtggcgtgtataccacaacccgtatggcgacgattgccagtaccaatcagcacgccaacctgcaattgcagacgtggagtgatggtgtaacgtcagatcgctatgacatacagtccggttctccggcgcaagccacatcaactatcgctacggataaaaacgcctacaccgctggtgacactataaccgtcgctgtgacgctgaaagacgcgcacggtaacctggttgaagggggcgagtccttattgtctggtgataacgtaacagtagaaggagccgtacgttcaggaggatggtctgaaactgccggtgtttatactgctacatggtcggcgcaaatggcgggagactctcaccacgcgacgctgaagttgtctgaatggggcagcagtaaacaatcagagagttattccatccacagcggtgctccggtgcaggcaaattctgctatcaggacagataaattggcatatatcgctggggagccattaaccgtcacaataacgttgcgggatgagtttggtaaccctgctttagggctgacatcagaagtcatcgagtcttatatcgataatttcgcggtaggtggcgcaactcccgattctctgcagtgggtcgagcagaataatggtgaatataccattgtctggacagcatgggttgccgaggaaaatctggttgccagtctgaaattaaaaacatggggaacggagattaagtcctcattatacgggatacaaccaggtgcggcggcaaaatctcaatccacgatagtcacggacaaaacgaaatatatcgctggggatagcataacggtgaccgttgttcttaaagatgcccagggtaactttattactgatggtgtcgttcagcttaatgaggaaaacgtacaagtcaggaacgctgattctattcaaggcaataattggatatacaatggcaatgggcaatatcaaagacagtatatggcacattttgcggaagcgaatttgaatgcgcaactgaagatggcgggttgggtcgatgccaattattcaaaaagctacactattaacagaggtgaagtaagtaagtttcgttcacagcttcgtatacacgaacttttagtggtagctggggcggatatacctgtcagtgttttattagctgatgaatttggcaatcctgtgaatgacggtctggatttgctgacagatgatgcagtgtacttacaaaatgtggaaaagaaacattggtccagttggacatttgtaggtgatggcagatatgagcgtacctatatggcctacaaagaaggagaaaacttaaactcatatctacatattaatggttggtatgtagacgggcaaccgtcttataccatccttccttttgtggaagtcgagtcgctgagtgttaatggtgcaaaattcagggcggcagatggttttccaaaaacagggtttgatggtgctaaatttacactgatattaacccacaatatgaaaaacacggattataattggaccagcggtatacagggtattcaggtcgatagtaatggcatggtgactttagaatatattctaaagaacgaaattactattacaggaacgccgaaaagcaataaagggaataaagtcacatatagattctcactgcagaaatggtttttaccccaaggagattttcaggaagcatggagtgtaattaattcatattgtagtgataggggctatagattaccgtctagtacggatatagtggggagtgcaactagcggtgctgtcccgcgaaaagtaggttcgttatggggtgaatatggtaatctgacttcttatgacggaatatttcgctctgaacattattggctcgacagcggtatgatattttatccaggagatggtcatctctcgatagcgtcacgttcatccgcattgtgtttgcaagagttctga

SEQ ID NO: 26080 - DNA, 1698 bp, Escherichia coli
atgcaactgcaacatggaaaaaataatacacaacaatatatatttggcgactttgtattaaaaaacaatggaatattattattcaaaaacaaagaatatcatattccaccgaaagaacttggcgttatcattctattacttaatgctgacggtgaaattgttagcaaagaagagattatcgataaggtctggagcgcgagtgttgccagtgatgaatctctaacacgatgtatttatgcattgcgcaaacttttgcatgagaataaacagtgtaagtatatcgaaacggtctatggtcgtggataccgttttactgtacctattgtgattgtgaccgataatgaaccggtaaagtcgaccaccactcttgccgtttttccctttcgtaccgaaggttcgatcaatgttctaaaactccattacgaacttgtccagggcctttcaaaatatgctttttgtggtttagatattttacccgcttcggtaacaaatgaggccagtgatttctccactatccatcagtttatcaataaaacaggtccagaatattatattatgggtcaggtcgttcactatggtaaaaactggcgtttatttattgagttaattcatgccagaacacataaattgattgatcatcaaagtattgatttcaatcccgataatcctctttccgtattattatcacaagtaattaatattcttattgaaaaaatacccaacattaattttaaatctattaatacacaacaaatgccatctctggattctgctgttatgtatatgaatggcagaatggaaatgtaccgttatacaccagagagtttgaaacgagcattagtaatatttagagattgtgtgagtacgcaaccgcaaaataccttgccctactgttgcctggcggaatgccatatatcattagccctccttggactcagtgaacaaaaacaagcaataactacggcagtaacctccattgaaaaggctcttgaaattaacccttcaaattctcaggcattgggtttactgggtttaatcagtgggctaaaagatgaacattcagtgtctaatgtgctatttaagcaagcacatttactcaaacctaattcgccagacgtttattattatcagtctctgctatgttttttgaacggtgaccttgcaagagcatttaatctaatagaaaaaagtattgctcttgaacccaataaaatgggtataagcattcttaaattaattatactttattacacatcccccctcgataacgcgatatcttttgcattaaatcttaacagtcaaaacacctgtaataatccaattattacctctattctggctatgttcatggcactgaaaggacataatgacaaagccaaaagtttattgcttaaacttgagcctgaacatggtcttgattacacctgtgttaactcgctttatacgaaatttctgatctatggcgcatctataaaaaatgacattatgaagttactggcaaatattaacaccaacaaaatcaatggtgttattttgccgttgatttacactgtgtatggtaaaaaagaatatgaaaggcgctggcaacaattaattaaagacaatgatttatggtcaaatgttttgcttcatgacccccgtttgctcagtgtaaaaaatgaatttaatactatcggtgtgatgcgtacttctgcgtaa

SEQ ID NO: 26081 - DNA, 1131 bp, Escherichia coli
atgaccaataatattagcaatataaacaatacagctcataataagaatctcgataaaacaacattcgatgaacaacctgcttatgaaacaagagtatcacaagctaaaaaaatactgcaaagttttgcgccaaatgatattaaagttgacacaaatactaaatttattagtctgatagagtctgtccgtgctctctctcctgaattacaatgtaaggtactagatggtcttaattatgctaagaatacactacataatataaatcaaaattctgccatagcgacaaaatcatcctgtcagtctgctgagtcaaaagagaaaaccataacatttaatattctcgatatgttagataatttgacgatgaggcaacagaacattatggaggcctttctaagagtctttacatcaatgtacaatgcctctgccaaggccgaggctagcatgagcatcctatttgaagagcttgtccaatttcagagtaaagaaacaattaattcatctaaggaaaatttagctggtgccgcagcgggtgcaattgttaatgtggttggagttggagtaatcgcgaaggcagaatataataagcctgcaggtaaaatagatgatgtcaccccaaaccaggaacaaaaaacagacacaccggaagaccaacagaagttaaagtcaaaagaagatgtgaaaaaagcaaaagccagactttctgatataaaaaaagaacaaaaaacattatcaaacgatactaaagttgaaaatgacacaaaacaagaacaacttagtaaattagaaaaagaaaaagatagtatcaataagcaaattgctgataaacaacaaattgatagtcataataaaaaatttagtcgttatcattctctttctaattctcatcatctctttcaagcttttggcagtacaatgcaatccagcggtactttagcggcagaatatactcatgcagaaaaagacattgttgaacaggctaaaaatgttatgcattcagttatgagtagctatctggatcaaattaatcgtgatgttcaaggaagagatcaggcactcaatttattacagcaaataatacaaactattattgatactgatagtgctatcgttcaaggcatccgctcataa

SEQ ID NO: 26082 - DNA, 195 bp, Escherichia coli
gtgaaactgacaacacatcatctacgggcgggggccgcattattactggcaggaattctgctggcaggttgcgaccagagcagcagcgatgaaaagcacattaaagtggcgttattaatggcgcagaacaagatgtcgcggaagtcgctaaaaaggtggcaaaagagaaatatggcctcgatgttgaactggtag

SEQ ID NO: 26083 - DNA, 900 bp, Escherichia coli
gtgagaattttatctaagccagagggtattgatgatctacttaataatatagatcttaactcatctattgatgcctttttatcacttgatgaaccgactggaattgctgacttaagaaataaaaaaaatgatctcttgaacgaaattgagaattatcacactgagatgattgaacgaggtcatttatcacataacacgagaaaaaacttctcaaaatataaatccatacttgagtggatttattatcacccaagtcagcgaagaaaaacagactacataaactcgatacgaaaactttacgcccaaagtggaactctatgtccttactgtggggtttctccttgcaggacattagaccattactacaacaaagctttattaccacagttttcatttcttcctgaaaaccttattccgtgctgtggtgattgtaatagagacaagggagcaaaaaaagcctttagcaaatggagaagatttgtcaatccattctatgatgatttctcatcgttagaaaaaaatgaacctctcatatatataattttcaaagaaagaccaagatctagaattgacatggaatatgtaatgacagccaatcataatctagactttttaataagaaaacaaataaactatcacattagaacagtaagaatccctttctatcatcatgaagccataagtaattcattttggagaaacgcgaaagacctaataacgtttaaaaaattagtcactgacggtgatataaataatacaacttatgataaaataattgatggtttcataggcaaaaacaatgctatgaattatgactgggaatatattattagatattcattagtcaaacttcgtattaatcactggatttataacagcaacctaccaaaattaatgtag

SEQ ID NO: 26084 - DNA, 1656 bp, Escherichia coli
atgattagtgcaaaaaacattcttttcagcagtcgacatactgatgctgatgtaactttacatatcaataatgttataagataccccaaaaaatatatgaataatcatatctatatattagatatagacatgtatattcagactgaagacatgaaaaatcaggcatatatagataatgacattagaagccccctgaaaatgctatttattggagaggaactaacagagtcaactttatttgacttattatcccaatcagaaatatcgcttcatgaagttaaggttaaatataaatttgattatatctgtcagatgtcagaagatggatatagatacatcaacaataaattagaaacagtcgcttcattatctttacttagagctattaaggattttggtgtaaactacaatattataagaaacaaatcctttctaaaaaaatattcagacaagatattctctacgttattactagataacactttcagttcttatgcctttgaaaatggctataaatattttaatgccgatgatggtgccgtttaccaattacagcccccaacaaaatttattatttatgacgaagaaaaacagccgtataaacttaagatggagagtctgttaaatattaatatacctattcatgcactaattggtaagaatggtagcgggaaaacctatttaattaataaaataatcaaacaatctatttcaactgacctagaaataagatcttctggcgcagtttttagtcgaatgatagttttatcaaatacaataaatgataagtgctatagaccggcaaatataaccaaaaacaaattcaagttaaataactatcattttgtatcgttaacatcagaaaaatattataataagcttttcccacgagggaaaaagctaactctattttctttattagaaaaaatacagaaacgagattctaataagcgaggtaactttgaacagggggggttgcttgatagagttactcaagatattattcccgagttttctttttccattaaaacaaatcttggggagcatatttacaatagttttttagagttaactagacaatatggattagttaatttaaactcaaacttagacttaattacgagttcagaaatcgaatatgcattacctgatgaagatatccatttctataaaaataatgaaccctttaccttaagctcagggcaattatcttttttagttagcatgttttctctaatctcaacaatagagagtaatagtcttatacttatagaggaaccagaaaattttttacacccaagtttattaacacattttataaactcactaacacacattctaagagatactaattctatcgcaattatggccacccactctgctttggtacttagagaaatcccttcagcacaaataacaatcctacatagaagagacaatatcaccaactataaaacaccgaatattgaaacatttggtgccgatactcatcaaataatgatagatatttttggtgatttatactctaatgcgatatttagagaagagctatcaaacattgcaaaaaacaaaacaatcgatgaattattagtgcagtatggtgatttaccttctgatgtattaaataaaatcatcatggagaaaaattcaaagtga

SEQ ID NO: 26085 - DNA, 804 bp, Escherichia coli
atgctcgaccggctggaaagtgaaatcctggctgaccgggtgagtgaggaaagccgacgctggctggcatcgtgcggcctgacggtggcgcagatgcaaaaccagatggacccggtgtacacgccggcgcgaaaaatccacctgtaccactgcgaccatcgcggcctgccgctggtgcttatcagcacggaaggggcaacagaatggtgcgcagaatacgatgagtggggcaacctgctgaatgaagagaacccgcaccagctgcaggggcggtatatcactcaggatccgattggactgaaggggggatggaatttttatcagtatccgttgaatccgataactgatattgacccgttgggattagcgacctgtttatacagcataactttaggtatgctttcatgcgtttcagatacgccaagtgatgataattcttatggtgtgcttactatttcagtcgcctctggtaataatggtaataatatgcaatgtaaaaataatcctggttgtacacacttacaaaatagaggcccaatacctccaggggtatggagctggaatgttaatggtcctggagcaactaatagaaaacctaatggtatacgtttagtaccgtcagcaaatacagaaacgtataatcgtgatggatttttaacacatagttgtttaaacgcttttggtccatctttaggacctcgattctgttccgagggttgtataactggttcatctaatgacatgcaaaaattaaatgagctaatattttcagagccagatagcacattaacagtgacggactag

SEQ ID NO: 26086 - DNA, 843 bp, Escherichia coli
atgtcgaatacataccagaaaagaaaggcaagtaaagagtatggtttatacaatcaatgtaagaaactaaatgatgatgaattatttcgcttacttgataatcgcaattcattgaaaaggatttcatctgccagagtattgcagctaagaggtgggcaagacgctgttagattggcaattgaattctgcgctgacaaaaattatatccgtagagatataggagcatttatactcgggcaaataaaagtttgcaaaaaatgcgaagatagcgtttttaatattttaaaaaagatggcactgaatgataaaagtgcttgcgttcgagctacagcaatcgagtcaactgctcagcgatgcaagaaaaacccaatttattcacctaaaatagtagaacaatctcaaattactgcttttgataaatcggctaatgtcagacgtgctacggcatttgctatttctgttatcaatgataaagaaacaattccactattgattaatctgttaaaagatccaaatggagatgtcagaaactgggccgcatttgcaataaatatcaataaatatgataatagtgatattagggattattttgtggagatgcttcaggataaaaatgaggaagtccgtattgaagcaataatcggactttcctacagaaaagataaaagggttttatctgttttatgcgatgagttaaaaaaaaatactgtttatgatgatatcattgaagctgcgggtgaattaggtgataaaacgctacttcctgttttagatactatgttgtacaagtttgatgacaatgaaattataacttccgttattgataagctgaagcgttcatag

SEQ ID NO: 26087 - DNA, 1578 bp, Escherichia coli
atgagcaaaatatcgcattcggattattttcactacgttgcttcctgcaggaattttaaaccaaaacatgatgttttaaatagctggtgtgtgggaatcaataatttttcccgtattgccgaggggcagcataacaaaagaaatatcctttctcctaaggcatttttggagtttctggcatggatatttaccttgggacatgtagattttagtgaaagccgcaatgaagcgggaagaaaaatgatgggtaatataaaatcctcatcttatttaaaaaaagatgatggtagtgaaataatgcgattttacatgaataatcctgaagggtgggaagatgatatacgcccggttattttagaagttagacttacccctccctctgtgaatggggctcgtcaagggcgtacagccattatatttgatgatgtaacagaatctggtaagtcaatttttcgttttgaagggacggattttgaaacaaaagatgagagttcattactactgattactaataaagttctggcgtgttaccagcgtgaaattaacaacgaaatagcacttcagttaaataataaccagatgaattggcaagcccaggactataaagatttttttaaagatgccttggctacaacattgtcaacaataaagcaagagcatctgctaataatgcctcatgtatgtaatgaaattattccagacttactgggcgaagaaggcatacttgaagagatagataatctcagcgcgtctgacgatgcctttactaataataaaaaaagtaatgatgaaattaataagatcaaagttgatctagcgcatattcttattgattccttagatgatgcgccggttgacctctcaccggtcatccgttcgatgttagaaacttttttacaatcgccatatatgagtgatgtaaaaatactggagttgtgttttaataaaagtatcgaatattttaatgctgctgcaaagatagattatgcatgcgacgtgataaaaaatattaagtctggttgtgatcagtctaaaagagctgaggcattattttcccttctcgataaagaaccctataaaaataatcctgatttacagacgttgatttgggataagttgattgtatatgtcgaagttttaaacttaagcaatcaagagaaatcacatttaattgaaagactatttaataatgctcagtcagtatttaaggacgtacctgtcagtatcttggtgaacaaggtgtttctgaatgatttttttatgaaaaaacctgagatgattaaatggtaccttcctcagttacttgtgagttatgcaagggaaaagagagagcttgatagcttagaatgtgatattaataatagacaacttacgaaagaacaactgggtcaacttattgaagaaaaggcgattaatgaattaaaccttagaactaacgtgttggtaatcatcaaaaatttaaaaagtgctctattaacagattttaatgacgcatatttggagggacgaaaacctcctgaatggctacaggatgcaatacagaactatgtgtcgaaacaggagactgacgctgaataa

SEQ ID NO: 26088 - DNA, 1188 bp, Escherichia coli
atgaataataaaagaaatgttacatttggtgatcttgctgaacaggttatggttagaatctccccaacaagcgacgatgctaagcattttattgggttggaacatttgaaatctggttatttttatgttcatgattggggggctgacgttgaattgaaaacacaagcctttaaggtaaagtgtggcgaaataatttttagtagacgaaatacatatttaaaaagggtgtcggtgagccctattaatggtatttgctctgctgatgcaatggtaattaaaccaaggaaaaacaactacttattggatgggtacttaccccacttgatgcaatcaacctcttttatggaaaaggtgattgcaaattccgccggctcgctatcatcgcgaataaaatggagtgatttaaataaactagaagttaatataccgagcattgaacagcaatactcgtcattaataatctttgattcgttagcaaagaaagaacttctatatttaagtgctctcaaagcagctaaaagattattatatgctattggtctacggacttttgataactactttgattcgagggagaataaatgtgttcctcttccggttggatggacttttggttctattaaagatgttttaattgattctccagaagggggatattctcctgttgaaaccgcagtcgggactgggtactatgtcctgaacctaaatagtttgtcgaaatcaggattcagagaaactactttaaaaaatattacagaatatcattttttaaaaggaaaaacatgcaatgatggtgatttgttaatctctcgttctaatacagcggagttggttggtttagttggaaaatataaaggatcgactggcaatgggaatacgattttcccagacacgatgtggagattggctgttgacgaaaaatttattaaaaaagagtttttaatgtactatctgatgtctccatatggccgtcgagctattcaaggtattgctgctggaactagcggaagtatgaagaaaataaataaagataactttttaaaaattcaaattcctattcctcccttcgatattcaagcatcaatcattaatacgtttaagtgttcgtatgagaatatttataggcacaatgaatccttggggaaaattattcaactgcgccaagctatgattgataaggaaatataa

SEQ ID NO: 26089 - DNA, 771 bp, Escherichia coli
atgaatttacaaggtaaaactgcgctggtgacggggtccaccagcggtatcggactcggtattgctcagacactggcaaacgctggcgcgcaagtgatcctcaacggcttcggtgatgttgacgcggcaatcaatgcggtttctcgtatgggtaaaacgcctggctatcatgaggcagacctcagcgatgaatcgcaaattatcaacatgatggcctacgcacggcgggaatttggcggtgtggacattctggtgaataacgccgggatccagtatgtctccccggttgaatctttccctgtagaaaaatggaacgccattatcgctatcaatctctcttctgtctttcacaccacgcgtctggcactgccagaaatgcgcactcgtaactggggtcggatcattaacattgcctctgtgcatgggctggtagcgtcgaaagacaaatcagcttatgttgcggcaaaacatggcgtggtgggactcacaaagaccattgctctggaaactgcgcagacgggtattacctgcaacgcgctctgccctggctgggtgctgacgccgctggtacaacagcagattgataagcgcattgcgcaaggcgaagatgcggaaagcgcgcgtgacgccttactggcagaaaaacagccttctcgtgaatttgtgactccgcaacaactgggtgaactggcgctgtttctctgttcggatgcggcagcacaagtgcgtggggtggcgtggaatatggatggcggttgggtagcgcagtaa

SEQ ID NO: 26090 - DNA, 1392 bp, Escherichia coli
atgagtgtattaatcgcccttgccgcgcttgggctgctaatgctggcagcctatcgcggatacagcgttatcctttttgcccccatcgcagcattaggcgctgttcttgtcaccgatccgggggccgttggcccagcatttaccggcctgttcatggaaaaaatggtcggcttcgtgaaattgtacttcccggtgtttctgctcggggccgtgttcggaaaactgattgaactttcaggattttctcgttcgattgtcgctgctgcaatcaacattctcggccggcggcatgcgattccggtgattgtgctggtatgtgcattactcacctatggcggagtgtcgctgtttgtggtggcatttgccgtttatccgttcgcggctgaactgttccgccagagtaacatcccaaaacgacttataccggcaacggtggccctgggggcattctcttttactatggacgctctgcccggcacgccacaaattcagaacattattcctaccagtttctttggcaccaacgcctgggccgcgccgtggctggggcttattggttcactgtttatcattgccgtcgggcttatctatctggagcggcagcgtcgtaaagcgcaggcaaaaaatgaaggttacggcacagagttacttaatgaacctgaaacaccagataacatcaatttaccgaacccactcattgcgatttcaccattgattctggtggggctgttgaacttgttgtttacctggtggatccctgtttggtacggtgcgagccaccaactggagttgccgggacttgccgccccgattaccacagatgtcgccaaaatcaccgcaatctgggccgtcgaagctgcgctcattgccggaattttgctggtagtgatttttggatatcgcaatattcatggaagactggcagaaggaagccgtacagcggtaggcggcgcaattctggctgcgatgaacaccgcctcagaatatggcttcggtgcggttatcgccgccctacccggttttctggtgctctcaaaggcgctggccgccattcctgatccattactcaacgaagccatcagcatcaccacacttgccggaattaccggttcagcgtccggcgggatgagtattgctcttgcggcgatgtccgacacttttattgccgctgcgcacgctgccaatattccactggaagtttttcaccgcgtggcatctatggccagtggcggcatggatacattgccccataacggcgctgtgatcaccctgctggcaattactgggctgagtcaccgtcaggcttacggcggcatcttcgcaattacgatcattaaaagtctggccgtgctgtttatcatcggcgtgtactacaccaccggcattgtctaa

SEQ ID NO: 26091 - DNA, 924 bp, Escherichia coli
atgcaaactgaacaatttgcggtactgggcgccggattgatgggcgtggggattgccactcatttcgcccgctttggtcatgatatctggctgtacgataccgagcagagccggattgcagaaatccacgtagttgcaggcggaattcttgatgagctgattagctgcgaacagtttactgccccggaaaaagagaatgtgcttaaacgtctgcacggcacgacttctcttgcagacatcgccgactcgcaactactgattgaggcgatcccggagcgacttgaactaaaacacgcattatataccgagcttgaaacgcttatttctcctgaggccattgtcgccagcaataccagcggtctgccgcccgatgatctggccgcgaagatgcgctacccgcaacgactgctgatcgcccatttctggcatccgccgcacttcattccacttgtggagattatccccggcagcgttaccgagccaaagcatttgcactggctgcagcacttgcttgtgtcactgcaactggaagcagtgttgctggatcgcgctgcgccaggatttgtcggcaaccgtctgcaatttgcactgttgcgtgaagccctgcatatcgtaaaaagcggcatcgccagtgcagaagtggtggatcaggtgatgcgcgcctcgcttgggcgacgttatgccatggtcggcccgctggaggccgccgacatgaccggactttcgacggtgcaggatatttgtcgccatctgctccctgaactagcgactggcagcgacatgatgtcattagttgccgaaaaagtggaacgtggagacatcggcgtacgtagcggtcagggattttactgctgggatgaatcgcggaagcagtacatccagcagcgtcgggaacatcaacttcgcttcgcccttaaaccataa

SEQ ID NO: 26092 - DNA, 1206 bp, Escherichia coli
atgcaggacgttgttattgttgccgctacgcgcacaccgattggctgttttcatggcgctctcgccccactttctgcggttgatctcggcgctgccaccatccgttcattgctggagaaaacagcacttgcagcagaacagatcgacgaagtgatttttggtcaggtcctgactgccggaagcggacaaaatccggcacggcaatcggcgctcaaagccgggttaagccacgatacacccgccgttaccatcaacctggtatgtggttccggtctgaaagcagtacaccaggccgtacaggcgatccgttgcggtgatgcacagataattatcgcaggtggccaggaaagcatgagtaacgcgccctattttattgatggcgcacgggcaggtttacgcctcgggcataccagcatgaaagacagcgtggtgcatgacggactatgggacgctttcaatgattaccacatgggcattactgcagaaaacctggcgcaaaaatatgccatcagtcgcgagcgacaggacacattcgcgctacgttctcagcaaaaagccgctgccgcaatggaagccgggcgctttgcagacgaaattactccggtcagcgtaccacaaggtaaaaaaccaccacgcagggtaaataccgacgaacaaccacgttccgggacgcaactggaaaaactagcacaactgaaaccggcctttcttccgggggcgggaagcgtcaccgcaggaaatgcttcttccatcaatgatggtgccgccgcagtcatgttaatgcgcgccagcaaagctgccgaacttggcctcccagtgctggctcgggtggctggttatgccgtttctggcgtcgatcctgcctttatgggcattggtccggtcgccgctacccgcgaatgtcttaagcgttgcggatggacgctggaagatattgatcttattgaagccaacgaggctttcgcagcgcaggcgctggccgttggcgacgaactgaactgggattgcgacaaagtgaatgttaacggcggcgcaatcgcacttgggcatcctattggcgcttccggttgccgcattctggtcactctcatttatgaaatggcgcgacgtaatgcgcaaaaagggctggcgacgctgtgcgtcggtggcggtcagggcgtggcgctgacactggaaagaaccacaggagaacaccatgcaaactga

SEQ ID NO: 26093 - DNA, 657 bp, Escherichia coli
atgttaacccgtgaacaaatggcgatgcgagtcgcccgcgaattgcgcgatggctattacgtcaatctcggcattggtatcccgaccctggtggcaaactacattcctgacgggatggatgtgatgttgcagtcagaaaacggtttgctgggaatgggcgcatttcctacggaagacgaactggacgccgacatgattaatgccggtaaacaaaccgttaccgcgcggaaaggcgcggcaattttcgattcggcgcaatcattcgccatgatccgtggcggtcatgtggatctgactgtacttggcgcatttgaagtggatgtgaatggcaacattgcctcatggatgatccccggcaagatggttaaaggcatgggcggtgccatggatctggttgccggtgccgagaatattattgtggtaatgacccacgcctccaaatccggcgaatccaaactgcttcctgactgtacccttccgttgaccggcgccggatgcatcaaacgcgtcttaaccgaccttgctctgctggaaattgctgacggagctttcattctgcgcgagcgcgcgccgggaatcagcgttgcggaaatcatcgccaaaaccgccggtaagttgtttgtgccggaacatgtcccggaaatgcaattcaactga

SEQ ID NO: 26094 - DNA, 708 bp, Escherichia coli
atggctgggttggataaacgggtcgctacgtatcacgaggcgcttgaaggacttaccaatgagatgacgattctggcaggaggttttggcctgtgcggcatcccggagaatctgattgctgaagttcgccaccgtggagtaaccggattaacggtggtttccaataactgtggcgtagatggttttggactgggtgtactactggaaagccgacagatccgtaaagtcgtcgcttcttatgttggcgagaatgctttgtttgaaaaacaggtgcttaacggcgaactggaggcgattctcacaccacaaggaaccctggcagaacaactgcgcgcaggcggcgcgggtatcccggcgttctttactgccaccggttacggtactcccgttgccgaagggaaagaagtccgcgaattcaacggtcgcccgtacatcatggaacaggctatcaccggtgattttgccctggtcaaaggctggaaagccgactggtacggcaacgtgatttatcgtcataccgcgcaaaacttcaacccactgatggcggctgccggaaaaatcaccgtggtggaagtggaagaaatagtgccacctggtgaacttgatcctgccgctatccataccccggggatttttgttaatcgcgtcattcaggggcaatttgaaaaacgcattgaacaacgcacccttagccgcaaaggagcctga

SEQ ID NO: 26095 - DNA, 912 bp, Escherichia coli
atgaaaatgagcatcaaacagttacgcgcgtttttagcggtagctcacactctgaactttgcccatgccagtgaacggctgaatatgtcgcagcctgcgctaagtcttgccattaaaggactggaagatgccttagggggcgctttactgctgcgtactacgcgaaaagtgacattaacccaggagggggaaacgctattgtcgatggcacggcctttgctggctgactgggataacactgaggaggccatgcgtcagcgattcacgctcaggcggggcaaagtctcggtggcagcgatgccgtcatttgcagccaacgttctgcctccggtgctgaaaaccttccgcgattgttattcagggattaatgtcaccgtgcacgatgtggtgaatgagcaggtgatcgaaatggtgagcgaagggcgtgtggagatgggtattgcctttgaacctgactattgcggccatgtgcattttaccccactgggcgtggatcggtttgtcgctattgttccagccgattcacgactggcaaatcggcaacgcgtgagttggcgggatttgctgacgctcgattttatcaccctccagcgaccgtcagccgtcaggttgatgctggaggagcagttggcacaaagtggaacgcaactggaagtggcgctggaaagccatcaactggttacggttgggcggctggtggcaaacggtttgggaggaagcgctgtgcctgcgctgtgccgcaggcagatgagcgaactgggcgcagtgtgtctggaactggataatccagtgattgagcgacgagtaggcgtactgcgttcgtcacaccataagctttctactgcggcgcaggcgttgatggaaacgttaaaaaaaactatgacgcataacgtttccgcagacatgcaatag

SEQ ID NO: 26096 - DNA, 1551 bp, Escherichia coli
atgaagagatcgatttcgtttcgtcctacattgctcgccatcgtccttgccacaacaatgccggttgcgcacgccgccgtaccgaaagatatgctggtgatcggtaaagctgccgatccacaaaccctcgacccggcggtgacaattgataataacgactggacggtgacctacccgtcttatcagcgactggttcagtacaaaacggacggtgataaaggctcaaccgacgttgaaggcgatctggcaagtagctggaaagcgtctgacgatcaaaaagagtggacgttcaccctgaagaacaatgctaaatttgccgatggcgcacctgtcactgccgaagcagtaaaactctcttttgagcggttactaaaaatcggccaggggccagcagaagcatttcccaaagatttaaagattgatgctcccgacgaacatacggtgaagtttacccttagccagccattcgcaccgttcctctatacgctggcgaatgacggtgcatccattatcaatccggcggtcttaaaggagcatgcggcggatgatgcccgtggtttcctcgcgcaaaataccgctggctccggaccgtttatgctgaaaagctggcaaaaaggtcagcaattagttctggtgccaaatccgcattaccccggcaataaaccgaacttcaaacgggtatcggtaaaaattatcggtgaaagtgcctcccgtcgcctgcagctctcccgtggcgacattgacattgccgatgcgctgccggtggatcaactcaacgcactgaagcaggaaaacaaagtcaacgtggcagagtatccgtcactgcgcgtcacctatctgtatctgaataacagcaaagcgccacttaatcaggcggatctgcgtcgggccatttcctggtctaccgattatcagggaatggttaacggcattctgagtggtaacggaaaacaaatgcgcggcccgattccggaaggcatgtggggatacgatgcgacggcaatgcaatacaaccatgacgaaacgaaagccaaagccgaatgggataaagtgacgagcaaacccaccagcctgacgtttctctactccgataacgacccgaactgggaaccgatcgctctggcgacacaatccagtctcaacaagctgggcatcaatgtgaagctggaaaaactggcgaacgccaccatgcgcgacagagtgggtaaaggtgattacgacattgcgattggcaactggagtccggattttgccgacccgtatatgtttatgaattactggtttgagtcagacaaaaaaggtctgccgggtaaccgctcgttctatgaaaacagtgaggtcgataagttactgcgcaatgcgctagcgaccaccgaccagacgcagcgtacccgggactaccagcaggcacagaaaatcgtcattgatgacgctgcttatgtgtacctgttccagaaaaactaccaactggcgatgaacaaagaggtgaaaggctttgtgttcaatcccatgctggaacaggtcttcaatatcaataccatgagtaaataa

SEQ ID NO: 26097 - DNA, 480 bp, Escherichia coli
atgagaaaagtaaaaacagacaacagtgatttaatccaatatttagatacagtaaaagaactaaaaaattatattccgatagaagaataccgaaatgaatatcgtaaactatgctctgataatattccgtggattaagattaaaaaatttaagtctgcccataccgaacttcgcagactggataaaaagagagaatctcttattgaattgtttattgatgaacttaacccgataagcagttcaacagcacgaacagcagcaaaatcatcaggtaattttgatgtactgcatgagagaatgctttattccaaaacactttcagaaaaaagtgatgaagaaattgttgccttggtcgtaaaacagcgtaaagaagccgctctggagtttcagcgttctattgaacagagccttgaacaactctcccgcatttcgtcagagttcaaaccatcaagtcagatacgcaggaaaatgcctctgtaa

SEQ ID NO: 26098 - DNA, 375 bp, Escherichia coli
atgtttaccaaactaagtattgccattttgttagcattttctgcatatgttcatgcggaaacatcagctccaatattttttgaagatgttggcagtatagactcttggttttcaattaaataccaaaaatatgaaaacgtgaaggatgaacaatacccagaaattctgatttattatggtgttaaaggttcaggaataaatagagttgatgggtggtttttctcatgtgcaaaggctgggagaacttgtagtctaatttttatggctaactttggtgaaagccgctattttaaacctgcaaaaatagctatgaataagaataatttgattataaggacgagtgatatagaaatagcatttaagataacgaaataa

SEQ ID NO: 26099 - DNA, 717 bp, Escherichia coli
atggcatttctacgtcgttctctggacgatctcgacccaactccatgtggtaaatgctcgtcctgtattggtcaaccaattataaatcaaatcattgaccctgctttggtacatcgtgcagggactttcctaaaacatgcagaaatgccgattactccaaaagctcaggtagcagctaatgcttttttgcaatatggcttcagcggcaatttgccacagcagattagagcacaagaaggtcgagtgttgtctcgctggggagatgctggttggggacggttagtagccgataataaacgtgcagatcactttgatgatgagctagtggttgctatggccgagatgattcagcagcgttggcaaccgaatccagcgccacaatgggtatgctgtgtaccttcacgcaatcatgtacaattagtccctgatttcgctcgccgcttggcggcatgtttgaggttgccttttttcaatgccatcagcaaggttagagataaccaacctcaaaaggggcaacaaaaccgtttccatcaatgccgcaatctggacggtgcttttgagataaatcaacctctacctaacacaccggttctacttgtagatgacattgtagattcaggctggacgttaactgtcatcgcagcactcctacaacgcgcaggtagtggtaaagtataccctgttgcacttgcttcatcttcggtaaaagactcatga

SEQ ID NO: 26100 - DNA, 1326 bp, Escherichia coli
atgaatgtatctaacttattgtcaaaaacagcccaggcgaccttacttctgactagttatttttctaaagcaactagcgaaaacgccaaaccactttccaacgccgaatggggacgttttgcgctatggttgaaagaaaaagcagttacgccagctgacttgttggactctgatcctcaaaccttactgaatggctggtacgactcccgtatcagtacggatcggatcattgagttgatgaatcgaggacatagcctcgctttggctatggagaaatggcaacgggcaggcttgtgggtagtgacacgttctgatccagaatatccatggagattaaaacatcggcttaaaacagactctccccctgttttatttggctgtggcaataaagccttattaaatagagggggattggctgtcattggttctcgaaatgccaatgcatcagaccttacttttactgatcacatcggcgttaaagctgcggacgaaaatatagctgttgtatctggtgctgcacgtggagtagacgaaacagccatgttaggtgcaatgaggcaaggtggagttgtaatcgggattttggcagatagcctgttaaaagctgcgactagtgccaaatggcgcaaggggcttatgaatgaccatgttgtgctaatatcccctttttaccctgaggctggtttctatgcgggaaatgccatggctcgcaataaatatatctattgcttgtcggatagtgcattggttattcattctggtcgaaaaggtggaacaattagtggggcagaggaaaatcttaagaaaggatgggtgccactatgggtcaatccaacaaccgatctagattcagctaatgctgacttagtgagcaaagggggacattggttgccaagtgatagtaatggcctatccatcgagaatttgcttaaaaataatgacagatcaaaaatgcagttaaaagcagagccccaagatcttttttcagaattgtcgcatccagaattaattattggatctgcagagaaatcgtcaactcaagctctcgaaaaagattggactgctactattaatgaagaaactcccaacctaataactacggaaaaaaaattagaggaaaaagagttagatgtaaatcctatagacttttatctgctattcaggacagaattacagcgattggccgaacatccaattacagtagataggttgacagaagtcactgggttgaataaatcgcaagtgcttgattggttgaaacgtgctgaacaagatggtttggtaaaaaaactaaaccgtcctacaagatatcaattaaatgagtag

SEQ ID NO: 26101 - DNA, 990 bp, Escherichia coli
atgaatgaattagagttttcgcaactttgggaaaaagaactacccatgtataaagcatggggagattttgtcgtctcaaatatttgcaaagaactctcagaaaataaagagcgggacctcaatagctttctcaagcaacctgcgacaccgagaataaaagaaaagacatctctaatcgataaagcttttcatcgaaaagaaaaatcatacaaaaacccctaccaagagattgaagataaagttggcatcaggtttgtcgttttacttacttcagatatagatgaaatatgtgaaataataaaaagtagtaataaatggcattataagacatcaagacactacgaagaagaaagattaaatacaccattaattttcacgtatcaatccgtacattttatagtaactgcaaaagaatcctttgattataatggagttatcattgaacaaggcattccatgtgagatacaggttagatctttattacaacatgcctatgccgagttaactcatgatgccatatataaagcaaaaactatagttgaaccagatatacatagaactgtagcaaaaagcatggcgttaatagaaactacggatgattttttctgttcagtatcgaaagcaattaacgcagcatctgatggttacgcaggaattcagcgaactttagataatatctacatagctttaacaaagaataaaccaaacaatcaaaaatcgactttattaattctagatacatttaaagaagtgatcaaacccgatacgatagaaagattacatcaatttatagaagagactcctgagctcgaactactaattcaggatggcaaagaagggagtagtttctttgaacaaagcgttgttattttcgtttactggttaatcaaaagacggagatctactttagaaaaagaatggccgctagattggaggctaatccaaaaaatggcagcggatctaggagttgcacttgaaagaaagacataa

SEQ ID NO: 26102 - DNA, 1092 bp, Escherichia coli
atgaatatcagcaaaatgaatattaacaaaataattatccaccaaattcatcagcgcgacgaagaaggaaacaaaatagaaccaacaagaggttcttcatttataaaatttgatgctgatgccttgcaaggttttaaatcacgagtaatcgacgctttaggtgatggttctaaagccgtaaaaatgcaaataaaggagcatggaaaagattatgttccttatattgctacaactttaattgataaagagggagaggattatattgatgagacttacacaatagctaataaactggcagatgcgcagacaagacgagcaattccaggcggaattgtagtaatcttttctggcgactatggtgtaaataaaagaaaattcattggaattatcaaggctgatatttatagtgcatatgaaaaagtaatcgacgataaaacgggccaaatatcattaaaattcgttgaagaaatattacttacaccatccacaaaactttataaaactgccggttttttccaatcaaccaattctcttgataatactgatcttaataaatcttgggatgtgatgatttctgactatcaaatcagtaagtcggatggtaaagctgcagcacaatatttttatcaaaattttttaggttgcggttacccagaaacaagtgcccgcacaacaaagaatttctatgaaaaaacgagtgaatttcttaatgaattggatgtcagcgaggaaaagaaaaatgtgcttaaaaatgcattagttacatatcttaaacatgaaaaatcggatgtaatttcagctaaagattatgctgaaagattttttgatgatagtattaaggatctttatcttgagtatgctcatgaatctggtataccacaaacctctttcacaagagacaacgagcatattgaaagcaaattaaaaacaagaaagcttaactttagtaaaaatataaaaatcacagcccctgcggaagtttttaaaagccatattgtaattgaatctactataggtgaactcgataaagatggtaaacctgctgagtggacaacaatcctcatcaaggacaagataacccttcaggaatga

SEQ ID NO: 26103 - DNA, 357 bp, Escherichia coli
atgactatatttttgagcactattactacactgatattagccttcgatttatctggatatgaaaaaatacagaaaaattctgctcttattgtgagtgcctgtcttactctagttagtgggtggactgcaagatttgattatcaaaaattatggtttaggcaaaaagctactttgctagccatgtatcaacttagaaacaaagttaattacttaaaatccaaagaagatgtaacccagtcagatattgatagtctttttgatgaatataaatctatttgggaaaaagacagtcaagaatggaataatattcacaaagaatatattgaaagcaaaaatataaaatcagataatcaataa

SEQ ID NO: 26104 - DNA, 870 bp, Escherichia coli
atgagtactaaaaggctaagtgattataagctttcaactgtgttaaccacagcacgatcgatgttatatggtgcaacacgccgtaaaactattgctgtagaagggccgtcagatgtaaggttttttaagcaatggttttcagaaaataataaagttagatttgtgtccttagatggaaaagataatatatattcattatatgataaatataaaagaacatcattaagtagctcaaaagctatgtttttttgtgtagatttagattgggatcttatacattcaatacctttaccagaaaaagaacattttttatgcaattcatattgtttaaatactggcaaatattattataacgacctagaatcttttttagtaaatactatagctttaaataaagtattaatatcatatgatgtaaacatcgatgattttaatttttttaaacaaaaattggaagccgcaaccagagctataggtaaaatacgagcagcagacgaaataacagtacgcaaacaaaaattgcgctcaagtatatttaatggatgtaatatggaaaattattttgatgcaaaaaatgtgatttttaatgaagatttacttatgcaagatatgccttcctggtctaattatcctctttatgtagatgatttgattgaagaggctaattcattaaatattaggttcaagactccgtggtcattgtctcgtggacatgatataaccaattttctttcgttatatgtaaatgaagttacatttataaagaccaatccaaaaagagttgaaaatgagttaagacttgcatgtgaatatgatgatttcaagagaacacctatgcatagtaaattattagcagagtcattattataa

SEQ ID NO: 26105 - DNA, 1338 bp, Escherichia coli
atgaaaatagagaaatttgaagtagacagattatttgatagatttgattatacaattgagctttctaacattaaccaaggtttggcaattattgctgctccaaatggttatggtaaaacaacaatattaaaaatgatagattccttttcaaaaggagatttttttatatttttcagagaaagtttcaaagaggtccgtttttatttatcttatggaaaagttattcagatcataaaaaaaagtgacaattctgagcaagatataattataactgacggtgagtatagcaatacgataaacgacccattaaatgataatcaattcattcattgggttaatattatcgaaaaatatatcccatacttacgacgtgtggggcctagaacatggagagatgaaagagaaggtgatattgtaaactttcaagatattttaaacagatacaaaaaacatccagctctcagaaaaagagtaggaaataaaatatcatggttggagtctgttatttcttcattagctgtattcactatttctactaataggttatcaaatggtgatgaagataaatctatggttcatcatatagccaaaaacattaaggaaaaaataggtggggccataagagatcaatttgaggaaggcagaaagaaggaaacaaacttcccaacaagaattatgaactatttagcaaaagggaactacccatctaaagaatccgttttacattcgattcaaaaattaaaagaaatagaagatcattatagcgatcttggcttaatacctgatactgaaacaacacaacaattcaatactcatattaagactacatcagacagtggtgctggactacttgtactgaaaacatatttagacgatgtttttgaaaaactgtcacttcttgatattttagcaaaaaaattagatatattttcatcctctgtcaataaattaatttcgttcaaggagataaaaacatcgatcgacgatggcttttatgtacggatggttgatggtaaaaaaaatacgatagccttagatagtctttcctcaggtgaacaacatctaattgttttaattggccgacttgtttttgaaacaagtaatgactctttagttctaattgatgaaccagaaatatcattccatccagaatggcaagaaaaatttattgaaatactcaacgagataaaaaagatgaatggttttgacgtcattttagcaactcactcaccgatattaataggggaagattattgggataatgtagttgaattggctgatcaatacaatcctattgaaattattgagctttcagataatttacgtctcgaggattaa

SEQ ID NO: 26106 - DNA, 222 bp, Escherichia coli
atgaccatcactactatcggtatcgatcttgctaaaaatgtgttcgctgttcatggggttgaccaaaatggcaaaaccgttctggtgaaatccagagtaacccgcgcagctcttcccgggctgattgcaagtttaccgccctgtgttatcgggatggaggcgtgctccggggctcattactgggcaagattgtttctgcaatatggcatgagccgcgtctga

SEQ ID NO: 26107 - DNA, 801 bp, Escherichia coli
atggccgctaaatttgtatctccataccgcatggccggtaaatcagggaaaaatgatgcagctgatgctcaggctatctgcgaagcggttcgtcgcccacatatgcggtttgttccagttaaggacgagagccagcaggcgatgcagtgtctgcatcgtacccgacagggttttatcgaagagaaaacagcaacatataatcgtcttcgagggttgatatcagaatccggcgtcattgccccacaaagtacagatgctttgcggcacatggtttctgcgcagaagagctctttacctcttcaggttcagcaatgtgtagatgatttactggaacacgttgatcgcattgaagctaacatcactgaatatgaccgaactttgtcccgcatagccaaaacagatcaccgcagtcagcggctgatgaagctaaaaggagttggtcccacaactgcctgtgctctggttgcctgtatcggtaatgcacatgattttaaaaatggacggcaactggcgacctggctggggttgactccatcgcaatacagtagcggcggaaagtcgaagttaggcaggataacaaaagccggtgattcgtatctgcgaacgcttctggtacagggggctcgttcagtactgattggcgctgagaaaaggactgacttattcagtcgttgggtctgttcactggtcgaacgcagaggatactggcgcgctgttgtggccatcgccgccaaaaatgcaaggctgtgctgggcatcattgcattacggtgatgatttcaggctgtattcagcaagctaa

SEQ ID NO: 26108 - DNA, 1236 bp, Escherichia coli
atgttaaaaaacatcatctatttattaagcgttcaaggtggcaattatatatttccattggtcacactgccttatcttgtcaggatccttgaacctacaggatacgggatatatgggtatagttttgctgtggtccaatattttatattatttattgattacggatttaactactcagcgcccaaaatcatatcaatatcaagggaaaatactgattccataagtaaagttttttggaatgtaacgtttatcaaaataattgcagcatctcttggtttgttaattatttatttaatttcggaattgaatatcattgattaccaaattaaatttatcattcttgcatacatatctgtcgtaggaaatttaatatatccagtatggttttttcaagggctggaaaaaatgttaggaatagcgataagtatgttttccgcacgcttacttacactatgtttaacatttttattggttaaaagtgaaaaggatcttggtatagcgataacaatacaatcatcaataacagttattgcaggtataatatctacatattttttattttctcttaaaaaaataatatgggtaccaccatccttatccaaaatgaaagagttaatttatgatggatggcattacttcatttcctctgcagcaataagcctttatactactagttcaacaataatattaggtgcattatcaggaacaactgcagtgggatattttatcgctgcagataaaattaggcttgcactacaaggcgttattggtcctataacccaagctgtttttcctagagtaacttatataatgaaggataatcatgacgatggactattattagccaggaaagtgtttcgatggcaattttcactgatgttcgtactttccatatttctttacttttttgcagacgatataattttaatcatgtatggaaaaacgtatcatgaatctttagaaatactcaaggttttagcttttactccagcaatagttacggtaagtaattatattgcaattttagtaatgatccctattggtatgaaaaaagaatttacaaaaattattactaccagtggattaataggcctactgataattacttatttgactaatgaatactcaggagttggtacagcaataggagttatttcaactgagtttataataatggcgagattttactttttgattaagaaaacaaataaattaaataatttaaatttattgtag

SEQ ID NO: 26109 - DNA, 726 bp, Escherichia coli
atgaataaaccaactttaacaatagttaccgttgtgtacaatggcgaaatgtatatcgaagatactataaaaagtgtcttatcacaaaactgcaatgatgacattgaatatattataattgatggtgcatcaacggataatactctaaatattgttaattcttacaaaaatgaaatttcatatatcatttctgaaaatgataatggtatatatgatgcaatgaataaaggtgtgttaaaagcatctggaaattatataggatttataaacgctgatgatttttataataaagatgtattatgtcaagtaataaaagtaatgaaagaaaataaatatgatgttatttatggaaatatgtctttggtagaggctgatagcttggatgttattcaggtccggaggcctaaagactggaaactacatatagatatgaatttaagccatccggccacatttattagaaaagatatccacagagaaaatttatttaatactagctataaaattgcttctgattatgatcttttgctaaaattgaagaaacaaggttatatctttcattatattgataaaaatatctcttcgatgagaaatgccggccttagcgctaaaaatgtaaaattagcattggaggaagcgagacaaatccgaaagaaaagaaacgggaaattatatgcggcgttagcagatatttacctatttatgagaaaagttataaaaagatga

SEQ ID NO: 26110 - DNA, 1071 bp, Escherichia coli
atgattaatagaaacataaaaattagtgcttcatttatttcaataatttatttgccttttgctttattattagcaatgattgaaatgattaatggggccagatggagtgtttatgtatgttcatttatgctaggggtactagcatttttgttaataccttatgaaaattgggatttgactaggcattatgaaacatatttatatgttagtcaaacatcactaaacaaagtttttgaaaatagtgacaatagatatattacaataaatactgttatttatttatttaaatctttaggaataaaaaaagaatttttaccttttattatgctttatatgatcatacagtatttcaccagtgaaaataataggtataagtcacaaaaaattatattctctgcaattatttcatgttgtattcatcccagcgcaatactattgctaggtgttttttttgttagcaaattaataagacttaacaaaacaatattgtatttaataatattagttctaatccttaaccatgatggattaatatcttctttgctatttcaattgattaggccattattggaaagcttaggtttttactttcccgaatatatggactctgtaaccataggcataagcaatagcttgctgagcactaatgaatatatcttgaataagatcatattaccgtcagtgttttttatttttacttttatctatttaattttatttaataaaaaaatgacgaggcaagagtcacaaatcaaaaatttttgcagtttacttcttttgctgatatgccttttatcgttatcgcctgatttattttatcgattttccattttctgggtgttattatatagttatatatttttctcctacgatattaataaaattagcaaactatgtaagcatctgatcttcttaatactcattaccgcatgttcaatcataaatttggcacaggcaaatatgggtaaagatattatttatgtgtcttggtgcgatatattgtataagccctcattattcctattcaataaagaagttaaatcagcagaatatataagagtgagtcaataa

SEQ ID NO: 26111 - DNA, 1008 bp, Escherichia coli
atgaaaatattatatgatgggattgtgaaaagtttacaatcatatggtggtatcactgtatactttgaagaaatcattaagagattaaaaaatgacgaatacaaattcattcaatttaatgataaaaatgaaaatcacaatgatgatctccatcggccatgccggtttttagaacgatatagatgttttgaagcattaaaaagtgattcagattacagtatatttcattctacatattatcgggttccgaaagatggggaatatgcggttgtgaccacggtccacgatttcacatatgaattgtatatgaaaggacttcggcgcaatgttcatagcttacaaaaaagatgggctgtgaaacatagcgatgcaatcatttgtgtctctaataatacagccaaggatttaattaatttctttaaggttgatgaaaaaaagatacatgttattcataatggtgtatcggaagattatagacacttaaatctagaaaaagaaaattttgtgctttttgtcggtgctcgttcaggatataaaaattttgagcttgcagttaaagccgtttctaaactttttgatactaatcttaaaatagtcggcggaggtggtttaaataaagcagaaatgaagttactatctgaatatcttccagaaagattccagtacttagggaaggtatcaaatgaaaaactaaatatattatataattcggcttattgcttaatctatccttcagaatatgaagggtttggaattcccttgcttgaggctatgcgaactggctgtcctgtgatagccgtaaatagatcatcaatacccgaggttgtgggggatagtgcgattttagtcgaagaagtatcaattgaaagtttattctcagctttattaagtgtagaagctaacgctaatgaattaaaaaataaaggattagcgcaatctaataaattttcatgggggaagtgtttctccgaaacatataatctatataaatcactatctaagttttga

SEQ ID NO: 26112 - DNA, 435 bp, Escherichia coli
gtgcactttgatcaattccacaggtgcgccgagggctttaaagcgggcttcgatagcgtccaccaccggacccgctgcgccgttcccggagttgatcaccagcttgagcggcgtgaggtttttgacattgatataaccgaacaggtgatcaacgtaagcgtcacgcaggttgatttgctgatagcgaccgcgtttggtttcatcgacgggaggaaagtcgttggcttcagccagacgctggacgtcgcgcagtccggtatctccgctgatcgggcgagccccctcgcgaaccagcttcatgccgttataatccatcggattatggctggcggtaacttcaatgccgccatccacgccgagatggaacgtggcgaaatagatctcttcggtgccggacatgccgatatccagcacatcgacgcccgcatcctgtaa

SEQ ID NO: 26113 - DNA, 897 bp, Escherichia coli
gtggtgttcccgcctgaactggtgcggctgctggacaggctggagggggaaatccgggcagaccgtgtgagtgacgaaagccgggcgtggcttgcgcagtgcgggctgacggtggagcggctggcggcacagatcgagccagtttatttgcctgagcgaaaaatacatctttatcactgcgaccaccggggactgccgctggcgcttatcagtactgaaggtgcaacggaatggcgtggggagtatgacgagtgggggaatcagcttaatgaggagaacccgcatcatctgttccagccataccgcctgccggggcagcagtacgatgatgaatcggggctgtgctataatcgttatcgttactacgagccgttacaagggaggtatattacacaggacccgattgggttaaatggggggtggaatttatataaatatccgctgaatccaataaattatgcagatcctcttggcttagccgtagatataaaccacttcccagtcaacgaagacatacgaaattatgcagagaaagtttggaataatcctaatatcattacaattggaacacatggtgatcctcaatcagtatatgatgaaaattataataagatagatgtcaagacattagctaatgaggttcgaaatcatcctaaatttaaacctggaatgtcagtaagactgttatcctgtaatacaggaaaaggaaataactcttatgcacagcaattggcagatgaactaggtgtgagagtctatgctcctgaccaatatgactggtactattcaaatggtaaggtagagccttggggaggattttatgatgcaaacaatcaattgcaaatggacacgaatcagcctggacatgagtttacattcaagcgaaggagaccatag

SEQ ID NO: 26114 - DNA, 177 bp, Escherichia coli
atgcccttgaagatgacgacgatgttcaaaaagtttatcataacgtcgcaaatctctaattatattttaaaggaatctgtctttatggcagatttctttaatctcatatattcttataaaaaatataatattcaactcgtcatattgattataaaaataccgaccccagagaaataa

SEQ ID NO: 26115 - DNA, 312 bp, Escherichia coli
gtgtcactagtcataaaatactttgttattgcattaataattgccctcattgtcgtcttatttaatgttttcagtgccaccggagttatcagggatttctggcagggagttagttacttgttctggatgaccctgggccccggtgctggtatgagtgtcggcgctttcctgcgtcagtggctgatgccagatgcaattattaccagtggcggcatgggagaacaactcaaagcccgtattttctggtcaatcggaccacagtgtatcggttggtttgccgggatgctggttgtggggcaacaaattaactga

SEQ ID NO: 26116 - DNA, 291 bp, Escherichia coli
atgatgaacaaaccgatactactgaaacgacaaaaattccttctgcccccaacattaattgccatcctgctactaagcggttgcggggacaaaaacgagcgcgattttatccgcggatgtaaatcaggaggatattccactgctttatgtggttgcatctgggacgaactgcaaaaaatttacgttaatgatgaactgttgctaaccagtcagagcggacagttaccgcctgactttatgcgtaatatgcagaaagccagcctgcagtgcagcataaaattcaaccgttaa

SEQ ID NO: 26117 - DNA, 507 bp, Escherichia coli
atgcaatcgattcatcattcactgctgttgttccttattacaaccaccttctccctgtcaggtgtttacgctcagacacctgatgctctgagaaaaaaaaatgaattgcgctgtgagagactcgtattttatgcgcaaacagttaaccataaaaaagaagtggagatttgcctcgtctcaccatcagtttcctattcgtttggtaagacaggagccccaaataaagaaatggaacttattgttcccaccgataagacctcatatgccagtcagaataaccaggttattcgcctgcaggaatttactgtcaaaaacggcaacactacctatcaagtgtcagccggaacgaacgatgaagggcataacttcgccactctggatgtttatcagggaacagaacaaaccggtaagcatctggcagagataaaactggatcccaaaaccatggtgaacaacattgaccattctctggcaaatgaaggtattccctctgcccctgacctctga

SEQ ID NO: 26118 - DNA, 237 bp, Escherichia coli
atggcaggtcagccctttagcatacagcgtgacggtattctgacggtggggattcagttcactgctggtgagcatgagttccagttgtttcatcagcagcggaaaggcctagtccaggtggtacgcatccgcgtcgctgaaccggcctctgataccggcgcggtcggcaaggtaatgcaactgattgccctcctgcaccagacgggcgccgaaacagggcgtcgcggtgcagggtag

SEQ ID NO: 26119 - DNA, 1080 bp, Escherichia coli
atgttcggatattacagagaggtgtttgtgaaggatattagacatattttatctgtcgctgtgtgtctttacagcagtttggctacgggagggagtgcaatttattttaactttaaaggagttcaaacaggagaggccattaataatacgacttccgggcaaacaatcacagtacctgtggcgttgaactctttaggcaatacaggaactgtagcaggtgtccctgaatgtaatggacaatatgatataaattattttacggttttctaccacaggttaggtataccaaaaaaaattcaattagggaatcaatgggtcgatgtacaggtaaatgcacctggttatgtcagggatacagaagatcaaaattacgtgtattattactccaatgaggaaaatggtggtcgtggttacagatatgcaggaaagagttgctggggggcaggggaggtcgtagacgtaactccgtttgccccgagtatcccccctgctgtaactctgagtgtacgccttccgccggacttacccgatggtttgactgagatgctgataccggtcaaatatgggaaaaatgtcaattttttaagaggcatatgggactggaatactcatcggaaggatttgatgtcggcagggacaacaattgcagctcagtcaacagcaacatccttccttctgtatagaagggatatcataaataaggcaaaatgctcatttgataagccatcatacgatatagatcacaaaaacgttagtatcaacgatgcattagcaaatatagccatggctgaaactaatgtcaagttaacatgtaccgcacctacagatgtaaaaattaaattatcaacaccaaaaacacctaattataataatagtcatttttcagttaatcttgggaatggctgggattctgtaatcagtcttgatggttattcttatgatgaagcgaatctccaaaataagtatgttacccagtcaggaagaacaatcaaaataggaagcaagctttacggagatgtttcaaaagtgaagcccgggggtattaatggtagtctggttatgacttttgactttcagtaa

SEQ ID NO: 26120 - DNA, 222 bp, Escherichia coli
atgattaacaaagcaattttagagacaaccacttttcatgatcttaagcttctttctgaatgtttcataagcctgattgaatgtgcacaggaagaaaacgatctcggtttactcgatgatattatagacaacattgcaacttataaaatcccgctcactattgctatgaagaaagcacgtgaagcacaacaacaattagaacaattagaggaagtggcataa

SEQ ID NO: 26121 - DNA, 309 bp, Escherichia coli
atgagcgaagttcacaccgtaactattcaaatgatggatctggttattgatttacagaaagcagtgaacgcggctctgacctttccaagcgagctaaccattacacaggcggttattaatctggaatcgacgcgggaagcactgcaattgcttattgaagcttgtgatcaatcagaaggtgcaatgattgaagccgacgacctttctaatctgatcatcgtcatcaacgacaccacagaaatcatgcaagaagcggtagcagatttgcaaccactcatagcagaactaatcgataaggttaaccaatga

SEQ ID NO: 26122 - DNA, 501 bp, Escherichia coli
atgcgtagtaaattatccattcttattcttgctttgatgacctgtggtgccgcaaatgccgcaactgtagtaggtgatgttgccactgttcaggctccagtagtatttagtgcacagaataccatcaacgcaacctggactcaggatccctctgtatctggttcttcagttcaggcaatgcaaaaactgggtactcttaatattcaattaaccggttctcatgcaggggtctatgtttcaggagatgatacgggggtaagtggcggcctcgttactatcccatttaaaaatgctgcaggtcaggttctgttccgtggacgtactaatgccgatattggacaagcggccaacacgctcatagcaggccacggtggaccgggttggaatttgccagacgctgggaataatattaatcttgatattagagccttccaaaaaaatgataatatccctgctggaacatatacagcaacattctacattcaacaatatcagagctaa

SEQ ID NO: 26123 - DNA, 762 bp, Escherichia coli
atgtacaaatatagaaagatttttctccctgttttatttttaacttcttttttaagtcacgcgcaaatagcaaacgcttcagctgcgaaattgaattccattatcaaaacagaaaacaaaatctatggcttacgattaggaagtactcgtgttatttataatgagggaatgttagcgtcatctttttggattaggaatgaaaaagaatatcctataattgtacaatctcagattttctctgatgataaaaagtcgaaagctccatttatcataacaccgcctgtattaagacttgaaagtgaaattcaaacgaggttaagaattgttccggtttcaaatgttctgaaacaagacagggaatcattattctggatatgtgtaaaaggcattccaccggaaaatatatcatcttatgacgctgagaacaataataaatcagcacatattaatataaacgtaatcaccaatagttgcattaagttactaactaggccgaaatcagttaacatatcggtagaagaagctaacaagaaattaagatgggatattaaggaggggaatttgttagtagaaaacccatcccctctctatataaatatagcaagaataactgtaaatggaaaagaggtcactataccagatggatatattgagccttacaagtctgtaagtaacataactaaagccagcaaaggagataaggttaattcagttgtattggatgacataggttctgaaattaataacgaagtgacgctttaa

SEQ ID NO: 26124 - DNA, 2448 bp, Escherichia coli
atgaagaagactgtttctgctttaattctgacatccatcattaatgcaggggattcttttgcaaaagaatataaatttaactatcgatacttaggaatggacggaaatgcagattttcatttttttgatagcaaaacaactgcaggaaactatgttattgatatatatgtcaataatgaactaaaagaaacaaccgaaatatattttagaaataaaggtaatgatcttatcccttgtctgatacaggaaaatctcattaaatatggatttttgcaaaaaaaaattgatgagttaacctttgatgatgagcaatgtgttaatcttgacaaggaaaatatagaatacctctttaacccaacaaatcaaatcttactgttaaacatcccatcaagctttttagctgacaagaacagcgagattgctgatgaatcgctttgggatgatgggcttaatgcgttgatatttaattatcaggctaattatttaaagtcaaacaataaaagaggtgattcatattttggtcaaatagaaccgggactcaacgtaggtccatggcgcattagaaatttatccacgtggaaaaagtcaaaagcagatacagattttgagtcagcatacatatatgctgaaaggggaattaattcattaaaaagcagactgattattggcgacaagtatactaacacgaatatttttgacagtatctcttttcgagggattaccttcaataaagatgaaaatatgattccgtattctgcgagagcttactcgccgaaaatccgtggaattgctaaaacacaagccgttgtggaaattagacaaaatggctatcttctttattctacttcagttccgcctggtgaatttgaaattaacggcgatcagttcagtaactttgaaagtggcttatttgatgtcacagtcattgagagtaacggacagaaacaaatgtattctgttccttacacaatacccgttatttctctggcgaaaggttattcaaattatagttttacggccggtaagtatcgcaatgcagatatacataaaaatgaaccaatattcgcagagggcacatattcctacggtcttccttatggtctaagtatatttggtggtattcaactggccgatatttatagttcttatgccgttggtataagtaaggatgccggtgaatatggcgcaatctcctttgacatgaagtacgctaaatctaaaccgtatgaaaaatcctcttttatagatggtagtgcttatggcataaggtatactaaaaatttcaacactacaaatactgatatatctatcgcaaactattactattattcaaaagattatcgcacattttccgaagcaataaatagttactataattatgggtattacaacaaaaaatcaacaacttatgcaatattaagccaacctttgggtgccttgggggcgattaacttaagttataatcatgataactattgggaaaaaaacggaagcaactcaattgcagtttggtatggaaaaaatattggcagtacatctctatccttaagctatacacgaacagcctttaaaaaatatggaaagaacgataatgaagacttgtttaacataatgttaaacattcctttgcgtgacttaacaaagaaggaaatttacgcgaactatcaattgacttcatcgtctgataataaaacaatgcatgatataggtctcaacggcatggcatttgacaggcgtatgagctggcaagtaagggaacaaatccaagaagcctcaaaatataaaaaattcagttatcttaatgcatcgtggaatggaacgtatggaacatttggtgcgaactacaactatagtaacactcatcgtgaagttggcttagcactctcaggtggtattttagcacattcatcaggaataacatttggacaccgtatttccaatactacggctttagttgaagcaaaaggtgttagtggagctaccgttttagggcttcctggtataaaaactgattttagaggttatacattctctagttcactaatgccatatatgaataatacagtatcgatagatccgagtacactgccaaataatagcagcattaaacaaactgatattaaagtagtcccaactacaggggcgattgttaaggcaaaatataataccagtatcggagtgaatgcactgattaaaatcagtaataaaaaaggaaaaaatttaccttttggcacaattttagcagttaaagatgaaaaaggagtggtgcaatcaacatctattgttggcgataatggtgaggcttatgtcacaggtctggatggaacacaggaaataaatgcaacttggggaagagaagcctctgatagttgtaaggtcagatacagccttactggaaatcactcgaaagaacaatcgctgactttcctgaacggagtttgtaaatga

SEQ ID NO: 26125 - DNA, 450 bp, Escherichia coli
atgaaatgtttcttattaaaagaaaactactgtctattgatgctattactattttctttattaacatattcaacgatagctgcagctaagaatttagaaattagcatcaatatggataatgaaaaactcaaccaatccactcagaacaaccatgttttgggtacaggttatgtcaaaagcaatggtgaatcatatgtcatagtcagttctaacgcagaaaaagtacctggacaacaagcaacatacatatttagaggtaaaaacaacccacaaaatagaatagcaatcaggcttggtggcgaaggctggcatccggataaaagtggactagggattagttcgcacattaatatgctatcaaaatttgagctgtatttttcaaataattatagagttaatcctgatgtttatttgatacacctatttgctaaagaagttgaagcagattaa

SEQ ID NO: 26126 - DNA, 798 bp, Escherichia coli
atgaaattaagacaaaacatcgaaaaagagattataaaaattaataatgttagaatacatgagtacactgtattatatacatctaattgtacaatcgatgtatacacaaaagaaggaagtaatacatatcttagcaatgaactcatatttcttgagagaggaattaatatatcagtaaggttgcaaaagaagaaatcctcaggaaaaccgtatatcgcaatcagattaaacagcgatacattaagacgtctaaaagatgccctgatgataatatacggaatatcaaaagtagatgcttgcagttgcccgaattggtcaaaaggaataattgtggcatatacagacagttctatattggatatattcaagagtatagatcataatgatggttcaaggattgcatctgatttgatatatcttatatcaaagatcgaaaataacaggaagattatagaatcaatttatatatcggctgcaagcttcttttccgataaggtcagaaacaccatcgagaaagacttatcaaggagatggactctagctattattgcagatgaatttaatgtatcagagataacaataaggaagaggcttgagtcagagtgtattacctttaaccagatcctgatgcaatcaagaatgagcaaagcagcattgctgttgcttgataactcatatcagatatcacagatatctaatatgatagggttttccagtacatcatatttcatcaggcttttcggaaaacattttggtgttacaccaaaacagttcctgacttattttaaaagctactaa

SEQ ID NO: 26127 - DNA, 567 bp, Escherichia coli
atgcagccagagcagttcccccgtctcagggttatgcaccgtctggcgctcgccggtgagacgtcccttacggttatagccgtaatgcaccgccacccggtgaccttcgctcaggtggctgatttctttcagccagccgtgggcgttataccgccactgctctgccggttcgccgttcaccgtgcggtgtgtgatacggtccgattcgtcgtagtgccagagggtgacaagcccctcatccccgttctgcgtgagtttcccggtcaggtcgtaacggtaacgttgcgtccgcccgtcaaagccgcgctgctgtaccagccggtccagcgcatcgtagctgaagtcgctgtgactgccgttctcgttggtcaggctgatgacacgtcctgccgcgtcatactccatactgcgcgtcagcccgtcctgtgtggtgctgaccgcctttccccacgcatcgtactgtgtctcgctccggttgccgtccggggtgataacggcagtcaggtcgcctgcggcgttgtactcataccgcgtttcatggccctgtgcgtctttcaccgaggttaa

SEQ ID NO: 26128 - DNA, 717 bp, Escherichia coli
atgagtaaattaagcagtgaaatgaaggcgctggcgaagaaagcgggcggcagcttcaaaacggtgaatgaccgtatccatattacaaaacggttcagtgaacatttacgggcgctgaatatccagatccagcgggtggagcagatcaaggttcgccatatcgaatgctacattgaggaacggctggagctggatattggtttacgaacgttgcaaaacgaaatggcagcgttgcgggccgtgctgagacaggctggacgcaggcaggtggtggagcatccgcgtctgaccaataaggcattaggggtatcaggcgcttcgcgcaacggcacgcgccgcgccatcacgccggaacattaccagcaggtgatggagaaagcccgtactcaggacgcagggctggcagcagcgctggagattgcgcggctgatggggctgcgttcgcaggaggcggtacagagttcacagtcgctgaaaacgtggctgaaagccatttcccgcggtgaaacccggctaaaagtggtatttggcaccaaaggcgggcgtccccgttatacgacagtcctggatactggcgcagggattcagcgaaaaggagtcactggcgctgacggcgacggatctgggtcatggcgacggtcgcggtcgctgggtgaaacaggtgtacggctaccgctggagggaggaatgactgaattcatgaatgtcgcaaaatag

SEQ ID NO: 26129 - DNA, 1263 bp, Escherichia coli
atgtctttaaacgattctaaaatccgcaagttaaaaccctcttcccgtccggtaaaactctccgactctcacggtctgtatctgctcgtcaatccgggcggttcacgcatctggtatctcaaatatcgtttcaacggaaaagaatccagagtcagtcttggcgcatacccgcttgtctcactggcagaagccaggcaacagcgcgacggtatccgtaagttactggcgcagaatatcaacccggcgcagcagcgcatggcggaggaagcggcctgctcccctgaaaagtgctttaaggcagtggcgctggcctggcacaaaaccaacaaaaaatggtcggctgattatgccgcccgtattctcgccagtatggaaaaccatatcttcccggcgattggtcatctgcccgttgccactcttaaaacgcaggatttcactgctttgttgcgggttatcgaggataaaggctttctggaagtcgcgtcccgaacccggcagcaactcagcaacatcatgcgctatgccgttcagcaggggcttaccgaaagcaatccggcgcagcatctggatggcgttgtcgcctcacccgtaaagaaccactaccccgcgttactgctggagcggttgcccgaactgcttggccgcatcggtgactatcagcagggccgggagttaacacggctggcggtggtgctgacgttgcacctgtttatccgttccagcgaactgcgtttcgcccgctggagcgagatcgatttcaggcacaaaatctggaccatccccgccacccgcgaggcaatcgacaaagtacggttttcggggcgtggcgcaaaaatacgtaccccgcatatcgtgccgctctcccgccaggcgattgccattctgaaacagatacaggagctttccggccatctggatctggtgtttcccggtgatcataactcgtacaagccaatgagtgaaaacaccaccaaccgggcgctacgcctgatggggtatgatacgaaaactgaaatctgcgggcatggactcagggcgatggcctgtagcgccctggtggaatcggagctgtggtcacgcgatacggtggagcggcaaatgagccaccaggagcgtaacagcgtgcgggcagcctatgtgcataaagcggagcatctggaggccagaaaggccatgatgcagtggtggtcggattatctggatgtgtgccgcgaggggtatgttgcgccgtacatttatgcccggcagcataaggcagcctga

SEQ ID NO: 26130 - DNA, 168 bp, Escherichia coli
atgactttttcgtggatttccacggaacgcgagaagcaggttgttaagttcaatacgttgcgtgaagattttgccggtcaggtgtttctccttcggcacttctctggcgtagttgctccgatcatcgctggtcaccatgccggtacattccgtggcctgaaagtgtaa

SEQ ID NO: 26131 - DNA, 450 bp, Escherichia coli
atgaaatgtaatgattaccagtcaattaaaaaggaattgcgagaatatgttaataaaatacgagtgaatactaattatttccgaagtgattttattgctgaatgggcgttgcttactactattgcttgttggggagctccggaagggagggtaaggtttatatcatttatgataacccttgctttcttttcttcaaaaatatatataccaagaagaaaacgtacaacgcctgattttatatttatgatgaaggcgcgaattattaatgctcatttattggatgaacaaagaatatttttaaacaagagacttattaagattcatagagtaacaagaaatacaaatgttattttttatgtgaggcggtgctggaaatatattcttggatatttatttttagccttttcatcaatgttttcaatattttgggatcttaatattcagtggtga

SEQ ID NO: 26132 - DNA, 4095 bp, Escherichia coli
atgaacaaaatatattatcttaagtattgccatataaccaaaagcctgattgctgtctccgaactggcccgcagggttacctgcaaaagccatcgcagactttcacgtcgggttattcttacgtctgttgcagctttatcactttcttcggcatggccagctctgtcagcaacggtcagtgcagagatcccttatcagatattccgcgactttgccgagaataaaggtcagtttacgccggggaccacgaatatttccatttacgacaagcagggcaatctggtcggtaaacttgataaagccccgatggctgatttcagtagtgccactattactaccggtagcctgcctccgggaaaccatacactttactcccctcagtatgtggttaccgccaaacatgtcagcggttctgacacgatgagcttcggatacgccaaaaacacctatactgcggttggtacaaataataatagcggtcttgatattaaaacccgccgcctgagtaaactggtgacagaggtggcgccggcagaagtgtctgacatcggggctgtgagcggtgcctatcaggccggcggacgctttactgcattctatcgccttgggggggggatgcagtacgtcaaagacaaaaatggtaatcgtacccaagtgtataccaatggcggatttcttgttgggggaaccgtcagcgcgctgaactcctataacaacggacagatgattacagctcagaccggtgacatttttaatcccgcgaatggacctctggctaattatctgaatatgggggacagcggctcccccctgtttgcttatgattccctgcaaaaaaaatgggtactgattggcgtgctttcctcaggaactaactatggaaataactgggtcgtcaccactcagggtttccttggtcagcaaccgcaaaatgattttgacaaaactatagcctacacctctggtgagggagtactgcagtggaaatatgatgcggctaatggcaccggcacactgactcagggaaacacgacttgggatatgcatggaaagaaaggaaatgatctgaacgcaggaaaaaacctcctgttcaccggcaataatggcgaggtcgttctgcagaattccgttaatcagggagctgggtatctgcagtttgccggcgattacagggtgtccgccctgaacggccagacatggatggggggcgggattatcaccgataaaggaacccacgttctgtggcaggtgaacggagttgccggtgataacctgcataaaactggcgaaggtaccctgacagtaaacgggaccggtgtgaatgcaggcggactcaaggtgggggacggtaccgttattctcaaccagcaggcggatgctgacggaaaggtacaggctttcagctctgttggtattgccagcggtcgtccgacagttgtgctttctgactcacagcaagttaatccggataatatttcgtggggataccgtggaggacgtctggaactgaatggtaataacctgacctttacccgtcttcaggcggctgactacggggccatcattaccaataacagtgagaaaaaatcaacggtaacactcgaccttcagacattaaaagccagtgacatcaatgtaccggttaatactgtcagtatttttggggggagaggagcgccgggagacctatattatgacagttctaccaagcaatatttcatcctgaaagcgagttcatattccccgtttttctccgatctgaacaacagcagtgtctggcagaatgtcggaaaagatcgtaataaagccattgatactgtgaagcaacaaaaaattgaggccagcagccagccttatatgtatcacggccaactaaacggcaatatggatgtgaatattccgcagctctcaggtaaggatgtactggctcttgatggttcagttaacctgccagaaggttcgataaccaagaagtccggcacgctgatattccagggtcatccagttattcatgctggaacgacgacttcttccagccagagcgactgggaaacccgtcagtttacgctggaaaaactgaaactcgatgcggcaacattccatctgtccagaaacggcaagatgcagggagatattaacgccacgaatggaagtacagtcattctgggaagtagccgtgtctttactgacaggagtgacggaaccggtaatgcggtctcctctgttgaagggagtgccactgcaaccacagttggtgaccagagtgattacagcggaaatgttacgctggaaaataaatcatccctgcaaatcatggagagattcaccggtggtattgaggcttatgatagcaccgtgagtgtgacctctcagaatgctgtttttgaccgtgttggcagctttgtcaacagcagcctgaccctcggaaaaggagcaaaacttacggctcagagcggtattttcagcaccggggctgtggatgtaaaagaaaatgcttctctgaccctgacggggatgccttctgcgcagaaacaggggtattactcacccgtaatttctacaacagaagggattaacctcgaagataaggccagcttttctgttaaaaatatgggctatctgagttcggatattcatgcaggaaccactgcggcaaccattaatctgggagacagtgatgctgatgcagggaagacggactctccgttattcagctccttaatgaagggatataacgctgttttgagaggcagtattacgggggcacagagtacggtaaatatgatcaatgctctgtggtactctgacggaaaatcagaggccggtgcactgaaggctaagggctcgcgaattgaactgggggacgggaaacactttgccactttacaagtaaaagagctttctgcagataataccacgttcctgatgcataccaacaacagctgggctgaccagttgaatgtcacagacaaactgtcaggcagtaataatagcgtcctggttgactttttaaacaaaccagccagtgaaatgagcgtgacgttaattaccgcaccgaaagggagtgatgagaaaacgttcactgccggtacgcagcagattggtttcagtaacgttacgccagtaatcagcacggaaaaaacgaatgatgccacaaaatgggtgctgacaggatatcagactaccgctgatgccggagcctcgaaagccgcaaaagactttatggcatcaggttataagtccttccttacagaggtcaataacctgaacaaacgtatgggtgacctgcgggatactcagggggatgccggtgtctgggcacgcataatgaatggtaccggttcggcagatggtgactacagcgataactacactcacgttcagattggtgtcgacagaaagcatgagctggacggtgtggatttatttacgggggcattgctgacctatacggacagcaatgcaagcagccacgcattcagtggaaaaaccaaatccgtgggtggcggtctgtatgcctctgcactctttaattccggagcttattttgacctgattggtaaatatctccatcatgataatcagcacacggcgaattttgcctcactgggaacaaaagactacagctctcattcctggtatgccggtgctgaagttggttatcgttaccacctgacgaaagagtcttgggtggagccacagatagagctggtttacggttctgtatcaggaaaagcttttagctgggaagaccggggaatggctctgagcatgaaagacaaggattataacccactgattggccgtactggtgttgacgtgggaagagccttctccggagacgactggaaaatcacagctcgagccgggctgggttatcagttcgacctgctggcgaacggagaaacggttctgcaggatgcttccggagagaaacgtttcgaaggtgaaaaagatagcaggatgctgatgacggtagggatgaatgcggaaattaaggataatatgcgtttgggactggagctggagaaatcagcgttcgggaaatataatgtggataatgcgataaacgccaacttccgttatgttttctga

SEQ ID NO: 26133 - DNA, 1215 bp, Escherichia coli
atgaaattcgctattgtcttattgtatttttttgcctattatctcgcagcaaggaaaagatggtggaggctttctcttgctatttttttatactctgttattttctctggaatgtatttttctggttgtttattagagtgttatggcagttctaatttataccttttatctgtattactctgctataatatgataacttttgtcatatatggtttcctgaattcttatggtttacgtggagcatgtctacatgcactctcattaacttcattatccgccttcgggatgtttataccattaaatccgttgattgttttatattatgattttcctgacctcttacccaaaacaggtattcctgttttaaatttattaatattaaatcttatcccggcgattacatttagtctaaaaatatcattttttcttcgttctcttatgttattgccgttgttttcgctaatatggaaaatgccggttaatataacacataaacctctgaacattgtgattgtacaagttggcctctattttaaaaaagtaggtgtcagaggtaatttttatactgaccttaatgactttgtcagaaataagaaggttgacctaattatcttctcagaaaatgtttttttcggttataagaatgattatataaaggaaaggactaaacatctcttagagcaattgaaagataatcggtcccactataaatatgggatattaatgaatttttatggatataaagacattaataatgtagtgtctgctttctggcataaagaagagtttcttctccaccagaaaagcaaattgatacctttttttgagaagaaaagtttttataatttaccagaaccatcgacatcaccttttctatattataaaaagaaatataatgaacaggatattttggatttcaacaatattaaaatgagtgttcacatatgttatgagggattatttcctgaggctaaatttcgaagaaaagacatgtccattgttcaatccgattattcatggttaagtggcaatcacaaatatgacaatatccttattaatggaagcatattatcgaaattctctgtttcgccgaatactcctcttgttaatattcaaaattatggtggaacagttcttatagacaaggattggaaaattgatatgaacctattcaaaaggtcaaaaacggagccttttttatttatacagatgtga

SEQ ID NO: 26134 - DNA, 630 bp, Escherichia coli
atgattagaataaaaatacataaaaaacctatagaaaacagaaccatcctgaataataggattattgagataaaagaggggtcgttcaatattattactggtccgtctggggttggaaagagttcactacttaacattattggtctgttagataatgcctttgttggagagtatgagtttttcggtaaaaaagtggatataaaagataataacatcaccacatatatcagaagaaaatattttggattcatctttcaggattctctgattaatgtaaagcaaaatgtcacaagaaatatactatgttctgtcgactctcaaaatataataaccgcaagggaaaggattaatgatatcttggtgtctgttggattatccaatattaataataatgtatcatttctttcagggggagaaaaacaaagattagcacttgctagggcattgataaaaaatcccagtatacttttagcagatgaacctactgctagtttagatataaagaataaaaaattagtgatgaacatactatctgaatataataaactaggaggaacagtcgttatggtaactcatgatcttgaactaatcgatgataatatgactttagtccaattattaaatacgtag

SEQ ID NO: 26135 - DNA, 591 bp, Escherichia coli
atgaatcatgagtatactgcaaagaaagatattgtggcaataaaaaggaatatggaagagaaaaaactagctagattaaaggaagtaaagacacattcaacctctatgatctcaaaagggtttatttcaagagaaaatttacatgatatagatgagaaaatcagcaatactgaattgactattatgggactggacatagagtcaaagaatctggaacacttattaaagttgtcatcaccgtttttgcatactcctttcatcattcgaaatatcttcgtaacaaatgagcagtatgtaaatgtaggtgatgatataatgtctatagaacttctggataatttctacatagatgttaaattcgatccggtcagtataacaggaaatataagagacaagagaataaggtatcgttctttggttaattctctaatggggtctgcaactgtagtcaaaaatatccgtgccagtggagaatcaaatcaaggtgaggatacatcaggtctgcgaattattacgctgttaattgatggcgaccggaatgagttgtcgaacctattagatactgcgtttgagattattatcgatgattag

SEQ ID NO: 26136 - DNA, 1239 bp, Escherichia coli
gtgaggcacatattatactcatttcttgcactaaatgcttatctgttttcgacacagactctggcaaaagactgtatcattgataatttctttcagaaaagtatccagtttaattcttattctcttgatatcgaagagttagatattaataaaaataacaatataaaaacaatgttgccagatataaatatagggttaggacagtatataaacaacaatcagtggttctcatctcttacagacagcaatttttatttatcattatcctataatcttctatcggcttatgaagcaaaaatgcagaatgataaattgaatgttgctaattatttaaaatatattgaaatgcttagtgaaaggaacaactatataattaatttgttctcggaagttattaactataagataaaaaaatctcaccttatgttgatgcgcgagagatataaaaaattcaataaagaatacgaaattgcaaagcatcaaatgtcaattggattaatatctgttcttgatgtcgagatgagatataatatattacaaaaaatcaggtttgatattaatgtccttgaggaggaagaaagtttactgtcagataaaatttcgagagaatattatgttcctgagaatgcaatcccagacattacatataataaattaaaagagtgtaaaacagcagatttctatacattattagctgaaaacaacagactcaagattaagactgttgatatagataatgatataagaagactatctgagatcccatctttttatttatcatttggactaacacctaaacaaggaggtgcattgggtaatatgagtctcaggaaaatggattatagtgctagtctgggtatcagctttcctttgatgggattatttagctcttcagaaaataaaaaagaaaaaattatttctatgtctcgaactagaaatgaatcattgaaggaaaatataaagctagatctattaaaaaaagaaattcgccagaaaattgatagattagagaaaaatcttgcggtgatgaaaaatgaactaactttgaaaaggagaaaagttgagtatataaattaccgcgtaaagaacggacaagacgacgttatcacttatttgtctagtgtagagaatttacatgaaacagaaaatgaattccagaaaattggatatgagattgaatattatagtttatatcattattttcttctgcagcataattccagtaaagggaaaatgtga

SEQ ID NO: 26137 - DNA, 1164 bp, Escherichia coli
gtgtggcaggggattcttgtgttatcattcaacatgacaactttgcactattatctaaaggaggctctccttaacatcatagaaaataaaagacagaattttgcatttcttgtttttttgtctcttagctttatagggataattattactgactctttgatattcagtgtttccttaaaagctgaagaagaactaaaagttcatagtgacaagataatatttgtcaaattttatcgacctaaaacagcagaatatataacgaaaaaattcattacggttagtaaagttctttctttctcgaagaatgcattcctctatgtcggcgatacacctttttccggtgaaccattttcggtaaacggaatagacaaactgggattgaacacgggatatatgggagacttaagtgataagtacaatggcaatgttgctattgttaatgaattcagtccatttttaggaaagaaacaaatatttgtcaatggtgttccgtttaaaattattggtgtcagattaaactcaaaaacagattttcttgatagtcttgggttgaaagtaaatcaatcagatgaacatattctcatcccactggaaactatgtttaaaatgaaactcgataacagagtcgatgctgttaaaatctttcttgataacatagtaacaaagagagatataaacaacgtaaagagagttttatatgacaatgatataagaaaattcgatattgtcacatctttaaatgccaaggaagctgtggacagagtgctagatcggttttcattacttactaactctgtttacgtgatattaactctatctgcgtcggtgacatgttttattttatcaaaacgtaacttttattcgagacgagtagagttatcattaaaaataattcatggtactgaaaagaaagagattacagttctaattatcattgagtcattaataatgctgagcgtatgtttgtttatttcagtcatctatgcggggggaatactgcatattattaagtattttttggatgtaacaataagtatcagggcaacaatgattacaatatcacttgccaatgtcttattggtgtttatatcttcaaatatcatcttcggcaggctgtttttcagcataaaccctgttaatgcgataaagggaaagatcgagtga

SEQ ID NO: 26138 - DNA, 516 bp, Escherichia coli
atgacgcggtatgagtatgaccggtacggtcaacaaatcgccgttcaccgggaggaaggtctcagtatttatagtctctatgacagccgcggcaggctgacagggcagaaggatgcgcaggggcgtgaaacccgttatgagtacagtgccgcaggcgacctgacagcaacgatatcaccggacggtaaacgcagcaccatcgcatatgataaacgcgggcgtccggtgagtgtgacggaaggcgggctgacgcgcagcatggggtatgacgctgccgggcgcatcaccgtgctgaccaacgagaacggcagccggagtgaatttacctacgatgtgctggaccgcctgacggagcagcgcggctttgatggcaggacacagcgttaccggtacagcgccacagggcagctcatccgcagcgaggatgaggggcaggtcacgcagtggtactacgatgaagcagaccgcatcacgcaccgcacggtgaacggcgaaccggcagagcagtggcagtag

SEQ ID NO: 26139 - DNA, 1575 bp, Escherichia coli
atgagcggaaaaccggcggcgcggcagggtgacatgacccgcaagggactggatattgtgcagggttcagcaggggggctgataggtgcgccgacaggagtggcctgctcggtgtgtccgggagggattacctatgctaacccggtgaacccgctactgggtgcgaaggtgctgccgggcgagacggaccttgcgctgcccggcccgctgccgtttattctttctcgcgcttacagcagctaccgaaccaggacacccgcgccggtgggggtgtttggtcccggctggaaagcccccttcgatatccgcttacagatacgcgatgaaggcctgatactcaacgacagtggcggcaggagtattcactttgaacccctgtttcccggcgagataagttacagccgcagtgagtcgttctggctggcgcggggcggggtggcggagcagcacagttcgcagccgctaagcgcgctctggcaggtgctgccggaagatgttcgcctgagtccgcatgtgtacctggcggcaaacagccttcaggggccgtggtggatactcggctggccggagcgggtgccggaggcggacgaagtgctgccgccggagccgcctgcataccgggtgctgacgggcgtggtggacggtttcgggctttcactggctttccaccgcgaggccgcaggcgaactggctggcgaaatcaccagggtgacggacggcgcgggccgtcgttttcacctggcgctgaccacgcaggcgcagcgggcggaagccttccgtaaacagcgcgccacgtctttatcttcccctgcaggtccccgttctgcttcctcttcttcagctttccccgacacgctgcccgccggtacagaatacggtgccgataacggtatccggctggaggcggtgtggctgacacacgacccggcatacccggatgaacagccgactgcgccgctggcgcgctacacgtacacggccagcggagaactgcgggcggtgtatgaccgcagcgggacgcaggtgcgcgggtttacttatgatgcggagcacgccgggcggatggtggcgcaccattatgcagggaggccggagagccgctaccggtatgatgataccggtcgggtgacggagcaggtcaacccggagggacttgactaccgctttgagtacgggcaggaccgtgtgaccatcacggacagcctgaaccggcgggaggtgctgtacacggaaggcgaaggtggcctgaagcgggtggtgaagaaggagcatgcggacgggagcatcacccgcagcgagtatgatgaggcggggaggctgaaggcgcagacggatgcggcggggcggcggacggtgtaccggctgcatatggcgtctggaaagctgacttcagtgatactgccggacggcaggacggtgcggtatggctataacagccagttgcaactgacttcagtgacatatccggatggtttacgcagcagccggaaatatgaccgtcagggccgactggcagaagagacctcgcgcaacggtaacattacgcgctggttttatgactcccccccgcagtag

SEQ ID NO: 26140 - DNA, 450 bp, Escherichia coli
atgatgaaatatttgatggttttattgtctctattttctgcttcggtattggggatggggcgagtgaatgaattgtgtggaatagatagtgtgaaaacgatagaaataattaatcttccagcatatgttaccaccttaaccccgcttagcaaggaaggtctcaagagaatatacaaacataaagtggtggtgaatggggttagcgatttttatgctggtgagataattgatttattgcaaatgaagtatttcaggaaggaggggaataacgatataagatggggggttgacattgtttcgaataaaaataataaatgtgaaatttattttgatggttttggtgaatgtggaagtgtgaatggcattaacgtatgttttgaaaaaaatgaaatgatagattggattaaaaaagaaatcccttttctgtcgcaagaaataggtgggctttaa

SEQ ID NO: 26141 - DNA, 891 bp, Escherichia coli
gtgagcagtgaaagccgccagtggctggcacagtgcgggctgacggtggagcggctggcggcacagatagagccggtttatttacctgagcgaaaaattcatctttatcactgtgaccaccgggggctgccgctggcgctcatcagtaccgaaggagcaacggaatggcgtggggaatatgatgaatggggcaacctgctgaatgaggagaacccgcatcacctgcaccagccataccgtctgccggggcagcagcatgatgaggaatcaggactgtactataaccggaaccggtactatgacccgctacagggaaggtatatcacccaggatccaatcgggctaagaggtgaatggaatctgtataaatatccattaaaccctgttcggtttatagattctttgggtttaaaattccatgttaacggtgatccaagtgattttaatcaggctgttgagtatttaaaacaagattcacgaatgaaagaagctatagattttttatcaagctctgaagaaaccataaagatagagtatattgatgaaaccgacgttagatttgacctggataaaatgactatatattggaatggtaaggcggctttattttgttcaactgatttaaaatcgaaatcacaatcacctgcattaggtttggggcatgagtttgctcatgcgcacttatatcttattgataaggatggttatatggggcttgtgagacgtgcggatgaacaatataaaaataaagaagaggcgagagttatcactttaattgaacagcatgcggcgaaaactttaggtgagtgtaccagaacagcatataatggagtgtattatcgtgtgaatacaccaacgcagacggcaacaataaatggcacgccagaatag

SEQ ID NO: 26142 - DNA, 198 bp, Escherichia coli
atgagcggaaccggctcagcaggcagcggcttcagtgacgactacacgcacgttcaggtgggtgcggataaaaaacatgaactggacggccttgacctcttcactggggtgactatgacatacacggacagccatgcgggcagcgacttcttcagtggtaaaacgaagtctgtgggggtaatgactccaacttattga

SEQ ID NO: 26143 - DNA, 363 bp, Escherichia coli
ttgtctggtaaaaacaaccttctgttagtcgacttcattgagaaaaatggaaacagcaacggactgaatatcgatctggtcagcgcaccaaaaggaactgcagtagatgtctttaaagctacgactcggagtattggcttcagtgatgtaacaccggttatcgagcaaaagaacgatacagacaaagcaacatggactctgatcggctataaatctgtggccaacgccgatgcggctaaaaaggcaacattactgatgtcaggcggctataaagctttccttgctgaggtcaacaacctgaacaaacgtatgggggacttgcgtgacatcaatggagaggttgggcatgggcccgtatcatga

SEQ ID NO: 26144 - DNA, 1029 bp, Escherichia coli
gtggaaacagtaggtgccaccccggcagagaccaaccctacaacatattctgatgcattagaacgctacggtatagtcacttctgacggttcaaaaaaaatcataggttttcgtgctggctctggaggaacatcatttattaatggtgaatccaaaatctcaacaaattcagcatatagccatgatctgttaagtgctagtctatttgaggtcacccaatgggactcatacggcatgatgatttataaaaatgataaaacatttcgtaatcttgaaatattcggagacagcggctctggagcatacttatatgataacaaactagaaaaatgggtattagtcggaacaacccatggtattgccagcgttaatggtgaccaactgacatggataacaaaatacaatgataaactggttagtgagttaaaagatacctatagtcataaaataaatctgaatggcaataatgtaaccattaaaaacacagatataacattacaccaaaacaatgcagataccactggtactcaagaaaaaataactaaagacaaagatattgtgttcacaaatgggggaaatgtcctgtttaaggataatttggattttggtagcggtggtattatctttgacgaaggccatgaatataacataaacggtcagggatttacatttaaaggagcaggaattgatatcggaaaagaaagcattgtaaactggaatgcattgtattccagtgatgatgttttacacaaaataggccccggtactctgaatgttcaaaaaaaacagggggcaaatataaagataggtgaaggaaatgttattcttaatgaagaaggaacatttaacaatatataccttgcaagcggaaatggtaaggtaatactaaataaaggtaattcccttggcaatgatcaatatgcggggatattttttactaaacgtggtggcacgctagatttaaatggacacaagcagatcagcttgttgtcaataaatcgttgtctggtaaaaacaaccttctgttag

SEQ ID NO: 26145 - DNA, 348 bp, Escherichia coli
atgaacagaatatattcgcttaaatatagttcgttgactgatggacttgtcgctgtatctgaattcactaaaagagtttctggtaaaacaaaccgaaaacttgtagcaacaatgttgtctctggctgttgcaggtacagtaaatgcagcaaatattgatatatcaaatgtatgggcgagagactatcttgatcttgcacaaaataaaggtattttccagcccggagcaacagacgtaacaatcactttaaaaaacggagataaattctctttccataatctctcaattccggatttttctggtgcagcagcgagtggcgcagctaccgcaataggaggttcttattag

SEQ ID NO: 26146 - DNA, 345 bp, Escherichia coli
atgagcgattttgacattgtgagttcaattgactggcatgatggggttttgttagaagtaaaaacgacattcaaagaatctcattttaacatgacgttatttattgacatttataaaaatgagaacattagggaaaaaatgatagttgaattttctgatgtagatgatttagtgttcgctatggattctgctgagttaatcgataatcacaagtcaggtaatataagtaatgggtatataaagaaattaaaaaacaaaaggatatataaattttttctttatttttctgatggcttattaagcatgacatttaaaaatttacaattaataaaaccattagggtaa

SEQ ID NO: 26147 - DNA, 174 bp, Escherichia coli
atggtgaggattactcatcagcaccaaatagcattaagaaatgtgcaaaaaaatatggtttcgagccagaaccaagtaaagatctgtcatgcaaaacctccgggctatcaactactgatgcggctcttgcaactggtgctacaattggcgcagggtatgttatatatagagtga

SEQ ID NO: 26148 - DNA, 603 bp, Escherichia coli
atgcaacagctcggcctgaagtctcctgtgcgcctgaagaaataccggtcttaccggggaaatatgggactcgctgcagaaaatatccttcagcggcagttcaaagcggaagctccctgtgagaaatgggtgacagatatcaccgaattcagggctggcggacaaaaactgtacctgtccccgatacttgatttgtttaacggggaaatcgtggcgtgggaaacggcctgcaggcctacagaggagctggtgaagcggatgttaaataaggggctggaaagccttgctgaaggggagaaaccgctgctccacagtgatcaaggatggcattaccggataaaaagttatcagtccgccctggcggacagagggttagtgcagagcatgtcgcgcaagggcaactgccttgataatgcggtaatggagaacttctttggtcacctgaaagaagaaatgtactatcgccgggactacagaaatgtagaagagctggaaaatgccgttaacgaatacataacttactggaatcaaaaaagaataaaactcagtcttgggggactcagtccggtagaataccggactgagcatcaaaaagccggttaa

SEQ ID NO: 26149 - DNA, 1233 bp, Escherichia coli
atgcaggtgacggcagcgcagatgcagaagcagtatgaggaaatccgtcgtgaactggatgtcctgaacaaacagcgcggtgatgaccagcgtcgtattgaaaagctgggacaggataatgctgccctggcagagcaggtaaaagccctgggtgcaaatcccgtcaccgcgaccggtgagcctgtaccgcagacgccagcctcaccgcccgggccggaaggcgaaccacagccaggaaacacccccgtatccttcccgccgcagggcagcgttgctgttccaccgccgacggcgttttatcccgggaatggtgtcacgccaccaccacaggtgacgtaccagtctgtgccggtgcctaaccggatacagcgtaaggtgtttacccgtaatgagggaaaacagggaccatcgctgccgtacattccgtcaggaagttttgcgaaagccatgctgattgaaggggcggatgccaatgcctcagtcaccggtaatgaatccacggtgccgatgcagttgcgtatcaccggtctggtggaaatgccgaacagcaagacgtatgacgcaacgggatgttttgtggggctggaagcctggggggatgtctccagtgaacgtgctattgttcgcacccgtaatatcagctgcctgaagaatggcaaaaccattgatatgccgattaaggggcatgtcagcttccggggtaaaaacggtatcaagggcgaggtggtgatgcgtaacggcaaaatcctcggctgggcatggggcgcgggatttgttgacggtatcggtcagggaatggagcgcgcctcccagccggctgtcgggctgggtgccacagccgcttacggggccggcgatgtccttaaaatgggtatcggtggcggcgcatcgaaagccgcacagacgctcagtgactactacatcaaacgtgccgaacagtatcacccggtgataccgattggtgcgggcaacgaagtgaccgtggtgttccaggacggcttccagctgaaaaccgtggaggaaatggcgctggagcagtcacagagtacagcggaagagggtaacccggaaagccctgtgccgaatcctccctcggcagaaagccacctgaacggttttaacaccgaccagatgctgaaacagctgggcaatctgaatccgcagcagtttatgtccggagacaagaacccgcagggcggggatgccggcaaggagggcggaaatggcgggtga

SEQ ID NO: 26150 - DNA, 705 bp, Escherichia coli
atgttcggtctgagaaaagtaaatggaaacactcattcctttgaaaccacttttcaaaattggaaagaaaagggcgaagatgttgcgttattaatgcccgaatttagcgccaaatggctaccgatagcagaagagagcggcagctggtctggatgggtgttacttcgagagttatttcccttaatttctgccgagctcgctgggatggctttaatgccagaaacggaaaggttaataggggaatggctcagtttatctagtaccccgttaaatctaaagtatcctgaactaaaatataatcgtttgtgtgtcggtaaagtatttgatggagtattgagtccagctcaaccactgataagaatatggacaggggaattaaatatttggttagataaagtcacagtctgccaatacgaaaacgctccaacgctagacaaaaaatcattatattggcccattcatattgtaattggatttagtaaaacatgttatagaaccattgttgatattgaagttggtgatgttttattaatttcaaataattttgcttatgcggttatttataatacaaagatttgtgatttaatttatccagaggagttaaaaatggttgatcattttgagtacgaggaagattttgaaacagatgactttgatatcaaaaaagctaaccaactccggttcagaatattttatcaaatatga

SEQ ID NO: 26151 - DNA, 201 bp, Escherichia coli; identical to SEQ ID NO: 20869

SEQ ID NO: 26152 - DNA, 273 bp, Escherichia coli
atggccagcgttaatattcattgtccccgttgtcagtctgctcaggtttaccgccatggtcagaaccctaaaggccgtgacagatttcgctgccgtgactgccaccgtgtgtttcagctcacttatacttatcaagcacgtaagccgggtatgaaagagctgatcactgaaatggcctttaatggtgccggggttcgcgataccgccaggacactgaaaattggtattaacaccgtcatccggactttaaaaaactcgcgccaaagcgaataa

SEQ ID NO: 26153 - DNA, 393 bp, Escherichia coli
atgcgcttccccattggcctgggtaatggcaatgccgttattttcaaggataaagtttgctgccacgtcctgtggcatggtgaagttcaccgttattcccgccaccggatgattcgacggatctttcaccgttgccgtcagctgcacgctgtcactgttattcgtcaccacctgttgagcagggatgttcagggtgacctgcgcgttgctggcatcgggcgcaatattgactgtcttcgtatcgttgttgccgttaggcagtgtggcttcggctgtatgaacacccaaaaccgtgcccttaagggtaacttcagcaacaccactgtcgttagtattgctcgtgctctgactaagttgagtatcagccgggttagtactgaaggtgaccggtag

SEQ ID NO: 26154 - DNA, 360 bp, Escherichia coli
gtgctcggtgtctttgataaagtcactgaaaatatggagacaatgaaagagatacatcttaacagtgacgaacaacatttatttggcagagctgcattgatggccaggtacgaagatgaaaataaaacgccagtgacgccagaacaaataattactccccgccgttgggaggataaacagaacgatctctggacaacctggcagcgggttcaggagaatatgataaaaggtggattatcggggcgaagtgcctccggtaaaaataccagaacaagagctattacaggcattgacggtgatatccgaatcaacaaagcattatggatgattgccgaacagttcagggagtggaagtcatga

SEQ ID NO: 26155 - DNA, 294 bp, Escherichia coli
atgataacgttgcgtccgcccgtcaaagccgccctgctgtaccaggcggtccagcgcatcgtagctgaagtcgctgtgactgccgttctcgttggtcaggctgatgacacgtcctgccgcgtcatactccatactgcgcgtcagcccgccctgcgtggtgctgaccgcctttccccacgcatcgtactgtgtctcgctccggttgccgtccggggtgataacggcagtcaggtcgcctgcggcgttgtattcataccgcgtttcacggccctgtgcgtctttcaccgaggttaa

SEQ ID NO: 26156 - DNA, 234 bp, Escherichia coli
gtgaccgtggtgttccaggacggcttccagctgaaaaccgtggaagagatggcgctggaacgcacgcagagcagagcggaagaagagaatcaggaaagtccggttcctgttccgccatcggctgaaagtcatcttaacggctttaatactgaccagatgctgaagcagctgggcaacctgaatccgcagcagtttatgtccggcagccagggagggggcaacgatggcaaataa

SEQ ID NO: 26157 - DNA, 228 bp, Escherichia coli
atgcgttccctgatcatcctcgataaagacattccggtactgtgcggcaacggcttcagcctgttcgcgggtaaaggagccgtcaggcagcccctgaaatattctgaaatattcgctcatcctcagctctccggtgatgccccgcactggacggggcggttgtcacagtcagtcgttcagaacggaatgtcgtcatcgaagtcatacgcgggttcagacggctgctga

SEQ ID NO: 26158 - DNA, 1152 bp, Escherichia coli
atgtttgtaaaaaataactttaatacaaataatttcgatgcggaattagttgaagcgattggtaataggctggaaaacaaccaattttcggatgcaatacttgcaggaaccaaatatctaacaactttgctgcgtgaaaaagggcaatgtgaaggggatggggctcagcttgttggtactgttttgggtggacaatcacctagaatccaaattaatagtcttcaatctgtatcagagcaggacgaacagcgcggatttgaagcactattaagaggctactatcagtgtataagaaatccaaggacacatgacaatttccctgatacagaagattcctgcatgagaatattgatcatgttggatacttttattaagtatttaaaaagagatgttgctgagttcgattacacagcaattcttgaaagaatttatgaggttcactttgtaaataattctgattatgcagaagctttaatatcacaaattccagaaaaaaaactactggattttttccaaagtttaatttctcgctttaatgaaaggccaaccaaggaaattgattctatattcaaagcaataaaccaacgcttttcaggagaggaagaaaaagccgcaatgcggttgctaggtgatgagttacgcaaggctagcaataatgttgagtttgctaatgtatttagaataattaagccgagcgcatggagaaatcttcctgatgatgttttaattagaatggaaaatataatcatcgaagagtgcaaaaaaggatatttggatttctattctgatgcgaccaaaggagctataggaacatggggtaatacatttggtagcaaatttaaaagaagaggtgatcttggtgatgctttaattggattgttatatgatagttggtatacgcaaaattatgttgcgaaatattacgttttttcaatcccttctatcattactgatgatgtgaaagttaaggagttagctgatgctttagcttatgccaccattgtaaatggtgctaagcttttacgaacaaaattgattgatgcatgtaaaaattatcctgataagttgaaagagcatcttagggatgctgttcagcaacggatggatagtgataaaaaatatgcggaagaattattaggtcaaataagctga

SEQ ID NO: 26159 - DNA, 783 bp, Escherichia coli
atgggacccttagttatcatggtcgtcctggtttgcgggttctggtacaccgaaaatcattaccagtcccgcatcaggcaagcaagaagtaatggttggaattcctatttttatgtagctatgcatggttgtaagtttgctattcaggggtttactctgatggctgttacattcgttatcttgctagttataagctcagttatcaatgtttttggttatttttggcctaagttacatgtggacttttattcatggctcacagacgtaaagataatgtcttacccattgttctttgtgttgtctatgctgcttgcggtgtttattgcttatgaccaaggtaacaatgcgcgaagagcaatagaaaacgaagagattcgtcaatctgcatatcgcgagatggcagctcaagatggaattgagtcactgttagttcaggctatagatgaaggtaagctcatctttgttacgctaaaatccagaaaagtttacattggttacgtagctgctcctcggatggagcatcaggaaactcagcatctggctctcataccatacatcagtggttatcgtgataaagatacgctcagataccatgagcagcatcgttactatgaactttaccttagtaaaaatattacagcagactcaactccactgaacttaaatcattttaggcatgtaatcccaatggatcaggttgagagtatttcaatatttgatactgaaacttataaatctttcgaagatttttctacgcctgaccagaccaaagtcactgcatga

SEQ ID NO: 26160 - DNA, 201 bp, Escherichia coli
atgtctgaacttctgcgcaaagttctctctgcaccaggtaagattatgcaggatgtcatccgtcaggatgtgcaacagtctgataatagtaaaattatcacagatgctaatggtgcggcgaccttaaacatgaacaataagcaggtacgtgaatcaatgcgtgccagaatggaagaattggctgcaaaacgacaaggatga

SEQ ID NO: 26161 - DNA, 171 bp, Escherichia coli
atgattataggacaacaaaaatacgaaactattcgaagagtgctacgtattaacctatttacatatcaccctgcaaccaatttatccataactaacgcctcgcacggctcgttgctcaaccttgcgaacggtaaaaaccagttttatcgtccgcaacgttccctaatgtaa

SEQ ID NO: 26162 - DNA, 927 bp, Escherichia coli
atgtcaacacacgaaatcacatttcgccatgtggacgaaaaaaagaaatccttaatcatgcagaatcgcggagggcaagcagtcatcgagcggatattagaagcgtatggtttttcttcacgccaagcattctgcaatcatctggggatatcacagagcacaatggcgaacaggtatgcgcgtgacactttcccagctgactgggttgttatctgtagtatggaaactggtgtatcgattgagtggttagcatttggtactgataccgaaatggaaagctttgcagataaaagtcacgacaattgtaacagtgaatctcggcacctcaacagagaacctaaaaacccaaatgagaacactgttactataaatcaaaacggaaaagcagcaatagagcgaatcgttgcagcctatggatttaagacaagacaagctttagctgatcatttgggtatttcaaaaagcacactagctaatcgttatatgagggatacatttccagccgattggattatccaatgcgcacttgaaactggtatatcactagattggctcgttactggaaaaggctcaaaatcgaacgatgtaaatactgatgtagcaaagttattagcatataagctaataaatggtaagttaatagatgcggactatatccactttgataaatctttaataccacacaaccttataaatccgcaggttgtgatcgatagcgaaaatgttttcgtagtagactatggatataaagaaatatctgatggtgaatggttagtagaaattgaaggcaaaataaacattagaacattggtccgcatacccgtaggaaaagttaaagtaatatctactcatgctgatttcatatgtgacattgagaatataaaacttttagcaaaatgccactgtgctttcattaaaaacatttaa

SEQ ID NO: 26163 - DNA, 972 bp, Escherichia coli
atggactctaaagaacacaaaaaagaaacaatacaaaacagcatcaccaaatcagagtttaaaaaatacgttgattttatacatgatgattctattccacttcctgaacatgaacgcacatatctaaagaacttgttgaaaaatggtgaaattgaagaattcaaggatcaatatagacgccatctccaaaacttagatagagtcggctttagcgacgaagatattgaattacaacttaacgtgttaaaaaaagataataatgaattcagaaacttattacgtttttatacagctcgcttatctgatttgcaagaaagcaacacctcattatcattaaaaaacaaagagttagaaaatttaaacatagaaaaagaatctttacttgagcaaactttttctaggataaaagagttagaggcttcaaataacgaattaaccagtcgagcacatcaagagagaattgatcaaaaaattcccgaatatgtcaatagtgtaaaagatgatttaggtgatgatgatgatcactttatttcactcgccaaaacatgggctattgctggtgcaatagccggtctttccgctgtcattttttcgttcatatcattatattttgttactgatttcataaatgctaaaggatttgaactattttatctattcaccagaggcctgattggaatttccattttatcatggctttcttatatctgtctgagtatctccaaaaagtatactcatgagtccattcgcagaaaagacagaaggcatgccttaatgtttggtcaagtcttcctacaaatttacggttcgactgcgaccaaagaagatgctattcaggtatttaaggactggaacatgtctggagattctgctttttctgatcaaatggattatccgccaagtttccaaacgctatggtctaccgcgaaagaaaaaatcaaaccttctcattcagaaaaatcctccgattaa

SEQ ID NO: 26164 - DNA, 402 bp, Escherichia coli
atgaatggcacggttacggcggattcactgaatcaagggttaagcttgggtgcgctggcctctgtcgtctacggcgttccgccagaggtggctctcggtgctctggctggtgcggtaatatttgttacctctgctgtagagtatcctgttcgtcgtcgtgtactcttgtcgatactcagctttctttgtggtcttctcttttacaaaccaacaacatcaattcttatcggaatagccagcatgatacctaccatcacgcaggactctttcgagaaagggattgttttctctgctggcgcattcgtgtcagcaattgtcgcagtgcgaattggtatatggctctatcaccgttctgataatccacgccagttaattcctgggagaaaaggcgatggtaactaa

SEQ ID NO: 26165 - DNA, 2652 bp, Escherichia coli
atgacggtctcaaccgaagttgaccacaacgaatacacaggtaacggcgttacgacatcatttccgtataccttccgtattttcaaaaaatccgacctggttgttcaggtgtctgacctgaacgggaacgtaacagaattggttctggatactgactacacagtaaccaatgctggaggatataatggcggtaatgtaattctgtcgaaggcgttggctaacggttatcatatttctatatcacgagagctcccggttacgcaggatactgatttgcgtaatcagggtaagttcttcgctgaggtacatgaagacgcgttcgataaactgacaatgcttattcaaaagtgtttttcatggatgaggttagcacttataaaaccaagcattctggctaactattatgatgcaaaaaataataagatatcaaatctagcaaatgccactgacagaaacgatgctgtcaataaaggttatgttgatgatctttttactggaggtgtaacgcctacacctaacagcgctaaaaacgatatttttacaaatcaccaaagaaagattgtagctacgatgccgcttctttttcctgaatatgatgcgattatggctgctaacccgtcagcaacttatatgtatcctcaaggattctgcgttagcgaagatttgatatacatcacttatccatttgagcctaaacagacgaataatgtcgtcgcagtatttaacatatctggtatttatcaaggttatttctatgttcaggctggcggcccaggcttcgctgctgaaggaatcgtggttacgtcagactatggccccaaaaaaatgtttgttggtcacacaaacggaatactgcgtgaatttaatatggagggggcattatacggaagcaatctgcctcttgtacaaaaccatgatgttggattattcaaccagttcagctacagaagaggtatatggctcgttgagcagaatgcgccagaagtaggacagaaaatcacaagaactgtacttgcagtgttcgacagtggtttcaatcgcctgtcaactataacgctgccgttacatgatgttgggtatgtaactaaaagcacctcaccttatgcgccttatttcaacaagcgtcagggtattgcggtaggtgataactactttgtctgcggctatggcggcttcatagctgatggggcaggaagcgcaggatataacgaatatcagggcagcaaagtttttaaccctgacggtacaaagcgaactgaatcaatgcttcatcctcaggccatgatggatttaatgaaagcagcaggattgaacgtcactcgcatagaaaatgaaggcgtttgtgtttctcaggatggaaaatccatttattcactttacattcatcaggaaagaactggctctgaaccttacaattcaggtttggttattttcgaagatttctccactgataaagatgctatcgattttacacctgcatccaggctttaccgcggatttgatatcgatcacgcgagcattggggtatatccccgtagtgcgaaggggattgttaaccctgtagatggtacgttgttcactaacatgactgaaattcttcgctatatgcaggagatgagtcagaaggcatttaatttttacacagggactgtcagcattgctgatatatctggcgtggcaatcccttccagcacatatgttgaaatactgaatgcgaataatcagacttttatagtcaactattattcatctgatagtggcattagttatttggttgcaactaatccttctggtgactttgtatttgtgcgccagcgaccggcacagtgggcatctaacttaaccattcagcaaaacgcagatcctgatacaaaccaattaaaccgcatcactgcatcatcatatgccggtgcaactacaaactctcagaaaatattggtccttgaccagcaggctacagctagcgcaaatagcttggtattgggcggtagttcttctgtgtttaggtctgccaccacggtggatattgcatgcaacagcgacccgacagcattgggaggaaccatacgctggcggttttatgatacaggtcttcgcccgtttgctgacaatacctataattttggtcaggcatcgtttcgtattaaagacgcctactttgcaaatgccccaaccgtttcatcagatgccacgctgaaaaccaatcccgaggcaatatcagatttaagtgaaatgctttcttctgatagagacagcattcttgatgcctggggcgatatttctgttgtggcgtatcgatggctcgacgctatatccatgaagggcgatggtgccagatggcattttggcgtcatggctcagcaggtaagggatgtattcttggcgcacggaattgatggaaccagatttggccttctttgctatgacgagtgggatgatatttttgagccggtaatcgcgactaaagagattaccgatacgtctggtgagttggtcaccgtcgaatatgacaccggagaacagaggctggttaaaaaagcgggtagttcatggggtatacggcctgaccagtgcgcttggcttgaggctgcatatcagcgccgtcgatgcgatcgtattgaagagcgactcgaactattggaatcaaaataa

SEQ ID NO: 26166 - DNA, 156 bp, Escherichia coli; identical to SEQ ID NO: 7036

SEQ ID NO: 26167 - DNA, 423 bp, Escherichia coli; identical to SEQ ID NO: 8048

SEQ ID NO: 26168 - DNA, 894 bp, Escherichia coli; identical to SEQ ID NO: 22778

SEQ ID NO: 26169 - DNA, 618 bp, Escherichia coli
atgaaatatatccctgtcggcgttgatattgcaaaacatcttatgcaggtgcatttcgttgatgaacataccggagagattatcgataagcaggttaagcgtgagaaattccttgaatatttcagcaaccgtgaaccctgccttatcggcatggaggcctgtgggggttctcatcactgggcgcgtgagcttcagaaactgggacataaggtcagattactcaaaggccggttcgtcaaagcattcgtgatgggaaataaaaacgatgtgatggacgcccgagccatctggctggcggttcagcagccggtaaaatccgtcgccgttaaaagcgaggagcaacaggccacgctggggttacaccgaatgcgccagcaactggtgaagttcaggacagcacagataaacgcgcttcacagtctcttgctggaatttggtgaaacgacgcacaaggggcgtgctgctttggcgaaggaggtgccggaagccctggagcgtctgaaggagcggctaccgctctacctgataaacatgctggatgaacaatatcagcgaattactgaacttgatgaacatcttgaccacattgagaagcagttgcaggcgatagccagatag

SEQ ID NO: 26170 - DNA, 1686 bp, Escherichia coli
atgagtggcggagacggacgaggtccgggtaattcaggtctgggacacaatggtggtcaggccagtgggaatgtgaacggtacatcaggtaaaggtggcccttcatcaggtggtggtacggatccaaacagcgggccgggctggggtacgacgcatacacctaacggggatattcataactataacccgggggagtttggtaacggcgggagtaaacccggtggtaatggcggtaacagcggcaatcatagcgggagctctggtggcggacagtcttcggccaccgcgatggccttcggtctgcctgccctggccactccgggggctgaaggactggctttatccgtttccggcgatgcgttgtcggccgctgttgctgatgtgctggctgccctgaaaggtccgtttaagtttggtctgtgggggattgcgatttacggagtgctgccttctgagatagcaaaagatgatccgaaaatgatgtcaaaaatcgtgacgtcattgccggcagacacggtaacagagacgccggtcagctccctgccgctggaccaggcgacggtcagcgtcactaaacgtgtggcggatattgtgaaggacgagcggcagcatattgcggttgtcaccggccggccaatgagtgttcctgtggtggatgcgaaaccgacaaaacgtccgggggtattcagtgtgtcgattccgggtctcccgtctctgcaggtgagcgtacctaaaggtgttccggccgcgaaagccccgccaaaaggcattattgctgaaaaaggtgattcacgtccggctggttttacggccggtggtaactcccgtgaggccgttattcgtttcccgaaagagagcggacagaaaccggtctatgtgtcggtgacggatgttcttactccggcacaggtaaaacagcgtctggaggaagaaaagcgtcgccagcaggcatgggacgctgctcacccggaagaggggctgaaaagagagtatgataaagcgaaagctgagctggatgctgaagataaaaatattgcgaccttaaacagtcgcattgcatcgacagagaaggcgatccccggtgcaagggctgctgttcaggaagccgataaaaaggtaaaagaggcagaggcaaataaagatgattttgtgacttataacccgcctcatgaatatggctccgggtggcaggatcaggttcgctatcttgataaggatattcagaatcagaatgagaaattaaaagctgcccagacatctttaaacgaaatgaatgaatccttatccagggataaggctgcgctttccggggcgatggagagccggaaacaaaaggagaaaaaagcgaaggatgcagaaaataaattaaatgaggaaaagaaaaaacctcgtaagggaactaaagattacggccatgattattttcctgatcccaagactgaagatattaaggggttgggagagttgaaagagggtaaacctaaaacccctaaacaaggtggtggtggtaagcgggcccgatggtatggtgataaaaagcgtaaaatttatgaatgggattcccagcacggtgagcttgaagggtaccgcgccagtgatggcgaacacctcggggcattcgatccaaaaacgggtaagcaggttaaagggccggatccaaaacgaaacattaaaaaatatctttaa

SEQ ID NO: 26171 - DNA, 2166 bp, Escherichia coli
atgaaaactcaaataactttcgctgcgcttttgccagcattagcgtctttcataccgcttcatgctcatgcctcgtctacttctgaagatgaaatgattgtcacgggcaacaccgccgccgacaccaccgattctgccgccggtgccggtttcaaaacgaacgatatagatgtcggcccgctgggaacgaaatcctggatcgaaacaccatattccagcaccactgtaactaaagagatgattgaaaatcagcaggcgcaaagcgtcagcgagatgctgaaatactctcccagtacgcaaatgcaggcgcgcggtggaatggatgtcgggcgtccgcaaagtcgggggatgcagggcagcgtggtggccaacagccgtctggacgggctgaatatcgtttcaacaaccgcgtttccggtggaaatgcttgagcgcatggatgtgcttaacagtttgaccggcgcgctgtacggcccggcgagcccagcagggcagtttaatttcgtggcgaagcgcccaaccgaagagacgctgcgtaaagtgacgctgggctatcaaagccgcagtgcgtttaccggccatgccgatctgggtggccattttgatgaaaacaaacggtttggctatcgcgtgaacctgcttgatcaggaaggggaaggcaatgtggatgacagcacgctgcgtcgcaaactcgtttccgttgcgctcgactggaatattcagccgggcactcagctacagctcgacgccagccattacgaatttatccagaaaggctatgtcggtagctttaactatgggccgaacgtcaaactgccgtctgcgccgaatccgaaggacaaaaatctggcgctcagcactgcgggcaacgacctcactaccgataccatcagcactcgcctgatccactactttaacgacgactggtccatgaacgctggcgtgggctggcagcaggctgaccgcgcgatgcgtagtgtttccagtaaaatactcaacaatcagggcgatatctctcgttcgatgaaggattccaccgctgccggacgttttcgcgtcctgagcaacaccgccgggctgaatggtcatattgataccggctctatcggccacgatctgtcactttctaccacgggatatgtctggtcgctttatagtgccaaaggaacaggttccagctatagctggggtacaacaaatatgtatcacccggatgcgatagatgagcagggcgatggcaaaatccgcaccggcgggccgcgataccgctccagcgtaaatactcagcagagcgttacgctcggcgatacggtgacatttacgccgcagtggtcggcaatgttctatctcagccagagctggctgcagactaaaaactacgataagcacggtaatcaaacgaaccaggttgatgaaaatggtttaagtccgaacgccgcgctgatgtataaaattacccctaacacaatggcctacgttagctatgccgattcgctggagcagggcggtaccgcaccgacggatgagagcgtaaaaaatgccggtcaaacgctaaacccgtatcgcagcaagcagtatgaagtggggctaaaatcggacatcggcgagatgaatctaggcgccgcgctgttccgactggaacgtccgtttgcctatcttgatacggataacgtgtataaagagcagggtaaccaggttaacaacggccttgagttaaccgctgccgggaatgtgtggcaggggctgaatatttacagcggcgtgaccttcctcgacccgaaactgaaagatacggcgaatgcctcaaccagcaataaacaggttgtcggcgtgccgaaagtgcaggccaatctgttggcggaatacagtttgccgtccataccggaatgggtttacagcgctaacgtccattatacgggcaaacgcgcggcgaacgataccaacacctcttacgccagcagctataccacatgggatttgggaacgcgttacaccacgaaagtgagcaacgtcccaaccactttccgcgtggtggtaaacaacgtgtttgataaacattactgggcttctatcttcccatcgggtaccgatggcgataacggttccccaagtgcgtttatcggcggcggccgcgaagtgcgtgcatccgtcaccttcgatttctga

SEQ ID NO: 26172 - DNA, 894 bp, Escherichia coli
atgagcgccgtacttcaacgcttcagggaaaaattaccgcacaaaccgtattgtacgaacgatttcacgtacggcgttcgcattctgccgaaagacattgccatccttgcccgcttcatccagcagaaccagccatatgcgcagcactggcttgcctttgacgtggaccggatgggagctgcgattgactggagcgaccggaactgtccgcccccaaacatcaccgtaaaaaatccctgtaacgggcatgcgcatctgctctacgcgctctggcttccggtgagaaccgcgccggatgcatcggcttcggcgctcaaatacgctgccgcgattgaacgttcgctgtgtgagaaacttggcgcagatgtgaattacagcgggctgatttgcaaaaatccgttccaccgggaatggcaggtggctgaatggcgggaagatgcctacaccctcgatgaactggcggattatcttgatttgagcgcctcagcgtgccgtagcatcgataaaaactatggcatggggcgaaactgccacctgttcgaaatgacgcgcaaatgggcttacagggcgattcgtcagggctggcctgtattctcacagtggcttgatgccgtgatccagcgtgtcgaaatgtacaacgcatcgcttcccgttccgctttcaccgcctgaatgtcgggccattggcaagagcgttgcgaaatatacacataggaaattctcaccagagggattttccgcagtacaggctgctcgaggtcgtaagggcggaactaaatccaagcgcgtagccgttcctacatcagcacgttcgctgaagccgtgggaggcattagggatcagtcgagcgacgtactaccgaaaattaaaatgtgatccagatctcgcaaaatga

SEQ ID NO: 26173 - DNA, 594 bp, Escherichia coli
atgggctggtgcggacgcgaacgcctgaccgttacggctctgcccgccattaccacttatggcgaaccggaagggaacctgctaacagggccgtggcagcctcgtgtcagctaccgaaaacagtgggcgcgctggcgggtgatgattctgccgatattgctgattctggttgcgctggtagtggaacggggcgtgacgttatggagcgtcagcgaacaggtggcgcaaagccgcacccaggcggagaaacagttcttaacgctattcctggagcagaagcggattgtgaatttacgctctcagatgacgatggcgctgaaaaaatatcgcccacaggccgacgatacctggctgctcgcagaattgtcagtgatcgccagtaccctgaaatcagcgtcactttccgacatcgaaatgcgtggtttcacctttgatcaaaaacgccagacgcttcaccttcagctacgggctgcgaactttgccagcttcgacaaactgcgtagcgcactggcggcagattatgttgtgcaacaggacgcgttacagaaagagggtgatgcggtttccggcggcgtaacgttgcggaggaaataa

SEQ ID NO: 26174 - DNA, 399 bp, Escherichia coli
atggcttacacagcaactgttatccctgtaatgattgcttctcctggtgatgtcgctgaagagagacaagtcattcgtgaaatgatccatgagtggaatgatataaattcagctcgttcaaaagtaatgttgacaccaattggatgggaaactcatacatcacccgaattaggagttaggcctcaggagttgattaatcaaagattattagtagattgtgatttattaatcggtgtgttttggactcgtctaggctcaccgactgggaacgaggccagcggaacagtcgaagaaatccaccgtcatttgaatgcgggaaaaccggcaatgatttacttttcctcaaagcctgttgcccctgaaagtgaagtggtcaacaaaaactggccaccgagttag

SEQ ID NO: 26175 - DNA, 606 bp, Escherichia coli
atgtcattcataaaatcgctaaacaaaaaaaatcaaacagaccaaatagaagtgacgattaacgttaggttaacccaagaagaggaccatttactgacattagcaacccagcaatctggttataaaaggaacgagctattctacctcctagcaaaggaatacatctttgatgatgaaagcttaaaggaaatggctgaggagtctggcgctgagttttcagaaggcttatatcaaaattgttatgtggttaacactaacagagttcatcatgaagaagatgataagttcatgatttcagagggtgtagcggcaacatttgaagatggttataaggaaaaaatggagcagattaaaaaaggagatttagtctttctttatcgctccggcgaaggaattgttgcacatggtatcgccagtggtgatgttttaaagaaagatcataatggcgtgccagacaagacctactaccagaagctatcaggctttgttaggtacgaaaaaccactaatcgcgtctgagatccagagaatactggggagaaacgttgtgttcatgcacacgctatttagcattagagatggctataaactgcttaaaaaagattaa

SEQ ID NO: 26176 - DNA, 348 bp, Escherichia coli
atgatcccgttaccttccgggaccaaaatttggctggttgccggtatcaccgatatgagaaatggcttcaacggcctggctgcgaaagtacagacggcgctgaaagacgatcccatgtccggccatgttttcattttccggggccgcagcggcagtcaggttaaactgctgtggtccaccggtgacggactgtgcctcctgaccaaacggctggagcgtgggcgcttcgcctggccgtcagcccgtgatggcaaagtgttccttacacaggcgcagctggcgatgctgctggaaggtatcgactggcgacagcctaagcggctgctgacctccctgaccatgctgtaa

SEQ ID NO: 26177 - DNA, 381 bp, Escherichia coli; identical to SEQ ID NO: 10432

SEQ ID NO: 26178 - DNA, 315 bp, Escherichia coli; identical to SEQ ID NO: 9107

SEQ ID NO: 26179 - DNA, 444 bp, Escherichia coli
atgagcaatactcctgtcaagagatataactggatatatcagagccatccagtcaggacgcacagaagtctcttcctcataatggagatgagtaatatatccagcaagatgaccacctgccgaaaaccccatacatccaacactcttaaatgttctctccgacattccggcccagtaagaaataaagttcagggcattcttcgcatctgcaaaggaataataaccattaacggagggcattctgtaagaaagaataaatgccgtatatccctgacctgctatccatctgccaacatcaagtccctctctttcataaacaatcctcctgtatccacctccaggtataatcagcacactatgttgattagatacaacaggctcaacaactgtaataaggggcacaatacctgtatatattatgccatcgccagtattctcaaatag

SEQ ID NO: 26180 - DNA, 411 bp, Escherichia coli; identical to SEQ ID NO: 15516

SEQ ID NO: 26181 - DNA, 210 bp, Escherichia coli; identical to SEQ ID NO: 8156

SEQ ID NO: 26182 - DNA, 255 bp, Escherichia coli; identical to SEQ ID NO: 10376

SEQ ID NO: 26183 - DNA, 216 bp, Escherichia coli; identical to SEQ ID NO: 17121

SEQ ID NO: 26184 - DNA, 303 bp, Escherichia coli; identical to SEQ ID NO: 12577

SEQ ID NO: 26185 - DNA, 207 bp, Escherichia coli; identical to SEQ ID NO: 3489

SEQ ID NO: 26186 - DNA, 996 bp, Escherichia coli
atgtttccagtcggcattgacgtaagtaaaaacaccctggatctttgcatgctttatgacggtatcaaaggacgcataaaaacccgtaacatccaaaataacagacattcagttgaaaatattcttcgctggctcaggctccagcactgcggtccggaagatgttcatgtggtgatggaggctaccggggtttatcacgaacggctggctactgagttacatgatgctggtttctatgtctctctggccaaccctcaccgtagcagagagtttgcacgcggcatgggaataatgacaaaaacggataaggtggatgcgtatatgctggcctgctacgcattccttaagaaccctcaccgctgggagccgccggcacccgaaatcagatatctcggtgcactcctgcgacggcgggatgttctgctgggtgatgccctgcgtgaggagaacaggctggagaaatacctgtccacagacacacctgcagatattatcagttcctgcatgcatatggcgcagctgctgcgcgacgaggtaagcaatatcgagcggcagattaaagcgcatatcaaagccagccctgcactgaggcgtgattatacacttctgacctcaattaaatctgttggcccccagctgggaatgcatatgctggtcgtgcttcgcagccatgacttttcatcagctgagcaggctgccgcctttctgggcgtggtgccgatcgagaaacgttcaggcacatcggtccggagccggccccggatgtcgaaaatcggtccgcctcagttgagagcgaagctttacatgtctgcgctgtgcggaaaaatctacaataagcggatgcgtaatatttacgacgagatgtgcctgcggggtaaacctaaaatggtggccattggtgcgctgatgcggaaactggtgcactggtgttatggcgtcctgaagaccggaatcgtttttaatgatgaaggcctgaaacaagtactgtcaacctga

SEQ ID NO: 26187 - DNA, 1257 bp, Escherichia coli; identical to SEQ ID NO: 13723

SEQ ID NO: 26188 - DNA, 477 bp, Escherichia coli; identical to SEQ ID NO: 25466

SEQ ID NO: 26189 - DNA, 636 bp, Escherichia coli
atgtctcaaatgaatctccacattctgaatgcgcagaagaaactcaccgctcactgtgaatggcttcaaataaacctgactgatacctacgaacaagccaaaaggttaatgccgattcattcactggatgtggtggttaaagctgggaagtttgtcatcccggaaaaagggcatcttggtttttgccctgaagctggcgttatctatataactgttgatcctgaaaattctgcattttgcaaaaatgatgcgcactctattgaacgaatgtttgtgcatgaactgcaccatgcagttaggtggacagggccgggatatggctcaacgttgggagaggtgttagtctcagaagggcttgccgggcatttttctattgagctttttggtggtgaacctgagccttgggaaagcctccattccgatactattcagccctactatccacaaatgcttgaaaactggcatcgcactgattacgaccataatgcctggtttttcggaacaggaaatttgcccaggtggctaggatataccgcaggattcaacctgatctcgaggtatctcgcatcatccccaaacttgaaagcttcaatgctggcgaacattaatgctgaggagttaaaggattttatataa

SEQ ID NO: 26190 - DNA, 1254 bp, Escherichia coli
gtgggagaggcgtatcagacagcaagactgaattatataaataactcactggatgcatggcgaaataaccaggcaaataaacccaaagcgcataaaaagaccgaagcggaaaaaacagaggatatttataaacggctgattaaacagcaaaaagaacagatagcactggcagggcagaatactgaactggctaagatgaaatatcaggtcagtcagggcgaattatcaaccctgtcagaagcgcagaaaaaaacgcttttgcagaatgcagcacttatcgaccagaaaaagattcgtgagcagcttgctgcgtatgagagcagtctggcggacagtaatgccagtgtcagagcatcaaatgaggctcagttactgggatatggtgaaggctcacggatgcgtgaacgacttcaggaaatgtggagcatccggcaggagtttgagcagaaaaataacgagctactgagacagtatcaggccggagaaattgaagaagccctgtggaaacaggagaaagagctgaataaaaaatatctggaagagcgtctcagcgatcagcaggattattatgtaaaggctgatgctttacgcagtaactggaatgccgggctcaaagaggggctgacgaactgggcagacagtgccaccgattatgcttcgcaggcggcagatgctgtcgtttccacgatggacgggctggtatcaaatatttccgatgcactggccggaaatgttgtggactggagaaactgggggagttcaattctccaggaagtttcaaaaattctgatgaacgctgccatcgttaacgggctgaagtcactttccaaaagcatgtccggtgccggaggatggcttggtacagtcggcgactggctttccggtgcagtggcaaacgcaaaaggtggtgtttatacatcggcaaatctgagtgcttacagtaacaccattgtggataccccgacgtattttgcttttgcgaaaggtgccgggctgatgggcgaggccgggcctgaagctatcatgccactgactcgggcagcggacggctctcttggagtcagagccattggcaatgtgaatggtggcggtggatttgtttattctcccgtatatcacatcagtattcagaataaagggagcaatggcgagatagatacgcagtcagccaagggactggtggatctgatcgacagcagggttgtgtcaattatgcagtcatcacgtcgggacggaggattatgcagtgcctga

SEQ ID NO: 26191 - DNA, 1242 bp, Escherichia coli
gtgggagaggcgtatcagacagccaggcagaattatatcaataactcactggatgcctggcgaaataaccaggcaaataaacccaaaacgcataaaaagaccgaagcggaaaaaacagaagatatttataaacggctgattaaacagcaaaaagaacaaatagcactggcagggcagaatactgaactggctaagatgaaatatcaggtcagtcagggcgaattatcaaccctgtcagaagcgcagaaaaaaacgcttttgcagaatgcagcactcatcgaccagaaaaagattcgtgagcagcttgctgcgtatgagagcagtctggcggacagtaatgccagtgcccgggcatctgacgaagcgcagttgctgggatatggtgaaggctcacggatgcgtgaacgactccaggaaatgtggagtatccggcaggcgtttgagcagaaaaataacgagctgctgagacagtatcaggccggagaaattgaagaagccctgtggaaacaggagaaagaactgaataaaaaatatctggaagagcgtctcagtgatcagcaggattattatgcaaaggccgatgctttacgtaataactggaatgccggactccaggagggactgaccaactgggcagacagtgccaccgattatgcttcacaggcggcagatgctgtcgtttccacgatggacgggctggtatcaaatatttccgatgcactggccgggaatgttgtggactggaggaactgggggagttcagttctccgggaagtttcaaaaattctgatgaatgcagccattgttaacggactgaaatcactctccggtgccggagggtggcttggtacggtcggcggatggatttcgggggcagtggcaaacgcaaaaggtggtgtttacacatcggcaaatctgagtgcttacagtaacactattatggatacaccgacgtattttgcttttgcgaaaggtgccgggttgatgggcgaggccgggcctgaagcaatcatgccactgacacgggcagcggacggctctcttggggtcagggccattggaaatgtgaatggtggcggtggatttgtttattctcccgtgtatcacatcagcattcagaatcaagggagcaatggcgagatagatgcgcgctcagccaggggactggtggatctgatcgacagcagggttgtgtcaattatgcagtcatcgcgtcgggatggaggattgtacagtgcctga

SEQ ID NO: 26192 - DNA, 192 bp, Escherichia coli; identical to SEQ ID NO: 8188

SEQ ID NO: 26193 - DNA, 465 bp, Escherichia coli
atggcgctgatggcagaaaaagcccgtcttgctgccctgttaccggagggatggtcacgggacatgacgacattcctgtcactcagtcaggaggtgctgttatccctgctcagtttctgcaccgcatgcagccttaacggtgtccagacccgtgagtatggtcacacgtcacgcagtccgctggacacgctggagagcgccatcggctttcacatgcgcgactggtggcagccgacgaaagcaaactttttcggacacctgaaaaagccgcagattatcgcagccctgaatgaggcaggactatccggtgccgcacgggacgcggagaagatgaagaaaggcgatgcggctgaacatgcagagcaccatatgaaagacaaccgctgggtgcctggctggatgtgtgcaccacgcccacagacggatgccactgaacgcaccgataacctggctgatgccgcctga

SEQ ID NO: 26194 - DNA, 234 bp, Escherichia coli; identical to SEQ ID NO: 11469

SEQ ID NO: 26195 - DNA, 234 bp, Escherichia coli; identical to SEQ ID NO: 10186

SEQ ID NO: 26196 - DNA, 510 bp, Escherichia coli
atggtcgggaagcgctgtcatgagcgcactgaccagcgtatccacttcccagccggtgcgggccgatacggccacaaccggatgtacaggccggaacagacggaataccgcctccgttttctcccgaatgttctgtgcctgtgcgggagaaggctgaatgccggccatatcccattcatggcagggctccgttttgtcggcctgcgtcaccacaaacagcacctgctgatgtccccggtgcaggatgtgtcgccagaaatactcatccacagacagggcccggtcatcggctttaatcagccacagcaccaggtccagttcaggcagaatgtcacggtacagggcttcatactctgcatccctgtcccggctctcgcccaccccgggcaggtcagtgataaccatgctgtaaccgtggccactcagacggaagcgccgtacttcccgggtgccggcgtgaacatcactgaccggtgtgacctccccctgaaacagtgcattacagagtga

SEQ ID NO: 26197 - DNA, 333 bp, Escherichia coli
atggcagggttccgttttgtcggcctgcgtcaccacaaacagcacctgctgatgtccccggtgcaggatgtgtcgccagaaatactcatccacagacagggcgcggtcatcggctttaatcagccacagcaccaggtccagttcgggcagaatgtcacggtacagggcttcatactctgcatccctgtcccggctctcgcccaccccgggcaggtcagtgataaccatgctgtgaccgtgaccactcagacggaagcgctgcacttcccgggtgccggcgtgaacatcactgaccggtgtgacctccccctgaaacagtgcattacagagtga

SEQ ID NO: 26198 - DNA, 219 bp, Escherichia coli; identical to SEQ ID NO: 19526

SEQ ID NO: 26199 - DNA, 375 bp, Escherichia coli
gtggccttcacctccacccgtgcggcacgagaatggctgattctgaacatggcgggactggagcgtgaagagttccgggtgctgtatctgaataaccagaatcagctgattgccggtgaaaccctcttcaccggcaccatcaaccgcacggaagtccatccccgggaagtgattaaacgcgccctgtaccacaatgccgctgccgtggtgctggcgcacaatcacccgtccggtgaagtcacacccagtaaggcagaccggcttatcaccgaacgtctggtacaggcactgggcctggtggatatccgggtgccggaccatctgatagtcggtggcaaccaggttttctcctttgccgaacatggtctgctttaa

SEQ ID NO: 26200 - DNA, 207 bp, Escherichia coli; identical to SEQ ID NO: 13738

SEQ ID NO: 26201 - DNA, 258 bp, Escherichia coli; identical to SEQ ID NO: 14880

SEQ ID NO: 26202 - DNA, 219 bp, Escherichia coli
atgcatacctttatttttcttgtgctgataaaaaatattaacggtggcggaagctggaatattacacccatgccaaatacggacgtatgcgtgcaggttcttcggataatcgagtcacacggaggcaggggatttggaaatacaggggagtgtattgaagttaaaacaaatgaacctttgaacagcgtgatgaaaacactaaatggtggtgggcaatga

SEQ ID NO: 26203 - DNA, 366 bp, Escherichia coli
atgaaagtgacgaaaaacatcgataccgaaaatacggtcgttgctgacactgtgaaagaaaccagcgagcgtggcgtaaaactgacccgaccaattgagcgtggtggcgaaaaaatcacgtatgtggagatcaccggggctattgagcaggctggatccctgcgtggtctgtcgctgtctgatgtgctgaatctgaaagcggataccatgttcacgctgttgcctcgcgtgacctcgccacgactggatgaagtgatgattaaaaaaatgtcgtcacgcgattttattcagttgtgcgctgtggctgtaaattttatgagcgagccagactctggcgcgaagagcgtgcaggagacggcagcgtaa

SEQ ID NO: 26204 - DNA, 2793 bp, Escherichia coli
atggataacattcatagctgcagttcaattagtcaaaatcataccggaccaggccataatgttgctggtaacttaattgtatacaatagtgataatgttgattatgcgactgagttagcgattgctgttttagtcggttgctgggatgaaaaaaataatggtgatattgatataattacaagccttattggtgagtcatatgacagttggattcgaaaattaagaataattgaagggatgcaagatagtcctttgattcatgagagaggttcttggagttttaaagatagaatacaaacatttcaaacggtatcgtcaagattattcgatgatcatttggatttgtttcggacgactgttgtatccgtttttaaaactatcgacccacaatttgaactggcacctgaagagcgttatgcagcagtaatttatgggaaggttttaccacacagccgattaataaggaaaggactatccgaagggttggcattagttgcaacaaagcaagagttacttactaattgctcaaaatataaagggcaatattgcgcctcaagtgtggttaaagaggttttttcggcttctagctggcaattatgggctagtacgcaagatattcaagttatgcttgcggaaagtgctcctgactgttttatcgacgaagtggaaaatgctgcatctcaccaagacaagccatttgattcactttttgcacaggaaggtatcggtggaatttcaggtcggaattatatgacaggactgctatgggctattgaaggattagcttgggcgcctaactatttatctcgctctttagtaatattaggggagctggatagccatgatcctggtggcaattgggctaacaggccacttaactcgataatcaacatattgttaccatggcttcctcatactacagctgatatagatagacgtattgctgctttcaacgcattggcaagggagtggcccgatacagcatggcgtgttttagttcagttgctacccaacaacacgcaagtaacatctggcacacatattccaacttttagaaactttattcctaacggttttaataaaaggccatcgggtgatgagtgccgtactcagattgaaatatacactcaattaacaattgaattggcaagtaaatcatcattaagacttgttgatttagttgaaaatattggtagtttagcgccatttaaattcgatgatgcaattaaactattgtatgatttttctaaaaaaacagatagtgctgaattgaagttagcggtgtgggaaaaatgtttagaagtttataacaaaaacaaaagattctcaggtgcttattgggcaatgcaaccagaacaaaatgaaaaaatcaaagatgtttctacagtcttgaagcccgaagatcctatgctttatagcaagcgactttttgcacaaaacaattacttcctatttgatgaaaatggaaactggcgggaccaagaagaaaggttgacaaaagaacgagggcaatcaatatgcgaaatatatgctattaatggtattgatggagtcttagaattctctctatctattgaaaggcctgagtttgttggtagtagcctggtcgcagaagatctagaaattcctttagatatactgaaaaaacttattgttagtgatattaaaaaggaaaattctcttgcttctggttatgtacaggctaaaaactacagagaaggaaaatcatgggtgttgacagttattaatgactggagtgctcaagaaaagattgctttttttcttttgttaccgtttaaaaaagaaacatgggatgcattaaacgcttcatttgatgattttcctttcgagtattggaaaaatactcttgttaatgcatacagctgtgattcaacggaagaaatttattttgctatagactgcttgattaaagtagaccgtcccttgatggcaatagattgtttatctaaaattttgcatatcgataattcagttgatagcagtaaggttgtgcttgctctattgcaatcaattagaaccacagaaaatattgagcggtttgatattcactcatttaatgaacttgtgaattatattcaaaatgataacactgtttcagatgacgacttagtaaagattgaatgggcatacctacctgtaattaacaggggggctaatgattcgttgcatcctcaagtattagagaaaaaacttgcaagtgaacccagttttttttgtgaagtcattcaatatgcgtatcgatcagaatttcaaaaagcaagtaaagaactatctgaaagtgaaataaatattgccaaaaactcactctatttacttgatgattggaaaaagattccgggtgttgatgctgaaggcaagtttgatgtcaatgcgtttaataactggtttgattttgtccaaacagaatgcgaaaagtcaggccatttagattttgcttatcataggattggaagcatattaatttttagccctgcaaatgacgagcattggatacttccagaactggccgagtttttgaatagacgtgaacttgataaagtgcgtactggttataagaatgcgataataaattcgcgtggtgtctacattgttgacccagaaggtaaaccggaattggagttggcccaacaatatcacactaagtctgatgcaatggaacttctaggctttcatcgatttgcccgaattcttcgagagttagctcatgaataccaagcggaagcagagttgataatagaacagcacagtaaaaaaaagattgctgagatttag

SEQ ID NO: 26205 - DNA, 321 bp, Escherichia coli
atggattttttatcttcggcgatactttctggcatagtttatgacatgcttaaacatcatgtttcgattactgcaacttcaataaaagaaaagttaaaaaattgggttgttgatgaggctgtagcccctgctttagctaaagagcttgaaaaactgtctttgaacgatgaaatgagtgaaatagcaattgaaagaaaactattggatagtagtgaaattcaaaaaatactctcgtctataaaacctcatgcagcaactgtcattattcaaaaccatagtggcactggtgataatattggtggaaataaaattacgaggtag

SEQ ID NO: 26206 - DNA, 249 bp, Escherichia coli
atgctggctgacaagcgttacgacttagtggtgcttgatgagctgacctatatgctggcttaccattatctggacaccgaagaagtgatcgcttctctgcaaaaccgcccggcacaacaaagtgtcattgtcaccggacgcggttgccacagtcagatattaaaaatggcggatacggtaagcgaaatccgccccgtcaaacatgcttttgataacggcattcaggcccagccgggtatcgactggtaa

SEQ ID NO: 26207 - DNA, 456 bp, Escherichia coli
atgaatccgtggagtaatgcactatggctgaatgaacatggcccgcgcggtggcgatgaaattaatatcccgcaaaaaggcaaaaactacggctggccgctggcaacctggggaatcaactattcgggctttaaaataccggaagcgaaaggggagatcgtcgccgggaccgagcaacctgttttttactggaaagattcgcccgccgtgagcggcatggccttctataacagcgataaattcccccagtggcagcaaaaattatttattggcgcgctgaaagataaagatgtcattgtgatgagcgtcaacggcgacaaagtgacagaagatggccgtattttaacggacagagggcagcgaattcgtgatgttcgcactggacccgacggttatttatacgttctcaccgacgagtccagtggggaattacttaaagttagcccacgcaattag

SEQ ID NO: 26208 - DNA, 594 bp, Escherichia coli
gtgataacagatgtctggaaatataggggcaaatccaatggtcatctttatggtgctgactacacgcgtgccaatggtgacggtttcggtatctcctcaacttatgtttatgatggctttggtatcggtgcggtgtataccaaatccgatcggacaaatgcgcaggaaagagccgctgctaatcctctcaatgcctccggtaagaatgcagaactgtgggctacaggtataaaatatgatgccaacaacatctactttgcagctaattacgctgaaacattaaacatgaccacctatggcgatggttatatctctaacaaagcacaaagttttgaagtagtgacacaatatcaattcgacttcggcttgcgcccatcactcgcttacctgaaatcgaaaggcagagatctgggccgctacggcgaccaggacatgattgagtatatcgacgttggtgcgacgtatttcttcaacaaaaatatgtcgacctatgttgattataaaatcaacctgattgatgaaagcgactttacccgtgccgtagatattcgcaccgataacatcgtcgcaacgggaattacctatcagttctaa

SEQ ID NO: 26209 - DNA, 1464 bp, Escherichia coli
atgccaaagttaagaatatatttttcagatttttttaatgtatctcctgaaaaaataaaagagtatggtgcatttaatatttctctgattaatgatttgccgctatttattgatccgtttttgttatttaataatgagaaatatatagatttacatcaggggataattaaatatgtttctttcttaagagatcgttctcagaatggagaattaaatcgaggtttaatcaaaagttggtttttatttcctgaggtaaaacaaaactggctgggttatagcatggttgggaacggtgggagtggattgggtattgattttgcaaattccttaatcacctcattttcaagtattttaaaaaactttggtaaagaggaaattactgagggaagtcatcttgaaaaattgtgtttgattaaggagggggtaggaaaggatagtattagtgattttaccactaatttaattaaatcgtttttactgaagtatactgaagatttctctaaagaaaatatagatagtaaatatctctctgaacacttagtaccaaaagttgaatttaattacgaaaccagaagttggatgagtaaaaaattcacgttgccaacatatgctggagattatgttcttttaactccgagagatatactcacaaaagatgaaacttggattaacagaaatgaaatgatcgaggactttagagatatatgtgaaagtatccctaatgatcaattgcgtggacaattgtctgattatttcaatagatgtctcccagactctccaaagaaaaaggaacgagagtccgctgccgatttgacaattaagaattacccgagttttattgattattatattcgttataaagaacaaaactctgggggtgctaaacgtgatagtaatgcaaaggttagcgaaactgagcaaaggtatattgaagctgtccaacttttggttgatacaatctttaataaacatcaggagttctttagttcaaaggatgatactttcgaagaggcctataagcgagtctgttatcttaaacaggtaatagaaaataatgatggctataaagtattctatttgaatggtgtcccaattaagcgtgaagctgatttgcagttaatgtttagattaacatggtttgctagtatttctgatgtcaatagtgaagtaaataatggtcgtggtcccgttgactacaaaatatcgagaggttcgaaagataaaacattggttgaattcaaactggctagtaactccaagcttaaacagaatctggcaaatcaggttaaagtgtatgaggcggcaaatgaaacaaaaaaatcaataaaggttattttgtattttactgatcgagaattgtctggattgtttaagactttcaaagaacttgggattaaagaaggtaaggatttagtcttgattgatgctaggcctaataaggtttctgcatcgaatgtcaaataa

SEQ ID NO: 26210 - DNA, 915 bp, Escherichia coli; identical to SEQ ID NO: 6605

SEQ ID NO: 26211 - DNA, 1014 bp, Escherichia coli
atgtcagtattagttacaggcggcgctggatatataggttctcacacaactttattattgttagaaaatggttatgatgtaataacattagataaccttagcaattcaactaatgaatctttgaaaagggttgaaaggctgacaaataaaaaaataaaacaatatacaggtgatatttcaaattcagaacttttaaatagaatttttggtgaaaataatataaccgatgtgattcattttgccggtttaaaatctgttagtgaatcaattaacgatcctataaaatattataaaaataatgttgtaggaagtttaactttggtaagtgaaatggttaaacataaagttaccaatattatttttagctcttctgctacagtttatggtcaaccagagataatccctctaactgaagactgtaagacagagaaacctacaaatccttacggatattcgaaattagtagtggagaatatattgagagacttggtgaagtcttctcatgactttaatgttacttgcctaaggtatttcaatcctgtcggagcacatccctcaggagaaataggtgaaaatccaaatggagtcccaagtaatattatgccatatatttctggtgttgctattggaaaatataaacagctaaatatatatggttctgattacaatacacctgatggtactggtattagagattatattcatgtaatggatttggcggaaggacacttatgtgcattgcgaaaaaaatggtcaactccatcttttcgaatttataatctaggtacaggcaaggggtattctgttttagaattagtcaatacgtttgaacaggtttctggtattaaaatagcttgtaattattcagaaagaagatgtggtgatattggggaatgttggtctaacccaaaggcagcggaaagagatcttgggtggaaagcaaaatatgacattcaaaaaatggtttttgatacatggaactggcaacaaaagaatccaactggatatgtttaa

SEQ ID NO: 26212 - DNA, 756 bp, Escherichia coli
atgaaaattgtatgttctttcggtagttgtctctccgcaaatgtagctacaaatttatcaaaaatatattcagaatggtataggttaagcagtgttcaacataatcgtatagatcaattctgtgatatttacataaataaaaagtatccagagttaaaaaaaacagatctaaagttcgagctaagtaaacaatatagctatgtaaacacgatcgataatcagttaaatgatgtaggtttaggtaaagcattaccgaagaaagaagataaacttccgcttataaatttctttgacgcaataaatttgggaaaaatagatctttttatatttgataattttgctgaattattatttaagatttataaacatagagagtttggcactcctatgtttataaatgaaaattaccttacaaataaggctgttgaatttcaatttgtaaataagtttatagatgatgataaattatataacagttatgataatgtgtttgactttttaacacgtaaaaacccattgtgtaaaattgtgtttataccattcccgatcaatttaaaaaacaacaaaaatctaacagaaagaagttcatcacaacacttgcagatttgcaaacttaaaaataatcataaaaatttatatgtattaccaagaagagatatatcgatacatgatttagtaactcattcggatatttatcattttactgataagtgttatttaaattactcacgagaagttttgagaaacataatttaa

SEQ ID NO: 26213 - DNA, 2247 bp, Escherichia coli
atgaaatatcttataataaacccttatcataatgcatcacatggaattgccaactatataaaaaatcttgaaaatgcgttgattggggtagaaataataacatttgaaaataaaagaaacttgaatgctattgcatttcgtgaagaggtgtatgattatgtcactaaaaattttggatatgatgacgttataattgaagcacctgaagctaaagcttcaacattactattgtcttcaaggtacaatgtgcatattcgattgcattgtccacttgcaatcgctcaaaaatatgatggtcaaaaaccaaatcaacaagagttttccaatgagttgagagtaatcaataaagcaaaaatagtatcatctccgtcatatgcattggctaaagaattaagtagcgaaattaaaatagataatgtaagttattttaaaaacccaatcataatcaatcacaatcaatcatatgataaagaatatgacattgtatttatggggcgctttcaagaattaaaaggtactaaagatattaataaaattcttgagagactgccagctaatttcaaagtattacttattgggccaaaatcaaatttatttaaattggaccctagtgtaaaatgctccgttgagaagaaaggcgaggttattggagataaacgatttgaattagtaaaaaaagcaaagtgtttaattatgcctagccaattcgaaaactgtagtatggtgatccttgaatcgttagcatgtcatgtacctgtagtcgcatgggatgttggtggtaatgctgaaatagctaagccaaatatattaaaatgcgcaaaatttggagattatgacgattttgcttataaagtaaatgagttgatttcaacacctcctaaaataaagttttttcaagaagctatagctaatataaacacagatttttcaaatggtatacaaaataccatcaatgagataaataatgaaataccttcagtttatagagggctgaataacaaaaaatatcataaatatagcaacgaaacagttgcggtttatactaagcctataaaaaagcttcgtgtttttggaatagctttttctaatgaacacattgaagaaatatgggcgccagttattgataaacttgggtatgaatacagatatgtatgccgtcaaaaattaggttatcatacggtctttaaacacactccatatcaaataaataaaaattggttttgccagtttgattggataaaagatcatgatcgactattaaaacaaatagtaaattatcggcctaactttattctttttcacaatggatcgcatccaatttaccgaaaagttttagaacaagtgaaggaactgaaaataccaattgtatattcagagttagggtggtttcctcaaaaggatcatgtatacttcgataaatggggtactaatgggcaatcatatattgcaagtttaacagcagagcagctatgcaaaagaaattttgatggagatgaaagtactttacaaatcaagggtgattacgcattaattattactcaattggaaaatgatacaaatcttattgttaattccccaaggtttaaaaataacatcaatttcattaatcatgtcatttctaatattggtaacaaaactaatataataataaaaccacacccattagaccaaaatattgaaagatataaaatatttgaatcacaaaatgtgaaactcgttaccgatattgataccgatactcttttaaaaaatgcgcattcagtaattgggattaactccactgtattattacaatctctcaagttcaatgttaatatttattcatttggtcgttctattttggataataaaggcgtggcaattgattgttctactgattctatagatacagtatggaccaatataatgaaaggaagtagacagaaaagagatgctattgttaacgcacttatggaaaagcaaattaatttaatagatattagggctggaaatactccttctatggcagcatcattacctttaactgaaaactatatttgtgatttcactcatttgattaataaacaaaaatcacaaaaagaatcaactaactttagtaatagagtattgatgccaaaaaataatgaggtaaaaaataatagaggagcaataaagagaaaaactaataaattaataagaaatccaaaattattttttgtagatttgataaaaaatattaaagataataataggaatattgcaaaataa

SEQ ID NO: 26214 - DNA, 141 bp, Escherichia coli
atgtaccgggtaaaacagctgttcggggggtcactgacgctgcgtgactacgatggtcaggttgcggaggctatggccctggtacgagcgctgaacaaaatgacgaaagcaggtatgcctgaaagcgtgcgtattgcctga

SEQ ID NO: 26215 - DNA, 327 bp, Escherichia coli; identical to SEQ ID NO: 16555

SEQ ID NO: 26216 - DNA, 924 bp, Escherichia coli; identical to SEQ ID NO: 25590

SEQ ID NO: 26217 - DNA, 348 bp, Escherichia coli
atgactgaaatcgttgcagataaaacggtagaggtagttaaaaacgcaatcgaaaccgcagatggagcattagatctttataataaatatctcgatcaggtcatcccctggcagacctttgatgaaaccataaaagagttaagtcgctttaaacaggagtattcacaggcagcctccgttttagttggcgatattaaaaccttacttatggatagccaggataagtattttgaagcaacccaaacagtgtatgaatggtgtggtgttgcgacgcaattgctcgcagcgtatattttgctatttgatgagtacaatgagaagaaagcatccgcccagaaagacaggtga

SEQ ID NO: 26218 - DNA, 417 bp, Escherichia coli
atgaccgtgaacatttcaagccaactgaacaccctggtgaccgatctttcttctatcagcaactcctttagtgcggatcaggctgacaccacgggcaccgcaggtgtttctggcggtactgagctgaccgcgtctggctcggctaaccagatgatcaccagcatctctaccgcgatggatgatgtttcgcagatccaatccaagctgggtgcgtctattaaccgtctgaacgacactgccaacaacctgaccagcatgcagaacaacacggaagtcgctatcggtaacatcatggataccgactacgcgacggaagcgtccaacatgaccaaacaacaggtgctgatgcagaccggcatcaccatgctgaaacagtccaacagcatgtccagcatggtttccagcctgctgcagtaa

SEQ ID NO: 26219 - DNA, 501 bp, Escherichia coli
atgttatctattaacaccaataacgcctcaatggccgccgttaatgcaatcagcaaaagcagctcttctctgtctacatctatggaacgcctggcaacgggtaaccggattaactcttctgccgatgacgcagcgggcaaacaaattgctaaccgtctgacagcacagtccagcggtatgggtgtggcgctgagcaacatcaatgatgccaccgcgatgctgcaaaccgccgacagcatgttcgacgaaatgtctgatgtgctgggtcgtatgaaagacctgtcaactcaggcagcgaacggcacctacagcgacgacgacctgcaggcgatgcaggacgaatacgacgaactgggtcagcagatgtctgacatgctgcaaaacaccacttacggcggtaccaacctgttcggtgtttccggcaccagcaacaccggtactgacggcctgttccagagcgcggtaactttccaggtggcgcggaatcttccgacaccatga

SEQ ID NO: 26220 - DNA, 126 bp, Escherichia coli
atgattgttgcgctaaacggctggtgtgatctcgcgcacattaatgaaggcataaaaaaaagccggcatcatgccggcccaaaaaaatataaacaagacgataaaaggctaataacggaggcatga

SEQ ID NO: 26221 - DNA, 1341 bp, Escherichia coli
atgtttaagtataaaaaaaaggcagcagggatctgttttttgtattttttatgtgtctctgtaatgacatgttatctgtatactatttacgttaaagatcgagtcaattcggtaaaggtatcgatcatagatagtgggcttgctatagctaatgtgtctgagtatcggcgcttagtatttaataatgtattttatgggttagatatttctccggaagagttgttaaaaaggatacgcaatagttttgctgactttcaaaaaccagaatatatttatgatctaggtccctatatcattagcgatggtaaatgcgccaaagttacaacggaaggggataacttttgtgacggcatagtttcttctatccgtataagtaacatctttgaaagagggattattagtttaaataataaatattatatttattatgctcatcctatttcgaaacgaacaagtttgatatcagtggtagatcctgaacgttatttggctttgataagaaatcagtcaggcgaacgggaaaatatatatgtctcattttatgatatcaatgataatgaaaagaaaatcgcgggtgatgattttttgattaatgatgctgtatttgagaaatcagcgatcactcttgcttattcttatatcccggaagtaatgtttattgttgcctataaaaaagataagtatatttatatgtgcttgttgtttgttttcacatcggcgatttctgcggggttaatatattttcattacattaaattaatgcaaaaaatcataaataagggtaagtcagaaaaagaatctatattatcaaataatcattataatttgcatggaaaaaatctattctttaacgttgaagagattgatgcaattagagaaatatatgattccgggacttacgatgcattgacgcgagcttctgggtgtcgtgtttttgataaaaatatcaggatgctgagtaaggattttggatatttatgcctgtttgatgtagataagtttaaaaccattaatgacaagtttggtcatttatttggtgatgaagtactaataagacttgttaatcttattaaggatgaattacccctcagcaaaggtgaagtttatcgatttggtggcgatgagttcgctattatttatcatgataaagatataaatcaattatcaagaattttgcacagaatagtccatttctcaataggtggattgaattgtagttgcagtattggtgttgccaatactgacgagtgcatgaataacattgaacggttgaaattactggcagatgaacgattatacaaaagtaagcaaaatggaagagcacaggtaacctggggttaa

SEQ ID NO: 26222 - DNA, 2001 bp, Escherichia coli
gtgagtagatcctttaatctctacacgggggctacttcgaatgataacgaaaaaaaacaggtttcttcagagagattaacacttgataattatattgatgatttacattttgataattctcccttgaagagatttacgtttgatgattatgctgtaaaacttacgacactgattaaaaataaaattcctattattaatacaacaatcaatttatcatcgttgtctaaggatgttttaaattcattaaaatattgtagttttaaaaatgtaattttttcaggagtgataaacagccctaaccttgaaggtccggtttttgaaaattgttatttcgaggattgtaaattcaacaacatacagctttatgagactaatgatgatactgtggggtcaggaaataaaaaaccaataaaaggtatgtttaaaggttgttttatttctaaatgcaaaattgaaaattatagatgtgagacgtctaaaatctacaccgttacacaacctgatagtattcaagaaaaattaggttcttatctctttatgcagtctttcgttcaggattgtataattcagggaggacgttgtcctggttcgagtatacttctgagtcatttttataactgtacgatagagaaacttgatgctcatgggatggattttttggcaaacgcattcaataagtctggtgataacgaaaccagggcgcaggatcagggaactgtgtttgattgttgtaatttgaatagtattaaaatgaactgtggtcttggtaatgtgagttcagatgaatataagtttaaccccgaagagtatttttctgattacattgaaagaagatcgagaaatcttaagttggatgataatttttctaactgcgtagagaatatcgagaaggctgttacaacttcatttagcaagggaaattcagagaatgataatatctcctttaattgttgtgatttgaggagggccaatttagacaattattacagagaagatttgtgcaaagactgttctattgatccagattcaatttatttagaagatggtgttacaccgataaaatatatttatatgaatctggacggagctataagtaaagaccaaatacctaatttcttaaaaaaggtaagtgctatcaatagcgatgtaaaagatttttataatactgagctaaagattaaggaagaatataataacgcattttcagatttagagtcgtttttgtctacactttatgttgaaaataaatcgtacaaagagaaatatcattttaataacggtagggctgagttttttattttcaaagatatgcagtataaagcacaaaatatcattactaatatgatagaaagtgaccgaattaagtttattgaatctatcataaaaaaaatcattccaccggcagatgtaaaaatgcctactaaagattcagacaaatttattcgacaaaaacagcatgagtctcataaccaatttgatattgattataaattgaattatggtgaccttgtccccctttttgacggtgttgaagaaaaacaaattgaagtgctaaaaatccaacttgaaaatataaaaagtttcaaagcatattacgactcagaactcaataagtttgcttccgattttcgaaatttttccggtgcatttgcaattaactgggaggatttactaaaaaactatcaggaaataagagcttccattaaagattacgatgacttattgcgagaaattaaagagttaaccataaatcgggataaatcattagaggagaaaagtactttatttgataacaaaagggacaagtggaatagtcaagaagtacaggatgaagtaaaggcattaaacaagaagattgctgactgtgacaatgagatacgttctaatcttaatattgttcaaaattttagacgcgagaatcaatataaagctaataaaaaaatcagtaacgcgatgcttaatattctggattggttcgaacggtatcccgatattgggtaa

SEQ ID NO: 26223 - DNA, 1101 bp, Escherichia coli
atgatgccgtccgcctccccaaaacaacgcgtactgattgtgggcgccaaatttggcgaaatgtacctgaatgcctttatgcagcccccggaggggctggaactggtcggcctgctggcgcagggaagcgctcgttcaagagagctggctcatgcgtttggcattccgctgtatacctcgccggaacagataaccaggatgccggatatcgcctgtattgtcgtgcgttcgaccgtcgccggaggaaccggtacgcagcttgccagacactttctgacgcgcggcgtacacgtcattcaggagcatcccctccacccggatgacatcagttccttacaaacgctggcgcaggaacagggctgctgctattgggtaaacacgttttatccgcatacgcgcgcgggacgcacatggcttcgcgatgcgcagcagctgcgtcgctgtctggctaagacgccgcaggtggtccacgccaccaccagccgacagttgctctactccactctggatttgttgttgctggctctgggcgttgatgccgccgccgtggagtgcgacgtggttggcagctttagcgattttcactgtctgagactcttctggccggagggagaagcctgcctgctgcttcagcgctatctcgatcctgacgatccagatatgcatagccttatcatgcaccgcctgctgctgggctggccggaaggtcatctttcgctggaggcgagctacggccccgtcatctggtcatccagcctgtttgtcgcagaccatcaggagaacgcccacagcctctaccgcagaccggagatcctgcgcgatctgccgggtctgacgcgcagcgcggcgcccctgagctggcgcgactgctgcgaaaccgtcgggccggagggcgtcagctggttgctacaccagttgcgcagccatctggcgggcgaacatccaccagcggcctgccaaagcgtacatcagatcgcgttatcacgtttatggcagcagattttacgtaagaccggcaatgcggagatcagacgcctgacgccgccgcaccacgaccggttagccggtttctacaacgatgatgataaggaggcgctgtga

SEQ ID NO: 26224 - DNA, 237 bp, Escherichia coli
atggcgttggcgctgaaaattgcagcgcgcatgattgaagatggcgagctggataaacgcatcgcgcagcgttattccggctggaatagtgaattaggccagcaaatcctgaaaggccaaatgtcactggcagatttagccaaatatgctcaggaacataatttgtctccggtgcatcagagtggtcgccaggagcaactggaaaatctggtaaatcattatctgttcgacaaataa

SEQ ID NO: 26225 - DNA, 516 bp, Escherichia coli
atgaaacagatttctttatttattcctctgctggggactttattactttccggctgtgccggaacaaatacggaatttgagtgtaacgccaccacatccgatacctgtatgacgatggagcaggccaatgagaaggccaaaaaactggagcagtcctcagaagcaaagccggttgcggcatcactgccgcgcctggctgaagggaacttccggacaatgccggtgcagaccgtcaccgcgaccactccgtccggcagcagacctgcggtgacagcacatccggagcagaaactgctggcaccacgcccgctgtttaccgctgcccgggaagtgagaacggttgttccggtcagttcagttgtgccggtaacacctccccgtccgctaagaacgggtgagcagacggctgcattatggatagcgccttatattgataatcaggatgtttatcatcagccatccagtgtgttttttgttattaaaccgtctgcgtggggaaaaccacgtattaattaa

SEQ ID NO: 26226 - DNA, 2235 bp, Escherichia coli
atggacagcggcaacactaacgccgtgcgtggactggcgaacatttatcggcagcaatcgccggaaaaagctgaagcgtttattgcgtcactttctgccagccagcggcgcagtattgatgatatcgaacgcagtctgcaaaacgatcgcttatcgcagcaggcggaggcgctggaaaatcagggtaaatgggcgcaggcggcagcacttcagcggcaacgactggcgctggaccccggcagtgtgtgggtaacttaccggctttcgcaggatctctggcaggccggacaacgtacccaggctgatacgttaatgcgtaacctggcgcaacagaagccgaacgacccggaccaggtttacgcttacggactgtatctctccggtcacgatcaggagcgggcggcgctggcgcatattaacaatctgccgcgcgcccggtggaacggcaacattcaggaactggtgaatcgcctgcaaagcgatcagattctggaaacggctaatcgcctgcgtgacagtggcaaagaacaggatgcggaggcgatgctacgccagcaaccgccttccacgcgcattgatcttacgctggctgactgggcacaacagcgacgcgattacaccgccgcccgcacggcgtatcagaatgtgctggcgcgggagtcgaataacgccgatgccattcttggcctgacggaagtggatattgccgcaggcgacaaagccgcggcgcgcagtcaactggcgaaacttcccgccaccgataacgcctcgctgaacactcagcggcgcgtggcgttggtgcaggcacagcttggcgataccgcagcggcacagcagacatttaacaggctgatcctgcaggcaaaatctcagccgccgtcgatggaaagcgcgatggtactgcgcgatggcgcaaaatttgaggcgcaggcgggtgaaccgcaacaggcgctggaaacctacaaagatgcgatgatcgcttccggcgtgacgacgacacgtccgcaggataacgacacctttacccgccttacccgtaatgatgagcaggatgactggctgaaacgtggtgtgcgcagcgatgcggcagatctttatcgtcagcaggatctcaatgtcaccctggagcacgactactggggatcaaacggcactggcggctattctgacctgaaagcacataccaccatgttgcaggtggatgcgccgtattctgacggtcggatgttctttcgcagtgatttcgtcaatatgaacgtcggcagtttctccactaatgccgatggcaaatgggatgataactggggaacctgtacgctgcaggagtgtagcggcaaccgcagtcagtcagactccggcacaagcgtggcggttggctggcgcaacgacacctggagctgggatattggcaccacaccgatgggattcaacgtggtggatgtggtcggcgctgtcagttacagcgacagtatcggcccactcggctataccgttgacgcacatcgtcggcctgtctccagctcaatgctggccttcggcgggcagaaagattctccgggcaacaccgggaaaaaatggggcggcgtgcgtgccgacggcgtggggctaagtctgagttacgataaaggtgaagcaaacggcgtctgggcatcgcttagcggtgatcagttaaccggtaaaaatgtcgaagataactggcgcgtgcgctggatgacgggctattactataaaattatcaacgagaataaccgccgcgttaccattggcctgaacaacatgatctggcattacgacaaagacctgagtgagtactcactgggtcagggcggttactacagcccgcaggaatacctgtcgtttgcggtgccggtgatgtggcgcgagcggacggaaaactggtcgtgggagctgggggcttcaggttcatggtcgcactcacggaccaaaaccatgccgcgttatccgctgatgaacctgatcccgagcgactggcaggaagaagcagcacaacaatccaacagtggtagcagcagtcagggttttggttacacggcacgggcattacttgaacgtcgcgtcacgtccaactggtttgttggtacggcgattgatatccaaaaagcgaaggattatgcgccaagtcacttccagctctatgtacggtattccgccgccggatggcagggcgatatggatttaccgccacagccgctgataccttacgccgacgggtag

SEQ ID NO: 26227 - DNA, 864 bp, Escherichia coli
atgcacaaattcaccctaaatttactcaccatatctcttggtttggcggtaatgtcgatggcaaaagccacgccaactgcttatcaactgctgatggcacagattcgattgggagaagactctcaccgtgaagaactggtggagcagtcgctttatcgccttgaattggtggagcccaataatcctgatgtcgttgcggctcggtttcgctatctgcttcgcaagggggatattgacggagcacacaaacaacttgccagactttctctgatcgccccagattcaaaaatatataaagcatcgcgtacggtcatgcgactttcttcgcttgaggggcgccaggcattgcaaatggcgcgtttacaagctatctccgggcgatacgaggaggctattgtcagttatgacaagctatttaacggagtaccgtcagatgtcggcatggcgttggaatactggagtgcagtggcgcaaattgcatctcgtcgcaacgaggcaattagtcagttgaaaaaacttaatattgataacccaaactctggtgcaatattgggggcgctgggccaggcttattcacagaaaggcgatcgcgcgaatgcggtggcaaatctggaaaaagccctcgcgctgggcccgcacagcagcaacaacgacaaatggaacagtttgctgaaagtgaaccgttattggctggcgatccaacagggcgatgccgcactgaaagcgaacaatcctgatcaggcggaacgcctgttcctgcaggcacgcaatgtcgataacaccgacagctatgcggtgctggggctgggtgatgtggcaatggcgcgaaaagattaccccgccgccgaacgttattatcagtag

SEQ ID NO: 26228 - DNA, 507 bp, Escherichia coli
atgaaaaatcttaaaacactgggcctcgcaatttcgatcgccgccgcgcttacatcatcggtctatgccggcccaagtaaccaagccccggccgtaacggaatccggaaaattcaccgtcgagaatgcgtgcaatatcacccaacagttccaaggtgaagcggggctaaaagtaggtggcatcacattgggcacccgagtcgctcagatcacagtaggcctggaagggtgtgtaagtcaaatctatttcactccaagcggtcagtcggtgcgcgctgacggtaagttacaaggtgtcggcaagacagggcgccagttcctcttaggagtgaccggccaaggggctacagctctacaggataacggacgctggtatatggttactgaccagcaaatagacgaccggaacaagttcacattcctcattgccagtgaagaaaacgtcaccgacccgaaccatgccgacgagtatactgttcattatgagcttgggacgtggtcgaaataa

SEQ ID NO: 26229 - DNA, 648 bp, Escherichia coli
gtggccagatgcactgtggcacgtctcatggcggttatgggacttgccggtgttctccggggtaaaaaggtccgtacgaccatcagccggaaagccgttgccgcaggcgaccgcgtaaaccgtcagttcgtggcagaacgacctgaccagctgtgggtggctgattttacttacgtcagcacatggcggggcttcgtctatgtggcgttcatcattgatgtgtttgccggatacatcgtggggtggcgggtctcatcgtccatggaaacgacattcgtgctggatgcactggagcaggcgttatgggcccgtcgaccgtccggcacggtccatcacagtgataaaggttctcagtatgtatcgctggcctacacacagcggcttaaggaagccggattactggcatcaacaggaagtacaggcgactcgtatgacaacgcgatggcggagagcatcaatggtctttacaaagcggaggtaatacaccgtaagagctggaaaaaccgtgcagaagtggaactggccacactcacgtgggtggactggtataacaatcgacgattgctggaaaggctgggccatactcctccggcagaagcagaaaaagcttattatgcttccatcggaaacgatgatctggcagcctga

SEQ ID NO: 26230 - DNA, 183 bp, Escherichia coli
atgcgtcgaatgtttatcagcttaacgttgcgaagcttcaggctgcggcattttctcaactgtcagattctgacccgtcaaaatctgacgcatcaaaatctgacccgtcaaaatttgatgcgtcgaaatctggcaaaaaagcgggttttcacccgtcagaatctggcggggatccgtcagtaa

SEQ ID NO: 26231 - DNA, 462 bp, Escherichia coli
atgaggaaatatattccactggtattatttatcttttcatggccggtattgtgtgcagatattcatggacgggttgttcgtgtactggacggtgataccatcgaggtcatggactcacggaaggcagtgcggatcaggctgataaatattgatgcaccggaaaagaaacaggattatggccggtggtcaacggaaatgatgaaatcactggttgcaggaaaaacggttaccgtcacatattttcagcgagatcgttatggtcgtattctcgggcaggtttatgcaccagacggaatgaatgttaatcagtttatggtccgggccggggctgcctgggtatatgagcagtacaacacagatcccgtgctgcctgtccttcagaacgaagccagacaacaaaaacgtgggctctggtcagatgctgatccggttcccccctggatatggagacaccgtaaataa

SEQ ID NO: 26232 - DNA, 855 bp, Escherichia coli
atgttgaatgtagctattgaaaaccagaacgggtggaattatagtgcacctgcacctcataaaacgggtgccgggcgtggaaacccgaaatcattcacggcgcataaccgcgctcaggcggtttttttatgcgttaagcacagccacattcgcattatggtggggcgtgcagggcagccgcaaggctggccgggttccgtgatgaccggtatttccacccctgtacgtctcaccacccttatggtcgtggaaaacctcggtggtgagttaatcaaattcatcgcggaggctgccatcatggctactatccttaccctttctcaccctgacgtaaccatcgaaaatggtcgcgctgtcactacgtctgttgcgatcgccgagttctttggcaaacgccacgaacgagtgttggataaaattcgcaatctggactgttcagcaaaattcactgagcacaattttgtgtcaagcgaatacaccgactcaaccgggcgcaaactcccaatgtaccaaatcaccaaaaacggcttcgttttcctggtgatgggcttcactggcaaaaaagccgctgcatttaaagaggcatacattgctgagttcgaccgcatggaagcagaactgcgccagaataacgccccgtctcccgacaaaatgattcacggggacggacgcaccctggttatccgtctcgacgaacacggcaatatcaaattcactgaaaccgttcctgacggcgcaatggtctgcaccctggataccttccggttttatctggagaaacaaggatggactcttgtaaaccggagcgcaattaaaaatatgactgtggagcaattgctaaaaattcattgttga

SEQ ID NO: 26233 - DNA, 132 bp, Escherichia coli
atgtctgaacagaaaatcactggcatcgatctggataaaacgaacttttatcttttcagtatcaatgctcatggcaaacccgcaggaaagatcaaactttctcgcaaccaactgcttaactggccggtgtaa

SEQ ID NO: 26234 - DNA, 594 bp, Escherichia coli
atgccattactctgcgggctgctcaccgctgttttgcagggctccagattcagttctctcgcgaaccttcgtgtttcatgcgcggtatacgctgaaccgttatccgtcagccactgcacggtgtgtccggcaacctgtcgccgaagcgcttttccaccgacctcagcatcacatcctgcacggtcgaactgtcgtagcctcccgtactcgctgcccagtctatggcctctctgtcgcaacagtccagcgcgaacgtcacacgcagtttttcaccgttgtcgcagccgagctcgaagccatctgaacaccagcgcatatcgctttctgccaccgcgattttgcccttgtgttcacgcttcggtcgctctggtttgttatgcagtaacaacaggttatgctctcttattatcctgtaaagccgtttggcgtccactggtggttatccctctgtgcaacgtttcttgcgcaggatgccccactcgcgtcgataaccatactcggcatatcgctgatgatatcgaggatatccgacagtatttcagcgtctgcttcgtcattacgccggttactgcgcctgtcctgctagtcggctga

SEQ ID NO: 26235 - DNA, 267 bp, Escherichia coli
atggaatccatacataccgataaaccgacttactatgtttgtgctcaacgtcttacgcagttcgaaaagatttcgcaccagttcacctttttctggatgagaaagtttgctgttttgacctgttcgctgttcaaaacgagtgaaaccggacatgaatcgctttcgtgcatagttatgcagccccctgaaaacaattctggcgcgtttttttggtctggcctgttgtttccctgtctttttgcgttttttgcgacagaaagcgactga

SEQ ID NO: 26236 - DNA, 1101 bp, Escherichia coli
atgaatattaactttaaacatatccttcctttattgtcgtcattttttatttcaggatgcgactctgatggaataagcaaggtaaagtctttcgtatattacgacattgacgactcaatgactgttggtaaagccttcgatacaaggagtgattgcatcaatggcacatggagtgaaaaagaggatgatcgaggaagaaccatcgtcacatatacctgtgatattagtgaaagtggcctaaaaataataaattcagccattatgcaagaacctgaagataaggctgaatattctatagcacaaaataacaacagcataaaatcaaccaatgaatcactagaggaatacaaacagaaaacgcctctggtggaaaaaacaaaagaggtcataatagatcatataagaaagctaaacagtgcttttaatgaagatccaatgatatatagcaaactcacaattagcccttatttagacagaatgctatatctaaaggaccataatgacaatgcgctaaatgaaatttgtggtgggtacgaatacattcaatctgccgatagttacagttggcgtgatgtaagtgaagagtatgcaaaagaatcatgcgaaaagcatatatataaagtatatcaatcgtttaagaaaaatgcatcaccattaataactaaaaacttccccggtttctacgaacgtgtccccccctgtgagaacgcagatgaatgcataaaaaaaacaaatatatactttgatgataactttctaaatatctacaaaagaagccaagatagagcacctcaaataatttctgatttaaaaaaacacaatatagaaataggtgaaaagttaaatgattgtaggaaaaaactaaatatctcagatgtcaaattaacctattactggtttgtaacagataccggaggagttgattatttagatggggtgttgacatataattttcagggaaagaatagagctgaaaactttcataaacaactattgcaatatgcatacattaactacagcaaaaatcaaatacctcgggactttgtaacatcaataaaaaatagtatttattataaaatagaagattgcactaagttttag

SEQ ID NO: 26237 - DNA, 192 bp, Escherichia coli
atgtcgtcacgcaactctgttcatgattttataatgctgcttccgttactactgttggtcgggtggttagttttggtgataatcctcatgtttcgggatgataaatgtgaaaatacttaccgtgaaggttcgtttcccgaattaatgtgtctcaattctgatagccgtcacgtcgataaaaaggtcgagtag

SEQ ID NO: 26238 - DNA, 1257 bp, Escherichia coli
ttgaccgaacccgacctgtcgttgatccgtcagcgacgcggtagtcgcaatcgcctcggtttcgcggtgcagttgtgctatttgcgctatccaggctttgctctgccgactgacgcggagccgcccgcctcattgttgagcattgtcggccgccagttgcgcatcgaaccggacatctggccacagtacgcgcagcggtcagaaacccgccgagagcacctgttagaattacaaacgtggttgaaactgacgccgtttgtagcttccgattatcggcatttcgttcaccaacttaccgaacaggcccagcagacagaccggggaatcgtacttgcaaaagcaatgatcgaacagttgagacagcagcgcatcatcctgccgactgtcgatgtcatcgagcgtgtgtgcagtgaggcgctgacacgtggcacacgcaaggtttacgaagcactcactgcgtctctcaccgattttcaccgtcgcgaactggatggcttgctgactatccgtgaaggtactaagggcagcgagctgatttggttacgtcaaccgcccggcccgccaaaacccaggcatatgctggcacacctggaacggctaaagaccatccatgacctggcgttacccgacgacctagtacactccattcaccagaaccgattgctgaagcttgcccgcgaaggtggacagatgacggcacaacacctgcgagagctggagcggaaccgtcgccatgcaactttggtcgcagtgctccttgatacccgcgctacgctgatcgatgaaatcatcgacctacacgaccgtttcatgagttcgctgttcagcaaggccaggcgcaaccatgctgagcgctttcaacaatccggcaaggctatcaatgacaaggtcaggttgctctcacgcatcggtcgcgctctgctggaagccaaacagtcgggcggtgatccgttcgccgcgattgaggcgatcatcccctgggatgcgttcagcgaaagcattaccgaagcagaaacgcttgcccgaccagcagacttcgatttcctgtccctggtcggcgacggcttcccccaactccggcgttacacaccactcctgttgagtacgctgaccatgaaggccgcaccggcagcatgcgaactgctggctggcgtcgaagtgctcaaagggatgaacgaccgtcaggcgcgtaaggtgccggatgacgcgcctacgtccttcgtgcgtaagcgctgggaaaacctggtgtgcacgtaa

SEQ ID NO: 26239 - DNA, 282 bp, Escherichia coli
atgaaagatttaacactcaaatttgcagacagggccgacttttcggcctttatggagagcattggctattatgatgacgagtcgatgcaggatgatattcttattgacgtgataggtaatgtgtacaaagaaaccggagaacttactgaagatggcgagccggtatgtgttaaggaggacggatattttgtaaatgtgcgcatcattaatgattcgcaaatatcgtcattattcgatgaatacgtggttgctgttgagcatcaactccgtagctggatgtga

SEQ ID NO: 26240 - DNA, 486 bp, Escherichia coli
atgggcttctttattgataccgtgggtctgaagttaagttttgcgatatgtgccgcaatttggggcctggcgacaatgggccatgcactaaccggaacatggtcaggtctggcatttatgcgcgccctgatgggtttcagcgaagcgtcggcaattccggcgggtgtaaaaaccgcatcaacatggttcccggcaaaagagcgtggcgtggcgacaggtgttttcaatatgggcacctcactcggcgcgatgcttgctccaccgttgattgcctggtgcattatgtttcatagctggcaatttgcgtttattgtttcaggtagccttgctttgctcgcggctttattttggttcttttgttataaagatccgaaagatgccaaacgcctttctgatgaagagcgccactatattgaatcagggcaagaacagcatcttaaaacagataagaaagaaaaaacgtcaatcaagcatatcctcagctaa

SEQ ID NO: 26241 - DNA, 948 bp, Escherichia coli
atgaaaaatgttctggtcaccgtccccagcttttcagcacgctgtgtttccgccagcaagttgctaagagagaataattttaatcttattattaagaataatgtggagcatctgcttaaatcagaatccactgcattacgagaatctatttgcgcggtcatcgccggaaaagattgttatcaggcggacacgctatcattgctgtctggtgtgaaaataatatcgagattcgggacggggatagacaatattgatcttcgtgcggcacagcaatccggtattgttgtcaataatgcggttgggattaattcaaatgcggttgcggaatttatcattggacttatcttcgcgagcatgagaaatatccccggtagctatcatgcgatgcaaaatggttattggggcgagtcgcatggctgcgagttacaaggtaaacgtattggcctgcttggctacggcaatattggcaaaacactggcgaaaaggttatctggttttgatgttgagcttttagcttttgacaaacaacccgatttccaggccgcaggcaaagatggagttcagttcgtatcaattgaagatatctttatgcagtctcatgtcatcatcgttcttttgccattttctccggagctggagaacttcattagtcataaatatttgtcgatgatgcacaatggtgctctgatcatcaatgccgcaaggggaaagttgctggatgagggcgctttacttcaggtgattgaagaacgaaatgtgtttgcggcgctggatgtgtttagctctgaaccgttggcgcaatttagcccactgctacatgccaaaaatatcattacaacgccgcatatcgcggcagccaccgttgagtcataccagcaaaccgggatacacgttgcccagtcgataattgattacttcgcaggaagggagataaaaaacgtgttgtga

SEQ ID NO: 26242 - DNA, 375 bp, Escherichia coli
gtgtcagacaaactctccgggataactcatcccgatgacaatcacgaccgcccctggtgggggcttccctgcacagtgaggccctgttttggcgctcgtctggtgcaagagggtaaccgcctgcattaccttgccgaccgcgccggtatcagaggccgcttcagcgacgcagatgcataccatctggaccaggcctttccgctgctgatgaaacaactggaactcatgctcaccagtggtgaactgaatccccgatatcagcataccgtcacgctgtatgcaaaagggctgacctgcgaagccgacaccctcggctcctgtggttacgtttatctggctgtttatccgacaccagcacccgcaaccacctcataa

SEQ ID NO: 26243 - DNA, 246 bp, Escherichia coli
atgggggcaacggcaattgttgcacccatgctgccgctgtatcccgacatcagcccggaaattattgcgattgctatcggttcaggtgcgattggctgcacgatcgttacggactcgcttttctggctggtgaagcaatattgcggcgctacgctcaatgaaacatttaaatactatacgacagcgacatttatcgcttcagtcatcgctctggcgggcacattcctgctgtcatttatcatctaa

SEQ ID NO: 26244 - DNA, 714 bp, Escherichia coli
gtggcacatatccgcactcgcgaaacatatggaacccggcggctccagacggagctggcagagaatggcatcatcgttggtcgtgaccgactggcacgtcttcgtaaggagctaaggctacgctgtaagcagaaacgcaagttcagagcgactacgaactcgaaccacaatctgccagttgcgccaaatctgctgaaccagacgttcgctcctacagcaccaaatcaggtctgggtggcggacctgacgtatgttgccacacaggagggatggttgtacctcgctggcatcaaagatgtttatacgtgcgaaattgtcggctacgccatgggagagcgcatgacaaaagagctgacaggtaaagccctgtttatggcgctcaggagccagcgcccacctgccgggctaatccaccactctgatcgaggttcacagtactgcgcatacgattaccgggtcatacaggagcagtttggtctgaaaacatcaatgtcgcgtaaaggtaactgttacgacaacgctccgatggaaagcttctggggaacgctgaaaaatgagagcctgagccactatcgttttaataaccgggatgaagccatctcagtaatacgggaatacattgagattttctacaatcgtcagcgtcgtcactctcgtctggggaatatctccccggcagccttcagggaaaaatatcatcagatggccgcttaa

SEQ ID NO: 26245 - DNA, 147 bp, Escherichia coli
atggttaatcatctcaatcaccggggcttttaccgccggatgatcgcgcaggaagtccgggcgtttgtcattggtggcaaagacaatggcattgcgatccggcagttggttatagagcaccgggaagttctgcccacgccagcctga

SEQ ID NO: 26246 - DNA, 267 bp, Escherichia coli
atgactgtctcaggggtggcaaactcttccggattcgcccttgccgcattacttaatgctaatattgagttgggtaatgacccaataattggtatagaagcctatcccggtaccgcggagatccatgcaaaaatgggatataaagttatcccgggtgatgaaaatgcaccactcaaacgtatgactctgcaaccgtcatctcttccagagctgtttgaattaaaaaatggtgaatggaattatatggtgatgctgccaacttactga

SEQ ID NO: 26247 - DNA, 324 bp, Escherichia coli
gtggaaaaagcccgcccgatccttgcggctgcaccactggcggatgccggaccctcactccgtgatcagattatggctctggatgaggcaaaaggggctgaggcgcaggctgaaaaactggcggcgtttcccggaatgacggtggaggctgcccgcgacattctgtcctcatcgccggataaagcagaaccggtctctgcatccacaaccgccctgtttgaacatttcatggcgaatcattcaccggcagcggtgcggggtggcgtgtcacagacgtcagcagacggtgatgcggacgtgaaaatgctcatggccatgccatga

SEQ ID NO: 26248 - DNA, 324 bp, Escherichia coli
gtggaaaaagcccgcccgatcctggctgcttcaccgcaggcgaatgccggaccatcactccgtgatcagatcatggcactggatgaggcaaaaggggctgaggcgcaggctgaacagctggctgcctgcccgggaatgactgtggagagcgcccgggctgtgctggctgcgggatcaggtaaggcagaaccggtctctgcatccacaaccgccctgtttgaacatttcatggcgaaccattcaccggctgcggtccaggggggcgtgtcacaggcgtcagaagacggtgatgcggacgtgaaaatgctcatggccatgccatga

SEQ ID NO: 26249 - DNA, 234 bp, Escherichia coli
atggcacccgaaccggatgacgatgatgacgaaacatgggtactgttcaatgtcatgaacggtaaccgcgctgaaatgagcccggaagccgccggcattgctgcctgtctgatgacgtacagtcatcatgcctgtcgtacagagtgttatgccatgacggtccattattaccggctgcgggattacgccctgcagcatccggaatgcagcgccattatgcgcatcatcgactga

SEQ ID NO: 26250 - DNA, 1107 bp, Escherichia coli
atgtctaaaacacgcgatgatttcagctcaaaaactgtaagagctctagcactacgggctggttataggtgctcattccccggttgtaatcagcttacagttggccccagtgatgaatccttaacatctatcacaaatattggggtagctgcgcacattcatgccgcagctcctgggccattagcaagacgatatgatcctaatcaaacaccagatgaaaggaaagatataaataatggcatctggatgtgtgttaatcacagcgttgaaattgatagagatgaaattagatatacagcagaaattcttaaagaaatgaagaaagcccacgaagaagagattaaaaaagaggtgagcaatggttcttcatcaaccaaacataatgatttcattgcaataggtatagacattatcgttttcggagagcttaccggaatctcaaccaatgagtggactataaaatttgcaaacttctttactggcgatttatctaagttaatatctttcaacgaaagattccactccatccctaccgaagaaaaatttattctagttaatcaacttggtgaggggcgtttgttatcagcaccaataaaattaaataaattaccagatagctatgaagtaatcgtccctgttgaaatagacactccgcgcatcaattgcaatagcctcccaatggatttagatattttcacgacaggcgatttatttgtaaatagttctggtgatatagctacgatatcggggtttgaagctttaccacaaaaaatatatacttccctttccaccattagaggtgagatttattcccatccaacattgggttccagaataagacagttcttccatgactttgaaggaacaatgtggctagacaaattagttaaattagaagttatacgcttatcttgtataccaatttttgattcaatcacaaaaaacaaatacactccattacattgtgtaaaaaatgtcaaaaatattcgggtgataccaactgaatataaagatagcaaattacctattgagttcacccttgatattgaaggtttcggcatctggtccaaagaaataagtgttttctcacctaaatacgatgaataa

SEQ ID NO: 26251 - DNA, 1002 bp, Escherichia coli
atgtttgaagagcataatgaagataaaacagttcaggacagcgtaagaaaaatgtttttagcctctattccagagcgtcagaatgaactggatgagttctggtctaaatttaacatgaccttccaaaatcatagcgataatcatacagacggtaaatttatttttgatgcggggatgtatcgatttatccgcttcaatcatcgtgttttgcgcacgttctggataggaacatttgctgcaatggcgggctacgaagcaataaacactgagcaaaataaaaaaattgaagactttatcgataaaagggattctattttagatctttttgactcaaagaaaatatcattagtctcaaccgagtcagaattacatgttttactcgaggagctacaggaagaacttgctgatttcagttcggcagacttcgtaaactttgaacagttaatctgcgcttttgaaaacacggctaaagatgaggtaccggatgaaaaaccactaccaataggaattcctgaacctggcaccatgcctgacagtaaaatcgaaccagttaaaagagcaacagctgaattagcaattattgctgctgcttgggcatttttgcatgaagtccgacatatcattcatcagcaggaaggtaccagttatgatatgaatgaattcacacaagaacaagctcataatgaagagttctcatgtgatgagtttgcaactaaattcatccttgaccatatagataattactgtgaagagtctatgtatgaccgtgtgttggtgagcaggaaaagaagactttctatatactgtgcattattcagcgttactatgttaggtaaaaacaactggggtttttcaaaatctcacccttcacttcaggatagaataaataaagtaaaagcattaatgaaagagcctgatgatgaggttctcgaatatattgtggagactatgtttaagtctattgctagaatctggccaaccgttcctactgtcaaattctga

SEQ ID NO: 26252 - DNA, 708 bp, Escherichia coli
atgaatgcaaatattagacttctcaaatatattgtcggtgtgtcgtcagctctttttttgattttttcgctaatttctctttttgaaactattcagaatgaaaagctatatgagcgtgatatatgcttcgatagccagtgcttaaaattttttgcggaaaaaacatctggtatagtaatgtattttcaggcgtttggatggcttataacaacttttgttaccgtttttggtgttatgattgctttgatgacatataacgctggagttaaaaataataataatagtaattacactagtcatctgacgatgtttagagaatttgcaagtgctgagttaactaaaagaagtagcatctatccagagaaagttaatttttttagatggtatagggttatgttccctgaagcgcaaggcggtgatatatctgtttcgagagattatctagaaataatatctagaatcaaatgtgttattgaggaagccaatgcacatattacagaggaaaataaagactataaatataaaactcatcagagaaaaatgatggctgttttggatgaaatcggtatatcgattagtaatgggcccaaaaatatttttattgaggttgagagtcaaattttggattatatcgatactattaatttgtcattttgtcactcctcatcagtgatagaattaagtagagtaaaaaggaagtatatatag

SEQ ID NO: 26253 - DNA, 1185 bp, Escherichia coli
atggataaatttaaaccatacagcaaatccaatgctcctatcacaacacttgaaaagttgtcaaaggctttatcgatttctgttgaagagcttaaagctattgcagaattatcattagatgagaaatatactctaaaagaaattcccaaaattgacggaagcaaacggattgtctactccctacatcctaaaatgagattattacagagtagaattaataaacgtatttttaaggaattggttgtttttccttcatttttgtttggttcagttcccagtaaaaatgatgttttaaattctaatgtcaaacgtgactatgtttcatgtgcaaaggctcattgtggagcaaaaacagttctcaaggtggatataagtaattttttcgataatatccatagagatctggttaggagcgtgtttgaggagatattgcatattaaggatgaggctcttgaatacttggtggatatatgtactaaggatgattttgtcgtacagggggccttaacatcaagctatatagcaactttgtgtttattcgctgttgaaggggatgtggtaagacgtgcgcagaggaaaggacttgtttatacgcgtttggtagatgatattaccgtgtcatctaaaataagtaattatgatttttctcaaatgcaaagccatatagagaggatgctttctgagcatgacttgccgataaataagcacaaaacaaaaatatttcactgttcatctgaacctataaaagtacatggtttaagagttgactatgactcacctcgactaccatccgatgaagtcaaaagaatcagggcatctatacataatttgaaattactggcggcaaaaaataacacaaaaacaagtgttgcatacagaaaagaattcaatagatgtatggggagagtgaataagcttggccgtgttgggcatgaaaaatatgaatcattcaagaaacagttgcaggcaataaaaccgatgccatctaaaagagatgttgctgtgattgatgcagctataaaaagtttagagttgtcgtattcgaaaggtaatcaaaataaacattggtataaaagaaaatatgatttgacgagatataagatgattattcttactcgctctgaatcatttaaagaaaaactggagtgttttaaatctagattggcatctttaaaaccattatga

SEQ ID NO: 26254 - DNA, 1839 bp, Escherichia coli
atgagcgagtttgatgttttttctatttcagttgatgattttaaaaaaagtgaatacgccagtatattatcatcgccaagaagttattctcattttgatatggagtcttattttgttcagttgttgtcatcttacaagctaaaaaacgatgtaagttcttggcggctttgctatttattacgtgcgttgtttaattttaaattttctaggtctggtgatattatcggttttgagccaaaaatcattctctatcctgagaggggctataggccttcagattataaggagagtttttcaacaatattaacttgtattaaagaaaactccgataatccttatattatatctagggtgtgtgatgttttatggataaataaccgtaaggatatagactctgccaataaagcaatagagtcatattctctaatggttaatgatgcttgcgatactttaatagaaaaacaagagtcaggtgatatccatatttttgatgttgttgactgcttggatagaggtatcgcaatatcgcgcatgcttattggcaggaaaaaacaactacaaggggggatagttgattcgacattaaggttatatcatgtattaatagactctggtatattcaccggtgtattaagagtttctgaaattctttataagaataatttattgtgtcccttgcaattggctgagaatgcagaaaagatagctgatgagcattgtggagcgtcttattttgatgcagtgaaaaaattgttttattttgcgtctgaattatatgttaaaaacgatatggaagagcaaggaagacggtgcagaattaaagcgtcagaaataacattggctcaatttgaacagtcttcatcttcaatattgaaggctcattggttaagagttgctcttggcgaatttagagcaattggtggaatgaatgaagaaattaaaaagattagagaggaattgaattctattcgagatcaaatcaatgatgaaatgcacttctttgcaataccaatggatcttagtgatgttatcgctcagaaagagcatgtttataatcaattggatttctcaagggtaattaaaactttaattgctagatttaagattgtaagtgccagtgaaattatggaaagagctcgttccgatgctaaaaaacatttttttcttaatatgagtgaaacggttgtttatgatgatagagggcgcgttgtagcaagtcgttcacctttggatcctgcgggggatataagtttaaatgatgcttgtgcaaattatttaagaactagtaacattgagcatcaggtctatgtttgtggtgagtttgaagtcgttaggcaaagtgtgttggctaggtattcattaaatgaaaatacatttgacccaatctcacaacaaagtgcatttgttccacctgggtatgcagaaatattttctttggggttttataagctttggcagggagattatgtgtctgcctgttatttgttattgccgcaattggagaattcaattagatggattttagaattaagaagaaaagaaacaacgaaaatagatgtgtcgctttttgaggaggctactagcctatctcaaatgcttgcaaattataggagtgaaatggaaggtgtttttgatagtgatcatgtattgactatggatttattgttcaatatgaaaggtggtgctgcaattagacacacgatggctcatggcaggtatactgtaaatcattgttatcaaccaacttcagtttttgcctgtgtctttatcttttatttaacttgtttgcctttatttagtgtatgggaagataaagttgaaccttatctggctgattaa

SEQ ID NO: 26255 - DNA, 168 bp, Escherichia coli
atggcaaaaattcacgcaatattagataatttcgtactgtatatatttagtgttattgaaaaatctcgacagaaagagttttctgtatttaatcgttgcttgcagtttggtattgtttaccatgattgtttgttaagtgctttaaaggtgaggaatgagcgagtttga

SEQ ID NO: 26256 - DNA, 1161 bp, Escherichia coli
gtgcggatagctattcccagctacatgcgccacctgttccaagggaagcgctactttatgaaaagcacagggacacgagacatacgtcaagcgcgtttgtttcgggatgctattgctctggaatggactcgcttacggaatctactaaagccacaaggagtctcatccgtcgatcaaatcattgatgaactacggcgtgtcagtgtttacgccaaggaagcccccgcatcatttggtgcatcggttcaggcttgtccttccctacttaaaatgcgcgatctgtatcttctccaatacagcgagaagagaaagctgaccacgctatccaagaccaacaaagccgtagaggtgctgttaacccacctgaaaaagaaagatattcagttgcgtgatatcaaccgaaccatagttacaggctggttagataagctcaaaactgagcgagcgccccaaactatccaaaactatataagcgcactggcgcagatatgggatttggcacgcaatcgctatcacgatgcgccacaggataatccttggcgtggtcatgcactcgaagcaaaaagcagcaaggtcagctatgaagtcttcgcacccggcgagctggcagaggtctacgcattgcttgatgatgagatgaaggcggtgacggctattggcgcatacagcggcatgcgacttaacgagatatgttcactaagtgaaagcagcattaaaactatcgagggcgttttgtgctttgaggtaacggagggcaaaaccaagagcgcagcgcgaatcgttccagtacacagcaagctaatccctctcgtaagatcattgcttaaaaccacgcataacggctttctcttctatcacgcgtcaactacagaccgagcagatgggaagcgatcatcgtggcatactcagcaattttcgcgtgctaagcgtaaagctcttggtgagcctgccgcagagagaaaagtgtttcattcactccgacatgcgtttgtgcaacagctcgaccgtgctcaagtgccagaggacagaattgcgctactggtaggccatgagcgagggaatactgagagcttcaagacttactcaaaaaacgcagcagctccccaggagcttaaacgctacatagaaatgcttgaaagcgaggatataaaaatcagttaa

SEQ ID NO: 26257 - DNA, 924 bp, Escherichia coli
atgcaaaattccccagtaatccagctaagacagatgatacacgccgactcttatggtatgtcttcgatattaatgcaatctattattattgctaggaaaatcggggacaaagggttcggtgattggctcgaatacgagtacaggggatacccatctaaagctctcacaccagtttataggctttttgatcttccccattacgcccagctacacgatggcagttggcagccaatgaacctagatcgaacttttttaaaagatatacttgagcacgataactttaacctttttaagatgtgcgcggttcagaaccctatggctgatattgaacgaatggcctcttctgacgaaccaataacagctttcttatctgaaaagcaaaagcagttcttttctaatctctttggaaattttaaaaactatgctcaattccctcatcgttcacatatggtgaagatcattttagatgtaaaaatgatgatacttaattgggccttagaattagaagaaaaaggagtgctttgcgaaaacttatcaattactcaacagcaaagggagatcatgaccgtgactgtgaacaataacactaataatttccacgcacctgtcaataacgctggaacgatagttgcgggtagtacaggaaatattgagcaagcaaataaaataacagcgggggacttcaactctctcaaagaacagctcaaacaatggggtgcaactgacgaagatattggggcattacaccaagcgatacaggaatcgacgccccccaccagttcagacgcgcttggaggaaagattggtaaatgggtcggtgacatgatcggtaaagcatatgctggtacattaaacattgctgcctccgctgctcccgcgctactgactaacgccatttgccattactacaacattcctgtttga

SEQ ID NO: 26258 - DNA, 426 bp, Escherichia coli
atggttacacggacagaccaactactaagaaaagcgatgcggagctatctggaacacctcggcaatatgccgctggcggaacggattacaaacgctgctgcattcgaagatgtgtatcgcttcctgttgaatggttccgggcggttggagctgcgccgcgctgatgtggccgctgtccgtgtctttctgtggaattatcaataccgacgctgtgcggtgacaggtaagccgctgcgcctcacgtctgccgtgctagatcactgccaccgaaccgggcgcgtgcgtgctgtggtgcatcgttctgctaacgctgctgagggaggccgctacgttgggcggacgtgtggtgttagcgctacgaatctaaggactatgattggcagctatcgcaagcaatacactggtattggcgtgttatatccataa

SEQ ID NO: 26259 - DNA, 252 bp, Escherichia coli
atgaatggcgcactcgctgacctgaaacagtgggtaatggataccggagagcctgagctggaagctgaatttcgtaagctgctggggcagatgcgtcgcaacggtatcagtgatgggcgcgtaaatgcggtggctgatgagctttatgctctggtatgccaacgccagcgcgaagaatatgaagcctgcaagcgggctgcctctgacaatggagactttgaatcatggttacacggacagaccaactactaa

SEQ ID NO: 26260 - DNA, 426 bp, Escherichia coli
atggctgatgaaaagccgattagagcgctggcagatgatgacccacgccgccagcggtacgctgaactgttggcgcaggctggccgcatgactattccccgactgcatccgggcgatgctaatagtgttatgagccagcttgcgacgatgctcggcgcacctgtcccgatagtcggtgctatgactgagcacgccgctgcatggcgtgcctgtatgctggagcaagggcttggcgatcttctggatggcttgagtaaacaggtgctgaccatcttctttctgctctgctggagagacagcgccttgcgattggcgggtaagcaaaaggaacggcttacagcggccagcgagggtttgaccattgagcaataccgggcaatgcacccggcttacagagagaataaagaagatgataaccacgattaa

SEQ ID NO: 26261 - DNA, 510 bp, Escherichia coli
atggttaatgatgcttacggccctgagctgttgcgatcccttttcctgtatgacccggttacaggtcgcttgtgccataaagctaaccgacgccgggttaaggctggctcctatgctgactccacccggcgagctgatggctatcgtcaagttgccctgcgacttgatggcaagcagtaccagctaaaagcccatcgcgtggcgtggattcttgcgcatggcgctattcctcacggtaagcagatcgatcacatcaacggtatccgtgacgacaaccgcctatgcaatctgcgtttggttacgcagcgggaaaacgaccagaaccgacgcaagacaaggggatatagctggaataagggctgtagcaaatgggaggcttacatacgcgttgatggtgtactccgtcaccttggcttatttactaccgaagcggcggcgcgtgctgcctatctaaaagctaaagccagataccatccctcaacgccagccgatttgttgcaggctgcctaa

SEQ ID NO: 26262 - DNA, 996 bp, Escherichia coli
atggctgatacttcgtacagtcccgatctgtttcgcccacattatggcggggtggaatccgacaatgatattcacatcgaggcttatgaccgggatgtccagacccgtttagagtccaaatccgtatttctggccgaggggctgtctacatacaggccgctgaaagccagcaaccaataccgcattgatcgcctgagtggtgatctggaggtgaagggcagaaccgcagggcaatcgctggagcctaccgctgttaagtcggataagctgattatctctgtggatacgctgagctatatccgcatcccgattgactatcaggatgactggacagcacccacctttcgctcagagctgagccgcaatatcggtactgctcacgctaaattctacgacgaagcgcacaccatccagctaatcaaagcgactgactttgtaccgccgccgacgttgcaaccaacgtttaacccgctgacggataatgttgtctcgctcgacctgaccacggggagcgaagaggatgcagctaacgaactggttcacgctatcaaagctgctgttaatcgattcctgactgagaaagatattccggtggcggagctggtactgcttatcgacccggcttggttcagtatcctgatggaacataagaagctgatgaacgtccgttacagccgggatagtggcaacgattacgcatggcgtcgtgttggctatgtcgctggggtgcgagttattgagctgaacagttacccgcaggaaaccattaccgggcatgaactgggcgctgattatgacgttaccgcagaggaagcgctgacgagggcgacgctgtttaaaccttcctcggtactgttgacggtcgaagcgcagagcgtcatcaatcgccagtgggatgatgaacgcgaaatgacgatggtgatggactcatatcgcctgttcaacgttgggctgcgtcgtcctgactgcgttatcaatttccgacaagctgcataa

SEQ ID NO: 26263 - DNA, 414 bp, Escherichia coli
atgagcacctataatttccatgccgtggagcgtgtcgctgacgtgcgcccagttttcgccttgccgctgggtagatgcggccacatttaccctgagcgtgtgcagcacgttttcaatccagacgaagcggtttatatcgttgcccggtctgccacatccggcacccgcacatctggcgttagccgtgggctttcccccgtgctgccgccgaagatggccgagcggatgcgcgaacgtaaacggcacgagaagaaccgagccagaccccgcaaggtgatcactgaggcgatacgcgctgacattatcgatcgctctgcaaaaggccaaaagaatcgttacattgcaagcaaggttggcgtgtctgaaacctctgtgcggaaggtgttgaacatggcgcgtatgagtgcgcactaa

SEQ ID NO: 26264 - DNA, 687 bp, Escherichia coli
atggctgaccagaatgttaatccgtacctttcgggcgctgatactgcgccgcagcaatcgccgtacatggccgcacctgtaggcgctgacaacggcgctagccgattcgaccagacaacacctgatgctgatttcctgaaaacgcagccagcgaacattaatcaaagctggaacgaaagtaactttgccaaccagcaagaccagcagattgatgttgctgcgcaagtgggcgacacgctgcaattacaggatggcactactgttgagttgactcctgaacttcatgggctgatggggcagtttcaccagtctgtcgaaagccagctagggcaggggacagttgacgccatgttgcagtacgctggcacactcgacgctgggacgcaatccacccttgaacgtatggttatgtctggcgaccctgcgctgatgcagcgggctgttcagtacctgcaagagaggatggccgcaggcactgcgactggttatgtcccatcacaggggaactcatacggccagtctaccgcgcaacctgtcggaatgtctcatgctgagtttatagcagcgtatgaccagctttcgcagtgggcgcagcaatcaggttatggccccggccatcgccagtacgatgaacaataccgcgctctggttgcgcagcgctccgctggcaaacgtgctggtcgctaa

SEQ ID NO: 26265 - DNA, 243 bp, Escherichia coli
atgagcaaaactatcgttttaatggagccacgccgcgcggctgattgcgggcaacaactgaaattcattgccgaagccttgaatcttcgtcaaatcgatttggctcatgtgtaccagatcgacagacaagatctcggcaaagcgtaccacggacagaaaatgattcctgcccgatgcgtacacgcgcacatgcttttacttgaactggcacatcgccgagttacatcacaagaggttgcataa

SEQ ID NO: 26266 - DNA, 234 bp, Escherichia coli
atggcagagaacgaatcgctgcaccccgccgttaaccctgatctctacgtgaaccttgacgaacagcgtgaagggtacgctccgtttgaatcacgcggctgggatgtactgacaaagaacctgtccggggaagggcgaactgaccccggccaaacacttaaccacaatccgaaacaacgcccgcgcggctccgttggtgagcgtcgttggcttcgtaaacgtggattactttaa

SEQ ID NO: 26267 - DNA, 564 bp, Escherichia coli
atgactttgagtattaccgatatccagcgcattaacgcgctggctcataagcacctaaagaacaatgaagagattgcagcggagacaggtcataccctgaccgatattgatgctgtaatccgtggcgtctatgtcgatgacttggccgaaaattggaaagacgatgctgatatcactctggcggagtacaacgccatccgcagccgctataagcccggcaagctgcaccgcgatacagagtttatgattgcccgcgatatgctgattcgccctgagactgtgctggctatcgcccattcccgctttagcaacgtccacacgcacccagtgccgaaagccgtcaaagcaaagccggagaaagcgaaagtagtgcgcaagttggtgcctactgatttagatgaaatccacaagttagagcgcttcggttggcctgctgcggagatcgccgggaagctgggcgtccctgttgaagtcgtcgcgcatgtgcaactctgtctgagaaatcgttggtcgtacccggatactctggagtctgttaactccaaattcagcgaggctgaatga

SEQ ID NO: 26268 - DNA, 177 bp, Escherichia coli
atgacacccgcagagtttagagcatggtttgccaccctgccgccgaattatcagagcgccgcacgcaccatgtacgacaacgcccgcaagtcgggcacacataccgcatcaagccttgcgctgatccacacgctggttactgaccagattaaatttgattcggagtttaatttatga

SEQ ID NO: 26269 - DNA, 207 bp, Escherichia coli
atgacgaaatctgaatttgaaaatgaaacgtggcgaatgaaaggcttgcttcttggggcgctgattcgccgccttgaggaagacaaggctggtgagtcgcgcatggccgcagcggagttatccagtgcagtcaacttccttaaggccaatgccgtagaagcgccggacacgtcatttaaccgtgtatttgaggatgacgagcaatga

SEQ ID NO: 26270 - DNA, 435 bp, Escherichia coli
atgcctgttaccgaacatgcgcagcgtcgtgctgcgcgtgcggatgcgctcgtcaccgcacaacttgccttcgccctgaacggctattcctttgatggattggctgagcgccaccgccagacccttaaccgtgaggctttgttacgtcaagcaagtacgcctctacagcggtattgcctgctcaataactgtgagccttgggaatgtctggccgctgtgctgaatagattccgacgccgggaggatggcgctcgtctttggccgacctatcgcatggctcgtgaggtctttaatgggactgttcaccctgccgacaagacgcgcgacgagatatttcaatccgtgcagcgtcgcctgtttttaccaaagccagtacatgccgaggtcattcaacacctgcgtgcaatgggactaactggagacaaccaccaatga

SEQ ID NO: 26271 - DNA, 1890 bp, Escherichia coli
atgccaacgaatctacgccgcctgcttgcgcaggctgccgacgctgacccgctcaatactgcggatgcagatgtacagcaaatgatcgctgacgggattgttattcgacgttccaagatatgccccgtaaagcgtaaacccgttaaggcggcatacaacacaaagaccgaagagttttattacaatgcagatggctccgcgatgaccttgcgggagtggcgaacgctgcacggtgttcaaccgaagaagcaaaagcagcgctctgacacggggttgcggcaagtcatccagccgggcgacgcaatccactgccgtcgcgctgagattgagcaatggcttaataagaagcccgttcgttatgttgaaccactgccgccagattttcccggcgttcgcgttgacgatgccgcattgaaaccgcgcgagcacgccatcccggaagcgaccacagggcaaaacgcctttctcaaagcctgtcgtgagtttctgatttgcgatgacgccaccctgaaaagaatcaaccggggcatgagtcagctggaagcgatgcgccatgctgactttacgcgaatgggtgacagcccggctttccgtcagttgtggtgcggtgagctgaaacccacggatgataatttcaatacgctgaatctgcattgtgacgttgggggcgctggcctgccgccatccatcccgccgctggttacagcaccgtacaggttccgcgagctggagcaatgcaaccgcccggcgtttgtgccattgccgccgccagatggtggcgactggcgacccggccagcaggacgtagccgccgctgtgtttgcccgtgaccgcgatatgttggccgtgctgccaactgggtacggcaagacggctgcgttcacctatgccctgcaattcgagtctgacgcgggtgacggtctgaccgttattgttgtgccgacgaacaccatcaagcagcaggtgttacagcagttaagggaggctggcgttcacgcggtggcttttggcgataagctaccgaagcggcgtaatgcgcagcaacttgcgggggtggctgctggcgctttccgcgtcgctgtcgtttcgccggagcatctggtgccgggtagtcaggtactggctgcgctgatggccgttggtgtggccagatttatcatcgacgaagttcacaccgtggacgactgggagttccgcgccgctttccccgcgatgaagcacaccctgcaaaatgcctttcctgatgcgcagcggtgtgcattcaccgcgaccctgccaaaaggggatgaggctgacctgatgaaagagttgggttgtcgtggcgggttcctcacctttcgggctgacgtttcaagagagaatatccagttgattcctgtccggcaatgtgcaattcagcgccgggctgctgttggtctggtcgatgccctcccggtggatgaaaagacgctggttatggtggacagtatcaagatgctttacgcgtacctcgacgagctgggaagccgcgcccggccttatcattccgacacccgccgtctgagccgtgaccagcgtcacgctaacgctgagtggtttgccactacgcccggcgctgttctggtggcgaccaaagcctttggcctcggtgctgatatccctgacgtgcgtaacgtaatcgtcacttatgtacccgaagacttggccgacctcgttcagatggtcgggcgtgctggtcgcgatggcgagccagcccgcgcgtttctgctctggtcatcgttggcgctgtacggcgatccaatcacttatgacgccgattctgccccggtgccgtctggtgtgcctgatgagcttgcttatttctaccgccctgaaaactgcaactggcagtacatcgctaaatacctctga

SEQ ID NO: 26272 - DNA, 576 bp, Escherichia coli
atgaggacttttatctactgccgcgtttcaacacgcgagcaggatacgcagaatcaggtgctggctattgagcgtgccgggtacacggtgcctgagagcagggtaatcagcgaggacatttccggcagcgttcaggctatgcagcgccctaagtttcgggcgatggttgagcataagctggaagcgggagatcagcttgtcgtgctgaaactggacaggctggggcgcgacaacatcgacgtgcaacagaccatcgacatgctgttagaacgcggcgtgaaggtggtgtctcttgacctgccagcgcgtgatctgacttcatctgagggcaagctaatccgccagatgtttggagcctttgctgagttcgagcgaaaccgtatccgtgagaggacgctggacgggctggagaaggcgaaagccaatggcgttaagctgggacgcaaggaagccaccgacaccactcaaaaggtgcaggagctgcggagtgaggggctgtctcaatcgaaggtagcgaagcgtctcggcgttagcgtgagcaccgttaaacgccactggaacaagggcgaggggtga

SEQ ID NO: 26273 - DNA, 705 bp, Escherichia coli
atgatcgagtttattgcaaagcatataaacacaataagcacacttatctccgcttttgcagcattgctaacagcagttgctacatttttcttgtggagagtaacgaggctgttagcagacgagacaaaaaggatggttgacgcatcagttcaacctcatgtagttgtgactctcgaaccaaattcgtgggctgctttttattttgatatcaatatagctaataccggaaatgctccagcctataatattgaagtcgaatttaatcccccactggtaaatgcagaacatagaaaaaatagaggcataccatttagcaaggttagcgtattgaaaaacggacattctctcaacagcaatctttgcaagtatgaacagatcaaagatcaagtttattccatcagtattagttggtcgaaacagccggactcaactgaaagagagcggaatgagtattcttatgatatggcctctttcgagggggttagctacttaggggcaaggagtccaatgacacagatagccgagcaggtgaaaaagattagagaagactggagaccaatttcccaaggagccaagaaagtaagagcagacgtatatacttcaagcgatagaaacgaagaacgcaagtttatgcaagagcaacacgatttggcaataaaaaggcgggatgagaaaagagctaaaagattagagtctggtgaataa

SEQ ID NO: 26274 - DNA, 174 bp, Escherichia coli
atgagttatttctcatttgagattattctcattcccgtaaaaaacataattcctatcatcaccgtcacgctcattttgaattatctgaataatagcgagcgttctttagttaagcagatcttaattgaagacgaaattattgtgtgtgcaacttacttaataccggacatctaa

SEQ ID NO: 26275 - DNA, 585 bp, Escherichia coli
atgaattatcagctattctcaccattctttaccaaagtcatcatgctgcttatcgcattgctttgcattgttcttgcctcatttggtatttctgccccattttgttacatcgtttttatcggcatcattttccccgttgctatatcaatgcgcatacaccgtctcaatgaaacaggaacagcactcacactaaccgaaagctcacactggatcgtttacatccatggttttccagctgaggaacaacgtgaagttttgaaaaacccctgtttctggtcaacagaaagagtgaaacagtttttccttcgcggtcttgctggcaaggttattcttcaactcgcctgccttgcacttctggtcaatgaatatttccgctcaacaccaggctccgggcaagacttactcgcagcaggcgtgctgttttttattttgttttcgataagcaaaaatttctggacgatgtatcttctcgccacagataaatggcagtgcgaatccctgaccaccaccagcggtagcctttggtatcagggatttctgtgtaaaggaaacagaagagttacgctgttttcgcggctggtgtaa

SEQ ID NO: 26276 - DNA, 759 bp, Escherichia coli
atgaatcaaccgttactttcggtcaataacctgacccacctttacgcgccgggcaaaggctttagcgatgtctcttttgatttatggccgggggaagtgctgggcatcgtcggggaatccggctccgggaagaccacgctgctgaaatcaatctccgcgcgcctgacgccgcagcagggggagattcgctatgaaaaccgctccctctatggcatgagcgaagccgaccgccgccgtttactgcgcaccgaatggggcgtggtacatcagcatccgctcgacggcctgcgccgccaggtgtcggcaggcggcaatatcggcgagcggctgatggcgaccggggcgcgtcattacggcgatattcgcgccaccgcgcagaagtggctggaagaggtggagattcccgctaaccggatcgacgacctgccaaccaccttttccggcggcatgcagcagcgtttgcagattgcccgcaacctggtgacgcatccgaagctggtgtttatggacgaaccaaccggcgggctggatgtgtcggtgcaggcgcgcctgctcgacctgctgcgcggcctggtggtggagctgaacctggcggtggtgattgtcacccacgatttaggcgtcgcccgcctgctggcggaccgtttgctggtgatgaagcaggggcaagtagtggagagtgggttaaccgaccgcgtgctcgacgaccctcaccatccatatacccagctgctggtgtcatcggttttgcagaattga

SEQ ID NO: 26277 - DNA, 2013 bp, Escherichia coli
atggattgttcaaaatgcaatggttatgcgacgatgttattaaatatggtgcatggttctgacccggttaatttactggaattacatggtttccttgaacacttcgcatattatgtttcatttggcaaatttaatgctggccaccagcgctataatgcatttaaaaaattcgtcagtgagatttcggagatcagcgcaaacgatatcaatatgacgattaaaaccgggcaatccagacatgaaaatgtgatctctataaatatgaatgatgcaattcctcgtgatgaaaaagggatcaccgtccgaatagataatattaatggaaagaaaaacaactctactttgtcagatgtttttattccctatgtaaatacattttcagacctcaaaaataaaatactcaggatgaaaattgaactgactgaaggtagtggtttttctaaaagtctttctgacagtcagattgagatgcatattctgagaaatgttaattcgctaaacgttggcgagaaattgaatgatgataatcttgcatatcattctatattcactaacgaattctctgttattattccgccatcctattatgatgcgacttctgtagtaaacgccaataatggtgtgagagaaaaactatttgaaagtgatagtaaagttaaagatatcgtcgatgaaatgtctaatcatgatgtggagagcgaaaaagatatatttgttatcggaggaatgatagaaaaactggattctctggtagacgaatctttcaatgaaaatactgataacatacaaacagtaaaagatttgttaacgcaattaactgatggcatggaactcttcgcgctgcgggacatagtggcattcccatcgtccataatagcaaaattattaaaatccccacttaatagcgatcatgaacttgttatgcgcgcattggatacgtatctgtgctacttcagaaataaaaatctgagtaacgatacggaaataattaactttttccatgctctctttttaaaaagaccagagttgatggtttctgaaaattatagatttattcaatttattgatttgctttttgaaaacggaagtgttgaagagaaaaacttagcatttgacctttatcacaattatcttgcattacctgaaataaaacaattcgttactgaagaaataaagttgaatttcaatgagcagcaagggttgttagataaagataataaatgttatatcctgttatcatccgataactctgggcgagtaatgcgcttatcgcacctggcgttaatctcaatgcttgagccagaggttaagaaaaagactatctggaataattactctatatatccatctttgcaggatacccatgaagatgtcagagatgatccagaaacgatttgtacgcgtgcatttcctttatttgcaaaaggatgggaatatgcgcagaaaaataagaaacaccaattgattctcaatgctcttggattgaaaggttatattcgtgatgtatttatgtcagcaataatgcgaaaaacagactttgtgccagaatcggataatcaaccgtcagaatttaaatcattattttcctctttgatgaccgattcagaccaatggcaacagcatactctgaaagataaacattacgctaatctattaacgatgctggatctcaaagaggccagtgaaagtgataagtctaaaatatttttctgtctgtctgccatatttgcaaatatttctcacagtaatgtcttttacggtattcctgatgcgtcaaaaattttaaaacgttatgcatttgctttattggcgaaagcttattctttagatgaaagtattataagccgtcaaacttttaatacatacaaaacggtattgcttgatttcaataatctgtctaatgaagaggccaaccagttgcgtataagttcgttatatcgtgatatggtccgctacgcacaatatcgtttttctaaagttttatccgagtggacgccagacgcatggctgtaa

SEQ ID NO: 26278 - DNA, 1686 bp, Escherichia coli
atgcataatttgtttgagcagtggccattatttaaacctaacacaccaggcaattccaactatttccctgacaacttatctattacagatatggttttctggttcgataataatgccaaaaaactgttagatgttattaaaaaaaccacgaaccatgaacaaaagcaaatgttcattcagcatttaacatcaaccttatataataacaaggtattaaacaatccttatcatttagaaccgcaaaaaatctcgaatgagcagatagccttaccaataattaatattttatatgataactctgacgtatttcataaagaaagcattttgtttttttcacaattatttataaaaaatatcgaacttttcgatataaatactccggaagatttaatgatttttgatagtcccgatgcatcttctatttttgatacccagggatacctctcgacgtatcatgttcagccagatttactcgattataagaacaaaataatcatccttttggttaaatttcttaatcatattaatgaggcaaatagcaaatacaaaactgcggaaaagaaagaattctataacaagttattggcaccactacgctatataaataacgacggaaataaaatattgatattaaattatcttataacgaacatctttacatccacaaattcaaatcctgatagtttgctctttgatgccatactggatattgcacataactctgttcacagaggatatttaaatcaacatagtttaatcaggcatcgctgcgtccaacacgcactgattaacatcatctcaaaacaaacagacattgacttaaaaataaaatggataaaagatatagttttagtgttgaagttacaacatgatgatttatcgaaatgtatcagcccacttattttcgctattgaatcgataaaaacaaccagcattaacgacacgacaattaaaacctcttcgcaaatattaaaactgcataattatatggagatgtgttatacactttttgatagctatccaaatttaatcactgaatgtaatgacttattcacggattgtatttctattgttactcagtacgatctgagaggatattttagcagactttttgagatgatagagattactgataatgaaactaaaaagaatacaactgcttttttaattagcagaattgaatcccggcatttgtatcaacctaaaattgccgctcaatctttgaaattgttattgaatacagatattccttatgcatattcatcattgccaacattgcttaatattctacaaaaaacagtttatgaaccggggcatctggagttactcgataaagtgttaaagttatgtgccaaaaatattcaggcgtcagaatttgatagtttattagaactactaaaaatatacggtaatgaaacgactgcacactttattttgcttagggagatagtcggatacactatagacaatgaaaataataaaatcagggacagaatcaagctaatactgaatcacatatctcataataatttcccagatgatgaacaaactctttatgcaatagcatgtttattccagactttcccagaatttgtttatgaatatcaaccaatgttattaacaataattcagattgcaagaagaaataatttcattgccattttagatacactagatagatcataa

SEQ ID NO: 26279 - DNA, 165 bp, Escherichia coli
atggaatttcacgaaaacaaagccaaaacgccgtttatcagacttgtgcaactctggcatgcggtgaggcgttggcggcggcaaatgcagacccgacgagtgttacagcagatgagtgatgaacggttgagggatattgggttacgcagggaggatgtggagtga

SEQ ID NO: 26280 - DNA, 2541 bp, Escherichia coli
atgaaaaatagaaatcgtatgatcgtgaactgtgttactgcttccctgatgtattattggagcttacctgcactggctgagcagtcgtcaagtgagataaagattgttcgcgatgaatacggcatgccgcatatttatgccaatgatacatggcacctattttatggctatggctatgtagtagcacaagatcgcctttttcagatggaaatggcacgtcgcagtactcaagggactgtcgcggaagtgcttggcaaagattttgtgaaatttgataaagatatccgtcgtaactactggccggatgctatccgggcgcaaattgctgccctttccccagaggatatgtccattctgcaaggctacgctgatggaatgaatgcctggattgataaggtaaataccaatccagagacgctcttaccaaaacagtttaatacatttggctttactcctaagcgctgggaaccgtttgatgtcgcgatgatatttgtgggcaccatggcaaaccgcttctctgatagcactagcgaaattgataatctggcactgctaacggctttaaaagataaatatggtgtatcacaaggcatggcggtatttaatcagttgaaatggctggtaaacccatcagcgccaaccactattgccgtacaagagagtaactacccacttaaatttaatcagcaaaactcgcaaacagcagctctgttgccacgctacgatttacctgcaccaatgcttgaccgaccagcaaaaggggcggatggcgcactgctggcgttaacagcagggaagaaccgggaaactattgctgcacaatttgcacagggtggtgccaatggtctggcggggtatccaacgaccagcaatatgtgggtgatcggcaaaagcaaagcccaggatgcgaaagcaatcatggtaaatggtccgcagtttggctggtatgcgcctgcgtatacttatggtattggtctgcacggtgctggttatgatgtcactggcaatacaccatttgcctatcctgggctggtttttggtcataatggtgtgatttcctggggatcaacggcaggtttcggcgatgatgtcgatatttttgctgaacggctgtcggcagagaaaccaggctactacttgcataatggtaagtgggtgaaaatgttaagccgtgaggaaaccattacggtgaaaaatggtcaggcagagacctttactgtctggcgtacggtgcatggcaacattctccaaactgaccagacgacacaaacggcttacgctaaatcccgcgcatgggatggtaaagaggtggcgtctttgctggcctggactcatcagatgaaggccaaaaattggcaggagtggacacagcaggcagcgaaacaagcactgaccatcaactggtactatgctgatgtaaacggcaatattggttatgttcatactggtgcttatccagatcgtcaatcaggccatgatccgcgattacccgttcctggtacgggaaaatgggactggaaagggctattgccttttgaaatgaaccctaaggtgtataacccccagtcgggatatattgctaactggaacaattctccccaaaaagattatcccgcttcagatctgtttgcctttttgtggggtggtgcagatcgcgttacggagatcgaccgactgcttgagcaaaagccacgcttaactgctgatcaggcatgggatgttattcgccaaaccagtcgtcaggatcttaacctgaggctttttttacctactctgcaagcagcgacatctggtttgacacagagcgatccgcgtcgtcagttggtagaaacattaacacgttgggatggcatcaatttgcttaatgatgatggtaaaacctggcagcagccaggctctgccatcctgaacgtttggctgaccagtatgttgaagcgtaccgtagtggctgccgtacctatgccatttgataagtggtacagcgccagtggctacgaaacaacccaggacggcccaactggttcgctgaatataagtgttggagcaaaaattttgtatgaggcggtgcagggagacaaatcaccaatcccacaggcggttgatctgtttgctgggaaaccacagcaggaggttgtgttggctgcgctggaagatacctgggagactctttccaaacgctatggcaataatgtgagtaactggaaaacacctgcaatggccttaacgttccgggcaaataatttctttggtgtaccgcaggccgcagcggaagaaacgcgtcatcaggcggagtatcaaaaccgtggaacagaaaacgatatgattgttttctcaccaacgacaagcgatcgtcctgtgcttgcctgggatgtggtcgcacccggtcagagtgggtttattgctcccgatggaacagttgataagcactatgaagatcagctgaaaatgtacgaaaattttggccgtaagtcgctctggttaacgaagcaggatgtggaggcgcataaggagtcgcaggaagtgttgcacgttcagagataa

SEQ ID NO: 26281 - DNA, 381 bp, Escherichia coli
atgccgcactttatcgttgaatgcagtgacaacatccgcgaagaagccgacctgccggggttgttcgccaaagtgaatccgacgctggcagccacgggtatttttccgctggcgggtattcgcagccgcgtgcattgggtcgatacctggcagatggccgacgggcagcgtgattatgccttcgtgcatatgacgttgaaaatcggcgcaggtcgcagcctggaaagccgtcagcaggcgggtgaaatgctgtttgaactgattaaaacgcacttcgccgccctgatggagagccgcctgctggcgttgtcgtttgagattgaagagctgcatccgacgctgaattttaaacaaaacaacgtgcacgcattgtttaagtag

SEQ ID NO: 26282 - DNA, 249 bp, Escherichia coli
atgctggctgacaagcgttacgacttagtggtgcttgatgagctgacctatatgctggcttaccattatctggacaccgaagaagtgatcgcttctctgcaaaaccgcccggcacaacaaagtgtcattgtcaccggacgcggttgccacagtcagatattaaaaatggcggatacggtcagcgaaatccgccccgtcaaacatgcttttgataacggcattcaggcgcagccgggtatcgactggtaa

SEQ ID NO: 26283 - DNA, 2682 bp, Escherichia coli
atgagatcagctaacgtctataataaagaattaagccgtcatcagttaggtggatttattcccgtgtatgatcagattccgggtacacattattttctacttgacggaaaccgactcggttttatgtttatctgtagtccgtcgcccggtgtctttgataatcagcaggatgtgttaactgaattatttaaaatggacttcccagctgacaccatctgtcagacctcattaactgcgctgccagacttgatcttgcacttaagtgcctggtctgccgttcgtggtggtcgaatggaaggtcatgataagcttaagggggatttactcactgcatatcaactggattattatgaccgaagcctgaatgaacctttgaagccggaccacgataaattgatgcttcgagattttcaggtctggatttccttttcaattccattgaagtcagcacttccttctgaaatagaaaagactcgcattgatgcgctttactctgacttaatcagtaagttgaatacagtaggccttttcccacacaaagttggtgctgaaaattggctttattgcatggataagttattgcatccgggaaaaacatcgcgttggtctgaaggtcatgttgaagctagcaccatgagacgcctaaacgagcagatcaatgtaccgggtcgaaaatatacagtgacagagaatcatttctcatctacaacgcagagcaatgatatttctgagcatcgttatttcaaacaattatcagtagtgaagtttccagaatttgtaaactttggctgcatgtatgaacttgtagttaattggttgaatggacgtaaaacgatctttagccctttcatgataacccagactgtccatttcgccgatcctttaaaattatcaagagaaaacgtcagatataaggcaattactaacaaacaagccagtattccaacagttttgacgttttgtccaagattaaaggatatggataatgattacatgacgataacacgcgaactggaagatggggctcgcctcctacacagttatctgacatttactgtaatggggaattcagcagttgatgttcagtctgccgcagaccagttaaaatcattttatctggaaagtcgtgttaatgttgctgatgactcgtacatagtatttccctcatttgtttcaagcctgccgatgtgtaatgacccaaagacaatactagaactggatcgttttgaggtcgtgagtaatactggtgctgcgcacatgacccccatatttggtccttggaaaggtaatacggacagacccgtacttaaccttgtctcacgagaaggacagctgttggggctggatatcttcaagacttctgccagctataacatggtcgttggtgcaacgtctggtgctggtaaatcattctgggtcgcatacatcattaataattatctaggcgcaggtccgcgttctaataatctgatccattatcgagatacttttgagggattcaaaaacaattcttatgatgcatttgaccctgatggagcccagattttcgtagttgatgtcggacgctcataccaaggtatttcggaacaatatactaatagtcagtttatagactttgggaaaaagcctgattttacgctaaatccattcgcatttttgactgatgtgactgttggagagcgtgtttttgatgaagcacctgtctttaatgacgattcaaataatcatgatgatgataaggataaagtagcccagaccattatggttctaaaccagttaaaaataatggcatctgaaaaaggaaatattgacgattttcaacaatcggtcatgctgcaactgattagtgaagaatataacgaatcacgtaaagttggacgtacaggctctattactggatttgcgcgacgctgttctaaccatgaagataagcgtattaaagatatcggtgaccagttggggcaatggtgtgaaggagggatttatgggaatcgctttacagaaaatctcccgccaataaattttgatagccggtttattgttctggaacttgaagaattgaaggggaccccacaccttcagactgtcgttctgatgtcgattattcaggccgctcagcatgcaatgtttatcaagaaagacggacgccgccggttgttcatacttgatgaggcatgggagtatatccgtccggacaatgcttcaggttccagtaatcattcaaatcaatttttctcctctttccttgaggccgcttggcgccgattcaggaaaacgaactgtgccggtatttgtattactcaatcctttgaagattacttcacctcatcggttggtcgcgcactaacggctaactcgccgtggaagatcatcatgaagcaggaaaaggaaagtattgaagccatgaaggtgaacaactacttctccacaactgatgcggaatatgagcgtatgaaaaatattcgaacggtaaagcgtgcattttccgagatgctcgtacgattcgaaaatttccaggagatatgtcgcctctatgtagatagaaaaatggagctttgctttacgactgacagcaccgatcgtggaaaactatgggaaatccaaagccgacttgattgctcttacggcgaagcaattgagattctgtacgaacaggaagttgcgagcaaatcagctgcctga

SEQ ID NO: 26284 - DNA, 951 bp, Escherichia coli
atgaacattaaaaaagttattttcagcgctctggttgttggttcatcttcatacctggcgggttgtactattggcagcgcagaatctgaatgcccgggaattgaaaaaggagttatttgtaaaggcccgcgtgaagttatggaactgacgaacaatcgtgatgatctctccggccttggggaggaagaggctaattcgggaaaggggaaatcggctgtcaatgacagccagtaccctgcccaactaacgccgcctggcgcagtgcagtaccccaagtcgtctgtacttgttaataagccagtgacatacacaacgacggaagtaaaaccggttggacagctcccggtgatgtatgatcagacattaaaaatgggggcgccaacttcaacaattggaccacggccaatcagcgggaatcctgttaattctaatgtacggatgacaacgagttacaactcaaatgggtcatccgttaacccctttttgcatccgtctgctgaagtcgtgaaaaaaacaactcaggttgttactcccgcgcctgctccgcgctatgtagcaccaaattctgatatcaatgcaagtaaagacctttattccattaacaatggacagccagtaaaccctacgctcagctctgggcaggtacagcaataccgtacacaaggttacaaacaggcagtcgttgcaccagagcctcttgctgtgcttcagcaaggccgcgtcatgagaatcacctttgcaccatatacggatgataatgacgcgctaaatctgcctggctttgtttatgtgaatgtcaaaccgcaaacttggattgcgggcaaaaattcaacatcaaatccggcacgaattgttcctttggaagtccaggatgcggctcgtgaaaatatgcaacagcaacagcgagcaacgaaagcagtttcgtcaaacggtattgtgagacaactctga

SEQ ID NO: 26285 - DNA, 858 bp, Escherichia coli
ttgaaaaagttacttttgtctctgctgatttccattacctcagcgtgcccgccgcttactctggctgttgaaaatgtattaaacaatcgtgatgccgctgcgttaatggaaaaggcaaaagaaggtggagtatcaacgaaacctttagacggtgtattggcgaaaatgaaaagctataagcctaaagatgctatttacatccctactggcggtctttatttgttccaggatgaacgttctcagttgatggcggtgaccactgacggacggtatacaatcacgggggggagcgtcatggacattcttcagagaaagtcagtgttatcagtagaggatatacgaaagtcgttctttattaatttagacgacgcccctttccctcttgaaactgtggcatcgatacctttaggaaacccaaaactcaaacgtcaagcggcaatatttattacgcttgattgtgacggttgtcaggatttaataaagaaattctatgatgaacgcgaaaagtatcgggtcgatatagttttaatcccctcccccggcgagccaaagcaggaattgcgtcaattatggtgcagtaaagaaaaaggcaaagtgaatgatcttgatatcttgcgttggcttatgggtaataaggccgatatagaaaaacgactcctgacgaaagaagaggcagaagcatgtccggctgaaccgttagtcgcgtcattaatgctggctggcatttataaattacagggagtcccctcagttgtaagacaggatggactcgctggtaatggcataccgaaagattttgattactggttaaaacaaagtgtcgaacccttactcaaaaacccatttgatactaattaa

SEQ ID NO: 26286 - DNA, 513 bp, Escherichia coli
atggaaaataacaacgacaatgaatcaccaaaaaagagtgagtctgctgatagcttaaatatcgacgcggctaaaccggttgggggtatacgtactaccaaaaaagtaactttagagatcgatatcgagaaaactcttaagtatctgatggtcgcaggcctggcagttcttatcgtgatctatggatacaagggtggacgttttgtatatgacaacttcaaagcaatgtcgcaaccggcctaccagattgccgtgctggatatgcaaactttaagaaaagtatttaataagcaaaatccggtgttggattcgcagcaatccaaaactaactttgaaaattattttaaggcattaatgaaggtttaccgtgaacgtggctatttggttattgatgcatccttggcagtaactattccagagaatgttgaaatagtctcttatatcgaccttggtggaagttttggtgaggtacaatctcttccaggcgaacctaaagaaagtgagattcgataa

SEQ ID NO: 26287 - DNA, 1359 bp, Escherichia coli
atggacattaaaaaggcctgggaaaataaaactgtcagaatctcagtaattggtgctgcattgatggtattgattgttgtcatcagtcaatcaatctttaccacaccagttaaaaaagagaagaaaacccagaaaaaagatatgcaaactggattccttattgatgattcacaaatgaacaagctgagtaatgaggaaagccagaagacttataacgaaatggtaaggcagaaccgtattgaccagaacgctgccaaggctgaccgtgacaaagctgaaaaggctcagcaagaaaacaaagcacagatagccagtcttgcttcgcaagttcagcaactcactacgcagttgactgaaatgcagacctcaagaaatggtaatcgcaatctcgatgcaggcggaccacgcaacaacgtcaatgaacaagccccagcaaagccataccagcttaatccaaatgcagcggtgaacggggttagttctggatacgcacctatatctccgacccgaaacagtccaatgcggacaataacacagagttcaattaagacaaacggcactgatggtgtcattcaggtgatgccgatatcagagaaccggatcagagaggggcgcgaggttgttgcgggaagtgaaaaggccccaacgcgaactattcgcggcgatgggactgcacctgttgatagtaaagctcgtcatgcggcccgtaaggatgaaatgtttcttccagcgacgtcaattattactggggtgctaattaccgggctggaagctccaacgagtttgtcctctaaagcagaaccgatgccggttaccatgcgcattaaaaaagacatcatcatgcctaacaattacacgatggatttgcgtgattgtaatttattgggttctgctgtgggggatctggcatctcagcgtgcgtacattagggcaacctccatatcgtgtgtcaactcgaaaggaaaagcattcgacgtaatagtggaagcttatgcggttagtgaaaatgacgggaaaaatggcattcgtgggaatctgataagcagaaatggaaatgcgattgcaggttctgcgtttgcaggagggctgtcagcattggcggggagtctgagtccatcaaaggtgtcttcgcttaatatagatccaaactctacggcacaataccaatcgccaaacataggtgcattaggagcgctggccggagccggtgcagctcagggggggctaaaccgtcttgtggactactatacgtcaatagctgagcagcagtggccaattgtagaaattagcccagggcgcccaattacttttgtcgttcaaaaaggggcgacaatacctacaaacctgacaagccgctga

SEQ ID NO: 26288 - DNA, 441 bp, Escherichia coli
atgagaaaagctacttttcttacagtgatctcgtttggtttagttgtctttttgggtaccagttattactaccaaactaagtatatcccgaaaggcaccgtgaatatatttcctgatgtccaccgacagggtgagatcgttgatgatgcctttgagaaaagcacgattgttataagcgacccaacgcttgcggataaatttgttggaagttcaaccgagtctgtcggtcggcatgaagttaatgtaataaaagaattgggcacgcaaaataatggttcgaaatttgttcatgatgagtctgataaatcaggtttgacggttggagataaatggcctagggctggtgaaccttatatcgtgcctcagatgacagaatacgagcggaatttgaaagttaagcgattccagcaaccaaagaatggagttaataatggacattaa

SEQ ID NO: 26289 - DNA, 1233 bp, Escherichia coli
atgacttcaaaaaaggtttttcactgcaccgcgattacagcagtgattttgctggcaacttcgaatgtggtatttgctgaagactatcagttaccggcgacagtaaataatccggtagttatgcctgtcggggccgatgaatttcagaacggtgtgaaaaatgcgataattaaagacactggcactacgactgagaccgtacaagcaacaaaaccgacaactgctctgccaagtctttcacctgcaagcagtgcttctcccgcagtcaatgaaataaccggggcgttgtcaaataaccctactctagctggttaccagcaacaggttaaatcaggaaattttgatagttacggaagaccagcagggaaagaacctcaacaaaatgcacaaagtaccgggtccccttcaaaggcagatgaactttatgttgaagcacgtaatcgctataaagaagtacaacgagtaaacgttccgcctggtggcaatattgtactcccggtttctcgggggctgcaaaacagaatttcgacttcatttaaaaatgcatctgtaagtacttcaacgccagctgatgaagccagtattttcgttaatggcggggatgtttttatttcaacaaatacagataagcctataggaattatgctttcagaagattcagttcctgaatctacttataacctgacactggttccactggatgtaccaggggccatgatttcagtaacaacttctttgagcccgacaatgcaggcaaaacgagaaacttctcttgataaacaaaattatgatgagatgctggcacgctcacaatcagaagagttgactccttcagaccctcggcaggatgaccataaacagcggatcattgatttgttgactccggttgcactgggtgaggttccttctggtttcagtttacaagaagaccgcttgtcacgcataccaagctcagagcagtccccatgtaatttcaatatgtacgccaagttaggtcaaagactggtgggatctcgggaattgatagatgtcgttcttgttaagaatgataagccttacggacaggtagtggctgatcagcaatgtataactgaaggcgtggttgcaagcgctctattcgataaagcattccttcagcccggggaagagaccgaactttatattgtgcgggataaattatttaaagagcgtcagactcgtgttactacgcgcccaagcctgattaaaagataa

SEQ ID NO: 26290 - DNA, 786 bp, Escherichia coli
atgaaacttctcagcaggttaaaaattccattcattaaaaattccagtaatggcgattttgataacaaggatgagacttcgcaaaaaggaggtgaagaagtaaaaggaagttttctggattcaaaagcacgctttagtaaagaaattgaaggttctgaaattggaattacatatagtgcattgattaaacgcgacgaaaaactcctacgtgtgaatacagttgcaatgatcattattggggttctggttgtaaaaaatcaatttctcactgatcctgtgactatagtgctaccgccaaatatgacggaagaagtcaaagttgttggaaataaagcctcagaatcatataaaacgcagtgggccttattctttagtactttgattggaaacataaacccaacaaacatcggttttgttacaacaactatattggatgcgctttctccggatttacaggcaaagacccgggaatcactacagcagcaaaccaatataatgcaggctcgtggtgtagagcagtcatttaagccgatcgatatgtattacgacaccaaaaatgacatggtctatgtctggggaacaaagtcaactcgtttgattaatgttccggacaaaactgaatcatccaaatggacgtttgaatgggtcctgggaatgaaaaatggacgaccgcgcatagcctatgtgaaccagtattcaggtacaccaaatattaagaaaattacaatcaacggcaaagaacaactggcaacactcgataatccgccgccgtcaataggtaactaa

SEQ ID NO: 26291 - DNA, 318 bp, Escherichia coli
atgacaagccagtacgagataccgccacatacatatcgctttccatacagaataaatatgccgttactaattctattctgggatgcaaagcaattgggtataacattcgtgactatcgcgagcggtaatatttttgatttctttataacttcggtagttgtggcggtggtgttctggtttgcatataagaaagcagcagaggaagggattagaggaaaactaaaacacaaactgtggtggtacggcttttttcctggaaaatcggtgtttagtagtcgttactttaccgatccatttatcagaaacctctattcttga

SEQ ID NO: 26292 - DNA, 354 bp, Escherichia coli
atggaactgacattgaatactaacgttgaaagaggaaaaactaacgcttttgcatttttgaagtccaaacatgcaaaagtgcctttgtttattctcttggttttagcaaattgcagttttgcgtacgcgggttccgatgatggagccttcggcgatatctgggcctacatgagcgaagccttgactggtgcgccgggtaaaatcatcgcgtgcggcatgttgttctcggtggcttatttcggcgttgtaaaacctaaccttggtttggcgctggtatcagcattaatgatgctggttatggcaaacggtgaaaaaattatcagctcgttcctggatgctggtattcctctgtga

SEQ ID NO: 26293 - DNA, 582 bp, Escherichia coli
atgcaaatgcttttcaaacaaagacacctatcagggactcattcatgcaaatgctttccaaccaaaggcaacttacacttccccattcattcaaatgctttccgaccaaaggcaacttgcattctcctattcgtgcaaatgcttttcgaacaaaggcaccttacactgtcccttgcgagccctgcttcccgaccaaaagcaactttcaccgcagcattcatacaaatgcttttttcaaaaggcacttttctgccgccattgaagcaaatgcttttatacaaaaggcacttttctgccgccattggagcaaatgcttttatacaaaaggcacttttttgctctccattgaaacaaatgcttttcatctccttgatatccaatttgagtaattttcatttattatcagaatgttatgttatttctctaggtccttcattggcctgcatattcataaaatgccgtcgaccaggctcatatcccagtcgtttgcaggcgttaaggaactgtaaatacgccgagtggcacaaggagtatagggatttgcgtttaaagcccaatacaacacgatggagggtagtgtag

SEQ ID NO: 26294 - DNA, 876 bp, Escherichia coli
atgagtgataacaatgaggtaacacatccttttgatgtgaccaacacggagacagggaagacttatcaactgagtccaaactcttcgaaatcggtccaacccattgctttactgcgcttaagtgtttttaccccggtgggaactaaagagaagcgatacagaaattttgaggttgacgcttctgatgagttgtcgagcatggagctggcccgttcagaaggatacgatgacattcggatcactggtcttaagctttcgatgtcaaccgattttaagtgttggctcggttgcataatggcgttcagcaaatatggtttcgcttccgataaaatcacattgtcattcaatgagtttgcaaaaatgtgtggtatcagttctacaaacataaacaagcgaactcgctcacgatttcaggaggcgctagcaaacctagcttccgttgtgatttctttccgtgattcaaaaactgaacgttttactgtcacgcaccttgtgcagaaagcagtgattgatcctaagaaggacaccgtagagttggtgggcgatccctcaatgtgggagctttaccggtatgatcataaaaccttacttagcttgcaggtgctttcggttctcgctaaaaaagaggcagcacaaagcctgtacatatattttgaggcgatgcctgccggtacgttattcgtaagcatgaagcgtttgcgtgagcgacttctgttgacgactcctgtacgaactcaaaaccagatcatcaggaaggcgatgctggagttaaaatcaataggatatcttgaatatcaagaggttaagaaaggtagagatatccagttccagatttttaaaagaagtccaaaacttgctctggcaaaacacagttga

SEQ ID NO: 26295 - DNA, 1077 bp, Escherichia coli
atgaatcactgcgactatcagattattgagatcagtcctaaagcactttttatcgaatctggattcaatccacgtgaagcggtaattggtgaactttgttatgaacaggaaccagtaaaatcgaccattgtttctattaaacaagcctataaagagggcagacgagtcgatttaattaaggttgttaagaaagactccaattacgttgtaaggcaggggcattgccgttacagagcactatctcttgctcttgcggaaggagctgatattcagctcatttcagtagttgttatgaactataagaataaaagtgaagaatacctggagaaccttgatgggaataggaataacggtcttaatcccgtagccttagcttatgcactggcagaggcgctgaagcttggctctaccgttgaatcccttgctatgcgctatcaacggtctagcactgctattcgtaaccagcttaaaatccttgatatgcctttagaactacaacgtttaatcagtctaaacctgattaaaaaaacactcgcgattgagatcatgttgaagtattccaatgaccatgcaaaagtccttgcacatttggaatcgtgttctcttttagtaccatcaactgaaccagaacctgttttatctaagacatcaagcgttcaaacatcatcaaacgatgagaaactagataacccggaaacactccctgttcatgttattcctaaggaagttaaaacaaaatccatcactcgcagttcattgggtattaaacggctttctcataaaaaaactgaacgcttaaaaactgaatttatcgggctgattgatactgtacggccagcactaaacgacagtaataaactcaccgaattaattttcgacggacaacattccaatttatttacgaacatcagcagcacttccatcacaaagacaacggaaagtgtaaagatcactctagatgaagcaaaactccagcttttattaagccttctaaatgatgaaaatactgctatcatcattccaaaatctaaggttacagaactgcatgaaattcgtgacctgttaacaagtgagtag

SEQ ID NO: 26296 - DNA, 201 bp, Escherichia coli
atggacaagattgcacagtttactgtaattaatacttataacgatctacttattacaaaaggcacactcgatcgcaacattgaagagatcaaggctggaaagcgttttgatcattttgaagaagggcacgatcaatacgtacagaaggtaactgacgctttacagctcgtggaggctcgactggagaaccttaaaaaatga

SEQ ID NO: 26297 - DNA, 708 bp, Escherichia coli
atgaaacattctcttttttttactcaggatggttatttactgccatcatccgtaaagcctatctacggtaaagatggacactattacgccgttatcacccgtgagtgctttgaatgcggagggactggaaagattgcgaacgccgtctgtgtgacatgcaatggctccaaaacgtctccagccacagaggaaaagctggtactgaaagagtgcattgaattccttgaaactatcccggaacttcgctgcaatcccgatcttgaagcctggaaacgtaggcacagcgagcagttagcattgctgcaagctgacaattctaagtttgcagcaagcattgcacagcagttaaacaacaatctctttttaacagtccgtcagttggagtctttctactcgacataccagcctgtttctgaagctttttcagaaaacgccggttttccaattgaacattctttcaacattggtgatgtagttagttttgatattatttttacagaagtgcgagctgcgttttcaaaaggttctcatagctatttttttacttttacaggcaaaaagcagaatgatggattcgcgttgactggtaatgttcaggatcacgttttattggggcatagctatcatctttcgggaaaagtgagaaagatccactactttgactcagtgccctacgcattactgactgtgtttaaattaacagcatag

SEQ ID NO: 26298 - DNA, 822 bp, Escherichia coli
atgcaaaatgatcttggacttgggttcatccgcaagtcagcaagaacgtcagcaaaaattatttcccgaaaagttacttttccgctcgatgacttggataatgcaaagctaacgctaactgggctacagtgtcatccatcctgccgttttccattttaccagctgtctatgcttatccataaccaactcgctgagcacggcgtcatttctgccgatgaaaacgcaccgttcactgtatccataagcattcacgagtggctgagtcgtgccagagtggcatttattgattatcacggtcttcgtaatagcgataagacggtcatgatcacacgcgctcatctggaagaattgcttacttacttgtctacgacattggctgtttatgtcccgtattcaaagaagcgactaaacttcagcttcctgacgtccttcactctggtcaaaacatcgcagtcttatacgttaacgttccctggggtacttcgtccgttcctgatgttgctggggggattaattcaggaatttatgacggaaaaattattgaagcgacggaatgcccagtttgtcatctttgattatttgcgaaagtcccggcgccattcacacaaaattaccgatatcgtgaatgatcttcagttgcatacagtgaacgtacgaatcatgaatgtccttacccaacttgcagatcaggggttcatatcgtttatatgcgaaggtaagagaggggagcgatcaattgaagagcttcagtttattccctatgccagccgtgaccattccgaagtgctgagcttcgaggaatggataagcccgatcgactaa

SEQ ID NO: 26299 - DNA, 825 bp, Escherichia coli
ttgcgaaaacatacaccaatcatcaaatgggcggggggtaaaaccaaactgatgccgttcctcagtaagcacttcccacatgataagagccgacgctgggttgaaccgtttatcggcggtggcgccgtgtttctgaacatgtttgccaccgaggctctcctagcagacagcaacccggacctaatcaatctgtaccgcaacatacagcgaaataaaccggcattcatcagagaagtgcagctgctggcggaaaggcattttgaagaagaggattactacgtgctgcgtaatacctttaacagcaccagttttgatgatgccccgctacaacgagcagccattttctacgcgatgaatcgactcggatataacggtctgtgtcgttacaacctgaagcgaaagttctcagttccatggggaaagcgataccagttcagtctggatatccagaaggttgattacctctcattcaggctttcgagcgttgaattgaaaaccgcagattttggtcagacgctggagtttgcaggtggtggtgaccaaatatattgcgatccgccatatgacaaaatcagtaaaaccagctttgtaagctatgatggtataccgttcgataagagcgcacatgttaaactggcggatatgctggtggatgctaatcgtaaaggggcctcagtggccatatccaacagcatgactccctttacgctggagctctatgaagaacgcggttttgatattcatactcacaacgcttatcggtctgtcggcagtcaatcaaagtcgcgtaagaaggaaatagaaattctggccgtccttcgttga

SEQ ID NO: 26300 - DNA, 1158 bp, Escherichia coli
atgagtgatctgatgactgattcccaacagcaaactaactcacgggtctttaaatccccactcgtgtctttttcaacagtgaccggttccggccgattcgtcagtggtatgaagcagttccgcgacgcgaaccctgacctttgtaatgaagtcactgaacagaaagcatgggctatcagcccaaccgtggttcaaatcacggaaggattcaactcccgtgagatgggaatgggggaagcttattaccagttgccagaagtcgccgatcatctcaataacatcaagaatgcgtacatccggggtgattacgtagaccctatccgcgttctgatcaaagacggcattccgtacgttcgccagggacattgccgtttaaaggctgctttgatggctgtggcagaagggcattctaacctcaccattctttgcatcgagatgaaagccgatgagatcagctgcgaattgacaacgattgacggaaaccgtggcctggctctttctcctgtggctttgggtgaatcctaccgacgtcttcaggcgctgggtggatggtcgcttgaccgtattgccgaacgtgagggaaaaagtaataccacaattgctgctcttattcgtttaaccggctgctgtgtctatctcaaaaaactgatccatgccgatgccatttcctatgtagcagtcctgtcccttatcgatgagttcggtgaaacggaagctgttgcgcggatcgaaaagatgatcgcagaccttgaaaaggctgattcaagcggtatccagattaagaaaacgccacgcgggcagatccgtgttgtcccttccgattttaaacccgcacgtgttccaccagttctcgctacaaaagccgtcgaaggggtcaaactcattacgacgagtctattgcagaaactcggtgatatcgagttgccggaggtgaccgactccagcgaagatgaagaaattacctttacgctgaaccggagcatgctggagatgctcaagaacctgcaaagtgagattacggaatcagaaaacaagcagcttcgccgggccgaaaatcggcaagcccgattgaaaggggaaaaagtgacttacaaaaccaagaaaaacgataaaaatggcggagaaccgcaatccgaaacacccccagcacaggcttaa

SEQ ID NO: 26301 - DNA, 1677 bp, Escherichia coli
atgtctgctgttgaatctgattccctgccaatgggtgcccctgggagttctctggttgcttatatgcctcatactggcctccttattaacgacgataacttcctgcccgaaatgcgggaagagctcgatgtcattaacaggcaggtcgaatcatataacgatgagcttagcttactgaggtccatgtccgctcagttcctgaaatgcgggaatcagaagctctattcatacctctccggatacaatcatctcatttcagaagcggatgccagctacgcagaaaacgcgctgcgttcagaatactggaagagggtcatggccctgaccgatgtactgtctgtgatgtctgacgaaaagaagaaagaatgggataagcagtttactgctgaccgttaccaccttcctcctcaggagatccctgattttacactcgatgctgttgttaccacggttgtcgcgttgctcaatgaccggcatcagttcattaaagatcgtgtctatgccgtctttcagtcattaagccgtcaacacaaaaccaataaagcatttggcttctctactcgcatgatcacctccggcgtatgtgaaggcgtgaaagacaaatgggtaaaactgaaagttgagtttaaagaatccggcctcatgccactttcggagttgcgggtgatctgttcttatttccggggcgaaacagttaaaccggtctatgacacgaaaaaaatggttgagaatatggttggtcatgttggattcagaaactggatcagcctggatggcaacagtattcgttttcgggtctacaaaaacggatcgatgcacattgatgtgcatcctgatatcgccgaacggcttaacaacattcttgctgccatcgtccctctggctctgcctgctgaacgcgtggcccataccaaagcgacgttgcaggagttcccggcactgaaacgctgcatcgattttcattcacggatgcagcttgcagagctggattttacccagaatgaaaaggaatggtccagctggacatcgctcggctatgccggtgagaacgctgataaaacgcggcaggtgaacgcggatgttctgcgatttctcggtgcccgagtgacaagctaccatgtgacgtttgattatgacccgaccgaagtgatgcgcttcatcggacatatgggcgccatgcctgatattaaatcccaccagttttatccgtcgtcggcgcgactcagtgaatacgtcgcatccattattgcggccggggagggggaacggctgctggagcccaatattgggcacggggatttgcttcaatgtttcccgaaaagtgtcaacgtaaccggcatcgaactggatacactgaattgtctggtctcccgggctaaaggttacgagaccacggaagccgattttctggcctggtcggcggcgaatcagattcagaaatttgattgcgtggtgatgaaccctccttttgctgacaaccgggctaagctgcatctgctggccgctgcgtctcatctggttcccggcgggcgtttagctgccgtcctgcctctgtcccttcaggggatcgataacctgctgggcgaggggttcaggaccgagtggatggataccttcgataatgagtttgacaacactgccgtctccgtccgcgttctgtatgcagaacgcttttaa

SEQ ID NO: 26302 - DNA, 177 bp, Escherichia coli
atgtccaaaagttcgcctgtcttgcctgaggaccgtgatgatattgagtttgtgatggatgatttccagcggagcctggggaaaagtaaaccagtacgtgaagtgcaatttctgggagagtcacagcaaagtgaagaatctgcgaactctgccgattcgccctggtttgaaagctaa

SEQ ID NO: 26303 - DNA, 2457 bp, Escherichia coli
atgcgtaaaattctgacaggctgtatcattgccacggccatagcttcagtttatccggcggcggctcagattttcagctattcgtatactgacaccaatcagctggcaaagacgcttaagcctgccacgcagagctaccttaatccggcaagcacaatgaccctgaatctgatctccggccttgaccgatacgaacgagtgagtgtgaccagggacagtgacaaaaaggtcatgtattccgcagtgacaggaaagataagcgtcgcagatcgcattgttgccgcagacggcacggaatattacggaaaggacttggcgttacccgcactcggtgaaggggccttcaccgtcatcaacgatactctggatctccagcaggctgtcgtcagctcttcaacgtatcatttcacaatcgacactacagcgccaaagtataccagcatctacccgagccagaacgcaggctatgaaatggtcctgagtggcccagtttgggggcttgggcgcggaggatctggccagttttccatctttgctgatggagttgatgatgcgaatggcatagacaagatccgtctggtcatcaagcgcggaaatggcacagtcgtgtccgacaacacactcagttacgatacggcggcaaaacgtgccttttacccctggatcaaggactcggtcactcaacccggtatgcccaccagcgatctcaatgaagaatttaccttcaattttatcatcacagataaagccggaaacacgctgaatattccgccgcagcgctttttatttgatgaccagataggtgaatacaccccctttgcggttcatgactcacgcgtcagtacgagtgtggtcccggggatctcttcagggtacgtcccgtttgttcgggggctatctgtactcgaaaacccataccgtatggtcatccgtatcccccgaaccaactggaagccataccgtaacggcggcatcaccattcttaacaattatggcggtgctaaggttatttcagaagacacgacctatgtgtacgtcgaggtgaagcttccccagggcgctctggatataaactactatcgcccagtgaacacgtaccaatggtccggaggcgatctgactcaatacgcctcctggctgaactgggacccggcttcggtaaaaagtcctgcatgggggagtccggcgattgagcgacagatgtccgatggtacctggtttaacagcgtcaattggaaatacttcaaggcttcagatatgccggtgaacctgacccagatccgtttcaatgtgcaggcaaggccctacgaccaaaaaattactggcggtgccacctgcaacatccctgccgggtcaacgtcgtgtaccgtcgccctgacacaggcgattacaaacggcaccaccggctatctgcatagtggttatgaggtacgttccacaacagaatccaccttcttcatgcctatctgggaaaacgtcgtctggcatacgctggggccttcggtcactggctatgactacaatgatacgaccaacatccttcaggtttacatcaaccagccgggagacggatcgtatttcgataccgttaaactgagccgggtgtggctgtccgacaaatcccgcaataacgcggatatcaatgtgaccggaacactaacggggcgtaacacagcaaccgggaattatacatacgagttcaacctgaaactaatcccggagggcagctataacgtgcagctcaacgcccaggattcgttcaacaatacgggtagtctggactataagactgtgacggtcgataacacgccgccgtccatcagtatcagctacgaaaccaaacctatcaccagcagtgtaacggtgtatggactggagaacattcgtattcagctcgcagataccctgaccaagccctctttaacgcgaatgacgcttcgcggtggcccggtatctgatgctgttgagttgtcgtgggtaaacctcggaaataatctttatgccccgaattacccgaagatctttccttcacttaacgacggcgaaacttacacgcttaccgtgcaggccaaagacgagatgaacaacgttaaagaaagcgccgtcgaatttagttacttgccgaacaacctggttcgtctggaaaaccttaagaccatctccgttagtaccgcgctgaaaacgtccgatgacacaccgctggcggttctttatgccagccagctgcgtaagaaggacgggtctatcgcaaccgggaaacaggacgcgatactgacggtgcgtaaggatgcagccttcggcgtcacggtgaatggggtttccgcagctcctggggagagcaaaaatgttcagttggatctgggtctgggtgacagccgcagcttccctatttttccttcgacttccggcgtcgttggaacttctgaatttatgctgaatatagaggaactgaagtaa

SEQ ID NO: 26304 - DNA, 516 bp, Escherichia coli
atgaaaattagcacgggcatgatgaaaagcaatgcaccgctcatcattctgatttgtttaatgatcgctttttccgcctatgttaaatcatggtcattgttatacaccttgctggcggcatcagtctcactcacagtcatgatctcactgccttttatcgtttcgcctctacagcactcaaaatttatagccttacgaattttgcgtttactggttattacgctttggacgattggccttgtcggcgtcttcttttcagttgttgaacgccttgtatgggttaatgcggacagctatccggcatggctggcgaaggaactggattctccggccatcacggatggtgaaaattttattaaagcaacagagtcttttgagaagatctgcgggaaaaataaaggctatcttagcgttgtcaccaagcataacggcatatttatgcgctgcgatgatagcttgtctttcgactcctggtggaagggtgtctaccggcttaaaacccctgagactcgatga

SEQ ID NO: 26305 - DNA, 882 bp, Escherichia coli
atgtcaagtaataacaacaagttatctctcgtcattgaagagtccctaaaagattcaggggaagttatacaactctttcccacattaaaacagaccattcaaccgaaagttttactccgcctaggtgtgtttgtgccgactttgaaatctacggacaagggggggaggaagagccatcatatcgatgccactgagccgctatcaaggttatctattgtagagggtgaaggttacagccagatccaaatctacgggccgcgtctcgatatggataccgatttcaaatcatggtgtgggatcgtttatgcgttgtctaaccggccgcttgattcagaaggtcagctggagctgaattttccggagtttgcaaaattttgtgggtttgataccaagcgcattgataaacaactgaaagagcgctttgatgcttcgctgacgcgtatagcccggaccaacatttcatttattaagaaaatacccggtacagatgatcagataacgataaacatgcacctggtggaatcgacgtattacgacagttccacgggaaaaatcatcatcaagccaaattcgaagctcaatacgctgtatcgcgtcgacggtaaaacccgactctacctgaagacattgcaaaaactggcccgtaaggagtccgcacaggccctgtacctgtatctggctgagctgccgagcaccttttaccgcatcggattcgatcggcttcgtggacgactccaactgtcatcacacctcggtaaccagaatgccacggttaaaaaggcgctgggccagcttaaagagatcggttttctggaatactccatagacaaagaaaacggcgattacgtactgaatattctaaagagaaacatgaagccatga

SEQ ID NO: 26306 - DNA, 597 bp, Escherichia coli
gtggtatacgggctggagaatatccgtatagctctggcggataacctgacaacaccccggatcacccgtcttcagataaccggagggccaacggcagataacgttgagctcacgtggtcacctgctggcacgaacgtttatgcgccagaatatccaaggctgttcccctcattcgagccttccgaaaactatgcgcttagcgtgacggtctccgacagtcagtcgaacagcaaaacttatacccagaaattcagctacctcccgaataacctagtgcagttgcataacctgcgaaccttatccgtcagttcagcactcaaaacgtcgttaaatgagcctcttgcttatctgtcaaccaacgtgttgcgtaagtccaacggtgagattgcaaaagacgtccagagtgcgacgctaacggtacgtaaagacgctgccttcggtattaagttcaacggcgtgcaggccgcgcttggtgaatctgtagaggtgaaaattgatatggggctcggtgataaccttttagtacctatataccctgctgaaaacggcaaagtgggtacatccgagttcatgatccagatcgatgagctgaagtaa

SEQ ID NO: 26307 - DNA, 297 bp, Escherichia coli
atgacaacgcaggaaacacccgaacccttccgttgcagctctttcgatatgataactatctgggcggtccgagatccgcaaagctccgccagcgtggtgccaggggtttccggatatccggcctattcagctgggatgaccgttaatgagaatccgattcatcttgtatatcgcgtgccaaagtccaactaccggtcatatgccgagggcggcctgctattctataacctgtattcttccccgaccgagattgcgacggacagcacctatacctacgttgaaatgatcctgccctag

SEQ ID NO: 26308 - DNA, 603 bp, Escherichia coli
atgaaaaatcaggctatagctttggctatggctatgctcggagtctcagttccggcatctgctcaaatttatgaatccatcttcacagataccaatggtattgaagttcacgccccctcaacccggctgttgctgaatccggcctcaccggtaaccctgacgctcattgccggtcttgaccgttatgtgaatgtcaaaatcaccagcgccaccggcacgcaactgctgaacaccactactacgcgcaccagcgtatccgaccgtctgaaggccggagatggcagcgaattttacggaaaaaaagtaactttaccggtgcttggcgaaggcaggtcggttgtgcaggtcagtattctggatctgaatcagtccgttgtagccacctacagctacaactggctggtagacaccacaccgctgtctgttaatgccctcacaggcaacgccgcctatggatcaactgcgggtagcgtctggaaaatggggctggaggccacggggcagtttgattttacctcaaccaatgtcacggacgtaaatggcatcgagaaaggtatgttttatgtctatcgcagtaacggcagtttgttcagtacgacgtga

SEQ ID NO: 26309 - DNA, 2385 bp, Escherichia coli
atgaaattttgccgacgtccgttgattgtcgccgtctatacggcactgctgttcccgctttacagccaggctcagctttacaactattcgtataccgacacacgcggcacgaaagtgaatgctgaacccaccagagagtatctcaacccgggcagcgcaattacgctgaatctgatatctggtctcgaccgctacgagcgcgttaccgtgacacgttcatccgataatgtgcagatgttccagagtgtcaccggcctggtgacagtggccgacaggatcactgccgctgatggtagtgagtactacggcaagtccatgacactgccggtactgggcgagggtactttttctcttaaatccgaaacactcgacaataagtcgaatgtcgtggcgacaactagctactctttcagcatcgatatcactcctcccgttctaccagatccgatgcagtggatcagggctggttttcagtacggaagtctggatattttcggcgacaggaccgcaacccaggccatttcgttatcgaacgtctctgatgcgaggtcaggactggataaagcggagtggtttgctattgacagcagcggtgtccgccggactgtaaatgctcagctgaatgcactcacgggggtggtccaggcactggcggcggtggcggcaggaagcacggttgcgcccgtcagtccggcatattacaccgtaggttttcgggtttatgacaaagccgggaactggacagaaacatcacatcgctctggtattgatcgtaccgtccccagctacattcaacatcaggtgcggaatgcgaaaacaggcgtctgggaagattatgttcctggcatgaccatttatgaaaacccggtaaaattccggttcaaacgccttaaatcggactcaacaaattttaacgggactgattttggctggatcgatcagattactaattctgacagcacctacttttatactgaagtcacggtgagttacccagagacctatgtttactacgagcggtataccaaggctggtctgaacaataatatcaattatagtacactgaaatttactctcggcagcggtgtgccggaagctccacgttatttatccgggcagtttcatttcaaaaaaggcaattcctggacaccgaccgacattgtcaggttcactggaccggattgcgttgatatgggccgtgttaacgttgaaccacgcccgtatgtgcaaaccgccactatcataggtcttggtagctgcaatgttgcagtgggggagagcagttgtctagtcagcatggattactgtaagacgagcggtaaaggctatagtccgtaccaaattcatatgaaagggaccggtacttacgctaatcttggtggacttcagtcgcatttctatacctactgggatatgaatcctcctgtcatcaacagtattgtttccaacccactagataaaacagtcgttatgctggtgactgacagcgacgtaactaacgactggaccacctatatgtgggccaccaacattttcaacctctcattgaaggataccagtaataaagtcacaaccctgtcgccgaaaagcgtcgcagtcctgaactaccagctgaagcaagtgacgtttgactacagtaagttaccttccgggaaatacactgcaacgggtgctgcgacggacacctacaacaacacggctgaactgaagctatcgagcaccatcctgcatgacgtgacgccgccagtcgtcggtatcatctttgaaggaaaaccagctgacggatcgcttgtcaaaggcctggaaaacttggtgatcaccctgagcgatgacatgactaaagcttctctgaagaacattacgctgagcggcggacccacgtcagataaagtcagcgtaggctggtacagccagggaaccgacaaatatggactgaactacccgcgtatcttccccgcgacagacgacgcgagttcctacctgttgactgtcgtagctatggatgaagctggaaacgccaccacaaagaccagccggttccgctatgtaccgaacaacctgattgaatttaataccatcaagacgctggccgtgggcatgggactgaagacatcagataaccagccgctggcgtatctgcgtaccaatagcatccggaaaaaagatggttcgctgatcactggagcacaaaccggcacgctgacggtccgcaaagatgcggcctttgcggtcagtatgaatggggtggccgtcgtacccggggattcgaaagacatcacgatagatttcgggcagggtgatggcgtcctgatccccatcttcccggccaccagcggcaatgtcggtgaatcaagcttcatgatcgagctgccgcaaatccagtaa

SEQ ID NO: 26310 - DNA, 420 bp, Escherichia coli
atgtcagaaattgctgagaaacctcttatcacgcgtgtagctcccctggagaggatttattattgcgcttcccgggcagagggtctgaagccagatcgccatgaaattcgaatgcagagccagtttttgctgcttggcgtcatctggttaccacctgcactcgctatggcagaactggaacgcctgctgaagggatatgacgctgaccacagccggttactggaaaacgtcctggagactgcccaccagcaattcctgaagttctgtgagccgcagaagagagaaggggggggcgtagaaaaccacgtagaatgtccccgacaggacgacgcacttcagtgtttacggtttatgtcaacgcggtatgcgctggccgttgatctgtgtgccgcgtatgtgtgcagcaggtatggacgttag

SEQ ID NO: 26311 - DNA, 699 bp, Escherichia coli
atgaaaaacacagtaataccgacggtgactgaaaacgagatgggagaggtgatcacccgccactcggcttacggactggtatcagtaagccgcacgtccacgacgggacagcgcctttatgcctccgacctcagtcataaagaggtagttacgatgaccttcagtgaatcagagcagattgaacgcgacggtgtgatccgtcatcgactggcggaaggccgacgccgctcaccgctcctgcaagtcagtctgtctccggcgcagtgggccacgatgatcacatcgttcggaatgagtgacggcgtgccgtgtaccattaacagcctgattcgcggcgattatgagcggcagccggagattggctatattgagtcgacacgcgaacgatacgaacggcagatccgggaagccgctgagcgtgaaatggcgaaattgcatgaaaagctggaagtgctgcgtttgctggcggtaaaaggcaaggctggaaagcgtgagcttgacgaagcctatcagtcgctgttaagcgtaatcaataacttgccggtcaatctggccttcaccaaccaactcattcaggaatccatggtgaatatcgtctcacacggcaaggccgaactcgaagccaccgccatgggcgtagccgctcgtctgggtatgaaagaaatgagcagccttgcctcgctggaagagaagaagtaa

SEQ ID NO: 26312 - DNA, 180 bp, Escherichia coli
atgaagggtaaaaatatcgtggctcgtgtcatgcgggaagcggcctataagtgggaaactcgccaccaattgcagcaggcgtacaattcagcgagtgacgtgggaaaagttcccagacattccggttccgcatctgatttacgccagacgctgtcatttttaattctttgtagggcatga

SEQ ID NO: 26313 - DNA, 264 bp, Escherichia coli
atgacgaacgctaacgcaaatgacgggaagaccagcccggtattacccactctcgaacaggtctatgctctgctcaaggccaactataaacccgcacgatttgctgatcgggatggggaaatctgggggcatgagtattcatggaacttggcaagatccagtttgcaagacctggagaaatacgggaaatcatatgtatccaagcattccgaccggatgggcgatggattcagttttggtcctgacctggtcattattcgctga

SEQ ID NO: 26314 - DNA, 342 bp, Escherichia coli
ttgcgcgaattacttggaatggcaggtgcagaacatcaagcctccgtaatgtatcaaacgttcggacacctcgacgcgaagctaggcgaaaagcataaaggtcacttcgtttttatcaacggccagcacggcgatctgtgcgttgtgcatagtgaattttcatcctttgacgaaggtccaggctatttcagtgaccgtgccgacttcatctgggaattagttaaaaacgacggcccatgctctaaggtcgggatttaccgatttgacggcgaatacgcgcttcctaagcgccggaatgggagaagattttcaggaagcgtaacgtgcctgcaagcattctaa

SEQ ID NO: 26315 - DNA, 123 bp, Escherichia coli
atgggcgatgttgccacactaccaccgaaaattaacgatggcgtacttcgacgctggaatgctcgcggtaaagcggataaagaggcgctggccgactatggcgttagcgtgaaggaggagtga

SEQ ID NO: 26316 - DNA, 777 bp, Escherichia coli
atggctaaattaatttcgacgcgtgaactggcaacaattattactgcattactggtaaaaccagaattactgggcgagctggattccccagaaaaacatcgcgccctgatggaagatctggggcgtgttgtggcagagcattgtggcggtaatgtcactgaaatcgcactaccggagaccgatggtacggctgctgaaggcgcgttgcagaatggccagcccgtccgctatctggaaaccaaagaaagctctccgtatctcatcgtacaccctgacgcctcactgccgtcggtgacgcaaaacgtctggatgcacgctgatcatgatggctgggaagagcatttcaacggagagaccgatgccctgactccagagatgagcgagcagttccgccagcaggtttatgcactgctgacgccggaatcccataccacctcttcagaaatgagactgactttgcaggactggcaactgggtgaagccgagatcccagaagaagactgtcagccctaccaggtgaaggtgttagcagaaaataaaaacgttcagtgcgaagtgacgaatgaaaccggcaccacgtgtttcggcctcattttggagatcgaccgtggtgtaccgacgctgcacattgatacgggcagtgattcactgctgcacattcacgcggcacatgacggcctggttctgacaccggatgcaccgagccacagatttgaagatgctcctgtagatcgcttttcttataacagcccgtccctgttggtgcctggggtgtaa

SEQ ID NO: 26317 - DNA, 777 bp, Escherichia coli
atgccaaaatatttgttacctgccgagcttgcggaaattgtttgtggattactggtgcaaccagcattattgaatgaattaaaaacaccagccacgcataaagcatttatgcaggacatcggcgagctggtggcgaaacattgcggcggtcaaattgacggcgtgatcatgcctgaggtacgcgatgaagacagccaggccgattacctgacatctccagatgaaaccccttatattgttgtctctcctggccaggacatgcactccctcacagataacgtctggcgtcatcatgcccgggatggctggcttgaccatatcaaaggcagtgtcgaagaaagccctgatgaactgccgacccacaaagagtgcgctgtacgccgctacaccctccagcgtctgctccttcaggaagaaaccagccatgctaatctgccagtacaggtggtacggatgtgtgagtacagcaccgacgatgttgagcagaccgattcttcagcagagtttaacgtcacaatggcgctcggtggtcatgccatgctggcagtaaaagatacagattcccgtctggtgatggccctgacactcttgattgaaaatggagttccctctgtccacgttaatgcgggtgacactgatccttcagttctgcacatccgggcagctcacggtggtctggttctttcaaccgactcccttaatcatgatttcagtatttcgccctctgaccagtatacctacggacgccctggattattattgaaagccgcctactga

SEQ ID NO: 26318 - DNA, 468 bp, Escherichia coli
atggataaatactttgaccgtagcggaatggcaatcgataacgctaagattaagtgtattgattcagtaaaaggcaccggggaatatatttaccgtgttacttgcaataaatgcaatggacgtggcgaacgcaatcacttttataagagccgctgtattgcctgtaatgccactggctatagcctggtcactacccgtacctgttacaccctgactgcactgtatcgcatatacccagaagctgctcgcaagatctcagccgctcaggcagcagagcgtcaacgtgctgttcaatcaaagacttccgcgttcaacctctggtgtcagaaccaccaagaactggtggacgccatcacgcagcaagacggcgagaacagttttttgaacagcctgaagtcgacgttatcacgcaaatttccattaagtgataaacaactgacggtcgcagccagaatcctcgggatgtaa

SEQ ID NO: 26319 - DNA, 297 bp, Escherichia coli
atgatccattcatttaaagacaggcgattggaaaagtttttccgtaatggaaaatccacggcaggcattcctgctgaactgattaatgcgatttcatgcagactggaaacgttaaataatgttaaaaacgaacgcgaattgttatctggtagtttgcggtacgaacgcttaagaatgaccgcaaaccggtattcttccattcgagttaattcaaaatatcggctattctttgagtggaacgatggcgtacataacgtccacctgtcggcgcatgattataaatcgctcatccattaa

SEQ ID NO: 26320 - DNA, 1146 bp, Escherichia coli
atggatgcgatgttttatattcaggccagcacaaaacaacaggcaagcttcatatttgacttcctcgccacccggctgtatgcgcattgccagcttattgaacctctgaatgaaaccatcattccctccttaagtcggacgacgctttcattacagccctggtcccagaactcccagacccggacgagtgagatgcagatggttacgcacggtctgacactctccggggcagtgatggtggagcactcccgccagatcgtcgacttctgcgataacctgggtcttcgccttgatgctcccaccggaaaacccggttggacagaactgatcaatgccgactgcgaacaactcaattccccgcgtctataccccgtcctgatccaaccgggcactgaaggacagtttcagatttatgttccagctccggctgtcattgacgccgatacggtcattgccagtgtgatcgacgagtgttttagcgatgttacctcgtactgcttggccggtacgccgtttccaatgacggagaaaccagtgatccgcatggaggcacaccttagtgacgcacatacccgggtttttgagctgacattcatcagctataacctggcgctctctgccacggtctatgacaaaaacctgcgccaggtactgatgttatgtgaagactttggcgtcactcttcaggggcgagccggtgcatcctgtcatgcctatatgcgtaacgagtaccgacgtcttgctcatgtcggcgtctactcacgctccggggctgaaaatgatgttcgcgcctacagctcagataaagaggaaaccctgatccgccagttgatgactcaggcgacagcggggagcgcgttgattccggcgcggcacggaaagcaatttaacggcgtgctgatgaatgccaacccgtcatcagccaccactggctttatctacctgtcaccggaattcccgcaagggcagtttatgatgacggcggaagttgtgaaatccagttgcacgccacgggggatcagctacatcgaaacggtggacggataccgttttattgtgacggcatatgacacgaaggcgatgcattccctgaccgaatttcttgctgttaacgaggactattttaccccttatcgctgggagtag

SEQ ID NO: 26321 - DNA, 333 bp, Escherichia coli
atggaatccgaacagctcattactaaaattactcagacactgaaacgccccgacggctctgaagtacgtattgtggtggagcaggcattcggcagtggcctcacgccttcgctgggtgtatatgtcctgcgtcgcccgaccattgccgacaactggcagttgtgcaaaaccgcaccgcacaaggactggcgcactatgtcggtggatgaataccagaaacacgggcgttcggaaatgcttcggtacgtctccatcggcgaaatccttcgcctgagcgccgcgatcggcaaaccaatgagctacgttgatacctgtccgggtttacagggctga

SEQ ID NO: 26322 - DNA, 261 bp, Escherichia coli
atgattaacgaacagggcatcgctgtaaataccccggacttaagccgactgtatattatctcaggccgcatgatgtttgatgatgaggaagaggtgatgctggtcgaagcggactcctgcggtgaagctgaagcggcattccagcaacatatcgacgaaggtgtagcgcacttggatcaggtgcttgttatttcgtctgcgtccctacaatcactgttaccagacaggctcattgcttcctctctgacacataccgtataa

SEQ ID NO: 26323 - DNA, 807 bp, Escherichia coli
atggcgaacaattacactcaggcatccttcacaattctctgttcacaggaacaggcacagatggcactggacgcgattgcgtatgttacagacacggatgtggcggaaggtgaacacttgctgtctaaaccggtttcagagtgttccctcactgaattgcttgtcctgggtattattcagaaccacccggagtgcgatccgtttgagccgacttttggtcagtcggagtcaccagaagacaattacgagctggaactcaaagcggaaatcaccggtaaaggcctggcaatctgccatgatgaaagcattaacctcgaccacgctatcgcggtaacaactgccgtgttgtcggtgtttaacctgcctgagatggtcacaatcaatgccgctttcgtctgcgaccgaccacgcgaaaacgagttcggcggtgcgactattgtggtgactaaagatacacaccactacgaagaaggctttaatttttctcgcctgatgaacgaagctcatgatgccggtgttcagtatgcgttggtgaaagtgaaccagtacaaccacgaatacacatacactcaatgctatctgatgagctgcaaaaaatcagaatcggcttatgacgttgcacgccaccgcctggcctctgacgagagcacgcccgacaatcctggtgaggatggagttatcattctcagcgaagaagacaataccagcatggcgcttcacagcgtcactgaattgatgcccgtcgtgtacgaaagcctgagcaaattactgccttcacttgacgaattgtgccccgtgactgcctga

SEQ ID NO: 26324 - DNA, 447 bp, Escherichia coli
atgaccaataaaatcctgattttgtccgctagctgcatcaatgaatttgcgagtgatgtcccgcaaagcgtcttcttttccattgatacgtcgctggctaagcgtatccgtgaactggcggcatacgtgaaagaaaatgatttgtacgccgccgagtttttcttctatgactgccactggtccgaaacattggaagaggacattgaggttctcatgtcgcaggctgcgtttattgaaagtgacagcagcggacaggaaacgatgctccgggacgtaatgccctcctgccgcacggaaacaacttccatccgggtcatgaaagaatcatttcatctgacggctgtaccccgtcattgcggcgatgacatgatgctcaatacgcccctaattccgttggcagagctggaatcaaatgcgacggttttaattacccagcagtattcgtga

SEQ ID NO: 26325 - DNA, 2376 bp, Escherichia coli
atgtatatcgaaatgaaagaaacattccttgaattaccctcagaaattcaattttctgaggcggctaacgctgccattctgacgcaggataaatggggcgatgtctggcagacactgaagaccgatgcggatctgaattatactgatgccggtgagccggtcagtctcgcttcgcgcgtgacgacggcaaccagtgccatttatcatgcgattaccgaaggctggaccatgtgcgtcggctacagcggcgggaaagactctcactcgctactgcacttgttccttatggccttgatccgtgcagtacgaaacgggtcgaacgtcagccagcaccacttcattcagatgtctgacaccctgattgaaaaccctgagatgcatcatcaggccacgcaggttctcagccagctcagagcctttattgccgaacaagaactgcctttgaccgtccttgtggcccgcccgtccatgacccagagctgggtcggacgcattctgaccgggcgtggacttccaacctggacaaattcttctacgcgtcaatgcgctacagatctaaagcgttctccactgcgccaggccaaagcccgttatctgaaaaatgcacctgcttctgtccgcaacaaagtgtgcctgatgctgggttcccgcgatgatgagagcgcccgtcgggcagacaacatcctaagaatgggcgggcaggcggacagcgtctcgctcacggagcacggcggcgaactgtacccggtgaaagagtggcgggcacaggatatctggtcatttctgatggcctgtggttctctggcgcgatttccgctgccaagctttttgccggacaacttcagcctcgccacgctttacaaagacgcgaccggggaatgtatctggacgccggagaaatccactttccggtcttctgcctgcggcgctcgctatggatgctcgctatgctgcgccgtcggcattgatcactcgatggaaaccttactccgcactgaccctgagaagtacggctaccaggctggtctcaaccgccttcagcgtttcctgaccaaaattcagtacgactggagccttcgggattatatcggacgcaaagtgtttgagggcgggtatgtgcgtcttcagcccaatgtgttctcgtcgtccctgaccgaaagactgttccatatctgttgcagcctcgattacgtggaggctcagcgggccgcagcggtgcatgaaaagttactttcaggcgagatcgaagataccgcgcataaccgccgcatgtcggagccgcagtttcgactggtgcaggaggctaacgtgctgcatatcgactttctctggtcactgcattgctttaacccgcgcccatttcgtgccattgaactttaccgccaggtgtgggaagggggggcactggatcttctcgacgatgagccagctatgcaaccagtaccccgcacgccgatgccagcaccacgctggatgaagttgccggaaggccgtatcgggacgtcatttgacgggctgtccgatccgtcatccgaaatagcctattttgacggtcgggaggatgagcgagcttcccgcagtctgatgagtagcggggaaggcctgaacatcgttgcattcgaagaagaggatgagctgacggtcgatgaagacacggcatcctggattatctggcatgaatatgacggattacgccagcgtgtgtctgacggtgagtttacccctgtggcggcggcacagtacctgcttagatacggcgccgtccgaatttcgcgcgggaaaggtgcggtgtaccatcgactcgctcaacgcgggcaggcctattcacgtcttggcattaacgaccagacgtcgctgacgtctctgctcgccagccgccgtttcaagatcctgaccgacagcgattatcgcttgctcgtagcccgcaaactgcgggggcagcggcagaaactgcgcttctggtgctgtgttgcggcctgtgtggcactgcacacctacaacaaaacccctctgggggggtggataacgacgcaactggagacagaacaacagctacatctggcccggacgggagacgaactgaaggcaaggactcttgacgctgtcctgaccctctgtaacctgcggatttcgtcacagcaaccggaagaacgtctgtattaccgggccgtaagaaaacgctttctggagacattagccgggtgtatttcgccggagcgcgaaggaaccttacgggaagtcatctgggagctgcggatgttatccggccctcaatcttcgaaaaagacggggttccggcatgtggatgaatgccgggagaggacggcggcgttgttaaggcctctgttgaaacgtatggtccgcctgctggcgtga

SEQ ID NO: 26326 - DNA, 465 bp, Escherichia coli
atgaccgatattaaggagaaacaaaatcactttagtaaattaaagtgtattgcaatttcctggcattttaataaacctactgggaaggagcaccttcttttatttgttgccattgtggcatggattttcccaggactggtgtttttcaaacattctctatggggcggactcctgttctttttttttgttgcaggtagttatgcattcctgacttttcctcattttactcatcggaagaaaatctggaaggaaaggcttgaccagtcgctgaaagagtatcagccgcttgatctgcaagcctgggcgtattttaaggaccgcgttagagaggaaggcatgacttataaagcctgtgagtcgtggatgagtactgaggctagtgcattatataaaagccccaaacaagaatggtcatttctcgacagcacttcggttggagaaaatgataagtcacaacccgattaa

SEQ ID NO: 26327 - DNA, 225 bp, Escherichia coli
atgcctattcaagaaaaaaccaccgttttcgtttttaatgcctgtcatgctgacaaggctgctgctgccagcgccaatgcactgcacagcctggaagttgaatacccaatgaccctgaatgatttgtcattgctgtgtgagtccgtcgctaaagcgttggatgtacccggcggagtgaaatatgaaattacgactgagccggtagtgaatggggaatacgattaa

SEQ ID NO: 26328 - DNA, 699 bp, Escherichia coli
gtgaagacacgtggaatgctttttaatgatgaaatggtccgggcaattctggcagatcagaaaacacagacgcggcggattataaagcctcaatatagttcggatgaatggtctataaggcctgcgcaaacaccgcgacatcgcgggcacacgcatgactggtggcttccaacagggacccagccatactcggcgcttcggccttgtccgtacggcgtagttggcgaccgcattacggtccgtgaggcgttttcattgctcgggaatgaagatgcgtgcgcggtggactggaatgacaacatcgtgatggacaggactgaagcagcccgcatttaccgggcgagctgcgaacagcggtcgggggattatgggctgtggtcgatccctgatgaggccgactggaagcctcgtaccgaaaatatgaagttcgaaggtgcgtggacaccttcaatccatatgcctcgctgggccagccgtattgcactggaaattaccgatttgcgggtagagcggttaaataccatcagcgaggaagatgccaaagctgaaggcgcaccaacagaatgttgtgttcttggcgataagcactttcttggcttccgcagcctctggaaaaacacgtacggcgaggacagttggcaggccaacccgtgggtctgggtcgtcaactttaagcgtattaccggggaggtcgtatga

SEQ ID NO: 26329 - DNA, 312 bp, Escherichia coli
atgaataatgagatgagttcgctgggtacgcaaaaggccgagggcccttttgtcctcctgacgttggtcggagagggttttatcttcgacgagcggcatgaaatcgtcagaattaatggaagaccaaagcagattggggtaaagcggaattactttgaatctgatctgggagaaggtaaagcgaaatactggacactggatattaatgaggcccatgtatttcccactctggatgccgcgaccgaacagctatgcaaattaagccgaccacacctgattaaaattcgaaaactaattcaggaaaataaataa

SEQ ID NO: 26330 - DNA, 525 bp, Escherichia coli
gtgaaagttctaaataacaaaggcgcagtaatcgaattacccaatttttcagaactcctcccgaaggttgaatctgatgatgggcgattttcaaaaccaaaaaataaaatatccaaagagcaacgagccgaactgcgtttgaaatttggcggtcggtgtgcctactgcggctgtcctttgccggaaaaaggctggcatgccgatcatgttgaaccggtgaggcgggattttgaaatggtcagagcccccgctggaagtcgagtgacacaccgggctcgaagtaccggtaaggtcatgcaccctgaactgcatgcaatcgaaaatctttttccggcttgcgccccctgcaatctctttaaaggtgcattaagtgttgaaggcatgaggaaagaaataagccgccaggtagaacgcgccagggcatacagcgtcaacttcagaaccgcagagcgatttgggttaattgaagtcacggaaaagccggttgtcttctggttcgaaatacatcaggcgacggcacaataa

SEQ ID NO: 26331 - DNA, 609 bp, Escherichia coli
atgtttttgcaccttgtaccaaaaatcctgcatccgatgggaaatctttgcacgctggattccgtaagcgtcccggaactgtcgctacgcctgactggtaatgaccttgttgcgatgcgcccttatcccaacaagcaatacctggtggggatgctgaaggggcgtagggcgctgaatggatttttggtcaaaagtccccgtgcgtttgaagagtttacgatggtgtccgtctggaatatcgaaggattcggcaaaataacgcacaccctgaagacttttgtcgaagatacagattatgacctggtttcccatgatgtgctgctggcgcaagggagctaccgagcacaagcgtctgaacagtgtcgtgttcaccctgtttataaaaacattgcgccggtacacatcgaaccgaagatggaatcactgctgtcgaccgaacccaatttcgagaacgatgtctgtgaaacccattcgtgggggatgctggtgcgttcgcgggatgaggggtttaaggcaatgacgatgccttccgcacgcctccaggagtcggtagcgctgcggggggatcgccagccacaattggaacaggccatcgttattaccgggtga

SEQ ID NO: 26332 - DNA, 288 bp, Escherichia coli
atggacgaagataaggtactgagtttcataaacagcggggacggcgacgccggagatctccttgatgatgcaatgccgactgccgcacgtcgattctaccgactgactcagtcgatgcacacattgctgggggaagtcagagagcattttcctgatgctatgttttattccgctaacggcaaggtgagcctactgcttgggagtagtcataacaagcatgaccagccaatgcaggaaatggtggctgtttctgcgacgcaacttcatatcgaaggtggtgactggtag

SEQ ID NO: 26333 - DNA, 222 bp, Escherichia coli
atggataagtatctggcgctggacagggcactcaacgaaattcttaccccagttcctacgccgttctcgacattatttgccggagagatcaaagcagagtgtcaccggattgcagccggggaaagcaatccgcaaccgtcgcatattcttgatcgccgtttgctggcgctgtgtaaagcaggtcaaattaattatacaaccggaaaagggtggcttaaatga

SEQ ID NO: 26334 - DNA, 249 bp, Escherichia coli
atgacaagcaatcgctgccgtgaaattaaaacgccaccagagcatattattgcggattacattcttcgctttatgaagaacaataaagaggcaaaactctacgaagccatgagccgccttgaaagtaaaatcaaactctttgtagctgacggtcatgatgaactacacatccgggcattgttaaatcaggccgcacatagccataccaaagaatcattgaaacaggcctgtgaacggatttgtaattaa

SEQ ID NO: 26335 - DNA, 381 bp, Escherichia coli
gtgaaatttatccttatgtttttcattttagccattctgatctggggttttacaggtctgacttttaaagatgccattctgtttacatccgtcggcctgagcatttcggttgtggctttgtctgcgctgcttgtggtagctctgacatttgtcatggctgcaatgtatgcggctcatgaactgggatcgcttggtaaaatgattatctctcaggtcgttctggttggattctggaacctgattttttctgttatcccggacggaaaattaatttcgttttttggcgttaatgtctggcaatctggttcatatctagtttacttcatgacggtgttggtagctgttttcgcagcgtatatcgcgctccagaagcagcgatag

SEQ ID NO: 26336 - DNA, 309 bp, Escherichia coli
atgcagattaataaagttatgtctttacttgatattcttaccagctggctcgaagacaatattaatatggagtctgacctgtttttcgataacgatgtagacaataccacctcagagtccctgtatcccgctgtggaaaaagctaacgctgtattgagcaaactggcgtcactgtcgtcagagacgattcaggcgacgcgtcagcgtttgcaggacgcggtagaaggcaaaggggaggtttcaactgctgacgtcaaagagttgctactggccacccgatatctgatgctgactacggatggagaataa

SEQ ID NO: 26337 - DNA, 492 bp, Escherichia coli
atgaccacattaacattcgaaattgctggggtaaaaaagctcctcgaagaactccgctcggcggaacggttcaatgcaaccattgaacagctttttgagccgtcaaattaccccggcggtactcctctcaacgaagagggcaaaacagaagtggaaatgaaccagacggggggaattttctggccatcatccaaacacattgacccggcccgcctgactccacagatccttctggtaaaagatcatggcgtctatctgattaccaatgcatctctggatggaacccctgtttcccgtgatacggttgtctatgcccgtgggatgaatccgtctgttgatgatgaatggtatgacgaggcagaggaggcattgggcggcgatgatagttcggtctctatcccggtggcgtggtttgaactcgctcttaaaaagaaatttaatgcttttagtatcaaagtatcccccacaaaaatcactctggtgaatggataa

SEQ ID NO: 26338 - DNA, 1254 bp, Escherichia coli
atgaatctaattgataagatcgcccttgtcggtcaacgcatgaagagcgagcagatctctctgaaagagtcattattggtctcttcgagggtttcggtatcggatgatagtgtagacggtgttgatcgcctaatctataaccactgcttgaataaaaaaaatctgtcagatttttttggtaaatctcgcgtaacttttaacaaaatcttagcggatcttgaagaaaaagaactggttggtgctcctatctaccagaacaaaaaccatctctatacccgctgggatgtccagaaaataatggatgctctgaactatcctcgatatagcgactactactgtagccgtacaatcgtaacgcagaaccataagggtggtacggggaagagtacaacttcaggcgttcttgcagttgcggcagcacttgatttgcatctaaacgcgcggatactgttgatcgaatgggacccacaagggtctattggaagcgggatgatccagagcgtagcggaagatgatgttttcctgactgctattgacgccatcttaggggtttacgaagaagactcagattacagaaaatatcttgatttagggtactcggaagaacaaattattgaaggtatgcctttttcaacacaccttccgaatcttgatgttattaccgcattccctacagatgcacgtttcaaagataaatactggcagtgttccagagaagaacgaactgagttattactacgttttaaagaggtaatcctgccggtcttgaagagcaagtacgacctgatcattatcgatactccaccagaagattcgccaatcacatgggcagcggatgaagctgctgatggcattttggttgccgtttcacctcgtgagtatgattatgcctcaacaactgatttcatgttgacgatcagtgagcgattcaaacaatcgccgagcaagggcgaaaatctaagctggttcaaagtgttggcagtgaatgtcgacgataagagtccctatgaaaagattgtcctggataaactggtaaggacagtgcaggaactctttatgtctgcaaatatcaaaaactcagaagcgtttaaagccgcagcttctaggggtagaaccgtattggatatcaaaaaatcagaagagctctgctctcccaaacagcttgatgttgccgaagaatccgtgatggcggtctaccagcaatttattaatgagattaagagtttttcagtgaagcaagggggtaatgtatga

SEQ ID NO: 26339 - DNA, 1008 bp, Escherichia coli
atgagtgatgagcagcatatcgggaacgacaaatcccgttatattaatgcgcctaagcgtactgaagtaatccatcgctccgggcttcaaggcctgaaaggtcagccacgcctgaagaaactttttacattacacaatgggcggaagcttgaggcggaacacatcattgttccggcggaaaaggtggaactggaaaccacagtacaccctctgaacccacgaaatcaggaggctctttctgtaaatgcagtaagagatattctgaaggacattgaagcaagaggtgttgatactgagggcgttgcagttaagcggaacggagtgtatctgctaatagaaggtagccgcaggcgtttctgttgcattcaatcagcaaaagaattgccattatgggttttgcctgatgatgttaacgcagatgatattaattccatcatatcagcaacacaaacttctcgacgcttttcatatcgtgaagtaggtttaaagtatttaagggaaatggaagagcatggatttgttaccaatgaagagcttgcaaactatcatggtatcagtcacgtgtccgtctctaagcgagttcaggctgcaaagattaacagcactcttattgcactttttcctgactatgaagctattccgaattcttattacaatcgcctattccgacttcaaaaatatatagagaagaatttattttctcttgaagaagttgttgagaatacacgtgaggaaattcgagatctggatatttctgatattgctgaagcacagaaaaccgtaatggagaagattacaacggtagttgaaaaacttgatattaaaccacctagcaaaggttgggatacacgtgaattggcaacttttactaataaagataaatatgcaagaattagcaaaagttcctcggggcgtaaaatccgttttgagtttaatagaatgaaccgagaattaattgacgaaattgagaagtttataaaatcaaaactgagcgaaatgaataattaa

SEQ ID NO: 26340 - DNA, 393 bp, Escherichia coli
atgaaatatatattgaccgttttgtgtatttttttctgccagactgcaagtgcttacccttatcgcatttacactgcccctgaaggtgcaattgtgaaaaatatacttactaatgaagtgatcgggaaaacaccggttgaagttgatgtcagcaatactgaagctggatcaactttcggaatttcaatgtatcgtcatgagaatgtagctattaaaattttcacagtaatgccaaatgcagaaaataattttactgtttctggtccagacgttgccactatgtctttaccgggtaaggccccgttaaacgtgaccaatgacagtaatgcagcagcggttcatatagatctaagaccttttctgtctgaaccggcccatcaccctgttcaataa

SEQ ID NO: 26341 - DNA, 318 bp, Escherichia coli
  misc_feature (282)..(291): n is a, c, g, or t
atgattagagtttcagcatttattcttaccttacttgtgactggatgtcagtcggttggaagcaaaattgcagtcctcccttcggtagggttcgaccctataatgagcaacagaactgaagcctacaccgacggaaaagttacttttctgattgagagttcaggcactgatgtctggttactcgccaagaatgggaccaaagaatttattgagttgtctgatctgaatctcggcgggagtcgttattgtccgatgacgctttcatgctgtggcgggttcccnnnnnnnnnnggtagttcaacggcatgttatgggtag

SEQ ID NO: 26342 - DNA, 840 bp, Escherichia coli
atgcttaaattagaactgataattttgccgttgctggcatttttaggtccatccaacattacaaatgcatcgactaaaaccccgataccgtcgtcccagctatctgatgccaaaactggggttaactatgaatttattactattgctgcaaattacgtcaacggaatgtggcttgttgatggtcgacaaagaccagtaattaaaacaagcatgactaagcgtaactatcttcagattgaaaacgactctgcttcaactcctttaaatcttgtaatacccaaaattgaattttccatcattgcaaaaaatggcgtgtttatatcaaaatttatctcccttgatgaagatgcatccgggaaacgaattctctggttagaacctggttccagcatgacaatttcattcgtcaatgatctatccagtaccccgttacaggcgttagtgtccgtaacaaagcagaaaaaagaggttattgccatttttggcccagatcagggtaaaaaattcaccctgcccctaccgtcagattcacaacaatcgtcaatcgactatgtcccctctccagaaatcgcattacgtatcaatgcccccaaaaaacttcaacccgctatcgcaatcccggaggacgctagtgcatctttattaccttcacatacctacaagatcagagcggcagaaaaagtaaggacttttaagttttcgtcgttcgtttgggttggaaagcgtaacaacctcctcggtggttcagattatttcagcaaagagttgaaaatttacccaggagaaaacttcgatatcagtaccatacagaaaacgactatgaggactgaaaatgattag

SEQ ID NO: 26343 - DNA, 948 bp, Escherichia coli
atggcatccgagcacgtccagacaattgatctgactaatttttcaggaagggttttctttctggcagaccctcatggtcattattcgacgctatgtaaccttatccattcgatatcagaacctgatgaggagttgatcgttttctccacaggaaatctcttcgattatggacctgagcctatggagttaatgacagcgatcaacacagggatttttgacggccgttctgttcgtgtgttctcagctgccggggccggagaagagatgctgaaaaagctcttacccataaataaagaccgcaggacttattatccaagcacatttcttaatgaacggtggtgtgcaagaggcgggcgatggcataaacaaattaaccgcaactatcttgaagaggaaatctgcaaactgctctccacccagctggctactgtgatgaaggtgctttttaaaggcaatatttctataggtatttgcccatccgattacacagacatacggcagggcttcaacaatacatataacgccctcctcgcttttaatcaggcaaatgtgaatatttttcagagtcagtttctatacggcatggatcacgcagtcaggccagtgaatgtcagcgatgtaaacctcgtagtattgggtcggaatccagttaacagcatcagaaaggcccatgggctaccgctgactaacttaccggtactcataggaaactgcctccacatcaatacaggttctctgtacatgtcagaaatcagtagcccagcactactggcaccaggtattccgcctactacagttccggcaataacactggtcgagttgatcctggcatctacaccgaccctgatttgccaccaaatgatcctgaataaaaacggtatttacacacaaaacactgcaccacttaacctggattcaaatgataataatatagaggccacattataa

SEQ ID NO: 26344 - DNA, 150 bp, Escherichia coli
atggagctagaaatcatttttcggtttccgagccgtatcaactgtaatgcacctcagttgttttatttttggtataaaaacgctgagcaaaatatagtttttgcgtgtgttgctcaggtgtacatgaatctagggttgtatctggattaa

SEQ ID NO: 26345 - DNA, 1035 bp, Escherichia coli
atgactgaattagcaaaaacaaaactggctgtggctgaatcaaactctactgaacttgagacactcaaagttgttattgatgatggtagtaaagcggcaaaactggtttgcactaacaatcaaggtgaccttgtacctttattgactcaaaatagtttcgttgcagatttccgggtaagccatgacggacttattccattcaattatctaattgatggtcttcaacgattctcgcaccacagcgaatcaagcaatgctttagaaactaccgacgttgcgcatcagtacgatgaaatcagtcgtcttaatgttcaccatgctctacattcctcaggtctaatgccacaggatgttcatctctacgtaactttgccactcagtcagttttataccgctctgggtgaaaccaataatgaaaacatccaacgaaaaaaagacaacctgatgaagccggtggagcgttatattgatggtaaacgtgtttcatttaatgttgtttcagttaccgttttcccggaatcccttccagcggtaacgcgtgctgatgaaatcgaatcaattgaatcttttgaatcaagcctggttatcgatttaggtgggacaacacttgatgttgcaagcattacaggtcagctggaacagatctccagtgtcaggggttttgaccgtattggttgctcaatcgtatatgatgaaatccgtcgttatttggattctgcaaagctgaatgcaagtaacgcctatattcatcacctagtcgataatcgtgaaaacaaagcctcgctcaaggtgtccccggaagatcttgacggcgtgttcaatgctgttaatggggctgtggcgcaacttcaagaaaaagtgattaaagcagtcactcaagtggaagaacggccgcataatgttttccttgttggtggaggttcttacctgattgaaccggcagttcgtaaacattttgacaaatcgaaaatcatcatggttgataatccgcaattcgcactttcactggctatcgcagatactgtttttgcatga

SEQ ID NO: 26346 - DNA, 525 bp, Escherichia coli
atgactaaaaaatctgagaaggaaaacgatcgtattcagattagtgcgttttggttatcggaacgacaatctccgtatgcatataattttttgaaaaaaaatgccctaacacatcgtggcgagcagatttctctaataagatctgcaatcactacggggttagtgctaaataatctcttccccgagttatctagttttattaatggactgaatgagagattaacagctgctgatctaaatcgattttttaatgatgaatttaataaagacaaattaaacaatgaaaatttgaaagaacaaataagctttatgcttgtaaatcccaaacctgagactttagagattttaacgccgattgagagcgcaaaaaagaatgattcaggtttaaatactagtcatggttctgctgctgttagcgcctcacaaagcgaaaacacggtgctgagtgaacatgcgcaaatccaaggtgtgacaaggaagccgaagaaaaaggccaatgcaaacctcgcaaatcttgcgaagtaa

SEQ ID NO: 26347 - DNA, 453 bp, Escherichia coli
atgttatcacgcaactcactaatacacggtttacgtcgagatcagttaatcgaagttctgtctatttctgaattcccagttgtcctggtcgagaatcccttcattcagcctaaatcaacaggcaaaaaaccagtcatttttaatattgatgaatttcatgtttccattgccccaatttcatcgcttaagtacgactgggagtgggctccaattgatacaatactcatcgaagtggtcattccgcctgctgaagcagacctggtaagcgccgagaatgatttccttcgcgatgcaggtattggccatattcaatgcgagcctggaggcgtttcgatacgccgtacagtgacatttgttggggggatcaccgccgacaatttgctgtatcaactcaggcttatgtgcgtaagtgctttacacttgattggagaggaactggaggatgaaagttaa

SEQ ID NO: 26348 - DNA, 435 bp, Escherichia coli
atgaaagttaattttaaaaaggtaatcccccttttaatggttggtttaacagtggcggggtcttactcgatctttaacgcaaaaccgtcgaagcctgacttgtacgattttactggcaaagttcttaaaaccacttctgttttccaaccttgtgataaagaatccacaccttcgttgaacatccagatagcagataacggaagcgtacatatcaatggcgttgcatcaaaagttacttttgttgagagagttccgggtaatgaaattgcagttaagtgtacgggtctgcaagtcaaaaattcccgccttgtgcatacgagctcttacaccatgataatttcggaaggaaaaggtggttttgttatttcggatttgacgcacacgcaggataatgaagttatgtccggtacatggttctttaagaagagagtatga

SEQ ID NO: 26349 - DNA, 558 bp, Escherichia coli
atgagcgatctgtcagcaactggtgcgaagcctcaacgggtcagagtattcagccaatctgtcgcgatggcattcgaagtaaatctcgacaaaagtcgctctgctgataattcggcgtttgtaactgagactgaaaagtattacctgtctctccagtttgctcctccgtctgacaatagggaatatggatggaattcagagggcagcattctcatgaaactatcccaaaacgaagccatggcgctggcatctgtttttctgagaattaagccgacactaaaatttgaaaagcgtaagaccacgcatcgcactcaccaagcctacaaaaatatcaatatcggacccaacgaccgtgggggccttttggtaagcgcaagcattgtaccggttaaaatggggacgtttaagcctttaaattataaccttcccgtaacacaaatggattgcgtttcaacaggcttgttcttgttggggttcctgacacttaaaatgccttgggtatcctcagaatcgataattaccgcccttcgcctatctgagtctaagagcggtcagtga

SEQ ID NO: 26350 - DNA, 4221 bp, Escherichia coli
atgatttccggaaaactccaggctgatatgcctgccgtcacgtttaatcccggcccgggcgattttgttgcattcgtcaacaataatacaattactgcttcaggtactggcaacgcatgcaatgtgacggttgatgatcgtgcgacatcaagcgtagataacttggtctgcttttttgaatggcttccaaatacctctggctttacagcaaacggattcaatttaacagggatacccaatgcggcaggagaactaaaactgccgtataaaatttcttatttttctggatcagaaaggcagaaagtagaagtggttaatggggagtatacagttaatgctcttgtaccggttaaaccgacgataacgggcctgaaatcgtctatgaatggagtggttcaggatggttacactcttaaatcctatcttaaggatgaagcaattaggaatgtcactgtctccgtagagcctcgcaattatgtgcaatatatctctatcgggtctggatcagcttgcgaagtcgcaattggtgggaatggctgcacgatcgatgttggaagcatcaaagtaagtgattcggatttgctgatgggttcacgggaaatcacggtcactgccaattcgaaaaataattactttgcccctcctgaagcgcagaagctaacgctgacctgggattaccgtcctcctgttgttgaccatactctctggaatttcacggatgaagctaaaacaataagtattggtggacaggagatctatacaggagctagaacggtggccgtagccgtcaaagtgcctcaggaagaaactgagggtgagtggtggttaccaaccgctatgacgctaacgatgaatcctgatggggtgtttaagccgacaacaaaagttactttagaagatggtacggttatcgactttaagcaatcctgggcaacaccgctacgtcgtactcttcagcccgtgagcgggccacagaaagtcggcgatgaatatctgtatatctttgacttaacagacttgacgaatggttcttatgccgcctcgttcacggtagagaacaatagcaagaatacctctacgtacaatgagcctgaaagcaaactgatgctttctgataacccaacactgatggtgcttaaggacggtgcagctctggccaaacgagctcctgtgtatttcttaaatgaaattattgttgccgcattccagggccaggccggagtcgcggatattaaagctgttacgatagataacaaacttgttgagctcacccccacgaaccacaaaggcatttattatctgccggttggggatgatctagaagtgaatgctgaccatgaaatcacggtcatagctgaaaacctgtacggcaagattgtgacatttaatactactttcacgtatcaaccaacaggattcacgcttaaaaactttgagaaagacatcacattgtactcacgagttcggcagtataccgatctcatgagtcagacggccggtgataaatgcactctctttactacagaagagaacgcactggcataccttgaatggtatggtgacaaatctgatatcaccgcctgttaccctcagtggaacaatgtgcctgacgggcttgaattttactttaaaggccggacgccaggcctgacagggttcttcaataaaacaggcgataacctgctcgactatcaggtctatatgataaacggcaagggctctaaagctgtatcgtccagaaaccgccatgtgctgattacgcagttaccttataacccggtccttacctacaagaaaaacaaggtgttgacggggattaacgataacaccgcactggcgtataccactggcggggaagcagctcgtctattggcaaaagtggttcctgctgatgtgacagtctatgtttcacaaaacgggggggaaagcgtaaaaacgacgtttaagaaccgttcatcaaataacgatgcaacgacgtttgttcaacgtcttaaagtggcatcagccccgttgtggacgaagaatgtcttcgacatagctgtcgagtactcgaaggaaccgactatgcgaaccgttgatacgctcaatgtgtatacggtacccgactttaacattagagcggcaatggaaattgaggacaaaaagactgctaccacgatggaattgccattgaaggtgtctgttggccgctataacaattcaacccgcaaaagttcatttagtcggacaacaatgggggactgggatgtaaccatttacgctcagaaaagtgtttatggaaaagatccagaaacaggccgatataaaacgacgtatgaacgtacacccctaaccgaagcactgcccgtgaatgatgccggggtggttgaaaccaagatcaagatagaaaatatggacctcgggaacgtgcgacttgtcgggattgctaaagtacgatcgcctttcgcagatttcgaactgacccgggaaaccagtgcagttagcatccgtgtttataagggcgaagagctagaaggtaatctctcaaagagtctgattatcggacgtatcccgctcagtacgcttgttaacttcaaatcggccagtacagctaactccgatgcgctggcgcctaccgagtggcaggagtcttctgataatggacagacatggactatgcttcaggacatgacagggaagcgaagcatttcgatcaggaaaactgaggttggtaaatggctttacagggcaaaaatgaccaacaagtttacgtcgaaagagtcttatagcgacgttctgacggttgtaacgtacaaacagcctaagctgagcatcgatgttgctgaaattctcgaaggcgatgatttgcctgtcacgctgctggataacgatgaaccaattccgcagggtacggccgaagtgatgtggtcggaggataaagtgaattgggttcagggtgacactacctataacgtatcggccgctgatacgctacctccgaccatttacgcccgaatgcgttacctggattctgatgagttggctgaagagtcatcctggaaagagacgtctgcccggttaaccgtcgctaaacccaagcgcctatctgtttcagtaagtggtatttcaagcgtcgaggtgggaagtaaagttactttagatggtaaatacactaacccgaacagccgattcaagaacggaaatgacgtcattgaagaatggactgcccctgacggacaaaaaatcagaggtgcgaatctgtcgataactttgactgagcagatgctggataagcaaggatatgcggcatttgaatacagtgcatggcttgctgacagtaaggacagtactatttccacgcggaaagtatctgttaaatcttgggtgtataagtttcctgagatgaaagtcagtacaaagcttaaatacaccatggccccgtcgaccttacatgttgcgctgagcggaataaaagacggtggctatcctggggtaacttattctcgggaatggatctacgataaggacaatatctcagttttaaaagatgatggtgatacgaaagaatttgcaattgcgaagccggggaaatatacgttggtaatcgttttccgtgataaccgtaacaacgaacagcgtattgaaaataccttcgtagtcgatgagcaaacgcccatgactgtagaaatgacaccgaaattctctaataagttcatgagggcgcctcttgatgtcacgctaagatctaacattaaactggcgcactctgctgacagtattgatactgtgacatacaaagtaaacggcgaggttgttcctggtagtaaaaactattgggctcagttaatttctggtcttactgagaagaaatacgaagtcacgctggatgttgtcagtaaaatgggccaaagaggtaccgcatcagttgattttgaggttgttaaaaacgcggctccgcaatgtgcattaagctacacagagtctaatatgagctggagtttcacaaacaaatgtattgacactgatggcaagctggttcgatatgaatggtatatcaatgatgagctaaggaatgttttcggcagcactgcgacactgtccaaaaaccttaatcgtgggaagcaagatatacgagttgtcgcgtatgatgatagtggggattcagcaactcagcgtacgaccgtttatggtccggatgagggcgcgtcaaagtccgtagattcagttgaaacctcgcagtaa

SEQ ID NO: 26351 - DNA, 513 bp, Escherichia coli
atgagagaatacatacctaagaagcgtggtttactgagttttgattggtacgtgccaataaatctcggaatcctgatactggttatgttgattttttttaatcgatttacgtttggtcatggactattaaatggatgtttacctgctgatttttacatgatcgatctgaaggataaatcggtaagttcagggaatatcatagcttttcatatgccaaaatcagtccgttttatacgtgaaaatgagaaggttattaaaattgtggcaggagtcggcggagatcgcctgagggtcacattggatggtgtttataatgggaacaaattttataaagccaatgccagacgtatttctgtgaaatacggcatacctgccgagaccattgaaagagaattaactattccggaaggggaggtctttttaattgggcaaacggaccactcatgggactcacgtttttgggggccggttaagttgacttcagttattgggaaaacatatgcgatcttttga

SEQ ID NO: 26352 - DNA, 1509 bp, Escherichia coli
atgcgatcttttgaattaaaaacaactattaagcctctggcctcctgtctggcattttacgccttaatatccaccgctgtggctagcccccagtatcaacaggttgctgatgacattgcaaggcaagctcaggttctgggcgcccaaataccggtaccacacgcatcagaaggtccgctcccgtctggttctctggattctcctgataccaagaaatacatccgccaggccgaagctatgaagaaaaacggggacctcagtcagcaaacaaatcgcggttatgtcccgggtatgaatgctgacagtgtgcaggcagttatagaccatacgcaggctatccgcgctcagagtaataactcggaagcagttaacgacatcattcgcagacgtgatgagattcagggaaattcacagctcagcgagtctgcactgaaatccgtcgaaaataaaccagaagttatgcgcagtcagtcttcgaatatcgaaaagatgtttggttcatcaggaatcaccgccgctgacttcgagcgtaaaatagacagcagtcgggaagaggtgctctcgacagaaaacggtatcactatctttgcgtcatttagcttgcctgattacgtcctggaagatctactccgtaccgcgtcagaacataaggcgagagtggtttttaatggtctgaagaaaggcactacacgcctccctgaaactcaggcagctatcaaccagctggtggtgaaggggaagtttgactccccactaattacgattgacccggacgcatttaaccagtaccagatcacgcaggtcccgacaataatctcccgtgagcaatcccggtttgcaaaaatggtcggctctttcaacgttgatttcttccagcgcgaactggccagaaaacccgaccaagatcttttcccgattgctggtacgacctatccggttgaagagaagagcattattaaagagctcgaagagcgagcacagaaatacgactgggacggcgccaagaagagagcagtcgctgatacctggaaaaaccagtacatggttaatctgcctcccgctcaagagcacaaggaatggctaatcgacccgacaatcagggttactcaggacgttaaagataagcagggtcgcgtcattgcttctgctggcgagctcattaacccactggccaggttcccgcagaacctcacaatgataatttttgacccaatgaacccagggcaacttgagtgggcagagaagcaatatcgccagcgtcttggcagcggtcaggtgatgccgatgttcacgcgcatcaaacaggaaaatggatgggatcatttgaatgatctgcgcgaaaaattcaatgggaaggtgttcaaagttaatgagcaaattattgctcgtttccagataaaaaacacgccagcgctgatctccactgaaaaagagaaattccgtataacgcaattcagtgaagctgaaatacgtggtattggaacaaaaatcgcggcagaggagaattga

SEQ ID NO: 26353 - DNA, 132 bp, Escherichia coli
atgaaaataggatttatttttggggcgctgctggccacttggctgacgctaacttacccggaccagatgagagagtgttttaacaaagtggttgcgtatatggaaagcgtgacaacattcattactaaatag

SEQ ID NO: 26354 - DNA, 705 bp, Escherichia coli
atgctgcaaaaatcacagttcgacatcggcaagagcaatactaaccagcctatgaccgcaacagaagccggattctacgacgtacatctctgggaattcccaatcatgacgatgttgaaattgctggttattggtgaatgtacagcagaaccttatgttgatgccagtctgacgtatatcagcgaagtagatccgatgtgggaaagtgacctattgacgctcgtgctaaaccccgaagctgtggtatttgcaaaccctatcgcctcaatggtatgtgcagctgactgcgtggccgtgactgccgggaaggataatttggctgcatatttttgtgccgggtgtgatgggaacctttatccgttaactggacacatctatgcgaatgatgatgccgtcagaaccagctcacttataactcagcgtctactgacgaagttacataggcagggaatgcttatgagaacaatgggagctgacgcaatgtgtgaaaaaacgtgggaatacttcactcctcgatctcaataccgactttcaatgctttacccaacgccggaggcgaatggtccggattgctgtcatcgcctaggcgattctgtccatgactggtcaacgcttaaaggtggacggaaaaaaatcggcatagataactatgtttacatgctgtggcgctataatgattgctgcgtcaggtatatacccaactaa

SEQ ID NO: 26355 - DNA, 3177 bp, Escherichia coli
atgaaacatagaaaaataatttcttcagcaattattgcgtctatgatagctaatactatgagttgggcattttacgtttcgctcataaacattgcgttaacgcctaaaatatttgcggcagatgcgatttttgaccagcttgaaaacaattttaaccttgccaatcccaacgccaaccggaacgcaaccaccagtgctcaggatattgtggaaaagtataaaaatgctgattccggggaaaatctgagcggcaaaatttccgagaaatatgttggtaaagcagagtcaacaaacctaaatgttgggaagtacgggacgccgaactcaaatgaaagtgttatgagtaatgcggtgtccgacgggaaatcgatcggtaaggctgtacaattacctagcatgtcgggcggtacaattaactcgaattatacgaaagagggggcaaagttactttctagggacagcagcggtaatattggaataagtaacaacccgaatacaacggcaggtaccaaaaccagtacaggggaactattcagctcagagcagaagcacagtgatgttcagttcaatgctggtggccggtatggagatgaaaatggcttcatcaatgacatcaaaaatcgaaaaagtcagctgtttgaagcgcaaagttatgatggagtcgcctaccgtactctggtgaatgcaaataaagaaaacccagcatctactattaaacctaacgaccctatgttcaatgcgggtcgtaacgaaataggaaatgctgtagctggtacaggaaactggctacagaattgtaatacggaaacatcaaaacaaacaattactacgcactatccagattacaaagagttttactgcaattcacccaagaaagataattttaacagttgcacgataactcgtgatttttccgtgccggtttatatctcaggtggtaatggtgatatgtccatgtgcggagataattgtgtgagagtctggtttggcagaagggacgacaactattggaacgatggagtctatgacaactcattaaccttaaaattccatccagatgcaaagctcgcaactgcgaaaataattaacgcagagtgggatgaccatatgagggtcacgcttgatggtacacagatttttgctcatatagatggagcatatagaagtagcaattatccatctccacaaggtcaatgggagttaaagaaatcctggaagctcgataaagtctacgatattactgaacaagtaaaaacctctgtatatcaggagcaggatcgtgaagtgactatggcttcgcgcgtatgggttggcggtggtggggaaggctattttgaagttgagatgacttttgaaaatatgaagttggaggataaacatatacaggagcccgcaggatgttttgatgcagtacaaacgccgaattcattctgtcggtttgacaggtttgtcaacatggatgttggtacaaagcgactcccggaaagtgtgcttaagatggccacaccgctttacaaaggtgatacaggatacttaacctggaaaacaaaccttgaaggctatttctgtgatcccctggcgaaggaaaaactgtgctcttatgatgcgaagggaaacatcatgaaagaccccacaggcaaagacctttgctacaactacgacgatataaaaaatatgcctgacgcatgcagcacatataaaaatgatgctgcgtgtgtgctagataatcagacatgtgctgaaggttggttcgatgaaggcacaaatacttgctacatgtatgagcagaaatatacatgtgacagagggaaagacgtagtcagagaggtagagtcacagactaactcctgtgtaggtatgatcccatgttctggcggaacatgtgaaacaggcccaaaagaagaaaacaaagattttgggaaagtggccgcgtactccaatatggttcagtacatgcaaggtgaagcaaaatgcgaagatccaaacgaccctaactcctgctctgtctttgaagggaaagcagagtggtgcggcaggtccgttggttttgtgaacggactggccaaaacagattgctgcgaaaagccgcagggtgctgctgggtcactggaggcgataatgctggccgggtcgatgatccgaaacacgaactggacccgagtgaatgctcaactggtaaactggactggaggggagagcggaacctgggcatcaatggctaactcagtgggtgaatggactgcatcggcaggtaaaactgtcggacaaatgtggaacaatgtgaccagttcaataaccagcgtttacgaaaacgtggccggtaaccttggccgaacagtaggatcatccgctgctggtgaaagtggtcagcttgctaaggagactatgagttcattcgggcttggtaaacttaagcagatggccatggaaaaagcctatgacctgcttcccgatacagttcgagacttcgtatttaaaaatgtagcgacaacgggtggagaaatagtcttttctgctgctgttcaaaactttatgcttgcattaaatgtaatcggctggatttatacggcatatcaagtcacaaaaatgctgcttgaaatgctggtggcctgcgatcaaaaagaaatggaagcatctattcacaaaaatcagaaatcctgttttacactggatacaaaccgttgtgttaaatatctgaatctgggatttacaaagaaatgtgttaaaaaagcaacagacatgtgctgttacaattcaatgttatctcgcgttattatgcagcaggcctacccgcagcttggaatagacccggttacttcaaactgcgttggcttatcaatagggcagatccaaaagttagattttgacaagattgatttaacagaatggattaacgatgctgttcaggtcggagaagtaccggaccagtacgctacattctcagaatcgtcaataacagcaaatttgccatttaaaaacgagaattatcaacttccatcagaaagaacaaaagatgcaatgggaggagaggagaatatgataaaagccagacaggaaaacgctcaggccattaaagaggagaacgtagactgtagctatcttccacgccctgcgatttgtgaagttgggtcaacttatgtagatccaattacaggtaaggaaataccaaaatattaa

SEQ ID NO: 26356 - DNA, 987 bp, Escherichia coli
atgacaactcaatccagctcaatacaatacgcttacgcgctagacggcgagggcaccctcacgcacattggcgctgccctgcgctcacatacttacacctgcccaggttgtaagagccccctgaccccggtaatgggcgagttcaacgctaagcactttcgccattcggaagaatgctgtgcccttgaaacctatcttcacaagtgcggcaaagaagcattcttctatcgctaccaacaagctctcagccgtgaaatgcctattagccttgagctggagcgccgggttgcctgtaatggttctcatttagccttggttagagacgaagcacgtcagtgcgtaaaatccgtgcctgcacgctacaacttgactcaatttttcgatcaggcagagctggaaaaacacgataaggtcacagggctgcgaccagacgtgatgttgtatgatacgactggcgaaaggcgttgctacgtagagatttgtgtcacacacccctgctctcaagacaagatcgaagccggtatcccgattcttgagtttaaggtccaatctgcctctgatattcagatgttgcttaccggggcctactcgatcaaggagaagatcctgagagtattcaactggcttcccccgtttcaatctgtggacacctgtagcggcgtctgctcagtaggtaacgtgtatatgtctgtctggagtttaagtggttccggccgactctacgaacaaacgatgccgctcgctgaagtggatttaacaatcaattctgacgtgaacacatggcctagatcgttaggggccgctgagctggctgataacttacgagcttttatccgtcacgccgatcctcattcactatttcccaactgcattatgtgcgagcaagcaggccgatgggaggatggctatctgcaatgtcacagtaaggcaaagatcgttccctacaccgaggcccgtcagtgcgccaattacaaggttaaggcatga

SEQ ID NO: 26357 - DNA, 2040 bp, Escherichia coli
atgaccaaaagactgacttgggagcagaaaagtattgtcaaccatgacaccggacatgcgttggtaaaagccgtacctggtagcgggaaaacaaccacacttgtaaagcgcgttgagcggctggtcaagacgggaactgatcctcgctccattctgatcctgatgtacaacaagtcggcgcaggtgagcttcacggagaagttgaagacggcactgatgtcgagcgtgattccagaaatccgcacgttccacagcttggccttaaagattgttggttacggagaacgccaacagataatcaagaagaaagacctcattactccaagcgactaccgctatgagcaactggtaaagcaagcctaccgctatggctttgaccatgaggcgaattatattgaccccaatgaaattgaaaacttcgagctgtttattgctcgctgccgggcggcggccgtaactcctgttgatgctgccaatgatccaacgttcagcaacatcaaacgggggtttattcacgcctatggccgctattgtgagctgctggaggaaaacagtctgcgaacctttgatgactgtttgattgaggctgtcgcactgttgcgtaatgacagcagccttggtgcccacttcaagcacatcattgttgatgaatatcaggacgttaacctgatacagcatgacatgacccgcttgctatctaagtcggatacgtcggttatggctgttggtgatgttaaccagtgtatttatgagtggcgtggtgctcgaccagactttatcggcggactgtttgaaaggcactacccgaatacgaaggtgtttcaactgtcatgcacgttcagatttggccatgagctttccttgatggctaactcggtaattcggcgcaactctacaaagctgaccaagctttgtgtcagtcatcctagcacccccaaaacagaggtcagattgcactttgataactgcctatccaaggtgctatcaaacctctcggtgagcagtggaacacaagccatattgtcccgcactaaggcgaaccttgctgaggcggaaattgttttacgcctgtgtgggctaccttatcgctacctcaatggttcaagcgcattacacacccgcaccgaaatcgggatactggtagttggcgtcttgctgtctgtgtacggcgatctgcggctactggaaaaccatcccaacaaacaagcgattgtttacggctttctgaaggaggctggttttagctggcagaaagggcaattcaaagcggcgctcagtggattgatggctccgcacgccgacctatggtctgctctaggtcagttattcgagggcgcacaataccaaaaagatcggctgggcaggctcgccactatctgccagaaagacggagaggaaacgcctgctatcgatgtgttacgacgcctgagtatggagggtttcattgatagtgttggctctgagggtgtaactcgcactggatcgaacgaccagcaacgaggggtcgtgaggatcggggagctacttgactccagtaagatcgattcccgcacgtttttaaaccttatcttgaatccaggcgaggctgctactgactgcgatcccttcatcctttccacactgcatggttccaaggggctggagtgggataacgtaatactgatcgggctgaatgagcaggaatttcctggcggcaaacccgatgatgtttacagcgttcgcacatcgatgaacacccctccggccgaagaggaaatcgaggaggaacgtcggctgttttatgtcggtatcactcgcacaaaacagcagctaaatctggtggtccctcttgatgaagggcttgcgcggtggctcaaaaaccgctgggatagcaccccgaagaagtcaccgatagctactcgcttcgtctatgaggctggctggactgcttgtgctgttaccagtgatgcgatctataacagcacggtagagaaacagaaggctgacttcagcaagtttcaccaatggtatctaagagatcttcagcggctaaaagtctag

SEQ ID NO: 26358 - DNA, 240 bp, Escherichia coli
atggcagagttcgtaggttcggctgcttcgcaagctgatttcatttggaagaacgcggaagacctgtggggggatttcaagcataccgacttcggcaagatcattttgccgtttactctgctgcgtcgattggagtgcgcactggagtctacacgggaagcatcgctcgatagccaaccagccacgattgagttcttagaagcagagttcagtgttgatttcgatgcgctgctatcttga

SEQ ID NO: 26359 - DNA, 873 bp, Escherichia coli
atgaaaaataaacggtttgtatccttggtttcagctttagttgcaagtgcgtctctggtagggtgtgctgggaacgcaggtcaatcccctaactccgcccagcacagcgacactcatgggctctactggcatgctaacgcaaaagattctgtagccaaaaatgcttactctctggccgggtttgacgtttcttttaatgaggaaactgttcagccaggtggtgatgcagataacttcctttccaaactcttgattagcggctctatgggatatgtgacaggcggtctcagcggattaagcattatgagtttgggctctctatacagctcctctgacgccgaatacattcaggttaaccagtatgttgtctttgtcccgaacccgaagaaacttccttataacgatgaaagcctagttcgtgccggtgctgcgtatgtttacaatcacaccaaagagtcacaggtaatgctcggattcaacccatcgaagcaaagtgcagctctggcgtcctgcaagattgatagggcggtcatcaataaatggagtacatgcgagctcacttcaaaaccagctcctgacgtaatgccaactaattccatgtacagcttccaggctattcgccctgcgactggaactgaaatcccccaacttaatctacctgccggtgagtattcagttattcgttacgtgttcattccatttaaaggcaatgagtcaagcaataatttctcaggtattattttccgttctgatagtccaaagttcaccatgccaggcggcgcagctgcttcaattaatgggaaagactattacctcttctctggtgagtatggtcagaaaggattcccggaaaaaactctgaaatcaaaataa

SEQ ID NO: 26360 - DNA, 1785 bp, Escherichia coli
atgggtaaaccaacagatgagcaaagggtcatcattgaaaatgcaaatgctaataatatggttattgcagcaccgggatctggaaagtcattcacgatgatagaggcggtgatctctatcctcaggcagttcccttatgccaaagtggggatggtcacatttacccgtgcagcaacaaattcattggctgaaaaactgaaacgtcgattaagtaagaaagaccaggatagggtgctggtcaatacattccacggctttatccggatgcaactggatatggtcaactggaagggcaagatgttgattagctcggcacagcgttctgtaattcacagggcattgaaggagtccggcgcgccttttcgatacccggatgcagaatttgctattgacgcgattggaagggaaatggatacggacatcatttcagttcgccatacgcggcaacaaatccacttgttcaacacctatcaggcaatatgtcagaaagaccacgttgcagatttgaatgcactctcacgttttgttgtgggccagatgtactcggggaaaatgcagccacttaacttgacacatttagttgtagatgaagttcaggataccgactcgattcagtatgcctggatctcactacatacgagggcaggtgttaacactagcatcgttggggatgatgatcaggcaatttattcattcagggcatcaggtggagtcaaaatattccagcagtttgaaaaacaattcaggcccaacatattttatttgaatacttgtttcagatgtgaaccagagattttgaaggtagcaggggcattgattgaaaaaaatgtttacagatacgctaaagatctccgttcagctaagggcggtgggggaaaagttcatttccgctcatatgttgatatggatgagcaaattcaaggcattctcaatctgattaaccaagacccgattgggtgggcaatcctcagcagaggtaatgcacatctcgatcagcttgaaagcctgatagagcagccggtacttcgttatggtgggaagtcattttgggatgaaaaggagacaagcgatgtattgcatttgatggcattcttccgacattccaacgatgtccggttaatgaagagggtgctggcgcttttcggtgaaaatgaagaggtcttggaccagacagcattgagcatgaaaggaagaaaagtaacttttggtgaactgaacatcccgaatgaaagttccctggaaacaagaacgcttcattcaaacttcacccggtttacacaggagactcgggaaaaggttgaaatagaaaaaaggttcgcaaatctgattaagtggatggagttgtcgtcgataaaaatgaggacgcagaaaggatcaccatcactgagcagaattgcgctggatacctgtaagcaatgggccgaaaagacaggctggcaaaatatgataaatcgagctgcggcgatgtgtctggggccaaagaagaaggatgaggaatatacaccggataaagtagttttatcgacgttgcacggttcgaagggtcttgaatggaaaaatgtaattattatgagttgtaatgcagatcagattccaagtaagcggtcagtggggcaggaggcgattgaagaagaaagacgactgctttttgttgggtttacacgagcagagcaacagctgcatgtaatgtggtacggtgatccgtctttctttttaagcgaatgtgctgaagataaattgaaagaggctgcgaaaagtagaacagaatcccctttgacagaataa

SEQ ID NO: 26361 - DNA, 876 bp, Escherichia coli
atgtctaaaagtaaagcacgcagtaaagctcttctcatcgccttcgctgatctgatcccagatatggataaggtggttaacaagaagttattggattctctgaatgtttattcagggcatgataatgaccttattgttattatgaatgaagatggtccaaccataattgaactgaattctttgaaatcagtttcaatgctggctcaaaagctttctgctttttctacttattatcatgtggaaatgcagcaaattcttgtcaatccaattgactttgagaaagcttacacacttctcaaagaagcacctgcaattccaatgtttaaaactttagccgatctggataagttcttaaatgaagagtttgaaaagtacgggttgaacacatttcttgatgtggataaccttgattattcactcgctaaatccagagagttaaaaaatgatcagttggttgcctgggtttctgaaattattgagaagcgcgagaaattagcattgcgtaatcgatttaatgaagtgaccaaagcacattatgaaactgtagatgcaatgtatgcagccgttcgcccattaatgaaagagttaggttttcctgatgaactcatgttacacacctttagtgaattgagcgttttcgattccaaaggctgggattatgctatcaagtcgaaaattgagtttctcactaaacgcgaggagcaatgtttagattatcaaatgaaagcagataaacggcaagcgacagttgatgaactcttggcacaaatcaataacgctaaaacggtaaaagcaccaagatcttttggtcagctgtttggcttttctgttattgccatgatgacatttatgttcattgtaaacaaatttatctaa

SEQ ID NO: 26362 - DNA, 378 bp, Escherichia coli
atgtcatatcttgaatatgttaatgaagtaaaagtgtccgggatagttatcagtgcaatggagaaagaaatgactagcggaaacgttgggttattgataaagctcaaaaacagaatgaaaactgaaattaatggtgaaattactgagagagaattttcgattcaaatcaaagtatcaccagagatgtattcaggctgtttcactggtataaatcaaggtgatgagttaatggtctccggttatcttgttgtggataccatcacattggaagggagagagcatcctcttgactacatgagagtagttgcaacaagtaagttagctcacatacctaaacctcctaagggttttgggcaaagtagctttagacagatctga

SEQ ID NO: 26363 - DNA, 987 bp, Escherichia coli
atgaaacaaaaaataaggccgactgcattttgcagtaagcaaatggattttttctctatattcgattttgaagaagaggaaaaagaaataataactatagttgagtctccacttgactatataaatgatgcaatagccgcacaacaaagtattcaatcagaagataaacattcaggcccggaactggagcctagtgtgtcggaagatgttgctttgcctggtaattgtcccaaactactcaaaaatcaaattctgcatgacattagttttgctgcggaaactgattatctcttcactctagaagagtacagtgcggagttaggtggtctggtttttgactgggcccctgaagatgtatatcagttatacgtcgtcgcaatggaagagtcgttggaaaacgtaaggcatctcgtcattacaaaatcactctattccactgatgaattcggtaacataaccgtgaatccgcttcttgaagccgaaacacggtggtatatgtcgaaatcatttgagcttacatgtgccactcatggtattgatgctattgagttcaggtcagagcttaaaaaaagcttatatgaatatacgcacagttacggaggtgaaaatgctgaattagctcgttatcatcaagataaagaggttattctgcatgattgtaaggaagagatgggatgggatatctttttcgaacaggactatttgttgcaagaaaacaaactggcaatgaaatggactgatcgggatataatggatgtctattctaaagtatttaaatcaacaattaatttgtttgaaaaacttgtcgttaataacaagttaaccttaagagatacttttggttgggtaatcgtaaaccctacatttgaacgccagtttgaatggattgagtcagaagtattcgaaatcgtaggaactcatcttggttacaacgttgccgctatcagaacacagatggcgaccgcgtgtaggatgactttccactaa

SEQ ID NO: 26364 - DNA, 1053 bp, Escherichia coli
atgactaacgccgcaactgtattaaaatccgacaattccgtacaggaagaaatcattggtaatctgttacccgcaaatgttatatcaagtaagatgtttgcgaataaagaacagtattatcttgtcaaagcaaaagatttatttggcattcctgagatggatgaggatatgattgttccagtgtttaaaaagttttctccatatcgtgcgaatctgaataaggactatataccaaattctcgaatacttgagcaagtagtaaaattgcttgtaagtaacgatatagatttgagtgtatgcctgaaaggagaatctggatcaggtaagactgaaatggcaatgtatattagccatatgctgaactggccgctaaccataaagcaaatcaacagcaatattcgcgctgatgagctggaaggtgagcgtagtcttattaacggtaacaccagttttgtgcctagcgagcttgtaacggcatttcaggaaggccacctcattcttctggatgaagtggacaagattgaccctgatactgccgcaaagcttcatatgcctatagagcgaaagccctggtcactagctgccaacggtggcgaagtggttaaggcaaataagtttacgcggtttatgggtacttcaaacacaaacatgagtgggggatctcgtaagttcgtttcatcgcagcggcaggatgcagcgtttatcaagcgcttcctgattgtggagatggaaaggccttcagaggttgcattaaccaacgttttgcttaaacgctacaataacctgcctatgctggtaattgaaaaattcgtttcggtagccgttgcagtaaacaacacaggaactgacgacagtgtaatggatatacgccagcttgtggcatgggttggaacgtcaatgacgttaaagaccatgtccttactggatacatttaaaattgcttttgcgtcggctctgcctgcacatgccactggtatggtgttggaagccatcgacttaattctcggtgacgacaagaaccgtacaatggagtattacactgcaaaaaagtag

SEQ ID NO: 26365 - DNA, 270 bp, Escherichia coli
gtgacagactttgctcatcttacgttttacggttttctgagtgcaaacggaactgaaactttcgtgattgcacaagatggaaatcaatatataggtctgaagcagcataataatgactattcatttatttgttatgaagtctgtaacaaagatatggaagccatgattaagggccttgaatcaaaaggattcatgtatcaagggagcattcaatcggcggatgtcgaaaatgaatttcctggaattcttttaacaacacttgaaaagtaa

SEQ ID NO: 26366 - DNA, 1128 bp, Escherichia coli
atgactttcaatacttctaaacttaataaagtttctgcaaaggaaatcagtgaaaactttataaaagcatatcctgacttgcaggaaggtgctgttataacaaaaattgaaattagtgggtgtcagggctctcggcgaactgataaaatcgaactgtcctatggcggtgatgatataacagaccagaagagcgtgtctaaaagcgaagttcgctggatagacataaaggcactgagtttcaaaagcactatcactagtcgaatttcaaccctttgttcacggttgtgcatccgctatagcaatatgtggatactgccagttgaaaggatggaggagtttctcgaagaggcacaagaaatcgaacgtgaatttcaagccggtatccagaacgtggttgataactatgacactcatattcaggctgagaaagatcgcagtccgttgatgtcagatttaattgaccagttgaaattgactaaagatgattttgttaaatcattccggtttaatctggcacatttcattccgttttcaccgattagtgtggagggggatgaaacgcaggacttttatcaagaacaactgataactgacttggccgatgaagctatgaaggtttatacaaaaatcagcaaaaatgataatttgcgttccagcacgattgaccgattaaagcagatgcaggataaaataattagcttcatgttcattcataaagaggctgttgttcttgcagaagctattaagcatatcatgaataatttaccaaaaggtgccatttcttctccccgtgatgttgcggtattaaagcagtggttctatttcatgagcgatgcgtcaatgctgaaacgtattatctccggtgaacaaaaggtaaccgactggctggattccataacccggtcattcaatatcgattcacaggttacagcggctaactctctgaatactgctgaggatgatgttttttcttcagcaaatgttttcagagaagacccggttgaagatcttgagaacaaggcagtgaatgcacctgagcctgctgttggccctgatgaagatgtttctattcaggccagtggtagtaatagagcatttgactgcgaactcgaattgaccggttggtaa

SEQ ID NO: 26367 - DNA, 2013 bp, Escherichia coli
atgaaatttgatttaaaatcttcaccacgccatattcaacgcctgacgaatatagccagcgtgataagcggtataaatgggatttatgtaattattgacaataaggtgagtacaccttatttcaacacccaaaacaatgtctgtgttttacctaacggtgattatagcgatgagagatttgtcaagctaattgaaggattcatatgtcatgaagcaggacacggtcgttatacagagcatgaagtataccgtgaagcttttgttggagaattgatcaatgcagatggcttcatcagtattgatgatgacttgaaggctgattttcaaaacctaaaacaaaagcaaaaagcatatgctcgtgcttgtcgactaaaaggacttattaatctttttgatgatgtccagatggaagagaagacgggtattgattatcaggaggcaaaaaaacgcctcgcggtgacttatgccttgatggttgaagctgggcgtatgacggttgatatttcttcaacccctcaaaacccggttcagtttattgaaatgtacctgcttaatacattgcgggttaacgttctccaacaagaagggcataaagaaacgcttgacccatttttcgattatgcaaagaaaatccttgcacctgtaacttcagaagtcgatgagatcattcatcaagctctaagttgcaaaagtacgcaaaattgcgattctctggcgcgtaaaactctggctcttttagagcgtttaagggatgaagcaaaagagaaacagcaagaagaggagcagtcgaaagacccgcatgacgatacagatgaatcatctggctctgagaatgaacctgataccgaacccaatggtgatagccagggtgaaggggatggtgataaagaaggtcaaggcgatgattctggtgatggtaaggcgcctgcggaaggtaatgggttaccggaccaatccggaggggatgaacaaaatgctgagaactctaacggcgaacctgatggtgagtctgaaggtgatgaatcggcgacccccggctcggatgatgctgactcgacaccttccctaaacgacagttcaaatggaaattcttctgatggggaaagtaacttttctcctgaacagtgggatatgcttgccaaattgctggatgattttttaaacagtgatgaggaaagcgaggattttcatgaggttcttgcaaaagagatctccgtaattgctgccagtgtgtcggatgaggttaaagctgaatttggtgcaagtgagtgggatgttccagatttgaacattgatctgaatgtctacaatgaagcattaaatatcagccagacccttggggcagatttatctgttttacagcaggtaaaaatgcgtggtcaatttaaaacccgtgatagaggcttgtcattcgatattaatcgactgatccagtctccgatgggtgttagggatgtatttcggtcacaaagcgaatctaaaaaccggggccacgtcggcttggtcattgttcgtgatatttcaggttcaatgagtctggaacaccgttatatccatgcaattaagactgaccttgcattaactctggcaattgaagctatttcaaaaatgcatgttgctaatgtgatttatccgtttgtagacaaagattttgaagttatcaaaacgtttgatgaaaacgcggaagagaaactttcaaaattctcacttggctgcaagggcaataataccccaacgggttctgcattaaatgctgctttagagttgttacttgaaagccagtttgacaggaaaattgttttccttattactgatggttatccgactgagtcggcttacaccattaatgatgttttttcagttgctgaaagtaacggcattgaaatcgctggtgttggtattaaaactgatgtgttgatgggttttaatgagggcaccttcgtaaatgttgatgatatttctttattgccgaatgaggtcagtaaattagtacatcaaattctatctaattaa

SEQ ID NO: 26368 - DNA, 222 bp, Escherichia coli
atgactcagataaagacttaccgtgtcgagtatgaaaaagtcgggacgatgcatcgtgtccgtatttttggtcgcatgggtgaaattgtcaaaagtgaattgccagaagaaagaattctccgggatgtatctataccagagggtaatggagaaatggcaacgtcaatggttgatggttttatccagcgtcttgaaaatatcggcttcaagactgaagcgtaa

SEQ ID NO: 26369 - DNA, 1233 bp, Escherichia coli
atgacttatgcatcccaggctgttaagcgtacaccacatgaagtcactgaccactttataaaaatggttcacgctcgtatagcggaagtatcaggctggcgctatgtattcgatagaataccggcatttaaagacgcttgtgataaagcacctggccaggttccttgcccatttagtggggtcgggaaatcaaagttccggttccgtaaaaaggacctctttaccggttgtgccattcacaatgattttccagtgaatgcattttgtgacggtattgatgtattggcagagtactacaagctgagcaagacccagacttgtaagaagatcctgactgatttctttgggatggatttgtacgctccattaactgatgcggatctcgaaagtgaacgtcgttataaatcaacagttcgtgcaaccgaaacgcttgacagcgatgaagttgaaaaacgagggcgtaaacttgaagtgatatatcactataccggtgaaatcaaacctgagagccctgtgtgggtgtatctccgaaatcgaggtcttaatcgagttctgagcaaccttcccaaggatttaggtctgaacaaacgactttactacatggataagtcactggaaaaacccacgatttacccgggaatgatcgcaatttatcgcgatacccgtgggcgtcctctgacaatccacagaacgttcgtcgagttaaatggtgataaggcacatgttgagaatccgaaactgatgatgaaaccgcctgccgatatgactggcggctcaattcagctgtacgatccacacttcaatccaggtacccgtacctggacgttaggtgtggctgaaggcatagaaaacgcgctgtcagttactgaagcgacttcaacaccgtgctgggccgcgagctctgcctggtgccttgaaaacgttgaagtgccggatagtctcctgcctccccctggtgtgaaagtaatacagttttacatctgggcggataaggatcttgtgaatacaaaaggcacttccccgggaatggagtcagctaaacgacttcaggaacgtatgaaagagttttttgcaaagcgatatcccacttcagagctgacaattaaagtctttgaacctgatttcgatattcctgtagggaagaaaggagtcgactggaacgatgtactaaaattaacaggaccggatggattccccgtaaaatgggctcctgaatgtcttgctcagctttaa

SEQ ID NO: 26370 - DNA, 525 bp, Escherichia coli
atgaatattgaaaatcaagatttatttaatacgttcgctgctgtgatttcatctcatatcgttgagcaaccatcttcgtgttattaccttcatgataatgaaattgacttcacgattttaaaacacagcataatagataaagacaaaaacctgttgtacgttattcgtccttcaggaacctgtttgttgcgttgtgataaatacttctttccgaattactatcttacaagtcgtggagattataaagcatttaagtatgtgcattttaatcttgcaacacgagaagcggaagaaatcacctggcagcaagcttttgaaattttgtccaagccgggaagacctccattaagaggttcacttggtaaatttgattatttaaaacttgttattgatgatcttcgtgcgcgagggtatgccgatttccttccagcatacaaccttgatggccttcgtcactttgcagtaaaggatgagcgaccatcacttgtcagttatatcgacaatgtcatggcactttgcgcataa

SEQ ID NO: 26371 - DNA, 879 bp, Escherichia coli
atgaaattagctacagatctggtcaatgcggttctgataaagaatggcattgtaccaacttccattaatgagttgcctgtaacgtcgctggtaaagccattgacacaagtgcatctcagcctgtatctgaaaacaacgcatttatctcagttcgtccctgactacgttgagtctctgaaagattgtccggtttcgtatgatatcggccttgaacttcagcagtgtatcaacagtgctgaattgctctgtgaagacatggagtcacttgagtttatctctgtatggatagagctctatacgtgtaattcaaagcaacagcggtttgagaaaagtaacttttcttttcgaactgaagatatcgagctggctaagatgctgtcttgctcgcatgaaatcttaataagtcaggcggcttgtttctggcttttgtattttgaagatttcatgaaatatgttcgtaataggctctgtgcattactcagacaggttttaattttgattgcaggactgcgaaatgtatacctgcaacggaatgaagatcagttgattaagagagttaagcacgggaatgaaatgctggaggtgactcttaaagctgttgcactatgttcaatagaaaggtatctgaaatcatatgcctctttacgaacagaagcggcggcttctgggtttatcaaatgcattcagtcttatatcagtactggttggagacatggctatatagtctgtcaatattcaaaaaatggacggtctcttggtaagtcattaccactttttataaaagagacatctgagcataatatacagaaacgtgtcaatcgccttatatcttccacgatttcggggcgaaataaagatttaggtctttacgatttctga

SEQ ID NO: 26372 - DNA, 936 bp, Escherichia coli
atgaaaattattgagaaaatcattaatgcatttctgatatcgcgtaaacattcagtgaaggtcagtaatgttatctgcttgagtggcaccgacggtaaatttactggaatatgctgtgacgccgatgtttcatttgattttctttattcgtatgcccccgcatacagttcaacatttttagatatcccgtttcctgggtttgaagaccaggacatcgcggattgtgttaaatgtcagttagatgtagttaaaaataaacggaatcggtcttttttaattgaccatattagatttccagtttcctcaagggaaggattcactctgacacgcggtgatagttacgacgtgactgaatgtgaatataataaggaacgattgctacatctgacccgacaaggacgtttttgtgaagactatctcacgttcaaggatggcctgagttccttcttttcatttgtgaatttcgaattacatgaaatagtgaaggaaggtatacgtttggcacttgatgttttaaacaagattacatctgatcaaccagaccgtcttataaaagactttaagtatcatgattgcttcggcagttataatgtacaaatattttctaagggtctgccagttgatatccttgaaacgatgattgcacctgataggttgttgtctaacttgtcaggtagtcgtcagattatgaaaaatgcaagtcgctatcttaaaggctttgccctcagtaatcgtgtttacatgaaatacggatggcgtttagcagatgttgacacatctgactatgcgaaagttatgtcagatagagaaatgcatgccagagatgatcttaaggcgttttgcagtgtcttttttaaagagtgtttcgcatccggaaaatatgaatacgaagcatacctgagtgaaagacaacacgcgattcgtaacgggtattaa

SEQ ID NO: 26373 - DNA, 921 bp, Escherichia coli
atgaaagcgatttataaaataattgaagcgatgctggtgaaaatgggctttgaaggtgccgtgatccaaagtgtcaatctggaaacgggtgtgattcagagtctagttgttaaggctgatattcctgtccggactttaatgccgcatttaaggcgatatctgcgcgattgtgagcctttatggggacatgacgtggattaccaccctatagcacaatattgctcaggagctgcgttgttgaaggctgggccggtcactcttgaaacctttcggtttgaggtttcagtgtcaactgctcacctgcggcttgtggatgttgagccggactgtctaaatgagggtgtgaaccgtgaaaaactggagtatgtatattaccgctccagcaatgcagacaaggatctaatacttggtatggttgaaaaaggacataattttatcaaccatctgcatgaacttttacgctcgcgcttatcaacggctttgccgctgattttcgcagttacagaaaagattgcggagagttcagttccacaagtagtcaccagctttttcagtgttgaccatcaaatcaatgcccagatagtagtcgaacctgtacccgtttcagtcgcagaccagataatttctgctgactggaatgtgtgtagtgtttcaggagcggataagttcctgaaccatgttaatcgttatctgtcgggtagggtgatgaagcggcgtatttacgctgttatagaagcttgcgacggtggatctttatccctcaatgcgaacttaggttgctttacatcacctcttctcgtaactgagtataaaatggttcagtcacactcttcatcgctttatcgaaaggctataaataactcgcttaagcaagttaattcgtatgctccagagcattcagatgacctgctttctatgtaa

SEQ ID NO: 26374 - DNA, 936 bp, Escherichia coli
atgtttaatgaaagtgatgataaaaactttgttagtgcaatgcttaaatgtcaacttggcctgaatataagccaagaggatattacaatatatgacaaagaaaatcattttgaacaactttcttttaaagcaaatgtggcgcttgatgatttgttattttatctggatttatatatatcagaattgattaagcataatgcgccgtattctgaaactgaagtccttcggactaaaatcaaatactttcttaaagtatatgaaaagtctggttttcagaacataagaattcgcggttatcataacgcgcacagtactatagatattgtcgatatcgcatcattaatattggcggggtctgtaccggagtctgaacatgattcaatagatcctgttttaagaaaggaaatctatcaaaatcgcatgagtgttgagggtaaagttctcattgcccgttttgcacttaagcaatttttccattctgattttggtgatttcatcttagagttcgagaaaagtatctccaagtgtttgaatacttctctccagataattaaatctgtaaagaactcatttaaccgtttaggtcaatatcaatatcagcgtcgtgtaaaagatgacctgactttgcatcttgatttgaatacagatgaatacccggcctgtatgccagacctttacatcggtttcaaggagtctgaagggacgacgggagtgtatcgcgatgatgaaaaaatcattcgtctttatactggcgttagttccggaaaggatgttcctgtaatgatgaccgttcgattcactggctgtgacgggagtgttttgtctgaatcatcgcacggtactttctgttccgtgggacctaccggccgagtgcaggtttgtgacagagttgcgttggtccaagaagcggtcgaagagttacgggatgttgtttaa

SEQ ID NO: 26375 - DNA, 957 bp, Escherichia coli
atgactaattctactgataaccagaactacgttcgtgcagtactggcaggcattggtattgattttgatgaaacagagatgtttatcagtgtctctcattgccagagcgacgaagtttcgtttacatgcagtatatcagccagtgagttaagagaatctgcggggcattatgtggatactcttaatgatacccaactggctggcctggatgcggatgcactcaagaagcgactggtttacttccttgaggttttcgacctggtttccggtcaatatctggatatttccggtaaacatttcgcgaccagccgctttgaatacgacgatgtctgtagtgagatcctgagtaactctgcggacagcgcccagccaggtggctatgatcgtgaagagtacaaaagactgatggaagttgatggtcaggttttaatcgcccgatttgcactggaaaaattctgggatacgcattttattgggcttatcaactatgtatcagatgaaataacatccgggctttatgaggtttatcgcacgttcagtgatataaacatggccggttatacatttagtgagtattcatatacgcgtcgtattaccgacgaacttagtttgcatatttcacttaaagaggacgatttcgaagagcaattaaccgattgttatatggatgaaacaacgctgccgtctggcaaggtggttttacgccgtaataatgaatcaattattgggatttatgaaggatatgcttcaaaatcttactttcctatggttgctaatgttagagtccttgatacagatggtgaagttgttactgaactttaccaaggggtgaatgtatcagaattagctggtggtcggattaaaatccatgaccgtcaggaattaatttctgaggtgttcgctaacttacgtgaattcatcccagcatcagaggataaaatctttgatgcggcatga

SEQ ID NO: 26376 - DNA, 270 bp, Escherichia coli
atgcctgccactacaatcctgagcaataaccctgtgaattcggtcttctctaatgacaatagccatttcacataccggcatattgatttcagtattgagctactgctttcttcaggaactgactcacaactggaatatctgtttctcaaaccggcggctgaagtaaagatcgatttacagcgccgtttagctagtggggaacgttacgttacaaccgagagttgtgacaattttagcgaagttgatggctgcatgggacacgattgctga

SEQ ID NO: 26377 - DNA, 591 bp, Escherichia coli
atgatgactgaatcgttctttgactgggttgtgtattgcatcacaggcgtaatactggcatctgcgttcctcgaaggaaaaagaacccgttttccggctgcatttttttacggaagcattgtgctgctggtcgttttgatagtggccggtgccctcaactggtggttctaccgttctaaattcggctcagttgtcgttatttttgccgcgacaacgctgttaatgacccgattcagattggttatttatgcgttcaggtttcggacgctggtggcagatctccaatcacatgtagccaagggattcaggataatccttgtcttacccgaaaatgaagacgagaagaccgttttgcttagcaaattgtcgaaagtgatacattctgggacgttgttttatacccgaacagctctgggtccatattctggggatctcctgcatgctctgggacaaaagcaccgaaatggcgagggctatctgcttctttgtgagcaacaacttccggctcgaacctggctaagcactgtagaaaacggtcaaccagagaagtctattgcagttaattttcattcgatccctgatatggagtga

SEQ ID NO: 26378 - DNA, 258 bp, Escherichia coli
atgagcaatacagattcacagaccgtaccagctgatgccctgtgtgaaaacagttctcaggtgaaaattcagctaagtcgaagcgcctcacgagcattgacgacggcgaaagaaattcttgaaacccgagggctggtatccgtatccactgaagaccttgttcaggcctgtctcgaagaaaatcagccactcgacctggcaagtatctatcttgagcaccggctaaaacagaagggaaccagtatctgtgaattttag

SEQ ID NO: 26379 - DNA, 537 bp, Escherichia coli
atgaaaagcaaaattcactcttcaggaacgtccggcacgaaacgagtacttaaaacggatattgcgttgcctctgctttgttgggtgttcaccagtccattcagtaactggactgataagttttttaccggcacagaagtgccggagggctcgctgccgggtctagaacaggcgcctgaggctatcttccgatttgtgctcaatgacgaaggttttgatgttggttttgacgcggtgggaatggatctctgttgtttctctatcccgctttcgacgatgcccacaaagaatctggacgacgaagagacgttgtcgaggcttaccggcgacgtgatacacggcgtcctgctttcgcttccggagtacattgaaatgccagacaggctggtctatcagctaactgatgaggtcatggcgttcaattcacactgtggcaacggaattctacatggatggacgacggctcaagagttgtggcgaaacgagatcctgccacgcaccactattttgatgcagcagacatcagtcattcactga

SEQ ID NO: 26380 - DNA, 390 bp, Escherichia coli
gtgttctggattatcatcagttttatgtttttatcagcgatgttcatgacaggtcatttgttaaacaaagttgtcctccagcccgtttggctgtgtatctggtctttaccctggctgggcttcttgttgaaggtacgcgtgaccgaaatggataaagggctcgtgaatacacttcagctcggagatctgccggttttccgctggagtcgttctgtagttcctggcacctggtctgttgacagaattaatggacgctaccggttgaaccggattggaacggatggtttgacggtacactatccgtggcgcctgtactatcagcctttgttcctgacaccggataagcagatttctgatattaacggacgtgaacatgaacgaaaattctga

SEQ ID NO: 26381 - DNA, 255 bp, Escherichia coli
atgcagccggtagttgtacttttacagcaccttccgcaattccccgggattgccggttgtataaagtggcagaggttcaacctgctgaccgtcatgccgaaaacaacgattaaggtcattcaaaaggccaaaactgaccggctggcgttgcagattgatgcgctgccagtcctgctttacaccaaacttcacccaccaacccagaccaatcagttcattacgtatgttctgcacattgcccaaatccgatactga

SEQ ID NO: 26382 - DNA, 960 bp, Escherichia coli
atggccagtgaagatttactcttttaccgtgaccggattctggagcgaattgaaaagctcagatcctttctgaatgaccatcagccggtgatggccgagctgatgactgtggggaccgtcacacgacacgaagagcggttgaaagaggtgaaccccatcgaggtgagtactatttcagatgcctccgtggatgaaattatccgtgttattcaggatttctgtatcgatgacattgatgtactcagcaggaattcgacgaaagtgacaaccaaatacccgggtttgattattgttcctgagggtgccgaacagctgagcggaattatttgcgatataaatgatgccaaaagtgactttgcctctgcaatgaaaagggtgaattcggagaaacacatccggtttaaggaagttcaccgtaagcttcccggtctggtgactgcgcattccactcgcaaaattctgtttgtggaagaacagctcaaaaaagttacttttgcctggcggctaaaccgaaaccaggtaaaaacaaacgcaagtgatctcatcgcgatgctggataagcgtcgtttagtagcggtcaaatcgcccgtgacaactgacctgacagtggtggcgaacatcgatagagcgaaggcattactggaaagaaaagtactgagagacggcgaagggtatcgcctttgtcgaaccaataccttcccggttccgatagcgcatttgttcacataccggcctgaaggcaaggagcgtggaagtagcaaatatgccgagactgattacaaggtggtgaaagcctcattacccatttttggcgtcggacaaaagccaacaattaaaagacttcaggactgggtgccagcgcaggatgaagcactgtccaatggtcgaaggagcaaccatagctacacggaacttgtacccggtgcagatcttggcattttcattatgagaaaggtctga

SEQ ID NO: 26383 - DNA, 909 bp, Escherichia coli
atgcaatggatttccacgaccagccagaaacttgatgagagactttatcgtgtctgtgtctgggtgaaaaaataccatgaggatgccatcaaccgtgttgtgttgacggttgatctcagtaaggcccgccatgacccgatagaggaccaggtacgggccgagttactgtgtgggcattattttctgatgcggaaagagaacaacgcaaaatcggcgccagcggatcagaactttgaatttttgcctgacggccgcaacctgagctggcagacgtcgacaccggggcttcagcaccttctcctgaacagcaatgtacctgagtcccttaggcccctggctgattacattcagatgcgtctggccaagctgaccatggtcccgatgtcgggaaccatcatgaaagccgcactggaagacagcatcagctgggtaaaagtggatctgcgatactactggcagtatgaactggttaattcccatctggggcctgttcaggtaactcataaggcgcttgtgcgattcgggaggctggcaaaacacgatgaaaacgctagtgcaattcgaatgcttcgccagcggttgtcatcaccgtttattcaggaatttgagatgcctggggaggaactgaagcgcaagcagaagatcatgaataccgttgatgtgaaaatgcttttccacacacattatccgggccagaaattactgctggcccgatatgctaatggttgggtgctggtggattgtttcctgttccaccatatcaaacccaaaaagaaggcgaaaaacaaaaccaaagcgggtaaatcagaaactcaaaatatcaaatcgacggggagtgaggatcatggaactgggcattatggtgtgcatcgtgttgttactctcactggcagcggtgtggatcagtaa

SEQ ID NO: 26384 - DNA, 330 bp, Escherichia coli
atggtgtgcatcgtgttgttactctcactggcagcggtgtggatcagtaacaagacggtcggattgctggaaatccattactttaagcggccgctgagcatggagtatgcagcctggctgcgtgtgatgtgtgcgggtttgctatttatttttattcagatggtcccggcattcacgtttctgtataccctgaagctggtggcactgttaaatctgggcgtgcagacgatgaagctaaacggggtttataaatttaaacgcaccgggatgatgccgccgaaagacgcccctcatgatcttggccgctttaatccatttcgaaagaagtaa

SEQ ID NO: 26385 - DNA, 1182 bp, Escherichia coli
atgaacagcaagccagtaaccagacagtttgaagactcagacctccatcaggaactggtcacgtttgaggtgcccaataatgaccttaaggagctcattttttacttttctcatatgaaatacaacacggctaaaacttaccttcaatggctgcgttcctggaacgagtggtaccaagctaatgcaggaaaggagggaaacgaagcctggcctgccagttctctcccggtgacagaacccccgttgttggcctatctggactatcttcagggctcgctgtcacacagcagcattaaaggttgtctgcacgcgctgaacagtatccataggaaagcactcgatcgccctgggatcatcacatccaaggtcaagagtattcttgcaagcctcgaacaagctgaagcccgagagcaaaaagtgactcgtcaggcaacgccattcctagtctccgacctgaaagctttgattaaagcccacggtacgacacagtcggtgcgcaaactccgagacctttgcattatctggacaggttttgaaacactgttgcgctcagcagaacttcggcgcattcggatgcaggaccttgtgctgaatgaacagacaggcagttttaccctgacggtgtaccggacaaaatccactgtcagtaccctgcttacctatcatctgacccctcatctcactgccaccctaatcaggctgatggatatggtcaaaagggaccagcaaagccatccgaaggattatctcttccaggcagttaactatcaggacagcggatatatgccccctggatggggtctccggagcaaagggaatgagatcaatacgctgctgaaaaatcataatatgccttaccgacctacccgtcccccgatcgggaaaaatggaaagcccattattgtcgatgatgagggtatgctcagtaaaaacacattgctccgggcctttgaagcgttttgggatgaacttcatccgcaggaagcgggcacccgatgctggactggtcacagcgttagggttggcggcgccatcgaacttgctaatgccgggtacacgcacttgcagatcatggagatgggtaactggagcaatccagaaatggtttcccgctatatccgtaacattgacgcaggtaagaaagcgatgacgaagttcatgcgtgaggcgctggatgagtag

SEQ ID NO: 26386 - DNA, 213 bp, Escherichia coli
atgtccgaaactaagcaggcgtatttaatgaaatttcgtaagtgctcttctttcgacacactggaaaaagtattcgaacgactctgtgaaaaaaatgcaggtatagcatcactggaaatttccggggcatatgaccatcgaaaagctgaactgacaatgaagaaactctacgataaagtacccgcaagcgtatggacactggtccgtcagtaa

SEQ ID NO: 26387 - DNA, 807 bp, Escherichia coli
atgtatatgactggtcaagaaataaacgataaaaagaaagagtatcttgaattactagatcgagaagagaatgaacagatttatcaaacataccttgaagaaaatacaatgttcataccaagagaattcgagcaaaaccatggaattcacttcagtacggtatttagaaagttgcctctatcaagcgattataaacctgatttcgtatatttatcaaaaagctcggataactggaatgtagtattagttgaaattgaaaaaccatcgtcgaaatattttaaaaacaactctacaacttttcatgcagacttcaatcttgctttgcagcaaatgaacacatggagggcttggtttgatgatgaatcaaacagaaatcactttaaaaacaatatattgcagggatttatagaaccggcacatatggggagaaatccatttaatttcaagtatgtccttgttcatggtcgtagatcagaatatgaaaataatacacagaaaactgcactaatcagagggcaacagcgaagtgacttctcaataatttcatttgatagtttggctgaaaatatagagaaaaaatataagttatatgttggagtgaaaaaaaatagtcactatgaattaatatcaaaagaatttgttgatgaagggatattttcatggatgaacatagattttttagcaattacacaaagtatatatgatgatgcaatcgcaaaatcagatagttggcatcactatataattaaagaaaatggaaccgtcaaaacaatggattatgctctccctcgaattaaaataatttga

SEQ ID NO: 26388 - DNA, 291 bp, Escherichia coli
atggaaattagtatttcattggatgttttatttgaggctctcatgatccttggccatggcagagtctggatgcaagagatggagttcgagaatttacctggatacagctgctaccgcgaattacgcacctgggataatcgtattgtcgcctggtggagtgatgctgatgacacatggtatttatgcgtagaagttgatgtgataactgctgttccctcacatatcccaaataaaaaaggagagctttccgaggaagtgtgcttccagttaatggcgcttggtcgatactga

SEQ ID NO: 26389 - DNA, 474 bp, Escherichia coli
atgggaagcattaaagaactgctgtttgatatacaggaagaatggcgtcatgaatggatctctattaactatcctgaagcggaagaagagacactagagtgggatgcggcagctcaggaatacagctggtttcgggactggatggaagaagctgctgagcagcaacatttcgaggcttccctgaattgtatccccgaacgccttcaggaggccttggatgagttacatgagctacaaggacttcttgaaaccgaacagctcatcgtctcaccgaatcttctatctgagctgaaaaatctatccattcaggaaggatacatgctaaaaatagaaaatgtactgccgccaaattttagagtattcctggtccgcgaaggtttcattttcccgggcgaatcatgggtgtgtggttccgggtactggttgcctgaaagtgaagtactcaaaaacggaatcaactcattgcttgtttaa

SEQ ID NO: 26390 - DNA, 426 bp, Escherichia coli
atgactgaccaggcctctattcccgttgatactccagttctggcactcgcaactgatgcttattcatcactaaaaaatatcctcaatgacaatgggacaagcgacaccacaggaacatgcatgttcgccagtctgctggtttgtgaatttgcgcaccgcagaggtatgtccgcagctgtgcgaggcgggaacggaacagatgatggtggtattttcaatgagtctggcgggcacggccattactggtgtgaggtaagtgccggtgaaatgattttttatatcgatattgcggccgagcagttcggctacccttcgtttatcatcaaaaatgcaaatgacgtgtcagggtggccgcgatatatccccggcgaccaggttacagtagatgaacacgtcaggattacgttgtctggaggcattagatag

SEQ ID NO: 26391 - DNA, 387 bp, Escherichia coli
atgggtgtagacatgaattatgagtttcagaaaaaaagccctaagggatgggaccgggttaacgataatttttcaaacgaccgaagctatttgctttattcatggttgggtctggatgcccgtaacacctggggtgttgcagcgatcactcctctcaggggattacccgatgacatagaacttcaatgggatgaggatggatgtgatgactactggggtgagcattcccaaacgtggttactatccgacgagatccttgcttcaaccagcccggtagccattgaagacgatgaaccggggtcggtagttgcggagttttgtgcggaggttcagcgacttcatgggctgcatgggacggtaagaattgttctaggcttcactggttaa

SEQ ID NO: 26392 - DNA, 222 bp, Escherichia coli
atgccaaagaagaatttatactctgaagagattgtgattgccaaaaagcaactcactcagctttcaacactaaaagataaagtcagcctgctaacccgtcagtgggaaggtgatattggcgccaatctgcctggttacactgagctattagctcatgtggaaagaattgaaaggcagattcatgaacaaattggcagctggaaaaaaactcctgcaatgtaa

SEQ ID NO: 26393 - DNA, 2847 bp, Escherichia coli
atgcttccagccgtcaggaatgcagaagatgttgcagtcaccatggcgctgggtacagtgcagaatgccctttctcaggggatttcagaggctcaggtttctctgatggcgaaagttgcggaacgggaaggcaagattgccggtgccgtagctaacattattacgtcgcgtaccggcgccatcacccgggcgctggagaaaatgcatccgtattatgcggagctggccgctgccaagctggccggaacgcaggagggcattgagcaagccagcaaaattcaggcaggtgttctcacgctggaattattcgtcggcaaaaacgtgacggtagttgatgttgcggaaggcgagccagcagacagcagcatcccgttgacgctgtgtcagaagaaactcgtcgtggatgaggagttttctgcctggagcgatatcgacgaacattttgatttcaggagtctttccgcattcctcaaggcgctaaaagataaccaggggctggtggagcaaattttcccgactgagcgctgcgtacttgtcatggtcactacccgcagatttattgactatggtgatacctgggcgaatgctgaaaacaacgaaaagaacagcatcgtgtttctgatggtccgcaacgggcaaaatatcaaacagatctattccccggtggagagccatcttggggcgtcccggttatttccctctgaagatgagcagcagggccacttccgagggtttgacggtaccaccatcaaatttgaagatgtggcttataccgatcgtctcaaagcccatgacctgatggctctgcattaccgacgtctgcttatcatgctgtttggtcttgaccagcgactggctctctttggtcagttctatccccagcatgaaaaggcgaatttcttgaatctgagcttccaggaacggtacttccattttctgcacgatgaagacggcacagggctgctggcatcaccagactcgcagacgctcgatgaatttattagtgaaaaaaactcctatattcaaccgggctcgcggctgctctgcaactggcgtgagcttatgacccccagaacagcacctggtgccgttaaagaggacagcggctattcagggtactccttcatcgctgaccctgaggataatgtctctgctgcggttgtgtatcgtcagggagatactctggccgttgatgtggcggtgaagcgattcagtacagataagatgtttaactgtaaggtaaacgtctctgcatatagcccgtggcggcgtggagaagctgaacttgcttatttgtgccttgatgcagtgggcccggaggagctgacccggtttatccagcaacgcaaattccggagtaaccaccttttttatattcgcttttttaaggccgcgatcaaattcctggaacaggagcgagaaaacgaactgccgcaccggcaatatctgctggctgcaatgcaggattcggggatgcacctgccggggaatatccaggaactgattcaccagtgtattgcttcatggaagaccggcaaccgtggggtttccctcgctgtcgggatgagtaccgaaaaagggcgccaggcactgctgaatcagctctacaggctcactcagggtgcaagcgaaatggtatcggtcattcaggagcacgtcgctgcgtccggctcgcaacttcttcgggccggggttaactcgtcagggaattacgtcgcatttatcgcgcctaaaccctatgagtgtgacaacagactggaagcccatgcgtgggtccatcgtgttgtctatgcaaccgggaaacgaaacattcgggaaaccggcagatcctgggtatctatgccggagcgttcggcatccgaaattactctttgggaagatgaggagcagtcacgaaaatggtactccatgacgcctgtattcagttcgtggaccgaaaaacagaagctttttgagatgtgcgaaaaaggcgcagggttactgaaaggggctatggggacgccggatgatgaggaatatggcgacctgctagagatgtggggggacgcgtatatcgcgtgcaatgccagcggtgagcatgtaacaaccccggatatgttcctcccggtaggcctgattaagtcacgaaaatcattaaagctgattgctttaggtacatgctcgacggagcactggatgtatgcccgggcaggggatgatgactcaagggagctgctgctggaattgtataccagttggtatgagtacccagataaagcgcgggcgcggctcctgtcgatggcagaaaaaaactccggcctgaggtttgtgttgctcgaaggtaaatcaaggaaactggagcgctttgcggtcaagcggccagaagagattgtcaactggcatgccggtaacttaaaggaaatcccgacaatgctgaatgatcaatgggcatgtcacatggcaatggtcagtcagaatgataaggtctacctgacaccggatttgctcgatgatgatggtctgcctaattttaatggagtcaccaggcaggtgcccggagaaggttatcagccagtcaatgtctatgaatttgaaagtgactattttaacgcggtatacgatgcagacgggaagaaagtggcactttgtcactggtatgatgtgacggataattcatattctgctgaagaactcataggcaatatgccgcataacgcatttaaatttcttcagtatagactggataatatcgagcaggctgaggcatttatcaaatacagaaaccggaattatcagccccgcgaaaatgcagactggcctgagccacctgaaggagttaagcgttacgtcatcagagcccgaagctag

SEQ ID NO: 26394 - DNA, 483 bp, Escherichia coli
atgggggacctggtcagtaaaaataatatcgatcgccttgaacgatttcattctctgctggcagggcagtattggtctgcgctcgtcgatattccggctgaggcgattgtggccggggacactctcctcattaactcgttgcggtacgtggataacaatctgcataccgtcatccttcgcgctcacccccggcattacggggaatgggtaagcgttgaaatcgtcgctgagaacggttcaaaatcaacgaaagacaagagactgaatgagcatcggtttctgacggccgatttcctcgcgttgtttgaatatcagcccgacaatgaaattatccgtcagtcggagctcaaaggcattcaggatgaggtcgctgacctgcaaatgcgtcttacggaaactctgcaagatccctctgcactccgggaactggctattaaaagggtcgaagacgaagaggccagtaaaaagggggggggcaactga

SEQ ID NO: 26395 - DNA, 354 bp, Escherichia coli
atgaaaattaaaaacattgtattggcaggaataatttcattggtattttctgttcatgccagcgataagcagaatataaaaagggacccaataccttatttagggtacgacgcagttacttcaaacatgtgcatagatgctggtggtttaactgatccagtggagatgagaaagaaagctactgaaacattactaatgattcttcacaaacaaccaggtgataaactatctaaacaatcagaagatacaatagaagcatttgttacacgaacaagatcctcttcagatgacatatctaaatgccagttcagtgtttatgaaagatactgggaaatagttcagccaaataaataa

SEQ ID NO: 26396 - DNA, 615 bp, Escherichia coli
atggctatcgataccgacgataccgatccggtagacgcagaggcgtgcgagaagtacctggcacagttacgggaactggaggcatacagggcgtaccgaacgacagctgcgattgactggttctttgaccaggctacccgggccattcacggtgagttgtggctagccgcctgtacgactttcctgaacgggattgagacctcactgatggtgacgatgaagctgaaggcgtcgcaggcacaaccgcaggcaccaacaccgctggtggacttaagcgatatggccacactcagtaatgctctgctaagaagggctcaccaggccggtatgccggtgacactgctggcctttcccgacgagcaggatctgctgaccaagattgcggacggcgccccgaaactaccctatgcggaaatcgtgagggttcggcacaatttatgtcacgggaacatcctggagcacatcatcactgcgagtgacggtatgggggagccagtccggttattcacacctgaatgtatgcgtgatctggcgcagacgctgtcggcagtctcgaaagtatggattgcaggcctgcatcaatattggtgtgataacaatttatctatgccttga

SEQ ID NO: 26397 - DNA, 435 bp, Escherichia coli
atgtctgtattccctgaacgttttgcatcccctcctcgtgatacaaccccttttttcagtgacctactgagttgcggggtgatgagtccgtgcgccggacacgaagacaatgagctgaatttacatgattttgtggttcgtaatcgccccgcgactttctttgtcagggcctcaggtctcagcatggtagacgccggaataaacgacggcgccatactggttgtggatcggtcactgactgcggagcacggctcaatcgtcgttgcgctggttgacggcgagtttaccgtgaagattttgcagaccttcccgaaactgatgttgatgccctccaaccccgccttcaagccgatacctgttaacccggacactcttgaaatctggggcgttgtcacctttgcgttgaatcagtttcctcatgtacatgcacgttga

SEQ ID NO: 26398 - DNA, 1260 bp, Escherichia coli
atgtacatgcacgttgatatcaatggagcctacgcggcatttgaatgcgccatggaccccaaacttgccaaatccccgctcatcatcgcgagcaacaacgatgccaccattatcgccatgaacaggctcgccaaaaatacagggctcaaacgcgggatgcctatcttcaaatgccgggatctgattgagcagcatcatattgcggtacggagctccaactttacgttgtacgaagattattccaaccggtttcatgaaacgctggaggggtttgccgaggataccgatcgttacagcgtggatgaaagcttcatgctactgaaaaacatggacaaaatagtagattttgaagagtacggatgcctgatcagacgaacgctgctacacaatctttcgctcacctgcgggattggagtatcgaccacgaaaacgctcgcaaaattatgcacctacgccagtaagcgatgggcagcaactggtggtgtggtcgtccttacagacccattccgaattaaaaaactgctgagtctcatcagtacccgggaaatctggggcattggccgcaaaatcagtgagcggctgactgcgtacgggatcatcacggcctgcgacttttatgacagcgatgtgcggtttttacgaaaggcattcggtgttgaaatggaacgtacctggcgggagctgcatggcgagtcctgtttccggttgcatgaatcccctcctgtcagacaacaaattatcgtctcgcggagctttggccagcgccttaatacattcagcaagatgcatgaggcagtgtcattctttaccggccgtgccgctgaacagcttcgaaacgatggctcctggactcgccaaatcaccgtgtttatccagagcagcccgtttgccagagctgaagcccggtacagcagctgcggtattgagccgcttactgcgacgcaggacacccgcgacctggtcagtgcggcaggcgccatactgacccgaatctacaaacccggcatagattatgcgaaggcgggcgtgatgctttcgtcaatgaccgatggcactgagcagctatccctgttcgatgaacgtcccgccaggcgaggcagtgaagcactgatgaaggtgatggatcggtttaacaaagagcatcgaggctctctgtttctggcttgcgaagggattcatcaggatttccgggggaagcaggccatgctgtccccacggtataccactcgctggaatgagttacttgtcgtcaaagcctga

SEQ ID NO: 26399 - DNA, 810 bp, Escherichia coli
atgattaaattaaattatttaaaacccgtggcgtctgttttaatttctgcggtgattgcgacggctggctctgtgtatattacgtcgaaatatctaaaacccgatgtaccgggtaacgacgaaataggacgagtggctgcttcctatctggtaaaaaatccccagtatcttctcgaagcaggtaaggcgctagaaaaagaaaatactaacgcttcccttgagcggattatcccctacgcaccggcactcttcgagaccaaagagacacccaatatcggacctgataatgcggccgtcgctgttattgagtttttcgactaccagtgtcatttctgtatgcaggtagcgccggttgttgaatctgtgttgagccaaagcactgatgtaaagttcttctttaaagaatttccgatcttcgctggctcaaaacctgtttccgcaatgggggcggcgacaggcctgcatgtgtatcagacattcggtgcggaagcgtatcgtaagtatcacaacaatctgatgaccagtgcgtatgtattcttcaacaaccagcgtgcgtttacactcaatgatttagacatggttgtgaataaatccgggttcaacagctcattcggcgatcgggagaaaagccgctatgagaacgttatctccggaaacatgcagctgggggaagctctcgggattaacggtacgccagggttcattattatgaacatgcaaaaacccgacgctgcaacgacgtcattcatcccgggcgctgttgacgaggccaccctgaaatacgcaatccagaaggcccgtggaggctaa

SEQ ID NO: 26400 - DNA, 612 bp, Escherichia coli
atgttacggcaatttttcttactaacagccacaacgttcttatgtggatgcggttatcattttggaaatgacgttgatgcgtacgatttactgcctcgcccggtaggcagcaagaaatttgaaattgttgctccggatgacagtattcagtcgcgaatgtttgcagcccggtttgcgagcggattaacgggtaaggggtttaatatttccagccatcagcccgaatatattctcagattcagttacagcaagacccaggagaatctgcaatacagtgaactaccggtgacgggaataaccggatatgttatcgagaagaaaacaacgcgaaaagataagcacgggcaaactgagacggactatgactataagccggtcagtgggatcgtaggaacagagacggtatcacaaagacatttctggcgtcgtcttgatgtggaagtctaccctgcgggaaaaaatgcacagcaggtgctaaaagtcagtatgcagagcaatgcgccgatcccatcggacagcgtggcgtattccgcaatgattgacgctttgaccgggaatctggatgccccgctgcgctccggaaactacgtcgcctcggtcccctggaactga

SEQ ID NO: 26401 - DNA, 423 bp, Escherichia coli
atgtcgctttggctcagcattgtcacccgggcaacgggattgccggataagcggtatttaaatgatccggtgatcctccgttattaccaacaaaagatccaaaaggctccttacgccctggtgggatggactctctgtttcatggcaaccattggtgtgtcgctgggactggatctttccaaccagatgttacttctcgttctgctgatattgatctttctgatggtggtgctccaggggcggtaccagttcatgcatccggaaagatgtatcaatgccaaattttaccaaacggtgctggacgatgcgtcagtctcagatattcagaaagctcagtttgaatatctcttcgtgaccaaagtggatgagctgaccatcggtgatctgtaccgactctatgatttcaacagaggaggccggtaa

SEQ ID NO: 26402 - DNA, 393 bp, Escherichia coli
atgaaatctgcaatactgacaacgttaatgctggtggcggttggttctcaacccgtctttgctgccaaatgccagttcggggcctgcgacgccgacactgtggccagcagtgagagtctggtatctgctgctcagacagataaagacgcagttttaaaaaaactcaatgatgcgacatcccgcagcgacgtgatgtcgaaacggtttgagtcgtatctgagcaatgacaggttaaaggtgaacaccgacagtaccaagaaaggccctagcaatgaaatcgctaagccgagggatgagttggcgccggtaaggcagctgaaagccattcgccccgagctggtacaaacacccatcttccagcccattgttgcgttctatgaacgtctggcctga

SEQ ID NO: 26403 - DNA, 750 bp, Escherichia coli
atgaataagactatcaaggcatcattatttttactggcatcctgtacggccttgagtatgaatgcccagacagcgaacactgacgtgcttcccgatgctgcactgaagaaattaagagaagtgggcttgtctatcgagcatattgaaccatcgccggtaaaagatatttataccgtcatttcaagagagggcgtgagctacgtcagcaaagatggcgattacattttcaccgggagcttgtttcatgtgaacgggaaagatgtggagaacacaactgagcaggctattctgaaaggtgtcagggagttcgccactaaaacaaaatccatcgaatataagtcggcgaatgaaaaataccgtctggcagtgtttacggatattacatgcggcttttgccagaaattgcatcaagatcttcaatcctatctcgacgccgggatctcaatcaaattcctcgcctttccacgtgcaggtctcaactccgttgtcgcggggaatatggcaaaaatatggtgtgcggcaaaacctaatgatgcactggatgccgcaatgagcccgacatcaaccattccggaaggacggcctgacgaggcctgcctcgataccatcaaatcgcatttccaggtagcttcaactattccgcttcagggtacgccaacgatggtaacgctgtcggggaaacctcagctattcaccggttggatgagcccggaaaatctggtgacccgcatgggtgccgaacaaaagtga

SEQ ID NO: 26404 - DNA, 516 bp, Escherichia coli
gtgtttataccaccagtagacgatgtgaaacctattcccgttcctgttgagatctacacgcagtgcattaccgatgcctcccgttttttcgggattgatgcggagttggtctttacgctttttgataatgagggcggaaaagtcgggacgttcagccgtaataaaaatggcacttatgatattgggcctatgcagatcaattcgtccaacctgccagaaatacgcgaccattttccgtctgttacgtggcgggtgctggcctatgacgcctgtgccagtttctgggtgggcacctggtggctttaccggaagattgttgaccggaagggtaacgtatttgaagggattgccgattacaacagcaaaacccctaaggtccgggcgacgtatatcttcaacttcatgatcaaatacaatcgccggattcagcgccgaaatggaatggacgaattatatcagtggacgcaacctaagccccagtacaacgggcatattgtaaaaaatcttcctgaataa

SEQ ID NO: 26405 - DNA, 567 bp, Escherichia coli
atgctccagtcaatttataaattcctgttcaatttatgcagttcaccgcagctgcccaaaaataaagacgtggatgggatattgtctcatgaagaaataaccgctggattatggggtcctttgccatcaatccatgttgttcttttcctggattttgatggtgtagtccacaaatgtcagaatgaatcgttcgagaggatgcatttgattgagaggttacttgacgcgagtccttcaatgttcatcgttatatcaagctcatggagagagtgcggcagtatcacttacctaaagtcacttttccgctcgccatacagagacagggtaattggagcaaccccatccctgtatctcccctcaggaagtataggagtccgtgcagctgaatgtgaggacttcgtcaccagacacaaagtaaaagcctttatctgccttgatgacgatgcgaccctgtttcctccagagtacccgcacctgtttcgtacagattattacaccggggttaatgaaaaggatctaacggacctgatagccagatataatgtgctgatgacccgcttttattga

SEQ ID NO: 26406 - DNA, 3990 bp, Escherichia coli
atggattacaacatctatacagttggcgatattgaatttgtgtggtccgccctgaacgggattgccctgattttctcacaatacaccggtgtaaaagcatttctaacgacggcagcggtactggctggagccagcctgttttataaaacgtggctttggctgttgaacccgacaaaagcagaagtgccgatattttcatggattcttgggctgattctattttcgatggcaattgttcgtgtggatgtgacgattgaatcagttaagtctggtgaagtgagaaatgtcgatggcattcctatttttattgcggcgatgggaactgtcaccacgaaccttagccagggcttactcaaagactacaaaacggcatttgatccactggcgccgatcgactttgccgcaacgacgcttgatgatgacattactcttggtccgatgattcgtttcgttaaattcttacaatggggtggtgacagccagggctattgttctgcgtttcccgaaccagccagcgggttaggtgcgatgaatgtgtgcgcgacagtacaatcactggcctataactgtctcaagggaacccaaaactcaagcgcaaaaattgctgggaaagaaaccatttttaacgatattttctctgcaaatatcgtggatagcatggaacgcattaatcaggcgatgaaaggttcgctgaagaacgcctctgccaacattgtcggtgtgaatagctcaaagtctgctacttgtgaagaggtctggtcgaccgttaaacaggtaacgagcaccccagaggctcggcagacgattgcattgattgggcaaacaaacggtatccttgctccagatgaggcgggaggtgcagcatcaggagcgagcttcacggatgtaatggcgtcggcgaatggcatgtacggcaaagctattggtgcttatgacgcgacgcttagtttgttcatcatgaatgaactccgtaatggtgccagcaagtacaaaaccccactcgggctggcctcggatatgcagttgtttgaggcatcattaaagcgtacgaataccatggcatctcaggggcagctctggctgcaattgtccggtgcagccatcgcgtttcttgagatgtttgcgtacatggttgccccatttgcattgctcatgcttttggctctcgggggaaatggtgtggccgctgctgcaaaatatctccagcttattcttttcgtaaatatgtggcctattactgcggttatggtgaatgcctacgtgaagaaagtggcgaccgcagatcttgatacatggagcacattgaatagtcagagtaacgcggtgacatggatgggtttgccagggcttgccgaaacatacagctcttatttatcagtagcatcagcactctatgctcttatccctgtattgacgctgttcctgatgacgcaatccattcatccaatgatgaacgcgatgaaaggagtcacaccaccagcgccagtggactccagccacctcacgccgaaagtgtgggatgcgccaaacagcggaaaatcatcgtttggggatgtgaatcgtaccgcgctgacaagcaccggccaaggattcagtggtggcggggccatggactccagtaatttccgactcggtacgtggaatgccggttcaagtatcgcgtcaagccaggggcaaggggcagcatttacctcttcagccatgagcgcagcaagtaacacattccagcaggccttcaaccagatgagtgaagttggccgaacggggcaatcaggccagcaatttacctccaacctgcaaagcttgaaatcatttactgaccaggccggtgcaaacatcgcgaatagcgtaggggcgaagcatggaattaattcgcagcaattagctggcgtggtgtcaaatcttctgctcaatggcagtttgggacttggtggtgaagaaaaacttggaaaaggaggaggaggaggtctcgctcagaaagtaatggatagcctaggaataaaagcgggggggcaagttggatcagggatcacgaaaagtaattctgggaatgaaagtctcttaactgatttgagtaaagctattacgactcaattgactgaaaactcaggactgactgaccaaatgactaaagcggctgctcagataaacagtgatcagtttgcacagaccaatgcattcaaagaagctgcaacaaaaatgaaccagtccacacagacaatggccgaaaacttgtcgacgtcactttcaacgaacgccagcgccaatactggcatgacactcgactcaagacaggctatcaacctggacagattctccgattctatccgtaataaaaactttagcgatgaagatgtgcgtaattttgcacggaaaaatggtcttgatgagaatgcctttatggagaagttcaattcctataatgacacatttaaggccagcactcagttgggttcacaactccaacgtacagatgcgctggtggcaacgacacgtgactttagtgagcaaaaaatagcgattgatactgcccgaggtgaaacggctgagagcaataaacaggatctgcgtgaaacttccagcctgcttaaagggctggttgctgactttggcggtaacgctcaacagatgctgccgattactaatcagcttgaccgaatcactggtgatgcctcgggtattaacacgattgcacaggcgcaggatcgcaccccagaacatgtaaatacgtccagcgtaatgagcgttgatcgtgttgctgacgtggggcaaagtatggatgctcaggcaaaagccgggctggtacaaaaccaacaaaatgctaaccagcatgttggtggacaaactgagtctggtgtaactccgtacaatgtggacaagatcagcaaagaagatattcagggcattcatcaaggtaatgtaaataaatcctatagcgaagagaaccagaatgtgctctcgtcattggagaagaatacccctgttgtgacgaatgaaactgtgggaagagttcagggggctggggtggacgttcagcacgccaaccaaactttcgaccagttacaggctggttcgggcggtaagcatgcgacttcgggcatgggtactatcagcgacaaactgaataatatgtacggagataaccagatacgcggtatatcaggcaacctcccgaattattttggcaggattgcaaatgatcctaccaaaaagccggatgacaaacgtgcggaactggccgcacaagctgtgtttacctatggcgccagtacaatggcaaccggcgctgagaaagaacaactgaaagcggatactcaaaatatcctctccgaactgagtcactataacgttcgctgggggatgaacgatctccagaatatccatgaaggtttcaacatgcataacaaggcttcaggttctcttgactcagttgtgagggcgaatcttggggaaggtggttctggcggcgggctcgttgggcaacgaacccaaaccacgacggatctccttgttggtaataaaattgagtccaatacagaacgtggtgttattggtagtacgcttttatcggggcaggagagtgttgccagaggacttgacgttatcggagctaaacctgtaaacgacatgctctcaggtatgggtatcctgaccaccccttcatctttggcaaacgatgcttcgaatccacaaaatatgccgagctcgctattgggcaaggttggaaatcacctgcaaatgtcagatggtgttagcgaggtgaccagcaggtataaggatatggggggggatgggatcaaggcgtatgagactgcatcacaaaactcagaacgtgcgattcgtcagcaactgaccgatgatccacgttttgggccggataaagcagatgcattcgtgagctttatgaagtcaaacctgaataatacaaatgaaccatatcagtcgagaattgagaaagctaaaagctggctgaatgaaaataagaagtaa

SEQ ID NO: 26407 - DNA, 1416 bp, Escherichia coli
atgcgcgctgatttccatgtttgtgcaaaaaagttacttttatcgttagccgtttgcacggcgatgattgcgccaaatgccgttgccgataacgccatgcgtaatattttcaatggcatgatgacgactacgagcccagctagttttgaaacggccacccgtaccggagtggttggcggctcattttcctaccgcacgacaaacgtgaataccaatttagtgtcaatgtcttttcccaaagcttccgtaggctgcaacggaatcgatgttttccttggttccttcagtatgattaacggagatcagctggttcaggttgctcgcggtattgcacagggggctgcaatttatgcattcaatgtcgcggtatcggcaatctgtgctgactgtgctgcgactattaacgatatccagaataaattgcaggcgctgaataaatttgccaaagattcatgcaacgctacttattcgtttcttactgaaaatgttggtccacctagccagtttgcgaatgctgtcagttccggccctgcttcaatgcttggcactcttaatggactgttgcctgattttggttcatcaatgacaaagtcgccggaaaccgtgacttcccaggtaaaagcaaaagaccctgaagagtttgctgaaaaattcagtggaaaccttttctatatgtcatttatggacatcgataaagggtcaatgaatatcggtggcgtgactgagctatctggctacagacttgctgagcagctgatgtcgcttgtcggtactgtaattatcaactgggacgctaaaggtgaaaaagcggggatggaagttcgcccgtcgacgatgacggtatcggatttcatcatgggcccaccggctggtggttccataaaaatgctcaaatgttcgcctgcccccgatccagcttcagctagaaagtcgcaatgcctggttatgtctgaagtgacggatggtggtttcaaaggtttgaaggatacaatctcggacctccttattcaggttcagacaaaggcaattagtgatgtcaggatctctgatgatgaattacgcattatttcttatattggcatcccaactattcttgattcacttcagacgtttgatgtccctgaaggctacgcctatatccaggatatcagtgcgatagcggccaccagccttgttattaacatgcttcggcaagttgaagcaaagatcagcgctatgaatatacccagcgaatctctttccgggcggcggcaggacctgactaggttatctgaaaacctgaccaatcaggtaaaagctgcctatgagctaacccgtagccaggtgggcaacagctctgacgtcatttctgcatgggatgatcgccgattaaagagaaaagcgttcatggaaagtcttcgtggcacaggtaactga

SEQ ID NO: 26408 - DNA, 1047 bp, Escherichia coli
atgactcgattaacgttaataccttcaaagatgttagtgctgctgtctttgtttattactggggtccatgcaaatgaagagcaggcccttatcaaagacactccctttgtatcaggacaggccttcaagaaaggctttttctggtatgacgacccgacaaggaaaactgaggaagaaattacagagaccaagcctcctgttgcatcttcgacccagccagaacaagaagaaaagattgagcttaattcaaagtggctaaaggacaatatgcctcagcttttgaccaaggctatggataatccgacccctgaaaatttatcgagattttatacagcacaacgtttaatgctggatatcggtacgcggttttcggataaatcgaaagattatttccttaaaaatccaatgatgtctgaaaaacgcaggcaaccggttgaaaaggtagcgctcgatgcacatcgtacggtggtcgagaaaaatcagcagtcggttatgaaagatattttcactaaatccgggctgtttttctttttccagagtacttgtcagttctgccacgaagaaagtcaaatactccagtttatggagaattactattctgtcgacattcttcctgtcagcatggacggcagaccactacagaatgggttgttccaggatttctctgtacctaatgcgcagattattgatcaatttaaaatccgtgaagttccaactattttccttgtctcaaaagatgggtcatcagcgcaacgaataagcgaaggcatgatcactgctgaggagctcaagaatactattattctggctgcaaaaggcatgaagctgattgatgatgcctctttccagtccactttagatattaagcgccaatataccattggcgaggatggcgtaattactgtgaataaatcagaaatggactctgacccgttcttattgcaacgaataatggataagaaactggaagggtacgatatgccaacggcggacccagtgaactatctgaatgtgggtggaagtttaggaggtgcatatgcgcgctga

SEQ ID NO: 26409 - DNA, 513 bp, Escherichia coli
atggctaaagtcgatcaaactaaagctaacatgttattgagcgctacaaaaacgatgtctcttggtgccaataaaaattccataaggatactctatggaaatcatgttgccgaaaatatagacttcaggtctgaacctcaacaaaactttaaaaaagggattcgtgggtggagtcgccgcacggataaccgcagggctttttctgcggttattgatgtcgctgtaaactatttcggttttgatcctattcacccggaatccagttttcgaaatattgacttcaaccgcatcatgagtgtgctgcataaccttggatatttcgtctgcgctcctgaggtaaataaaatcattgagattctaacgtcaatgaaagaaatcgaggagcttgaaacttgtgcgaaatgtaagcgcccttatattgtcccgtataccaatgatactcattgtcctcgatgcagattgtcgtccacgtcatcggcaatagcacggtattcccaggaagagttagattag

SEQ ID NO: 26410 - DNA, 801 bp, Escherichia coli
atgtcagaatcagataacatcacgcgtaatttactcggtaaactattacgtaccgagatttcgattattcgtagttaccgtgccttcttaatgttattgcctcttcatggatcttctaagtatcaaactggatcaccactcctccaacgccgactatttggtaatggatttggagctatgattgataatgcatttgaagttgaaactcggccaggaagcttcctcgttcctcgttctttaagtaaagagatctcttgggacaaattctttgtagctgtagttgatggcgacactaacgtcattcgagaatatgacagtgaagatactgacttcggcatttacaatgaaggtgaaaaagtaactttgctcagcgggcaggaggaattttataatccgagaaaaattcagcaactacgttctaagtgtgtagacattcaaaatgattacttaatgcaagttttctttatgtcaatgcttgcacctgagtttgttagtatcttttttggattaaaacctgccaccgttgaagcaataaaagatgtcgggatgtcatcacttaaattaattaatgatgtcgttctctttccacgaacaattccctttacgccaggtctgggggatgacagtgctacgctaaaatcaaaggtatttgcttgggcatacgaaatatctgccgatattcgtttgggtaaaattagtgacgatttaatggaattactgcgttacgacactatgtttacatgccaccgtcaggatgtgttcaatactttggcaaataaagtgctcttgaaggattattga

SEQ ID NO: 26411 - DNA, 486 bp, Escherichia coli
atgtctaaatcgaagctattaaagtcattggagatttcacgtactttattgcgctcacaaatcgatgttcttcgagaagaggctgaagaactgatcaccaattattggatcgagtggaaagaacggaatcacattgagaggaatttacccagggatagcaaaactctaaagaaggagtatctgggttcatatgcaccaaaagttgagctaattggtaatgccaggaaagtcaccattacctggcatcagtttagcccgtataaaaacaggccacctagtcacatgtcgaaacggatttcaccgatgaaaagtggaaaatatacgaaaagctgctttgttaatcatgccagctgggaatatgaaatgattgaaaaaacggagggattactggaaccctacagagaattacttgagttctaccatgctgcatatatcgaactgggacgaaaagtccgtcaatactcaaaatcagaggtggcacaatga

SEQ ID NO: 26412 - DNA, 723 bp, Escherichia coli
atgaccgatgtaacaatgaatgaaagcgagcataaggtacctgacgtaaatacccgctcccctcatgcgtccgataatagccgtagggtcgtgcaaagtaaaaatgaacattacggcatggctacagtaactattaccccaggcacgccagactttaaccgatttctcacggcacgtaatcgttccgtaataagagggtttgatgatgtcagtattgccatttcatccttattcagaacggtcaatgcagttaagcaccccgaactagtgcaggcaattcaagactggttcaatgaattgcacgaagaaaataatctaatgaagaacaatctggagcgccacattgccaccatccatatcgatgaaagcgatccgttcttctcatcaactgagttttcaccgttcagatttgaacctgtacagttaaacttcaacaatcaaaacacgatgcgcttttataagcacatctttgaaatgaacaaccttctgacacagatgcacaaattcaactctctgggtcaattaccggttagcgattacaacgttatggcccacaatattatccggagccttaatatgtatatcgaacgggtcaagaaaacacttaacgtttcccgccgcgcaaaaggtgcttacagtcctgatgagttcatcgaaaaggtaaagcagtataaaagcgtgcaagcatatattgctgcggaactgtctggtaaacgccggtaa

SEQ ID NO: 26413 - DNA, 3036 bp, Escherichia coli
atgaatttcagggcactcttcttaagtatgcaacgagtttttggcattttctccagaagggagaatgatgtatctgagttaatgatgaaggatgcagcgaacttctcgccatttgctcagattataggagagcagaaatacactgtgccggaccacccgaatcctgaagtcctgaaattcattgaatacccaaccaggcctgcggggatacagacatttaatgagcagtctattctttcgttgtacagagacaagctgcactctatttctatgatgctggcaataagtgatggagacattcgggaggatgcctataccttcactaatctggtgttaaaaccattgattgaatacatccgctggattcatttacttcctgcgtcagagaatcatcaccataatggtattggaggattgttgtctcacagcctggaagtggcgatgatctctttaaaaaatgccaatcactctgaattacgtccgattggctatcaggatgaagaagtggttcgccgaaaagtttatctgtatgccgcttttatctgcggcctagtacatgatgcagggaaggtatatgaccttgatatagttagtctcaacttgagtgaaacattaacatgggcgccaagctcgcaaagccttcttgactgggcacgagaaaacaatgttgttgaatatgaaatacattggcgaaaacgtattcataaccaacataatatatggtccagcgtatttcttgagaggattttagatcctgtctgtatgtcattccttgaccgagtcaaaaaggagcgtgtctatgcaaaaatggttacggcacttaatgtctataacgacggcaatgactttttatcaaaatgtgtaagaacttctgattattactctacaggtactgatcttaatgtgttgagggacccgataatgggtcttcgttcgaatgatgctgcggctagggcaataggtaccattaagcataactttactagcattaatattaataactataaaactaaacccatgcacatcattattgtaaacggtgaagtttacctcaatgaaaacgcctttctcgactttgtactgagtgattttgcagcccataagttcaacttcccgcagggagatgcaggcaaaacagtacttgtcgaatctctggtgcaacggggttatgttgaaccttacgacgatgaacgtgtggttcattactttattcccgggacatattcggaaaatgaaattgcaagcatcttccggaacggtattggtaagctggaattttataacctcttaaaactgcgttggatcgggttaatttttgattcatataaaatcccggattcagttcctggtctgttcagcgttaatgcgaataaagatttcatctatattgatgagcagaaaactgtaacggaatacagaaggccggtcccgggtcgtgagtctgttaccagagtaacggacactgtcaatgacgccattgagaataccccacagtatggacttcagctcgtaaacggccctgatgccgacagtaacaatattattagcagtgaaaatactgaatccattacggatagtttggaagagtctggcgcggatatctcaaacgagatttttgaaacgcaagttgttacggcaattgatactgccgaaacggtaaacgcggatgagccagaacaggtagaagagcatgacgaccggagccagatttatctggttgaacaacttcatgaaatgctgttgagcgccccactgccccatcatgccgtcattaatattgattccgtaccttacctggatctcgatgctgcgattgcgttaatcccgggtatagatgaggcggcattttgtaatgggccatttttccagttgacataccgtgatgggtctctagatggtatgtggatagtccgtgatgtaaacaatctacgcctgatacagctgggggataactgcgccggtatgcaagtaagcacatcggaaccacgaaacacgtcatcgctgaaatcactatttgatacgtcaatgtaccaaccgttggatatccctgaagctccatcagtaaacgaagctgcttcgcctccacaaacaccgcttgaactcccccaaccacgactgaatgcacctgtggctgaagaggccagctcggtagctgaacagactaacgcccactccgaaccggattccgtcatcgctactgagtatgagcaatatggtcatttgctggaagagacccttgatagcgatggtgaggcatattctgatttaattgcctctgacagtactgaggcagaataccccgccactgatccgcagagcagcgattttgcccaattacctcgtgaaacggccctgtccgttgcgcccggtgatttggattactcagagggtgccattaagccaccagcacccgatgcaaccggaaaagaaacaatactaacaagtcctgaaccagcagaggatgtccgagaaacggtagccgccgtggagaaagcgagtcatctttctccggcattggctcgactctttgctgtaagcacccatgctgagaagaagcatgaaaaaacgcaggaaccctcccctgttaaagaggttaaaaatccaacctcctctaccacagttaaggctcctatttccattgaaccaccaggcgctgaagagaaagaggcggtggaagaattcaccctgttaaacgacggtgaagtcacagaactcgaatatgtcgagattgccaccatgctccaccaaattctgacgaagttatctgggtcgttcaaaagaaagaggaaaaaccggttcatggttttgacccagaacaccttttatctgacgcagtcatgtattgaaaagtacggaacgcagctaaatgcgcctgagctttttaaccaacttcctcagtaccaggtcacatccggtgccgtagtcaatacaaaatgcattgcattcaacataccaactctggtcgccgcatcagaccgggcaaaggtcgatattgagttaattattaacaagctaaaagaggtcgggaatctgtaa

SEQ ID NO: 26414 - DNA, 2085 bp, Escherichia coli
atgacaaaatcaaaaagaaccaacctgcacgctcaggaaaacttttacaggccgatactggagtacagaagtgcctcagtgcttttaatttgcgccgtcataatgctggttatgggctttcgttcagatggggtgaatattgcccctatcattctttataccgctgttttcctgcttttggtttgtttgtaccgttgtaaaacggcacacccctatttgatggcacactggcgcgtatttcagcgccagataatgtttattagcctcaagtcgctcaggacgatcaataaaagtaactttttctcgaacgagcgaaagtatcgccagctggtacaagagtataaaaaaaataaccgaccagtaccggatagaaaaacctacttttgtaacggctttgaatggggtcccgagcatgcagaccgcgcatatcaaattgctaatctctcaagtgacaaaagagagatagccctgccatttgttctaagccctatagcgcgacattttgaaacaatggccagatccatggggggcaataacgccatctttgctgttgaccggcgggcacccatttttgtgaccgaagataactggttcggacataccctcattaccggaaacgtcggtaccggtaaaacggtacttcagcgcttactgagcatcagcatgctgcatttgggccatgtcattgtggttattgacccgaagaatgacgctgagtggcgacagtcactgatggatgaagcgtcagaactggggttgccattttataaatttcacccagcccagccgtcttcatcggtgtgtattgatgtatgcaatgcttacacaaatgtttcggacctcacctcacgacttcttagtctggtttcggttcccggggaagttaacccattcgtgcaatatgccgaagctctcgtctcaacggtgatcactggtctgtcttacacggataaaaaaccgtcgatatatctcatccacaaaaacatgaaaagccatatgtctgttgtgaacctaacgataaaagtaatggaatgctgctttgcacgacactacgggcctgatgtctggatggaaaaggtgaaatacgcttcgaatgacactcttcaggttcgatttaagcgcctgacagaatggtttaatgcccattttcttaattatgaaggcgccgagcccattgaatggattgataccgtcggtcggttagtggattactccatgtctgatcctgaacacatgtctaaaatgacggcgggtattatgccgctatttagtcgactgactgaacaaccactgaatgaattgctttcgccgtctcctaatacactcacttcgcgtgaaatagtcacttcagatgggatgttcagtaccggcggagttctgtatatctcgctcgatggcctttccaacccggaatcagcccgggccatttcgcagttgataatgtcagatcttacgtcttgtgcgggtagtcgttataacgctgacgatggtgatatgtcttcccattcaagaatcagtattttcgtcgacgaagcacactctgccataaacaattcaatgataaacttactcgcacagggtcgtgccgctcaaattgcattatttatctgcacgcaaactatttccgactttattgcagcagcgaacgctgagacggcaaaccgtattacaggtctatgtaacaactacattagcctgcgggtaaacgacacaccaacacaaacgctggtcgtagaaaactttggtaagagtccaattagtacaaatatggtcacgtatacgacaggatctgaaaccactttgccgcataataacttctctgggtcaatatcagaaagaaagcaaacaacgctggaagaaagtattccaaaagagcttttgggccaggtccccaaattccatattgtggccagacttcaggatggtcgtaaagttgtcgggcagatcccgattgccgtaagtgaaaaagcgatgaaacccaatacgacgttactggagatgttcctgaaacccgccggaaaagtaactttgcgccagaatgtgggtttaagctatttaaataaatatctaaggaaattgcattga

SEQ ID NO: 26415 - DNA, 1104 bp, Escherichia coli
atggatgagcaaattactctgacacaaaatcaaattttcagtgcatctctgaaagtaagtaaaagccgctcgctcgttaagcggcgtatgcaatcattagggttgaagtttaccgaatcgcaggatgtccgtaaccgactggcggggatagaaaaaggtgctttgaaatgtgtggggcaattttgccatgacaacgatgctgagtctttatcagcgatggcgatcatcctttccgagctttttctgctgcaaggcgaactgtccaccagcaatgaatacggtgaccatgaaacgagttactggaccgtagcacaaggcccatgtgatgaatgggtccagtctctgctggcgagcgaaaatggtcgacgtacatttaatagctttcgtataactttcgacaactccgaagagcgccgcagcctcgtcgaaaaaaatgccaaaatgctggggagttatttattgccttattttgtcaattttacaaatgctgcatctgcgtttattacgctgcctaatagcatcacgtttaaacaggtgcaacgcaacaagccgctcattcaccctgaaaccacattaagtcacattctcacaatagaagattcggcgtttctctctcggatcaaatttaaacttatctcggcaattgaccgtctgcccgacccgtccggtcagtatgccaacatgttcaatcacatcatggatcgggcgctgctgacgcacctcaaccgggagcaaattgatagcccttgtgtgtgcaaaaaggtcatttccacctatgcagacactatgctgacgctcccgatatttaatacgacgattaccgggaaataccggcactggaccccgtgggggattaattttgtcgagtttagtcgtcaggctgcaaaggaaaaatcttgtgtctatgttcctgaacccggccaaattcactggaaaagtccggagcataaggaactggcagagtacagcctgatcaaccagataatcccgcagcaataccactggttgctgggtgtgccgacaatctggcgcagtcactatcgtgaccatagcaaacgattagacttattcaaggagtggagggacacaaatggctgcggataa

SEQ ID NO: 26416 - DNA, 663 bp, Escherichia coli
atggctgcggataattctgctcgtgcaatattcatcaggggactgcttttactagggatgatgctttatcttatttatagtctggggttccagaacaccgacgagctaaagcaacaaatcactcaggaggtgaacgccagtcgtagccttatttctaatgaccggtggttatctgttattgcaaatagtgaggctactttatccaccctgattaatgactataagctgatcgactatctgaatacgatactgatcccggacacatcgacacctgcacgtggaatgaattacgttgccgaaaagatgacatcagtaaactacactgtggcaaaaaatctacccctgctgatttatcagtccattttccgctggaatctgatactcggttggctgattttgttttcaccatacctaattgctatgctcgctgatggcatgtatcagtggaaattaaaacgttacgttttcggtaatgtaaccgttcagttttacagaatctggttcagggccttctggataattggtgcattaacctttatatacctatcaatgcctaatatgtcactttttaacaatatcgctcaactgttcccccctgtcgcattgttgatattgggaattgcactcaaccgtttgtggtctaactttcaaaaacttatgtaa

SEQ ID NO: 26417 - DNA, 1182 bp, Escherichia coli
atgtttaaacgtaataataagaagtcacctgccaatatcaaagaatcgcttgatgagaacgctgaccgtttctataaaatgttccgaatccataccacgtcaaaagtggttatttcactgctggcattagccgccgcaggggtttcggcctttaatatttacgataagtatcaggaatccgaaggacgaatggatcatatcgccgtcgtgcgtatctcgggagaaatgggtaccggttctgaggtcggcgatggatctgtgatagccacagcactggcgaaagcgtacaacaacccacatgccaaagccgtcattattgaagctgagtcaggtggcggcggtccttcagacgcgattattatttaccgccagattaatgcactacgaagccaccagcagaagattgaacgggtttcacatgccgaatccacaagcaagccccgtaacacgagtgatcacagtgcttcacgttcgcaggccgatagcaatgccgaactgtcgaaacgtaatacgctggacgttctctccgccgggagtgggcatttcatttctgatatggaaaacagctacaagcctattatcgtcagcgtcaaaggaatttgtgcgtcagcatgctactacgctgtgtcccctgctgacgccatttttgcagacagtagcgctctgaccggttcgatcggtgtccgaatggatcactggaacctgtctcgcgttatggatactgtcggcgttaaaaatgagccactcaccgccggggagtttaaagatgcactcgacccctatcatccactttctgatgccacccgcgattttatgcagaagcaaatcctggatgcaatgcacgaacaattcattgcggacgttgagcaaggcaggggtaagaaattattaagccgtccggaggctgatgctgtcgcactgtattccggcagggtatggacaacgcagcaggcgatccggtacggactcatcgacggtgacctgacacctgtcgaagtccgttcacgcctgtcccaaatgtactcaaccactatcttcaagacgtacaacgagccacaacggtcgcttcgctccgcgctcgggatgttaatgagtctgtcgactaacgtcgaaacgctggcaggaacaacctctcggatacttgattctgttcaggccaccagctatccgacggtgagataa

SEQ ID NO: 26418 - DNA, 729 bp, Escherichia coli
atggatgcaattttgatggtgtggcgagtgataggaatcagcattattgtcctagtactcattgtgctttactgcctgatgggatttgtatcgtcggccattgctgaacgcaggacagccagacagattgaaatatacctgcctgatgatgcagaagggcttctgagcgacttaacgctgccggtcaatgccaccggcaccacgcagattgatcacgttcttatcgcctctcatggactctacgtcatcgagcagaagaactatgcaggaaagctctatgggaagctggaggagagccactggcgaaaatggaaatcgtcagggacactaaagttacaaaacccgttcaggcagaactacgggcacataagggccattcagtccacgttacgcgccagcgagctggagtgtatcaatgttgtcatcattaacggcccctgcaagtttgaaggtgagaagccagactggctttgcatgggtatggaggagttcgttcggaaagtcactgagaggcgccagttaaatgtattcaagcctgaagcagtaagttttatccgtggagagctgaagctaaagagaaagcctccgggcctttatactgatttgaaccatatccacaacgttaccactcgatacaaaacaaccatgcggctggagcagcgtattacctataaccttttgcgcttttctcggcttatactgagtaaaatgttcagatcggcaaagtaa

SEQ ID NO: 26419 - DNA, 357 bp, Escherichia coli
atgacaacggcaaacgtaaccaccactacttaccgttccgatgacatcgtgccttttcgtcggccgcagggagatctggataatcgctatatgccgcaggcttacgctctggtgcggagctgggccagcaaacctgcggagtacggtgcaggagttctggctacctacagacagccggtagtcaatctcgggtataagataaaagggactcgcgttgttttaattcttgtccctatcgaatgtgagccggttggcgtaaaaatgactgacgccgctttatggccgtctctatcgattggggaggccatgcgaattatgcaggaagcgtggcaaaatattccggagttgaatccataa

SEQ ID NO: 26420 - DNA, 315 bp, Escherichia coli
atgaatacttttctttacgtgctggtgggctggattatcgttctatatctggttaataaagtccgcgaaaagtacagcaaaccgaaaacagttaatatcctagtgaaacgcaatggcgtttatcaagaagtggaagccgtagtgatgcctcgaagccataatagcgatgtgggtacaggtaagaccggcaatgaagccgccccacaatggttgaataaagaggatgatatttctgaactggagtactacagtggcgggtcactcttgaaggctgcaagagattttgaagctcaacaaatggagcaaaaattctag

SEQ ID NO: 26421 - DNA, 234 bp, Escherichia coli
atgttactcaatattgcattaatcctctatgttgctgtttgtctttacctctgtctccgtaataaaaaggcactttaccgtttccagggcggagggcgtcagtttacgcagtccagtaagagtggagcgaacacaggcgaaagtggtttcttcttaatctccggctactcagacactggcgttgggggcgacagtggggacgctggtggcggatgtgggggcggtggtgattga

SEQ ID NO: 26422 - DNA, 237 bp, Escherichia coli
atgagcgatttattcagcagcgaatcaccggtaacactggctcaggcacgcactgtcgccgctgggtaccagaacgtctttatcgaaaacctccagccagcaggccatttccagattgtcatccgtgatcatcgcgaccacgacagccagctggtctggcgaaactggaattatgaatccggtgccaatgatgcgctcaatagctacctgcaaagccatgggctgaaggccagttga

SEQ ID NO: 26423 - DNA, 546 bp, Escherichia coli
atgaaaactttaaatattcaggttaatgacatcgcagcaattagcgcacttggcggctcaatgttggcggatattatcgctgcgcaatataaagtgattgatgataccaaagacgcatctgaaatggccatgccgtgcattgcttacgggcagatccccgcaaacatcggcccgggcgtctttatcaatcgcgtgtacagcatggacagccagtcactgagtgtcagccagcgttacgagctctttaacggacttgcaacccaggcgtttaccttctttttccagtcgggctggtatggcgcattccgtgttgtgtctttccgtgataacggtcctgccggactccttaatatcggcattgtccatgacaaggtgttaaacgaattttgcgatgattttccacgggctaatgtcagcgaaactggcttcaactgcggcatgacgtttgaccagatccggatgtttatttcggacctggcctatcagatgcctttgtacaacaaccaagaccacttcgttaaactcgccaaacacctcgcggcctga

SEQ ID NO: 26424 - DNA, 438 bp, Escherichia coli
atgtataaatatgacaggaaccggcagacgttcaacttgatcaatgcgcttcagccggtctatcgcaacaatggtggcggtttgtttgagttcgaccgcaggaagcaacatgaaacagcagatctgatcttcgaggcactgactttctccccaacgcccgaactggagctggcgaaatttgtccgtctcaaatcggtgcgccggattgcacagtttgatgacggggaagtacgttatggggttcacgtggaactagacgaagctgttaatattaattccttccgcatttttaaggatgataatacaggcgggtttgatttttatttgttttctgttttaggtaataatgcagagcttgtccagattaatctggatgccagcaatattcatttgcaggacatttttgaacggtctaccggtttgtgtttgtcctactga

SEQ ID NO: 26425 - DNA, 141 bp, Escherichia coli
atgaaaaccaatctggcttatgcatctaattgttctgactctctttactcctttatttatcctgcactgcaacaacgctctggaaccgagaatgaaagtctctatcagcaggctatttccgcctgccatactccgaaataa

SEQ ID NO: 26426 - DNA, 282 bp, Escherichia coli
atgaagaataccgcaatcaacatcagcacgaagaaaccattgcagacagttaaggacccggtgacccgggtcagcattcattgtacggctaaggatgagaagggcgcagacgtggaagtaaatattctcgacctggaacagcaccacaccaccaacgaaatcaaattgacgtttggcggttccccttcccaggcgctgacaatgctcagcagagtgatggtcgtgctgcaacagcaggcggccgaagaactgcaacggaattcctgctcccgtttgcagtga

SEQ ID NO: 26427 - DNA, 1206 bp, Escherichia coli
atgtccactgtcgaaaatgatgtaaaaaccgctaacaacgatatcagcctgcgcacctacctggagcgtaccggtaacggcgcacgcaaaagcaatggtctagtcattaacccggcagtggtcgaagaggaagaggggtttaacacccgtactgctggcattggggagagttactactcattacctgacgtggtagcccacctgaacagcctgaaagagtcctacaagatcgatcctttaagcgtacaagctattgtcgtacagattctgaatggccgtccggtcctgcgccagggagcatgccgtatccgtgccgtcgcgatggcaaacatcgagctggcagatgaagggcgtgaattgatcacgttaattcgatgcgaggagtttcgcggtagccgcgccagtgccgagcagtttacgctggacggtaactcaaatctggctctatctgtcgtagctgaggcgctctccatcaaacggatggttgaagacgcggaagaacccaaaacgttcgctgaactggcgaagcgtcgcggtaaaaccgaacagcacctgcgtcagatggttcgcgtcctggatctgcctgaagccctccaggccatgttggtgaagggtgaagtgagtatgtatgtcgcgctggatgaatacctttacagcggcgatgaagcggtcaacaacatcaccaaagccattgatgtttatggtaaggcgacggccaaaaccctgaaattcgtcaaagctggcaacattgatgcagcgatgaagccgaaagcagccatcgtgccggacgcaaatgcgacccccccggaaaccaccgtgactgaacaaacgtccggcgaaggtactaacgatgagaccaccccaccgcagctggtggacgggagtgcgggcactaacccggagccgaccccggaaaggaccccggcaccgcagatgaaagacccggtcaaaacgccagagcctaaagctgtgtcggtctccagcgtactgaacaaaaagaccgtgacgacgattgcggacacggcaatcccgctgttttcgcgtattgcggaagaagctaaacaacgggccgctaagaacctcagcgacgatacttacactctggtgctgaccaatgacgagatgaatgccatttgtgaagctcacggcgatctgacgcagtacctgcgtaaacatgctgaaaagcagaacaagggccaggcatga

SEQ ID NO: 26428 - DNA, 201 bp, Escherichia coli
atgattgaacaccgcacagagatgcgccaaacggccattaaatcgcttcaggaagccgaagaagcattgacggcactggctatgtcctatgagctacagcccgatgataaggccagttcgtgtcatccacggaccggtactctctccacggccagccaggtacggaaattgcgccgtgtcgtcgaaaagcagaaaacttga

SEQ ID NO: 26429 - DNA, 216 bp, Escherichia coli
atgctagtcacattcagagtagcctcttacccgcttaaatgcaaggagaagaaggccatgaaactgccgaaccaacccgttgttttgtgcgtattgatagtatgtcttacgctgttgatattcacctggcttacgcgcaattcgctctgcgaactgaggctaaaagacggtacacgggaagtgtcggctgtgatggactacgaatccggtaagtag

SEQ ID NO: 26430 - DNA, 606 bp, Escherichia coli
atgaatcaaacagaaacgggcccgtccggatttaccgaaacaacggtcgatcaagaacgcatagccatcagggtaatgattggtgatgtggtcggccgctaccgtaagcaggtgccgcctgatcgcgtccagaaagctacttttgaagtgaacggcgggctgctcatggcgctgttactggctctgctgatgctggtctgtattattcagcgtctggcaactggcgaccgcctaatgagctttaccggagagcctgacgtccgggatattcagtttaccctgatgctggtcatcgagttcgcacttggcatggttgtctggtttctgattgcaacgggggagttttcccgcccctggctctactgctttactccggcaaaacccgtctggctttttgatgaagtggaggatgcagacctggtactgctttccggcaatccctttatcaaacgctggcttcacaaggaaatcttgaaaatcaggaggctgacgtatacccgtctcgatgaggaactggagaaaatcgcccattacccggacagcctccggcacagtagtgttcgtgctcaccgtttgtcactgatcgctggtacgaaaacggactga

SEQ ID NO: 26431 - DNA, 282 bp, Escherichia coli
atgaaactcagtcagctggaggtggggatgaccgtctggtcactctcccggaccaaaatgggaaacaccaccattaagacggtgactcttcattctgtcgtcatcaaggaagtacacgataatcacgtgattgccagctggaatggcaatgcaccgcgtcgtttcggggaaacggctatcactggttggaaaaaggaaaagccactgctgatccgcgaccgttccggaagtgcccgactggcgacgcgggaagaaaaggcacgaattctggatacaaaatag

SEQ ID NO: 26432 - DNA, 324 bp, Escherichia coli
atgaataagcctctggttagcttcgcggagttatccggcaatgctattaatgttgcgcgtcagtctgttatcgatatggaaatggacgcaacccgggaaaagattggaaaggctcgttcgttattccactcaggtattcatcgtgccgtgaatggctatccgctgattcagtctgcggctaaccagctggctgtcattaagcgactccttggcgacacgaagtacctcgatgcctgtattaccgagaatctttgtatgttctcgccagagggttatctgtacctgtttatgcaacgccgcttcattaatgaacccgtggcctga

SEQ ID NO: 26433 - DNA, 207 bp, Escherichia coli
atgggccatgtcgattatacccggacactccgggtccagctttacgatgccagccgctttcatgatggtgcgacggcggaacaggctggtgaactgcacaccgtcgcattcagtaaacccgcgattgccgatgatattcagaaaattgtcgataccactgccgaggtgctcggtaaacggtacagcgttaacgtattctcgaactga

SEQ ID NO: 26434 - DNA, 225 bp, Escherichia coli
atgcataaccttgaaatctctaccatagccattttcagtgcccagtataaaaatatcgaagaggccgagaacgccggggccttatattccgtcgatatcgaatatccgatgactctgaatgacctgtcgctgctgtgtgaatctgtagcaaaagccgttggcgtccctaatggggtgaagtaccagtttgtcacccagccgcaaccggaagaaagtgattattaa

SEQ ID NO: 26435 - DNA, 207 bp, Escherichia coli
atgaaattgttctacagcaaacctgttcgctttatcgtcattatctgcgtatttctcctcggcgttgataacctgagcgatatgttcgtcgatatctcccgaccagtattctacggcggtctcgctgcactcctggccgctgccgtcgttattgcccgcgttgattacaacaagaacgcggaaaaaaaggccagccaggtccagtaa

SEQ ID NO: 26436 - DNA, 492 bp, Escherichia coli
atgaagacgttgctgctgccctgggctatcctcggcggtttagtctccttgtcgcagagcgccgtgtcctcaccggcttccgggaaatccacgtcttttttgatttcgccacgcccgcccaccatggtggcaaactccattaataccggaccggcgggaaacagaagcgatgcgccggcgctgacgcgatccataataccggcattgttgtccgtcagggtgataatagcgttcccccaggccttcgccagtggcactgctttttccgctgccgattcaagcaggtcagtggcaatatccccccatgaaggttccccctgtggtggagagggtattgcttcagtcaggggaggagggggaagggtgacggcggccctggcagcgggctttccgttaatgtttacatttttagaaccagtattgatggccccgtccttgtcacaaaagctgtttatccatgattcaagctggttctgtttctcctccacataa

SEQ ID NO: 26437 - DNA, 507 bp, Escherichia coli
atgcatacattaggcaaaatggtttctccaatggaaaagacgcaatcacccgcagagcgcttttacgaaagcatttattattctgatgaaagcctggaagaggattacctcgcggagctccgcaatttcagcagcgaccactgggacactgcactgcgtgccgcccgtttgtctgcggcggtaaagcgtttcaagacatcggagatgcttcgcttcattctggaattcgttgttcccgagaacgctcaggaagacgcccccgatctgacaccgctcgcagcgaagcggctttgcaactccctgttcggccggtctggtagccagtccattcttgtctatgtctttggccaggcaggccgtgtgcatcgcagtgcaacctgttcccccaaaaccatagaggctatcgctgctctttatcgttctgacgctgaacgctactggaattcaactcttgcgacaattgaaagggtcaaacacacctaccgcgcaaaaatccgaaactcctga

SEQ ID NO: 26438 - DNA, 261 bp, Escherichia coli
atgagttacgcccacctttttgaaaattgcgatcatgttattgagggcaacattctcctcgacattgcgagtattccgcccgttctgaaaaaggccctgatctttctcatccaatccggactggagcgggaggcatttaacgctcaattaacagagctcttgatattaccgcagccgaattgtcagcccacctgcttactccgggaaacgcctgaatgcggttctttgtctttaccttgttttaatttcactacatgctaa

SEQ ID NO: 26439 - DNA, 393 bp, Escherichia coli
atggacgataaagagcagtttacgagtctcgtggcaaagcatgcctccagattcaccgaagagcagctggccgggtatgatgcctgttcccagtatggagaatgcgtctcgccttcatacgaagtattccgggggtatcgtacccgccacaccctggatgaatttctggagctggccatatcgctgaatgccatccacccggatgaatatttaacggatatgctgctgaagcctcatgaggtgatcggtgctctggccgatgaaggcgaccagttgaacaacgccaccccggtttatttcttcccggataccggcgtctatgcagcggccgtcagtgaaacccgtgtgctcgatgcctggctttgttggccatgctacccggcgaactggtaa

SEQ ID NO: 26440 - DNA, 204 bp, Escherichia coli
atgttcagtactgagaaaaaatcagagcatttaggtcagatcatagtgattgatccggcgcttcttgggcagggtatagaggttggcccggtcgtagtgtttgatttggggcacgccagcaaaggggttgcggacttgatgcgcgatgctgaaaagcttgatggtttatccccaacgacaatagcaaacagactttcacgatga

SEQ ID NO: 26441 - DNA, 1206 bp, Escherichia coli
atgcgcagtgaaataccttctggtagatttttttgtttggatgagtttcacaatttccatatgagcgatgatgtccttcgtgaaagactccgttcaatagacggcatccccgctgtgagctatcaggtaaatggcgaaaatgtttttgtgttcgagaaacttgtccagctggtaaaacagaatggccacaacctggaatcagccttagctctcgttccgaaggcaacaatgaccgccgcagaggctattgaagcgtggtcggtattccccgagccgtattctcgtgagaccaatacaatcgaccatagtcaggcgatctatcacccctatttaaatgcgtatctgccccggaaatatcccgaccgtgaatcctgtaatgcggatgcggccagattacttctcggcaatcctgtcgagggtgagggggattttgtctacagggggcagtccatggtccttcgccagccctttaccctggaccgtcttcccccacgacctgaatgggatgtgccggtgtctgaagatgccagtgcctacacacatctctggaacacggattttgtcagtggcttcgcaccggttaccgaatcactgttcaacgggataaaatcggcggagtgggaatggaaccacgctatcgctgcgacatacgcatacatgggaaatccggagtgtatctcttcgttgtggtcacgggcgggtgagttcggactggagcagctggagctcaaatcctgggacgttgacgagcaagatccggaacactaccagcaattccaggctctttacccggagctgtccatgttgtccccggcaattatccagaaagcctatgacgagtattgtgaatcgatgtgggaaaaccctgaaaggtgcgacgggtttctgtatcaccttattggcagtaccgtcagttcggatatctcccgcgacaacccagaaaaaaccggcagactcatcgctcacgcgttactgacgggggcctcgattgaggatgcctgtcgctttgcctcagaggctcagcagttcgataccgctctatcgggactggcttaccaggtagccgtggccatgaaatttgttgccggtgattctgcggccgtaaggaatgaaggccatccggtcattacactttccgactccttccgtcttatgagaaaagcaaatattaacaccctgacggccacacagaacaaccggaaatga

SEQ ID NO: 26442 - DNA, 492 bp, Escherichia coli
atgaagttgacaaaaatgatggcgaccttgttcctgcttattcccttgacatctttttcgcaggaattgggccagcgaatatcacaggatgacagtgcagaactggcgaataaggcaggtacagctttgacagagatgcttttgctaaaagttcagcaattgccacaggtgaaaaagaacagtggaatggaccttgcggctgcaaatgacgctgttgcttccttactcagcaaagagtttttcatttttaaaccagttgatgaaatcagcataaaaacctctgctcaaaaattaaaagagctgaatgatgatgccgacgcacttgctaaggggtacaccatcattcaaccagatgatgtcggaagctcctacatttcgtataaggtgacgtccagctctcgaacctgcttcattcgcctttcaaaggatctgtcatcgtcattaaataccagaattgtaactgtgaatagcatggagtgttcgaacccataa

SEQ ID NO: 26443 - DNA, 228 bp, Escherichia coli
atgattattatccttggtgttctgcttttattgtctcttttcttcaatatctggttttgggatcactatatgcgtgtcattccgttatcagcggataaaagtagcatgtttgctatcgcctccagctgtgaaaaccctcggtgggtgcaagaagttgagagccgtggggggatgacccgtaaggaatgggctgactttgtggatcgaaattttaaccctcctaaatag

SEQ ID NO: 26444 - DNA, 807 bp, Escherichia coli
gtgagagaacctcgtccacgccatacattacaggtagtctgtgtcccgtctctgaatatacaggatctggggctaaccagttttcatagctggctcttatcaaaaggctatgacacgaccaatgccaggaacaaccgtacttgctgggcaagggaaggtggctggcacctgaagcgatgcagacatctggcaacgggcgaagatcatttctggtttatcgcattcaacggtaccggcggcgacatttttcctgtgaaaacccagcaggactaccgtgctgcctaccgcaagcttgaagcgtatggatatgcaccggccgttattgaacaattgaacacaggcgttgcctataatcttgcttattcacggacaccgttaaaacgccctgagagcgccaccagcgaactgaagcgaaaacctgacgtgaatattcagggtgagccttgcgaacgctttgtgaccgaacggagcagcgcagcgcagaataaattcaaaaccctgctcattgagaacttcgccggtcggtgtgcagtcactggatgggttaatggtggtgtgctggtggcggctcatatcgagcatgggacgcgctacaacccttcgaacggcatcctgttgacgccgacaatgcacgcgttgtttgacgcggatctgatgggtatagacccttcaacactcaccgttcattttaaaccgggcatcgaggcgggagagctgtttgaaggaaaaacgctcaatccgttggtgtatgatctggataccgaccggctggctgctcgctgggctgactttataggtgccgagtga

SEQ ID NO: 26445 - DNA, 408 bp, Escherichia coli
atgcaaaattgcctttcgggatatttaaaagcgaccattgttattttatctgcgggcctgacaggttgcgacctggcaaatgggactgcggaaagtggagtgtatcagaaatacacgaatggacctttcaaggaaccgactatcgtgatgagtccgggctggcggatggatgaccacggcagggaagcactaatattcgggagcagccactgcccggatgtaaacggcaataatacgtctgagggcggctgcgtcctcattgaggagcactctgcgactgtcgcggtcactgttgttgatgcgacaaatcagtcccgtcgccaggaaacctggacgattgaacgtaaaaaggatcgagttatagtgaagcgcccggataacagttttgtgatgccctggggaaaatag

SEQ ID NO: 26446 - DNA, 450 bp, Escherichia coli
atgtcgagcccggacctggcactattttctgaagatgtccggaaaaactgcgccggtacgtgtgttcttaccggcgttcgaggcagacaaagaactgaggctgcgcacataaaaccccgtcatgctggtggtgagccggatgtgacaaacgggattctactgcgaagtgacatcaataccctctttgacaattggcacttttcgatcgaccctgattcaatgaaagcccgtttcagcccggatgtgctctccgtcgataaagacttactacaactggaaggcaagcaaattgatttttcccgcctgcaaatgcctatcaatattgaacaccttcgacatcactggaacaaattttttaaccgtcatgtcaatccagtcataaagaatgcgctaaataaaaaaatcaacaattatgaaaaacggccagttagcagcaacatacattattag

SEQ ID NO: 26447 - DNA, 171 bp, Escherichia coli
atgaacttgaaaagtattgttccgaaggctgctggccttgctgcatggattgtaggaatcatttatagtggttttgctctttctgttctgtgggggggggttttgtgcctctcggtgtggtgccgatcacaactccatgggctattggaatttactgcttggcaggcataa

SEQ ID NO: 26448 - DNA, 405 bp, Escherichia coli
atgtccgaagcactcaaatcattaaacaacattcgtactcttcgtgcgcagggccgtgaactgccgttagagatccttgaagaactgctggaaaaattaagcgttgttgttgaagaacgacgtcaggaagaatcttcaaaagaagctgagctgaaagcgcgtctggagaagattgaatccctgcgtcaattaatgcttgaagatggaattgaccctgaagagttactgagttctttctctgcaaagtccggagcacctaaaaaagttcgcgaaccgcgccctgcgaaatataaatacactgatgttaatggtgaaacgaaaacctggactggccaggggcgtacccctaaagcactggccgaacaacttgaagccggtaaaacactggatgatttcctcatctaa

SEQ ID NO: 26449 - DNA, 273 bp, Escherichia coli
atgaaccgcactgatgattccataacgcaactatcttcactttatgaacggctcggagctgtggctcatgaactggaatattgtaaaattctgctccctgaacactctgaacaactggatcttgatgccgcagcaacatatgcaatgatgctccgcattgaacagtgggcagcaaacgttaagaacgcatataataccaacacatacgaccctttccatattaacgaaaaggacaaacaactaagaaatcaagaggaagaaaatcaatattaa

SEQ ID NO: 26450 - DNA, 669 bp, Escherichia coli
atggcggcgtcgcgaattacacacctaataacgtcctgtaccaaaggtaagcacagccagtgcggctccatgccagaactgagtatccggtctggacagacaccagaagaggcaatgtccagctgggcagcaacgattaaacggtcgcaaagtgcttcaccggtaccggccctgtcgctctatgccggtaatcactggtcaacggcaaaagagatattacggacaactgagaacctggagttgtgggtgatctcggccgggttgggttttttgaatagtcgtgacctcgtggacgcttatgaagccacctttcatgatttaccgttcagtcaccgacaatggtggcgggaattaacaaatacattcgggaaagaaaggacggcgaaatctattgagacattgatggcagcaagacctttcgatgattatgttatcgctgcctcccccgtttatatcgaggcgacggaggatgatatcctggcaggggcaagcaaattaaataatcacattgcccagttgacggttgtaacgtcaggggaatattctggactacttgaatcctatttaattcgtagcgaatcccgtatgatgcggcaactatcaagcaacatggtatgtcttaacatcaaacttgctcaatatattattggaagtcggcgctattcatga

SEQ ID NO: 26451 - DNA, 456 bp, Escherichia coli
atgagcatgaattcgcagccggaactgaagttgagtacccgtaccgaacaactcgccagtagtcgtgatgccgctatgcaaaaatttctggacggcatgacgctgattgccgaagcctcagcaatttgcgggttttcactgtttaacagcaaaattatggcccctaatgcttttggccttcctgcgtccctggccgcaagcatcgaggaagggcgacagcaaatagaccgtaagacatggaacaatctttttgaagaaacgggtattgaccgattctggaatcacaaccagcgggcggagttccgtgagtctctccggaacgctccgccaattgcgtcgttaaccgtaatccgcagtacattgcgccaggcagttgccatgcgcagcattacgcttgctgaagggtttgttgatctgctatgccagcttgatcgccggtataaaactaatgcctag

SEQ ID NO: 26452 - DNA, 348 bp, Escherichia coli
atgccaaaaaaactggtactacgcggcatttttcccgactcgaacatgatgagatataatggcttttctcaggataatctcttctatttaaacgactttgagaatgtcgtttgcatctgctccaatgcagcaacaccgcctgtcggcagtggaatgaacatgtacgatcggcttgctgtcttacggaaaaccgatttcacgggtgacattaccgacccgaagggctggaagttccgattgttcggaaatggtaacgtccatatctcagttgagtgtgaaagcctgcataacgcactgaatgacctgattagcatttattttgccaaccagatcccggccaaaggataa

SEQ ID NO: 26453 - DNA, 1221 bp, Escherichia coli
atgatgactgacaatgtaaatttgatgaacggggatgaacaaactgcgtccagtttaagtgaagagacttcaaaaacgccccctctaagccccgagttactgaagaattccccttactcgtcaatagctaaggttaaatatttcaccgagattgaacaaatctgcctcgataagagcatcagcaccgaaaacctcgaccagtttttcaaagcccactggctgcgggataaaatgggggggtcttttgcccgggctcaggagatgctggcggcctacaagcaatacgtggacgaggtgcccgaggaagcacgcgcgattgaaatccctgaccagattaaagatgcattcagtgattttactgcgtttatcacctggtacttccgcttaagctatacggctatccagagtgatagcgtgaaaattgcgaaggcagaaattactcagttacggcagcggaatgctgaaattctggaagaactgtcacagtcgaaagaacaggctacagtcctgaataacgaaaaagttaacctgattaacctgctggagcagcagcgtgaactctccagtaaattagaagattcacttcaggaagcagaagaaactctggcaggaactcaaagtgaattacagcatgcccaaaacgagatccagcttttacagcagacagtagggacactgaaccagcaactgagtgagcgcaaacaggaactggcctcgcagcaggagtatcagaagcagctgaatgatgagaataaagcgcagcaggtagagctgacagccctcaaaagccagaatgatcacttacaacggaccgtgtctgatttaaaagtcagtgtcagtcagcttgaacaggacctttcctcagtacagacccattcctctgaattgagctcatctttagccgaaaaggacacgaccctgacgctcgtgcggtcggagctctcaacagctaaaggggagaatgaccaactacgagctgaagcacaacgcttagctgatgagagcctggttgccaaaaaagtgcaaacagatcagacagaagagcttcaacagctcaggaatcagatgatttccatggaagcgacactcaatgcggaaaagaccattgccgagtctttacgaggaacaatcaagcagcttaccgaagctatgaccggcgcagttgccatcaaacctaaatcctctggggcatcaaaaccgcgaaacaaaaagacgacataa

SEQ ID NO: 26454 - DNA, 300 bp, Escherichia coli
atgctacggagaagactgaataccaggaactccctcatttcccggaagctagacgataaaattaacccgaatcacaaccttaaaattgggctaaaaatggcgtacatactttcgatgagtgagcaggttaaactgaaggcgtttttggcggcagtactcgatgactacaaactgggagctatttcacaacagcaagctgttggcgggatcactagcctggttgatgctattgagatcagtgattcggggaaaatcagcctaatgctgtcggaaggacgtaaactcctgcgaacgggataa

SEQ ID NO: 26455 - DNA, 1296 bp, Escherichia coli
atgggccagaagtttgcagtttttattgcttacgatgacgaaccaaacacgaaacgatactcggctgaatttcagacacaggatgagtatgtaaagggatggcagtcggccctgaagaaagcacaccacacgtccgggcagaaatctgtgatcagctgcggatgtcggggaaaaggcgcaaagcgtctctacgtccgctcactaccaaacagtgatacgttcatcctgattaaggctgcaaatacaggcactgagcatgatccatcgtgtgtgtttttcgaccttgatgccaggcatacagggttaaagggttatgccagcaatgttgtacgcatcaacaatgaggggaccatgtcaatccgccttggaataggcatgacggagaaagatccgccggaaaagtctgaggttccttccctgccccaaatccagcgacctgaaggtggccaggcttcaatgaccctctccggacttctgagtttgttgtggactgaagccggtcttaatgtctggtatccgaatatggccgggaagcgaaatgattcgctggttcgataccggatgttggaagccgcaaagcagattagatcgggtagagcatgtattggcgaccatctttttatcggggtggcggactctaaaagcaaagtggccagtgagcaggttcaactgctgtcgtcggcggaactgagcgacaaacgactgctgctgctatcagtactgccgcgctatgacgcagaaaagcatgagaagccgctgaagtttctacctatgcgtaacttcggcggtatgccccttaccttctttaactcagacgggcactgggatagcgtgaagcggcgattccctctggaatatgccgcctggaaaaatgggggcaaagttgttgtttttgctcttacatctcccgtatcggtgaccagtagaggtatctctgcacgagctcatcagatagtgcttatgctggtgagtgataactggatacctctggactcctcctacgaagcgatagtgtcccgtaaacttgatgccgaacaccggcactatgttaagcctatgcggtatgacgccagtgcgagcgatgttttcccagatttttatttactggatacacgaagtgataagccgttcccgatggaagttttcgggatgtcgacacctgcctatcttgcgcgaaaggaacttaagaaggcgtattacaaccaggaatatggggcctatggatggtggcactgggatgctacggagaagactgaataccaggaactccctcatttcccggaagctagacgataa

SEQ ID NO: 26456 - DNA, 168 bp, Escherichia coli
atgacgtattttgattcagcagaagacctcaccatttcaaaacagagagctctgcaagagcttgcaaaacatggcgtcgtagccagcgacatagacgtatttttttccgagttgggtgagagggaagagtacaacgcgcaagaagtattgatatggctaggctattag

SEQ ID NO: 26457 - DNA, 1428 bp, Escherichia coli
atgtacaacgatagaactgagcctgcaataacagcattgcttaatgatgagacgccttcctctatccataaattactggtgcaggttgcaagtatctatgacgtaaaagatttggctgcgcaacttaatgctgcaaccggcagcgactggtcgagggcatcacttattcgccagatcaaaggttcagttaatgaatgtcgaataacccaggaagaatatcattatcttcgatcgttgctcccctcacgcccagcagactatgaccagaaatttttccgttttattgacttgtttgctgggatcggtggcctccggagtggttttgacgccattggcgggaaatgcgtgtttacaagcgaatggaatcagttctcccgccggacatacagtgcaaactggtactgtgacgagactgagcactatttcaactcagatatccgggacattacactcagtaatcttcccgatgtttcggatgaccaggcctatgcttctatcgatgcatccatcccagaccatgatgttttgctcgcaggtttcccatgccaaccgttcagtattgccggtgtcagcaaaaagaactctttgggccgaaaacacggctttgaatgcgacacccaggggacccttttttttgatgtcgcccggatcatccgagccaaacagcctgccattttcgttcttgagaacgtaaaaaatctgaagagccacgataagggaaatacgttccgcatcatcatgaaagcgcttgatgaacttggctacgatgttgccgactgcgatgctcacggatcaaaggaccccaaaataattgacggtaagaacttcaggcctcagcaccgggaacgtatcgtgttggttggattcaggcgcgatctgaagctccatgatggcttttcgttaagtggtgtatcggctctttatccttcacgacggccaacccttggggagctgctggacgctgaggtcgatagccgttacatcctttctccaaagctctgggagtacctttataactacgctaaaaagcaccaggcaaaaggtaatggatttggcttcggactggtaaatccacttgataaatcagttgtttgcagaacactcagcgcacggtactatcgtgatggctctgaaattttgctagaccgtggatgggatcacagcataggcgaaaaggactttaatgatcctgtaaatatggcaaggcgcccgcgccgtttaaccccgcgagaatgtgcccgccttatgggattcgagcaaccgggaaaagttacttttcgcattccagtctctgatacccaggcctatcgccagttcggcaattcggtcatcgtcgacgtatttgcggccgtggccagtttgcttcgaagccgtattgagatcgccgttgcggctcgtctcaagggagagtttgaagcggcatcatag

SEQ ID NO: 26458 - DNA, 516 bp, Escherichia coli
atgactctgttgaaaaagttacttttgccgacattaatcgtccttttcccggcggcaactctggctgcccaatcgtcatttgaagcgaaagtggtaaaaattatcgacggggacacaatcaccgcgctcgatggtcagaatacaagcatcaaaatccgcttgtacggtattgatgcccccgaaagtaagcaggcctttggacaaaagtctaaacaagcgttgagcgccgcgattgctgcacagaatattacggtaatagaccacggacctgatatttacggcaggatgctgggaaccatttggcttgatggttatgacataaacgcctcaatggtagacagcggctatgcatgggtataccggtttgacggtaatgccatcgtcccaaactatctgaaattcgaagcttcagctcagaaagcagttaaaggcctctgggtagatcctaatcccgttgccccctgggagtggcgccagcaaaaccagaaacctcaaaagacgaaaagcagggggtga

SEQ ID NO: 26459 - DNA, 924 bp, Escherichia coli
atgacaagacagcatcctttattgaaaattgcgcttaatagcgatggacatctttcgtggccaattttaccaggagagactcaccgctgcccaacgtgtctgcgacacgttactacgggcccggatggggatttggtgcattcgatggaggagggcggcaacgtctgcataccttcagcttctgttgttatttcaaaggcaattattgaaatgctcagcgcaggcgaacgtctctatgttaatccaatcaagaatgggaataaaaccctagcaccgtcatttatctttctgcatacagaccagcaactccgcccatttatcaattcggattatcagccagccggtgccagctggagaagtgataaaggtttcaggcttggccttttctttatgaatgagcgagcctctaaaattaataaagaccagtttgattttattgcagtaatagacccattgacctttcagtcagaatttgatgcgacatggtcccgtggtgaatttgatgaccctctaaaggcattacggtattcaattgtttctgaaaacttgtcttccgtctgggtgaaatggcccgtaaaaaacctgcaaccgaggaaagaaacggtgatggccgattactggtatgactattattcacctcattccccagctcagcaggctgcttgcacagcaacggtgactggaatagatgggaatgtatccggcgaaactatttacatgctccagatcgctttagagcggtcgacagttgagtaccagcttgtaaaatcgctaggggtcatattgctactggataatacaggaaatttggtatcggaggcgcagccgcactttgatataatcatcaaggcatgcatatcgggcgtcagagactttgttcttcagaatcctcggacgctgggttttgaaaacaaggttgcatag

SEQ ID NO: 26460 - DNA, 780 bp, Escherichia coli
atggtacaagtactcaacaccactggtttgaattatcaacttgaaaaaacaatcactgaagctgaggaaaggataattctcattagcccataccttaagcttagtaatcgcattaaagagctgatcgaagataaaaatagactaaaagttgacatcagaatagtttatgggaaatcagaactaaactctaaagaatatgaatggttaacaaacctgccttttgtacgccttagtttttgtaaaaacctccatgcaaaattatatgccaatgaaaatcaatgtattgtgtgcagtctaaacctttatgattttagtcagattaataaccatgaaattggagtgttaattattaaggagcaggagaaggatgcatacacttcatcgttaaatgaagctcagcgactgatcagaatcagcacagataacattcagccactaacaacagataaagaaacaacaggttcaaaagaaagtgaaaaaactaataaagagtcatccgacttcacttcagcctttcatgaagaaccattaacaaatcaaaatggattgattactgatttaaatacaaattcaaaactcacttcgacaaatctagcaaaaaatcataaaactgatttgttatctctatataaaaaattaatcgaagctggatatctcatggacgtagaaggaaaatacatattgactgatgctggcatagcggcaggggcagaagccaagccaaatcgatataaaaaaggagaaaactattttctgtggcctgataacctagcattatga

SEQ ID NO: 26461 - DNA, 231 bp, Escherichia coli
atgaaaaatagcttgtttagtactgattcgaatactggggtcacctttaccatctcgcctcacggccagggatgtaaactgtctgtagagcctgaatatcgtcgcaaaggaacacaaaattacgatggctggttccctcgatattacactaagccacaatacgctaaagcagcattgacacggtttcttggggaacctgttaattggttggattgtaatgaccataattag

SEQ ID NO: 26462 - DNA, 300 bp, Escherichia coli
atggaaaatctggatgttgtatcagcggtagatttttacttagaaaaagcattttatttatttggattcataatgttaggtatggcatggcttacttttcgtgctggttcaacttatcagcattttaaaaatgctgataagttagtcagtgaaggtagaggctcagtttcaagcggtaaagagcctgaaatgatccggcggcttaagttccaaacattgatctggtacattgctaattgtgtggtgttagcattatccactattgcttttgggtatttattttatcttctacacagttaa

SEQ ID NO: 26463 - DNA, 669 bp, Escherichia coli
atgattttgataaaaatcattaggggattcatcagtgttctgcttcagtttcaaaatgctatgaaagaaaaaacattagattcagtgagtttgctaataagcaaaataaggaggcttgattggcaaaggttaaaagagttttttggtcctttggcatttaaccacccagattgcattgatgccatcatgactgatggaattagcactgatgcctcatttactattttaaatgcattaatttctcgcacggaaatgatgtcctctggagagtatgcaattgagcatgatcgttctaaaaatctgctaacttacaatgaacgccttaactttttgatcaattgtgataaggaaggagagtttaaacattccgagatagcaactatctcattccctctaaaccttaaaaaagtctatcaaattgattcgaaagaaagcccaagcgtgcaattgtgtgatgttcttataggtgcatgtattgaatcagtttatcaattaatggactctaaggtgctcaatcaaaattccgttctttcactttaccaagatagccagttaatacatttcatacctgatatagattttgaaggacagaaaaaatttaggaaaggcagtcaaagtgaggagtatcttacgtttattcaaaatgaaatctactctagtaaactttaa

SEQ ID NO: 26464 - DNA, 1071 bp, Escherichia coli
atgagtacagaaatgaaaacggggctggtgctgtccggtggcggggcggtgggcgcttatcaggcgggagtggttaaggcactggcagagtgtggtacacagatcagcatggtttcaggggccagcattggcgcattcaatggtgccattatcgcggcctctaccgatctgtcagaagctgccgtacgcctggaggcgctctgggatcatctggggaataatcaggtgctgtcggtaaacagattggtttacttttcattgctgaaaaaattgttccaggcaatgaacctctgccagatccccggacgtgcaggagcactgcttacgacgcttcttcgccatatatcgacaatcaacgggtttgacaatctgatggctcagccgttgttgtcagatgagcccctgacagcgctgatggatcattatcttgatactgatgctctggcagacgggctaccgctgtatgtgtcgctgtaccccacagaagggggcatgcaggatattattgactgcattcgtgctgaactgggtgtcggaaccacgaaaaacgccgtttttcagcatatccagagcctgccccgcggacagcagaaagaggctctgcttgcgtcagccgcgctgcccctgctgttccgtccccgtgaggttcaggggacaatgttcggtgatggtggtatgggaggatggcgaaatatgcagggaaatacccctgtgacgcctctggtcgatgccggatgcaatatggtgattgtgacgcatctgagtgacggttctttatgggatcgccaggcttttccggacaccacaatccttgagatccgtccccggaaaaggctgaaatatgcaggtgatggtggcaacagcggcggtctgctcagttttacatcggcacataccgacgcctggcgtcagcagggctatgaagacacgatgctggcgatggagcatatccggaaaccgctggcagcacgtcaggcactgacccggtcagaggcggtattgcagaaaagcctggatataacggaagaggcagatttggcactgagaaacgcgatggcccggattaaataa

SEQ ID NO: 26465 - DNA, 756 bp, Escherichia coli
atggcggaaatagcggttataaaccataaaaaacgtaaaaatagcccgcggattgtccagtcaaatgagctgactgaggcggcatatagtctctccagggatcaaaagcgtctgctgtatctgttcgttcaccagatcagaaaatccgacggctccctgcaggaacatgacggcatctgcgaaattcacgttgctaaatacgctgaaacattcgggttgacctccgctgaagccagtaaggatatacgacaggctttaaaaggttttgcgggtaaggaagtggttttctatcgccctgaagaggatgccggcgatgaaaaagggtatgaatcctttccctggtttattaaacgtgcgcacagcccatcaagagggctttacagcgtacatatcaacccatatctgattcccttcttcatcgggttacagaaccggtttacgcagttccggctcagtgaaacaaaagagattaccaatccgtacgccatgcgtttatacgaatctctgtgccagtaccgtaaacctgatggctcaggtgtcgtgtccctgaaaatcgactggatcatggaacgctaccagctacctcaaagttaccagcgtatgccggactttcgccgccgtttcctgaaggcaagtgttgacgagatcaacagccggacaccaatgcgcctttcttacatcgagaaaaagaaaggccgccagacgacgcatatcgtattttccttccgtgatataacctccatgacgattgaatag

SEQ ID NO: 26466 - DNA, 1149 bp, Escherichia coli
atgaggcgcttcgcaggcgcatgtcgtttcgttttcaatcgtgctctggcgcttcagaatgagaatcatgaggccggtaataaatacatcccttacgggaaaatggcttcctggctggttgagtggaaaaacgccactgaaacgcaatggcttaaagattcgccctcacagccattgcaacagtcactgaaagaccttgagcgggcttacaaaaacttcttccggaagcgggctgcttttccccgattcaaaaagcggggacagaatgatgcattccgctacccgcagggcgttaagctcgatcaggaaaacagccgtatttttctgccgaaacttggctggatgcgctaccggaatagccgtcaggtcacgggtgttgtgaaaaatgtcactgtcagccagtcctgcggtaagtggtacatcagtattcagacagaaagtgaagtatcaactccggttcacccttcagcatcaatggtcgggctggatgctggcgtggctaaactcgccacgctgtcagatggcacagtctttgagcctgtaaacagttttcagaaaaaccagaagacgctggcgagacttcagcgacagttaagccgcaaggtcaaattcagcaacaactggcagaagcagaaacgcaaaatacagcgactgcattcctgtatcgcaaatatccgcagggactaccttcataaagtcacaacgaccgtcagcaaaaaccacgcaatgatagtcattgaggatttgaaggtcagtaacatgtcaaagtcagcagcgggtacggtcagccagccgcggcgcaatgtccgggcaaaatcaggtttaaaccgttcgatactggatcagggcaggtatgaaatgcgccgccagcttgagtacaagcagctctggcgtggcggtcaggtgcttgctgttccgccagcgtacacaagccagcgttgcgcgtgctgtggtcatacagcgaaagaaaatcgcctgtcacaaagtaaattcagatgccaggtatgtggatatacagcgaacgccgatgtaaatggcgctcgtaacattttagcggcggggcacgccgttcttgcctgtggagggatggtgcagtcaggccgcccgttgaagcaggaacccaccgaaatgattcaggcgacagcctga

SEQ ID NO: 26467 - DNA, 180 bp, Escherichia coli
atggtcgaacgtcagtttcccggccacactgcggtcaatgtccagaaacacagctacgcagagatcgttcaccttcacaaacagatctgccgttgcgccgaacatgcttccgctgccgctgacttcatcaagtgggaccgtgcctccatcgtaaccggccagaagatgcgggaatcctag

SEQ ID NO: 26468 - DNA, 477 bp, Escherichia coli
atgatcaccaaatcaagtatactcatagagtataaagataaaagtaaactaaccgaaagtatttataagtttgtaaatgctctagatattgacttttcgatattaaaatatgactactttgatgtaaatgagtataaaaaaaatattacttatgacacatcttttattgacaaagatgcagaatatattgaattattagcgaagattgatttttcttatgaagttgatttcggcacatcaacaacatcgattgaaagcaagtatcttccatctctaactgatttcatcgctcaatcactatcacaacaattaaattgtaacataataaccagctttaaaccattaagtggagatgagttttgcccaataacatatttttcaaaaggtaaagaagttatcaattttacgacatttaattcaaattgttgggatggggtatactgggtaaaaaaaaggaggcaaacaaatatccgctaa

SEQ ID NO: 26469 - DNA, 297 bp, Escherichia coli
atgcgaaaaaaaatagagatgagcttgataaactctcctgcaaatggtgttgtgattaaaagaataatttctgatggattgaaagaaatagtttctctaaaagaacagatccttcttgaaaccaccgcaaaaattcagagtattgaggaaaagagagaagaaaaagttattcaaggttattatgatggctatgcgaaaggcattattgatgtgatggataattttatacccttgataagtttgctgagctcagaattatccacaaattcctgcggactaaattcagcaataaattga

SEQ ID NO: 26470 - DNA, 345 bp, Escherichia coli
atgataaacgatctgaagagcatattgttaaaatcttcagaggaagttgaagtttttatcaaaatttttgaaagttgggtaacaaaattaccgtcaatatcaggccctttaaatctctatatacctaccagtttcaaagataagtctattgaagtagagtcatattttgtcgacaagtcaatatggaatgtccatatttcatatcatgatgacaaacgttttgttttttttacagatcaatttattgctgaatttagtccgcaggaatttgtggataattctgagctcagcaaacttatcaagggtataaaattatccatcacatcaataatgcctttcgcatag

SEQ ID NO: 26471 - DNA, 207 bp, Escherichia coli
atggctaccccagtttcactgatggatgaccagatggtcgacatggcatttctcactcaactgaccggcctgacagataagtggttttacaggctcatcagggatggggcctttccggctaccatcaagctgggccgcagctcccgctggctgaaaagtgaagtggaagcctggctacaggcgcgtattgcacagccccgcccgtaa

SEQ ID NO: 26472 - DNA, 207 bp, Escherichia coli
atggctacccctgtttcgctgatggatgaccagatggtcgacatggcgtttatcactcaacttaccggcttaaccgataagtggttttacaaactcatcaaagatgggggctttcctgcccccatcaaaatggagcgcagctcccgctggctgaaaagtgaagtggaagcctggctgcaggcgcgtattgcacagtcccgtccgtaa

SEQ ID NO: 26473 - DNA, 690 bp, Escherichia coli
atgactctcaataaaaccgatcgcatcgtcattacgctgggcaaacagatcgttcacggcaaatacgtgccaggctcgccgcttccggctgaggcggaactctgtgaggagtttgcaacctcgcgcaacatcatccgtgaggtgttccgctcgctgatggcgaagcggctgattgaaatgaaacgttatcgcggcgcgtttgtggcaccgcgtaaccagtggaattacctcgacactgacgtactgcaatgggtgctggaaaacgactacgacccacgacttatcagtgccatgagcgaagtgcgaaatctggtggaaccggcgattgcccgttgggcagcagagcgcgcgacttccagcgatctggcgcagattgaatcggcgctgaacgagatgattgccaacaatcaggaccgcgaagcgtttaacgaagcggatattcgctaccacgaggcggtgctgcagtcggtgcataacccggtgttacagcaacttagcattgcgatcagttcgctgcagcgggcggtttttgaacgaacctggatgggcgatgaggccaacatgccgcaaacgctccaggaacataaggcgctgttcgatgcgatacggcatcaggacggcgatgcggcagagcaggcggcgcttaccatgatcgccagctcgacacgaaggttaaaggaaatcacatga

SEQ ID NO: 26474 - DNA, 207 bp, Escherichia coli; identical to SEQ ID NO: 26472

SEQ ID NO: 26475 - DNA, 354 bp, Escherichia coli
gtgaacttcgtcaacggaaacagcgaagccgatccggagcaggaggtgatcagccgctggcgcatcgagcagtgcagcgaactgagcgcggtcagtgcctcttttgtactgtccacgccgactgaaacggatggcgctgtttttccgggacgtatcatgctggccaacacctgcacctggacctatcgcggcgatgagtgcggttatagcggtccggcggtcgcggatgaatatgaccagccgacgtccgatatcacgaaggataaatgcagcaaatgcctgagtggctgtaagtttcgcaataatgtcggcaactttggcagcttcctttccattaacaaactttcgcagtaa

SEQ ID NO: 26476 - DNA, 177 bp, Escherichia coli
atgattttttttgatattaataattttactacatgtgataatttgttattagatgaaaaaaaatacttttttattaatcagttatgggcaattgaggatgaaaaaaattctatttacgtcacccctgatgaaatttctataagtatagacggcgataacttaaagttgccatattag

SEQ ID NO: 26477 - DNA, 840 bp, Escherichia coli
atggaaacggcacccgtgcagtacgccattgtggatggcgctgtggaggaaggattgctggattttctgaacgaggtgaatcccccgcactgttgtctgtatgcagaacccatacaactggatctggtcgcgctagccccctatctcgtggaagtcgttccggaggttgaagcatggctgagtgttaaggcgtcgccatggggaatatatctgacttctgagtcatccatgcgtgagctacagcaacacttcagacgttatctgtgggttaggatccccgaacaggagaaacctgttctcatgcgattttatgatccccggaatatatgggtattagtggaagttctgaccccccgccagcgtctttcttttatcagtcccgtcagacagctaagtacccgttatggtgaagaatgtcgtgaggataatttttcttccgtccgtcccgcagaaactatgaatataagggcagaacggccatcacaactgacgctgagttacagacaatatagccaactggaacgaaaggcacgggataattatcttgatatattatctgcatttatcgaagaaaatgtagataaaaacggatgggatgattcatcaaaagctgaatcatcccgaattctggcagaagattatttctctttttgccagtcattaaatatagcagatgatcgttccgtcagaacaatgacgcttatattactgaaaaaaaatataatcgatctcagatatattccggatgactggtatgaacaactcagcaatcagtcatacccgggacatattcgggtacatgaacttgcacaacaggaactgggatttatcccacaataa

SEQ ID NO: 26478 - DNA, 354 bp, Escherichia coli
gtggctgatttcgataacctgttcgatgctgccattgcccgcgccgatgaaacgatacgcgggtacatgggaacgtcagccaccatgacatccggtgagcagtccggtgctgtgatacgtggtgtttttgatgatcctgaaaatatcagctatgccggacagggcgtacgcgttgaaggctccagcccgtccctgtttgtccggactgatgatgtgcggcagctgcggcgcggcgacacgctgaccatcggtgaggaaaacttctggatagaccggatttcgccggatgatggtggaagctgtcatctctggcttgggcggggcgtaccgcctgccgttaaccgtcgccgctga

SEQ ID NO: 26479 - DNA, 213 bp, Escherichia coli
atgctggcaccgaaagccagaactccccgtacacagacaacggataacggcaaacagaacacctatttctcctcactggataacatggttgcccagggcaatgttctgccggttctgtacggtgaaatgcgcgtggggtcacgcgtggtctctcaggagatcagcacggcagacgaaggggatggtggtcaggttgtggtgattggtcgctga

SEQ ID NO: 26480 - DNA, 357 bp, Escherichia coli
atgttgaccttgcctgcagcaacacctttcacggtgatggtcataccactgaccgacacggtggcttttgttttatccgcagacaccgcacggaagctcttgtcggttgcgccctccggctggaatgccacggtcagcgtggtgctctgccctttcactacggaagcactggcgggtgtcaccgtcatgccggttgtcgccgtcaccgtgctgcgatcttctgccatcgacggacggcccacattggtgaccttcaccgtgcgggtgatcacttccttcgccgtcaccgccttaccgatactgctgacccagccgcggaacacatcgaccgtgccgttcgggaagcggattttatag

SEQ ID NO: 26481 - DNA, 396 bp, Escherichia coli
atgaaacatactgaactccgtgcagccgtactggatgcactggagaagcatgacaccggggcgacgctttttgatggtcgccccgctgtttttgatgaggcggattttccggcagttgccgtttatctcaccggcgctgaatacacgggcgaagagctggacagtgatacctggcaggcggagctgcatattgaagttttcctgcctgctcaggtgccggattcagagctggattcgtggatggagtcccggatttatccggtgatgagcgatgtcccggcactgtcagatttgatcaccagtatggtggccagtggctatgactaccggcgcgacgatgatgcgggcctgtggagttcagccgatctgacttatgtcattacctatgaaatgtga

SEQ ID NO: 26482 - DNA, 174 bp, Escherichia coli
atgattgatacggctgctctggtcacggtcgtggcactggtgacgctgcatactgatgcacttcacgccacgcgggatgaacctgtggcatttgtgctgccgggaacggcgtttcgtgtctctgccggtgtggcagccgaaatgacagaacgtggcctggccagaatgcaataa

SEQ ID NO: 26483 - DNA, 951 bp, Escherichia coli
atgaaattacctgcgcataaatattattctttggataaagcagccaaactggccggatgtgaagtatccgatttaatacactatgcagcaattggggttttagaaatatgtataaaaattccacctattgaattgttttaccattacccaaaaaatgaagatgccgagccagaattacttaaagttgaaacagatagtatttttcatatagatacaaaagcagcacatgagaattatctccttgatctgagcaataaggcagataatctcgaatcatatggcttatcatcacttgattataaaaatagcgataactatatgtatttcatgaggttttcatacaaatcagaacatttctcagttatagagcgatacaatgttgggaaggatgaaagagatatcgaaagatggagcggtctattagcaattccgcctgcgttcatagataacgatgagcgggagctatcagaatgggatgattgggagatctctgtatgcgaactgatgcctccgagatgtgacgagtttagcaaatcgaataattatgaaatcggagctttttatattgacggctggtatgaaataagccgaaacaaaatgtatataactgactatgaatacaatcttcttataaatggaggaaaatatatttatgacagacccatgcacaaaccatccgcaaacaagttatccaatgatataaatacgctaaaagttaataaacgtgccgaacggtacgcagtcaatagggagaaactattaaaatctgcaatttatatacttagtaagtatccaaatgaatgcaggggagaaaggaaagaaataagccctgagaagtggcgtgactgtcttgttcgtcatttagacgaagttccaccacttatgataactaatgaagatgtaattcttaaacatctacgatctgcggcaaatggcaaagtggatagttaa

SEQ ID NO: 26484 - DNA, 171 bp, Escherichia coli
atgttaaaaatgaacatgtcgatgacagaaaaaataaaagcaggcaagctatttaccgatatgtgcgaaggcttacctgaaaaaagacttcgtgggaaaacattaatgtatgagttcaatcactcgcatccatcagaagttgaaaaaagggtaatgactccaacttattga

SEQ ID NO: 26485 - DNA, 228 bp, Escherichia coli
gtgcgtttttcagcgacgatttatctggtctgtttctgcttctttaagcaactggcgatgatttttatgtctattctggcgggcaatatgtatgaaagcatcggtttccagggcgcttacctggtgctgggtctggtggcgctgggcttcaccttaatttccgtgttcacgcttagcggccccggcccactttctctgctgcgtcgccaggtgaatgaagtcgcttaa

SEQ ID NO: 26486 - DNA, 297 bp, Escherichia coli
atgaataatcagttcccgataaaaacgctgaaccagctcagacctgtgctaatcgggtttcgcaaaatcaagggcttcacgcaaaaagatgtgtctgagaggcttggcgtaacgcagcaaacctatgcccgcctggaagcaaaccctgctagcgccagtattgatcgtctgtacaaggtattcagtattctgggcgtagaaataacgctgtcatctatttccccttcacccttcatttcccacacagagatgaggggggcatttgacagcactcccgccagacgggagaaatggtga

SEQ ID NO: 26487 - DNA, 207 bp, Escherichia coli
atgcaatggattatacatacctacagcgcacgttacgctgagctgaatcgaatttcagagaacgttcttcgctattaccctgcccagccagttgaacacattttatcatccggccccgagagtgacatgttctctgcctggtacagccttcatcagagtcaaactagacgttatttacaggcaaaagaagacagctacagagcttaa

SEQ ID NO: 26488 - DNA, 3276 bp, Escherichia coli
atgactctacgattgcagacggaatcacccgctgaccaggatatgtttagaggcagcagtcatgaaaaagttgcagagaatgtggctcagatcatcaggacacctgatgtcaatattattggtctggaaggtgagctgggttcaggtaagtcaacaatattgaagttcctgcagaaaaagcttaaagatgattttacgttcattaactttgatgcagaacgttaccatcatggctcaactaaaaaagcgcttatcgatgtcatccaccacggggtcagcctacaatgtccgggctcccgggatgtgttggataagtataaaaatctggctctgggtaacatcgttgaatacgacaagagggtcagcagcaggctaagctggttgaccgtcgtttttattttactgtcattgctttccgtgcagatgcttcgttatgtgctaacagaccttaatcaatattttactaacaaggagtcattattagggtggcttttttatgttgaggtggccgcgtttctttctcctgccattatggtcgcaggactggcatgcctgcagaacatggaatggtacagaaagaaagggtattcgagtattggtgatttgttcaaacgcaacagtactgacaggattgaagagacttggctagttaataaggaggtcggagctattgagctggctgaagctctgcagggatttacctccaaagaggtcatttcccatggagatcgcttcatccttatcattgataatctggaccgaatcagtgcagacaaagtgaaagagctctggagtgatatggagcttattgccggagccactcatgaacacttcaggatagtggtgccctattcggcaagacaggtttcagcctcactttctgtggcgggtttcagcgggcgtgagtttattgcaaagcggattcctgtaagttttcaggttcctcctcttatttcggcaggatggcaggaagcgttaaggcagtactggaaagaaacagtaaatgaggatgcagggatagcgtgccgggaagcaacggtgttgcttgagcgctggaaaccctctgagtatcctcgtatcacaccgcgattaatgaagaagtttgttaatgatattcatattctgaaccttaccgttcctgcaacagaagatcatcgccatattcttattgctctctacttactggtggtcagatacggggagcgagatattaaagtattacttcgcgatcccaaagctagtcagaccgaacccggtattgctccggatgattttgacgagatgctctcgctaacttatcaacaaatatcccgaatttttaataacgatacagaaagatggagcgaatttctgatgagcatccactatcagtccacggtggagcttgccaggagcgagttgcttgatacgcctcttaaagacgcgattggtgctataaatatcccacggcttgaagaactgacggccttgtggggtttcgctgaagcatggcagcgagtggcaccacatattcagatgcgagactggctggtttcttatagccggatggatgagaagtgtcaggctctcgccgaaccgcaactcaaagtcgcagtgcaaatgctgaatcagagttatgctgtttcactcagagaaaagaatgatgaaggtttcgtattgagtctgcagaaactgatggctgacgggcggataagcctagagcctttcgtcgaaaggcaaatatcgtttattgtgagtaaacttgatgaaattcaggattcagaaaaattggaggctgaatccacgaagacgttgctgcaggaagctgattcatactctgttctggccggtgaatcactactgaataaaatggagaattttgtagatggcgtattttatgtggaataccttgtcaataatgaagagaccttgtcaaacctgaaaattggcacactagatatcggaaatcacggtcgggaggagatgttacgctatggagctgagcaacctcagatagacctttttaatccgggaattatccggcatatcaatattgcatcgaaggcggtacagaacgtaattggaaagaatgatggtacaggtggggctcaggttagctctgcaataatgacgcttaaaaatcgtcaggttgttgaggacgttatccatttcagaaaaattgttctgagcccggactggaataataatgttttaaatcaatattatcttaataatacggcgacgaggaatctcttccctgcggaatttgctgcacaggctgttgctcacatggtgctccatggtaactatgccggtatcgagtcgtacagtgaacatattggtgaggaacggtttgacctggctttggctgcatatcttcgttatctacgtactgccgagagtatctttatagcacttaaggataaaaatgttctgccgtacatcaaaaatgctgttggcaggattgttgatttaggtcttctggtgaatatacctgtcctgagctttgttaaaggtcagtatgacgtcatcaaagaagctacaaatgcaacctctcttttaatatttgtgcgagagcgtcaaaaagcactgtcagagaaaataattgagtctgatgtgaatgctatgggtccagtatttctccatgacgtatatcagtcaggtgagcagtttgatattttgaagaaaaagctgaacgccctggcatgtggagtatttagttcttctgaaaggcttattgagtgttttacggttcttcctgtgaacatgcgctttatccttgaacaaatgcaacttcaggggcagcatatccggatggaaggtagtgtgggtatctttgcatcatggttccgtgatgcagagccagacgttgtcacaaatgccgagaacattcattttctgtggtcttgcctcgacgatacccagagagagactgtacttgatgagttgcacgatgtcttacttgaaagacatattcgtattgacagccgtattgcgattattacccgttttcataatgagttgtcgtttattgaacctgagaaggccgttgaacgcagggctattgcggcgctgtttagcgcttctgttgataatgtattattgtctcaatggcttgaccgtcagacgttttcattttcatcatggtctccggaggacgcccgtacggcaacgagttgtataatgaataactcggagatttttcctctcatctgcaggaattcacagtatattaaaaacagaatgttaccagagaaagcggacgttacagaagatagtgatacgtttccggactga

SEQ ID NO: 26489 - DNA, 330 bp, Escherichia coli
atgacagaaagtgctttgcttttgcgagaggcatttaatgaatcggttaactatatgacatggtctttttattcactgataactgcttacgtttcgatggctttttatgatagagttgaggttaagacccgaataaataattatctgaataagttacttttcgtgattgctatgtccgtttttatcccaaatatgtactttgtttcaatggtgttcagtcagaagttaggcaccgcagctggcgttgcgtcattcattattgggctacttttcatgatgttaaactcggcacctgtaattactggtatcgtacagcagcgcaaagattga

SEQ ID NO: 26490 - DNA, 1413 bp, Escherichia coli
atggaaacgctccttcgaactgacccggagaaatacggttatcaggcaggcctgagtcgtcttcagcgatttctttctaagatccagtacgactggagcctgcgggattatattggtcgtaaagtgttcgaaggcgggtatgtgcgtcttcaacccaatatcttttcttcgtccctgactgaacgtctctttcatgtctgttgcagtcttgattatgttgaagccagacgtgcggctgagcatcgcagaaagttactttccggcgtggtggacgatacggctcataaccgtcgtatggctgagccacaatttcggcttgtacaggaagcaaatgttatccacgttgatttcctctggtcgttgcattgtttcaaccctcgcccgtttcgggcaattgagatctatcgcagggtctgggaagaggccgacctggaccttcttgaggatgagcctgacatgcagcctgtgccccgtacaccaatgccagcaccactctggatgaaactgcccggaggccggttcggtacagcttatgatggactggctgatacgttgccgctgatgacctattttgacgggcaggctgacaccagggcttcacgtagcctaaagaccggagagagcagttctgtcgtcgttgcattcgaggaagaggatgagctgactgttgaagaagatacggcatcctggattatctggcatgaatacgacgggttacgccagcgcatcgctgacggtgagttcactccaacgactgctgctcagtatcttcttcgttatggagcggtccgaatttcaaaagggaagggcgctgtctatcatcgcctcgcacaacggggacaaaccttttcccgtctggggataggcgacagagtgtcgcttccagagttggttgccagtcgtcgttttaaaatactcagcgattctgcataccgtcagcttgtggcccgaaaattgcgcggacatataaaaaagatcagattctgggcatgcgtagctgcttgtgttcagttgcacgtacacaacaagacagcactcggagaaagaatttcaacgttactcgaaggtgagtgggaacagcaacaaggtgcgatccaggcgaagctgaaggcgggaatgatggatgcagttctaactctgtgtaaccagagactccgggtgaaagaaaatactaaccagaccgaggagttacgctattaccgtgccgtaagagctcgtttcatgcgccatttatctgaatgccttaagccagaaaatggcggcgttatccgtgacgttatctgggaactgagggtgctgagcagtgctcacagtacgaccaaaacaggtttttactatgtcgatagcaatcgctcggcagcgaaaggactattaacccgcctgctgatgaggatggtcaggcaggtcgtataa

SEQ ID NO: 26491 - DNA, 240 bp, Escherichia coli
atgcaaaatcaaaatacacccgctcaggaaaaacacaccgtatacctttttaatgctgaacatgctgacaagacagccgccgagcaagccgggaaactcttcacgctggacattgaacacccaatgaccctcaacgatctctcgctgctgtgtgagtcggtcgcggacgctgtgggagctcctggcggaattaaatatgcaatcacaacagagccgaatggggttcaggaggaatactga

SEQ ID NO: 26492 - DNA, 312 bp, Escherichia coli
atgactttgaaaatgggaagttccgggacttccaagcctgaggggccatttgtattaatcacttttgagggggacgaatttctttttgatgacagacataatgtcgtcaagataaatggcaggccaaaaaaaatggatgtaaagcgacattattttgagtccgatctgggagaagggaaagcgaaatactggactttaaatatcgaagaggctcatcggttcaattcgattgatgaagcgacagaacagctttgtaaactgaatcgccctcatctgatcaaaattcgcaaagttgagggggtatctcaatga

SEQ ID NO: 26493 - DNA, 189 bp, Escherichia coli
atgagcaaagagatgtttttacgcattttaaatgaggcacaggctcgtgtggataacgattcgcttccgcttgatgttcgtatccggtcacgcaccacggtaaatgattgcgtcatccgggcagataaagaggggtggcctattgagtataaacagaaggtctgggtagatgcagtcagtggctgttaa

SEQ ID NO: 26494 - DNA, 534 bp, Escherichia coli
atggtcaaggtgataaatatcaacgggaatttagttgaattacctgagccctcagcaaagttatccaaagctgaatcacctgatggtaggttctcaaaacctaaaaataaaatctctaaaatacagcgagctgagctgagaatgaaatttggggggcgttgtgcctattgtggttgcaagcttcctgaaaaagggtggcatgccgatcatgttgagcctgttcgacgcgactttgaactggtgagagccccggtcggcagcggcgtaactcatgttgcccgaagtacgggtaaggttatgcaccctgaactgcatgatatagaaaacttatttccatcatgcgccccctgcaacctttttaaaggagcttttagtgttgaaggaatgagaaaagaaattaccaaacaggttgaacgggctcgcgcatatagcgtgaatttccgtaccgcagaacgttttggtttgcttcatattgtagaaaaaccggtagtcttctggtttgagcagtatgacgaacagaaacaatacgaataa

SEQ ID NO: 26495 - DNA, 609 bp, Escherichia coli
atgtatctgcatcttgtgccccgtattcttcaccatatgaaaaacaagtgtactctcgtgtctgtgtctgtccctgaattgtcacttgagcttaaagctgattcgctggtggcaatgaaaccctatcccaacaagtcctaccacgttgtcatgttgaaggggcgacgtgcattaaatggctttctggtaaaaagcccacggactttaactgagttcacaatgataacaatctgggaaatagaaggctttggaaaaattagtcataccgtaaaaacgctcgttcaggacaaagactatgacatggtctcccatgatgtccttttggcacatgcataccatcaaagggaggaagaattggggtaccgtgtacatccatcctatgacagtttagctcccgtcgattttgagccaacaatgcaatcccggtacataaaggaatccgacctatctcacgacgtatgggaaacatattcatggggggaatttctgcgttcgcgtgaagagacatttctggcgatgaccatttcttcttctcgtttaaaccaccctgcatttatcagaggaaaccggcaacctcaaactgaccaggccatcattatcagttcgtaa

SEQ ID NO: 26496 - DNA, 288 bp, Escherichia coli
atggatgagcaagagattctccgcgttataaacggccgtgatattgatgctactgacctcctggaagaagctatgccgaacgcagcccgacgcttttatcgcttaactaacagcttaaacaaattgcttcaggaggtccgggagcactttcctgacgcgatgtattactctgccagcggaacggtaagcctgctgttggggagcagccacgacaacaatgaccatccggttagagaaatggtcgctctaacgtcaccagacctaaacattgaaggcggtgattggtag

SEQ ID NO: 26497 - DNA, 813 bp, Escherichia coli
atggataaccattttgaggcaaaaatgaacgtttcaactgacagcagcaacatttcgatagcagaacttaaaaaagaatatataccgggtcttctgcttaatgctggggccataagccattacggtgactcggctatatcttcgaaggctatggataaatattcaaatcttctggagaaagacgcagtttccgctttatcaggagccttgagccgtatcgtaagtgccttagcggaggcagatccacgttctatcagtagcaatccatcctggttttcccgttttacgggcaaacatcttgaaaagcgcgtccgataccaacacgcacgtgaaaaggtggaaactctcattaatgaggggaacggttatcttacgtatgtggatgaaacgttactggctttagaagagctgcttgaaacatatgtatcagaaatcaggcgtctcaaactttatattcaggcaggccaggagttccttagggattctactgaagaaaaaaataatgaagaactaggcttcctgctcgataaaccgagggaaagatttgccagacgtttagcgaacctgacaactctacttgcgtcgcatgaaatggccaccatgcagatggaaataactcgtgggtcttgtatagatattgctgaccgctttaatgaaactataaaagtcctggttccagtatggcggcaacacacactttcgctgctaacagtaaataacaccgaccctaccattgttaaaaaagctaatcaggctcatgaagctctcctaaaaagcctgcgacaaaatttagagggattccgaaatgattaa

SEQ ID NO: 26498 - DNA, 1113 bp, Escherichia coli
atgattaataacttaaccgctaacacccagattgttgcgtttactttgacttccgcagaactggaaaagttcggactccatgagcgggatgaacaagagattaaagccgtcgcggaatgcattaatgcagatgaccctgaaactgtttatagttttggtcgggcaatgggagagaatattgctaattatacggatagcctccttgatcaagttcgtaataaagatttagacgaagccggggccaagcttactgaaattataaatcttgcaagaaatgtaaacatttcaaacctaactgaaagtcgttcaaatctaccagttattggtcccttgctggataggattcgcacccgaggtaagaattttgccgcccagtttgaatctacccgtgagcaaatagatgctcttgtttcagaggtttctgttacacagaatagcctcggcgctaataatatttccctccagcaaatgtttgacgaagttgtaaaagaacaccacttgacaggtgtgcatattgctgcggggaaactaaggctgggagaattacaactacaggcagagaatctcagatctaatgttggtaacaatcctgctaagtttcaggaagtagcagatatggaaactttaattgctaatttagacaaacgtattggtgatttgatcgtttctcagcagtctgctatgcaagttttgccaatggtgcgaattatacagtcaaataaccaaaatcttatcgacaagtttcacagtgtcaaagaggttactgtacctaatatcaagcgtcagtttctattgtccatttctctgaatggacagcgtaatgctgtaaatctagccaatgatatcgataatgccaacaatgatttgctccgtagtaatgcaaaattactgcatcgtaatgcagtagaaactatgaaagctaatcaacggctggttattgatatcagcactcttaaagaggtgcaggatacgattatacagactgtcggcgacgttatcagaattcaaaaagagggagcaagtaagctcagggagacagaaaaacaggttcttgccatgcgtgagaatttgcgcacccgtctgacacaaaaaggggtagatcatggtgcataa

SEQ ID NO: 26499 - DNA, 894 bp, Escherichia coli
atggtgcataaacttaagggtgatgacgacttttcgcgcgaactgtcttttcttttttacaggtctataaaaattagaaatttaggtttcgcaatttttggtgcgggtctgctgataatgatttttggtctttgcttgtggttgttgtcatttcacctctcaccttcagttctggactttgatattgatgtgcccttgtcactaattcattcgactgaggcaacaggaaaattagaggtttcgggtattggcgaagaatttggaggtttttttacttcatactctaagttattattagggatcatgggtctacttacagtgtcttcaactgttattaaaattattaagggtgaggaaattggcgaaatatttccgatacttataattgctggtgcttttttgattgggatgacggtttttacatctgttttcggcacagatgagtcggatgtacattcaacctcacctgtaagcgttatcaaaaaatatgtaaaagaagaaaaatacgataagcttttaacatatttaaatgaaagtggtttgccaccaagtgaagatgtatccatgaagtatttaatagcgcagttgcatatcaaacgtggcaagccagatgtaaggctaacacagaatgttgtggggtcgtatatgtctggaatattacagactcatattcccgtcaaaattcgttatgcattagagaagacagcgttagataaaactgtctcacaacctgcgattagttatgaacaaaaaagtgttgctaagtcgctgaacttttcaaaagtgtcggttaaatgtcttgcagtaggcggtcctgtggccttcattggctttttattcgctctgcttggtataaaaatcagacggcgggtcagatttatagcatcacattaa

SEQ ID NO: 26500 - DNA, 228 bp, Escherichia coli
atgtgtaaatttactcctgtccaaattattgctgattatatgttgagatttcttaaaaataatgcggatgccaagctttacgaggcaatgcagcgtcttgaaacaaaaattggtcaatttgttgctgatggggttgatgaacaccaattgcgctcttcattgagcaaagtcagtcgctctcgttccagggcgactctgaaagaagagtgtgagcaacttatttcctaa

SEQ ID NO: 26501 - DNA, 342 bp, Escherichia coli
atgtccaatagcttcgataaaccacaaatgcttccggaacataattctgaagttgaccccttttttccgaaaaatctggattcgtttatcgaaaaagtttcgggaagagacttggcgatgcttagtgaatctgagaaaggtgagctcgcgcatttggtcagaaccgggcgtaaatacggggtttttgtctccatatccgttactggtgttcccgatacaagctcgcacgatctcctagagttattgtccaatgctggttctgtagaaaggcagttcgccatttatgaacgcgtccaaacgaagattgcgatcactcggtctcaggaagcaaaaacaaagtga

SEQ ID NO: 26502 - DNA, 312 bp, Escherichia coli
atgaaaattgaaaaggtgatgtcattacttgaagtgctttcaacctggcttgaagataacatcaatatggattctgaaattatctttgataatgacgaagataataccaactcagaaattctgtatcctgctgtagaaaaggctaatgccgttttgcgcaaaatggcatctttatcttcagattctgttcatgcaattcgacagcgcttgcagcttgccgtagaaggaaaagctgaattgtccctcaaggatgtgggagagctcctgctggcaacaaagtatctgatgttgtccactgaagagggagagtaa

SEQ ID NO: 26503 - DNA, 492 bp, Escherichia coli
ttgaccacactcgtatttcaaatggcggatatcaacaaactgatcgaagaaattcgcaccgcaaaaacgttttcggtcaccgcagatcagatctatgacccggcatgctatccggggggagccctacttaacgctgagggacagactgaagaagaggcgcgtaaagctggtagggttttctttccctcatcctcaaaaattgccagcacacatctggtgccaaaagtgcttctcgcgcacagtcatggtgtatacctgatcactaatgctgagcttgagggctctcccgcatcccgcgatactgtggcttacgcccaggggatgaatccaaaactggatgaggactgggattacgcttgtgatgccgctttgggtgggtcggattgtagctataccattcccgttgagtggctggagttagcggtagagcagggttttcaggagtttcgacttcgaatgagtgaaaccaaaatcaaacttgtcagcaaatag

SEQ ID NO: 26504 - DNA, 204 bp, Escherichia coli
atgaaaatgttttttaccccttatgttcgtatcgttttctatttttgcgcattaatttttattgtttacagtttcagtgattttttccagggcgtccctgacagtacattcttcagtgctgtcatcacgcttctcgttatcggaaccattgttgcccggcaactggatcgcaaaaaatctctcaaaaatagtacaaagatttaa

SEQ ID NO: 26505 - DNA, 225 bp, Escherichia coli
atgcataaccacgaaattcagaccattgctatttttagtgctcagtataaaaacatcgaagatgctgaaaatgcaggtgctttatattctgtagatattgaatatccgatgacactaaatgatttatcgcggctttgcgattctattgccgaagcagtaggtgtgcctggcggcgtaaaataccagttcgtgtcccagccggaagcgcatgaaactagcttctga

SEQ ID NO: 26506 - DNA, 201 bp, Escherichia coli
atgaaacaaaaaaagtcttctatgtcacgtattgtgcagctgtacgacgggagccgatacgtaaactgcgagcaggctgataacgaaggggggctctatacggtattgatgaataagccttcgcagatcgatgacatccgtaaaatcgttgacacaaccgccgaagtacttggcaaagctttgccagtactcctcttttaa

SEQ ID NO: 26507 - DNA, 312 bp, Escherichia coli
atgatcacatcactaatgaatttccgcgatttaaccggagaggcagtcatccaggcgcggcaatgcgttattaatgctgagatcgaagcggcccgggaaaaggtaattcatgctcgttcgttattcaaagcgggtatacataatgttgtaaacggtagttctggcattaaggctgcggcagcacattttctggtgataaaacgtttacagactgacactcggtatctggacgcggttatcactgataacctttgcatgttttctcctgagggttatctgtacctgtttatgcaacaacgttatttccgataa

SEQ ID NO: 26508 - DNA, 177 bp, Escherichia coli
atgaaaccatttggacttgccggaaaaccccggcccgagccttgcggctgctgctggtatacccgtgaggactgcccttacgtcagcgcaaaacagatctatcgccgcaggcagcgcaaggcagaacgccagcgtcagcgcagcaccattgtgatggccgtttctgaatttcgctga

SEQ ID NO: 26509 - DNA, 282 bp, Escherichia coli
atgaaaatcagccagctggaatccggaatgcaggtatggtccgtgacccgttccaaaatgggaaataccgccattacaacggtcattgtgcaccccgttgtcattttagaaattcacgataatcacgttattgctcggtggaacggcaatgcaccacgtcgttttggagaaaaggctatcaggggctggagcaaggagaagcctctgcttgtccgtgaacctttcggaaatgcccgcctggccacccgggctgaaaaagccgctatgcaggataaacagtaa

SEQ ID NO: 26510 - DNA, 606 bp, Escherichia coli
atgactgaattaaataaaagcccgtccggtttttccggagctgatgtcagtaaagaacaggctgctataagggcacttgtagaaagagtagtgatcaactatcgcagccggacagcacctgatcgggttcaaaaggcttcggtagcgtttaatgggggattaatcctgaccctgatgctggccttaacactattgggctatcttatggtggagttactcaggggatatgtagcggatagctcaccctatgtgcctggtctgagtaatatgcaatttggggggctgatggtcgttgagctgtttctatgtttttttggatggtttttggttgtcacaggggactatccccgaccgtggatctttcaggtagtcccgatgaaacagtactggttcttcgacgaagtggatgacgacgaccttgcccggctttcctgtaacccttacgtcaagcgctggctacttgatgaaatgtccggtattcatcgactgacctacacgaggctgcatgatcgactggagcgcatctgtaatattccatcccatctcgaatacagccgtattcaggcacataagctttccctaatcaacggaaccagtgccccttga

SEQ ID NO: 26511 - DNA, 216 bp, Escherichia coli
atgctagacacattcagagtagcctcttgcctgcttaaatgcaaggagaagaaggccatgaaaatgccgaaccaacccattgttttgtgcatattaatagtttgtttaacgctgttgatattcacctggctcacacgaaactcgctttgcgagttgcggatgaaagacggaacaagggaggtatctgctatcctggcctacgaatccggtaagtag

SEQ ID NO: 26512 - DNA, 204 bp, Escherichia coli
atgaaccatgagagccgaactgtatacctgaacacggccattgaggccctgctgaaagctgaggcggctctgaacgatctggcattagcctatgagcttaaacctgatgaaaaggcaagcgcatgccatcccagaaccggcacactttccactgcgtcccaggtaaaaaaacttcgccgtgtccttgagaagcagaaggtatga

SEQ ID NO: 26513 - DNA, 357 bp, Escherichia coli
atgaacatgaaaaagcccaaagctgcattacagaatgccatgaaagaagatgtgccagctgtgacacagattcagatgcgatctacggtttccagaaaggttcgctatgtaaaacaggcaaatcgagagggtctgaaattatctgagtggatgtcgcggcatctcgacgctgtctgtgataccgcagatgagattcataaaggcaaacgctcaactccggttgcgcctgggaagattccccctgaggtataccaggtgatatacgatcagtgcggcgggttcgtggagtgtgatgctaatgcccaggttatctgggaagcctgccgtgatgccattcttaacggagacaaagggtaa

SEQ ID NO: 26514 - DNA, 600 bp, Escherichia coli
atgaataaagaacaactaatcgacaaactggaacgcgtggtatgtggtcagtactcctacgaaatgcaggagcttgcgtattcggccctctgctgcattaaaggcaccccggacgactgcgctaagttccctgttacgcgtccgctgcctgacaccttagtggacgtatgggacgagatcgggcaataccttggcacaggcaaagccattgaaactcgcagttgcggcgtttcgcttctgcttcatggacactgctacgattcaaatcatgtgctgtactggcgcaatgctggcgcacttccagcagcttgcgatacgccactggctggtgggtctcgcaaactgttcacctgctcagcctgtggagtggacggtctggatgaaccacctgaaaccagttgccactgctgcacagagggggcccactggattgagagcaggctcttcacctccgggcaggcagacactgaagaatttagacccgtggcggtcgtgaaagagtgtgcaggctcaacgccggatgatcggctcatctggagcgtgattgaacagctcaacggcgaactggcggaaggcgataaactatttaagcgacgctga

SEQ ID NO: 26515 - DNA, 945 bp, Escherichia coli
atgaaactttcccgtcagacgacttctgatacttctgtagatggccgttcacgcgcatatgcctggggccgagtccattatttcattatcgaacatgcaccaatggctgagctggtcgctattgacgagttgctggaaaaagctggctggagcaatgacggctgtccgaactatgagaaagatgacgagtttggtaatgctggttacagctgtggttactggatcgatattgacagcgtgggaagcttcaaggctgactacaaacgtcttaagggtgagattagtgcgcatatcgcctcaaaggcggcagaggtggagatccgcgtactggactcgatgtccgacaaagaatgtaaagatgttgcctcggtggcatgtactgttcgccgtgacttacgtacgcagtccgaatcgcttcattcaatgcgtactatcgtaacggttgatcattacaatccctatgtgaccaccagccgcccgctgagcatttccgcctggacacttatccacgactgtctgaaaaccggcaccatcaatgacgtctgttcacggttgagctcattaatcctgcactctgaagccgcgattgtccgttgtaagggaagcttcgactactcttcggaacacgctcagctatcgttctttgctggtaacgactatgtcaccagacgcacccttgttgatgcagctcacgaagaggctctgcgaatgaaccgccgctttgatgaacgcattgtaatgaacgcggattctgatgccagaaggctccagtgcgaattcaacctgagcaaccatgtcgtacagcgtcggaccgttgaatctgctcatatccaggcaatcaacgaagacgtcacccgttcacaggcggaaccacgctgccctggaaagcttcttctgaaaatgaccagtcatgaggaagtgcgggactcactgagcacctgttag

SEQ ID NO: 26516 - DNA, 177 bp, Escherichia coli
atgaaagataacaagacacgtcctgtagactcgtatgctcatgctgatttcatggagtccgtcttcagcaacctcagggctttctgtgatgcggaatgccagcggctaactgccggttatcccccaactgtcaaaccagaacagcaaagcactgacggccagctgtcggcggcataa

SEQ ID NO: 26517 - DNA, 1185 bp, Escherichia coli
atgtccgcaatcgaaactgaagtaaaaaacaacagcaacgaaatcagccttcgtggttacctggaacgcactggtaacggtgcccgtaaaggtaacggccttatcattgacccttcggttgttgtagagcaggaaggctttaacactcgcacggccggtatgggcgagctctactattcaatgcctcacgttgtggaacacctgaacagcctggccgatgcctacatggaagacccgttcagcgtgacgcctatcgttgttcagatggttaatggcgtacctgtactgcgtcagggggcttgccgtatccgttccatcgctattgcaaaccgccagctggaagcagaagggcgtgaacgcattactcgtattcgctgcgaagagtttcgcggtagcgcttcaaaagcagaactcttcaccctgaccggcaactccaatctggcgctgtctgtcgtagctgaagcgctttcaattaagcgtctggttgaagataaagaagagcctaagacctttgcggaactggcaaaaaaacgcggtaaatcagagcagcatcttcgccagatggttcgcgtactggacctgccttctgaactacagaccatgcttgtgagcgatcaggtgagcatgtacgttgcgctggacgagtatatgtacagcggtgaggatgcggtagataacatcaacaaggcgatctccatctatggtaaagcgacgaaaaacacgctgaaattcgtcaaagctgccaaggtagaagagcgcatggcagatccgcagactccggaaaactccggtgatgagcaaccgacaggtaatgctaccgttaacaccccggtaccggatcaactgaatgatgaaagcaatacagagacgctggtgacgccaccggtacaggaaccagctccggctccaaaggacagcgctcctaaacagaacccggcaggtaaagcaccatccatgtccagcgttctgaacaaaaagaccgtgaccgtcattgccgacaccgcgatcccgatttttgaacgtattgctgaagaagccaagcttaaagaaggtgaatctgtcagcactgatacttacacgcttgttctgaccaatgatgaaatgaacgatatcatcaacgctcatgctgacctgaaagagtacctgcgtaagcatgctgagaagatgaacaagggacaggcatga

SEQ ID NO: 26518 - DNA, 282 bp, Escherichia coli
atgaagaaggctgttagcaacgtagacaagactaacccactgccagtcctgacggattcggtgacacgggtaagtattcagtgcacggcaaaagatgaaaacggggcagggatcgaagtgaacatcctcgacctgattcaggatcatgatacggatgaagtgaaagtgcagtttgggagctcgcctgttcaggctctggcgatgctccgccgggttatgacagcactggaaaagcaggcaaacgcagaactgaatacaaaccactattcacgcatgcagtga

SEQ ID NO: 26519 - DNA, 237 bp, Escherichia coli
atgcaggagaccgtcagacagtcctcacaaatgcttgagcctgatgcagccatataccttaaacgcgctatagctgcgaggatgcttcaaaaaataaaatatcaggatagtgaagttttaaaagactgccttggcgatttttttatttatgaacaacgtgaaaaattgcgccgacttggcgtgattactaactggggagtaaataaaacagcagacgggaagaataataagttgtga

SEQ ID NO: 26520 - DNA, 297 bp, Escherichia coli
atgaaaaaacaactggcgtacgcttcaaactgttctgacagtctatattcgtatatttaccgcactctgcaaaaacgggctggtgatgagaatgaaagcctttatcagcaggccatttccagctgccgtacagctaaacaaaaaaagaaactggccgggtattatgccggtccatggcagctgctattcaacgcgtggtgtaacaatcgcgtccctaacacagcggtgctggctcttctactccagcagtgcttatctcatttccagtgcgaagaagtgatcgcagcctggcagtaa

SEQ ID NO: 26521 - DNA, 438 bp, Escherichia coli
atgtacagaaacgacagaaacgtggattccttcaacctggttaatgctcttcagccggtctttcgtaacaccggctgtgggatgtttgaatatgatcgtaaaaagcagaatgaaaccgctgattcaatcttacgagcgttggcgttaaatgccgatttcgcgagggccttaaaacagtacgtccggattaattctgtacgacgggttgttcagttcgatgacggctcggttcgctatggtattcatgccgaatttgaagggcatgataaaatcaattccttccgtatttttaaagatgaagatacagacgcatttgactcctatttttattcggtttgcgataataaagctgagctggtggattttaaaatggactctctcgatattcaattgcaggcggtttttgaaaaggtgacaggtatttttctgtcacattaa

SEQ ID NO: 26522 - DNA, 537 bp, Escherichia coli
atgaaaaacgtaaatattttgactaccgatatcgcggccattaatgctctttctggcgtagaactgactgactttctcactgccgggtatcaggtaaactggtcaggagaaagggaggtttcgctggtgggctttccgtgtttagcaagcaacaagcagccggtagaagttggtcccggcattttcattaaccgcgtgtacagcaaagacagccaatctctgtgcgggaaattgcgctatgacctgtccaatggtctggcgtccagcgcattttcatttttcgcccattcaggctggtatggaggattccgtgtcgtatccttccgtgacaacgggccagctgcattgatcaacattggcattgtccatgaaaatgttctgaatgcgttttgtgctgacttcccccgggccaatgtgagcgtaaaccgttttcattgtggcatgacgcttgagcagatccgcatgttcatttcagacaccgcttacgatatgccgctttataacaatgagtctgactttcgcaggctcgccaattag

SEQ ID NO: 26523 - DNA, 300 bp, Escherichia coli
atggaacgtgtaatattttcagtaatcttttttatgatgctgggcatccctttttaccttctttataaaattgcccgggacattttggggaccgccggtgctggtgagcctgcacaattgcctcagggcaagcaaagacgctcaggaggcgctggttcgggttcaatctggcaaggacaccatctacaggggagcagccatttgaaccccctcggaggtgattgtaatggtgacaacagcatagctggtggttgtgatggtggcggtggaggaggtgacggaggaggtggtggtgactga

SEQ ID NO: 26524 - DNA, 285 bp, Escherichia coli
atgaatacatttttatacgtgcttttggcctggattgttgtgctttttatcgccaacaaactgctcgcaagacgtaagcccaagacggttaaaatcctggtacagcgcaacgggaaagccgcagaggttgatgctgtagtggttcagggttcaaagagaactaacaacagttctgttgcggacagcgacgcggtagatagttattttgaaatgaatccttactcccgcgaaaaccaggcgaatggttgggctatgctggccagagacgatgaccagcttaaataa

SEQ ID NO: 26525 - DNA, 354 bp, Escherichia coli
atgacaaccaatacaacaacgaccacctaccgctcagaagaaatcgtgccgttcagacggcccaaaggggatctggatagtcggtatatgcctcaggtgtatgcaatggtgcggaactgggcaagtaaccctgctcaatatggtgagggtgtactggcctcctaccgccaaccggcagtaaaccttgcctaccaggtaaaaggaactcgtgttgttttaattctggtaccagtagagtgcgagccacctggagtgataatgacggaaacagtcctgtggccgtcactatcacttgtagaagtcttgcagaccttgcaggaggcctggcaaaatattccggcgttaaacccctga

SEQ ID NO: 26526 - DNA, 732 bp, Escherichia coli
atggatgctttcaatctgctgtggagcattacgggggtagctttcattatccttattttcatcgtgttgctgtgtctgttgggttttatgacctctgccatagcggaacggcggactgcaaaggcaattgaatctgggcttcctgaagaggctcaggggctactttgtgatctcacctttcagttatcggctcaaagcactacgcagattgatcacattctcgtagcctcacatgggatatacgtcatagagcagaaaaactacgtaggcaagctctacggtactttggaggaaagccactggcggaaatggactcattccagaacccttaagttgcagaacccgttcaagcaaaaccaggggcacatcagggctattcagtctgctctcaaggctagagaactggaatgtatcaatgtcgttatcataaacggacgctgtaagtttgatggtgtcaagccagaatggttatgtatggggatggacgattttatccataaagtcaaacaacgacgagggctacggttgttcacaccggagtctgttcagcacatctgttcggtgttgaagtcaacaaggaagtcgccagggctctatacggaccttactcatattcacaacataacgacaaagtacaaagccccgatgaaattcgagcaacgagtaacatacattctgctcaactttatccattatctgtgggcaagtctgttcactaagccgaagccttag

SEQ ID NO: 26527 - DNA, 1182 bp, Escherichia coli
atgttaagcagtaaaaaaaggaagtcccctacaaatatcaaagaatcgctcaatgataacgctgaccgtttttataagatgtttcgtattcataccactgcaaaagttgctatgtcgctaattgccatgaccgctgtagggttttctttctacaatctttacgaacaatggcaggacgctgaagggaagaaagaccatatagctgtaatacggatttctggtgagatgggtaccggctcggaaacgggcgatggaacagtgatcgctacagctcttgccaaagcttacaataatccccatgccaaagcagttattatcgaggcagagtcaggtggcggtggtccctctgacgccatcattatttaccgccagataaacgcgcttaaaaaccaccagccacagattgaacgcgtctcagatgccggaggttctctttcatctgtcggtgctgacaagagtaacaaaaccgggagcacagaacgtagcgatgaagcacggtcgaagcaaaactccctcgaagtactctccagcggtaccggtcgttttttctctgatatcgcagactcatataagccaatcatcgttagtgtgaaaggcatatgcgcatccgcatgctattacgcggtatcgcccgctgatgcaatttatgccgacagtaatgccctgatcggttctatcggtgtgcgtatggaccactggaatctgtcagagatcatgagcacagtaggcgtcaagaatgagccccttacggccggtgagttcaaagatgctcttgaccccttccacccattgtccgattcaacgagggaattcatgcagaaggagatcctgaacacgatgcatgaaaaatttataacagatgttgaactaggacggggtaaaaagctgctctcgcggcatgatgccgatgcggtttctctttattcaggccgtgtatggccaacacctcaggcagtaaagtacggcttggtggatggagatcttacgtcagtagagatccgtacacgtctttcagaaatgtactccactgacacattcaaaaactacaatgagcctcatcgaaatctccgttctgcactcggcatgctgatgagcctgtcttctaatattgagagccttaccggtaccactacccgcctggtagaatctgttaatgccaccagctacccctctgtgaggtaa

SEQ ID NO: 26528 - DNA, 663 bp, Escherichia coli
atggctgcggataatacaagcagagcagcagtgctcagaacaatgcttttttttggcatggtcatttattttggttacagcctggccttccagaatactgaggagctcaaatatcagattactcaggaggttaatgcaagccggtccatcatatcaaatgaccgttggaagtctgttattgcaaatagtgaagcgactttaaattggttggtacatgactataagttaattgactatctgaatactattctgatccctgacaccaaaaaaccagccagaggtattaacattgttgctgaaaaatttacatctattaattacactatggccaaaaacatacccctcttactttatcagtccattttccggtggaacttaatcctggggtggctaatcgtttttctgccctatctctttgccatgctagcagatggaatgtaccagtggaaattaaagaggtacgtgtttggtaaggttacagttcagttttatcgtatttggtttcgagcattttgggtgatcagtgctttaacgatggtctacctggtcatgccgaatatgtcactttttaacaatatcgctcaacttttcccaccagtcgctttattgatattgggaattgcattgaatcgcttgtggtctaactttcaaaaactcatgtaa

SEQ ID NO: 26529 - DNA, 1110 bp, Escherichia coli
atggatgaaaaaattgtcctgacgcgccagcaaattttaagctctgcactaaaagtcagcaaatgtcgctcgctcgtaaaaaggcgctttcagtctttgggtttaaagttcgcagattctcaggaagttcgagatcggctaactaagatagaaaaaaacgcgtttcatcatttgggaaaattttgtcagagcaacgatatcgattccctattttccatggcaaatactctgtccgagcttttccttttaaagggagagttgatcactactgattcctttggggaccgtgaaaccagctactggtcggtaccacaaggttcatgccatgaatggattcaatcgctgaccaccagcgaaggtgctgaacgtaaattcgttagtttccgtatttctttcgataacaatgacgaacggtgtgatcttgtaaaaaagaatgcccgtatgcttggttgttatctgttgccatatttcgtcgatttgacacgcacggtgggcgcattcattaatttgccgtgtagtgtttcttttaaacaagtacagcgcatcaaaccccagattcatccagaaacaacacatagtcatatagttactattgaggattctccttttctttctcggctaaaatttaaaatcatcactgccatagatcagctaccagaccctaatggcctttatacaaatacctttaacagcattattgaccgtgcactgctgactcacctcaaaactgaacaggaaaaaatagatagtccaagagtctgcaaaaatgtgatttcggcttttgccgactcaactctttctctgccggtgtttaacattggcctaaacgagcagtacagatactggacgccgtggggcatcaactttatagaattttcccgccaggccgcaaaagcaaggaccgctgtatttgttcctgatgtgggacagatcgagtggaaaagcgctgagcataaagaactggcggagttaagcctcatcgaccaaatcatacctaaacagtaccactggctcctgggtatcccgacgatgtggcgtaacaactattgcaaccacgatcagaggctagctctttttcgtgaatggagggaaagcaatggctgcggataa

SEQ ID NO: 26530 - DNA, 2085 bp, Escherichia coli
atgtcagattcgaaaaggactaacctccatgcacaagagaacttctatcgacctattcttgagtatcgtagtgcctcaatacttttgatttgttcggtgtctatgctttatatgggactatcttcagacggattggacatcgctccaatagttcttttcacctcaatattactttttatgttgtgcctttatcgttgcaaaacagcagcgccatttttgatggctcattggcgagtattcaagcgacatttcatgttcgttagtctggattcactgcgtgtaattaacaaaagtaactttttctccaatgagcgaaagtatcgtcagctggttcaggattatcaaaataaaaataaggatatacccgagcgaaagtcctatttttgtgatgggtttgagtggggtccggaacatgcggatcgggcatatcaaatagctaacctctccagtgataaacgtgagatcgagttgccattcgtcttcaacccaattaagagacattttgacgcaatggctcgtaagatgggcggcaacaatgcaatttttgctgtggaacgtagggaacccatatttgtaactgaagacaactggtttggtcatactctgattaccggaaacgtgggtaccgggaaaacggtgctacagcgtttactaagcattagcatgcttcatcttggtcatgtcgttgttgtcatagatccgaagaacgatgcagagtggcgagagtctctaatggaagaggctaagaccctgggtcttcccttctataaatttcatcctggacagccagcatcttcggtctgtattgatgtctgcaacacttatactaatgtttctgatctaacatctcgccttttgagcttggtgacagttcccggtgaggttaacccattcgttcaatatgccaaggctctcgtttccaatgtgatttccgggctttcttatatagagaaaaagccttctatttatttgattcacaaaaacatgaaaagccacatgtctatcgtgaatcttacagttaaggtaatggagtcatgttacgcaagatattatggttacgatgtctggaccgaaaaagttaagtacgtcgctaacgataccttgccagtacgtttcaagcgcctcgctgaatggtttaccgctcatttcatgaattacgaggggtccgaacaaatagactggttagatactgtttcccagcttattgattactcaatgtccgaccctgagcatatggctaaaatgaccgcaggcattatgcctgttttcgatatgctcattgaaaaacctctaaatgaacttttatcacctaacccgaactcagtatcatcaagagaaattgtaacaagcgaagggatgttcagcactggtggggtgctatacatttcgcttgatggcctttcaaaccccgatacagcagctgctatttctcaattaataatgtcagatctgacctcctgtgccggtagtcgctacaacgctcaggatggtgatatgtcagctaattccaggataagtatttttgttgatgaggcacattcagccataaacaaccctatgattaaccttctggcacagggtcgtgcagcgaaaattgcactgtttatttgcacccaaaccatctctgactttattgctgcggcaagtgttgaaactgccaatcgaattacggggctctgcaacaattatataagcttgcgtgtcaacgatactcctactcagacgcttgttgtagagaactttggaaagagtgcgataagcacaaatatggtcacttatacgaccggttcagaaacatctttgcctcataataacttctcaggctcaatctcagaaagaaagcagacaaccttagaagagagtattccgaaggatctcttgggtcaggtccctatgtttcacatagttgccaggcttcaagatggcaggaaggttgtaggccaaatccctattgctgttgctgagaaacaaatgaagccaaacacaactctgtcggaaatgcttttcaagaaggccggaaaagttactttgcgtcaaaatctcgatatcaaaaatctaaataaatttctaaggaagttgcattga

SEQ ID NO: 26531 - DNA, 3135 bp, Escherichia coli
atgaatttcagggcgctgtatttatgtattaaacggattctggggattttctcgtttcaggggaatgatgctacctctgtaatgatagaggatatatcaagcctctctccttttgcgcagattctaggagatcagaagtatactgttcctgatcatccaaatccagaagtcctgaaattcatcgagtatccaactcgtccgacgggcatacagacatttaatgaacagtcaattctttctctgtatcgggaaaaactgcattcaatttcaatgatgttagctatcagcgatagcgacattagggacgatgcctatacatttactaatttagttttaaagccattggttgaatatgttcgctggatacatcttttgccagcttcggaaaaccatcatcataatggtattggtgggttactttctcacagcctggaagtggccatactctctttaaaaaatgcgcatcactcagaactgaggccaatcggatatcaagatgaagaagtagtccgtagaaaagtatatctctatgctgcgtttatctgtggtttagtccatgatgccggaaaggtttacgatctcgatattgtaagcctgaatttagccagtccgatcatttggacgccaagctcacaaagtcttcttgactgggcacgtgaaaacgacgtggttgaatacgagattcactggcgaaagcgtattcataatcaacataatatctggtccagtgttttccttgaacgaatcctaaatccggtatgtcttgcatttttggatcgggtatctaaagaacgtgtttattcaaaaatgattaccgccctaaacgtttatactgatgggaatgactttttgtcgaaatgcgtgaggaccgctgatttctattctactggtacagaccttaatgttttacgtgaccctatcatgggcctgcgttctaatgatgcagcagcaagggccattagtaccatcaagcacaactttaccagtatcaatattaataattacaatgctaagcctatgcatatcatcatcgtaaatggtgaggtataccttaacgagaacgcattccttgactttgttctcaatgatttcgaattacataaatataacttccctcagggagaggctggaaagacggtattggtagaatccctggttcaacgtggttacgtcgagccctatgatgatgagcgtgtagttcactacttcattccgggtatctattcggaaaacgaaatatcaaacatcttcagaaatgggatagggaaactagaattctataaccttcttaagcttaggtggattggtttaatctttgattcctataaaatccctgactcagtgccgggtctttttagcgttaatgccaataaagactttatttacattgacgagcaaaaaacagttactgaatacagaagaccagtgcccggccgggacgctataactaaaattactgatacagttgagacggctgttcttaaggttaatgatttaggccgcacctctgcctctattgatggagatttaccttctaataaaaatgaaggcttatccgacgattttgagaagaaagccgaaagtgataatgacacgcagatagttaaatctgagggtgaggaagcagctgaacctgtcattcctgaaatagaagaaagtgcagatgaaacggcaaaggacactgaatcccttgggctggtcaaccaacttcatgaactccttttgagcgatccactttccaatgactatattgtgtgtgttgatgctgtcccctacctcaacattgatgccactatggcattgctaccgggattagacgaaaaagcattcagtgaagagccctatttccaactgacattcagagacggctctctcgatggaatgtggatagtaagggacattgacgatctgcgtttagtccagctcggcgataactgcgctgggttccagctcacctatcatgaaccaagaaggccaacaactttaaagtcacttttcaatacttctatgtatcaggcattagtgattaatgatgagtcttctgttgaaaactcagccccacgtcccaagcaaacgcttgaactgcctcccccacgtgtaaatgccgtcgaagaacatcctgccgacgtggaatatcacggaaccgatagtgcatccgctactgatccgctgaaaactgaggctgttgaatatgaacattatcaacatctttttgagaaagaagatgaagagcatgagatcgttgattataccgatttcacacagcttagtgtttcacggccagaaaccgatagttgtgcaataagctcttcggtccataatgaaaagcttctccccgggccgtcagaattaccagaacttaaccgagaacagaacgctgatccccagtgcatgattggaccctctgtggatgtttctgaaggacaagataactcagaaccagatactgagggtaactgcccactaccagctgaagttgtatattctcagatggaagcagccgcaaccagtgtgatggcaagtgaagagcccgccttacctcccgtgcttgaagaatcaaatggagagcatgcgcccacagacgctaaggggcatcatctttcgccagcactggccagactcttcgccccaacagcaccggtagaaaaacaaaaccccaagcgcaaccggaataaatcttcggataaagcagaagttcaaaaaccagcatcacctgtttctggtcacaatttaaacaataaggtctttgcatctatcgaatcagaccaaaatggtgaattctcgctcataagtgaaggtgacgtcacagagcttgaatttgtagaaattgcgttagtacttcatcaaattctgtccaaaatggaggtagcgtttaaaagaaagcgcaaaaacagatttatggtcagtactcctaatactctctatctgactcaatcttgcgtggaaaaatttgggtcgcagttagaggctcaagatcttttcaataagcttcctcagtacctcgttaattctggtgctgtgatcaatacaaaatgccacgcttttaacatgcctactttgctggccgcatcagaccgggcgaaagtggacattgaacggattatcaataacctgaaagaggccgggaacctataa

SEQ ID NO: 26532 - DNA, 738 bp, Escherichia coli
atgaccgacgcaattatcactgaaaatgagcgtattaacattgaaccaaaagatgtaatggtcaaaggttcaaataaaaagcaaggcgtaaacgctcaaacttctactcaacgcaggccagagcaccagggtatggccaaagttattattaaccccggcacccccgactttaaccgttttttgactgccagaaatggggcagtcatcagaggatttgatgatgtgagtatcgctatttcctctctctttaaaacggttgatgcagttaaacatccggatcttgttcaggcaattcaagattggttcaacgagctgcatgaagaaaacaataagatgaaagaaaatcttgttgcttatattaagtcaattgagttcgacaagaatgactcattcatgtcatcaactcagtttgtgcctttcagttttgaaccagtacaactcaacttcaataaccacaacaccatgaggttttacaagtacattttcgagatgaaccagctcatgaacacaatgtatgagtacaactctttgggtttactggctgtaagcgattacccggttatgtctcacaacattataaagagtattaatttatatgttgagaatgtgaaaaagactctgaatgtttcacgccgtaaggatgggccatacagtccagcagagttcatcaccaaagtaatgcaatataaaagtgtgcaggcatacattgcagccgaactgtcaggcaaacgtcgataa

SEQ ID NO: 26533 - DNA, 486 bp, Escherichia coli
atgagtaattcgaatcttataagttctatagagctaacgcgtaaaaatttacgtgctcagattgaaggtttgcgtgttgaagctgaagatctcattacaaaatactggatcaagtggaaggaacgaaaccaccaggagattaacctcacccgacatagcaaagttccaaaaagagagtatctgggttcttacgcaccaaaagttgaactaataggtaatgccagaaaagttacgataacttggcatcagttcagcccttataaaacaagagcgcccagccacatgtcaaaacgggtgcaacccatgaaaagtggaaaatattctaagaactgttttgtaaaccatgccagctgggaatacgaaatgatttctgaaacggaagcattgctggagccttacagagaaatgcttgagctctatcattcagcatatatcgaacttggacggaaaatccgtcaatactcaaaaactaaggtggcacaatga

SEQ ID NO: 26534 - DNA, 711 bp, Escherichia coli
  misc_feature (27)..(36): n is a, c, g, or t
atggcgcaaggacaatcagcacatgtnnnnnnnnnnactggaactccgcttctacagcgtcgcctatttggaaaaggatttagtacagccgctgatttagcttttgaagtggaaactcgtccaggtagttttttggttccgcgtacactcggaaaggaaattacatgggaaaggtttttttctgctgtcttggacggtgattcaaatgtaattcgtgaatatgatacaaatgacattgactatggtatttacgatgccggtgaaaaagtgacttttcttaatggtacagaggatatctataatccaaagaagattcatgagttgcgttctaaatgtgttgatatacagaatgactactttatgcaggtgttctttatctcaatgcttgcacccgagtttgtaagtatattctacggtttaaaaccgactactgctgatgccatcaaagacattggttattcatcgttaaaaacaattaacgatgtcgttcttttcccacgtacaattgctttctcacaagggcatattgaagagagtgtttcacttaaaacgaaagtttttgcctgggcttatgaattgtctgctgacatccggttgggaaaggttagtgacgatttgatggaactattacgttatgacactatgttcaccagtcaccgtcaggatgtgttcaacactttaacaaataaagttatgttaaaggattattga

SEQ ID NO: 26535 - DNA, 1047 bp, Escherichia coli
atgactcgtattgcattagcgccttccaagatggttttgcttatgtctttggtaattactggtgtccacgccagccctgagcaacccctaataaaagatacgccctttgtatcaggccaggcttataagaagggtttcttctggtatgacgatcctgcgaaaaaaagcgaaccagaagaagaagaggttttgccaccaactggtgcagctagctcgccttcaaaagatgaaaaggtagatttaaattcaaaatggctaaaagagaatatgcctcgactgttaacgcaggcgatggataaccctaccgcagaaaatctatcacgttattacacagcgcaaagattaatgctggatatcagtacgcgcttttctgacaaatcaaaagattattttcttaaaaacccgatgatgtctgaaaagcgtaggcaacccgtcgaaaaagtggcattggatgctcaccgcactgttgttgaaaaaaatcagcaaacggtaatgaaagatatctttactaaatcaggtttatttttctttttccagagtacttgccagttttgtcacgaagagagccaaatccttcaatttatgcagaactattattcggtagatattcttccaatcagtatggatggaaggccattgcataatggcctttttcaggattttaacatccccaatgcacaaatcattgaacaatttaaaattcgagaggtacctacaattttcctggtttcaaaggatgggacatcagctcagcgcattagtgaaggcatgatctccgctgatgaattaaagaacactattatacttgccgcgaagggcatgaatctgatcgatgacgcttcgttccagtcaactctagatattaaaaggcaatataccatcggtgatgatggcgttattaccgttaataaatccgaaatggaatcagacccattcctacttcaaaaaataatggaccaaaaactcgaaggctatgacatgcctacggccgatccggtcaattatctcaatgctggcggcagttttggaggcacttatgcgcagtaa

SEQ ID NO: 26536 - DNA, 1416 bp, Escherichia coli
atgcgcagtaatgccgttttcaacttcaaaaagttacttttgtctctttctgtttgtgctgcaattttagccccgactgcaaatgcagacaacgcaatgcgtaacattttcaatggcatgatgacgtctaccagcccggccaccttttccacagcaacccgtacaggcatagttggcgggtcaatgtcttaccgaacaacaaacgttaataccaaccttgtttccatgtcgtttccaaaagcttctgtcggttgtaacggtattgacgtttttcttgggtccttcagcatgatcaacggggaccagcttgtgcaggtggcccgtggtattgcccagggtgcggctatctatgcttttaacgttgctgtttcagctatttgtgctgactgcgctgcaacgattaatgacatccaaaacaaactgcaagcgctaaataaatttgcgaaagattcatgcaatgcaacttactctttcctttctgaaaacgtgggtacgccaagccagttcgctaactcagttagctctggaccagcctcaattctgggatcgattaatggtctcattcctgattttggctcatcgatgacaaagtcacctgaggctgtcacttctcaggttaaagcaaaggatcccgaagagttcgctgaaaaattcagtggtaacctcttctatatgtcgttcatggatattgataagggaacgatgaacatcggaggggtaacggagttatccggttataaactggcagaacaacttatgtctctcgtgggtacggtcattatcaactgggatagcaaaggcgaaaaagcgggaatggaagtccgcccgtctaccatgactgtcacggattacataatggggccaccagctggcggatcaattaaaatgctcaagtgttctccggcaccagatccatcatccccacgaaaggctcagtgccttgtcatgtcagaagttaatgacggtggttttaagggattgaaggataccatttctgatcttcttttaaacgtacagaaaaaaatcatcaacgacgttcgtgtttcagatgatgaattacgcattatctcctatatcggcatcccgaccattatcgactctttgcaaacattcgaagcaccggaagggtacgcatacattcaggacatcagcactattgctgcgacgagcctcgtaatcaacatgttacgccaggttgaggccaaaatttcaaccatgagcataccgagtgagtcgctgtcgggtaaaagggatgatctcaaccgattaacagacaatctctcaaaacaggttaaagccgcctatgagctatcgcacagccaggtcggtaccagctcggacgtcatttcaacttgggataaccgtcgcctgcaacggaaggctttcacagaaagtattcgtggcacacgtaactga

SEQ ID NO: 26537 - DNA, 3954 bp, Escherichia coli
atggattacaacatatataccctgggtgatattgattttgtctggtcggcttttaccggtattgccctaatcttttctcaatatactggggtaaaagagttcctgaccacggccgccgttgtagcaggtgtgagcctattctataaaacgtggctatggcttcaggctccgaccaaaaatgaattaccgtttttctcctggtttttggggttgatccttttcatgatggcaatggttcgagtggatgtaactattgaatctgtaaagtcgggagaggtcagaaacgtcgacggaattccaatttttattgctgcgatggccaccgtcaccactaacttaagccagggtttgctgaaggattataaaacagcgtttgatccgctttctccggtggacctgtctgcaacaactctggacgatgacatcaccctcggtccgatgatccgattcgtgaagtttttgcaatggggcggcgatagccagggctactgttccgcatttcctgaaccggccagcgggctagggccaatgaacgtatgtgctaccgttcagtctcttgcatacaactgcctgaaggctacccaaaactcaagcgcaaatattgcgggtaaagaaacaatttttaacgatattttctcagctaatctggcagatagcatggaccggattaatcaggcgatgaaaggcgcactgaagaatgcctctgccagtattgttggcgctaacggttcaaaatctggtacgtgtgatgaggtctggtcaactgtgaaacaggttaccagtacagctgaagctcgccagactatttcccttattggacagacaaacggcatccttactccagacgaagcaaatggtgcacctaccggcgcaagctttactgatgttatggcgtcagcaaatggtatgtacggtaaggctattggttcgtatgacgccaccctgaacctgttcataatgaatgagctcagaaatggcgcaagcaaatataagaccccactcggtctggcttccgatatgcagttgtttgaggcttctctgaagcgaaccaacacaatggcttcacagggccagttgtggttacaactgtcgggagcagcaatcgcattccttgagatgtttgcttatatggttgctccatttgctttgcttatgctgctggcgttaggtggtaatggtgttgccgctgcggcgaaatatttgcaacttatcctcttcgtgaatatgtggccgcttacggcagtaatggtcaacgcgtatgtgaagaaagtcgcgacggccgacttggatacctggagcaccctcaacagccagaataatgccgtcacgtggatgggcctcccagggcttgcggaaacatacagttcatacctgtctgttgcttccgccctttatgctctgattccggtactcacattattcctgatgacacagtcgattcacccgatgatgaatgcggttaagggagtgacccccgatgcgccggtggatactggtcatgtaacgcccaaagtatgggatggccctaacagcggtaaatcttcatttggtgacgtaacacgaaccgccttaaccagtaccggtcagggatacagcgatggtggcgcagttgattcaagtaatttccgtcttggaatgtggaatgctggttcaagtatcgctaacagccaggggcaaggatcagctgtaacctcatcagttatgagtgcggcaagtaattcattccaggctggttacagtcagatgagcgaaattggaaggtcaggacagtcgagccagcagttctcaaccaacctgcaaacaatgaagcagatctcggataagattggtgcctctgtagcagaaggtattgcaacgaaacacggggtgagtgcgtctcagatggccagcattgcttcaaatgttattctcaacgctgggcttaatggaggtgctggaactggcaatggagccgggctaaaagcggctgtagcagggcaattgagtagcggtgcgtctaagaccaatacaggcagtgactcgctttcaaatgacctttcaaaagcaatcacgaatcagcttagccaggattctgcgttaactgaccagttcagtaaagcggcgtctcaggtaagcagcgatcagatatccaatactaatgcgtttaaagaagcatcgtcgaaaatgaaccaggcgacacagacgatggcgcaaaatatttctacatcggtttcgactaacgcaagctccaatagtggaatgagcctcgattctaaacaaagcattaacctggacaggttctccgattctattcgcaacaaaaacttcagtgatgatgatgtaaggaattttgctcgtaagaatgggctggatgagaatgcgtttatggagaaattcaactcctataacgataccttcaaggccagtaatcagcttggatcgcagcttcaacgtactgacgcgcttgtggctgcaacacgagatttcagtgagcaaaaaattgcgattgataccgcccggggagagacggccgaaagtaataaacaggatctccgtgaaacctccagcctgcttaaaagtctggtttccgacttcggtggtaatgcacagcagctgctacctatcaccaatcagctcgacagaatttcaggcgacgggtcaggaattaatactatcactcaggcacaggatagaactcctgacagcgtaaatacgtctggcgtgatgagtgcgtcacgcgtaggggaactgggtggaagtgtagattcgcaggctaaactcggtctttcctccaacgctcaggacgcgacacagcgtgtccctggaaaaagtgaagctggctttactccttataaccttgataacgcgggcaaaggcgatattcagggaatacataacaacaacgtgggccgcacttattctgatgaagaaagaaatgtgcttaattctctcaaaacgaatggacctgtactgaataatcagggtgtagagaaagtcgtcaattcgggtcaggatgtcagaaatgcagaaggctcatttaacgatctggaaaaggctaccggtggtcgggtggttggtgatggaatggatcaacgagccactgctttgaacagtatgtatcagagcggtcaagttcgtggcttatctaataacactgataactactttagtcgtgttgccaacaacccgaacttaagccgggacgataagcgagctgaattggcacagcaagctgtctttacctatggtgccagcaccatggctaccggtgccgaaagagagcagctcaaagcggatacccagaagatccttaatgaactgggtaactataacgttaactggagtatgaatgacgttcagagcatccatagcagtttcaacactcataacagagctgatggttcacttgagtcagtcgtacgggcaaacctgggagagggtgggtcgggcggtggtctcgttggtaaccgcactcagaccgtcacagatcgcttggttggggaaaagatagaggccaacactgagcggggcgcgatttctggtgcgctactcgggggccagcaatttgtttcggatacgctaaccagcgttggggcgaaaccggtaaatgagatgcttactggagcgggcatccttcaaacccagacatcgatagcaaatgatgcttctaaccctgcaaatatgcctgattctctccagggtaaggtccttaatcacatgcagatgtctgatggcgtcgcagcagtaagtgaccggtatcagagtattagcagcgacggcgtttcgacttatgcgaatgcagcgcagaactctgaaagggctatccggcagcaattgacggatgaccctcgctttgggcctcagaaagcagatgaattcattcagtacatgaagtcagagctgagcaacacaaatgagccttaccagtcacgtgtcgataaagcggatcagtggcttaatgaaaataaaaaataa

SEQ ID NO: 26538 - DNA, 507 bp, Escherichia coli
atgaaagatttaactcaactactcagcagcctaaagagtttgatggttgcagatgactaccctttagccagcccggtagccccggaagtcttgaaagacttaatctgcaatccgcctccagtggagtgggcagatcacaaaaagagcgcctatatagatatacagaaactcattaaaaccaggcttgattatgcccaagtgtttaatgctatggatggttttgagtacaacggacttacgttttataaccttgttcaggcagagaacgaaaatctattgtggtcaaatatttacatacgcaactttgaagcacgagacaatgaaatctacgttgacccaaatctcactgataaggtgttaatcggagaagatggcatgtcacttttcgcgtatagttttgcagacgactgctttcagataagagacaaagcatctactgattatgttattgaatctcatacagagtttgatagatttttgtcttcactgattcaaaccgtcagttga

SEQ ID NO: 26539 - DNA, 1062 bp, Escherichia coli
atgctgcatcactgtcaggctaagtcactggatgacatataccttgaggatattccccacatcatacatccggccacggcggtacgtgacctcgaagataccgccctgccaaaccggattattcaggaatggaatttaccgcagggatatacccagtttgtcagccggtatcaccagttccaccatcaacgcccctggctcgcttaccgcgatacgcttgacgacatcagatacggtaagatcgttctgcttagaaaagacataaccggcaataccgggccgggggttatatcaaatggcaacctacgcaatgacctgcccctgtccctctttacccgtctgcgcgatatcatctctcgtcagttgaaacgcccggggtattacgttcgatcaacgacaccagcacagcacgcccaatcaacaaaaaccattaattccaaagcagctggtcgtcttctcgcagctggcgggctttataatggaaatgttgagggatttcgacatacggctgaacaacttggcggcgaagctgttgaaggctatgaccaggtattgaacgaaacaacttcaggtatgctggttgcagcggcttcacttttggttatccgaaatccaaggtctgcggatgaattgacaagttatctcggcaagtacaagaaagcacatgttttgctcgatgatatgaatgttagcgaattgaactacatgcgccgagacagagctgaatatttagctctccgtggacaattcaacaatactgtacgccctaactttcttaaatcactttcagaccacccagatgccctggctacgtttgaacctaacgatttgatgaaacttgcaacaggcaaggtcccctctgggtggcaggttcaccacaagatccctcttgatgatggtggcacaaacgctatagacaacctggtacttattcagaattcaccataccattcagcactgtcgaaagcacaatccatcattacgaaggatctaccgtataattcaagcaccaaagttttatggccatcgccgaacggtgttatctacccggtaggaaagtaa

SEQ ID NO: 26540 - DNA, 558 bp, Escherichia coli
ttgtcttcttctgcaagaaatttatttaagattctctcttctttcttgatccagaaaaaccctcttcatgaagaagtgtgtgttcatgaagaaacaacagctggtttatgggcccctctccctgattcgcatgtcgtgcttttcttagatttcgatggggtttgtcacaggtgtaaaaatgaaacctttgagcgaatgccactgttagagaaattgctggataactgccctgccatggtgattgttatctccagctcatggcgtgagtgcgctaatacaagttatctgaaatctctgttccggatgccttatagagacaaaatcataggtgcaaccggttcggtatatttaaaacacggacagactggtgtgcgggctgccgagtgtgaggactttgtcttttcacatcgagttaaagcatttatctgccttgatgacgacgaatcattatttccggctggttatccgcatttgcacaaaaccgattattacacgggcctcaccgaatctgaccttgcagctcttaacgcaaggtaccatcagctcatgggacgctga

SEQ ID NO: 26541 - DNA, 540 bp, Escherichia coli
gtgtttacaccaccagcagatgatgtgaaacctattcccgttcctgatgagatttacagtcagtgcattacggatgccgcacgctacttcggaattgatgctgaactggtttttacgttgtttgacaatgaaggcggtaaagttggttctttcagcaggaatactaacggcacttatgatattggcccaatgcagatcaactcatccaatctgcctgaaataaaaaagcatttcccgacggtaacgtggcgggttctggcttacgatgcttgcgcaagtttctgggttggaacatggtggctctatagaaaaattgttgatcgcaagggcaatgtgtttgaagggattgccgattacaacagcaaaaccccaaaggtacgtgcaaagtacatatttaacttcatggtaaagtacaatcgccggatccagcagcgtaacgggatgggtgagctttatcaatggacccagcaacctcctcgatacaatggccatatagctaaaaatgtcccggagcaaaacccgactcctgttgttaaataa

SEQ ID NO: 26542 - DNA, 750 bp, Escherichia coli
atgaaaaaaattattaaggcatcggtattacttctttcattaagtaccgccttcacgatgaatgccgagccagttaatacaatgatactgccagatgcagcccgggataagctcaaagccattgggctttcaatcgagcacgtcgaaccctcgccagtaaaagatatttttacggtgatttccagggagggggtaagttacgtgagcaaagacggagattacatttttaccggaagcttattccacgtgaaaggtaaagatgtggtaaacaccactgagcaggccattttaatgggtgtccgggaattcgcatccaaaacaaaatccatcgactacaaatcaccaaacgaaaaataccggcttgctatctttaccgatataacctgtggatactgccaaaaactgcatcatgatctgaaatcttatcttgatgccggtatttcgattaagtttcttgcattcccacgtgcaggactgaactcggtagtagccgggaacatggccaaaatctggtgttcagcaaagccaaacgaagctctggatgcagcgatgaatccggtttcaactatcccggaaggacgtcctgatgaggcttgcttaaacattatcaaatcgcatttccaggtggcctcaacaatcccgctgcaaggtactcctaccatggtgacactaagcggcaaaccgcagttatttacggggtggctgagcccggaaaacctagtgacccaaatgggcgctgcgcaaaagtaa

SEQ ID NO: 26543 - DNA, 393 bp, Escherichia coli
atgaaatctactttattgagtacgttaatgctggttgctgtaggtgtacagcccgttttcgctgcacaatgtcagtacggagcctgtggaacggaaaacgatcccggaatcggatttctgatgtcatcggtacaaatggatcaaggtgaacaactaaaggaactctctggtgttgcgaccacaggtgacaccatctctaaaaagatggaaagctacctgggaaataaaaagctcaaggtaaacaccgacagtacccgcaaggggccgggtaataccaccatcaggcctacagatgagctcgccccaacgaggcaactaaaagttatccgtcccgaactggtaaaaaatcccgattcgcagctcgtggtagctttcaatgagcgcctggcctga

SEQ ID NO: 26544 - DNA, 423 bp, Escherichia coli
atgtcgatactcagtaacttcgtcatcagagcaacggggatacctgacaaaaagtatctccgggatcccgtaataaaacgttgttatgaacgtctgagtcgtagggtgcctgctctaatgacggggtggcttctgtgcattctgggttcagggtatgtcagtatggcactggaacagcctgatagcactgtgttacttagtctgctgctgttgtatgttatgacaggcattttactgatgcagttccagtatatgtattcagaacgaagcataggctacaagttctacctggaagtgcttatgaatgcagctgccagtactcaacataaagaacagttacagtatctattcattaataagcccaacgccatcacgatgggcgatctttaccggctttatgatttcaatgggggagggcgatag

SEQ ID NO: 26545 - DNA, 612 bp, Escherichia coli
atgattaggcagggctttatactcacaaccgcaatgcttttgagtggttgcggatatcatttcgcaaaccaggtagatgcgtacgatctaatgcctcgtcctgttacaaataaaaagtttcagatagtccctccggacgaaggtattcagtccagaatgttttcaggccgttttgctgatggattagcaaaaaaaggagtcattatttccactcaccagccagattatgtgctcaggttccgaatcagcagctcacaggagaacatgcagtatagtgagcagcttcttactggggtgacaggctacgttgtagataaaaagacaacgagaactgacaagcatggcgaatcgcatactgactatgactacaagccagtcgatggggtaataggcactgagacgatgtcgcagatgcactatattcgacagctggatgtcgaggtatacccgtcagcgaaaggagcgaagcaggttctgaaagtgagtatgcaaagcaatgcacctgtgccgtcagacagccttgcttattcagcaatgatcgacgcctttactgataaatttgatgcaccgctgcgttccggaaattatgttgcagtgatccccttggactga

SEQ ID NO: 26546 - DNA, 810 bp, Escherichia coli
atgtctaaagaattttatttaaaaccgatggccacgattttaatttctgcggtaattgctaccgctgcctcggcgttaatcacggcaacttattttaaaccgaaggtgctcagtgaggaagaaataggaaaaatttccgctaattacctggtaaaaaacccccattatttagtggaagcaggtaaggcgctggaaaaccagaatgtgagtgcctcagtggagcgaataattccatatgcgccagctctgctggataccaaggagacgccaaacatcggcccggatgacgccgacgtcgcggtgatcgagttcttcgactatcagtgtatttactgcatgcgggttacacctgttgttgaatcggtaatgaatcagagcaaagatgtaaaattcttctttaaagaattcccgatttttgccggttcaaaacctgtgtctgccatgggggccgcaacgggtctgcacgtctatcagaatttcggtgctgaagcctatcgtaagtaccacaacaacctgatggctgtggctcataccttcatgacctctcaacgcaaattcgaactcagcgactttaattctgtggtggaaaagtcagggtttaacagcacgttttctgacagggaaaaaaaccggtatgaaaacgtgatctccggcaacatgcagctgggcgaagcgctcgggatcaccggcacaccaggcttcatcattatgaatatgaaaaagccgaatgcggcgactaccacatttatccccggggctatggacgcagcaactttgcagggcgcaatcgaaaaagctcgcggggcctaa

SEQ ID NO: 26547 - DNA, 1260 bp, Escherichia coli
atgtacatgcacgttgatattaacggagcctatgcggcatttgagtgtgcgatggatcccaagctgtccaaaaagccgctcatcatagccagcaataacgattcgtccgtcattgcaatgaataaactggctaaaagcgttggtattaagcgtgggaccccaatttttaagtgcagggatttgattcagcaacaccggatcgaagtccggagctctaactttactttgtatgaagactactcaaatcgcttccatgaaacgctggaaagcttcgcgcctcaatcgagtcgatatagcatagatgaaaatttcatgttattgaaaaacatgaacaagataatagattatgaagattacggccggttgatcagaagtacacttcttcataatctgtcccttacctgtggtgtgggttgttcaagcaccaaaaccctggctaaattatgcacctatgcgagcaaacgatgggcagctacaggcggggttgtagttttgactgatcaggccaggatcaggaagctcctgagccttatcagtaccagagaaatatggggtattggtcgaaagatcagtgaacgcctgtcggctttcgggatcatcactgccggtgatttttataatagcgacgttcgctttttacgtaaaagctttggcgttgaaatcgagcgaacctggcgggaactgcatggcgaaccatgtttccggctgcacgagtcccctccagtcaggcaacagattatcgtttccagaagttttggtcagcgccttaatgagataggcaagctacatgaggcagtttcattttttaccgcccgggcggcagagcagctgcgcaaggatggctcgtggacccgtcaaatcacagtcttcattcagagcagcaattatgcgcaaggtgaaaaccgctacagcaattgtggtatcgagccgcttaccgctacacaggacacccgcgatctggttgatgcagccatgaccatcctgaaacgcatttacagacccgggatagcgtatgcgaaagcaggggtaatgctctccgctatgactgacggtacagagcaactcagcctgtttgatgagcgcccggccaggcctggcagtcaggccctgatgaaagttatggaccggttcaataaagaaaagcgcggagctctgtttttgctgggggaaggcattcaacaggattttcgtatgaagcaggccatgctatcaccgagatatacgacccgctgggatgaattactcgttgtaaaagcgtag

SEQ ID NO: 26548 - DNA, 435 bp, Escherichia coli
atgtctgttatccttgagcacattagcaacaagccttacgaaatggcaccttttttcagtgatttaataagctgtggagtgatgagtccgtgcgccgggcatgaagataatgaattaaatttgcatgaatatgtagtccgcaaccgcccctcaaccttctttgtcagggcggcgggcctcagtatgatcaatgccggtatcaatgatggagcaatacttgttgtggatcggtctttaacagcacgacacggctctatcgtcgttgcgctggtggatggagagtttacggtaaagatcttacacacgtatcctaagctgcttttgatgccttctaatccagcctataagccgatacgtgtaaatcccgaatcccttgagatatggggcgtcgtcacctttgcactgaatcagttcagccatgtacatgcacgttga

SEQ ID NO: 26549 - DNA, 618 bp, Escherichia coli
atgcccctcccaccaaattttttatctcctgaagaccaggctgagtacgatgcttatatgtcaagattcagcgagataaatcactattatgattatcacactgtccccgtgattgactggttctttaaacaagcaaccgaggcgttgcatcacgaactatggataccggcctgtacgacctttctgaacgggattgaaacatcactcatggttacgttgaagtcgctgatgctgaaaccaacagttaacgatcagcatccagctcctgagctggtggacttggagggtatctccgtaatgagtaatgccttactgagaaaggccaagcaggaaggggtgccggtagaattactgtcatttccagccgagcaggatatgttggctaaggtagcagccgggagaaaacctgaagcagaaattgtcaggctgagaaacaacctatgccatggcaacattctggagttcatcatgtctgttgatatcggtacttcaggccccatacgtatttttacgcctgaatgctgccgtgaactggcgcatgaactttcgtccatttccaggaattgggtggtaggtttgcacaagtacttggtcgacaacaatctgatttccccctga

SEQ ID NO: 26550 - DNA, 357 bp, Escherichia coli
atgaaattaaaataccttctgttatgtgcaactctgtctgtcgcctttacctcctctgcggtccttgcatctgaaaacgggaaaaaaccgatcccgggcaaatcagatgtgatggttgccgatatttgtttaaaacctgaaatccaaagtgaaaccgattataaaaaaacgaaagaactggtaaggactgagtttgaagaaaacttgcctgttggatctaaaatcaaagaaaaagacttgaatgccgtaattgaagcctttgctactcgtagaagggacacgccggagcgagcggaccattgccaagaaaacgtacgtgaaagatactgggaaatgaacccggtgaaagataaataa

SEQ ID NO: 26551 - DNA, 3336 bp, Escherichia coli
atgggtgacctggtcagcaaaaatagcattgaccgtttagagcgatttcattctttgctggcgggtcagtactggacgtccactgacagcatccctgaagagggtattgtggcaggggatacactgctcatcacgtctttgcgttacgttgaagataagctgcacacagtaattctacgcgcccatccccgcgtttacggtcagactgttgctattgtcactgaagacagcagcggcaaccgtagggaacgtggcaaagaaatgcgagagcatcgcttcctggttaaggattttctgtccagttttgtatttgaacccgaccataaggtaatccgggatgctgaactcagacaagctcaggaggaagtgaatagcctacaggcatcgcttacagccctcgtgagcgacgctcaggggctccgtgaccttgcgattgagcaattaggtacagatgaccgtgaaaaccctgtgacgggccttagcgttgcgttagtgccccctcaagagcagcaggcggtaacctccctggcaattgggtcagttcagaatgctctgtcctctggtatttcagatacccgcattgaacaaatcagagaagcagccttaaaagaagggcagatcagcacagccatcagcaaaatcatcacacaacgaacgcaggcaatcgctaatgccagcaaaagaatgctgccctatttcgaggaagttgcagcggcaagtctggccactacagaagaagccatggaatatgtgaagaaaatccacgatggcgttggcagtctggaactgtataccggcaaagacgttgaggtagtgaatatcgtgaagggtgaatccgctccatcacacctcccgctccaggtcgttcaggcaaagctgatggtggatgaagagctggccgtatggtgcgatctcgatagctggttcgacttctctgatatggaaaaatttcatgaaactttacgaaccagccccgggctggtggagcagatttttccgtccgaacgttccatcgtatgtatggccacaacacgacgttatatcgattaccgcgatccctgggaaaatcatgtccgcaatgacaggaaccgggttgtattccttctgatccgggacggtcaaaatattcatcaggtttactcttcggtagaaagccatcttggggcttcgcagctattcccttccgccagcgaacaggaagcacatttccaggggattgatggcagcaccataaagtttgaggacgtcagttataccgaccgactgaagcagcatgatcttatggcacttcactaccgtcgtttcctgatccttatctgcggcctcgatcaccggctcaaactatttggtgatttctatgataccaataccccttacagttttctgagccttgagttccaggaacggtacttccagtttcttcacgacaaagacggttctggccttttgggtatggctgagacacggccgtccctgcaaagttatctcgaacaggcaaactcatgccttcagtccggatcccgggtaatgtgcaactgggattcgttgatgaacccagtgacagcaccaggagcagtgcaggaagacaatagctactctggctataaatggcttgggagaacccataaaaactatgagccggttattgcattccgccagggagatgatatctgtgtcaacgcaacagtaaacagatactcaacggatcgagacttcaattgtaaggtgaatttatctctgtttcggcagtccacccggaatgatgctgagctgggtttcctgtgcatggatactattaaagcggaggaactcgaatggtacattcacagacgtaaattcaggtctaatcacctgttttacattcgcttcttcaagatggctttaaattatattcgtgccgagcgtgaggcagaagaaccgtaccggcagacgctgagccaggctctggccgatggaaatattggccagcctaatctgagatcagagttgatagatcgatgcattgtagcctggcgagctgataacaggggggcgacgctggaagctgccatgagtacagagaagggctccaaagagctcctgaaccagctctatatgctcgctgatgtggggctcaaacatcttcccggggttcgtaattttatcagcagcaaaggctatgagctggtcaggttatcggtaaatgcttcagggaaacttgttgcatatgccgcaccagcaaattttgaatgcgacaaccggatggaagggcatgcctgggttcatcgaatggtacttgctacatcccgaaatggcttaaacgtcactcatcaacgttttgcgaaaatgaaacacttcttaccagctgaaaacaccctgttcgaagatgaacagctggtggccacatggtcgggcaaaaagactgctttcaaaagcttcgaagagaagcagcgttattttgatacatgctcccgtggcgctcaggctcttaagcagtttttaaagctgaacgatccggtgatttacaccaatctgcttggccagtggattgaggcctatgaaagtatcaatgaaaccagtgagtacgtacagcaagtaaacctaatggctcctgttgcggtcaagagcgaaaaaggtaaagccagcctcatctatattggcactaaagacctggccgactggttttatcagaaagcgccgacacccgagttgcaggcgctgttccttgaggaatacctctcaaaatttgaaaataaagaggtcaataaagaaaagctactttcacgcagaaataccgctccgtctctcagtttttacaccatggacaacggggaagtaccagatgaaatcctcgtcaccaaatcagttgataatgccagacggtggtattcaggaatgttcacaagcatgccaacgatgttaaatgaccagtggtcctgccatgttgcgcatttttcccgtaacggaaaactctatttgacgcctgatctggtcactgatgaaggggaacctggctttgatgaaatactcgggtatccgcgcccggaggggctggtaccggtaaccgtgtgtgagtttgaaattgaccactttaaccgacgtggcactgatgcgaatggtgataaggtgaatattacacagtgggtcgatatttatcagggtgagcgtgaggttacggaactgctggggcctatttctgaagaaggggtgaacatcaaaacctacaggatggacactcttgagcaggcgatgaataacatctcccggggctcgacgcgcctcagaccgtcaacggagaatagtgagtggcaacaaccatctgagggtgtgagccgctatgtacttcgtgcatggtaa

SEQ ID NO: 26552 - DNA, 378 bp, Escherichia coli
atgaacagcgaacccaataagcaatgctgcaaccgtgctgatgaagtcaaaaaagaaagtcagtcttgcaataaagacgatgaactggcgcaactcctggcgaatcttgaaataactgatagtgctctgtacctgagtaacgaacgtatagaggaaattgcgtctacagactctgatgcggagaaacgccagcttgccggtcgcctactgaatttgcagcgatacagagacaacacctctgttcttcacgccctcagttttaaacatcaaccaggttgttatcctctcaatccgcttgatgactgcctactgaacaagctcagtgattttcaggggcgttcaatttctctggatggtggggatgataatgcatcgtga

SEQ ID NO: 26553 - DNA, 516 bp, Escherichia coli
atgatagaagcacgctatcaaggtaagcctattaacagtattcctgaagaagcgtttgctgaagggttatcgcgatccggtttaagccctgttctgctactggcatccccgaccacagtacccgttactacggatgagcgctggtggctcgcaaaggaaaacgtgtcaggacattacggcaggattttttatgctgcggtgcgggagctggtcataaggtcggaaatcctgtcagcagtgggaagtattgcggatgagaacttcacgtccgaacacatgggttacttcgagcgtcttacatctgatgaaaaagaagtcgtgtttagcgattatctgcgcactctcgctgaatgcggtctaacctgcactgcgaataatcttgtcaaactgacgcaggatttatacccgattgatgccactcctgacaacattagaaagctatccacggatagggatgcactgaacgaactacacatcaatggtatggtactttttattaccggccctgcgctttga

SEQ ID NO: 26554 - DNA, 492 bp, Escherichia coli
atgatagtaaataaaaacaggtttatgcataaaaacgggaaaaggtttaagtccatcggaaggtatttaagattttggcaagcagtagcgtcctctggtttacccatgaacatggtaatacgggaaaaaccataccaacttatggtcgctttgattgctttatatacggccatccctgttgttacaatagtaattttatctggtcagcaatcgcataagttggaactaattgctgtgtatttcattacatttatcacgatggtgtttgttttgcgtcgtaagatggggaaacgttggctggatttatttgaagaaaaattagccatttataaacctaatgataaactcgcgcttagcgaattacacgaaagcatacgtgagaaaaatgggctagacttgcaggatctacaagattggtactggaaagagaagatgacatatgcgtatcacaaagaacataaaacaaccataagctatcaaaaattcaagtag

SEQ ID NO: 26555 - DNA, 528 bp, Escherichia coli
atgaacattaccgacaaagaacttagctcaaatacagtgagtcagtatggatggaacttaggagagttcaatcactcaacgccttttacatctcattttatttatatcaccgactatcataaagataatacatggatgatttcactttcgcaggaggattttaatacgaccaaaatttcaacatcgttaagtctagatgcctgtgtgtccatgctcggaaagatactaaaaaaaatgtctaacaaaatcggtatctcacaaacggaagaatctgaattcgcatttcttttaacaaactatattaaacaaactttgacttttagagaatggcaacgcaatgctgaaggaaatcaacgactgcactttcttattaatatctacggtgcaaaagaagacggtggcgaagtggttttaagaccatttattgcaaatcctgatgaattaatgcttactccagcggatgtcgttggatttaattcgcaggttatcaaagttgatcggcagcgtcatcctgagtggttccgttaa

SEQ ID NO: 26556 - DNA, 408 bp, Escherichia coli
atgtacccggaattggtatcaggcattgcaagagtggcgcatgaaagactactttcaattttaacggagtgcggcacagagaagacgacaggcacatgcctttttgcaagctatcttgtatgttattttgcaaaaaataaaggtctagatgctgttgttcgtgggggtaacggtgcagatgatggcggtatatttatagagagtggtggctttggccattactggtgtgagttgaatttcgaagaagtgcaatattatattgacatcacttccgaacagtttgggtttcatccatacatagtgaaacgcgccaacgatataacaggatggcctcgatatattcctggtgatcaggaaacggtcgatagtcatttagaacaattattacgcgacggctatacagaatag

SEQ ID NO: 26557 - DNA, 177 bp, Escherichia coli
atgtataaattcatacccgcaatactagtctttctttcggtgttccttggactaattgctctactcggtgctatcaaaaatggttctgatgaaatggcggtattcctgattacactttcggcgtggttcgctgctttaagtaagttttattcacttaaacagaataaaaatagttag

SEQ ID NO: 26558 - DNA, 672 bp, Escherichia coli
atgtatagaaaggttttggctctttcagccttactgatttctgcttgttccaccgataatcatcataaaaaaagtatgcaccacaatgattttgagctttcggactcagctgtaaaaattcaaatcaagtctggaaatatgataatctccggttcaggtacttggatcgatgaacaacatattcttacagcctcacatttatggcttgatgcaagcaaggattatagtctaagtataataacaagaaatgggagtcaaccagcaacagttatcaatattgatgatcctaagaaccgggacctcgctcttttaaaagtagaaaaaaatactattgtcaaagccccacctaattggaagcttccagtatgtgataatgttctagctccaggtgagtctgtttgggttctatcgggaatgtataattcgctttcaaatacgtatgcttcccccgactcaacctactattataaaggaatagttggttctgatggtttgactgctttttatcaaaatggagttagtggaagcgctgtgttaaaccaatctaagagttgcttatatggtgttgtgagtcaacaagacattaaaaagatcaatgtctatcagatatatattacaaagattactacaaatgaaattatacgcggattcataggttataaaaataattaa

SEQ ID NO: 26559 - DNA, 306 bp, Escherichia coli
atgaatgtacatctgaaatatgacacgatagatcactatcactttgattggctaacgcctgctggcgaccatcctaattcagcggttatgctcgttggttgccgtgatgggcgctggattattgttcaagagttcggaaatgattatagctgcttcgagggcgttctggagaatgttgatgatcttaatacggagcctaaattctgttccgacttaaaaagcgtagcggttgctgcttttggcatgatgaagcagatatatccacagtacgacgatagcacgctagaacaattcctcgctggataa

SEQ ID NO: 26560 - DNA, 276 bp, Escherichia coli
atgaaagtgaaagaattaatcgcaatgctgacgacacaagatccagaagcagttgttctgatctccggctatgaaactacaggaggcactgaagtcgcagaagctgatttgctcgtagaaatgcagtcagtatgcctagagaaggctgataatcttacaggaaatcgtaaagtcgtttcttccgatggtgatgtttctgtttggttaggctggaaagacgattaccgaacaaaaatgttcttagaagatgcccaaattcttgacaaagatgagtga

SEQ ID NO: 26561 - DNA, 609 bp, Escherichia coli
ttgactgagctaactactaagcgccctgacactgaactggcacatcttgcctggtgcatcatcgtagcggtaaagcttgcacggaaagagggaaaatcaatcacgcctcttcaaacacacattttcataatgcagtggctttcaaacgcccagaaacgtaagctatttgcaaaatcactggcacaagatattatctggttacaggagcaaggaaaactgaaggggcccgctgcacggctttacagtaaagttgaatatatctggttagcaagctctggcgagttagccagccagagcacactgtttcgatttacatgcatgatcgatactctgcgctcaatgggttggaaggattaccttctatcggatgctgattgggagaataaatggattgcaggaacagaagtatcggcaatatatacaaaaaaatcccaacttcgcagttcatttacagagtcaggccaattgatcgtaccacttgaagtccggattaccggtaatccggatggcatcttcccactactaaaacaatgcaacataaaattagaaaagcagccttttgaattagtatatacagtgttattcatacaaccggacgctaagatgtaa

SEQ ID NO: 26562 - DNA, 258 bp, Escherichia coli
atgatagtttctgaagcaattttttattcatctattattgcctgggttctttattggtggtttattggaaatattactagaaaggtggggatgcttgtcgttccgctcacgcttgccttcgggtgttacatttatgcaattcatttggatgattccgaacagcaaacccatttaggctgggagcaagtcggttttattacctttataattgtgataatgtgggcagggaagtttgtgatgaaaagactatctgattga

SEQ ID NO: 26563 - DNA, 312 bp, Escherichia coli
atgaatgaaaactcagtaattttgataagtttattttggtttttttttggatcgagtgttgtagctggttttatggatgtatcattatattgctggatttttgcagccataagcgcattgtttcttctttcggtgatacagacaccaaaggagttaacggtatctattcttcttgcggtacttatggcaagctccacaggtgtttttattctggcttataaagtcaaaacgaatgtcgtttcaccaatctatctcttaaaaaagcctacaacatacatggctgaaatagataatcgaaggattcatggttaa

SEQ ID NO: 26564 - DNA, 897 bp, Escherichia coli
atgatgaaagagcctcatccgttacttcagttggtactaaacgattccggtcgtctaaccatgcctgtttattatagagatcaacagtattgcccgacttgccttacaaaggtgttgaagagtgaggatggaagtttggcgcacctcggggaaataaatcaaaatacatgtagaccttctatttcagtagttgtgacaaaagcaattattgaaatgttatgtgacggggaaaaaatatatgtaaatccaatacgataccgaggccgagcgctggcaccctcagtaattttttctcccgacactcacactttcaaaccgtttataaatacagactatcagcctgtgggagcaaactggaaaagcgaaaagggatataaacttggtctgttttatctcaaagatcgagccaactctatcaataaagaggaatttgatttcattgcagttatagaccctgaggcaatgctgaaagaatttaattcggcctggtctgaggttgatgaagaaaatccattggaaacgctgaagcagatcttacgatgtaaaaacaactcttctgtatgggtaaaatggcctggcaaaattgagcatgcgcaaaaaggaaattataacgaaaattactggttcgattatcaatctgataatctggaagtgaactgtacggtctctgttgtaggtatcgaaggtaacagttccggtgagacaatttatagattgcaaactttgctaaagcgtaagctcaatgaatatcaactggttcggtctttagggactattatgcttcttgataataccggaaatatgattccatcaaaccacccatattttgaagtcatctcaaaagcatgtataaatggagtgcgtgactttgttcgtcaaaacccgtgggtagtctga

SEQ ID NO: 26565 - DNA, 516 bp, Escherichia coli
atgttttttttaacaaagttacttttgcccatcatgattgttgtattcccaatggcgtcctgggggaactcaacatcttttgaggcaaaggtggttaagattgttgacggtgacaccataactgcgttggatgctcaaaacacaaccatcaaaatacggatgtatggtatagacgctcctgaatctaaacaggcttttggccaaaaagcaaaacaggccttaaccacagctatagcaactaaaatcattaccgtgatagaccatggtacggatatctatggccgtatgttaggtaccatctggttagatggatatgatatcaatgcctctatggttgacagtggatatgcgtgggtttatcggttcgaagataacgccattgtacctggctatatcaaatatgaatccgcagcacaaaaggaggcaaaagggttatgggcagacaccaaccctgtcccaccatggcagtggagacaggcaaacgaaaagcccagaaaggtgaaagagaagaaataa

SEQ ID NO: 26566 - DNA, 1428 bp, Escherichia coli
atgaaacgttacactcatgatcatgagacagacctgaatgatgtagataaaacaccatctctgatccacaaaactttgttaacagcttcgaccatttatgacctgaaatatctggctcaggttttaaatgatgcaaatggcagtaattggtcccgtgcctcgcttaaacgtcaggttacatgcatacctgagcattgtgagctgagtatcgcagatggacgctatctacagactttaataccttcacgacctgctgattatgaggacaggcactttagctttatcgatctgtttgcagggataggtggactgcgaagcggattcgatgccatcggtggtaaatgtcttttcacgagcgaatggaatacttattccagccgtacttaccgggcgaactggtattgcgatgagaacgagcaccgcttcaattcagacatacgtgacatcactcttagcaaccggcccgaggttactgatgacgaggcatataaatttatcgatacctctattccggatcatgatgtacttcttgcgggatttccatgccagccattcagcatcgccggtgtcagtaaaaaaaactctttgggacgcaaacacggtttcgagtgcgacactcagggtacgctcttttttgatgtggccaggatcatacgggcaaagcaacctgcaatttttgttctggaaaacgtaaaaaatctgaagagtcacgataagggtaataccttcaacatcatcatgaaaacgctcgatgagcttggctacgacgtcgcaaacagcgaaagcacgggcgcggatgatcctaaagtcatcgatggccgtcatttccgaccccagcaccgtgaacgtatcgtccttattggttttcgccgcgacctacgtctgaaagacggtttttctctgagagacattaaagacttttatccggagaagcgcccttctctctcagatttactggatccgagcgtggatagtaaatacatcctctcccctaaactctgggagtacttatacaactatgcaaagaaacatgcggcaaaaggcaatggttttggttttggactagtagatccttccaatgttaatagtgtcaccagaaccctctcaagccgctatatgaaagacggatctgaaattcttattgatcggggctggtcccatgagctgggagaaactgatttccataacacatacaacatggaccgtcggccacgcatgctaacgccacgtgaatgcagcaggcttatgggcttcgataaacccggggaaagtgttttccgtatccctgtgtccaatacacaggcttacagacagtttgggaactccgtggtcgttgatgtctttgcggccgtcgccaaactgctgaagtcacgaattgaatttgcagcctccctgcgcttgcggcagttatacgacgaagtcagctga

SEQ ID NO: 26567 - DNA, 168 bp, Escherichia coli
atgacgtatttcgaatcagctgaaggtgagacggtatctaaagaacgagcattacaagaactgtccaggcattgcgttcccgaaacagatttcgaagaattctttagcgacatgggcgtaaaggaacagtatgacgctcaggaagtgttgctatggttgggatattaa

SEQ ID NO: 26568 - DNA, 1320 bp, Escherichia coli
atgagccaaaaattcgcagtgatgattgcttacgacgacgatccaaacgtcaaaagatattcacctgactttcaaacgcaggatgaatttgctaaagggtggcagtcggctcttaaaaaggcacatcacacctcaggtcaaaaatcagtcattacctgcggatgtcgtggaaaaggagaaaagcgactttatgttcgtgctttaccgaacggtgatgcctttattctcgtcaaagccgctaacacgggcattgagcatgatccttcctgcgtattcttttcccttgatgcccggcataccggcctgaaaggatatgcgagtggtgtggtccgtattacaaccgaaggggatatggctgtaaggcttggtatcggtatgacagagaaagatcctcctgaaaaatcagaagtgcctcccctgccccatgttcagcgaccagaaggtggtcaggcctcaatgaccctcctgggcttgcttagtcttttgtggacagagtctggtctgaatgtctggtacccgaaaatggcagggaaacgtaacgattcactggtacggtatcgtctgcatgaaaccgctaaacaaattcgtaccggcagagcctgcataggtgaccatttattcattggtgtacctgacccgaaacaacctgtcgctcagtcgcagattcagcgtctttcatcacaggcgatgagtgataaacgtctcatgctcctgtcagttttacctcgctacgatgctgaaaagcatgagaagccacttaaatttttacccctgcggaattttggggggctaccgctgatttttttcaattctgaaggccattgggacagcgtaaagaaacgattttcatcggagtacgcagcatggaaatccggagcgaaaattgttgtctttgcgttgacgtcaccagctgcggtaaccggcagaggcccttctgtaagagctcatcaaattgtgctgatgcacgttagcgagaactggatacctctggactcctcctatgaggcggttgttgcagaaaagctggatgccgagcaccggcagtacgttaagcccatgcgttatgatgcgagcattagtgaggtgttccctgacttttacctgctcgacaccaaaagcgataagccgttcccgatggaagtatttggtatggccacccctgcttatctggcacgaaagcaactcaaaaaggatttttacaaccgtgaatatgggccttatggatggtggcactgggatgcgaccacagcatctgaaactatggtgctgcctcattttccagaatcacgcaaacctctttcaactgacacacctgcttaa

SEQ ID NO: 26569 - DNA, 204 bp, Escherichia coli
atgtcctacatgctttcgctaagcgaacagacaaaactgaacgctttcctgtcagggatccttgatgattacaagactggggttatcactcagatacaagctgttggtaaaattggtaacgtgttttctgcactggaaagtggagactccaaaaaggtagtgcatttgttgactgaaggacgaaaactcctgcggacgggctga

SEQ ID NO: 26570 - DNA, 1206 bp, Escherichia coli
atgatgatcgagaacgataaagaaaaaagcctgaacgatgctaccccgtcaggggttcaagatgacatcatcagcgaatccgcagaaaatacaaaggaactgggccgttcaaggtactcatctattgcgatgatcgattacttcaatgcaatcgaacgtctgtgcgaagagaaaaaaattaacccggaaaacatcgatctgagcttcaaagttcactggctcaggaacgctgttggcggctcgtttgcaaggtcacaggagatgttcggtaagtaccaggattatgtgaaggaggttcctgaagaggcccgttacctggacatacccgacccggtaaaggttgcactcggcgaccttatctcgttcattacctggcactaccgtatgagctataccgaaatacagagtgacagcgttaaaaaagctgaagcacgtagcatgcagctggagcaggaggtgacgcagctgttacagcggcttgagcaaaacgctaccgatatggatgagctgaaacttgagaatcaggcgctacagggacaattagagatcctgaacagtactgttcaggagttacaaacaaagctgactgctgccgaagcagatctcgaaacttgccatcgccacttagatagtgcacggcatgaattaagcctcgcacagcagtcaaatgactcactctcccagcaactggctgaacgtaaaacagagatcgctggtcaccttgaatatcaaaaaaagctgaacgaagagatcaacacgcagcgttctgataacgccggtctttccagacaatgcgaccagttaagtcagactgtgtcagatacaaaggcagagagggacaggtttgaacaggaattgattgctgcacagaacctttgttctgagctgaaaagtacactgtccgggaaagagggtgacctggtggcggtgaatgccgagcttactgaactccataaactaaacgagtcgctgagcgccgacctgaaaaaagtaactttggttagccatggctatgaagcggaaatggctgaacaaagcaatgaactaaaaacgctccaggccaaagtaatgaagctggaagctaccctggaggcggagaaaacaatctcagaatccctaaaaggcaccattgatacattgactggtgcaatggcagggggaggtactggaaagtcaaaacagccgcgtagcagaaaaacatcatga

SEQ ID NO: 26571 - DNA, 819 bp, Escherichia coli
atgactcaaaaccagggttctgagccagtaccggcgagccggacagggcagctcatcagcgcccgggatatggccatgcagaaattcgaagaagggatgcggttaatctcggaagcgtcggagctatgcggtctctctctcttcgccagcagaattatgcagccaaacgcatttggtcttccggcctcactggatcgcaccatcgaggaagggcgtaaggaaattgaccgtaaaacgtggataaggctctttgaagaaacgggtatggaccggtactggaaccataaacaaaaagaagcctttaacgaatccctacgttcagatccgcccgtcgcttccctggagattgttaagggaacattacagcatgcactggctaacagacgggacacgcttgcagaaggtttcgttgatgttctcaacaagcttgaccgaagtttcaaaagcaatgcccggcaatatacaatgccaaaaaagcttgttcttcgggggatttttcctggtgtgaacatgctgaggtacaacggtttctcgcaggacaatcacttttgtttacgcgactttgagaatattgtatgcatctgttctgatactccaacacctgcaaccggcggtgggctgagtatggtcgacaggctgacggccttgagaaatacagaattcacaggcgaggtctgcgatgagaatggctggcggtgtcgcctgtttgagaatggaaacgttcatatttgcatcgacagtatctcgcttctgaatgctctgaacgatcttatcagcatatattttgcaaaccaacttccggccgcagggaaaaaatga

SEQ ID NO: 26572 - DNA, 381 bp, Escherichia coli
atgacaaatacacttgacccatcacgcgagcaaatcgaaatgtggcgcagagctaccggttccgaaggtggactcaacgaataccgcaactggattctggaaaacagaatgagatttacagcatacggtattcataccgttatcgtcgaaggtgaggcgaagcatataacagcgcttgatgatgttaccctctgtaacgagtgggcgaagcttaaaagagaaaacaataggctttacgcagcaaatgaaaaaatttgctctggctggcgtggttttgtgttgcgtttgttaggaataacactgccatgcagaaaaccggtcatcttactgggggcagatgggaagaatcaaaatgatgccgtgaaaggggctgatttgtaa

SEQ ID NO: 26573 - DNA, 666 bp, Escherichia coli
atgatctctgaacgctcagtacacttaatcacttcctgtacaaagggcaagaatcatcagggccacgtctggccgacattggacatagatccaaaacaaaccccggacgacgcagcatatgcctggagtaacattgtagacgacgccagaagtaatcaggcggtaccggcgttgtccttgtattcaggtaatcactggtctacggcaaaggaaattttaaactcaaccagaaatctggagttgtggataatctctgccgggatgggttttttaaatagtcgagatcgggtgccctcttacgaggcgacatttcatcaagtaccattcaggcatgatctctggtggaaagccctcacaaaatcactaggaaagcataaccgttgcgcaactataagccagttaatgcagtccagtccgaatgatgaatatttgattgcggcttcgcctgtttatattgctgctgtccagaatgacatcctgaagggcatcgagagtttgactcatcctcttacgcaactaacgatcgtaacatcaggggcatatgctggcccacttgaagaatacttaattaagagttcttcaagaatgatgaaagatctggagtgcaatatggtgtgcctgaatataaaactggctcaatacatacttaaaagtggtagtcgttag

SEQ ID NO: 26574 - DNA, 456 bp, Escherichia coli
atgttcaaaaacagattctctttcttgtgtcttactgtcgcatcgtcacttgcgcttactgcctgcgatgtagttgatgcagcttatgacgagactttcaatgataatgcacccgaaattgtaatagctggaggattcaaaattgatatccagggtaatgctgttccggttgagggacttgataactgctctttgaacacacctcagggaagctttgttacggataaatcaaattgtatcgttctggatacaacgcgtagcaaagtgccggttaaagttctttttccctccggctcagttaacgaagaatggaagatcgagcaccaggttgaaaaaaccaaaaccgggaaaaatttcattcaaattcgtatgataagacctgatggaaactttgtagtgcctgcatcctcagagcgagggatgtttagtggcaggcattacagtaaagccagctaa

SEQ ID NO: 26575 - DNA, 294 bp, Escherichia coli
atgaatgtaattgcagctggggttttttgctttattttttatccttcagctttcgcttatgctttttataaaaaaagatggttagagtgggtttttcttactttgattatgatttttgcttctgccatatcgattcaacaatacaatgatgcgaattttgtaagtgagttaaatcaccctgtgtttatctccgccatatatggactgtcactggcatggtttccttttccgattgcttatgttgttctgcgcttcctttgtgatgatacacagtttgacaaccctaaatcgtga

SEQ ID NO: 26576 - DNA, 405 bp, Escherichia coli
atgtctgaagcactcaaatcgttaaacaatattcgtactcttcgcgcccagggccgcgaactgtctttagaagtacttgaggaaatcctcgaaaagctgaccgtaattgttgaagagcgtcgtcaggaagagtcttctaaggctgccgaactgcaagctcgtcaggaaaagcttgatgctctgcgtaagttaatggaagaagacggcattaacccggaggagctgctgggctcattccaggctaaatcctcggctcctaagaaagcccgcgaaccacgcccggccaaatactcatttactgacgaaaatggcgaaacaaaaacgtggactggtcaggggcgcaccccaaaagctctggcagaacaacttgcagccggtaaaagtcttgatgatttcctgatctaa

SEQ ID NO: 26577 - DNA, 204 bp, Escherichia coli
atgcaaacccaaaaagaaattacagttggccagatctgggaagaagtggatccaagactgatccggaaagtgcgagttgttgaggtggcctcgttagaagggcccaaaggcatcctaatcgaaaacgtggagtctggtcgtaagaactgggcgtcgtcatcccgctttaatggaaagcgtggagggtaccgtcttatttcctga

SEQ ID NO: 26578 - DNA, 858 bp, Escherichia coli
atgaaaatgacgaagtcaaacccggtaagccggatgaaaaaaccgtttattagtgagcttgcagaactggatttatcgggtgaaattctttcaattcgaactgacggcatgcaggggacactcatacccgatcttaccgcaggggtgagtgaagcaacccgtgtgaaaaccggcaactgggtaatctctgacaaaagaaccttcgaccatgtcgttctgtgtgttgaaagacaagatgagaactatgatgtgttcgtaggtaaattcatccagttacatgtagccgctaataagagccttaagatcgtcgaaatgggcgatgtgaaactggtggccaagactagttcgattcctactatttttaatggtggggtaaggagatacaaaggggttacgtatgtgtcactttcccaaacagctcaaaccactatcgacttcccgaagcgtatctacaaagagggccaggaatgtacttctgtcaccagtcctgaccaaggtcctttcgcccgggatgttaggttgaattgctacgggcgatgtgttgtcaccggcgtaaggtccccctggcgtactgaggccgcgcacttaacgccccgtcatgaagaaggcattcccgacgtaacgaacggaattttacttcgccgtgatatccatacactgttcgacaatgaccattgcgccataaaccctgacactatgaaaatttacttcagccgggaggcccgggagttggatgatgatctcctgaaatggcatgggaatgagatagagacgacacgcatgcaagttccggttaacatcgaaaaccttcggatacgatggcaaaaatttaaggctaaggatcgtcagcgtaaataa

SEQ ID NO: 26579 - DNA, 309 bp, Escherichia coli
atgcgcaaatttaagtacataatctgtcaccagtgcgaaggccacgggaccatggaaaacccggcctttgaaaatggattcacccaatcagaaatggctgagtgggagccagaaatgcgtgaaaagtattttgccggagcatttgatgttcgctgtgacgtttgtgccggtgacggtaagctcagcgtaccaaacgtagcggcaatgtctttttcagaacgccgggttctggccgcacagcggcgtgatgagcgtcttcaggcagctgatgaacggctgtcccgccaggaacgagcaatggggtactga

SEQ ID NO: 26580 - DNA, 426 bp, Escherichia coli
atgaataaaacagcgttagtgatgattatcgggatcctcggatgcagtaaagcattcgcagccactgaattacagctccagcaaaaacgcgttatgcagttctgtgccaacgccagtcttccattgttagttgcgggtacaacgtacgcgaatacgtctgacaatggacgaccagaaaaagaaagagtggcaatcctgaaaaattcagttgcaagctcgacagcttataaaatggcatctcccggagttcagatggccatgatgagcgtggtggaagatattgccgatccgaaagaattagctctacatcaaaaagaaattagacgtcttggggctagttatctatccgacagcggtgtttcatgggcttcaaaaactgtttcaccatttacagcctggtgtaactttaaccgtttagaaagttaa

SEQ ID NO: 26581 - DNA, 816 bp, Escherichia coli
atgagagagccaagaccccgccataccttgcaagtcattcgagtgccttctctggaggttcaggatctggggctgaccagctttgacagctggcttgacgagaacggttatgacaaaacgaatgccagaaataaccgtaccatctgggcgagagaaggcggatggcatctgaaacgttgcagaaatctgaaaactggcacggacgatttctggtttatcgctttcgatggtaaaggcggaaacctttacccgctaaaaacccaacgagactaccgggctgcatatcgtaagctcgaagccgaaggatatacgcctgcggttatcgagcaaatgaccacaggcgcagcatataacctggcctatccacgttccagccttaaacaagctgagatgaccaccagcgagccgatgcgtaaacctgacgtagatatcatgggtgagcactgcgagcgtgtagtgacgcaacgtagtggtgtggcacagggtaaattcaaagttctgctcatcgagaatttcgcgggccgttgtgcgataaccggttgggttaatggcggtgtcctggatgcggcacacattgaacatggaacccggtacaatccgtctaacggcatcctgatgacaccaacaatgcatgcgctgtttgatgccgatcttatgggcatagatccggccaccctgaccgttcattttaagccaggcattgagctgggcgagctgtttgaaggccgtaaaatcacaccgctggtgtacgatctggacttagagcggctggccgttcgctgggcaggataccagggtctggctcatgaacaatga

SEQ ID NO: 26582 - DNA, 411 bp, Escherichia coli
atggcaattttagcaatcattgcagttatcgccctgggtggatacgtctacggatttattaaagtccgtgaactgggtgcattgcgtaaagaaatgaaactgtacgtggatcgcatggaagcggcggagctggacttacacgcaatcagaagcgtagcggagcaccggttacacggtgcagataaacagtttgccgatctttacagccgtattgacggtacaactgtgacgctgacacccgaagatcagctgttactgtcaacgatgccatttaatatccaggatgtagaagacatcgtaaacgagcgcggtccaaagacaattagcggccgtccgttctgggaagttgagccaggccaacatgactatgaatatggcccgcaatatccgtatttcccagaccagcgctag

SEQ ID NO: 26583 - DNA, 207 bp, Escherichia coli
atgactgaagaacaaaaaagaatagagcgggctattgagctggcttgtcgttacggcggaaccgatgaaatgcatcatctgcaatgggtcgtggatcagatggtaagagaacttgctggagaacgttatgcacacattgtagctgatgccaccagcggagaagatgggcctgatacttacaaatggagtgttgggatcgcgccttag

SEQ ID NO: 26584 - DNA, 1326 bp, Escherichia coli
atgagccggaaacagcagcgtctggcaatctggatgaacggaatcaaagtcggatactgggaaaaaagtaaaggggtagacagcttacaatatcttcctgactggagtgcagacgaacagggaaggccgctgtcattgtcccttccttttactcccgggaaccaggtctggcgtggaaatgtggtacgtgactattttgataatttactcccggacagcgaaggcatacgcagacgtctggcaatgcgttacaaggccgatagcctggagccttttgatctgctgtcggagctgggaaaagactgcgtgggcgcgatacagctgcttcatgacggagacgaacccacagatttatattccgtgaagtatcacccccttactgaatcagaaattgcggcaactttgcgtaataccacggagacattgctaccgggcaggccagaagataacgacgacttacgtttatctattgccggtgctcaggagaaaacagccctactgtggcatgaagatcggtggtgcatgccggagggtaatacaccaacgacgcatatattcaagctaccgctcggacttgtggggaacatgaaagccgacatgagctcgtcggttgaaaatgaatggctctgctcggtacttctcgaacagtacgggctccccgtggcaagaacgcagattgctcactttgaagatcagaaagcgctggtggtagaacgttttgaccgaaaatggtcaggagacggacaatggatcattcgtttaccccaggaggatatgtgtcaggccctgggcgtttcgccattacgaaaatatcaggcggacggcgggccaggtatatcggaaattatggaagttctgagtaattcagaccgcgctgagcatgacaaagcgcagttttttatgacgcagataattttctggatgatggccgcaacagatggccacgctaaaaatttcagtatttctattgggccacagggacgatatcacctaacaccactctatgatgtgttgtcggcatggccggtgatcggtcatgggaacaatcagatatcctggcagaagtgcaaactggcgatggccgtacgtggcagtagcaactattaccagatctatcgaatacaacgacgccactggatcagacatggtgagataaccggcctgagtaaacagcagacagaggcgatgatagaggaaatcatcgccagaaccccaggtgtcattgaacgtgttagcgggcttcttccggaccagttcccccagcagcttgcggaaagtatttttgatggaatgaggcagcaatgcaggcgcctggctgagaaataa

SEQ ID NO: 26585 - DNA, 297 bp, Escherichia coli
atgatcaataatgattacccgttaaacacgctcaaccagttgcgtcccttgctcattggttttcgcaaggcgaatggcctgacgcaaaaagacctgtccgaaaggttaggggtcactcaacagacatactcacgtctggaagccaaccctgccagtgcgagcattgaacggctattcaaggtgttttccatccttggcgtaaaaatcagcttctcctcgacaaccacctcttcagagaggaagcagacggaagaaatgcttaaatcaaactcacctgcacgacaggagaaatggtaa

SEQ ID NO: 26586 - DNA, 858 bp, Escherichia coli
atgaactccaaaatggttaacaaaaaaatgatgatgggaaaattccctgacctttcaaggaaaaaaattaagagttggctaaaaaaagaaaatcttttttattgcggacttcttcttatcgccacgactgttatagcgctgatgttttcacttttatctacacctcacctcaaaagtttcgtcgttgctgttccgccgtctctggagccagtctatggttctcctcgtgaactcattacctatcaatatcctattgtaatagggatcgcgaaattgatagcgagcattttcgtagccttgtcgataggaaaacttattctcggacattttggtttcagagaacttggtgttttaattgctggtgtaatgatagcttttgccccgacaatttatgaaattaaaaaaacagatccagatttcgcacatggtaagctttttagctatagacaactgctggaattaaccaacgatgcagaagcaaataaagtttctgattttattgaaaatattactggcaaaaatattgttagcacaccggttgctgattatgtttcagcacaaatcaaaatcaaaaatggctatgcagatgtccagcaactgaaacgcgttgttaaaaactatcagtatgggccgctcgtcgatattgtacctgaagatgtaaagtactttattgaaatgtcagcttttcaaaaacctgtaacatcggatgcgattcattattcgcaaaagaaaagtaatactgctggtattttcaaccgcattgcggtcatatcattcctgtgtgggctggcttttatcatatcgggttgcttcgttttttgctggagcaagatgaagatacgcagaaataaaatttga

SEQ ID NO: 26587 - DNA, 1389 bp, Escherichia coli
atgagtcagtctccttatgatgatgagctcagggccatccgttatattcagctccgtggtcaggatatcacgaacgctcacgagacaattaacagtgatatagagagccttaaggcacagttgaccgggctaatcagcggcactgaacttgatgaagcggagcatctggcgcttaaagaacatcatctgcgagaaatgaccccctcagatactgccatgcattctactggtctcaagaccatatatagcgaggctaaccagcgtgtatgcggtgatattggactggccacaatactctccacggatgacctggctgtcgtagatgcccggatccagaatcatattaaagaatttaatgatcgctacgcactcgacgcctgggattatgctattgcctgcggatgcgggctcatagcatccatgctggatttactttgcgtcagagccccgccaaaacctacggtgagctttacgacagaagtggatggtattttcaataaacaggtgcagaaagccttcaatgccattttgccggaggacctgagtacaaaactctcagatttgttccctataggggcaccagacagttcgatcagcagcgatttagtgggtgcagccggtggcgttttgtctcccacaaatcaccgcttaagagctttatcacacgaccccatactgggcattattttcggcataaaggatatgctgaacgggacctgtacggtggttcagaatggacagatcgtggtttatccttccagtaaaggcgttaccgacgaaaccaatattttcaggctcatcgccagaatgtttggacacctggcatcggatgttaatgccccctcagcaaaaggaaaccgtggcatgggtttaccggctccttttatggggttacttcgtatgcttgaggggatccctgtggggagttctaacttcggcaaacaaatagagtacatgtatgtcaacgggtatgactttcgtcagtttatcgtgacaagtattccgatgaccataatggaagttttgatgcgggttttctatgtggcgaaacaggtatcgctgggaaaaggagcttttggggagaccttactggataccatgcctttgcggctaaatccgcgcttccggatgatgcttgccctgggttatggaacttccagtgctgttaacgcaggtaaaatgtatatcaccggcaatattctcaatgcgaattacgcctcctggatggggttagcctggaatggttttcactcactcaagtggtccctttatcagcgacacttaaagctttgggccggtattgataaggcggaactggaacggcttcagaacaatataaacagcattgaggcattgaccatcagagcaggaagcttgccagtaaagtaa

SEQ ID NO: 26588 - DNA, 498 bp, Escherichia coli
atggacgctaccgaaactgaagagctcgaaaaaattcgcaagaaggcaatggatgaagttacaagtgctcttcaggcgcttgaaaataagttcccgggtattactgagggcgcagcagcattggcggggtcaggcgtaggcgctgcggcttccttcggtgctctctatacgcttggtacaacgggagtgtcagcagcaggcataacctccgggctcgctacagcagggtctatcgtcggtggtggtatggttgcaggcattgcggtattggccgcacctgtagctgtgttagggattggcgggtacgcgatagtgaaacacaaaaaaaatacgaaactgacagccgccctcagtcaggccattcaaaagctctatgaagtacaggaaaggttaatgtcgaatgcggagttttttaaggcagaaattgctgggatcaaggcaacaatcgacatgcttactaagaaagctccaaaaggtagcctggtcgcggtgaggtaa

SEQ ID NO: 26589 - DNA, 648 bp, Escherichia coli
atgcttgaaaactacgtctgcaaaatctatgtgagtgataatccaaaccctagttcatttcgcgaagcaacggcatttggcttcgatgacggtacgagtgaacaccttctcaccgcagcccatgttgttacggatgttcttggcaagaaataccccagcagcaacaaccaaaagctttacgtgatattccacaatcatctcggaccagtaaacaccatccccgtacctgtggaattcattcttaaggactgtaatgaccaaagcaactttcaaggcaatatgccgtttgtagatagtgcgaaaatgattttgccatctggaatgaaacagcctgtatcccactattttaaacgccgcccccccgtcggcaacatgcaaacatttggggtcggatatccattgggccagactgcactttcaacggtccttgggaaaattcaaagtgtcacttcctgctactgcgctaaacactctaaccagcattgcacatctcgttttgaaatttcgcattacaacaagcaaggatgctcaggggggccctatatcatatctgatgaaggtgagtattatgttataggtagtctcattggtgaaattcatccaggtccacctccaaccctgtcagttcagtcatcgaccgatttttag

SEQ ID NO: 26590 - DNA, 411 bp, Escherichia coli
atgaaacagagtttgtatcgacgtttaggttttggttatatgggtaactctaggcaaccggaatatgacatggtcaaagtacaagggctctttgttggatacagaaaatttgctgttgatcgcgactggcttcgtcagcaggaagaacaacgttatcgggatcgtcagcgacaatttgatgaatggtccagaaaatgggtcactgtaaccaggctcaaagagactcgtttatggactgacggagccatcaggcgatggctgggtgatcctcagcagcagggtaaatataaagttttccccgttgaagcggttttagctgcggagaagttgaatgagtttcagctctggcttaaaccccggctggaaaagaaacgtgcccagcatcaccactttttaattccatttctgtaa

SEQ ID NO: 26591 - DNA, 192 bp, Escherichia coli
gtggaaggcatcgagacactgagcttgcggctggatgagaacgaagccatggcccttgctcaatttgttaaacggctgagttggagcgatcttcgtggctgtgctgtgagcgacgaagaagcctgggtaatgaaaagcgcagttgataaattacaacaggcgttaggggaagaaggttttgcgcctcgatga

SEQ ID NO: 26592 - DNA, 282 bp, Escherichia coli
atgagccaacactggtatgacgtaaaaagcaataagggaattgttcaggtaatgttaggctgggatccacctttgcagtggtttcatatgtgtattgactatgacattaatgcagcagaagacccactctatactaatttggctgagcctgatccctactgcgttactccagaatatttgcaatgtgtgcttgaacgcttcgaaataacggacattgtaataaagccgaatacctcaggactttacgaagatttattaatggatcagcttttagaccgatag

SEQ ID NO: 26593 - DNA, 540 bp, Escherichia coli
atgggtaaccaatggcaacaaaaatatcttcttgagtacaatgagttggtatcaaatttcccttcacctgaaagagttgtcagcgattacattaagaattgttttaaaactgacttgccgtggtttagtcggattgatcctgataatgcttatttcatctgcttttctcaaaaccggagtaatagcagatcttatactggatgggatcatcttgggaaatataaaacagaagtactgacactcactcaagccgctcttattaatattggttatcgttttgatgtttttgatgatgcaaattcaagcacaggaatttataaaacaaagagtgcagatagtgcgactggactgggaatagaaatattggataacaatgatgtggcgattgccattaatggtgaatcaggttttcgtgatttagtgttaaatgaaaacggtgatgctaatttgacgtttaaacttcgctataaatcaactcaggaaaatgtacatgccgggcaagcaaatgctctgttgtattttgatatcgattatcagtga

SEQ ID NO: 26594 - DNA, 762 bp, Escherichia coli
atgaacaataccacgcccattaagatattaacggcagcggtactgctaacctttggttttgcgcttaccgcaaatgctgcgctcatcaataaaggagtcaccgaaatgaatcatgaatatacggtttcagatacgctgtcagctcgccagcaggccattccgttgattgccgcatcaatggccagtagtcagatggataagctgaatgcagcgcttaatcaaggacttgatgcaggacttacgataaacgaagctaaggaaattctcatccagctctatgcctatacgggatttccccgcagcctgaatgcactgaatgagctgatgaaagtcgttgaaacacgtaaacaacgtggcatcgaagacattgaaggtaaagcgccgatcgccccgattcccgtcggggatgagcttcggcgtgtcggtaccgcaaaccagacgaaaatctcaggcgcgcctgtgcaggggccactgtttgattttgcgccaacaataaatcaattcctgcaaacacatctgttcggcgatattttcgctcgcgataacctcgactggcaaagccgtgaactggcaacagttggagcattagccgctacgccaggcgttgaagcccagttactgtcacatacgcgagcaagtctgcgagtcggtctgacggcagcgcagttacgacagttagcacaggttctgcgtgaacatggcgacaatgatgcagctacaagagctgatgaggcactgcaaaaagcgcttgagaacaaatag

SEQ ID NO: 26595 - DNA, 1581 bp, Escherichia coli
atgcgcaaagagcttggcattatcgcggatcttgttgagtcctataatgatgaactctgcttgctgaaacacatggctgtccagttcaaaacccacaatcaccagaaactttattcttatctctcaggctacaaccacagcatctctgaagcggatgccttgttcgcagaaaacgctctaagatctgaatactggaaacgagttatggcacttacagatgttttgcctatcatgtcggatgccaaacgtagcgaatgggataagcagtttacggccgaccgctatattatgccgcctcaggtgatccctgatttcacagctgacgctgtagtgggcaccgtcgttgctttgcttaatgaccgcaatcaatttattaaggaaagggtttacgacgtcttccagtctctgagccgcagtcacaagacaaacaaagcttttgggttctccacccgcatgatcactaccggagtttgcgagccgtctaaataccgctggcagaaattaagggtggattttaaagagtctggtatttcaccactgagcgagctccgcgttatatgcgcattcttccgtggcgaacaggtgaaggcgatccataacaccaaatcattggttgaggcgttggtcgaacatgaggggttcagaaaatggatctgcatcgatggcaatagtattcgtttcagggtttacaaaaatggatcaatgcatattgacgtccaccctgacatcgccgagcggcttaacaatattttatcagctatcgtaccgctggcattacctgccgaccgcatggctcatagcaagaaatctttggaggcattccctgtacttaaacagtgcatcgactttgatacacggatgcagctttctgaactgatgtttaagaatgacggggacaataaatggagttgctggacatctttagggtctctcaccgaacgcaaatcttcgagtgttgccgctgacacccttcggttcttaggggcaacagtaacaaaatacgatgtgacatttccctatgatccgtgtgaggttattcgttacatcggccagataggggagatgcccgatattgtatcgcatcagttttacccttcatcttgccgaatcagcgaatatgtatattccctgctcggtgcaggggaaggggataccctcctggagccaaatattggccatgcggatttgcttaaatcattccctgccggtgtgatcgttactggcatcgagcttgatactttgaattgccttatctcccgggctaagggatacgatacgacagaagccgacttcctcacatggtctaagtctaatcaacagaagaagtttaattatgtcgtgatgaacccaccttttgccgataaccgggccaggctgcatctccaggcagctgcatctcatctcgcagccgggggatctctagcagccgttcttccattatctcttcaggggctcgataaccttctgggggaagaattccggacggaatggatggacgtttttgagaacgagtttgaaaacacgaccgtttcggttcgcatcctgtacgccgaacgtattcaacaagaggaagtcctatga

SEQ ID NO: 26596 - DNA, 174 bp, Escherichia coli
atgagcaaccaacccaccagcctgccagaagaagatattgagtttgttatggatacctttcagaggagcatgggtaaatccaagcctgtcagggatactcagatagagggcgagaaaccgcaaagtgaagagtccgcaaactcaactgaaatccccggttatgaggaattttaa

SEQ ID NO: 26597 - DNA, 444 bp, Escherichia coli
gtgattaaaagacgtaacattcgacgatcagtttatggattgcttgttgttcttatcgccggaaatgtgtggttaggccttagagctgataaaattcataaagtgcgttatcaggatttctggtcaccggcaactgtgattaaagtaacggtaatgccgtcgacgaatgaaacccagctcattggcaaaatccctaaatcggtaaaagtttcaaacaattatgtagagtacacgttaccgggcacactctcggccaagaccatttaccgaagtgttttagaagatgagatgcttactttgcttaatgctggaggtcaacttgaagttaaatacactctggacaagcagacaaatcgaactaaggtatgcactaagtgcttacgggtgattaaagatattaaccatcaatattcagccactgaggtaaagcatgggcagtcctaa

SEQ ID NO: 26598 - DNA, 279 bp, Escherichia coli
atgggcagtcctaaatttgaaattgctgagcaaattaaaatgtggatcgttgtttatctagtttgctttttagcactctactgtgtgttaagcgctctacatgcgctttatgatccgctaattttacccgccctgacgtggcctataagctggttcctggtgcctgaaatgactagttttggcagtgcattattggcatttgtcctaacgcctggcctttgctctataattgctgttttattcggtaagtctatctttaaaaaagctaaaacaaaatga

SEQ ID NO: 26599 - DNA, 627 bp, Escherichia coli
atgttatacatgctcttatgctgttttctgatgctcattagtacattcataatgttcagagcaatgtctgcaataagcaaaggatccgctacagataatcggtttgaaatattgctgatagtcctggcaacacttggtattgcatcaccattcattgttgcaatgattactattaatgaaagcatgacatctaaagcattagcagatttttctttgggtgctcagtggtccggaatggtttcagcggtagtgctaatggggttatatggtcgacatgtttggaaaggaaagacgttcttatttacaggcgctttcctggcctcttccttaatggcctttatttttactgacagccttgttttcgtatctcagaatgacaccggcgttctggccactttcgtactcgataaaaacgctggagatattgattgtagtcgcccggctatgattgtccattacagtaaaggtgttccaacggactggcgttgccctaccagtattatgttgatggcggattcatcatatccttttttaccctggcctgagtatagccatggaagcagtcagtctcttacagttgttattgatacacttatggaaaacgctgttaatctcagcaaaaaataa

SEQ ID NO: 26600 - DNA, 2457 bp, Escherichia coli
atgcgtaaaactctaattggctgcatggttgcaactgcccttgctactttatcttcggcacatgctcaggtatttagctactcatttactgataccaataaggctgttcggaatatcaagccagcaatacaaacatatcttaatcccgctggtgttttgactctgaacttgatatcgggtcttgatcggtacgagcgagtgacggtcacccgagacagcgataaaaaggttatgtattcctccgtctcgaccaaaacgagcgttgcagatcgtatcgttgctgccgatggaacagaatactatggaaaggatatggttctaccggcgcttggagaagggacctttactgtagtcaatgaaactctggatattcgccagactgtagtgagcacatctacttatcatttcatcgttgatacaactcctccacgctataagagtatttatccgagccaaaacgcaggttacgacatggtactttctgggccactttgggagttgggccgaggcggtagtggccagttttctatatttgcagacggtattgaggatgctagtggaattgacaagatccgtcttgtcattaaacgaagtaatggctcagtggtctccgacaataacctgagttatgacacagccaataaacgtgcgttctatccatggattaaagatatgaacacccaggctggcatgccctcaagtgatcttgatgaagaattcaccttcaatttcatcgttacggaccaggcaggaaatacgcttaacattcctccccagcgttttttatatgacgatcaaatgggagaatttacgccatttgcagttcatgactcacgtgtaagcaccagtgttgtacccggtatttcttcgggatacgtcccgtttaaacgaggccttacagtgctggagaacccctacaagttggttatacgtatcccaagaactaactggaagccatatcgaaatggtggcatgagcattacaaataactatggcggagtacaggtcctttccgaagatgccacctatgtctacgtagaagttaagctgccacagggtgccttggatggaaactactatagacctgtgaatacatatcaatggtctggaggagatcttggtcagtatgccagctggctcaactgggatcctgcctcagtaaagagtccggcgtggggaagttcacctatcgaacgacaaaaggccgatggtacatggttcaacagcgtaaactggactaatttcaaggcatctgatatgcctataaaacttaccactatccgattcaatgtacaggccaggccatatgatcaaaaaatcaccggcggagcaacatgcagtattccggcaggttcaacatcctgtactgtctctttaccccaggacattataaatggcaccaccggctatcttcatagtggctatgaagtacggtcaaccaccgaagcaaccttctttgccccaatatgggagaatatagcctggcatacactggggccctcagtcactggattcgattacaatgaagccaccaacattctccaggtttacgtgaatcaacctggagatggctcatatttcgaccatgtttatgtaaatcgagtttggttgtcagataaaaaccgtaacaacgcagaaataagcgtaaccggcaaacaaactggtagaaatatggcgtctggtaactacacgtatgagttcaacatgaaagaggtaccagaaggcagttataacgtggtgattaatgcccaggatacattcaacaataccggtaatcgcccttatcaaacggttgtcgttgataatacagcaccatctgtaagtattagctacgaaggaaaaccaatcagcaaagacgtgacggtatatggtctggagaacgtccgtatacagctcaccgatgctctaactaaaccatccttaagccgtatgactcttcgcggtggccctgtttctgatgcggttgaattgtcttgggtgaatctgggaaacaacctgtatgcacctaattatccaaagatctttccgtctctcaatgaaggcgaaacatacactctcacagttcaggccaaagatgagatgaacaacgttaaagagagctcagttgaatttaactaccttccaaacaatctcgtccggctagagaatctgaaaaccttagcagtcaatgcctctcttaaaacgtctgacaatactcctctggctgttctgtatgccagccagctgcgtaaaaaggatggttcaatcgctacagggctccaggacgcagtgcttactgtccgtaaggacgctgcattcggcgtgactgtaaatggcgtttctgcgatgccaggagaaagcaaagagcttcaactggatttggggctcggagacagccgtagctttcctattttccctgctgtttccggccttactggcaggtctgagttcatgattaacattgaagaattaaaataa

SEQ ID NO: 26601 - DNA, 1089 bp, Escherichia coli
atgactaaagagaaagatactgagcagcaggacctggtcaccagggctttctctgttagagagaaagaatcaggtaaagacatcattttgcgtcccaatagcaaccgtacggtgcagtctatcgctttgatgcggctcgggctgttcgtcccatcacctaagagtgtggggcgtcaaaatcgggaatataaaacggttggctttgacgcaacgaaagagttacagacgctctctttaatggagagtgaggggtttaccaatatttcaattgtcggtgagcgtcttgatatgtcagtagatttcaagacgtggatgggcatcattcgaacctatgcaaatcatccgattaaccaggacaaaatcagcttaaaattcactgaattcctaaagctatgtacacctgaaaattatcgatcatctacagcttccagaaaacgtattgacgcctccttacgcaggttggcatccgtcaccttgtcgtttaccagtaataactcttccaaagtctacacaacgcacctggtacagtctgccctgttagacccggaatcagatcaggtagtccttcaagttgatcctaagattttcgagctctatcaatacgatcataaagttttgatgcaattgaaggcaattaaagagttggccaagaaggaaagcgcacaggctctctatacgttcatagagtcattaccgcctaatcctataccgatctcccttactcgactgaaaaaccgtctgaacctcaagacacgagcaaatagccagaacgctacagtgagaaaggctcttgaagagttggcatcaataggatacctccagtacaccgaaataaagaaagacggcaaagtatacttccagattcataagcgggatcccgatctgaatttgaacaatattcaggctcctttagaagaggttgaagatgaagaagatacttctgggtcttctgttttagaaggtgagttatgtccaccagctgacccgattgacggcgacgatgttctcaccgtccatgatttaactgctgaagaactgctctatattcgtagtcttcgaagccagaaaaagaacagcagcgccagctaa

SEQ ID NO: 26602 - DNA, 657 bp, Escherichia coli
atgcggcgagtcacggccattgtgaatctcgattggattggcgaatacggcttccggttgggccagatgtcaatggttatgcttcatccagctcattactgtagtcattgccgttcagctgagctgatgctcctctcattctatatggcgacaacggtagtgagcccagaaagtgactaccgttgtcatagccgtccagtagagcgggtcaacctcttaaatcacagggtgacaacggtattgagcccagaaagtcactaccgttgtcatggccgtctggttaagcggatcaacctctcaattcacagggtgacaatggtagtgagcccagaaagtcactaccgttgtcatagccgtcccgttgagcagatcaacctcttaacttacaggatgacaacggtagtgagcctattaagtcattaccgttgtcattgccatccagaagagcggatgatcctctcaattcatacggcgacaatggcagtgagcccagcaagtcacttccgttgtcatagccttccagaagagcagatgagcctcttaattaacagggtgacaacggtagtgagttcattaagtcattaccattgtcatggccgtacagctgagctgatcatcctctcaattcacacgccgacaatggtagtgagctattaa

SEQ ID NO: 26603 - DNA, 2421 bp, Escherichia coli
atgaaacatctcgcttttattactgctgtagccggactcggtatgtctgttcaggccccagctcagatatatgaatcggcctttaaagacacgaacggtattgagatccacgccccggcttctcgtcttatgcttaatccggcatcaccggtaactttgacacttatttcaggtcttgatcgtttcgttaatgtcaaagtcacgaaagacactggaactgtcattcttaatactacgactacacggacgggtgtatcagaccgactaacagctgctgacggtagtgagttctacggcaaaaaagtaactttgcctgctttgggtgaaggcaaatttgtcgttcagataaacgtcttagatctcaatcagaagcctgtagcgacctataactataactggctaattgatgtcacccctccagcggcaaatgctcttaccgctaatactggttctggctctaccgctggtgacgtgtggaagcttggattagaggcaacggggcagtatgacttcacctcttcgggcgtaagtgatgcaaatggtattgataagggcctaatatatatttacaggcaggacggtagcctctacagcactacacagatgcagtatgacgtatccggccagaagatgtaccacacttactctaagaattcagttaagggaaccggaataccagacagcaacctggatgaagactttactgcaaaagttgttatcttcgataacgcaggtaatagccgaacgctgccaactcaaaaatttcgctacgacaacacgctgggtgagatgacactgtgggccgttcatgatccaaatacgtcttccagcgtcgtacccggggtttctaattatccggcttacaaagccggtatggtcgttaacgaaaaccctattcgattagtctaccggatcccaaaatctaactaccgtgcttattcagaaggtgggcttcagttcatcaatcaatattccgcccccaaagagatagctgtagacagcacttatgcttatgttgaaatgactcttccctatggctcaattaatggggatatggctcgtatggcgaactttggccagtggggagggtattatccgtcatacagcctcgttctaaacccatctgcaaaccaaacgcctgcatttgcgggtacctgggtagatttcctcgatgataaggggaactgggttaagtggaaggattttgagagtgtggcttcatcacgactgccaattaaaatttcccgacttcgttttaacgttgaagcccggccctttgcacaagagatcggcggtaaggcgacctgcaccattccggcaggaaaaacctcgtgtgaagcgcctgagacgtttgatatggccttgggtacccaaggctacaatagaatcctttacttcgttcgcagcatcagcaatcccattttgcggtctgagcaatggattatgacacgttggaacaataaacaactgccggtaataaactcgatatcatatgacgagactaacaagcagctggatgtactggcgtcacttgaaggcgatggtaactggttcgactcggtctcattgagggaattttatctttccgataagaacactggtacccggatgtcacccacaggagtaatcaaatctcgtatctcaggtaactacacgattgcatatgatttatcccgtcagtctgaaggaaaatacaacgttgaggtcaacatcagggacttcttccagaaccagaccaataaaactttcggagaaattgctctggataacactcctccgacagtggccataacattcgacggaaagccggtaaaagacgatacggtagtgtacggcctggagaacctcaggattgctctggcagataatctgacaaccccgaggataacccgtcttcagctcgtaggtggccccacagctgataacgttgagcttacgtggtcaccggcaggcaaagatacatacatgcctgagtatccgaggctgttcccaaatttcgaaccatctgaaaattattcaattagcgtaacagttgccgatagtcagtcgaataccaaaacctatactcagaagttcagttatctaccgaataaccttgtgcagttacataatctacgcacattatcggtcagttcgcctctcaaaacgacagatggcgtaccacttgcgtacttgtccactaacgttctgcgtaagacaaatggagaaattgctaaaggggtccagaacgcaacgctgactgtgcggaaggatgcagccttcggtattaaatttaatggggcacaggcggctccaggcgagtcagttgaggtgcaaatagatatgggccagggggataatcttctgttacccgtttatccttccgaaaatgggaaagttggcacctcagaattcatgattcagatcgacgagttgaagtaa

SEQ ID NO: 26604 - DNA, 588 bp, Escherichia coli
atgttttcaaagcctatgaccactttcacaccagaacgtattgaacaaattttggaatttgccgagggtagtaacccaagcgaagcaatgagtcttagagctgacgaagttgctgtactggcacgtattggaaaggcagttatgtcgattgcacctgtttatcagtgcgagttttgccaccatgacgcaaccgggcaacttcagtggcactgggaagatgtgaacaaagctttttatgataaatacgatccagacagacgcggaaggcgtcgaatcctctataccgccccgccgatgcctttagtttcggctgacctgcttaacatggcttcatctgctattgaagacttgctcactaacaaagacagaagtggtgcgggaatgtggaatgacattcccgaacagctacgacgcgcagcagaactggtaatggataatagccgggccgctgaaatagaagcgatgctgatgcgtctttatgtagaatgtgacaccggtgagcgcaggggcaacggcagtcaatctggcgtagcaatgccttcgtggcaaaccgttgaagaggcacgtgtgttgctgggggtgaaatga

SEQ ID NO: 26605 - DNA, 264 bp, Escherichia coli
atgacgcatactgccgtttctcaggctaatagtgctttgcagctacccacgctggagcatgtctacgcacttctgaaagcaaattgtaaacctgaccgctttgacgggcgtgacggacccgtgtggggccaggaatactcgtggaatctggcaaaagatcgcttacaggatctggagaaatacggtaaggcatatgtctcccgtcatgaagaccgtatgggggaaggatttagttttggtcctgacctgttaattattcgctaa

SEQ ID NO: 26606 - DNA, 762 bp, Escherichia coli
atgcaaatctcaactgaagttctgaatgtattatctcgctgccgtactgaaggtaaatttcttttcctggccgaccagctcgaccgcagcatttatgttaagacaaacaaagtgctgtcagctgccggtggcaaatggaaccgaaaagagcaggcacatatttttacggcggatgcagctgagcgtatcgagcaaatcattctgacaggttcggtcgacatcccacgtgatttgttcaatttcttccctacacctgagaatctagtcacagatatggttctacgcgctgaaccagctgccggggaacgtgttctggagcctgagtttggtgatggccgcattctgaaagccttaaaactggcggctccggatgcattgattaccgggatcgaattgaacgatgagcgattccttgctgtgaagaacgacagtgtccttagcacaggggtcgagctggtgcataccgactttctttggtaccagcccgatgaaacatttgatgttatcgttatgaatccaccattccttaaacgctctgatattaaacatgtcatgcatgctatcgcaatgctcgctaagcgaggtcgcttacaggccattctgtcagctggggtattgttccgggaagacaccctgacaaaagcgctcagggagcgagtcaaacaacttggcggacaaatttcgcctctcccggatgatacatttaaggagtccggaacaaaggtcaaaacagcccgccttgaaattgatcttcgccgctaa

SEQ ID NO: 26607 - DNA, 765 bp, Escherichia coli
atgtctaaattagtatctcctcgtgaattgactgagattattaccggattaatgcttaaacctgaactccttggtgagctggactcaccagaaaagtatcagatgtttatggcagatttaggacgcgtggtggccgaacattgtggaggtcaggtaaacagagtcgtattgccaagagaagaaggtacagtgccggatgggttaccgcttaatggccagccggtacgttatctcggaatcaaagagagcattcctcacctaattgtagagcctgatgcttccttaccttcgctcgctaaaaacgtctggatgtatgcagatcctgaaggctggaaagaacattttggagctgaggaagactgccttactcctgaaatgatgcagctgttccgtaaaggtatccaggctcttcagaatgagcatgacacccctgaaattagcctcacacttcaggactggcgcctggaggaggaaacactaccagaagaggacagtcaggcctatcaggtcagcgttaccgggcaacataacatccactgtgaagttgtgaataaggaaggtgacccctgttttggtgtcatgttcgaaatcgatcagggtgtgcctgccttacacatcaacaccggcggggatatgttgctccacattcattgtgcccataacggactcgttctgactcctgatgcaagcgatcagcgctttgataaggctcccgtcgatcgcttctcttataacagcccatccctgctgttatctgccgactaa

SEQ ID NO: 26608 - DNA, 516 bp, Escherichia coli
atgctcaaaaaagattttttttcagctattgaaaaccttctcaaagctggctttcaaccacgcttttacaccgttaacagtggccgaatcggtctcattaccttcattgataaaaatggaacaaaacaggtcgaacaggtttattcctgcacttctttagccgccaatacttttggaaagcgcttcaccacatggtcagaagaaatttttcaaaagcataaagaaaaaaaagtagctgattccgggatcgaggttggtggccgtgtctgggataaattgatgtatacggtgcgcaccatttcagaaattcgtactgggggtgtgctggtgctggataacggtgcacagcgtacactggatgaagttcagaaaccggctccagaagcaaaacaggtagagccaaaggaaatctcatcacttcaggagctgctgaacgcttccaaaaatctggagccgacttcgcctgaactaattgcggctcttaaacaggctcagtcaaccgccataaaacggtga

SEQ ID NO: 26609 - DNA, 438 bp, Escherichia coli
atggcgatgaataaaaaagaacaagccgcctatgatgagctgatggcacaggccagaataaaccgcgctttacgctggtctgactatagcgttgaacgcgatatgcccgtaccagaggtctcgggtgaataccaaaatggctggagcttcaacaccgccactggcactgtttatccgacatggagcggaactacggttcacggcatacgggaagagggagaggttgtcgatgcaacctcccgccgcatgcgaggcatgaatggtagccagaacggcataccacagtacagcaccaaagaacgcgctatgaaggcattacgctgttcgcttgaaatcaagtttgccatacagctggatgccgtagataaagcaatcgcaaaagaattagagtcgtccaccgctcgccgaaagagcgatacctcagatgccaaatggtaa

SEQ ID NO: 26610 - DNA, 258 bp, Escherichia coli
atgccaaatggtaaaccatcaaatcaggcccgtaatcagaggggcctcaacgccctgaaagaggcggttccagcgacggcacaactacagatgcgggttacccctgatcggaaactgcgttacgtcagtcaggcaaaggccgaaggtttgggtctaacagactgggtccaaaagcatatggacaacgtgtgtgatctggcaggccagcccgacacaaccatgtacaaagatgatggagaaaccagtggccaaaaataa

SEQ ID NO: 26611 - DNA, 189 bp, Escherichia coli
gtggccaaaaataacaacagtctcaaacagcatgttttcaatatgctgtcggctggcagcgaacttaaagaagtgaagcgttttctcaccagcaagcgccttaaagcccgccaggcagtatcaatgatccacgagcaggcgattgctgtacagaacactgagtacatgaattatccggcttatagctaa

SEQ ID NO: 26612 - DNA, 252 bp, Escherichia coli
atgagcgtaaacccagaatataccaggattcagaatgtccagatcgttcgcgagcaagatggacagaaggaagttgttcgagtctatgatgaagatggcgacgtggttctatgtttaccttcctatattcaaaatgaggaagtaaatcttattctgcgccggatgaatgacgtatattcaatcggatatcgtgtaggtgatgcagcccgccgacgcgccatcaaaaaagcgctgggggatgatgaggagtaa

SEQ ID NO: 26613 - DNA, 2391 bp, Escherichia coli
atgaaaatcaaactagccctgcttattgcatttgcaggtttcagcgcaggagcttccgctgaaatcgcagaattcagctttaaagataccctgaacgttaaaaagaccgtatcgcccgcatccgtatggattaatccggtaacgagctttgacgttgccgttatttccggtctggaccgttatattacgctcagtctgctgaaaagtgacgggagcctcatctggagcacgaaaagcagcctggttaccgttgatgaccgtaccacatcttcgacaggctttgattattacggcaagactctgaccgtaccagcgatgggagaagatagcttcaccctcagagaggtgattaccgacttgcaagggaaggaggtctcccggcaggattacccgcttgcaattgaccgaacgcctccggcaacgggtaccataagttatacgagaaatgggtggaactttggcagcgaagcgatcttcacttcagtaccagccggtatgcagtacgccagcgtccaggcactggtctttaatggactgagtgataaaggttccgggcttgctaatgctgaatatttcataaccgatgccgctggagtggagcgtaaaaagccagcggaaattaatacagtggaaggtagcgtaaccgttcaagtcgccgacgcaagcagcaatgccctggcaccggaaaaccgctctgaatataaagtggggatctacctttatgacaaagcgggaaacaggagcgaactaagccgccgaagcgtaattgatcgggttaagcctgacgatatcatccaggtgcaggacgccactaccggatcatgggtctcctatcagtctggcatgaccgtcttccagaaccctatttccgtacgggtattaaggaagaaaagtgactttactgctgttaacggttccaaatatggctgggcggactcgaatttccagacgtccgatagcacttataatatctatactttcaaatacatatatccaaatgtgggggatacttatcatgaatttcagactctggcgggaggagtaagacgaattcatcataactccctaaacttcactccagccccggcgatggaaatagccccgaagatattggctaaagagatgtaccggagtgataccagtgagtggttaactcaggcctcaatcagcgttaaaaccgccaccattagccgcataaaggtaaccgcagaaccccgaccatacgtgcaaaagttcagaacggtaaaaaatgcagcctggttctgcactattcctgtcggacaaagttcatgcgagatgacggttaacttcaactacaccagtgacaaaggatttgagtatctgcacctttactcgggaaaagatggtgacagcatattcgatgcgcttgctggtaattttacggttatctgggataacaacccaccggtggttaatgtcgctcaggtaaacaaggcctccaagacaatcactatgacggccaccgataatgatcgcgtcaacgcctggaacatcagctactgggataccaaagttttcgaagccacccttaaaaatgcacggggggaaactttcaccctgaagcctgtgaccgtcagtgaaagcgattataaaaccaaaaacgccactttctcatacgctggtctaccggacggggattatacggttgttagcgtgtctgccacggatcttgttggaaacacaggaaccaaaacgcttaatgcaccgctgaaaattgactcaacgcttccggttatcgcgttcagttttaatggcgcagacgcagaaggaaaactggttaaagggcttgagaacctacgcataagcgttactgatgcctctggggatgcttccctgacatcgcttcagctcgctggtggacctaactctgaaaaggtcaccctggcattcacgccgctatccaaggatgtctttattccggaataccccagaatcttccccaacactgatgaatcgggacagatgtatcatctggaggctctggctattgacgaatcaggtaaccggaccactaaaacgcttaattttacctaccagccagctaacctgattatgctggataatctcaagacgctggccacagccgtagcactgaaagcaacggacaacacgccgctggccatcatccgaaccagtgtgttgcgacgtcaggacggttctatcattaccggacagttaaacggaaccctgactgttcagaaaaatgcccagttcggcgttacggttgccggagttacggtccagcctggtgaaactaaatcgctgtcactggatcttggtaatggtgaagagcgcacatatcccgttactcccgctgtaagtggtcaatctggcacggccacatttgctatagaattccctcaaacataa

SEQ ID NO: 26614 - DNA, 471 bp, Escherichia coli
atgaccaaatattatgatcgcagtggaattgaaatctccagcgcaaaaatccgctgtgttgattctgtaaaaggtactgcggaatatacttttcgtattctttgcgataaatgcaatggtcggggagagcgtaagcatttttataaaagtcgctgtatggcttgtaaagccacgggttacagcctcgaaacgacccgcactgcttacacgctgaatgcgctgtaccgcattaatgctcaagctgcccgcaaagtgtcagcatccttgcaaaacgagcgtttgaggactgaaagcgcccacagctctgcgttcactgcatggtgcagatctcatcaaaaaatggttgatgcaatcacccagcaatccagcagtaataattttctggaaagccttaagtcttctttaacccaccagcgtcagttaagtgataagcagctggcagtcgccgcccgcattttagggattcattaa

SEQ ID NO: 26615 - DNA, 297 bp, Escherichia coli
atgatccattcatttaaagacagacggcttgaaaagttcttccgtaatggaaaaacaacggcaggtattccttctgaaattattaacgcgattctgtgtcgacttgaaacgctggataatgtccagagtgagcgggaattgttatccaacagcttgcgttatgaacgcttaagaatgacgtcaaaccgttattcctccattcgagtaaactctaagtatcgattattctttgaatggaatgatggcgcacataatgttcatttgtctgcacatgactataaatcgctcatccattaa

SEQ ID NO: 26616 - DNA, 1146 bp, Escherichia coli
atggacgcgatgttttatatccaggccagtactaaacaacaggcaagttacatatttagtaccctttccccgaagcctactgcgaactgccagcttacagatttgcagaatgagacggtcgtcccatccataagcccgatttcgctttcacttaacccctggtcgatcaattctcagtcccgaacccgggaattgcgtatggccacgcatggtcttaccctgatctgtgcagtcacggatgagcatacccgtcagatagtcgacttttgcgataaccttggacagcagctcaaggatccggacgacaaaagtgcctgggtaaagctcattaattctgaatgcgctttgcttaattctccgcgtctctatcccgttctgctggagcctgatacaccgactcaatttgaaatctttgtgccagctccggaagatggcgatcacgacaccgttatagccaacgttgttcaggaatgtttcggtcatgaatgccggtacaaagtaacggacaaagcttttgcaatgtcggaaaagccagtcatcaggctggaagctcatttcaatgacaaacgcgaaaaggttttagaactgacattttcctgtttcaatctttcactctcagcgtccgtgcatgaaaaccagctacgtcagattttgttactttgcgaagactttggcgtaaggcttcagggtagagcaggggcatcctgccacgttaatatgcgcagtgcttaccgtcgtcttgctcatgttggcaccggctctcgcccaggtgatgacagtgatgtgcgggtctatacctcgttaaaagaagaaaaagatgttaagaggctgcttgataagtcaaccaggggaagtgagcttgtaccggcgaggcacgggcagcagtttaacggggtcttagtgaatgccacacccgcatcggccactactggtttcatttacctttcgcatgattttccggaaggccagtttatgatgacagccgaggtgttgcatgttggaattacaccaggcggtatttactacattgaaacactggacggttaccggtttatcgtgacagcgtttgagaagggattaatgaacggtttgagggagtttatagctgaaaatgaggaatattttaagtattaccgctggtcttag

SEQ ID NO: 26617 - DNA, 378 bp, Escherichia coli
atgaaagcgttagacgtggtttcaactcaactcaactttattaatctgttggatcaggcaggatatgctctttcagaaattgttgtaaaacgcttcagtgctgcaccagcctttaacgaagggcactggttgttcattgcagagcaggataaccgctacattgaagtggtctgtattctctctttagcttcagaaagcggagagcagcatgttgatgtttttattaatatgttcgaagacccgattgatgatgttatttcacgaaacattgaaaccaaaacctttgcgacgctttataaatacattgaacgtataccttttactccgggcgtaaagaaagaattcttgagcagtattgagaacatcaaatttagttaa

SEQ ID NO: 26618 - DNA, 429 bp, Escherichia coli
atgtctaataatgctgaagtcattagctgtgatttattttcaactctatcttcacttcattttagcaccgaggatattacaggtttgactccggccacctttcgaaagggagctttcttacatgcaaaaatttctgctagccaggccacgcgagcgactgatatttcccttcaattacacacgaataatgttacaggtgaattgagctacgtagtagtaattggcaggcacgaagggctccttcaaagcgaagcaatcaacccaaactctgataagcagtaccgggaaaatcggcattcgcgccattttatcgcagtaaccgatgccagtaccaaagccctgaaaaaaacctgcaaggtaatgaaagcatatatcaaagagcaggactttaagcctaacacctgggggcacagtttcattaagggttga

SEQ ID NO: 26619 - DNA, 258 bp, Escherichia coli
atgtctgaaaaacactttatcgtaaagatccagaaccgtaacggcgaccatgagaaaagctatgttcgtttactcgtcagcgattgtgagaaaaatgcttgccagacggcactgatttccgagtgtgctggcgagattgaacagctgagttttgaagacggtggggtttatgactacaacggcgaaaatcactacagtgtcagaagctgcgtggaggttgcccctgaagatgttgcaactttgcaacgctacctttaa

SEQ ID NO: 26620 - DNA, 621 bp, Escherichia coli
atggttgtttctatgaagagctgcttttctgatttacccgttaaagacggcacgtccggaacctggaaactggacacattcgaaattaccgaagataaggcgatgagcctcgcccttcgtgccgagtatacaggtaatacagacgagtttatcccgcccggtagatatcggcgtttgtccaacggctgggatgtggtgatgtccaataccccgatggagatcagaacctgccaggattttttagagcgagccaccgggcgcgtgctcattaatggtcttggtctggggatggtgcttcacgccattcttcaaaaagacgatgtaacccatgtaacagtaattgaaaaagaacaggacgttattaacctcgttgcggcctcgtttgcaaacgatcctcgcgttgaaattatccatgctgatgcaatgatgtattgcccaccagcaggcgtcacgtacaacgcatgctggcacgacatatggccagacttcgcaacagctaacctctcacagatggataagctggaaataaagtaccggaacatctgtgaatggcagggctcgtggggcagggaggagtgtgagcaaaagcacattgagtttcaaaatcttggggctgaatga

SEQ ID NO: 26621 - DNA, 1251 bp, Escherichia coli
atgagcacgatttctacggatttaattgcacggatctacgcagcctccgaattgccgttgagcaacgacgagctttatcgcgaagtgcagcgtgaaactggcatgtcggatgccgaattgcacgaactgaaagaatttgggtcagataaaaccagaaccagcggcgtcaaacacaaagtacgctggtttcagcagactctccgtcaggctggggtcatcgaacgcgttccagaaaaacgtggcgtctggagatacgcctctaagacgaaaacaaacctgcacgagtcatgggaaaagctctgtgttgtcggtttctcaacttctgttggggcatcggtttttggaaatgcctatgccttcttcagcaatatcacagagcaaattcatctttgcctgacctcgccgccttacctccttcgaaattcaagagactacgggcacggcgggggacgtggcgagcaggtttatattgactggctgctgcgtatcctcgaaccgatcgtgaaacagcttgtacccggcgcaagtgtggcattgaatatcactcaagatagctttaataggggcaggccttcacgttctctgtatctggagcgtctgacactggcattatgtgacaagctggggcttgagctcatggacaggcttcagtgggtgaatcgcagtaagcccccatcaccaacgcactgggcatgtaagcaacgggtgcagctctgctcatcgtatgagcctgtgctgtggtttaccaatgatgcgagtaaggttcgttcaaacaacttacgtgtactgcaaccgcattcagagcagcatctaaaattgcaggcagcaggcggtgaaaatcgcacgaccttttatggtgatggagcgtaccagcttaaaagcggatcttttggaaataaaacagaaggaacgatccccaaaaatactttgttttacggcaatagctgcgctgatacgagattttgccattccattgcccgcgagctcggttttccgctgcatggtgcaacgtctccaaccaggcttgcagcgtttctgattgagtttttgacagagccgggagatcttgttgtagatcccttcgctggcttgcataaagtccccatcgcagccgagcgacttggcagacgttggttggcgacggacaaaatcatggaatggctggcgatttcccgaaacctttttacggccgcaccgggatataagagtaaccccatgctggacgagctcgtcgaactgtatcggacttaa

SEQ ID NO: 26622 - DNA, 321 bp, Escherichia coli
atgaagtcagattcagaaatggtttctcctatcgagttgcacattggcgatcatgtccagcggcatggtgctttatttgaagtcatgcatattgttgaatcagaatgcgatattcccggcggcatccgggtagcagcatgcatttcacgggtaatcggtgacgttacgggcaatattcctcgtggttggctggaaacaccgaagcgtatggctgagcgaggagttaagtgggcgacgagtcttcctgaagggctttactttaacatccagggtaacgcacatgcgaaagtaagccgggttatccgtaatgtgactaactga

SEQ ID NO: 26623 - DNA, 327 bp, Escherichia coli
atgcattcacaggatcctatcacgaaattaacccagacgttgcaacgcgacgatggttctcaggttcgtattgtagcgcagcggggatatggtagtgggcttacagcctcgcttgatgtgtacgttctccgtcgtgattcctctgaaagcaactggtcactgtgcggaaaaaatcctcacccagagtggaggaagatgtcagttgatgagtatcagaaatttggacgctctgaaatgctgcgctatgccacaccaggtgaaattctcagggtggcatccgctattggccagccaatgagcttcctcgatggcaaccctgcgttttag

SEQ ID NO: 26624 - DNA, 258 bp, Escherichia coli
atgaatctgaacgaacgaagcacgagcgcagcaacgccagatttgagccgactttatctcatttccgggcgcattatgtttgatgatgatgatcaggcctacctggtcgaagccgactcccctggtgatgcagaggaggctttccggcatcatattgctgacagtgccgacgacttagaaaaggtgattatagtttcctctacaagtttcgcttcagctcacagcagtcgcgtaatttgtcggcctgccgtgaagtaa

SEQ ID NO: 26625 - DNA, 792 bp, Escherichia coli
gtggcagataattatactcaggcgtcgtttattattccctgcactcaggagcaggcaaaaatggcacaagaagcaatcacattcgttaccgaagcagaaattgcagaaggtgagcgtttgcttgataagccactggcagattgttctctgactgagaagctgatcctcagtattatcgagagccaccctgagtatgacccttctgagccgagctttgggcaaccatcctgcccagactgcaattatgaactgttgttcgcaacagaagttaccagcagtgggctggcagtttttcatggagagaccattgatcttgaccatgcaatttgcctcacaactgccgtgctgtcggtattcgacctcccggaaatggtaacaattactgctgcatttacatgcagtaaaagccggacagatgaatttgggggtatgactattctggtcacaaaggatacccactattaccaggatggctgtcagttttctcgtctcatgaatgaggctcacaaagccggtatccagtatgctctgtgtaaagttacgcattaccacggtgagagcagctatgtggcaagctatgtcctgagctgcgacgtagcggattcagcccaggaggtcgtttacagacgacttaagtcatgtgccggaaaagagccagaagacggaatctatattctgagtgaagaagacaacaccagtctttcggtcgatctcgttacagaactgtctccgctcgattacgacaagctgagcaagcttctcccttcccttgacaccctttgcggcgcttaa

SEQ ID NO: 26626 - DNA, 450 bp, Escherichia coli
atgaccaataaattcatagtttctaccgttgattgtatcaatgaatttgcaagtgacgttccgcaaagtgtttccttacggatagatacaatgcttgaacagcgtatccgcaaattggcggcatacgtgaaagaaaacgatcttcatttaactgagttttacttctatgacgctaactggtcattttgtggtgaagatgaaattcaagaaataacagacatggatgtatataagcatagcgacagcataaagcaggaagcgatgctgcgggaagtaatgccatcagcacgtacggaatgcccggttattagggtgatgaaagattcatttcagctttcagctctaccacgccattgtggtgatgacatgactcttaacactccttctattccgctgtctgagttgaaaacaaatagtaccgcatttattacgccgccaacctataactaa

SEQ ID NO: 26627 - DNA, 1053 bp, Escherichia coli
atgtttattgaaaaaagcgactcattccttgaattatcctcagaagttatttttcctgaggctgctaatgctgccattttgaaacatgataaatgggcggatgtttgggagaccctgacaaccgatgccgatctgaactataccgacgaaaaggagactgtgagtcttgcttctctggtcatgtctgccacatctgctatttatcaggctattacggacggctggacgatgtgcgtgggatacagtggcggcaaagactcccattctctcctgcacctgtttctgatggcattgatcagggcagtacgtaacggcacaaatatcagcgaacatcatttcattcagatgtccgatacgctgatcgaaaaccctgagatgcactatcaggcttcacaggttctcaaccagctcagaatgttcattgctgaacaccagctaccggtcacagttcttgtcgcccgaccgtctcttacgcagagctgggtgggccgcattctgactggacgcggacttccgacctggactaattcttctacccgacagtgctctaccgactataaaatcgcgcccctgcgccaggccaaagctcgttatcttaaaaacgccccggcatccgtacgaagcagggtatgcctgatgctgggatccagggatgatgaaagtgcccgaagggcaggaaatatcctcaaaatgggagggcaggcaaggaaagtaaccctgactgagcacggtggtgaactctatccggttaaggagtggcgtactcaggacatctgggcttttctgatggcctgtggttcagaatcccgcttccctttaccaagctttatgccggataacttcagcctggcaacgctttataaagacgccaccggagagtgtatctggtcgccggagaaacccacccgatcctcagcttgtggggctcgatatggttgctcgcttactcttgtttttatgtatttagagttaaactctacttttctatttttagaattcaagctattcatcgtaattgagagatatccttttaatgttcagcaagcctgttaa

SEQ ID NO: 26628 - DNA, 636 bp, Escherichia coli
atgtcatcactgatattttatacagacgaagcacaagcactgattgtaacagatacccttgccgtcaccgataatggggagccgttatcttttgtttccaaagcaggttacatcccccagctaagaaccatcatagcaggaacgggggcaggtggattttctaacacctggttgcttgaagcatcaaccagaatggtcgtatcaggtatacaaaatctcaattatcatacatcggcctgtctaaggaggctgtggaaacaatacaagcatgaccatgcaattccctcttcttcaacggtgacaaccagtgtttatcagttcgcaatttgcgaggaaacaggaaatatcgtttcgttcgcctatcgctcagtccatgatttcgaatcagagcaattacaatacggaacaggagtaaaacctgagtgccaaatcttggatggggatttgttgcagacaattcctgtaatgatgaatgaacaaagggctatacaggcgacatacccacacccggaacggatccatattggcggtgagatgattgcgcattatctgacatcatctatgtatcaatgctttaagattggggaatttgaggatttcagaactcagggagagtatatattgagcaggatttag

SEQ ID NO: 26629 - DNA, 1248 bp, Escherichia coli
gtgaggataatcactaacattcatgcgcgttatgggcgtgtcagcaaactggatgcaacagagccgaaactgaaatttgaacccggatttctgtatgctgaaataccttatattagcggcatccagaatcgaaaactgagccgatatgtacacttttatcttatggataaagctatcctgcaggccagggatttaaagcctttagcccgggcatttttacgctggataaggtggctggaggataacggacttgaccctttcaccccgggaacgttgaaataccaaagccctacatatggcttcagggagtatcttctgggggccgtaaggcaggggcgcatcgcctcatccaccgcggcggtgtacatcagcgttatccgacggttttacgtatttctgggcaagtgtggtgagctggctgccagctcattttttacgttggtcgaaaaagtcgttgacgggcgacgcaaggtgataagttcggatcttgccatcaggataaccagcacaacaaaaaggacaatcaacccactgaatgatgcagaggttcatatcctggatgaggcactgaaatctgagtccgggttgttcagtttaatgattgtgctgatgaaaaattgtgggctacggctggatgaaatgctgaccctgccgtcgtcactctttactgaagagtaccttgccagtgtccctgtatctgagttgaccatcagggggcttcatattggtccgagatgcggagttcatacgaagtttgggatgacgcgagaactcttcatcaccagacgattgtacgagcaggttctggattatctggcggatgaggagtatgaaaagaagatccaaaaatggcgtgcacgacagggtggggaagggcggcacgagcctttatttttaatggcaaacgggaaacggatgtctgaaaaagccttttactcccgctggtacagttttcgccatcgcctggcccggtctgctccgggaaatgtgttcagacataaaccccatgatttgcgggcaacgtttgcgacccattttttacgctcggcactgagttgctatcccgatcaggccgcaaatgcgctgggtacagtaaaatactggatgggccataaaagcgaaaatacgacgatgaaatacatcgtctttcttcagcaaaaccagatttctgatgcagtcgccggggtcatggacgcattgattgacggtgctgcaggtcgcgatggagccatatatgagccggagtga

SEQ ID NO: 26630 - DNA, 1767 bp, Escherichia coli
atgagccggagtgaaacgcagataacgtggatggccgaaaatgtgctgtcatgggagacggtcagcggacacatcactcagcgggatctgaaccgatattatttacttgacgtttatcttcaggctcatttttcagattatgtgttgctccccggatggtttagtgaacattcgcatcttgcccgccctgaaaaacgcgattttattgcctctctgaaacgatttcttctgtcttaccgtcccgccggaaggttaaccattttccgttatctcaatatgttttttatatggcagtcagtcaatcagtatgactatggcacggctgaaggcgttgaaatgtatattaaacatctcatgaacgatattcgtcggcgaaaaatttcagtcaggatggcaagacactacttgtccgtggtcaaccggtttttgcttacgggcgggcagattcagaggcggtatgaatatgaattcttaccgaaaggaacgtatcagcagcagggaagggatagctataccaggaatgaactttccgagatcctgaggcagttgtcatccatgaatgagttccttgcgggatgtatccgggagcatatcgctaaatcggaaaaaggggtgcggcatttctcaccgtctttgctggcacctgtttatgaagcgtatttccggtatccgggagagaacggggtcagcagggcagagatcatcatcagggacgttctggaaaattactttcttacttctttttttctgttctgttaccacacatggggaaacacctctcaggttctgggtctgacgcgggatgatatacatctggatgaaaagggtatcagcactgattatgtttataaggggagagcgaataagtatatacgtctgacgataggtaaatcggagtatgtgaccaaacgtgcgggctattactggtttctgtcttttatcaggctcagggacgacatcgttaactatctggtttccgcagataacttccctccggtacaggcgctgtttctgagtgagccgcaggtgaaattccgtaagctttattctcttaatcccagtcatctgactaaattttctaactctgagggggcgtgggccacgatgcggcagcttaatccctcgcttccatcaattaccgtttctggcttgcgcaaaacgtctgagcagtatacggacagaacattaaagaatggtctgattacggcggaaaaagcacagcataactggggcacttacaggcggaattatgctgcaggtaacccacagggggcgaaggaaaacttcagtgctgcacttgatacgcttatgaatcaggggattgcgacacgtgcgttatccgagcgggtaaaagttgctgatgagctggggatcgatctgcgtggaagcgatgagggtgtggatcttttattgaatggcctgggatgtcgatcgcaggagccgcctacagatattgaattgcgctttataaaaaagcaaaaacgatttggccggacaccaaaggcttgtgcggatttttctcattgtgtcgaatgttcaaaaagttgcgttgtggaaacgctggagtctgtatggctcctgctgtcattcaggcatgctatcgagtatggaaaaccgttgtacatcggttcggtcaatgctgtggagcgttatgaaacgttactcctgaagattgatttacggcttgggctggtagatgaggcgaccctgaaaaaagcgcgcgttaaacttcagcgagaaggtgtggctccggtatggcagatttga

SEQ ID NO: 26631 - DNA, 2118 bp, Escherichia coli
atggcagatttgaagaaaaaagaggtaagccgtagtcgaatggcggagtttcctgccggaacgccgcttcgttcaggggatgagtttccgactgaggatatcatctgtgaggcactagaaaacaaaagctttgaacgtctgaataactgcctggttatcgccagctcagatgaacatgatatgcgttttatcaatgaggagacgctgaatatttatttcagggatgatgtctggaccaatcgctatgtcagaacccatattggtgaaacgttaagaaccgttaatttttcaggcatacgggatcctgaactgcgtcttgaagccaaaatcatctcagccagcctgctctggattgtcggcaggaccgcgaagacgcagtcactgatccggaaatgtgcaaacattgtggcgggagcccgtattattgagtctatggggtatcgcagtctgtttcagcttcgttttccgcttgtccggaatgctttcattgtaaagatgaaggaggaggatgagcacggcaggaagcgttctgaaagaacattacgtaattactttatggacctggcggatatctcgctgacaggtcatacccgtcttcgaaaatacggttactttcctgatattagcttcgacagttacaacagtgtggatgattcaaaccagacatattgtatgcctttcagtcttatgatgtctgtctgggaagggctgattactgaactggatgctgaaatcagtgatttcgattttgacgggttttcccggctgtgcgctatcataaacggtttttatgattcgccttactatacgtcgatgctggaagcccgtaaaagagggacagcaaaaagcataccggattaccgggccgcgtattactacaatattgttgccggggaaattcgggcgcttttcgcgacacttggccccgggatgcagggctggttctcggtacataaaaataagcgctggagatctgattttattggcgttgatcacataaagctgaacacctggcattttgagctgacgttaaaagtcatgaatgtgatacaggccatgtcggggatgagacacagcgaagtgcttggcgtgatgcacggttcactgatttatgatggtgatatcctgggacttcgttcggtgttgcataagttcgccccggaaggtggaagtcacgaagactgggttgtttgtcgctatgtggaaaagccttttcagcatttacgcagaattaatcaaatcatgacaggcctggacgggaagacgctggacaatgttccattgtctttaaatatcaggtcgtggttctcggagcaaaaactctcttttatggggacgcagcgccagactgagtgggcaaagaaatttgtgaaaagacaccatctgttcatccgacgtgaccatattgatgagttcaggcttttaaatccaaacatacgtgatgatgaacgcgttgcgatggagattcgggagggggctttctggccattgcgaacccatcagtttcgccgttcacttgctgtacacctcaggcgtcttgatctgatttctactaatgatcttatccggcagtttaagcacttaatcagaggcatgacggagtggtatatgtccggtgcactcaacgcttcgcattttagccgggcgatccctcaggcattcgctgccgagattgaaagggttgataccgaactctcagcttccagggctgtttcttatcagcatgaaggcctgctttatggcgaaggcgggaagttactgatgtcccagagaggtgggcacttacatcagatgacgtttcctacactgaaaaaagcgatgagcatggctaaacgaggcgggcaaaaactggtatctcttggaaacggtttttattgcatgaatggccatgactgcgagtttaaggcggttgttcagtcagcgtcctgcaatccgggatgtgagaacatgctggccggagctgattctgttcccgtgtggaaacgcaggatggctcattatgacaaccttctggagattgccgtgcgaaataatgctcctcaggctgacagggattttctgatgcttgagagagatttttatgcagatgctgtccgcttttttgaaaaggatgaatag

SEQ ID NO: 26632 - DNA, 429 bp, Escherichia coli
atgacgaacgaacagtcgggggttaaaaaaacacaggcaagagcagagcaggccctgagggaactgatgttatcaggggagcgtatcagccagtatgctgtggaaaaacgagcggggctggcaaacggcaccctgaattataactgtcctgagtacaggcaggtcagggaggctatccgcagtctgaaaaaaacgtgccagggcaccgcgccggttgatgagcagggcattgagcagcagatcaagctgaaagaaaagtatcgccgtcagagaaatgagctgagggaagaaatcaaaaagatgatggctgaaaatgtagagctgttacataaccttatacttttacagcagtatgtcagggagcttgaacgcaacaccgggagggagaaaggggacgtcattccgttctcgggtggtgtcagggactga
